United States Patent Application Publication US 2005/0228172 A9 - sequence listing, part 173

SEQ ID NO: 773444 - DNA, 629 bp, Homo sapiens
tgactgtatcttcaaaaatggtattttaaatcatttatgatgctttcctattttttaggatctggttctctttatctggttgtttaccacaagatactatcgtttttcagaggtaataacatcctaatatctttgaagataagttttttagttttttctctttccatcatcgtcttagttttttccaggtttgtttccttcctctgttcatgtctttgatgtttggttgggcagtctcrcactggggatgctccagcagtgttgggccatccctaaccatgcacatttggaagagaggctctaacagcctaattggaagtctgtgtgtgaggttgtcgaccaaaatttgtctgatcaccactcagccttttgtttgaggattcccaaaggcaagatctggaagccttctctggggccattcagtttctcaaagatagaaacctgattggtgatgtgcctggcaataggcaatctggaagccctgactagaaatggcccgcagttccactgtgtccagccctgtgcctcactcctactctgtgctgagcctgatggccccgtgtctagaatctctccagttcaacttctctggcaagtaaacctttgctctcttgttagcaagtttattg

SEQ ID NO: 773445 - DNA, 477 bp, Homo sapiens
tcagttctgaaaacagcaacccaagagatcttgttataatgtaaagcagaacctgcaacttcttttcctcaaaacccccaaggagtttagcatctcactcaaactaaaagccagcgtatgtaatcaagaacttcaggaccctacatgatgtgatccccttcccattgccattccttctctgcctccatggcattctggtcttccctctctcaagtacaatcccaacagcyccctttctgttgctggaacaccagacacaatcccaccttagagcttttgcccttgtggttctctaagaatgccctctaccaattatcagcatggttagcatcctccaggtctcaattctcaagtcaccatcacaaggaagccttccctggacaatgtatctaaaatttcaatgtccactaatgtatcacagcccattccacactctcatttattcttagcatgcttcattacctaatatattatagt

SEQ ID NO: 773446 - DNA, 417 bp, Homo sapiens
aatttccttggagatagataagccacatcaacatgcaatatgtttatgtttctcacatatttcaaatgtgtgtttcagaatctacaaatcaactttgactcatgaagtgaatatttgtacttcttggctccccagcatcctactcaactccacttcttyggcaataaacccagttcttttgtggagattggctcacttaggtggtgtacaattgttatggaactatatataatggtgtcctgctctcttacaatctcagggtggggggatgttggatccaagtttaatgcatggacttttcttccagggactctgaatcttgaaatgaaagatataaacaccaaaaacaaacacaagaattctagaatctatttgttacagtaacaactacatgaggagactggcaagtaaataatt

SEQ ID NO: 773447 - DNA, 417 bp, Homo sapiens
aatttccttggagatagataagccacatcaacatgcaatatgtttatgtttctcacatatttcaaatgtgtgtttcagaatctacaaatcaactttgactcatgaagtgaatatttgtacttcttggctccccagcatcctactcaactccacttctttggcaataaacccagttcttttgtggrgattggctcacttaggtggtgtacaattgttatggaactatatataatggtgtcctgctctcttacaatctcagggtggggggatgttggatccaagtttaatgcatggacttttcttccagggactctgaatcttgaaatgaaagatataaacaccaaaaacaaacacaagaattctagaatctatttgttacagtaacaactacatgaggagactggcaagtaaataatt

SEQ ID NO: 773448 - DNA, 626 bp, Homo sapiens
agttgtggtcaagatactaaaagtgacacttgtaaagtgtcaatcagttggtggtttaggcaacaatagtctctgtctgtatcgtctccccttaaattttgtttgaaaatattttatttcataaccttttactttaaaatgtaaacaattgagagtttaattttgaagatgggggaacctaaaaaattgtaatacaatgataaaagctctacaaatctttatatcttcatcaaaaattgttgacattgaaattaaggttgaataagcaggatggaaaatagtttcrtattttgttggaagaggtgatatatgaaaaagagtttaagacatatgaattttttttcagcattcctatttgtacagaagaaaaagatttttttttctgaataactcttatttaaaatgaaaacaccattatgttggctaacaacagccaaagttctagtttttgaggccatatctttattcctaagtaaatgatgagaattaaaattaattttttcacttgaggccacttatatcagttttgcaaatatttgcttttttacttgtttttgtcagtagtttattatatggttctaagatctaacaaatatctttgctctcatctgtgtgacaagcctgag

SEQ ID NO: 773449 - DNA, 594 bp, Homo sapiens
ccattttattgcagctttcacctgactacttcactgaaaccgctcatgtcaatgtccccagtggtatccattttgattggcagctcttgacatggtcactcattccttcttacttgaaattcattcttcactggcttccagaatgccaagctcttctggaattttcctcttctctcactggattatccttgtcattctcttttccttatttctcctcttgtcctcaccctcgtaatttgtgagtgtccaagggtttagtctgtagtctttatctcttctctatctatagtgtctttttttggtgactctarctttaaatccttggggtcattcttgatgcctcagtctgtattaggtggatgagtcagaaatctcttggctctactttttaaatatatgctcaatctactgcctcttactcctgcacttgtaactgtcattgtctgagtcctcatgatgtcttgatgtcatgaatcttacctggattattgtcagattcttaaattgcagccctacttatacttttttccctagagtcaattctcaacacagtagcccaggggaacctgttaaaacagaagacagataaggtat

SEQ ID NO: 773450 - DNA, 575 bp, Homo sapiens
agcagtgtataagggttcccttttctccacagcctcgccagtatctgttatttcttgacttttcagtaatagccatcttgactggagtgagatggtatcgcactgtggttttcatttgcatttctctaatgattagtgatgttcagtattttttcatatgtttgttgactgtgtgtatgtcttctttcgaaaactatctgttcttgtcatttacccactttataatggggttatttgttttctgcttgttaatttgtttaagggttgtttggttcctgattgttaatttgtttaagttccttatagattctggatattagtcctttgtcagatgcatagtttgtgaatattttctccctttctgtaggctgtttactctgttgacagtttcttttgctgtgcagaagcgcttaagtttaattagatcctatttgtcarttttgtttttgttgcaattgcttttgacatcttcatcataaaatctttaccagggcctatgactatccaaataggaatacaggaagtcaatctatccctgtttactgacaatatgattctatacctagaaaaaaacc

SEQ ID NO: 773451 - DNA, 567 bp, Homo sapiens
cctcacttccaatgctgggtgacaatcataaataattttaatgacaatgtcaggaatgttagaaatatttgaaggatcatttgttttgcctgagcaatatacagaactggaaagaaggaatgatttacattttggtaattagacatttctaatccctttcattcttcagtcaagctataacctactgaattgaaaatgtaagatgtcagtgcttttcaatacaagaatacatattttctggcatttctctggattgaacaaaactttggtttccatggatcccaattacagtttcaagttgttcwgcaccacagcaacaagacaaaggagaaattcatttaaagctgttgaacttttaacatggaatataaaggaaaaccaatgaatgcaggcttggtacatgattgctccctaggagcctgacagatcctgaccaatcactccagtgctaaggaatgtcctttcaagacaatgccaccaggcaagttcacgcaagaagaacaaaaaggttaaaatggaactaatgatttcatgtcttttatttaaattggctatagcctcacctag

SEQ ID NO: 773452 - DNA, 590 bp, Homo sapiens
agttaaaaagatatattcataccaaagagtgattattggccaggcacggtggctcacacctgtaatcccagcactttgggaggctgaggcaggtggatcacctgaggttaggagtttgagaccagcctggccaacgtggcaaaaccccgtctctactaaaaatacaaaaattagccaggtgtggtggcgcatgcctgtaatctcagctgcttgggaggccgaggcaaaaaaattgcctgaacccgggaagcagaggttgcagtgagccgagatcatcccactgcactccagcctgggcaacagattgcaagactccacatctcaaaaacaamaaaaaagagcaattattaaaaccacagactatgtcatcattgaaaccctatcgacgagtccttatcttttaaagaaatgtgctgaaatattcacagataaaatgataggatatctagggatgtgcttcaaaaccatttagcaagaagggaacagggaaggctacataggatacactaagcaaggctggccgtgagacgatcgttattaaagagggtggtaggtgcgtcacacacactcttctcattctataaatgttt

SEQ ID NO: 773453 - DNA, 691 bp, Homo sapiens
atatccgagactgggtaatttataaaggaaaaaggggtaatggactcagttccacccagctgaggaggcctcacaaccatggcagaaagcaaaggaggagcagtcacatcttacatggcagcaggcaagagagagcttgtgtaggggaactcccatttataaaaccatcagatctcatgagacttattcactgtcacaagaatagcayggaaagacctacccccatgattcaattacctcccactgggtccttcccacgacacatgggaattatgggagctacaatttaagatgagatttgcatggggacacagccaacccatatcagataggtaaagatatcttataggcacaggagaaaggtcacagaaaataatataaatttgagatgttttgacaaaaagcagatgtttaaatctttgatgagcttgctaaaacagagcataaagaagctaaaaggacaatgggaacaaggagtgaggaaaaaagaggagctagcaatcaaaatacagcaatcggtttattcagttgttcattgatcccattattaaatgggcacagtggagtgtcactcatctagtaaattttcagtgtgtggtggccattataaatgtgtatttgtgtgtttaaatgagtgggtgacatttgttttctcctgtcctctgttatacgtctttggataattccaaaa

SEQ ID NO: 773454 - DNA, 599 bp, Homo sapiens
gcaaggtttcctggtctctcccctgcctgtttatgccacttcagtttttgctgctccctgtcacttagtgcacacatgagcatcctcctattttctggaatatggtatgccttcttctgctagaagacctttgatgtgctcttccttctgtctagaaagttctcgtgtcccttcatctttcctcttgagtcgtcacactcagcccaattgtcatttcttcagggaaacttcctcttactctctggatgagggcatgtcttcctagtgtagactccactagcaccatgtacttctcattcgtagccctcactataattgcatttttctatgtattctttgataatgcttttctcctgtactctaaattccatgagcacaggaaacactgkgtctgcagcacccaggtaattgcatggcatgtagcaggcacacaaatttcttttttgttcctgttgaaatagatatgtataataatgagccatgctctagggtgttctgctgtagttcatcttggttgtatttctctcataatttaatattaataaggcataatcatttagtgggtttttttgaagcatcatccttgaaggattttgtta

SEQ ID NO: 773455 - DNA, 650 bp, Homo sapiens
tggaaaaaaaaatctagagataacaccaataagatgacttgggtgttagaaccgtttgacaaaaatcattaaagcagctctaataaaaatgctttagcaagcaatcaatgacaatcttgaaggaaatggaaactagaaatcctcagcaaagaaacagaagatatatagaaaaaccaaatagaaattttataattgaaaagtacaataactgaaataaattcactgaatgggatgaataacaaaggaggtgcgagaggagtcagaacttgaaaacagatcaacaaaaatatgacatctgaacaacggagagaaaactggttgaaaaaataagaagcagaactagacatctgtsggataataacaacgatcttattttttcaagccatcacagccccagaaggaaaagagaaagacagtggggctgaagaagtatctgaataaagacacggctgaaaactttccaaatctgataaagggtataaacctacagattcaagaagtttcagggaaatctaaaaggatacatccaaagaaatttatgcccagacaaagggcaaccaaactgctaaaaacaagcttgatgaaaaaacaatcttgaaaacagagaaaaatgacattgccaaagaaaaacctgactactatggagttct

SEQ ID NO: 773456 - DNA, 636 bp, Homo sapiens
acatttttaacagatattaacaaaaagataagtttagataaaactatctgaacttcatgattaaaaagtgaaattacaagactgagtaaagataaatttggggggaattttttaaatgccatgttaaaaacaaaggattacttataaggtactgaatacactttaggtcccttyttaacatggttttctccttcactctaaattttaacaatctgttggtggttcagttttagaataatgcttcttcacaaaggtcaattttaaaaaatgtttaagtgtcaagcagtctagcctccttaaacctctatcaccctggtcccttgtaccacatctactccgtaacttccaactagcctcttaacagatctcaaggcgactctggctggcctccctccaaagaatttttccaccatgctgcctcattgctcttttaaagttgtaaatgtcttcctatagcagcttaaaaataagtcagtgattcctgcagttcatagaataaaaaccaagattttgaacaaggtttatggagccttgtcttacccagtctccaccacttagccaggctcatttatttttatcatgtctgtaatctcagcacgtcgggaggccaaggtgggtggagagcttgagcccagg

SEQ ID NO: 773457 - DNA, 642 bp, Homo sapiens
tttttataggctgttgaggctaatggttgctattcctgtactaccaccttccatttcttatcggtttccatcccaaccctctatgtacttcgaacagggtcatctgtttaactcagaaattcctgagattgtttttctgatttgcattgtgacatgaactgctctcgatattattggcacagtattattaatgcatatttgcatgaaacattktattctttaccaaagcattttattttaggttgtttaaatcaccctttctactactggaccctacttttaatccagagaataggttccaaaccatgccatcaattttatgttattagactggatataaatgtgttctgtgtttttatgtatctgtggccaaaaatatgtcattttatacataagggagtttgttctatcaaaccattgcaaaacacagtgcctttcagaaacatttatactacaaaggttttggggaattggagttgataattatcctcctcttcgcttttggaatcttatcctatagaaagcaaatatgggccaaaatactgtatttcctttattattgagaagtattgattgttgactttggcaggactgtcttttgccctcgttaaacttgaattctggaatgccctgaaagtgaag

SEQ ID NO: 773458 - DNA, 642 bp, Homo sapiens
tttttataggctgttgaggctaatggttgctattcctgtactaccaccttccatttcttatcggtttccatcccaaccctctatgtacttcgaacagggtcatctgtttaactcagaaattcctgagattgtttttctgatttgcattgtgacatgaactgctctcgatattattggcacagtattattaatgcatatttgcatgaaacattttattctttaccaaagcattttattttaggttgtttaaatcaccctttctactactggaccctacttttaatccagagaataggttccaaaccatgccatcaattttatgttattagactggatataaatgtgttctgtgtttttatgtatctgtgrccaaaaatatgtcattttatacataagggagtttgttctatcaaaccattgcaaaacacagtgcctttcagaaacatttatactacaaaggttttggggaattggagttgataattatcctcctcttcgcttttggaatcttatcctatagaaagcaaatatgggccaaaatactgtatttcctttattattgagaagtattgattgttgactttggcaggactgtcttttgccctcgttaaacttgaattctggaatgccctgaaagtgaag

SEQ ID NO: 773459 - DNA, 575 bp, Homo sapiens
agaattacacaaatttgaaaatccttgggtcagggagtggtcaacactgagccctttttttaaacttattgaaaattgcagtaatataaggagaggctcagatagaagtgtgttataacctgttttacatggatatgatgaatttatacagttatgasttgtggacaatagagggagaaaaagattgagagccattgaactttcttttatttctttttatttatttattttttatatttttaaggagtcttgctctatcgcccgggctagagtgcaatggcatgatcttggctcactgcaacctccacctcccgggttcacatgattctcctgcctcagcgtcccaagtagctgggattacaggtgcacacaccaccacacccggctaatttttttttttttgtatttttagtagagatttggccagactggtcttcgactcctgacctcgtgatccgctcgcctcatttctttttaccatctaaattgcattatctctgtgataggctcctcgggtattttacctgtcttaagcttccatattctgtttgtacagtgctttgatagtgtacaga

SEQ ID NO: 773460 - DNA, 601 bp, Homo sapiens
taaatctctgcaagctgtttctgttaacagcacagtaatataggaacatgaggttttaggatgacatcctgttagatatttagctaaaaattgtatgcaccatttattaaatgtgtcaaatggagtccaaccatagcaccttaaaaaccaaagctatcacaagtttacttagtttcccaataccttatgtagcaaagctgtttatcaacaatattgttgctttgtgttgcctagcttagataaggattaaatattatagcattgtttaggactcttaacacagattttattaaatgtagtttatgtgtctaaatatattagtactattgtatatattgtaaatacttccttttaatcaattataatgtattgattaacctgcagttccttaagatggccaaatgataatattgaaaccartcttgtttttcaaaataactggacttttctttctcactttccgcattgtttctgctcctctgcaggcctcttgtcgtctgtttttttctttatgtgttaacgatgcttattctaagttcataaatagaaccatgaactcaatgtaatttacatttgtttaaataatgtagtatattaagca

SEQ ID NO: 773461 - DNA, 577 bp, Homo sapiens
agataaagaaacattccagaacttggttgacatgtgcggttaaaacacttctgttctgcatttgctgtgtagagttgaaagtcaattacttgagccagccagggccaagtctgagtcaaggtgacccatcagaaaccaggtcacccattggcctgggactctgaggtatgcaggcaactggaagagtgcatgggtatcaaggactaaggaggtttgagctggagagagggaacctctccctgaaggaattcccgtgtccatgcacagacagactgtgtatctgcagtatttggcacaatgtattagcagcagagagaggagctgaataagggaaggaaaaatgtcagctgcaagagcctctgctgtcctggaggacaggagctcaggtcactctgagctgccactggagtctagaaggagaatraatgaggtgaaaagctgtgaagctaagaagacaaaactcgagctgcagacacaggtcttggcaggactgacctgtgcatggcatggggataccttgctcattttaaccaggggcaatattcagccagtgcatctgataggagcagttgttata

SEQ ID NO: 773462 - DNA, 524 bp, Homo sapiens
ggtgagaacatcacaaacaggaaacgtagttgtcaaatcatgccaggccaaatgtggagcctaaaaacactgtgtcaggaagacattctccagagccttgagatgagcattgaaaaacagagggttgcctctcagtgagtgctcaatagagctttgcatggggggtccacatcatgaatcatcaccgagtcccccttatgagctgggtaaggatacttgaacttctgagcctgcccacccttggcagggaaggcagagctaaggaagtgaaggtgyggtcggagatatctgttagaggagcaaggactcagtgattctgaagagggggattcatgaaggctgggagggtgagctggatttcaatcagaagagaaacgatacaaagaaggttgaatccatgccttagccatgtcacctctcagtccctttagagcagtgaatgcccagattttctttctttaaaataagaacttagcggtctcaatgtgtctatctttaacttttgccttttttcttcctgaaat

SEQ ID NO: 773463 - DNA, 528 bp, Homo sapiens
cggacagaccttagagccacgctgcgtgaatgtggaaaatatgaagacagatccgcccagacattcagtgattccttaacaggcagatgcaagaattttgcataccacagtaacttgtccaggtcacaaaatcctctttgtgaagtgtctgcctgtagccagggcaatacttccatggactgctgtgacacagagttcccgaggtgctgggagagcctgcctgtgggttgaagatttgacaatgatgtccttggaccagcttttgttccctcagatctgaactgctcccaagtctgtggatcaatggaacgacactaaatggcacagatacaccacgtcacgcagaatttcaggggatttaacttatctgaacataycacgtgtgaaaaggctttttccgagccctgtagatgggtcagggatatggaaatgcaagtggaagaaagtacaaggaggctttagcagggacggggagggtaggtttccatgcagacttctgccacagcaggctctttgggctgtttgggc

SEQ ID NO: 773464 - DNA, 571 bp, Homo sapiens
aaaaaccatgtctttacagtgaactaaaaatatcaagagacgcacttacctccccgcacagagggggtcactagggagacctgaactaggatggctcaattggagcctctcactgtttggcccagtgggtctccgtttttctgcccagctgctggacagcctgaaacatgcctgcctttccttactgtggccggttcctggattttaaaattgggtatgattgaaataaggtctgtctgggtgtgcatgttacacgcaagttaaatttccctgttcgwgttttgtcctacaaaaggcagtcagccctgtgtgttctttctggtcttcttattttaaaaaaataattgtaactaaatttttgatggaaaaggaacatgtgccaatagaggggaaaggcagccaggacaaaagggtctacagtgaccggtggctgttctccgtgtcccagccccaaagacccttcctcagcaccaactcctggagtctaacaatgagcgtgttatttcaggtacttttctaggaagaaagaggggatttgtcctgcctgctttggggctgtcatcaccaagtc

SEQ ID NO: 773465 - DNA, 621 bp, Homo sapiens
caggactatgtgataattgcattaactgcacaaattgtacagcatgtgtgtttgagcaatatgaaatgtgggcaccttgaaaaaagaacaggataacagcaattgttcagggaataagagagagaaacttaaactctgactgccrgtgagccgggcagaacagagccatatttctcttccttcaaaagcaaatgggagaaatatcgctgaattctttttctcagcaggggatatccctgagaaagagaatgtgcagctagggttaggtctctgaacttgaactggcccccggggcgtacctgtctcttatggttgagactgcaggggtgaaataaactcgtctcccatagcgctcccaggcttattaggaagaggaaattctcacctaataaattttggtcacactggttgatctcaaaaccctgtctcctgataagatgttttatcaatgacaatggtgcccgaaacttcattagcaattttaatttcgcctggcagctgtggtcctgtgatctcgccctgcctccacttgccttgtgatattctattaccctgttaagtacttgatgtctgtcaccgacacctattcgcacactccctccccttttgaaaacccctaat

SEQ ID NO: 773466 - DNA, 621 bp, Homo sapiens
caggactatgtgataattgcattaactgcacaaattgtacagcatgtgtgtttgagcaatatgaaatgtgggcaccttgaaaaaagaacaggataacagcaattgttcagggaataagagagagaaacttaaactctgactgccagtgagccgggcagaacagagccatatttctcttccttcaaaagcaaatgggagaaatatcgctgaattctttttctcagcaggggatatccctgagaaagagaatgtgcagctagggttaggtctctgaacttgaactggcccccggggcgtacctgtctcttatggttgagactgcaggggtgaaataaactygtctcccatagcgctcccaggcttattaggaagaggaaattctcacctaataaattttggtcacactggttgatctcaaaaccctgtctcctgataagatgttttatcaatgacaatggtgcccgaaacttcattagcaattttaatttcgcctggcagctgtggtcctgtgatctcgccctgcctccacttgccttgtgatattctattaccctgttaagtacttgatgtctgtcaccgacacctattcgcacactccctccccttttgaaaacccctaat

SEQ ID NO: 773467 - DNA, 594 bp, Homo sapiens
ttaggaaacctactaacaggtgaaaatctcttaattctagcaagagatttagacatccaaatatccccaaacaaatacaatgtaaaaaggccttttcccatggcactttctagtcaaactgtctaaattcaaagacaaacagagaaatctaaaaacagcaagagaaaagcatctagtgacctataaaggaatccccatcagactaacagtagatttctcagtagaaatcttataagctaggagagaatgggatgacatattcatgtgctgaaagaaaaaaatattgccaaccaagaaacaatattcagcatgatctatcttcatttatcttttatcaatgaaagagaaatagtcttcctcagacaaacaaagctgagaatattcatcaccactagaccagccctacaaggcatgctcaagtgatycctaaatctggaatcaaaagaatgacaattaccaatgtgaaaacacgtgaaagtataaaacttactggctaagcaaacatgtaaaagaggaagacaaaaaactagaatgttaccaatacagaaaaatcatcaacctacaatgacaaacattaagagagagagagaaaaa

SEQ ID NO: 773468 - DNA, 629 bp, Homo sapiens
aaaaaaattaaattctgcagttgcattttttgtaaatataagccaaactgcttgttgtagttatgtttagataacatctgggagcattaccccaaagcaaagaggatctatttccaattcatctccagaatgttggagtgtagtaattcattgtcagttgactattttgtttggaacactgcatttattagagaaaagaattcatgatttgatgtggtgtttttcacaacagaaatgtwtgaaagaaaaattacctctttcatgatctattgctgtgattttatatggaggaaaatgcagaaagcttttaaatattattacacgctttatgtgaagcctgtgtacagagaacatcactgccaaccaacaacatttgacagtgtcttgtgagtctaaaaccactgaaaagaatactatttttaacttgagaattgaatgatatcgaatgacttttaataaatgcaactactttccatatttgtgtcagtaaaccattgctccgtaacaaaattgcaatgagttacaatttattccttgtcccttttattgaaaagaatcgctaagggtgataacggatagagagatgtgaaaaattggtgccagtgatgaaatataccacacaaagggta

SEQ ID NO: 773469 - DNA, 629 bp, Homo sapiens
aaaaaaattaaattctgcagttgcattttttgtaaatataagccaaactgcttgttgtagttatgtttagataacatctgggagcattaccccaaagcaaagaggatctatttccaattcatctccagaatgttggagtgtagtaattcattgtcagttgactattttgtttggaacactgcatttattagagaaaagaattcatgatttgatgtggtgtttttcacaacagaaatgtttgaaagaaaaattacctctttcatgatctattgctgtgattttatmtggaggaaaatgcagaaagcttttaaatattattacacgctttatgtgaagcctgtgtacagagaacatcactgccaaccaacaacatttgacagtgtcttgtgagtctaaaaccactgaaaagaatactatttttaacttgagaattgaatgatatcgaatgacttttaataaatgcaactactttccatatttgtgtcagtaaaccattgctccgtaacaaaattgcaatgagttacaatttattccttgtcccttttattgaaaagaatcgctaagggtgataacggatagagagatgtgaaaaattggtgccagtgatgaaatataccacacaaagggta

SEQ ID NO: 773470 - DNA, 629 bp, Homo sapiens
aaaaaaattaaattctgcagttgcattttttgtaaatataagccaaactgcttgttgtagttatgtttagataacatctgggagcattaccccaaagcaaagaggatctatttccaattcatctccagaatgttggagtgtagtaattcattgtcagttgactattttgtttggaacactgcatttattagagaaaagaattcatgatttgatgtggtgtttttcacaacagaaatgtttgaaagaaaaattacctctttcatgatctattgctgtgattttatatggaggaaaatgcagaaagcttttaaatattattacacgctttatgtgaagcctgtgtacagagaacatcactgccaaccaacaacatttgacagtgtcttgtgagtctaaaaccactgaaaagaatactatttttaacttgagaattgaatgatatcgaatgacttttaataaatgcaactactttccatatttgtgtcagtaaaccattgctccgtaacaaaattgcaatgagttacaatttatyccttgtcccttttattgaaaagaatcgctaagggtgataacggatagagagatgtgaaaaattggtgccagtgatgaaatataccacacaaagggta

SEQ ID NO: 773471 - DNA, 588 bp, Homo sapiens
ttattcttgcttggtttcttcagtttatcttttgggttcttcctaataattcgcttgaatacaaatgctcaatttgagttgtacttctggggaacttgaactaaaacagcttgtcttatacctcaatatttgcttatttagtataattcttggtctaccagtaaagaatgatacataaataatttattttattagaaattaattttttaaataataattttgttggagttgcttttggagagaacatgggcttagaagtcagagaaagattcaaagtcagcctggctgctcattagctgtgcaacattggtaaacttaattagtcttttacagtgcttgtttcttcaactccattggaattaatccctatagggatgtgttagacattacatgaatttgtctagcctatgctttgctcatagaatttcttgttrtaaatatttctcttcgtcctacccgcctgtctaattgcttgaaaatgtttaatctgccaaaagtatgatctatgttactttattgcatgtaggttaggtcatgccaatttcactattaatttttcatggaaagacagggaatgttaagaaagtg

SEQ ID NO: 773472 - DNA, 513 bp, Homo sapiens
aaaccaagttatcagatttcagggccaaaaagaacattttgttggatgtaatagttataaatcattcctctctagaatactggaagttgtggcttttagcaaagaaatacatcaaatgtagtttaatattgatttttttcccttcagaaatgcattccaaccaagaggaccccaaagcttagtaaatctacatgtaatttttatgcagactacagttacacttttctccttattttattgagaaatktttgtgacaattcattcaatttattctcctaaatctgacttgcttttcataggagagcatcatgaggactgtggcctcagatttattgggaatatcagagtatgtgtattggaaagaagtgaatgatcccctgagtaaatgcaacactcaccacaggtcccctgtaaagcttcctccctcaagatgtgtctaatacataggttaccatactttctaatgtgaggctccaacactcaaacaataaatgattggactatggacaaaaa

SEQ ID NO: 773473 - DNA, 513 bp, Homo sapiens
aaaccaagttatcagatttcagggccaaaaagaacattttgttggatgtaatagttataaatcattcctctctagaatactggaagttgtggcttttagcaaagaaatacatcaaatgtagtttaatattgatttttttcccttcagaaatgcattccaaccaagaggaccccaaagcttagtaaatctacatgtaatttttatgcagactacagttacacttttctccttattttattgagaaatgtttgtgacarttcattcaatttattctcctaaatctgacttgcttttcataggagagcatcatgaggactgtggcctcagatttattgggaatatcagagtatgtgtattggaaagaagtgaatgatcccctgagtaaatgcaacactcaccacaggtcccctgtaaagcttcctccctcaagatgtgtctaatacataggttaccatactttctaatgtgaggctccaacactcaaacaataaatgattggactatggacaaaaa

SEQ ID NO: 773474 - DNA, 326 bp, Homo sapiens
gcttctctgtaataagtttaattttatccatcctggcccaagtgcaaaggtgcacccttgccaaataatagctttatacaatgtgtcagacaggtaaactctagggaaataacagcgttggacagatcagcctggaatgagctatcagcaaagaggcctctttttcaaaattcraaattaccaaactgaaaatgcaagtggatttcaattataggctgtagcttttagagaggtattgttctgttgtgggttttttttttttcctttccatttatatacaggaagcaatcactgtcagcatcatcaacatgaaatatgaatgacag

SEQ ID NO: 773475 - DNA, 616 bp, Homo sapiens
ccataccctcaactcaaagcaggctaaatatctaaacaatagaatggataaatacacagctaaatgtcttcaatgaatatagctgtgtatttcaggaatatcctgctgctacacaccaacaatatggataaatctgcaagtattattttgaagaatgaagtcatgccataacaaacatcatattatttaatgaacttggatttcaacgtctagcaaaattagtttatgttattagaagccaagatgatggttgcctttgtggaatactgtgggcataaaaatgtggaaaaataccagaagatttttccagtactgattatggtctatttctttatatccatgatatttagatgattatatcccctttgtgatatttatgatgccrtattatgacatttatatttggtagttatatatagtcatttggtgcatttttatttatttgctattcttcaataaaaaatctaattaaagaaaagcagccaagacaatcagtttttttaaaattagaggtacttcaccttttaataagacacaaatattgagtatagtattggtgaagatacacatgcccagatagagatacagtcatatatggaaacttgctatttaatac

SEQ ID NO: 773476 - DNA, 620 bp, Homo sapiens
atggaaacaacgttaatctccatgtgcttctccatctgagcttttgggtgaccaggtgcattttcaatgaacggtaatatttgtaaagcatttttttttctcagaagtaagtgtcaacagtgagcttaaaacattcagtaaaccatgctgttccatcatccaggctttgtttttccatttatagagcacagacaatatatttagcataatctttaaggcccttaggatatctggaatagtaaatkaacattggcttcaacttaaaatcactgactgcattgacccctaacaagaaagtcaccctgtcctttgaatttttgaagccaggcattgagttctctccagctatggaagtgctagatggcatcatcaaatataaggctgtttcatctacattgcaaatctgttatttagtgttgacacattcatcatttgtcttaactagatcctctggataacttgatccagctttcacatcagcacttattgcatccacttggacctttatggtatggctacagcttctttccttcaaactcatgagctagcctcttctaacttcaaacttttcttctgcagctgctcacctctctcacccttcataaaatgggaaaaactaa

SEQ ID NO: 773477 - DNA, 588 bp, Homo sapiens
gcagaatgaaaagtaagtgaaagtaatcaggtgaagaaaaaaattgtggaatgaattaaatgtcaacttctttagctcatctccagcttttacctgtctttaaaattgttcccaacttttttctttaaacccagaagaattgtttgtgggaaaaagtgacaatgactcagttcagttttgtaaagtaccaacagttctcaagaggaaatatgctatattgagtaagcgcaaagtatgattattaaacttaatacgatatttttaaactgctgacagatggtgaatacaatgaaatattttgataackgcttgttatattttcagagacttggaggcttagtgaaaatatgaagttctaaatatttgaacatccagatgtcatttcagatcagtgtgaccaaataatatttttgtaaataacatggtggagtttaaaaaggaaggtggagctaagagaaaagaaagaaaaaaaatgcatacaaatgtaggattcctggaagaattctagtggaacatcagacattacacctccggggcaatctatgtatcttttaaacagaaactccctccgatgagcttgtctaggat

SEQ ID NO: 773478 - DNA, 605 bp, Homo sapiens
acagtgacaaatatgtaatgagtattcttatttaattcaagagatttaagttcattattattgagacattttcagtgtggtaaaaccttaaaaaaaattaaataaaaattgctccagaaaaaaaaaaaaccactgcaraaagcttctacgaatctgttggacttgtcatttaatgtccttatatcaaaacaaagaagcatcatatatttaacttcgttttaggagcaaagaataagatgatttttaataagagaaaatgataatcatttggcaaagctgtttgccagtgtgcagtttttttcacgaactccaaaagaggtcatgggccaggtagcattgaagcaatttgagaaaaaataaaagcacgctaaatacaaagcaactcaaaaacactacagtaccaaatggagtgcttcaaattgctcctgagtatcaggattttatgatgcagaattttgagggtctatttaagaaagcactgtatccatggactgtcctaatccttcatctaaaatagtagatattcatggcctatcccaggtccactgctttatttatttatttatttatttaattttagattccagggcacatgtgcaggtttg

SEQ ID NO: 773479 - DNA, 541 bp, Homo sapiens
agtctaagaatgggattattatggacttgttaaaatggcaggaaaacctacaggacacttttaaagagctgtgacctagttttgtaagtgtgcaatgtgctgttaaggtttaaggttaagataagggtttctttgccttaaatttgcaaatctctgttaatgaacctcaattatggccttaacttggttgcttctccatatatatcagagcttgaaggaaactcttagtaccraaaaatttagaattggagcagtctttcgtaatttggcccaattccctgctttataacaggagcatttaattgggttgaaatccatcaatccaagtaacttgccagcataattgcaatttcaaatgaaaattagagtcaaatgtggtaatgaaaaacattgttccttaaaacaagttgtttgttaaagttactttgaatactgttacgttctaggcagtgtttactgtaaacacactatttgttgtattaatttcatagaaaaaagaagagattaacctccaaaaaagaatgctttcacagtcttaact

SEQ ID NO: 773480 - DNA, 585 bp, Homo sapiens
cgccattgcactctatcctgggcaatagagcaaaactttgtctcaaaaaaaaaaaaaaaaaaaaaaaaggaaagaaagaaatatggataaccattgagaattccttgtcctccactggtttgatagtttgacaactttgagatcagaagatgttcagggtcctatcttctaaaatacttgggtgcagaggcgagtcttgaatttttttttttttttttagaatattgaatctgaaaacctaggcagacataaraaaatgaactctggaaaatgtggcaatttagtagatcagtctttttcaataatacacatctctgtttggtaggcattaggtttggcaggatttctttctcctacacattccttctcttattcaaattaatattctaattttaacatgggagattccttatatggagttaatcagattaaaagtataatcaacttggttaattacttttttactaagattcctacaggtctaagtgtttgcagttttatattgtgctattatatgttcaattagattttgttatgtctacaactatattttgctattgtatgttctattagattttgttatgt

SEQ ID NO: 773481 - DNA, 592 bp, Homo sapiens
tggaacactgcattcctttctttgctgggtaaatgccttctaaccccttagcactttgctgaaacagagcattttgttttgcaaactcccacctccactcatcccttgcagcttaggtgactaagtcctggccaataagatgtaagtgaaaatcactgggtggaactaccaagaaggctcattgaaaggagcrcagatggctgcatggcctttccacctttttctagtttttttatatataatggatgtgatggctggtgctccagcagccatcttagacacaaggtcaccttcagaatgaaaatcatgctctatggatggagaggccaaagagagaagttgcctgggaatgctgatattgtggtgctaccatataccaaggctagactggctccctttggttcttttatgagagaggaagataaactcttatgtgtttaagccactgttattttagtttgttgttatatgcagaaaatcgaatcctagccaatataacagacatacaagtcatttcctgatttggctcctacacacctctctagccacacatttcccctccccacccccaaaccccatactccacacctac

SEQ ID NO: 773482 - DNA, 671 bp, Homo sapiens
cagccacattgagggagagagaccacccaacttcagatgggggaccaacctcacatcccctctctgctgagagctattttgtagcttaataaaactcttatatgcccttctcacccttcaactgtcagtgtaatctcattcttcttggatgtgggacaagaacttgggacccactgaaggtaagtatgaagaaagctgtaacactgtaaccctcccattctccatcagcagagggcagccaccccatgcagcaggaagcagtgtcagggtcaggccagccctggatccgcaggctggagcagggcagtggactaaaggagctgttagcatgctctaacacctgctctggggcttcagggttgtgggcatcccygtttgggtgccaccgcattcccctcatctggaggccagagtccaccacagcagtcggtcatgacatgcctggtccaaatgcaagccccacacaaagcctgctcctgtgctggcacttggagcagctagccggaccccacacttgcttgctcacacacccacttctgccatgggctgagtgcgctgtccttgtggccatgggatctgcgctggagtgcaagccaggcacagcctggtggtttgagtgagcaggggcatcaccagccatgaaggtctctggctggcaaagcggcactgaa

SEQ ID NO: 773483 - DNA, 619 bp, Homo sapiens
attatattggggggcgcatgacaacaataatatttattgctcattatgttaatcacttggctaaggtggtatctgccgggttcattgcgaagtcactattgtcccctctccataatctgtcattagaagccagtcaatacatccggcccatgctcaagcaggggaacgaagctccacctgctgcagggaggaatatcaaatcattttcggacacgtgttaaaactaccacagtcattagaaaatattctgggggagatacgttgaggctatgcagatatcctgtttctccttaaagctttaccttttaattttagcattcatctgtaatcccagcactttgggaggccgaggtgggcagatcacaaggtcaggagatcgagaccatcctggctaacatggtgaaaccccatctctactaaaaatacaaaaaaaaaaattagccgggcrtggtggtgggcgcctgtagtcccagctactcaggaggctgaggcaggagaatggtgtgaacccgggaggcagagcttgcagtgagccaagatcgtgccactgcactccagcctgggcaacagagggagactctgtctcaaaaaacaaacaaacaaacaaacaaaaaacaat

SEQ ID NO: 773484 - DNA, 628 bp, Homo sapiens
ccactgggagaggacaactagatgctctgcatttaaaactctcctggggcacagcagctgcacatcctggggctcctgacctctttgcgtttgcagtgtagcccaaatcggtcagcactggaggacctcagcagccatgttgaagccccatagtgaagccgggactgccttcattcagacccagcagctacatgcagccacggctsacacattcctggagcacatgtgccacctggacattcacacaccacccatcccagcctggaacactggcatcatctgtaccattagcccagcttcccaatcggtggagatgttgaaggagatgattaagtctggaacgaatgtggcttgtctgaacttctctcatggaactcatgagtaccacgtggagaccatcaagaacatgtgcacagccacggaaagctttgctgctgaccccatcctctaccggcctgttgctttggctctggatactaaaggacctgagatccgaactgggctcatcaagggcagcagcaccatggaggtggggctgaagatgggagccactctcaaaatcatgctggataacacctacatgaaaaagtgtgacgagaacatcctgtggctggactacaagaacatc

SEQ ID NO: 773485 - DNA, 577 bp, Homo sapiens; identical to SEQ ID NO: 768867

SEQ ID NO: 773486 - DNA, 627 bp, Homo sapiens
caaagtccaatgctaaatgcttcctaattgtggggactcgaatatgaaatctgagcacgtcattttcacttcttaaaagaataaagtcaggtgacaattttaggtatttttaagttttcctttctacagtttgaaggagagggagcgtaggtcaaatgtggcatttctttctgcagtgtttctaacccragacaataatgggccacctattgggtgatcctttggcttcaagctgcagagttgtctttgctgccagccccaaatcctttaccttctgttttcaagatactccccaagacagctctagaagagagcttgtctttatacctccgaatatctctacgttaacaagttcaaaagaaagcagagtcacgatgacgaggtgctgcaatctaccagatacagaaggaaataagcaacgaagatcacctgagctaataacaatatttttttttttgagacagaatctcgctctgtcacccaggctggagtgtagtggcgcaatctcagctcactgcaacctccgcctcccgggttcgagcaattctctgcctcagcctcccaagtagctgggattacaggcacccaccaccacgcccggctaatttttgtattttgagtggagat

SEQ ID NO: 773487 - DNA, 627 bp, Homo sapiens
caaagtccaatgctaaatgcttcctaattgtggggactcgaatatgaaatctgagcacgtcattttcacttcttaaaagaataaagtcaggtgacaattttaggtatttttaagttttcctttctacagtttgaaggagagggagcgtaggtcaaatgtggcatttctttctgcagtgtttctaacccaagacaataatgggccacctattgggtgatcctttggcttcaagctgcagagttgtctttgctgccagccccaaatcctttaccttctgttttcaagatactccccaagacagctctagaagagagcttgtctttatacctcygaatatctctacgttaacaagttcaaaagaaagcagagtcacgatgacgaggtgctgcaatctaccagatacagaaggaaataagcaacgaagatcacctgagctaataacaatatttttttttttgagacagaatctcgctctgtcacccaggctggagtgtagtggcgcaatctcagctcactgcaacctccgcctcccgggttcgagcaattctctgcctcagcctcccaagtagctgggattacaggcacccaccaccacgcccggctaatttttgtattttgagtggagat

SEQ ID NO: 773488 - DNA, 598 bp, Homo sapiens
caattttaacatatgcatttatattacctatgggatctaggaatccccaaaccaataaattaatcaaaagaaacttgttacttctctgactttatctttcctcacttagtaatttatctttatttttcctcacttagacagcatccatgctgtcttcttgcctattgctcgaaaataccagccatatttgttctcttctctctcttctcattctcttctctgtcttgaatttcttttctgtatatgtgtactgaaaatttccttgcccaataaaacctttgctaaaatgtcagcttctcaatgaagtcttctctcaccacycaatttaaaattgcaacctatccactccttctaatctcctaatcctcattcactttttgctgttgtccaaaagacttatcaccttctaaataaaaaaaaaaaaaacttacttattatccaccctcactagaacttacctaataccctccaccccactagattgtgagctcaaggagggcaggaattttgtcttttatatttgcttatatatctcaatcaactggaaaagtgccttgtacataacaggttctcagtataaacattttagtcaatggaa

SEQ ID NO: 773489 - DNA, 598 bp, Homo sapiens
tgcactgtgtacctagaaaagccacagacattcaatgccagcctatgaaagcagcgaggagggaggctgtaccctgcaaagccacaggagtggagctgtccaggaccattggaacccacctcttgcattggcataacccagatgtcatacatggcatcaaaaaagaacattttggagctttaagatatgactgccctgctggatcttasacttgcatggggccagtagccccttagttttggccaacctctcccatttggaatggctgtatttatacaatgcctgtatccagtgtatctaggaagtaactaacttgcttttgattttatgggcttataggtggaagggacttgctttgtctcagatgagactttggactgtggacttttgagttaatgctgaaatgagttaagactttgggggactgttgtgaaggcatgattggttttgaaatgtgaggacatgagattcagaggggccaggggtggaatgatatggtttggctgtgtccccacccaaatctcatcttgaattatactcccataattcccacgtgttgtgggaggcacccagtgggagataatttgaatcatgggag

SEQ ID NO: 773490 - DNA, 598 bp, Homo sapiens
tgcactgtgtacctagaaaagccacagacattcaatgccagcctatgaaagcagcgaggagggaggctgtaccctgcaaagccacaggagtggagctgtccaggaccattggaacccacctcttgcattggcataacccagatgtcatacatggcatcaaaaaagaacattttggagctttaagatatgactgccctgctggatcttagacttgcatggggccagtagccccttagttttggccaacctctcccatttggaatggctgtatttatacaatgcctgtatccagtgtatctaggaagtaactaacttgcttttgattttatgggcttataggtggaagggacttgctttgtctcagatragactttggactgtggacttttgagttaatgctgaaatgagttaagactttgggggactgttgtgaaggcatgattggttttgaaatgtgaggacatgagattcagaggggccaggggtggaatgatatggtttggctgtgtccccacccaaatctcatcttgaattatactcccataattcccacgtgttgtgggaggcacccagtgggagataatttgaatcatgggag

SEQ ID NO: 773491 - DNA, 588 bp, Homo sapiens
tgtttgtctggatttaaatactagtttgctttttagccatccaagcacccatgcatactcttttaagttgtctcctgtgaatgatagccatttgcctttatagtcggaagtcaacattttggataacaattttcactcacacattgttttccccatcagaaaattgaagacagtgtttcactgtattttggaattgaatgttgctgtgatgaaatttaaggccatcttgaataatttctttttgaagttgacttgttttttctgcctgtttgcctaaggtattttttttwatcagggacgcacaataatttaattatgatttgtgttatttctgaatattctgttaaagttttttcctgatatataatataacctcttcatattcagatcctcaggtcttagaaatattactttattatattccttaaactttttatttcactcctgtttctaataagtagtttttcatatattcaattatctttgtgtgtctatttatcaactctcaatgagaatctatttcccttttctctgaatttcctatatttgctttgaatcttttctttatgtcacttatttgacttttta

SEQ ID NO: 773492 - DNA, 514 bp, Homo sapiens
gagtgagtgccatgtggcactgagaacaatgtatattccattgtttgggggtggagagttctatagatatttattatgtccacttgatccagagcagagttcaagtcctgaatatccttgttaattttctgtctcagggatatgtctaatactgacagtggggtgttaaattgtcccactatttttgtgtgggagactaagtctctttgtaagcctctaagaacttstttttagagacttactggtctgggtgctcctgtatttggtgtatatatattttgggtaattagcttttcttcttgaattgatccctttaccattatgtaaggcccttctttgtcacttttgatctttgttggtttaaagtctgttttgtcagagactaggattgcaacccctgcttttttctgttttccattttcttggtaaattttcctccatccctttattttaagcctatgtgtacctttgcacaagagataggtctcttgaatacagcacactgataggtctt

SEQ ID NO: 773493 - DNA, 664 bp, Homo sapiens
cagaggaagagttccataagggatccacaatgatgtcacctgtctagtatcttaaaaggatacctctatttgctctgtcacgggaaaaggatgaaaggccagaggccagtgaggaggttcttcaaggacccagatgaaagatggtgatggctttcacaaggacaagtaaagagaagaagtggtcaagtgaatattttgaaggtgaggccaagagratttcctggcggcttgtacacaaggtgtgagagatgtctcaaggttttggcttaactaaatgacaagatgagtttcgctgagatggaaaacactgggaggactagatttgggaaaagggagagaccagaagctttgattcagacatgttaagtttgagatacttattgaagagctagctagtaagcagttggatatatgatctagaattcaggagaatggttcataatagagatataaatctggggattattgctgggtatatagatggtattggaagtcatgagagtgcagaccacatcaagggagtaagggtagacagggaggaggaaaagtcgacaactgggctttgagagcccctagtgttaagatattaggaaaacgtagataaatcagcaaagaagcctacaaaggagtagtcagtgaggtaggaaaaaaccagaaaggtgtg

SEQ ID NO: 773494 - DNA, 609 bp, Homo sapiens
ttattccctatattgcagagaatgtacaaaccccctgtgataccttttaaatatttggtggcagaaaggatgatattacccttaaaactgcaaggggtgtacacccccccgtgataatgttccttgtatccaaattaggggagaatgatattactcccaatatcgcagaagatgtacactccccctgtgatattgttccttataaccagggggagagaggataatattactcccaatattgcaggtggtgtatacccccctgtgatacagtttttaatatccagcgggggkaggataatattactccaatatctcagagggtgtacactccccccttgatattcttccttatatccagtgggggagtggatgatattactttcaatatcgcagcggatgtacacatccctgtgatactgtttctaatatccagaaggggagaagatgatattgtttgcaataccacagaaagggttcacacctcctgtgatattgtttctcatatccagtgggggagaggatgacattattcccaatattgcaaagggtgaacaccaccactctgtgatattgttcctaatatccagagaaggagaagatgatattact

SEQ ID NO: 773495 - DNA, 609 bp, Homo sapiens
ttattccctatattgcagagaatgtacaaaccccctgtgataccttttaaatatttggtggcagaaaggatgatattacccttaaaactgcaaggggtgtacacccccccgtgataatgttccttgtatccaaattaggggagaatgatattactcccaatatcgcagaagatgtacactccccctgtgatattgttccttataaccagggggagagaggataatattactcccaatattgcaggtggtgtatacccccctgtgatacagtttttaatatccagcgggggtaggataatattactccaatatctcagagggtgtacactccccccttgatattcttccttatatccagtgggggagtggatgatattactttcaatatcgcagcggatgtacacatccctgtgataytgtttctaatatccagaaggggagaagatgatattgtttgcaataccacagaaagggttcacacctcctgtgatattgtttctcatatccagtgggggagaggatgacattattcccaatattgcaaagggtgaacaccaccactctgtgatattgttcctaatatccagagaaggagaagatgatattact

SEQ ID NO: 773496 - DNA, 522 bp, Homo sapiens
gtgtacacgccccctgtgatattgtttctaatatccaagaagaagatgatattactcccaatatcgcagggggtgtaaccccttttgtaatattgttcctaatatgcaatgagaaagacgatgatattactgtcaatatcgcagggggtgtacagtccccttgtgatactgttcctaatatccacaggggaacaggatgacatcactcccaatatcgaagggggtgtacacctcccctgtgacgttgttactatttccagaagggaagagaatgatattacttccaacactgcagcsgggtgtacacctcctccgtgatattgtttctaatactcaggaggaaagaagatgatattacgctcaatatcgcagggactctacaccccctcctgtcatgttgtctctaaaatccaggtggggagaggatcatatcactcccaatatcgcaggacgtgtacaccctcccgtgatattgttcctcataatcatcaggagagaggatgatattactctcagtgtcga

SEQ ID NO: 773497 - DNA, 558 bp, Homo sapiens
attctaatactttattatagttaacccctgcgaaaagagctcccagagcttacagtgcatttgattgatgtcatatggactattcattattttctaaattattttgtttgtataaagcaatctgaagaggatgtaagtcagtttgattccaagtttacacgtcagacacctgtcgacagcccagatgacgcaactctcagtgaaastgccaatcaggtctttctggtaagtgaaagaatttccatgtagtcatgggaaattttaagtatgaggatgggctcttcgataagaaaattcagtttgcttgctttgcagctcatgtaggtaacctggcccacttttttttttttaaataagccatgctcttataacttattgatacctacaaaattgattttcataatccaacattttattttagcaattagagtgggaatgtacaattctttggagagtatgattcccttttttggttgggccacagacttaaaatgatgtttggcttagcatctcaaccaaaaattaagtcatagcagtgggagagaaaaacctcactaa

SEQ ID NO: 773498 - DNA, 558 bp, Homo sapiens
attctaatactttattatagttaacccctgcgaaaagagctcccagagcttacagtgcatttgattgatgtcatatggactattcattattttctaaattattttgtttgtataaagcaatctgaagaggatgtaagtcagtttgattccaagtttacacgtcagacacctgtcgacagcccagatgacgcaactctcagtgaaactgccaatcaggtctttytggtaagtgaaagaatttccatgtagtcatgggaaattttaagtatgaggatgggctcttcgataagaaaattcagtttgcttgctttgcagctcatgtaggtaacctggcccacttttttttttttaaataagccatgctcttataacttattgatacctacaaaattgattttcataatccaacattttattttagcaattagagtgggaatgtacaattctttggagagtatgattcccttttttggttgggccacagacttaaaatgatgtttggcttagcatctcaaccaaaaattaagtcatagcagtgggagagaaaaacctcactaa

SEQ ID NO: 773499 - DNA, 638 bp, Homo sapiens
gcctaggctggacaatccacctgcctcactctcccaagtagctaggactataggcacataccagcatccctggaaaatttttttatttttgagatagagtctcgctctgttgcccaggctggagtgaagtggcatgatcttggctcactgcaacctccacttcctgggttcaagcaattctcctgccycaggctcctgagtagctggcattatgggtgtgtaccaccatgtccagttaatttttgtaattttagtagagttggggtttcactgtgttgcccagattggtctcaaactcctggcctcatgagatccacctgcctcggcctcccaaagtgctgggattacaggtgtgagccactgcgcctggccgttcccggataattaaaagaaataatttttagaggtgaggttttgctatgttgcccaggctggttttgaacttctagtctcaagagatcctctcacctcagcctcccaaagtgctgggattacagaggtgagccactgtgcctggactggtattattttatagttttataataccttattattagtagtaatatggttaccattataacttttaaataggacaaggaagatcctttttttggataaaagtctgcctgtaaataaca

SEQ ID NO: 773500 - DNA, 580 bp, Homo sapiens
cggtttttaagccagtcggaaaagcgcaatattcgggtgggagtgacccgattttccgggtgcctccgtcacccctttctttgactaggaaagggaactccctgaccccttgcgcttcccgartgaggcaatgctcgccctgcttcggctcgcgcacggtgcatgcacccactgacctgcgcccactgtctggcactccctagtgagatgaacccggtacctcagatggaaatgcagaaatcacccgtcttctgcgtcgctcacgctgggagctgtagaccagagctgttcctattcggccatcttctatccttatccttacccttatccttattctaagggcagttagaagggggaatgatacagatggaagcagccaaaggtttccctagtgaagccccaccctcaagcctaaaacagctcaaaggctgaaaaaccagactgctggtcccggagaatctccaatcgtcctgagctctagggtgacagggtggagccttgggaagttcatgctgtttgcaggggtaggagcctggcctctccttttcctgtgtggtaacctgggattcaatctgtgaga

SEQ ID NO: 773501 - DNA, 580 bp, Homo sapiens
cggtttttaagccagtcggaaaagcgcaatattcgggtgggagtgacccgattttccgggtgcctccgtcacccctttctttgactaggaaagggaactccctgaccccttgcgcttcccgagtgaggcaatgctcgccctgcttcggctcgcgcacggtgcatgcacccactgacctgcgcccactgtctggcactccctagtgagatgaacccggtacctcagatggaaatgcagaaatcacccgtcttctgcgtcgctcacgctgggagctgtagaccakagctgttcctattcggccatcttctatccttatccttacccttatccttattctaagggcagttagaagggggaatgatacagatggaagcagccaaaggtttccctagtgaagccccaccctcaagcctaaaacagctcaaaggctgaaaaaccagactgctggtcccggagaatctccaatcgtcctgagctctagggtgacagggtggagccttgggaagttcatgctgtttgcaggggtaggagcctggcctctccttttcctgtgtggtaacctgggattcaatctgtgaga

SEQ ID NO: 773502 - DNA, 536 bp, Homo sapiens
atctaccactttcttctcttctatattcccataacactatatcatccacatatttgaaggatttttttctctagttatattctattatcatgtctagaaattcgattatctgattttattttgacagcaacatagaaaagatacattaaacagaaggtacttgcattatgcttgttgagattaaataaactataacataacccagataatacctgttatctgtttgattcctatgcttgtgggatcctccctgccctatacttggaagtggtagggtgggcagagttggattgtcgatgacagaagtgtttggtcgggattcaatgccccttaatacattacagtcacctaccaagcaaagatgaaaggaaatatgaagtcataaagattttgagcaakggccacagaggtctagtaacaatgtactaaacaaattggaagtaagtcagaatcactgggagagaagagatgagtgcaccagttcaatacacagaaatcacaagagcagtgaagaaattcaataataaactcttcaa

SEQ ID NO: 773503 - DNA, 429 bp, Homo sapiens
attatgaacaataaaaatcactaagatgaagtgttccaaaacagtgatataagctcttgaaaaacttgaaactatcagaaacgatgataaatagacttgaagggctctagagatgaagagaatataaaatagttacaggaaacaacaaaagtggcaattataaatgatataaataatgtcaggtacttaatattctatcctgaagaaatcactcaaaatgaaatagaaaaggataaatactggaaatagacatgacaattatttaaaagtttatacacatagggaaagaaraggaccaatacacataatttttctttcctatctgaagaagagagtaaaaaaaatgttgaataaaaaaatgcaaggaagatttcctgaaataaagaacttcttgacttggcagcaaaaaaaaagaaaaagaaaaagaaa

SEQ ID NO: 773504 - DNA, 494 bp, Homo sapiens
aatttattagcttttaactcctatatacctttggtgctaattgaacacctgctattagtaagggcagcatctgcaatttagaactggaaaagtgaactttaaaaataatttatttaagctcagtttcattaaaaaatttttctgggggctgggcctggtgactcaggcctgtaatcccagcgctttgggaggccgaggcgagtggatcacgmggtcatgagattgagaccaccctggctaacacggtgaaaccctgcctctgctaaaaaaatacaaaaaattagccgggtgtggtggcgggcgcctgtagtcccagttactagggaggctgaggcaggagaacatcgtgaacccaggaggcagagcttgcagtgagccgagatcgggccactgcactccagcctgggcgacagggtgagactccgtcttaaaaataaaaaatttctggaatcaaaatagtggcaaaggcaggggagaaataaaaacaaggaaaa

SEQ ID NO: 773505 - DNA, 766 bp, Homo sapiens
aacctaaatgcaatggatgagattggatcctgttatgtctgaggcaaagtgatgtcactcaactgctataggtaaggtaagcttggtaaccataattgtcaaaccagtaatcagaatcatctgattctcaaaggtctggcactggctagtgatcacagtgttcctggcagtaaaatcaatagaaagcctactaaattcttacttggtctgtaaaaatagaaaatgtctaagtcaggccaggtgcggtggaacacacctataatctcagcacwttgggaggccaaggctgtttgatcatttgaggtcaggagttcaagaccagcctggccaacattgcaaaacctagtctctactaaaaatatataacttagccaggtgtggtggcaggcacctgtagtctcagctacttgggaggctgaggcaggagaattgctaaacctgggaagcagaggttgcggtgagctgagatcatgccactgcaccccagcttgggtgacagagtgagacttcatctcaaaaataaaaaagaagagaaaagaaaaaagaaaagaaaacaaaaagaaaaagtctaggtcaagtgaatgaaaggctaacttgaataatacaaatggagaattacagcccttcaatcaattctaacacttgaaccagcttacagacccagaaacccttatatgaaagggaggtagctggtcatgatggctcacacctgtaatcccagcacgttgggaggccaatgtgggcggatcacgaggtcaggagatcg

SEQ ID NO: 773506 - DNA, 512 bp, Homo sapiens
attataaacctagaaaaatgtatattttgagcagatggagcagctaactacaacagtgtggatgaggaagagtcagataactatatataaatattatgatgacacctggaagtctgtacaatttatataaactagcataacagttggtaacatacgaatctgtggtctgacatacatacacacacacatgcatatatgtatatattcttggatataaagtgttaggctcratagtaatataagtatctagtagataactaatcaaattcatttcttaatattactttaaaatcctcaacatgtatgtttttaaatttccatattttaaaccaatccatttcaataaaaaaattatagagaaatagagctctatttatagtagttttcttttaagtggaacaaggttgaaataaatggagaaaattgacattctaccttattggtcatcataaaaaatgaagagaaaaaagatgttgctattacagaatgatttgatcaattgtattgatggg

SEQ ID NO: 773507 - DNA, 592 bp, Homo sapiens
cacacctgtaatcccagcactttgggagactgaggcagatggatcacctgagttcaggagttcgagaccagcctggccaacatggtgagaccccatctctactaaaaatttaaaaattagccaggcatgggggtgcrtgcctgcaatctcaactacttgggaggctgaggcagaataattgcttgaacctgggagacagaggttgcagtaagcttagatagcaccactggaaaaaaaaaaaaaaaagcaaaaagcttaaacttttaagccagcaaatgcgggcctaggtcttgggtcttggctctgttatttactagctgtatgatgttgggcaagttactcaacaccctgaggttaacagtttccccatgcttagagaaacagataataatagcatctatcctcataaagatgttgtgcaattgcatacaaaacacttagctcagtgctgggcctgtacatacaaaacctcagggttgactaccaatggtagtcatctatctttagacatttcaaagagcatcaccttaattctaagaaaaggaaatgagaaatgagaaccctggccatgcagccagtgcaatcctaaggc

SEQ ID NO: 773508 - DNA, 514 bp, Homo sapiens
tattatactgaccactttgaatacatcaatttgcaaagcaaacaaaccctgccctcatggagcctatattctggaaggggaagacaaacaataaaaataataaattaataaattatatattagaagatattaagtgctataggaaaaagtaaaacaggctaagactacccagggattaaagggttacaattttaaataggatggccatagtaggtgtcattgaaaaggtgacatgtgagmaatgatttgaagtagggaggaaattagctatgcagatatctgagggaagagtctgcaggtaagaagaagctgccagtgccaaggtcctaaggcagaagtttgaggaataggaggaaagcaatgtagctagaacatatgtgaacgaagggaaaagcagaaaatgtttccccacagaggtaaggaaacaaagtataagtagatcatatttggtcctgtgggccaggtgtttccaatgcatgggccacagactgatacgggtctgtggcctgttagg

SEQ ID NO: 773509 - DNA, 563 bp, Homo sapiens
aagttggttgttagaattagaggcttgcacagatcaaggttcaatttttttttgacaataatgatgtataaatggtgttgtatgtaaccgtcaggaggcacataatgtctgattctctctctttatgtggtaatagcaaccattgatgatcattgcctagatctgttatttcgatagtggtatacattagaattctaattgggttagaaaagtggaggctggaaagaatgattatgactagtctgtaccttttgagcaagcaaaccaatcaacatacatttttttaatgcaataaaaatyttctattttaatttttaaaaaaattttgtgtgcatgtagtgggtggatatatttatgggatatatgggatgttttgatacaggcgtgtagtgcgtaatgatcacatggatgatggggtatccatccccttaagcttttatcctttgtgttacaatccaattatactcatttagttattttaaaatgtacaatccaatctacattttgttaggtattttgtcttttgccactttatagctttattgaaacttctattaaaggga

SEQ ID NO: 773510 - DNA, 563 bp, Homo sapiens
aagttggttgttagaattagaggcttgcacagatcaaggttcaatttttttttgacaataatgatgtataaatggtgttgtatgtaaccgtcaggaggcacataatgtctgattctctctctttatgtggtaatagcaaccattgatgatcattgcctagatctgttatttcgatagtggtatacattagaattctaattgggttagaaaagtggaggctggaaagaatgattatgactagtctgtaccttttgagcaagcaaaccaatcaacatacatttttttaatgcaataaaaatcttytattttaatttttaaaaaaattttgtgtgcatgtagtgggtggatatatttatgggatatatgggatgttttgatacaggcgtgtagtgcgtaatgatcacatggatgatggggtatccatccccttaagcttttatcctttgtgttacaatccaattatactcatttagttattttaaaatgtacaatccaatctacattttgttaggtattttgtcttttgccactttatagctttattgaaacttctattaaaggga

SEQ ID NO: 773511 - DNA, 653 bp, Homo sapiens
tagagatctaattactttttttttttttttttgagacggagtcttgctttattgcccaggctggagtgcagtggcacaatcctggctcactgcaacctccgcctcccaggttcaagtgattctcctgcctcagcctcccaagtagctgggattacaggtgcacagtaccacgcccagctaatttttktatttttagtagagacggggtatcgtcatgttggccaggctggtctcgaactcctgaccttaggtgatccgcccacctcagcctcccaaagtgctggaattacaggcgtgagccactgcgcccagccataattacaattttaaatgacacacggtgatcaatttgcaaactccaggctgtggtaaactacaaaacaactaggcttctttaacaaactgcaaaggggggtaaaaacaggagaaacctatggcttaaaagatacttgagaggcatactaaccactgaggtgtatagaccttgtttgaatcctgatacgaataaatttttaaaaatttctcagaattatttgaacatttgctggatattttatgtcattaagaaattttcctgatattttacaggataatatttatataaagtttatatatgaaaaagagtaaacagaaaaatatacacataaagtaac

SEQ ID NO: 773512 - DNA, 638 bp, Homo sapiens
ccataacacttcctatatgcaaagagagcaaaataaaggcaaatactacattttcaaagttatttgcctcagtagcatcagcatttggttccagctgtaatcctcagccccctcccatgatggtaatcaaaggcttgcactttgctggaaattcctgccctgcaataggagtgttcttcaccctctacatctgacaactgccctccacagttcacaaatactgacggcgcactaaaccataagctctttaggaacaggaactctgacatatatgtatttataccccggagagtaatcaaattgtactacatatactcctggtgctgatgaggaccagtaatgagacagatagaatgtatscagagacatctgttggtgctaagaagggctcaggcaggtaataggcatcctaaccatttaggacaaagtaaaggacaaataaatctccaattttagtcatttattttcttccgctagctttcaggttgatgtgttctttcctagttcctttaggtacaaagttagattgttaatttgaaacctttctaaacctttctaacttcttgatgaaagtgtcttggggctacatgctttcctcttaacactgctttggctgcatcccagagattttggtaagt

SEQ ID NO: 773513 - DNA, 615 bp, Homo sapiens
caaacaccttaagttagctacaagaatgagccaagaagcaaagcactgtgatcaggatttaatcatggttaatataatgggttaagttctataaaattttttaaaaatgaaatatagttgttaaaatatagtcataggttrtataaaatcttaaaatagaaagttcccttctccctaacgaagaatgaataaaagaatgagaaaatttaagttgtctggttctaaactaggtctctatttgtagaaaggagaagtgtgtttctgggattttctcccacttgtacaaatattgttattgtccgaacatccacaataaattaaaattggggattgatttttttcagtgaggacaaagaaaggcagaataaaacattgagaaggttttaaaaagcaaaactatattttaaatatctgttcctgaattaaacagttaaatatttttaatacaatcagaagaaagtaaagaatttttgttcatttttttactattcccattttatagatgaaaatgttttgttttattcctaagcactgattaaaatcattatcaagaaaaaatctgacatcactaaaataaacttatttaaatttaaaaggataaagcaaacaagcaaa

SEQ ID NO: 773514 - DNA, 615 bp, Homo sapiens
caaacaccttaagttagctacaagaatgagccaagaagcaaagcactgtgatcaggatttaatcatggttaatataatgggttaagttctataaaattttttaaaaatgaaatatagttgttaaaatatagtcataggttatataaaatcttaaaatagaaagttcccttctccctaacgaagaatgaataaaagaatgagaaaatttaagttgtctggttctaaactaggtctctatttgtagaaaggagaagtgtgtttctgggattttctcccacttgtacaaatattgttattgtccgaacatccacaataaattaaaattggggattgatttttttcagtgaggacaaagaaaggcagaataaaacattgagaaggttttaaaaagcaaaactrtattttaaatatctgttcctgaattaaacagttaaatatttttaatacaatcagaagaaagtaaagaatttttgttcatttttttactattcccattttatagatgaaaatgttttgttttattcctaagcactgattaaaatcattatcaagaaaaaatctgacatcactaaaataaacttatttaaatttaaaaggataaagcaaacaagcaaa

SEQ ID NO: 773515 - DNA, 617 bp, Homo sapiens
acagttcatcccaactttctaaagaaaatggtgtcagccctcagttacactatagcaatttcttcccatggtctttttagcaacgaaccctcaagccatcagcaaccgaagtccccaagaagtcctagggcagcctggcttcaggctacaagttcaggtccctgattacacatttatttttctgggttcctattcactaaacatgagaaatggggtgggagatggcattttccattatggcctcagcacagtctccccacccacaaattcttctgcagtgtgctttgccacttgcctgtccatgggcactctctccaaccccatgaatctgagccctaggactgctttgaccagtagaatacagtggaagtggtcctatgcctgtccttggcacagcctttaaagggcctagaaacgtccacttccagtatcgaagcccatgccttcccataaggasagagaggccatgtggcaggataccaggtgactgctactgcatgaggcccaaggagaaccactcagctgagcccagtccacccaaggaattgtgaaacataataacaaattgcaggtttaagtcactaaattatgggaaaattttctgtataccaatagat

SEQ ID NO: 773516 - DNA, 584 bp, Homo sapiens
agatctccagaacaaatgagtttaccgatttaatgcattttattttgggaagagggaaaaagataagagaactacattgtttgctcacattcccaggtagaacagtttcacctgggagccacgagtctctagatttcaggagaacctggctccagagaccaggcagggctttagggatagctggttcttaggtcatggtgattttatttgtaggactttgtacttacragaaatccaaagagctaggcagaagagctgccttttctattctgaacccatggtagcactgtatccagatggttctggttatgaccacaagtcactccttccagttttgaaagtacaaccagctgtcagctccatcaaggtctgaggaactgccacccacctgtggccgtgtgctctagggatggtggccaagcctctggtgaaagggctacccacctgcacctgccagctttgcctctcaccatttccgccctgcatggctgaagcagaagtccccacagcctcctgcccagctgccaggcttctcggcacctttcctagaggtcaggatcctacttggccagccctcgtgggca

SEQ ID NO: 773517 - DNA, 584 bp, Homo sapiens
agatctccagaacaaatgagtttaccgatttaatgcattttattttgggaagagggaaaaagataagagaactacattgtttgctcacattcccaggtagaacagtttcacctgggagccacgagtctctagatttcaggagaacctggctccagagaccaggcagggctttagggatagctggttcttaggtcatggtgattttatttgtaggactttgtacttacgagaaatccaaagagctaggcagaagagctgccttttctattctgaacccatggtagcactgtatccagatggttctggttatgaccacaagtcactccttccagttttgaaagyacaaccagctgtcagctccatcaaggtctgaggaactgccacccacctgtggccgtgtgctctagggatggtggccaagcctctggtgaaagggctacccacctgcacctgccagctttgcctctcaccatttccgccctgcatggctgaagcagaagtccccacagcctcctgcccagctgccaggcttctcggcacctttcctagaggtcaggatcctacttggccagccctcgtgggca

SEQ ID NO: 773518 - DNA, 584 bp, Homo sapiens
agatctccagaacaaatgagtttaccgatttaatgcattttattttgggaagagggaaaaagataagagaactacattgtttgctcacattcccaggtagaacagtttcacctgggagccacgagtctctagatttcaggagaacctggctccagagaccaggcagggctttagggatagctggttcttaggtcatggtgattttatttgtaggactttgtacttacgagaaatccaaagagctaggcagaagagctgccttttctattctgaacccatggtagcactgtatccagatggttctggttatgaccacaagtcactccttccagttttgaaagtacaaccagctgtcagctccatcaaggtctgaggaactgccacccamctgtggccgtgtgctctagggatggtggccaagcctctggtgaaagggctacccacctgcacctgccagctttgcctctcaccatttccgccctgcatggctgaagcagaagtccccacagcctcctgcccagctgccaggcttctcggcacctttcctagaggtcaggatcctacttggccagccctcgtgggca

SEQ ID NO: 773519 - DNA, 637 bp, Homo sapiens
tacattatgcagataggacgagaaatctttcccttactgagaagttgagagaagagtgagggagagggggtaaggggaaagaagttgagaaagagatatatagagatacttggaaagataaatgggaaagggttggagacagccccaaagagagaacattatgggagagaaaatgagagagagggagtggtagaaggagaatgaagagagatagggaatgagaaggtgaaaatctttgtcactaaatgccatgaacagcaaatctcttcaaaactaaagtgcttctgaatctcaattattgrcatggcaatttaatgcaatatttaccacaataaggtcacaacaggagaaaaaactgagcagtcctttgatgtttgaatttaagttactatgtgctcatcatgaatttttaaattcctaagaatttcacagagcagaattgggagtgacaaaggaaacaatctccattcagtttctgagactaaatgatcaggaaagtccagctgtgtcaagacagaagccccatacacacaaatcgcctgtcaaaagaagtgggcaccaggcccctgcccagcttcttttcagttccacttcctgtgccaggggtgctctgtgctggagctgttcctcctacctt

SEQ ID NO: 773520 - DNA, 579 bp, Homo sapiens
tctggctctgtgtggttggcccattgacaataacttatctccaaaaagttgcatagccatttcttcttaattgcatatgttgcgctgtagggtgatatagaagatattaaaatatgagtaacagatggatactggctaatggagcttcagatctcatatattttcttattgttttctatttatttatgaacctattgctgtaaaataaaaccttttttttttcagggcagcaccagcttcagacttttttccccaagcctycttatttcggtttcttcttgctatattactctatgatggaagcacttctgtgctctgtgctccatgtgatgtttggtttttgttattagtggatgaaagttaatgatacacaaccagactgggacactttgaaggtaacagcaatatctgtgtatagatggggttgtgggttttgttatttatctgctattgctgtagtacctttgtcttgagcgataaaagagaagtaaaatactaaagaactgaactgtccatttctggccatgagtaaagatgctgcctgtcaaacttcctgttcatacattagtttatttatag

SEQ ID NO: 773521 - DNA, 637 bp, Homo sapiens
aaacaaagtctctcatcaggcaggacattctaaggtcttagaggtgacttcccaggaacttggcaaaggcaagtcctttgcttggcaagggccaggttcatccttcactgcaattctcctcatacctggagttctctggtggcggctttttaccccagcttctccccttcttgtcttgtgcatcctctgcagagctgccatattcaccctcccaaagtttgctcatcctgacatcccactgaaccttcagtgactctgccttcctttggatgaagtctcrtctctttctcatgttaacattccctacaatctgtgtgtcatctacttttcccatctgttagctgtctggagtgcctcttttgagctctccatgctcttgcatgtgagtgatcttgcaggtagtcatcgtggcacatgctgctgctagccgatgctggctgcctccacacactcctgatgccaccctccctgctccttggcctgccacctggaatccaccctcctgtttacttccttgtcttcctccagggacttgagcatgaggccagatttctgtctgtgattctcatggcattgcagtccagatttttacctttgtggaattgctttttttcacctatctcattcagtttgcact

SEQ ID NO: 773522 - DNA, 600 bp, Homo sapiens
tctgggagttgcaaagactgtgggaaaagcgtagtatctgggctggcaagcactgtctgtcatggcaccgtccttcaaggcttcctttgggtaggggagggagttccccaacccctttcacttcctggttgaggcaatgccctaccctgcttctgcttgccctccgtgggctgcacccactctctaaccagtcccagtgagatgaaccgggtacctccgttggaaatgaagaaatcaccyaccttctgtgttggtctcgctgggagctgcatattggagctgttcctatttggccatcttgcccaggaatcctgtattcttttttttttaatagaaagaaagtggcatacaaatttttattgttgtgcatatgaacacaagagccatatacaaagtcttatatacatgagagtttaaggaggggccagatggttgatgattaaatattcttacctttcggagattctagttaactatcttagctcttatagaaaactcatagcaatgaatatttatttattcacaaatgtctgcatgggtgaaggccatacatactatcaagagcctaaagtcagtaggggctttattccaatttagaac

SEQ ID NO: 773523 - DNA, 537 bp, Homo sapiens
gtataagtctttgtgtgggcagacatgctttcatttctcttggatgaatacctaggaatgagatggctgaacatatgctaagggtatatctgacttcttaagatactctcaaactgttttccaaagtagttgaactactttacattcctatcagcaatgtatgatactttcagttcttccacaaacttgttaacacttggaatcatcagatttttaactttagccattccactaggtgtatagtagtatctcattattttttaaatttgcatttgcttaaggacaactgatgaacactttttgtgtgtgcatatttgccactcrtatatcttctttggtgaagtgtctcttcaaacctttggtttattttttactgagttttttttaattgagtttggagctttctttgttattctggaaagaagtcctttaccaaatatatgatttgtaatattttctccaaatttgtgacttatgtttccattctgttaacagtgcctttcagaaaatagaagttttacattctaataaagccca

SEQ ID NO: 773524 - DNA, 588 bp, Homo sapiens
ggctgcaaatttctcaaactttttttgctctgcttcctcttgaatgctttgccgcttagaaatttcttctgccagataccctaaatcatctctctcaagttcaaagttctgcaggtctctaggacaggggcaaaatctcaccagtctctttgcatagcaaaactgacctttaatccagtacccawaaagttcctcatctccatctgataccaccttagcctgaactttattgtccatatcactgcccacattttggtcaaagccatttaacaactctctaggaagttctaaactttcccatttttcctatcttcttctgagccctccaaattgttgcaatttctgcctgttacccagctccaaagttgcttccatattttaaggtatcctcgtagtaatgccccagtcccagtaccaatttactgtattagtccatttttattcttcatagccgttctgctacaaagaaatacttgagactggataatttataaaggaaatatgtttaattgactcactgttctgcagggctggggaggcctcaggaaacttacaatcatggtggaaggggaagaaaacatgtccttc

SEQ ID NO: 773525 - DNA, 589 bp, Homo sapiens
tttatccaattacagaagaatgcatattcttctcctcagcatgtaattctcaagcatagatcatacgttaggctgcaaaacaagttttaaaaaattcaaaaaaattcaaattatttcaagtatcttctttgaccacaatggaataaaactacaaatcaataacaagaaaaatgttgggagctatacaaacagttgaaaactaaacaatatgtctccaaataaccagtgggttaatgaagaaattaagaaggaaattgaaaattttcacgaagcaaatgctaatggaacacaacatgcaaaaacctatgggacacagggaaagttttactaagaggaaggttcatggcaataagtgtctacatcaaaaaagtagaaaaatttcaaatcaacaacctaatgatacattttaaaaaattaraaaagcaagaatgaagtgtacccaaaatcagtaggagaaaaaaataataaataataaattttatttatcagaaataaatgaaatttaaatgaagaaaacaacccaaaagatcaacagaatgaaaaattgggtttttaaaatgataaacaaaatctacaaacctttagccag

SEQ ID NO: 773526 - DNA, 610 bp, Homo sapiens
ttcaggcagaggaactgactttattttatttctagctttcttttcaagggtatttcttctttcttttttttttttttttttttttttttttttgagacggagtctgtctctgtcacccaggctggagtgcagcggcaatatctccgcttactgcaagctccgcctcccgggttcacgccattctcctgcctcagcctcccgagtagctgggactataggcgtccgccaccacgccaggcaaatttatttatttattttttgtatttttagtagagacggggtttcaccgtattagccaggatggtctcgatctccasacctcgtgatccgcccgcctcggcctctcaaagtgctgggattacaggcgtgagccactgtgcctggccttcaagtgtatttctatagcagtcagcctaggaagatggagataatgcatgtctggagtagaaggtattttgctgtccagagtaatggagacaataacacattgaaggcaacgtttgagcaggtttgccaacagttcctttataacactaaggcttttctaactcaaggtaccttggttgtgacacaagttaattgtgtgtagacagcttcctccaggaccatt

SEQ ID NO: 773527 - DNA, 480 bp, Homo sapiens
ataacacattgaaggcaacgtttgagcaggtttgccaacagttcctttataacactaaggcttttctaactcaaggtaccttggttgtgacacaagttaattgtgtgtagacagcttcctccaggaccattctgtattgctccccgcaggacttggggaaagatgagccaatgtgaatgaagctcatgcttcttgctatgccatgaagaataaagtcctgtgtctccaactccagaatcttcttccagaatatataaaacggtggtgggctaaatggtgacctttcaaataaggtaagatatcamacactttacagaaactgggtaaaatgcagatttctctagagcagagagaatatatgttgatatttccttgattttcagatacgacaaggagttaaaccttgaatatttaaaaacagtaattgtcagacaaaaagccttttaacaacggcaaaaaaaatgaatcttccaagtaaaa

SEQ ID NO: 773528 - DNA, 640 bp, Homo sapiens
aggctgtacaggaagcatagcagcttctgtttctggggaggtctcaagaagcttccaatcatgatggaaagcgaagagggaacagatacttttttttttgaactttgatgttaagacttattaaaactgtattgatttcattatggcaggcgtcactcatataggtgtgttcatttgccaggcttctgtggatttctgagagagtggaggaggaacatatataatcaccacaagctccatggctgaccagcacaggcattagggtgagaagaaaaagggcagtactaacttttatgttcattaagtattcacttggggaagccgaagctggcggatcacctgaggtcaggaattccaaactagcctggccarcatggtgaaaccctgtgtctactaaaaatacaaaaattagctgagcgtggtggcacatgcctgtaatcccagctacttggatggctgaggcaggagaattgcttgaacctggaaggcagagattgcagtgaggggagattgcaccactgcactccagaacatctgtgaaccagtggtatagtaaagatagcagtgtaggtggggtgtgtgttgtgacagtaagacagacaaaaagacagagatagaaagacagaccaaccctgggaag

SEQ ID NO: 773529 - DNA, 640 bp, Homo sapiens
aggctgtacaggaagcatagcagcttctgtttctggggaggtctcaagaagcttccaatcatgatggaaagcgaagagggaacagatacttttttttttgaactttgatgttaagacttattaaaactgtattgatttcattatggcaggcgtcactcatataggtgtgttcatttgccaggcttctgtggatttctgagagagtggaggaggaacatatataatcaccacaagctccatggctgaccagcacaggcattagggtgagaagaaaaagggcagtactaacttttatgttcattaagtattcacttggggaagccgaagctggcggatcacctgaggtcaggaattccaaactagcctggccagcatggtgaaaccctgtgtctactaaaaatacaaaaattagctgagcgtggtggcacatgcctgtaatcccagctacttggatggctgaggcaggagaattgcttgmacctggaaggcagagattgcagtgaggggagattgcaccactgcactccagaacatctgtgaaccagtggtatagtaaagatagcagtgtaggtggggtgtgtgttgtgacagtaagacagacaaaaagacagagatagaaagacagaccaaccctgggaag

SEQ ID NO: 773530 - DNA, 505 bp, Homo sapiens
acttgtacccatcacatgtagggaacagcagtttcatagtgagaaagaatctcaaattttgtattcattgactgtagctacctcaattatagtaaagcctatggacaactggagatagataattacaaagggtttgtatttacaaatagagttccaatacttaaagatcagtgtttaataggaactactttgaaagaaactgccacaagtggatatacgctaaattatccacaaaactaccagatggctaaagatgtttcaattttattttacagaatatgaagtataaaactccaaatggcacagycaaatttagaaggaaagagaatacatattcaagcctttaaagaaatgctcagtcagttttatagtaccttgaaattgatcttactcaaacggatgaactgaatgtgaaaaaattctaatcaaaattataaatagttcatattaataatattgaattccaaaccagtttctccaccaaaaaatattgaatctaactaaa

SEQ ID NO: 773531 - DNA, 630 bp, Homo sapiens
ttactttcttttcctattccaggcattgaaatcttaaaaaaagataaattagtgtctgcttggcatagaatttagcatctggcttccaaaaaatatttaataattgctcagtaagtgtttgtagaatagaagaatggaggtgattttcaatgacaagaaataactactgcaayaatatcagtaattgttgacgtgtatacacagacaaaacagtaattatatcacacacaaaaaacagattaactatatatcatttatatataaagttggtttaattttaatgtccaagccctcagtagagggacttagcaaaattaattgcccaagtgatatatattgattatgtacctgtgtttttttctcctagtcattttgcacatgaatcaggttttgttgcagcctctgtggtttattttttttaagcacatataattaaaaaaatttttttattatactttaagttctgggatacatgtgcagaagatacaggtttgttacataggtgtacacatgccatggtggtttgcttcacccatcaacccgtcatctacattaggtatttctcctaatgctatccctcccctagcctctcacccaccaacaggccctggtgtgtgatgttcccctctc

SEQ ID NO: 773532 - DNA, 630 bp, Homo sapiens
ttactttcttttcctattccaggcattgaaatcttaaaaaaagataaattagtgtctgcttggcatagaatttagcatctggcttccaaaaaatatttaataattgctcagtaagtgtttgtagaatagaagaatggaggtgattttcaatgacaagaaataactactgcaataatatcagtaattgttgacgtgtatacacagacaaaacagtaattatatcacacacaaaaaacagattaactatatatcatttwtatataaagttggtttaattttaatgtccaagccctcagtagagggacttagcaaaattaattgcccaagtgatatatattgattatgtacctgtgtttttttctcctagtcattttgcacatgaatcaggttttgttgcagcctctgtggtttattttttttaagcacatataattaaaaaaatttttttattatactttaagttctgggatacatgtgcagaagatacaggtttgttacataggtgtacacatgccatggtggtttgcttcacccatcaacccgtcatctacattaggtatttctcctaatgctatccctcccctagcctctcacccaccaacaggccctggtgtgtgatgttcccctctc

SEQ ID NO: 773533 - DNA, 633 bp, Homo sapiens
ctacattaggtatttctcctaatgctattcctctagccccgcaccccctgacaggccccagtgtgtgatgtggccctccctgtgtccatgtgctctcgttgttcagctcccacttatgtgagaacatgcagtgtttggttttctgttcctgtgttagtttgctgagaatgatggtttccagcttcatccatgtccctgcaaaggacatgaactcatcctttttatggctgcatagcagtccatggtgtatatgtgccacattttgtttttccagtctatcattgatgggcatttgggttgattccaagtctctgctattgtgaacagtgctgcaataaacatacgtgtgcatgtgtctttacagcagaatgatttataatcctttgggtatatacccagtaatgggattgctgggtcaaatggtattgctagttctagatccttgtgcatatcctacaactcagtaatgccattcctaaaccagagaaattcatrcacatctataccagaaagcacataggagaatattcatagaagcattgttcatttaaaaaaatggagaaaagaaacatttgcgggtgacccagcactcaggggaatggataaatggcacccaggtacttcagctcaaag

SEQ ID NO: 773534 - DNA, 615 bp, Homo sapiens
atattttcctaattaattattctaattaagcaatatttactattttgcagatatgtcctaattgtactaattaatccaatgataatttaattattaatttcttaattaccttaatgatccaattattattacttgaagatgttggtcaataaatttttatttgtcctttttagaaaatgtacatgaaaaatattactcctgatatgcaaattattttttcacagataagtttttgcaatcttttcgtgttgaaggtatgtatttatacatatgcaattatagctgcaaaaaaatcatttcttttaactgctgtatagaattccatattatgaataagtcacatcaattgtctactttcgatgctcatttagrttaccttcatttgtcccttctattttgttatttttaagcactgttgtaatgattaactttctatagttttcttgagcatgaatgcaaaaaccatgctaggatatatgcctatatttagaactgcttttaaaagttttatgagacaaacattgacttatgagacaaatctccaaaatggttctatccatttatatttctacggtaacatatagcattcccatttctctgctttcttgccaacac

SEQ ID NO: 773535 - DNA, 588 bp, Homo sapiens
tacctgctaaggtttgaatggtggtgtccccttcaaaattcatgttgaaacttaacctccaattcaacagtattaacagctgtaacctttgggaggtgattaagtcacctcaaccgtcacaagtgggattagcaccattataaaagggatccaagataawgagagcaatgttgaggacacagcattcattccctccagaggatgcagcaatatggcgctatcatggaagcagaaagcagccctcaccagacatgcagcctttcagcaccttgatcttagatttcccagcttccaggactgtaagaaataaatttctattatttatagattatccagtgtgtggtactttgttacagcagcacaaagatagcacctaacaacaaagcccaaaaatgcgtgaagtaaaaactgattgatggaattgaatagagaaacaggcaattcaacaatcacagttggagataaaaataacccacttttcaataacagataaagcaactagactgaacatcaacaaggaaacagaagacttgaacaatattactgtgaagtaaaagcacaaactgcatttcttctgttctcataata

SEQ ID NO: 773536 - DNA, 588 bp, Homo sapiens
tacctgctaaggtttgaatggtggtgtccccttcaaaattcatgttgaaacttaacctccaattcaacagtattaacagctgtaacctttgggaggtgattaagtcacctcaaccgtcacaagtgggattagcaccattataaaagggatccaagataatgagagcaatgttgaggacacagcattcattccctccagaggatgcagcaatatggcgctatcatggaagcagaaagcagscctcaccagacatgcagcctttcagcaccttgatcttagatttcccagcttccaggactgtaagaaataaatttctattatttatagattatccagtgtgtggtactttgttacagcagcacaaagatagcacctaacaacaaagcccaaaaatgcgtgaagtaaaaactgattgatggaattgaatagagaaacaggcaattcaacaatcacagttggagataaaaataacccacttttcaataacagataaagcaactagactgaacatcaacaaggaaacagaagacttgaacaatattactgtgaagtaaaagcacaaactgcatttcttctgttctcataata

SEQ ID NO: 773537 - DNA, 594 bp, Homo sapiens
actttgttacagcagcacaaagatagcacctaacaacaaagcccaaaaatgcgtgaagtaaaaactgattgatggaattgaatagagaaacaggcaattcaacaatcacagttggagataaaaataacccacttttcaataacagataaagcaactagactgaacatcaacaaggaaacagaagacttgaacaatattactgtgaagtaaaagcacaaactgcatttcttctgttctcataatacaatgtatgaagttttttcccccacacagcaagaaagcaatcagttckgcagcagacaccagctgggtgtccttcagttcaatactgacactatctacctggagatagcatcagatcccacaatttgaggcctcagttttacaagacagccccccacttctgatgccaatcataaaccccaggttgtttttgatctgtgcttctgaccaactagctataaatcagggttatcacaatttcctccttgggtttcattagtttgctaaagtggtttacagaactcagggaaacactttcatttaccaattggttataaaggatattataaaggataaagatgaagagatgca

SEQ ID NO: 773538 - DNA, 594 bp, Homo sapiens
actttgttacagcagcacaaagatagcacctaacaacaaagcccaaaaatgcgtgaagtaaaaactgattgatggaattgaatagagaaacaggcaattcaacaatcacagttggagataaaaataacccacttttcaataacagataaagcaactagactgaacatcaacaaggaaacagaagacttgaacaatattactgtgaagtaaaagcacaaactgcatttcttctgttctcataatacaatgtatgaagttttttcccccacacagcaagaaagcaatcagttctgcagcagacaccagctgggtgtccttcagttcaatactgacactrtctacctggagatagcatcagatcccacaatttgaggcctcagttttacaagacagccccccacttctgatgccaatcataaaccccaggttgtttttgatctgtgcttctgaccaactagctataaatcagggttatcacaatttcctccttgggtttcattagtttgctaaagtggtttacagaactcagggaaacactttcatttaccaattggttataaaggatattataaaggataaagatgaagagatgca

SEQ ID NO: 773539 - DNA, 616 bp, Homo sapiens
aagttttttcccccacacagcaagaaagcaatcagttctgcagcagacaccagctgggtgtccttcagttcaatactgacactatctacctggagatagcatcagatcccacaatttgaggcctcagttttacaagacagccccccacttctgatgccaatcataaaccccaggttgtttttgatctgtgcttctgaccaactagctataaatcagggttatcacaatttcctccttgggtttcattagtttgctaaagtggtttacagaactcagggaaacactttcatttaccaattggttataaaggatattataaaggataaagatgaagagatgcatagggtgaggtatagaaaagggtgtggagtttccatgccctcccccrgtatgccactctccaggaacctccatatgttcagctgtctggaagctcctcgtactctgtcctcctgcctcttttatggagacttcattagaaaggcacaattgaagcacagacaaccaggtagaaatgtgattgaacaaaaagttatgatctaatactaacagactaagtgggcaaacccaggcaggtctatgtgttcagattcttcttggcctctctgtgcatcat

SEQ ID NO: 773540 - DNA, 619 bp, Homo sapiens
ctgagtgatcgaccagaaaggtggtggaaagactttctcagctccttcagctctggtgacctggccacacagactcgtgatccctccaccacccacacactagtcaggagccccgcagccaagtcctggggctgtgggaggagccggcccctgtctggagctgacggtctttcatgctcctgcccaccccttgggcaggtgcccaccgagcaggcagacttaaccagccttggtggtgcctttgtggtgcatatcctccaggtggggaagggtggagatcgttaataaatatccagaacttgtttgagacttgaaaagaaatgttgcaggcccactcttgtctggtctataccccttgcttcctggacttggcagaggttaaggatggggcctggagcgtgattgagggaaacagcactggccccatatcagtgagctctygggtgcttcatgtggttgttagacttgccttttaatgagcctcttggcccctaccagtgggctacggaagaaataaaatgtgaaattttaccatgtgaagtttgctgtttgccaatgactgtgcttctcaaaagttcctagggaaaggttttaaaactggtgcaggtagtgaagtttg

SEQ ID NO: 773541 - DNA, 680 bp, Homo sapiens
gagaagcccagtggaccagtgcggccccccagccctcaggcagagccaggacgcttcacacaagagtcactcattggattttctactccacgcacacgctgtcaataatggcaggcgccacctaaaggggcaggtgccagtgtaatttaacaggggagaaaaagtacagaggccacccaggaggatgctggaaagacagagggtggggagtgggaagaaacactcaggacccgcggcaccagggcgtgggactagaacgaaaagcaagaagaccatgtgaggggcaggggaggaaggactggccggatgccatcagttatcatcaatatgaagggaatgagcccaaggtaactctgaaatcctaaacttggatttggaagcactgaatctgagctgagggtggccctcagtaaggcactgtggccctaccrctctggttcccccagtcgttctctgccctagtttgtaatctacaaagtgatcagaagctcataaaacatgggcacgagcactacagttgaccagcactgggcggggaaggtgatcctgggaaacctgcatgggactgtgcacaccaaccacaccaaccagaagcagccaacacacacaaccgcaagggccaactcaacatggtaatcaacatctaaagctgcacaatttgatggaggaaaactccactt

SEQ ID NO: 773542 - DNA, 627 bp, Homo sapiens
ttgaaaagattaacagaatagatagactgctagccagactaataaagaagaaaagagagaagaatcaaatagacacaataaaaaatgataaaggggatatcaccactgaacccacagaaatacagactacgtcagagaatactataaacacccttatgcaaataaactagaaaacctagaagaaatggataaattcctggacatatacatcctcccaagactaaaccaggaagaagtcaaatccctaaatagacctgaaattgaggcagtacttaatagcctacaaaccaaaaaaaagcccaggaacagatggattcacagtcaaattctgccagagttagaaagaggagctggtggctgggtgcggtggctcacgtctgtaatcccagcactttgggaggccgaggcgggcagaacacgaggtcaggagatcgagaccatcctggttaacacggtgaaatcccrtctctttttggtatttttaataccaaaaaattagccaggcatggtggcgggtgcctgtaatcccagctactcgtgaggctgaggcaggagaatggtgtgaacccaggaggcagagcttgcagtcagccgagattgtgccactacactccagcatgggggaca

SEQ ID NO: 773543 - DNA, 473 bp, Homo sapiens
aatattgttatgtgtgaatttgatcccgtcatcatgatgctagccagttattttgcagacttgtttatgtggttgcttcatagtgtcactggtctgtgtactttagtgtatttttgtaatggataatatagtttttcctttccatatttagtgcttctttcaggagctcttgcaaggcagaccttgtggtgatgaatttcctcagtgtttgtttgtctgaaaaggatcttatttctcctttgcttatgaagcttaatttggctggtaatgaaattctgggttggaaattcttttctttaagaatgttgaatattggcctccaatctcttctggcttctagggtttctgctgagaggtctgctgttagtttgatrggcttccctttgtaggtgacctggcctttctctctggttgcccttaacattttttccttcatttgacctcacagaatctgatgattatgtgtcttgggg

SEQ ID NO: 773544 - DNA, 628 bp, Homo sapiens
attcacaaaatatcttagaattgaaaaaattttaagatgataaatattaacttttagtcatttaacttaattccattgtcattttttattccatttcactgaaaagtgagatgccagtctaattattgctcttttgaagtaattttttttcctatggtgatttccaagattttcctgttttcctttggtttttaacagttttacatgctttgcctaagcatagttttcttttggttaatgttgctttgaatatgtatagacttttctcaatctgtgattgatgtctttcattagttttggaaatttcttggctattatctcttcaaatattattattattgttatcattagggacagagtctcacactgttgtgagagtgctggagtgcagtggtatgatcagarttcactgcagcctccaactcctgggctcaagtaatcctcctgcctcagcctcccaagtagctaggactacaggcacacaaccacacccacctaatttttttctttcttcttatttatttatttattttattttttttggagagacagggtctttctttgttgccctggctggtctctcactcctggtctcaagcaatcctccccatttggcctctcaaaatgt

SEQ ID NO: 773545 - DNA, 556 bp, Homo sapiens
gatttctgtccggagagcagatatttaagacatctgaacttgggctgcacaactgaagttttttttttgttttttgcaaatcgaactctttgccatcctttgtcctactgcaaaccttacgtgaactcagtggcacagctgagtgtgctctgttcaatccaagggcgtgttattttaatacacacacatctgcaagtgtagataagaataccctgtcatcggcaggatcacatctgctaaggcaaacctaaaggaccttgggcaaacgttgtgaggcccaagaaaggtgccgagtgtccaccgtctgtccccagctgagtctrcccagagcccagccgtggttcaaaagccctggaagggctgcagagaggaatgcaaatctggcacaatctgtcctgaactatttctccctggagaggacacggcaagctactggttcaaccgggcaccccgggtagctcttgcccggtgccttttcactgggtactctgagagctccaaacccactaaggatccaccaatgctggaaaagtgatccctcaataccccggctccc

SEQ ID NO: 773546 - DNA, 619 bp, Homo sapiens
tttcttgtgatttttctgtttaaaatggccccgaaacacattgctgaggtgctgtctatttagtgaaagaagttgttgacgaaaagagtcaaactctgtaaaatattttaagagatttattctgagccaaatatgagtgaccatggcccatgacacagctctcaggaggtcctgagaacatgtgccaaggtggttggggtatagcttggttttatatacttttrggaggcatgagacatgaatcaaaacatttaagaaatacattggtttggttcagaaaggtgggacaactcaaagtgggggcttccaggctataggtaaatttaaacattttctggttgacaatttgttgagtttactggaagacctgggatcaatagaaaagaaatgttcaggttaagataaaggattgtggagaccaagttttgttgtgcagaggaagctctcagatagcagactttagagacagcagattgtaaaatgtttcttattggacttaaaagcgtgcctgactcttggttgattatctcctggatttggaaaggaaggaaggaaaacaaaggggattctctatagaatgtagattttcccacaagacactttgcagggcaagtttaag

SEQ ID NO: 773547 - DNA, 619 bp, Homo sapiens
tttcttgtgatttttctgtttaaaatggccccgaaacacattgctgaggtgctgtctatttagtgaaagaagttgttgacgaaaagagtcaaactctgtaaaatattttaagagatttattctgagccaaatatgagtgaccatggcccatgacacagctctcaggaggtcctgagaacatgtgccaaggtggttggggtatagcttggttttatatacttttgggaggcatgagacatgaatcaaaacatttaagaaatacattggtttggttcagaaaggtgggacaactcaaagygggggcttccaggctataggtaaatttaaacattttctggttgacaatttgttgagtttactggaagacctgggatcaatagaaaagaaatgttcaggttaagataaaggattgtggagaccaagttttgttgtgcagaggaagctctcagatagcagactttagagacagcagattgtaaaatgtttcttattggacttaaaagcgtgcctgactcttggttgattatctcctggatttggaaaggaaggaaggaaaacaaaggggattctctatagaatgtagattttcccacaagacactttgcagggcaagtttaag

SEQ ID NO: 773548 - DNA, 602 bp, Homo sapiens
ggtcccacctcttaacactatcacaatggcaatcaaattttaacatgagttttggagtggactttcaaaccgtagtaatagccaagcagatacgacaattatgaacctgtttttgagataaataataactagttctcaagtaagacgacttgtcacacatcatttatcctaactttatcatggtaattgagggaccacctatgttggttttatccagaggagaaacaagtttcttatctctttccaacaggacatagttttgcaaggcactaartactcactaaagttaggctagtaggggaggaaaaaaaataatgttctctaaactgggacttcctataacaaaagatagattaacaagagaaatacagacagaagcttattaaaatgtatacctcacatacacatgggagaaaacccagagaaatcagtaaatctctggagtatatctcaaagaaagcatttaaatttcaggcttagatgccatctttctctggaaggaaagatgtggaggagggcctggtttagatgaaatgacctgggaaagcatcttaaacaaaggtaaggtttgttttgcagatttaagtagataccttctccat

SEQ ID NO: 773549 - DNA, 613 bp, Homo sapiens
aagaagttgagctgtgatgcagtcttgacgatagccccagccaatctcataggaggctctgaagttgttccaaattagtgtatgggcctgaacctttataaacccacatagaccagttattcatgcaggttgtcctagaaagggggcatgactttggagaaggggctctttttaggtagacaattgtattgtgtgataagggctgagggcttgctgtcagcagcacccccaggagctggatagcacatcacagtgtccgtaagagcacccaataaggtgtatggttgaacacatgaactcagtgagatctaaaaacagagtggatgcagtgaggttcatgacatgcaagacagaaagacaaggagaaccaggtcagtgaatcctcatgcccaaagtcctccattttcttgtttatccattttcctattatagacaaagccctgtctgggtactataagggatctaacatcacagacaatgtccctgacctcaaggaagagaatgaaacmtaggcacaaacatccatggtacaaagcattgtgatataatttacatgtatagcacaaatgggtgcttatagaggggaaagagaagggagagcccttcccgcaga

SEQ ID NO: 773550 - DNA, 393 bp, Homo sapiens
aaaatatctagaccacaaagttcataagccatcaaaaaactgaagaaaacttatacaacataatattcttaacataaatgagtttttataaataaataaggaattatagagtataaatatggacacattgtatgaataaggaattcataaatgaaatgcaaatgatcaagacatacgtaaaaagctactcaaactcattaatggccaaataattctragtcagcattcaacaatatttttcacttagaggaatgtcaagggtgaaaaaaaagtggataatttgtaaggatagttagtgtttaaggaaacaagtacttggctatatattttaatgaggttataaattttcacaacctttctggaggtagcccattgttatgcattagagcaatc

SEQ ID NO: 773551 - DNA, 605 bp, Homo sapiens
tctgcttatcataagctacaaatataataatagtaacaggaagagtgctagactcaattaagtttaaggcatggcctacacctgtgaagagctgaaaacacagtggaagaattggccaagtggtcaagttgttactttgtaagtttctttgttagcactgatggtcactaatgtttgctgcatattgccttgtgatcacacccaggacctcaccattttggaccatgcagcaaaagtctgctggcctaggctctggagcaatggtggatatgcacagtcaaccgggtgacaattgtcacaatgagtttggtgggaaggttactsacaacagaaaagagtaagatcctgcaataattaccccagtcagttttctttacattaggagataaaattctatgagggtgaattcaaggcatcaagtaatccatatatgatttattgtgcatgtgtgaacataactattttgtgcttaaaggaaatatgaagcatgatttcaagatgaataaattagatgaacacagtttttatcagtgattatctaatagtcactatattttaggtaatttgaagcaacacttttaaaacagcagcagtataactatatg

SEQ ID NO: 773552 - DNA, 576 bp, Homo sapiens
tagacatcaggaatgatggaaatagaatttccacagcaacttacatgtcaaaggattgtaggtttagattcagaatttttagttgaatgtgtactggcctctgaagcttaaaaaacatgggctgagtaatgggtggaaaaggatgcccattaattcagctttcaaaatgaaaatgtaaacatgctgaccctagtcgaagcacccagccctcgccagcacacctcactgaccttctccagtcggtagatgagctgcttggtggagagctggatgagaggtgcgacgaactcacaggtgatgttcacagccatcaccaagctcttccccttctgtgccccgatgatggcgtggsacaccagcttctctttcactatctgccagtgagataagccagcatttggggaacaactataacttaatacttactcagaatacttatttacccactgagagaaaatggatttccgactacctgcctggggacacaaggaagagcacacttttctgaacagcacgtttcagggactgctctttgtcacatgattatgtttttgttagttacacatggccttgatg

SEQ ID NO: 773553 - DNA, 622 bp, Homo sapiens
ttataaaaaacacatactgtttataaagactaggcaggatgtctgttacttattcacagtatatctttcaatcatcacagcaatccagtcatgataagtatatttactaccattttatagatcaagaaatggaagctctgaaaacctaagggagttgtctaaaaatatgcaattagaagcggcagcgtatggctatttctttagaccagacgttggcaaactttttctttaaagggctaaataacaaatattttaggcttttkgggccacacggtctctgtaacagctactcaactttcccttgtagtgtgaaagcagccatagacaatatgttaagaaatgggcatggctgtgttccaataaaactttatttacaaaagcaggcagagggttgtagtttacccagccctgcttttgacaattcttctggagactgcaggcatagtgattttatgtcaaaaagtttaggcagagggcaaattagcaactaaagctacagtttgcttttatattcatagaaaactgttagctaaccctccaattccatatgtcagaatatcctttgaaggctacttgacactatttgtagatttaaaagaacatgtaattaggtctggtttgc

SEQ ID NO: 773554 - DNA, 578 bp, Homo sapiens
ctcaatagtaataagggatatacaaattaaaactacataagatatcatttcatgttcagactggcaagaacttgagttggaccatactaagttttagccactacataaatagatacctcaaacactcctggaagggcacattgatataatcactttggagagtaatttggcaacatctaatgaggttgaaaatgtacctatctgaagagtcaacaaattccactcctagatatactccctatttgtataccacccaaaaactcttgcctatgtacacaaggagacaagtattctgttcactgcagcattgttataataacccaattgtcaccaagtrggcaaagaaataaacataataaatggtaaatggagtatccacagcaattaaaatgaaataactagatttataggcattaacatggatagatgttggaaacgtaattttgagcctgaaaaataagttgcagaatgtcacatacagtgatatgatttatatacattttagaagcaacaacatgccacaatatagtatttatgaatgcatataatatatattatgtaataaatataaaaacatg

SEQ ID NO: 773555 - DNA, 446 bp, Homo sapiens
agaacgcaaataaaatttttaaaatgctactatataactctgggaaccatttctcagagcctctgctgctggggaggacgacagagcatgcaggtgtcacctgcctggggtacgccacagtctctctgcatctggtctggcctaacatggcccagtctaactcctccctgtgccrcagtgctccgccgagccttatgacagcctgaggtcggactgatctctttacctaggttttggtatcttgtttattatggattttttggaattaattttgatttcttacaatatgtaatggaaatactaagcatcttgagtgtttggcttccccttaaattttgtgcccaaggcaagtgcctcatcctatgcccagtcctgctgtgcagaaacaacttcccctgaccccagatgcacactccactctgagttcttgaaatgatcatgcactg

SEQ ID NO: 773556 - DNA, 583 bp, Homo sapiens
taaaatgctactatataactctgggaaccatttctcagagcctctgctgctggggaggacgacagagcatgcaggtgtcacctgcctggggtacgccacagtctctctgcatctggtctggcctaacatggcccagtctaactcctccctgtgccacagtgctccgccgagccttatgacagcctgaggtcggactgatctctttacctaggttttggtatcttgtttattatggattttttggaattaattttgatttcttacaatatgtaatggaaatactaagcatcttgagtgtttggcttccccttaaattttgtgcccaaggcaagtgcctcatcctatgcccagtcctgctgtgcagaaacaacttcccctgaccccagatgcacactccactctgagttcttgaaatgatcatgcactgtgcagggctggccyggcctgctgtggagcatctgagtgttagaccttgtctcctgtcaccctaacccttggcttctagttctgtctcagagaaacccatagaaccattctatttctctgttacgtaacagccccgtgacttgtgaaaggtagctgt

SEQ ID NO: 773557 - DNA, 559 bp, Homo sapiens
cttttccaaatataaaggaaaaataaagtgaagatgaagtcattgatttggaaagaaacagagaatcctagtgtgactgtaaccccttgtttatgtatctgggctgtggctagaaggaagaacaagtggttttggcagaaggctgctagcaagacgctgtgtcttttaaaatcttcctgagatatctgggaagcaacaacaacaacaaacaacaacagcaaaagaaaagagggaagacagttaagggtgaaataattccactggtggcactgtgaggcgataaccaaggcaaagcactatcctgattgcaracaaaacatggaaggatgagtattcctcaggatgaggaagctgaattctcatggcttttcctgcagaactcaagataaggcgctgttagtgatatcacatccacatccaccatgaatgaagcctggattcggattacaaagctgaataaaccagatatcatctttggcataagtgtggctatttattggtatctaaaggatctgagtctgaaggaaagataaacctaagtatcaataagttgtgaaat

SEQ ID NO: 773558 - DNA, 642 bp, Homo sapiens
cttttgatgctttatttgaacaactctgtccccaaatcccagacaggttatcatattttgcaataacttctctgtccacattattcaatggccgagttcaataaatgcttggaggttttcaaactccttattctcattcaacacatccttgtatctcctgaaaaatagtgggtttgcagatatttacctgggcctttagtgtatcagctagcatgccagttgttacttggtccgtttattctttaacccatccaaggattcatctatgcctcaatgttccttcaaggacaatcaccacccaattctattatctgactctctcatgctactgcagctgtagtcaacagaactaattatttctgggtaggtcatccaacatccaatcctaccatcaaaaatctttatagccatagaaattctrgaaaccaacatatagtactattacccaccacccatctatcacaacatcatcaattccaacagtccctgatgcaaaatccatatcttcaccaccaagcaaataaatgccacatctccaacactaatctgtaacagactcctttttaggaatggaacttaagtgtcaatacagggataatactgtcaactttagttagcttaatgtattccccactatattag

SEQ ID NO: 773559 - DNA, 638 bp, Homo sapiens
tgggagcaaggacatgcttcatttatttttttatttttgagaggctactttcataattaaagtgatgaacttttgaaaatgtacttggccactactgaagatgatacacttaatttttcattggtttaagcatttatttaaccgtttttctctttcttcggcatcttcctatctcttaatattgagcctctgcttataacttgtttrttgattcatttactcaatcagagagtcagtcagaaaacatttgataagtgattattgtgagccacatattgaggaatcagcactataaaagtgaacaagacgtgacccttgtcctcaggctagtggagaaagcagacatgtaccaaagtggacatgtggccatgctgggctctgtgggtgggaggcctgtgcccagagaagtcagaaaaggctacattgaggagccacagttaaatattccagatggagaggcaggaagacattctgagtaacaggaatagcatgtatctattagttagaattcatgggttcactctatggcaagtcattgaaaacctgaccctaagcaaaaattaaaggaaaggaaattcattggttttcacgactcaaaattccagattcgctttggcttctggcctggcttaaagcaa

SEQ ID NO: 773560 - DNA, 607 bp, Homo sapiens
ttggcctcttgtatatcttctttgagaaatgtctgcttaaacgctttgtccatttttaaattgaattatttattgagttataattgtccaataatttattgtcccttatcagatatatgagttgcacatactttctcccattgtgaaggttgtcttttcactttcttgacagtatcccctttsaagcacaaacttttttacattctgatgaagtctaatttatttattttttctttggttgcttgtgcttagatgctgattatctgaaaactattgcttatttggtttttggatatggatatttaaccctattttttttgtttgtttgtttttgagacagagtctcactctgtcacccaggctgcagtgcagtggcacaatctccgctcactgcaatctccgcctcctgggttcaagtgattctcctgcctcagcctctcaagtagctggaattacaggcatgcatcaccatgcccagttaatttttttgtatttttagtagagacagggtttcaccatgttggccaggctggtctcgaactcctggcctcaggtaatctgcctgcctcagcctcccaaagtgctgagattacaggcatgagccacc

SEQ ID NO: 773561 - DNA, 613 bp, Homo sapiens
gtcttcaccgagccccctctgctgagttccaagtctgttgccttcttgacgtctcctcttggacatcccttggatgcctcccaggtgatttatgcctagcgtgttccacataagctctgttccctccctgctcacccccagactctcctccagggcaccctgtcccagtaaatgacatcactgctctcctgggaggcattaggatttcttcctctctctaaccccacccaccctatcaaatccaccaccaacttctacctattctgccttctgaaaacctcattcccatttccactgctgtyaccctggctcaagccaccattgcctgttactgtggtcacagccctacctgggctttctgcttccacgcatgcaccacagctcctactcccctcagtagccatgccactgccctggcgttaagcctttagtaactacctgtgcttcttggaataaagtacagagcactcactctattctgcaaggctcagcatgtgctggtccctgcgttcctctccagatttgctctgtgcttctggcactgacctttctgtttacccaacacaccggcctctgtcctgcccagtgctgttcctgtccaactgcccccttc

SEQ ID NO: 773562 - DNA, 613 bp, Homo sapiens
gtcttcaccgagccccctctgctgagttccaagtctgttgccttcttgacgtctcctcttggacatcccttggatgcctcccaggtgatttatgcctagcgtgttccacataagctctgttccctccctgctcacccccagactctcctccagggcaccctgtcccagtaaatgacatcactgctctcctgggaggcattaggatttcttcctctctctaaccccacccaccctatcaaatccaccaccaacttctacctattctgccttctgaaaacctcattcccatttccactgctgttaccctggctcaagccaccattgcctgttactgtggtcacagccctacctgggctttctgcttccacrcatgcaccacagctcctactcccctcagtagccatgccactgccctggcgttaagcctttagtaactacctgtgcttcttggaataaagtacagagcactcactctattctgcaaggctcagcatgtgctggtccctgcgttcctctccagatttgctctgtgcttctggcactgacctttctgtttacccaacacaccggcctctgtcctgcccagtgctgttcctgtccaactgcccccttc

SEQ ID NO: 773563 - DNA, 531 bp, Homo sapiens
tctccctctgctccctccggaagctgcagggaaaatcccctgcctttgctgaattccagagctttgttcctttcactgtttgcattcctagtctctggcccttccaccaccttcaaagctgactgcataccatccccttctcccctctctggaggaacatggccctctgcctccctcatataagggcacctgtggttagatcactgggctgactcatatactccaggataatcaccccttctccagatcctcaacttaatcacatctgcaaagtcccttttgccatataaggtaacattcacaggttccagggattcaaacatggacatcttgaggctgtcccttatccaacctattcagagcctcyaacattactggcattgagttcttgtgctccctttactctctttaaaaatggatcctctattaatgaccatatcattagaagctttggttgtaagcaacggtaatcctgactcaaacttacaaaaaaaaaaaagaaaagaaaaccagaatttgttggttcatgca

SEQ ID NO: 773564 - DNA, 400 bp, Homo sapiens
aaatcacttcagaacagacatgctgagtgaaagaaagtgtaaaggagtccttctttctccttcttcccagccccattagttcctgggcttcctccaaggaaccctcacatctgtagctagggctgagttagctgatgcctaattactatttaagaattacattaartcacaaagcaatgttgaaatttctacacttaagtgtaatgtattatactatattactgagctcaggctgccgtaacaaaatatcatagagtgtgtgacttaaacaagagatatttatttctcagttctggagactggtagcctgagatcacagtgccagcatagtcaagttctgatgaaggctatcctcctgacttgtagacagccaccttctcaccatgtgatcgtatagcaa

SEQ ID NO: 773565 - DNA, 645 bp, Homo sapiens
ccctcatttgaattccaaaaatgatggtaatcctcaccaaccccacacaagagcagctcacattcattggacatttgctatgaccctggcaccatggggctcattatgtgaactatggctcacagcaatcagatgcggagggttctcttactaacacagcccccaggccccatagtgcacaagtggggaagccggaattcaaacccaagccctctgaccccacagccatgctcagaacccctgtgcactgcctggctccctgctggaacacttstaccctaaagcacagccactcctgtggctctgactctgatccactggcctcttagctccttgaagcaagggttgggtttctcatctttagaatcctacaacactgtagtggattccctaggagagccggagagtgtggttcttgaggtgatttattgagggagggctctcaggagaactataagaaactaagggaagcaagatagggccagaagaaaactaggggaagatgtgatttcagaagtctcacctctgcctgatcccgtggggagctttggagtgtaaattacatcacagtttgtcccactcagagacaaggaggctgggctctcatagctgccacccctatcagtcactccttcctataagtca

SEQ ID NO: 773566 - DNA, 486 bp, Homo sapiens
aagaggcaaaaattagttcttggagggtggtggaaaatatcttaaatattacaatggtttgcggcccccaaagagccacagaacataaacagatacatggtatgtttaaagcattacatttttcctgggaagggcgtggraagggtaagcaaatcggtatatccacaccatggaatactcagcagtaaaagggaatgaattattgaggtgcataacttgaatggattacaagggcattatgtggaatgaaaaaagccaatctcaaaaggcgatgtgctgtatgattccatttatataacattcttgaaataacaaaaggctcaagatggagaacagatgagtggctgccagaggtaagggacagggagagaggggtggatgtggttataacctgggcacatgtaaggccaaacacaaatggaaaatgaggcttagttctccttgttgaaaataagggaagagacttctcttcctccccttagagta

SEQ ID NO: 773567 - DNA, 577 bp, Homo sapiens
gctttaggagccagaagtgtctttctcaaggacctgggaaccatctctttgacacgtaatcaacaagaaaggtgaagtccctactcccagtttctgtgagaggatgggagcctagcttccatggggccctgctagaaagacaagtttgtttttcctttggataaagccaattagctaacacagttggtcacctcaattaccatgtcgatttaggataaactatgtgtgrcaaatgatggtgtcaagtcctcttacttgagactagctattttttactctgagaacaggaatgaaaaggcttggatctggttggctctataggaggggcagacttccttctgtctttgcaatctctcagcagattgcctgtgatgggcatcacattctggtttaatgcttattcaataataaaattgttttctttctcttctacctttgtggatagattttctgggttggagggagattttgtttttaattttatttcctcaagaagcacgaggaatcttggtggtaatggaatagttctggatcttaattgcggtggtgggttcacaaatctacatgtgataaaatt

SEQ ID NO: 773568 - DNA, 603 bp, Homo sapiens
gctttaggagccagaagtgtctttctcaaggacctgggaaccatctctttgacacgtaatcaacaagaaaggtgaagtccctactcccagtttctgtgagaggatgggagcctagcttccatggggccctgctagaaagacaagtttgtttttcctttggataaagccaattagctaacacagttggtcacctcaattaccatgtcgatttaggataaactatgtgtggcaaatgatggtgtcaagtcctcttacttgagactagctaytttttactctgagaacaggaatgaaaaggcttggatctggttggctctataggaggggcagacttccttctgtctttgcaatctctcagcagattgcctgtgatgggcatcacattctggtttaatgcttattcaataataaaattgttttctttctcttctacctttgtggatagattttctgggttggagggagattttgtttttaattttatttcctcaagaagcacgaggaatcttggtggtaatggaatagttctggatcttaattgcggtggtgggttcacaaatctacatgtgataaaattgcacagaactacaccacacacataca

SEQ ID NO: 773569 - DNA, 603 bp, Homo sapiens
gctttaggagccagaagtgtctttctcaaggacctgggaaccatctctttgacacgtaatcaacaagaaaggtgaagtccctactcccagtttctgtgagaggatgggagcctagcttccatggggccctgctagaaagacaagtttgtttttcctttggataaagccaattagctaacacagttggtcacctcaattaccatgtcgatttaggataaactatgtgtggcaaatgatggtgtcaagtcctcttacttgagactagctattttttactctgagaacaggaatgaaaaggcttggatctggttggctctataggaggggcagacttccttctgyctttgcaatctctcagcagattgcctgtgatgggcatcacattctggtttaatgcttattcaataataaaattgttttctttctcttctacctttgtggatagattttctgggttggagggagattttgtttttaattttatttcctcaagaagcacgaggaatcttggtggtaatggaatagttctggatcttaattgcggtggtgggttcacaaatctacatgtgataaaattgcacagaactacaccacacacataca

SEQ ID NO: 773570 - DNA, 457 bp, Homo sapiens
atggggccctgctagaaagacaagtttgtttttcctttggataaagccaattagctaacacagttggtcacctcaattaccatgtcgatttaggataaactatgtgtggcaaatgatggtgtcaagtcctcttacttgagactagctattttttactctgagaacaggaatgaaaaggcttggatctggttggctctataggaggggcagacttccttctgtctttgcaatctctcagcagattgcctgtgatgggcatcacattctggtttaatrcttattcaataataaaattgttttctttctcttctacctttgtggatagattttctgggttggagggagattttgtttttaattttatttcctcaagaagcacgaggaatcttggtggtaatggaatagttctggatcttaattgcggtggtgggttcacaaatctacatgtgataaaatt

SEQ ID NO: 773571 - DNA, 537 bp, Homo sapiens
tctcacaaagattctctgaatttcttgaacttacatgtcaacttctttcgcaaaattggggaaattgttgtggattgtatcctcagatatgttttccaagttgcttactctctcttctctctcagacatgccagtgagtcacacgtatagtctctagagggtttgtctatttttaaattattcttttttatttgtttttgtctgactgagttgatttggaagactgatcttcaagctctgaaattcttycctcagcttggtctaatctgttattaagactttcagctgtattttgaaatttctatagtgaaattttcaattccagaagttgagtttggttcttacttaaaatggctctgttgtctttcgatacttggatcattttttgagttttcttggattgggttttaattttctcttgaatctcgttgagctttcttggccatccatattctgaattctatgtcagttgtttcagacatttcaatctggttaggatccattgctggagagatagtgcaatcctttagaggtaag

SEQ ID NO: 773572 - DNA, 611 bp, Homo sapiens
ttaggagggactggtggacaaggcagcgtgtggatcagatgtgccctgctcctgcaggaaagacagccttgctctctcctggcccaacagtcagcaggagctacagtcactcagagcaagatagagagccttctgggataaatgcctgaagtcacgtttagttgctgctgcaccacgtgccaccttgaaaccttcagggttctatgcaggttcaatctctgcctctgtctggtctctgagaagttcctcctgccaattcaaatgtctgtgggggtaatgggatctcttgtctctaggatcccagagggttgtatttggggtgtggtgccttggagttcctttactcaccccttccttaggacctgttgagggccaggagctggtcttggtgctcggtgactccatgcaggcttcccagtttcctccctctttagccacaatgtctgtcacctccctatcratttttggtgttttctctcaaaatattttttcaaagtataatggtttactctacattttggtttctgttagtgagggaggcctttcccagctgcatctagtcagccatcttctagatctttttcttgattctgacactttgacctaattta

SEQ ID NO: 773573 - DNA, 592 bp, Homo sapiens
ctctgcttgtcagtccactatgttctgctttcttctctcagttcacaagggcagcattttgtgcctagtcaccacccaactgaatttgttttgagaaaaggcgaagggatgatggtcatgcataggagaggtgaactcagtgtctcatttgttcccatctaccaagaactgggtgtatgagagctattgtccaataaccaagagaagatgattttgatagtttaaggtgtttccccaggcccttttcacaaaatagatcttcaggccccaagatttctccctgatattcaacagaatcaaaaaatgattgattagtgaaaaagatattcagcattatccttggcattagacattggaawtgaatacacatagaaaactaagaaatgaaagctctccgataagatgctacatgagaaattcatctcataatgtagacctaactaaattttatttgatggagaattggtatgctttcttctgttaggtaagaaccatgtaatccactgtttctcttcctgtactgccttgtaggaagcctactgataagcccacttatttttgaggaagagaacatctcatctttgtattatta

SEQ ID NO: 773574 - DNA, 632 bp, Homo sapiens
taatggtggacgtccctccccccatcaagctcaagtgtcccaggttgacttcagactgctgtgctgtcagggagaatttcgagctactggatcttagcctgctgttctgaatgtgtgtggcatccactgagctagaccactggtctccctggcttcagcaccctttccaggggagtaaatggttctgtctcactgtgcattccaggcaccactggggtatgaaaaaaactcctgcagctgagctgagtgtctgcccaaacagcgcctagttttctgcttggaacccagggccctggtggtgtggtggtgtaggcactgagggaacctcctaatctgtgggttgtgaagaccatgggaaaagtgtagtatctgggccagaatgcaccgttcctcttgggacagtccctcatggcttctctcagctaggggagggagttccctaaccccttgtgcttcacaggtgaggtgatgcctcacmctacttcagctcatcctctgtgggctacacccattgtctaaccagtccctatgagatgagcagggtacctcagttcaaaatgcagaaatcacctgccttctgcgttgatcttgctggaagccacagaccagagctgtttctatttggccatctt

SEQ ID NO: 773575 - DNA, 546 bp, Homo sapiens
ggttttaatgtatatcttcctaattgctaatgagattgaatatgatttcattatttattgaccatttggattttcttctctgaagttcctatccaagtctcttgctcatgtttttataaagttttgtctttaaaaaaaamacaaaaaacagaagttctccaatgagaacacatggacacatcggggggaacaacacacactcgggcctgttgggggactggcggtgggggagaatgtcaggagaaatagctaagggatgctggacttaatacccgggtgatgggttgatctgtgcagcaaaccaccacggcacactttgacctatgtaacaaacctacacatcctgcacatataccttgaaacttaagataaaagttgaagaaaaaaaagagacaaagaagacaacataaagcacagaaagtatcttaaaacacagaatttatctttgttttttccttccttaggtagataacttatggggtataagaaccttcttagtcttttatcagtactccaaagaaatcctgtttttcaaaaatagtagaa

SEQ ID NO: 773576 - DNA, 546 bp, Homo sapiens
ggttttaatgtatatcttcctaattgctaatgagattgaatatgatttcattatttattgaccatttggattttcttctctgaagttcctatccaagtctcttgctcatgtttttataaagttttgtctttaaaaaaaacacaaaaaacagaagttctccaatgaraacacatggacacatcggggggaacaacacacactcgggcctgttgggggactggcggtgggggagaatgtcaggagaaatagctaagggatgctggacttaatacccgggtgatgggttgatctgtgcagcaaaccaccacggcacactttgacctatgtaacaaacctacacatcctgcacatataccttgaaacttaagataaaagttgaagaaaaaaaagagacaaagaagacaacataaagcacagaaagtatcttaaaacacagaatttatctttgttttttccttccttaggtagataacttatggggtataagaaccttcttagtcttttatcagtactccaaagaaatcctgtttttcaaaaatagtagaa

SEQ ID NO: 773577 - DNA, 546 bp, Homo sapiens
ggttttaatgtatatcttcctaattgctaatgagattgaatatgatttcattatttattgaccatttggattttcttctctgaagttcctatccaagtctcttgctcatgtttttataaagttttgtctttaaaaaaaacacaaaaaacagaagttctccaatgagaacacatggacacatcggggggaacaacacacactygggcctgttgggggactggcggtgggggagaatgtcaggagaaatagctaagggatgctggacttaatacccgggtgatgggttgatctgtgcagcaaaccaccacggcacactttgacctatgtaacaaacctacacatcctgcacatataccttgaaacttaagataaaagttgaagaaaaaaaagagacaaagaagacaacataaagcacagaaagtatcttaaaacacagaatttatctttgttttttccttccttaggtagataacttatggggtataagaaccttcttagtcttttatcagtactccaaagaaatcctgtttttcaaaaatagtagaa

SEQ ID NO: 773578 - DNA, 546 bp, Homo sapiens
ggttttaatgtatatcttcctaattgctaatgagattgaatatgatttcattatttattgaccatttggattttcttctctgaagttcctatccaagtctcttgctcatgtttttataaagttttgtctttaaaaaaaacacaaaaaacagaagttctccaatgagaacacatggacacatcggggggaacaacacacactcgggcctgttgggggactggcggtgggggaraatgtcaggagaaatagctaagggatgctggacttaatacccgggtgatgggttgatctgtgcagcaaaccaccacggcacactttgacctatgtaacaaacctacacatcctgcacatataccttgaaacttaagataaaagttgaagaaaaaaaagagacaaagaagacaacataaagcacagaaagtatcttaaaacacagaatttatctttgttttttccttccttaggtagataacttatggggtataagaaccttcttagtcttttatcagtactccaaagaaatcctgtttttcaaaaatagtagaa

SEQ ID NO: 773579 - DNA, 633 bp, Homo sapiens
aggctggtctgtttcctaaaaccagaaggaagttttcacatttggttaaataaggaaagcatgtgttacataaaagtaaattctatgtagttttcattttttatgtataatccttcaattctataacaaagataatgaacgttttttagatttattagattgttcataactgaggaaacaatcagtgaacttcaagattgtcaatagaaattatacagattaaaaatagctgaaaaacacaaaaatataaaaaagtagaaaaaagatacaaaaaaacagaagacagcatccaagaactgtgggacaattttcaatggactaatgcatatgtaatcaaaattccagaagtccagagaaagaatgtggtaaaagactatttcagaaaatgatggatgacagtttctaaaagttaatgaaggctataacaccacagatccaaaaatcccaaagaatttatgagatgataaaagaaaataacaaccacamaaaaactaaaacaaactgaaataataaagtaacaaagataaaatgaatgttttttttttaaaaaaaacttttattttagatacagggcatacatgtgcaggtttgttacatgagtatattgctcacaggtaataagtgtagtaccaa

SEQ ID NO: 773580 - DNA, 597 bp, Homo sapiens
aggatccctggaactgggaagaccaaggttgcagtgagctaccattgcaccactgcattccagccaaggtgacaaagtaagaccctgtctcaaaacaaaacaaaacaaaggaaagaaaagaaaaaaggggaaaaaaaactgtcagccaaaaacattatacacagcaaagctattctacagaaatgaagcaaaaataaaagttttccagacaacaaaaagctgagagatttcacaccactagccaggccttacaagaaatgcttacagtgtgattcaagcagaagtgaaaaaataataatagttgccataaaaacaaaagagtatgaaactccctggtagaggtgaacatataatcaaattcagataactccattactgaatgktagtatattaatcttccagatctctattatgaagagtaaacctcagagtggtcaataataactacagttacaatatattgttaagaaacacacaatatataatgatgtaatatagactacaacaaaataacacatcatctttcttacacggtgaagctaaacattgggtatacaatgaaataaagatggcaaaaatagacactggggactacta

SEQ ID NO: 773581 - DNA, 645 bp, Homo sapiens
tcatattcagaaagagtagtaaccaattcaaaattctgctcggctcccctaatcactgataccatcagctcttccctcgacatgtcctactagttcttttagttgatctctaccagattaaactagatcttgattagcaaggataggcacagaattcatggaggaggaraatgaatcattgacagcaagtctttgaatctagaagcagactggattctgaacagatacataaaggaagaaattaggagacactgaataggtctcttttatctttctgaggataactcttcatctgcctacctagtagttccctttctcttcctttccattcataatcccaacgaatgaataccagagtttcctatgctatcatccttggttatcacaaagcttaatttcacgttaagacttttattcattaaaataatcaatggttttttcacttaaaatttctttctgaaatctgtaccatggcctttaaaatgtcagttttgtttcattttctatttttaaaaaatgaaaaataggagacaaaatttttgtgcatttaacaccttatctttaatcacagaatacgtttgcaaagattgtgaattgtctttgtaaggaaaaatgatttaataccttttccttgggcacacaagc

SEQ ID NO: 773582 - DNA, 603 bp, Homo sapiens
tggagatctatgtgcaaagatacctcttcaaacttcaggcagtttacaaaatagtcttagcttttacttgcagttttcgcaacactttcaagccaactagaggtgagtgagtggtgccttttcctttcccaggtcttatatgggtgagaatacaacttaacggccaggcatggtggctcacgcctgtaatcccagaactttgggaggctgaggcaggtggattcaagaggtcaggagatcgaggccatcctggttaacatggtgataccccatctctactaaaaatacaaaaaattagccgggcgtagtggcgggcgcctgtagtcccagctattcaggargctgaggcaggagaatggcgtgaacctgggaggcggagcttgcggtgagccaagatcgggccactgcactccagcctgggcaacagagcgagactctgtctggaaaaaaaaaaaaaaaaacttaacctgggatccccagaaatatgtcagagattttcagggttccctattgtcatcaggatttccttttaaatttctgcacagattcttgttttcctcaaatgaaatcacagccttatgcaggtaaatttgctatgatttc

SEQ ID NO: 773583 - DNA, 593 bp, Homo sapiens
cattagtggttcttctaattctgaacaagaatatgtctgtctcagctagtgccctacatcaatcattacttagaaatgtcattctcatcaccatgtcagcaagtaatatactttttgcaattgctatgtaaccagcactctggtgtttttcaagtattaactgatttaatactwacaatataaataccattatttctaaaaagttacttgaccgaagattcatagttagtagtgaatgtaggccttgaacttgggttaatgtgaccataaaagttttcagtcttagctcttaagttaatctgcacatatttcaatggtattctgctaaatatgtctattaatatgagtttgatactatcaatactaaattcaatacatttaaatctttttaaaattacttgtatttgcgccctcttttttcactttctctcactctcacttctcttttaaatgttttgaaaaacagagccattaaattcgtcagtatattctatattctcaactaaccatttgcattatgcttttaatttaatgtatttccacttaagtcaatgcatacaaaagtatgtcttagtaaagtcatgcaagcaaag

SEQ ID NO: 773584 - DNA, 613 bp, Homo sapiens
ggaaaatgaccagttgatagatcagtttaaacacatacaatatttatcaattaatttccccatcctatatggttgtggttcacaataccccaaaacatttacagtagtgacatgaaagatcactaaccacaagtcgccatgagaatataatattaatgagaagtgtgaaatggtgtgagaattaccaaaatgtgacacagagacatgaaatgagtacatggtgccattagacttgttcagctctaggttgccacaaatcatcaatttgcaaaaaatgcaatatctgcaaagtacactacagagcctaccaaaagcttcataaagcacctctataaaccactgacacttcaagaacgataagatctattggatcctttgggtcaagtggccaaagaggccactttggctcaagyggcccagcagtttgtatagcagtctggagatgttgcagagccttctcttggtctggggcacactcaaaactaacagttttttaggacattttgtaagtaggccagagtagtgcacccaaaagaggaatctgttgcctctgaaatccagaaaggtccatttgacatgataagttgtatgttagatgagatatctcatcatg

SEQ ID NO: 773585 - DNA, 596 bp, Homo sapiens
cttgaaattttcagtattatttgaaaaaggtctctgcattttcatttttttactggtataacaaattatgtatctggtcctacttgtttccatcttatttactctactatatttatcttttgtcttccctactaaaatggaatctccacaagagtagagattttgtctatgttgtttacaaagtagatagaggcattacaaacatgtttytttaattttccacatggcatcatcacttattcatatctgaataaaaccatacctttgagaataagcagcccatcctaaagaataaatattcatctaaagttatataatatttaagagaagtatcaaagaggacataaacattatctccaagattggccttgtacttccaaacttattaagtaaggtaaatgtcacagtgtgtcttgataaaataatgccaaccttttgcatttaatgtcaatatcagaattataatttcttggtgaataaatcccatctggaatttcataaacaagtcgctgatattttgttgaccttttcccagtcctccttcagatccatcttgtcacttcaatctctactttaacagaaaaaaaaaaaaaaaa

SEQ ID NO: 773586 - DNA, 596 bp, Homo sapiens
cttgaaattttcagtattatttgaaaaaggtctctgcattttcatttttttactggtataacaaattatgtatctggtcctacttgtttccatcttatttactctactatatttatcttttgtcttccctactaaaatggaatctccacaagagtagagattttgtctatgttgtttacaaagtagatagaggcattacaaacatgtttctttaattttccacatggcatcatcacttattcatatctgaataaaaccatacctttgagaataagcagcccatcctaaagaataaatattcatctaaagttatataatatttaagagaagtatcaaagaggacataaacattatytccaagattggccttgtacttccaaacttattaagtaaggtaaatgtcacagtgtgtcttgataaaataatgccaaccttttgcatttaatgtcaatatcagaattataatttcttggtgaataaatcccatctggaatttcataaacaagtcgctgatattttgttgaccttttcccagtcctccttcagatccatcttgtcacttcaatctctactttaacagaaaaaaaaaaaaaaaa

SEQ ID NO: 773587 - DNA, 586 bp, Homo sapiens
ctatgagtttaactattttatattcatcatataagtactatgatgcagtatttgttcttcagtgtatggcttggaatagtaccctctagttttgttcatgtcattgtaaatggtattatttttaaaaagctgaataatattccrttgtgtgtgcagacatgcacacatacatgcacaataaaatatatattgtgtgatatatatgtcatatatatataatctcacatttttgatccaattttccactgataaacatttgtgttgcttcaatgtctaggctattgtggacaatgcagtcatgaacatgggagtgtagacatcttttcaaattttaaacttcaattctttagaatatatatctagaacttggattgctggatcacataatagctctattttttattttttgaaggacttccatactatttttatagttgctgcactaatttatatattcaccaacagtatacaaaagttccattttctctctatcatcaccaacatttgctatcatttgctttttgataatatcaattttaacaggtgtaaggcattaactcattgtggttttggtttgcatttctgt

SEQ ID NO: 773588 - DNA, 586 bp, Homo sapiens
ctatgagtttaactattttatattcatcatataagtactatgatgcagtatttgttcttcagtgtatggcttggaatagtaccctctagttttgttcatgtcattgtaaatggtattatttttaaaaagctgaataatattccgttgtgtgtgcagacatgcacacatacatgcacaataaaatatatattgtgtgatatatatgtcatatatatataatctcacatttttgatccaattttccactgataaacatttgtgttgcttcaatgtctaggctattgtggacaatgcagtcatgaacatgggagtgtagacatcttttcaaattttaaacttcaattctttagaatatatatctagaacttggattgctggatcacataatagctctattttttattttttgaagracttccatactatttttatagttgctgcactaatttatatattcaccaacagtatacaaaagttccattttctctctatcatcaccaacatttgctatcatttgctttttgataatatcaattttaacaggtgtaaggcattaactcattgtggttttggtttgcatttctgt

SEQ ID NO: 773589 - DNA, 501 bp, Homo sapiens
cgacaacataacttaatctcagtttctttttagtaagtaaaagttgtcagaactgaaagtctaaattctgtataattcaatttatgtgacatttataaaagataaaaccactgggacagagaacaaaatagtggttgcagagkttgaaactgtgatgaggggctgactacaaagaaacagcacaaaatttctgtattgtgttggtagacacgcaactctctcgcaacccacaaaatggtacaccacaaagactgaattttgaagtaggtcaatataaaatctaaactaagaaaagatgtctgcaatatttttactcagatttcctgtcccagccttcgtacaggtgttgtgttaaacctcttttatttattgtttctggatgaggagtcttatgatagatgatacattacatatattcccaagaagaaaaattgggataaggaaaactaattaaaattgatgataccccctctgtgcacttgagtacaatattatacattt

SEQ ID NO: 773590 - DNA, 595 bp, Homo sapiens
agcacttcctgtgttgccaatcactggtatcctgagcaagtgaatgattgttgttttatatcactaagttttagggtagtaaaacactcagaaataaataaaaatagtaattaatgcagttgatacattttaaaattcatttacagctccatctttttcttatgcctctttccaaacaaatcagttgagataagagtattaatttattttaatggaggtgtttcactgttgctgagaaaaaaraatcctggcttgctgaatactgtcaccaccaattaaatatactgctactgcagagtagcccacttccttgtatcataaattggcaaagtttgacttaagtttatgatagataggactttgcatgagtggcactctatgaaaggcagatttattagtcaaaatgtacctcttaataaatgagagtatatatacaccagtgataaaacatttatcttgtggatagatgaagtatgatgtttgatgcacatacttttaaaagtttagttgagtttatctaaagataattgaagcttgcttttatctgctgactgagtacactttttatttcacatgacctagtgttccttggact

SEQ ID NO: 773591 - DNA, 595 bp, Homo sapiens
agcacttcctgtgttgccaatcactggtatcctgagcaagtgaatgattgttgttttatatcactaagttttagggtagtaaaacactcagaaataaataaaaatagtaattaatgcagttgatacattttaaaattcatttacagctccatctttttcttatgcctctttccaaacaaatcagttgagataagagtattaatttattttaatggaggtgtttcactgttgctgagaaaaaagaatcctggcttgctraatactgtcaccaccaattaaatatactgctactgcagagtagcccacttccttgtatcataaattggcaaagtttgacttaagtttatgatagataggactttgcatgagtggcactctatgaaaggcagatttattagtcaaaatgtacctcttaataaatgagagtatatatacaccagtgataaaacatttatcttgtggatagatgaagtatgatgtttgatgcacatacttttaaaagtttagttgagtttatctaaagataattgaagcttgcttttatctgctgactgagtacactttttatttcacatgacctagtgttccttggact

SEQ ID NO: 773592 - DNA, 567 bp, Homo sapiens
acccacttgagcattatgttttatcctttctatatttgctggattcaatctgcaaatatttttaaaacattttctgtgtttctgtttacaaaagatttgaggctatagcattttgtttctttttttcttttttttaaatatttataatgcttttagttttgttagcagggtatttctggctttayaaaatgaaatggaaattattattttcctatactttctggaagagttgctatagctgttgtaacatttttttcttaaatgtttagtagttcttaccagtaaaaacatctaatcatgaagtttttttgtggagaagttttcaattgcaaatttaatttatttaattaatgcattactttcagaattttacatttttttcttgtaatagtgtcagtgatttttgtcttttagggtgtttttacatttcatcttatgcattgaatttattaaaatgaggttgttcataatattattttatattttttaaggtttataggatgaaatgttcccactttcattccagatattgttgatgtgtgttttctcttaagctagctagagaat

SEQ ID NO: 773593 - DNA, 509 bp, Homo sapiens
ccactcatgggctaccccaggaataatagggactcctccctgagtctccccactcctgactccaggctttcctcccacagcaggtgacattcctaagtttgtatgcatgtgccagcacacatttatatatacaagtgcaatatgtacatagtaatgcacacacatattctcaaacctacacacatacacctcacacacatacataaacgtaacatatatacacctacacacacataaacagacacatgcggacttacacatggacatctatacagaaacacacacaygtaagcatacatgcacacacacaacacaggtgcacatgcacatacaatgtttgcaaacatatacagccacaggcatagacacacatatacacctggatacatatacaaacccatcacacatgcatacatatgctcattcacatactacaaatacatacaaaaaggcatacacatatatgcacacatgcacaacatacaaacacagagacatgcatgtaggca

SEQ ID NO: 773594 - DNA, 575 bp, Homo sapiens
atttgttctgtagggatcctgcaagtccttgtaatgcacaacagactttcgggactccttcatggtctgtctttcctgccagtctgttgagttccaggagggtagaaactacatgtgtcttctttctgttgtggcccttgcacctggtacagggctttatttattttttatttatttttttttgagacagagtcttgctctgttgccaaggctggactgcagtggcgcgatctcggctcactgcaagctccgcctcttgggytcacgccattctcctgcctcagcttcctgagtagctgggactacaggcacccgccaccacgcccggctaattttttttgaatttttagtagagacagggtttcactgtgttagccaggatggtctcgatcttctgaccttgtgatccgcccgcctcggcctcccaaagtgctgggattacaggcgtgagccaccgagcactaaatgaatgtataaatgctcgttgaaaaaaatagagaaatggatgattttgccgctgaaaacattttccccagatatttgttatttttgtttcatattctttatctgctatg

SEQ ID NO: 773595 - DNA, 575 bp, Homo sapiens
atttgttctgtagggatcctgcaagtccttgtaatgcacaacagactttcgggactccttcatggtctgtctttcctgccagtctgttgagttccaggagggtagaaactacatgtgtcttctttctgttgtggcccttgcacctggtacagggctttatttattttttatttatttttttttgagacagagtcttgctctgttgccaaggctggactgcagtggcgcgatctcggctcactgcaagctccgcctcttgggctcacgccattctcctgcctcagcttcctgagtagctgggactacaggcrcccgccaccacgcccggctaattttttttgaatttttagtagagacagggtttcactgtgttagccaggatggtctcgatcttctgaccttgtgatccgcccgcctcggcctcccaaagtgctgggattacaggcgtgagccaccgagcactaaatgaatgtataaatgctcgttgaaaaaaatagagaaatggatgattttgccgctgaaaacattttccccagatatttgttatttttgtttcatattctttatctgctatg

SEQ ID NO: 773596 - DNA, 575 bp, Homo sapiens
atttgttctgtagggatcctgcaagtccttgtaatgcacaacagactttcgggactccttcatggtctgtctttcctgccagtctgttgagttccaggagggtagaaactacatgtgtcttctttctgttgtggcccttgcacctggtacagggctttatttattttttatttatttttttttgagacagagtcttgctctgttgccaaggctggactgcagtggcgcgatctcggctcactgcaagctccgcctcttgggctcacgccattctcctgcctcagcttcctgagtagctgggactacaggcacccgccaccacgcccggctaattttttttgaatttttagtagagacagggtttcrctgtgttagccaggatggtctcgatcttctgaccttgtgatccgcccgcctcggcctcccaaagtgctgggattacaggcgtgagccaccgagcactaaatgaatgtataaatgctcgttgaaaaaaatagagaaatggatgattttgccgctgaaaacattttccccagatatttgttatttttgtttcatattctttatctgctatg

SEQ ID NO: 773597 - DNA, 575 bp, Homo sapiens
atttgttctgtagggatcctgcaagtccttgtaatgcacaacagactttcgggactccttcatggtctgtctttcctgccagtctgttgagttccaggagggtagaaactacatgtgtcttctttctgttgtggcccttgcacctggtacagggctttatttattttttatttatttttttttgagacagagtcttgctctgttgccaaggctggactgcagtggcgcgatctcggctcactgcaagctccgcctcttgggctcacgccattctcctgcctcagcttcctgagtagctgggactacaggcacccgccaccacgcccggctaattttttttgaatttttagtagagacagggtttcactgtgttagccaggatggtctcgatcttctgaccttgtgatccgcccgcctcggcctcscaaagtgctgggattacaggcgtgagccaccgagcactaaatgaatgtataaatgctcgttgaaaaaaatagagaaatggatgattttgccgctgaaaacattttccccagatatttgttatttttgtttcatattctttatctgctatg

SEQ ID NO: 773598 - DNA, 633 bp, Homo sapiens
gagaggccatgagtagggtgaccataagcactgatgtacaaggaagacttcaaagacgccttctttacagcacaggcaaggctcaccgtatgaggttcagcacacacaggtctgactccttttctatgccacagttagacaggatgccgtccactttgctgacagcttgctcttcattcatcaggtatcgatggtacagcttcttccaaggaatgaactatgcagttaaaaaacaaacaaaataacatgaggcaaagggccattagaaagcagattaatgaggcgggcagatcgcctgaggtcaggagtttgagactagcatggccaacatggygaagccccgtctctactgaaaaaaaatacaaaaattagccaggcatgatggcacatgcctgtagtcccagctactcaggaagctgaggcaggagaatcacttgaacctgggaggcggaggttgcagtgagccgagatcaagccactgcagtgcacgctagcctgggtgacagagtgagactccatctcaaaaaaaaaaaaagaaagaaaaaaagcagattaagccacaaacacatagataaccttttaccagtgaaaagcaatcacagctcacaattcaaaagccaggaaaatcaggca

SEQ ID NO: 773599 - DNA, 616 bp, Homo sapiens
  misc_feature 304, 305: n = A,T,C or G
tgcctccagtaactggtttacttatagggccagcttattaaacttacagtttacttatttatttttatttgtttgttttggtttttgttttgttattgttgttttttgaacttacagtataaaaaacagtaactcagacatttgaatcctgccccaccactaatcagcttcttgccttggccaatcccaacctgagtcagtacccttattcgtacaatggatttagtaacacctgctttatgcagtaattacaaaggttaaaaataatccatacctgttaaataactggccagtgcttggcaannatagaaatccccaaatagtttgaatctgtgtcacgagactctgacagcacagggcactgatgcacagaaagggtgtcattgtgtcactgaagaggtgtgattgatgggcggggyctggtgtttatttgcagcaccagagagggggcctcccaccgaggaaggaaatgccagaaataaaggggcaatgagggggcgtgagggtgaggacatgacccgcgtcaccagggcagtcgtgggctgaagcctttctgtatgtcctcctgccccccggtcacctgcagcgagtgagaccttccagggccacatgacat

SEQ ID NO: 773600 - DNA, 501 bp, Homo sapiens
ttccatgttggtcaggctgctctccaagtcccgacctcagctgatccacccatctcaccctcccagagtgctgggattacaggcaggagccacggtgcccagcctaatttttgtatttttagtagaggcagggtttcaccatgttggccaggctggtctcgaacttctggcctcaagtgmtccacctgcctcagcctcccagagtgctgggattacaggtgtgagccactgcgcctggccctccccttcattcctgttcccctccacaggttggggagcaatcttggaccacatggaaaagggcaacctactcaggacagcagaacaaccagcagaaggaaccggggggctgacacctggggctggttgagctcatctgtacttggctatgcccagactcttatgcgggaaagaaaataaactttggtttagtccactgttattttttggtctttatttagagacagggtctcactcagtcacctaggctggagtgcagtg

SEQ ID NO: 773601 - DNA, 675 bp, Homo sapiens
  misc_feature 664, 665, 666, 667, 668, 669, 670, 671, 672, 673, 674, 675: n = A,T,C or G
cttctgacacaatcatcccatacaataagccacctccaggggatggatcaaaagcagctccaagatgggcatttcgtgcaaagctggaggaaggcagccccaggctcagctgggggctggggagcacagtggagtcaggcagaaaggtcctgcccttgaccttccaaggtcctgggctcagagaagccaacagtggtcttatgccccacccaagggacaggcctctatggaaggcctaaggctgagagtgctgaccccttgaccttaatatatgtacatgtatatttaaacaaatgtattgaatggggaaatgtctagaaagagatatactttaaaatgttacccatagttctttctggatggtggtattggggctgattttaatttctttttatttatctgtatgtttcaatttttgtaccaggattatacattccstttgaagttttgattaataatagcaataataaagtaggaggtgctgaatcctgagagtggggaaggtaggagggaaagttccagggcccctaaaaggaacaaatgacagtcagcctgagagattccttaacagcagggaacatgtcactcctcttccagacagaattcttagaattcagagaggctgaggagttgggagtgtgcagcaaggcagaataatagaaannnnnnnnnnnn

SEQ ID NO: 773602 - DNA, 596 bp, Homo sapiens
ctttttttgagctgtctttttcagggttttatatcagggtcatctctgttaagtaaattagatagattttccatatttgtcaatgtttgaaattactgaaacatagtgattacgtattccttaagaattgaaagatttttttcctgtaaagttttctaggcctagacacattttttttcctggagggaaatctttcctttttttctaagttcttcagccgtgattggcatatgtaggtyttatacttctaattttgataatgtatatattttcagactattcatttcatctaggttttcagatttataatttataattttgcaaagtattgtcttatatttaaaatatctcctccttatctggtgctgaacctcccctttttatttctaattttattattcatagggtttttttttttcttctttagtttctctaatatttgtctactttattactttttaaaaaaagtgctcttgaattaattccgtaagttttcctatatcctaattcagttagttttggttttgcctttagtcttttctgtctactgatttcttagggattttgttgtcattgttgtttttataaacccttgg

SEQ ID NO: 773603 - DNA, 603 bp, Homo sapiens
attagtaatagcttaattcacattgctgtaaaactttgaagtgtgtgagacctattatgtttatcttttaggtttttaaagacaattgttgcaaaagagaagtcctcaacttatatgtatattgcagcaatgctcctggatgtaatgccaaggktattctgggccggtaccaggttggtattactcatgaacgatatctgcttttgccatttttccaggaatgtgtgttgaacccctttatgtgacagttactgagctaagcatggtacagggattcagtgaattgccctcaaggattcccagtctagcaatacaggtggctacagtgctgtagccacctacggctgaggtgtgagtgaagaggttcgtcctgtatggagcgcatggaggacatcttgtatccactagaccttaattgtgtggtagggatcattgagccaaaagagagggcgtgggacatgctggacaaaacaaacactcaagaatatgccattttgggggaactgtgtgggacccagggcatgactacagaaagacacaattgtgaggtccttccccaaaagcatttgctctctcacttggtgctgtcgtaggtgtttccca

SEQ ID NO: 773604 - DNA, 632 bp, Homo sapiens
gtgactcattgcaactactgacaagcaagctggagtggccctgcttttagagagcctgaagatctactcagagtgaacaatacttgaagttctaattgagttacagaaaggaaactagtaaaaactaagaaagattgcgattctcaccttgaatatgcagatctaatttctataactgtgtttaggggtatttttctaaattactaaaataatgcttacattttcaaattggccattaaatatatcttcagatgcggagatgtgtatattacaaaaccttcctctgtgaaatcttttgttattctcttaaagagattattcatttaggattttmgtggcttaggtccccccacccccaccctacccccaaatatctcaactcctcttgacacactcagagaggaaggaaatctcttgccttagccatacttaccagtttctacttcctttgtgcgggtttgataatttggcacatactttacaataccattagtgaattcagactccagttgcaataggaagtgatccgtggacttctaaataggaaggacccataacaaaggggaggatataacactaaagacaccacgtgtggtcaatcactgatagagatccaatttttttgtaagatt

SEQ ID NO: 773605 - DNA, 577 bp, Homo sapiens
agcagaagctcatcagttagttggtggagaagtccttgggaaactgagaggtcaatgttaattacctttgagaacgtgagcgacagaattttcaggaaggagaatttgatagagcctgtacccacgggccaaggcctcagccagagagtcctccaacctctctgaggctgaagagtctaaaaaggcttataagggaaagggaagttgtggtttgagaatgttctccatggaattctgataaaccctcaccccctctgcctgtttcaaaaccaccggcttgtggtmttaagcagaacagctgtatctcaaatttcagtcagctaaatgctgtcttctctttatttgctcaggtttagaggcagttaaaatactatatatcattgatttagaagaccagtgatgtttatctgacagaataaaaagaaagcagataaatgagagctctgttggtgctctgtacatgttcatcaaacccacgaaatgtaatcttcatgaaaaatattaggctcagatctgacagctcttggcctgaatgccgaatatggagtccatttcagttgattgaatatagtgaaga

SEQ ID NO: 773606 - DNA, 580 bp, Homo sapiens
agtgagagccccggtagcaccaatgtaaaccaagcagaccagaattccaccacacagattctgaatattgaagagcaactggaactgtaacccacaaaatgtgcaaggccacgtggtaaacataaacagggtgacagcctgctaaaataaaagatttgaataggacccaaagttcccyaacataataaatgacatgtcctgggtacaatcagaaagaacacgttgtatcaggaatcaagaacatcacaacttgaaagagaaaagaatcaagtgatgtcaacagtgagataaatcagatgttgaaatatatgacaaggatgttgaagtagtttccattaacatgcttcaacaatcactgacgagctctcttgaaacaaatagaaaatatcagcaaaaaaacaatggttacaataaagaactaaatagaaattatagaactgaaaaatacactaacataaataaagaacatgctgaataggctcaatggtagcatggagatgacagagaatagaatcagtgaacttgaagatagaacaatagaattcacccagtctgcacaataaagagaaaatagactgaa

SEQ ID NO: 773607 - DNA, 623 bp, Homo sapiens
aaaaagtggaaagggctctacaaagcttttctaagaactaattgacaacatggtaaggctatggggggtagggcatgctatttgtccttactttttccatgtatatgaaaatccaattgaggcaaaatattttggccatgagcataatttcacagtatatttttcaagctaatgagacaaagcatatactacttaaattctaagtaccctgataccaaaagggtgttgaagaagaatatttttcatttacacagttagcaaaatggttctgaaccctttctatcaactagagtcattgggagcttttaaaattacagatgcattggcaatctcactgcttaaaaattctaatktaattggtttggggtagagcccaggcatagacatgtctatttgtttgtttgttgcccctgtgttgattccaaagtgaagccagagttgagaaccattggatgaagaaaataatactcaacagcgttgaagatgcagtcaagttggagcacacagaaacactgagtaaaaattagtatcatctgtctaaaatgtaatttggcaatatcttatatgcccaaacaattgactctctttctaagaatatactctaaagaaacaggcaaagaatc

SEQ ID NO: 773608 - DNA, 617 bp, Homo sapiens
tgagtaaaactttgtacctcatctttaggggctgctgggactcaagtctagctataggtctagaagcaaagaggtgtggtgggggtgggtcctgagaagactcagcatcctctggcttagcagctgcctagaggaaggccattatggtttcctcaggcaatgcaragtcaatcccctcagacaaaggtggaaaggccagtgtaggggggatgctgttactgggggtgggaggccatttctgctggcaaacaagactcatcagaatttaggagctcaacgtccccagcctcatcagggtcttcccacacatccccatccaaacgtatagaattccatctttcccaaccaatgccctcattttaacagcagataccttacaaggctgatatttcacctttgattgtaattcagctaatcacatgatgagagtatgtgtttgattttgtgcaatttcagacctttggcaacagaagagaagattctgacttagggcatatttagaagttcttgggctatttatggcagagctggggccaggaaatcaaaaccctgagctcacccttttctttcatcacttcgtccagcaatattagaaaaccttggttttctacaaacgt

SEQ ID NO: 773609 - DNA, 620 bp, Homo sapiens
gaaaatgaggttttatagaaaatggggctttccagcctcatccctaacaagctccactacccacatatctcataccctttcctccagacacgtactaaactaaggcagtttcctgaacatactatatatcccagtctatgcctttgcctttgatgttccctttgcctggtaaaatcctgggtgtccttcaaggcccacttcaaatgtcactttcacaagaagcctttctcaaccttcagagacagaattctttccatattctaatacaatactcatcactttggtgaggccgtattagcagagtggttaagagaacaaactgtcaggctgtggaggtttgcaagctmtgtaaccttaagcaaattatttacccttcctgggcctcagttacatccactgtaacatgggacaataacaatactcctatagcaggactgttgtgaaaactaagaatttaaaagtacttagtacagatctggcaattattaaattcaacacgttacctattagttattaaataggctgtgtgggtcaatgtctgaactaccggaaagcaaacactatgttttagttatttgtggattcctatcacctaacatctggcacaagagcactcaaga

SEQ ID NO: 773610 - DNA, 615 bp, Homo sapiens
cacacacacagctaagcaactaacatttttattttgaataatgagggtgggtaaagaacagtagacttacctggtaaaatttaacaagataactaaaacatggaaattatatgtattttaacaccataaaaactgatggtaaaataatactaacacatgggaaaatactacattactctctgaacaaaataactatacacaaaatagttttctttaaattgatagtgmcagaaatactattaggaatttccgggtttgggaattgttttcttctctctggatttccagattttctacaggaacactgttgtcatttatcccaaatttcccatcatattcatagagtacatactgatctatcatttttgtcacttacatatttgtttctcaaaccaaaataaaatggtacataatacatatataatatcacaggtcaaaatgctctaaagatttgttgtaacaaggttcaaaaaaagcttcaaattgcccactatctacatggtcactgaagtataatggccaacataccatcaatttagaacagagagacagggaagggcagtagaagtaatatttgattaatcaatactcaataaattaatacttagaactatt

SEQ ID NO: 773611 - DNA, 518 bp, Homo sapiens
acacagtgaaaccccatctctactaaaaaaaaaaatacaaaaaattagctgggtatggtggtggacatctgtagtcccagctactcaggacgctgaggcaggagaatggcatgaacccaggaggcggcttgcagtgagccaagattgcgccactgcactccagcctgggccacagagcgagactccatctcaaaaaaaaaaaaaaaaaaaaaaaaggtcaarggtgattttaagaacaccttttggctgagaatggcagctcacacttgtaatcctaacactttgggatactgaagtgggaggaatgcttgaggctaggaactcaagcccagcctgggcaacatagtgagatcccatctctacagaaaataaaaaaattaagtgggcgtggtggtatgtttgtagtcctagctactccagaggctgaggtaggaggactgcttgagcagtccgaggctacagtgagtgtggctgtggatgcgtcactgtacttcagcctggatgacagagcaagaccc

SEQ ID NO: 773612 - DNA, 518 bp, Homo sapiens
acacagtgaaaccccatctctactaaaaaaaaaaatacaaaaaattagctgggtatggtggtggacatctgtagtcccagctactcaggacgctgaggcaggagaatggcatgaacccaggaggcggcttgcagtgagccaagattgcgccactgcactccagcctgggccacagagcgagactccatctcaaaaaaaaaaaaaaaaaaaaaaaaggtcaagggtgawtttaagaacaccttttggctgagaatggcagctcacacttgtaatcctaacactttgggatactgaagtgggaggaatgcttgaggctaggaactcaagcccagcctgggcaacatagtgagatcccatctctacagaaaataaaaaaattaagtgggcgtggtggtatgtttgtagtcctagctactccagaggctgaggtaggaggactgcttgagcagtccgaggctacagtgagtgtggctgtggatgcgtcactgtacttcagcctggatgacagagcaagaccc

SEQ ID NO: 773613 - DNA, 518 bp, Homo sapiens
acacagtgaaaccccatctctactaaaaaaaaaaatacaaaaaattagctgggtatggtggtggacatctgtagtcccagctactcaggacgctgaggcaggagaatggcatgaacccaggaggcggcttgcagtgagccaagattgcgccactgcactccagcctgggccacagagcgagactccatctcaaaaaaaaaaaaaaaaaaaaaaaaggtcaagggtgattwtaagaacaccttttggctgagaatggcagctcacacttgtaatcctaacactttgggatactgaagtgggaggaatgcttgaggctaggaactcaagcccagcctgggcaacatagtgagatcccatctctacagaaaataaaaaaattaagtgggcgtggtggtatgtttgtagtcctagctactccagaggctgaggtaggaggactgcttgagcagtccgaggctacagtgagtgtggctgtggatgcgtcactgtacttcagcctggatgacagagcaagaccc

SEQ ID NO: 773614 - DNA, 627 bp, Homo sapiens
agtaaatgttgtttttatttttgcacaaatgacagcaaaccataaaaaccgttccaccctgatttttctttttgctttacagtgtgcttaggatattgttttgtattactacatgcaaagctacctcattctttttaatggctccataatattcttagatggaccataatttgtttaaccaacgcatttaggatgtttccaatcttttgctattacaaactgtgccgtaatgaatatctttgtgtatatggcattttgtccctgtataagaatatctaaagaataaattctggccgggcacggtggctcatgcctgtaatcccagcactttgtggggccaaggtgggcagatcacaaggtcaggagttcaagaccagcctggccaaaatagtgaaaccccatctctcctaaaaatacaaaaattagctgggcatggtggcatgcrtcgataatcccagctactcgggaagctgaggcaggagaatcacttgaacccggaaggcgaagtttgcagtgagccgagatcgtgccactgcactccagcctgggcaacagagcaagactccatctcaaaaaaataaataaaataaaatagcatacagacattcctagaagtgggattgctca

SEQ ID NO: 773615 - DNA, 476 bp, Homo sapiens
ggaaagcagtatggaggtttctcaaaaaattaaaattagaactacgatatgacctggcaatcccactaatgatacacatccaaaggaaatgaaatgaatatgtgaaagagatatgtacttttcatgttcattgcaacattattcacaacagctaagataaggaatcaacccaagtgtccgtcagtgggtgaatggaaaatgtggcatgtgtacacaatggaatactattcagccttcaaaaagaaggaaatcytgtcatttgcaacaacatggatgaacatagagaacattacactcaatgaaataaggcaggcacagaaagacagaagttgtatgatctcatttatgtgtggtatctgaaaaaaaacagaactcagaagcagagaatacaatggtgctttccaggggctggagaggtgaggaattggagaaatattggtcagaagatacaaattatcagctgaaatctggtgatg

SEQ ID NO: 773616 - DNA, 628 bp, Homo sapiens
atttattttcggtttactcattcatttaaaaaaatcacaagtacctttatattcctccttttttacaaaaagatagcacagtatacatactattctgaagaagacagcatttagactgctcttaaataaagttccacatatcagatcttcacaaatcttaaggtactactcattaaaaaagttatttaataaaaataacatattatttttattcttaaaattcagatccacttagtataagattattatgttagcatagacctagtggaagaaattatattaaatttaactattgtaaggctagaaccctgctttttaagaagaaaaacactgctcactttaatgatgcatattcagcacttattatatgtgaggcawggttttaagcactttccaaatattaacttatttaatcctcataataataccgctaaataggcaccattattaaccccattttagaaatgtggaaactaaggcaagagatgttaagaaactgttaacgtttccagctactaagcaacagttaggatttgaactgaagatcctggcttcagtgtctggggtcttaattattcacccggctgccattctccatagttaatttacattgtatcttttttttttt

SEQ ID NO: 773617 - DNA, 640 bp, Homo sapiens
acttgtgcagtctgactctggagtagtctgagctcttaattactagcttggaggattgctggagtaactggcttttctcttgtgctatggacagttgacaatttaacctaagcatataacttttcaatatgtaattgacagtagaagtgtgacaggatggtggtttacacacatgtatgatacycttttctaaataagagtttctgggctgggcaggttggctcacactggtaatcccagcactttaggaggctgaggtgggaggatcacttgagcccagcagtttgagaccaacctgggcaacataggcagaccctgtctctacaaaaaattcaaaaaatgagccaggcatggtgatgcatacctgtggtactagccactgggcagtttgagatgggaggattgcctgggcctggaaggttgagactacagtgagccatgactgcacgaccgcactccagcctggacaacagagcaagactttgcctcaaaaaaaaaaaaaaattctgtaaatgatttgggagtgaagtggtgaaactttcttttcaaacctttaaatgcttatgagatcttcttttaccctttcaggagtggtcattcactgtaaccacaggatcccatttggagactggtttgaata

SEQ ID NO: 773618 - DNA, 616 bp, Homo sapiens
caggtatgagccaatgcaccgagctcccaacaaatatctcgtatccgaaactgcccagcacatacacaatggacatcctacttaccatatacagagtcccagagccttgcatcttgagagttcagagctctcacatctaacatgaaggggaacgtgagaaggcagagaggggcctaccaatatttagagaactaaattatggccccaactttaccactaactagctgtgtggcccccgtccagggaatcagcatgcccaagcttcagtttcctcatctgtgaattgaagatgtagatggcagtttctgctccgatctatgatcttgacaccgggagccatccctgactggcccctgacccagcaggtgaccaccaaagcctgcagcaagcaggctccctcttccccaaagtaggatgcagtcccttctagttcccccatcatgaacygagcaggaggcatcagtttccactcactcagaccttcttctacaacccttgctgtgcaccagggaacaaaatcaagaattgattcccaatccctttgtccctaacatacctcagcatctgaggaccaagtcctaagaaagagtcaaacaactcctttgcaacctctgcc

SEQ ID NO: 773619 - DNA, 602 bp, Homo sapiens
ttattcagtgtttaactgacactatatagagcccttttgctacttttaagctaatcaaaaaagatataatataccctgttagtgcttctgatcagttcaagcatttttttttttctcatcaaggtgctgtgagcatttggcagggtaattcttcactaygtgggtctgtttctagaatagcaagcattcagcatccctgagcctggcatttgaaatgccagtagcaccctccaatcattgtgacaatcagtgtccccacatattttcaaaagctcttgtggtaagtgttgccccttcccctccccgtgacaaacctgccccttatacctttactgatgtttctagcctatgtggcctacaaaaaaagtgtgaagggggaaaagctatgttgttcacattaaaaagagataggttttcatttctgctttttgtaagccattgctaaagttaaatttaattgcaaaatactaaactcttgaaccaattctaggacaggtttgcagaatgattttcttaaaggacctttataatctattaccctgaaatgaatttctgagacttaacattcgtaacactagggcatgattaaatatatgggagca

SEQ ID NO: 773620 - DNA, 560 bp, Homo sapiens
tttttgaaagaattaagtgcgtcattatttatttttataatcaactctaattataattaaggccttaatatgtaatttgttatatgattaccttttgtatctttctaaataatatgacccctatttactgttcaagttcaacctaattattacaggaattactttttggtttctaagacattttacataaaaaaagttttgataaatgttattgagcttcaagaatcgattttggttactgtacaaaaacttttttggatggtgtaattatttaagatttcttagcaaaatattctatgacataaattaatgcaatgacaaatatattaaattcaaatgtcttaagaattctcattacaattawctacaaactcaattattatcatgccaaaacaaatcagttgccacattcaacattttaaaaatactttaattcaaaaacctattgcagaaaacactgtatcagtttcttaaaagatatacctgtaactgccatgtgacacagaaattgcactcttgcatgtctatcccaaagaaataaaaactcatgttcatacaaa

SEQ ID NO: 773621 - DNA, 597 bp, Homo sapiens
atattgtaggtcagtatcatcagcttcctgaagaacctttactgaaatcgattttaagagtgactaatttggaagtagtgtattttatttcaaatgctgcagagtggaagagcatatctgggctgacacaagacctgcagttcgctagcataattacacatagctctgtgtgatccagacacacaggaagttattcccaaggraacagccaagccagccgagtggatcatataaaagggacttcccaacttcatctgtaaatgtcatgtgagacactgcagataaagcagttagtatactttctatgcaagctaagtgggactggcttcaaaacggctgggatgttcacccactgaatatgcctgttcctcactgccttgctgcatttgggttgctgtaactgaataccttagactgggttgcttatgggcaactaacatttacttcccagagccaaatgcactgtgattctgaaaactgctagtgaagttttaatggtgactaaggttagattgggaagctatggtgatgcaatgattaatgagattagagaaaaaggttagataaaaattgtgagtttttgtcacatatcctttg

SEQ ID NO: 773622 - DNA, 648 bp, Homo sapiens
tgcagtgatgcattctagctccgtatatccttatactcttgagctcaagtgaccttcccaccttagcctcccaagtagctaggactggaggtacattccaccatgtcttgctcattcttattttttgtaaagacagggtctctataagttgcccaggctggtctagaactcttggcctcaagggattcccaccacttccagcctgtatataaagtctgtaaggcaaaggagctcaatactttacccccaaataacttagcaagtaggggtggatccagaattataaccccagagtctagcttcaagttgatgttcttataccctatattaaacaaaaacytacctgatgtatcttaaatataatgtttgcataaatagttctctcagacactattcagagtagcaaagacatggaatcaacttagatgtccatcaacagtggactagttaaagaaaatgtggtacatatacgccatggaatactatgcagccattaaaaagaatgaaataacatcctttgcagcataatagatgcagctggaggtcattatcataagcaaatgatggcaagaatgaaaaaccaaatactgcatgttctcacctataagtagaagctacatactgagtacacatgtatataaagatgga

SEQ ID NO: 773623 - DNA, 648 bp, Homo sapiens
tgcagtgatgcattctagctccgtatatccttatactcttgagctcaagtgaccttcccaccttagcctcccaagtagctaggactggaggtacattccaccatgtcttgctcattcttattttttgtaaagacagggtctctataagttgcccaggctggtctagaactcttggcctcaagggattcccaccacttccagcctgtatataaagtctgtaaggcaaaggagctcaatactttacccccaaataacttagcaagtaggggtggatccagaattataaccccagagtctagcttcaagttgatgttcttataccctatattaaacaaaaacctacctgatgtatcttaaatataatgtttgcataaatagttctctcagacactattcagagtagcaaagacatggaatcaacttagatgtccatcaacagtggactagttaaagaaaatgtggtacatatacrccatggaatactatgcagccattaaaaagaatgaaataacatcctttgcagcataatagatgcagctggaggtcattatcataagcaaatgatggcaagaatgaaaaaccaaatactgcatgttctcacctataagtagaagctacatactgagtacacatgtatataaagatgga

SEQ ID NO: 773624 - DNA, 601 bp, Homo sapiens
aatgaaaaaccaaatactgcatgttctcacctataagtagaagctacatactgagtacacatgtatataaagatggaaacaatagacacgggggactactggaggtgggaggatgggagcggagtgagggttaagaactatctgttgagtactatactcactctctgggtgacaggttcattctcatgctaaacctaactgacatgcaatttacccatgtgacaaacctgcacatgtatcccctgaaactaaaataaaaattaaaaaaaaacaaaaacaaaaamaagaatgcacataaggatgaccttgagggctcatgtaaaaagcaataacaatacactcaaggacagatataagcaaaggacatcatttttaattttagcataaaagaaaggactcagtagaatttccataagactaaatacataaaaagaaagagaaatttagaatgaaacaaaataaaaatcagcatcttcatcttatccattatagattttctttaacaaattagaaataaagatttgggcattaaagtgacaaattcactttatttaccctctgaagaaaaggccatgttggttatatgaagcccacaaacata

SEQ ID NO: 773625 - DNA, 454 bp, Homo sapiens
ccactgaaatatgatgcataaattgttctcccttattacaaatttcttatcattatataatgttttaataaatgtaatgcttgtcagaagtattttaatttattagagtatgtgcaacttttaaaagtcatttaaaagttaataattaaaatacagtacatgtgacgatttaaattatggttagagatattgttagcagagaaggagatttattgcattctataaaaagtcaatagcagaactgagatagaccacaatctacttaaggagcacatatatacaatatacatgcataaatagatgataaattgttttkagcaagtaagtaatgtatcttctagtaaaagcttaacaattcttttctctcttccttcaggaactagagttcactaggaagtagataagacattatagtgtttctgcatattgaatagttttaattatccattattag

SEQ ID NO: 773626 - DNA, 623 bp, Homo sapiens
tcctcttctacttaaaataatttttttcttaatatctccagtgtctccccttccatggtctgcaccacttcacaaaaagtcagaagcagcagccattgcaacatccatatacacatacaaactttgagtagttgtcaaagtaatgtgccatatatagtaccatatatatttgttaaccacttaacatgtgcaaaatagtagtactcctttatattttttatctttgcttgtcattaatgaagttttttttaatcctgtgcctctcacrtaatattttcctataagctttgtgattttatttgcacaagtttgcataaaaatttttcaggaatgcatatgtctgtaaccgaagaactgtctacacttacaacactctcattatgcaaactcatgggtcttttcagtttttgaaaataattgttagttttttatttaaataatagtcattttatgttgttttgttaattttcttcagagatgtctgttaaacatattcagaaaatgaaaattaaatgacttaaattaaatcacctttaaaatgcataggaacatcaaatacaaacagaagaaaataattaaaacaaccatcatatagtaagtaatattgacaattttttataatt

SEQ ID NO: 773627 - DNA, 579 bp, Homo sapiens
gcatgtcttgcatcttggtcacactaagtcaagaggtacattctcatggtcttgggcagccccacccctgtggctctgcagggtacagcttccctgctggttgctttcataggctggtattgagtgtctgtggctttcccaggcacaaagtgcaagctgttgttgaatctaacattctggggtctggaagacagtggccctcttctcacagctccactaggcagtgccccagcagggagtctgtgtgagggctctgaccccacgagaccccacattttccttatgcactgccctaraagaagttctccgtgaatgccctgcccctgtgacaaacttctcccttggcaaccaggcatttccatacatcttctgaaaactagctggaatttcccaaactccaattattctgtgcactcacaggctcaaaaccacatggaaactataaagacttggggcttgcaccctctgaagccacagcctgaactttatgttggcccctttcagccatggctggagtggctgggatgcagggcaccaagtccctagcctgcacacagcatggggaacctgtgcctggcc

SEQ ID NO: 773628 - DNA, 579 bp, Homo sapiens
gcatgtcttgcatcttggtcacactaagtcaagaggtacattctcatggtcttgggcagccccacccctgtggctctgcagggtacagcttccctgctggttgctttcataggctggtattgagtgtctgtggctttcccaggcacaaagtgcaagctgttgttgaatctaacattctggggtctggaagacagtggccctcttctcacagctccactaggcagtgccccagcagggagtctgtgtgagggctctgaccccacgagaccccacattttccttatgcactgccctagaaraagttctccgtgaatgccctgcccctgtgacaaacttctcccttggcaaccaggcatttccatacatcttctgaaaactagctggaatttcccaaactccaattattctgtgcactcacaggctcaaaaccacatggaaactataaagacttggggcttgcaccctctgaagccacagcctgaactttatgttggcccctttcagccatggctggagtggctgggatgcagggcaccaagtccctagcctgcacacagcatggggaacctgtgcctggcc

SEQ ID NO: 773629 - DNA, 530 bp, Homo sapiens
aaatattttctcccattttatggttcgtctgtttactctgctgattatttcttttggtgtacagaagctctttagtttaattaggttccatctgtttatatttgttcctattgcatttgctcttgggttcctggtcataaactcttggcctaagcaatgtctagaagagtttttccaatgctatcttctaaaatttttatagtttcaggtcttagatgtaagtctttgratcatcttgagttgatttttatacaaggtgagggtgaggattcagttttatttttttacatgtggcttgccaactatctaagcagcatttgtttaagaggatatcctttccccactttttgtttttgtttgctttgttgaatttgtgaacctccaaactttgagacaggtctcaaataatttagaaagtttattttgcaaaggttgagaatgtgcccataacacagcttcgggaagtcctgatgacatgtgcccaaggtggtcagggcacagattggttttatacattttagggagacatg

SEQ ID NO: 773630 - DNA, 593 bp, Homo sapiens
agcatctagaatatttaacgatccagttgtgaaagtgatttatgaagaaaaaagatacacatttgagtgttaattgaaggatatcaaaaatctgaaccatgtgttatgatagataaactcttttggactctaagtaatgtgtaaggttgatttttttttccttattcataatttaatacatttttatataatggtgattttgcttggtaaaaaacagaccccctactctaaatacccactaacaaaaaagtttactgccccgcaatcaacacaaaaattctgcccagagttgacaaaaaaacatgtactgttgctccatattgaaaacacttttacagtgctttctctactgctaagaatcctacattagttaacctttttttttttcctttttttgattgtggtgaaatatacagaacytaaaattttatcattttagccattcttaagtgtacagtatattcacattggtctgcatctgtcacaccatccatctctaaaactttttcatcatcccaaaagcagttgactttttacactcaaccactataaccacagtaaagagaattgtagataagttgtcttataaataa

SEQ ID NO: 773631 - DNA, 586 bp, Homo sapiens
ataatataaaaggattttgaccaaaaaaattaatttgtataaaagaagagaaagaaggaacatggactggcaagtaaaaaatttctatgtgatagaacacagggttttacacagggttttactgtaggtttgaaaagataggttagaagttagatcacagaagatatcaaatttcaatcagaagcgactgtcttacacaaagtcccctatgccacagatatcctaactagcctggtgaaaacttactaggaaaattgcatttccatctcttgatgagatataataaayacagaaacatttactttctactgactttaagcttctccacaaaagttcttatgttattcttaggcccactattctcactatatgcaaaacttggtaacttaaaaaactgtaaattcaaatgactatgaaattcttatagacagctttagaaaagagaggggctatcaaaatgacagaaaagaacaggaatgaatatttattatttcctccctatccctcatttatgattaatgaaggagctactttcaaggacactgctaaaatatgaaggcctaagtaccagaattgctttagctgt

SEQ ID NO: 773632 - DNA, 549 bp, Homo sapiens
aaaaattaatttgtataaaagaagagaaagaaggaacatggactggcaagtaaaaaatttctatgtgatagaacacagggttttacacagggttttactgtaggtttgaaaagataggttagaagttagatcacagaagatatcaaatttcaatcagaagcgactgtcttacacaaagtcccctatgccacagatatcctaactagcctggtgaaaacttactaggaaaattgcatttccatctcttgatgagatataataaacacagaaacatttactttctactgactttaagcttctscacaaaagttcttatgttattcttaggcccactattctcactatatgcaaaacttggtaacttaaaaaactgtaaattcaaatgactatgaaattcttatagacagctttagaaaagagaggggctatcaaaatgacagaaaagaacaggaatgaatatttattatttcctccctatccctcatttatgattaatgaaggagctactttcaaggacactgctaaaatatgaaggcctaagtaccagaa

SEQ ID NO: 773633 - DNA, 555 bp, Homo sapiens
gtataccaacccataatgacctagtgctacttttcatatggcagcgggttatgaatatggacctaggagtcacaaacacctgggtttgaatcacagctctgccacttactagctgtgtgattttgaggtcggtgttcgtacttggaaatagtggacaatgtagtacctaccagaagagctgctggaaggattaaattagattaatgtatatgaagtggttggcagatatataaagagcttgacatagtacctatcacacartaagtgctcaaaacattttatagttatttaataacatcatatgaagaaaccaagactaagagagactaaaagtcatacagtgagttgatggtagagtgagatcgactggaagtcagtttctggctcctgaatatttcaccatacctgcaacacccatttcctctgaaactgctatctattaaaaaaaaacgggaagagttaacactgttgtcacctgtacactctaggcaccatgctgtcattccaatgggctaaagattccttctcaagtttgttcttttagtgtacaggcca

SEQ ID NO: 773634 - DNA, 566 bp, Homo sapiens
taaatccagtgacctgggccacagatccatagtgtgatctttgaggcacagagatgtgtggggacttgccacttccctcgtttgtcaagtggaaagaataatgccttctgcctcacaggtgtgtaaggagggtcagaggaaattatgactacaaacgtgttccaaaggttgagagccctgcaaaatcgatcaccaagccccagaaagcctttctccttaatttctttcccatctgtcttctcctctccactcccctaaatctccctcttcgtggccttcacacccctcccctgctcttggggcctccctgtcttccctctttccttgtctcagttccggctccatactcaggcccagtcrtctctgtaaaacccactactcagcaaggcacatccctctataaaacctccagtaacaatcctttaccaagacaaaaagcagaactcccggctggctggggacgggcagaattataagcatggccccatgacactcatccatgtatatataatatgcttccttttgagtgtgggtggaacatattaataggttgagctgtcacgtcc

SEQ ID NO: 773635 - DNA, 581 bp, Homo sapiens
attttaatttttacacacatatacatagatttttcatattcattatatcatagatataacttagaatgttaatttccacatttccactctaatttttaccataaataatatttccatttggcaaaaatcacagtttatcgctctctttccagtgtttctcccctgccacactataaccagtattaacagcctgagaacatctctctacatatttatctacattcactgaaaacaataataacagtaaacaaaaggtcttaatgcttgttataatacagacctgttttcacatattacctactgtagctcacttaatcctccaaacaaccttatgagagaagtactattgttatctgccatttacacatgaagaaactggggcccaacatacacagaatattcaaaaatgtaaacaaatctgtagaaacaaawaaggaaggttttttggtcatttaagaaatacagagaaagccaggcatggtggtacacgcctatagtctctgctacttgggacactgaggcaggaggctctcttgagcccaggagttcaaggttgcagtgcactataatcacacctgtga

SEQ ID NO: 773636 - DNA, 565 bp, Homo sapiens
ggcatggtggtacacgcctatagtctctgctacttgggacactgaggcaggaggctctcttgagcccaggagttcaaggttgcagtgcactataatcacacctgtgaatagccaccacactccagcctgggcaacatagtgagatcctgtttctaaaaatatagagagagagagaaaaagaggaacacagcacatagttcacagtggtagcttttgaagyacagtatatcttgccatctctccagggcaacagatccaactctagctcatttttaaggagcaataaagaatgccccattgtatgaatataccatcatttattgcacctattgataagcatttatgttacttcctttttttgccactacaaatgatgctgcaataaatatcacagaatataaattctcaggtcctagagcttttattttgataaggtagtgtctatagactttagtgctgacttcggaaacttccatacgaaatgagaaacacagccataagctgagccaaagcgtaagacttccttgaaatatgtgggctccacctagatcagagagagaagata

SEQ ID NO: 773637 - DNA, 512 bp, Homo sapiens
cagggggtgtttggagacgtaaagaattttttgttgatgtggagaaagcccacacatttgatgtcagaagtgaagtgttgggagagtatagaaaaatattgatttttcctcttttaataacagatttccaaagtgtgttcaccattttacgcacttaccagaaatgagarttccacttatgccacaactttaccaatactaggtattgtcaaactttttaattgtagtcattctggtggtggtataatggtaccgcattatggttttaatttacttttaattgactactaatgatgttgagacctttttcatgtgcttactggctatttctatatctttgtttgagaagtggctgtgcaagtcttttggccattattcatatttgattgtcttcttaatgagttgtaaaatttcttaatatattttgaattctcagaatgtatatgcaaatgttttctttcaatcttactgattttttaaaaaatatcttcaaagagcaaaagtttttattt

SEQ ID NO: 773638 - DNA, 692 bp, Homo sapiens
cagtagtctgttctttttcatttcttagtagtattccattgaatggatgtaccacaatttggttatttttttgttcatttcaatgattttactctggttatgttactattagacaaagctgggtaaagaatatataggcactaactggtttatctattcaccagktggtggacattgagctgtttccagtttttggtaaagctttgacttgtatacaaataaagccattataaaatttgtatagaagtctttgtgtggatgcaagctttcatttatcttgggtaaatacgtggcgatggaattgctggatcatatggtaaatgttcatatataagtaattgccaaactgtttttcaaagtggctgtactattttgcattctcattctcaacatatgggagttctagttgctccatatccttgacagcacttgatattgtcagtttttctcatgattagattggggttatgcttttttttttttttttcaagaataacatggatgttttgcttttctcagtgcatcatatcagaaagtataggatgctgatattgttactggtcgggttaactttgattaaggtgatatgtgccagaattcacagtaaatttactattttttcctttataactaataagtatcctgtagggacatactttaggaccatacaactatcctgtttctcattctac

SEQ ID NO: 773639 - DNA, 665 bp, Homo sapiens
tttgattaaggtgatatgtgccagaattcacagtaaatttactattttttcctttataactaataagtatcctgtagggacatactttaggaccatacaactatcctgtttctcattctacctttacctactaattttggcatcctgcaatgatttgtgctcccagtaattattactctggtgttgcctatgatgattttctataattccctttgcacttattaattggaattctgcgtaaggaagtagtgtccttttgcccccatttatttattcaattataccgatayggactcaaggatattaattttattttatgggttacaattcatttctttcttatttattttgtttttcaaatggtcccaggattaaccattgggagctctttcaggttgattcctatcaatatcacctcgttttctggttgtaaacttactttcgggtcccacgatatgctccaggctcatcttctgttttccctgtccgtgctctggagtcaaccatttttccaaggatttattgttccttttattgtaagatgatatttataaatcaagatcttggtgctagctttgcacattgttactgaggtttcagtgcttctagtccctctcaacagaaagagctaggaagtatatcatatatgtacagcacaaacatac

SEQ ID NO: 773640 - DNA, 665 bp, Homo sapiens
  misc_feature 73: n = A,T,C or G
tatgacaaaattaattttttttttttgagatagagtctcgctctgtcgcccaggctggagtgcagtggccgantctcggctcaccgcaagctccgcatcccaggttcacgccgttcttctgcctcagcctcctgagtagctgggactacaggtgcgcgctaccactccyggctactttatttttgtatttttagtagaaacggggtttcacagtgttagccatgatggtctcaatctcctgatctcgtgatccacccgcttcagcctcctgaagtgctgggattacaagcatgagccaccgtgctcggccaacaaaatttaaaattttttaaattgacagataacattttagctgttgtattgtgtacaacatgattagaattgctttttatgtatgacgtaagggtagggatcaagattttattttttttcccttaagatttattattgctcctgagcaagttattaaaaaaaaaacttgttttccatcttatcgtaagttaaatgatcacgtatgtgtgtatcagtttctggtctctagttctatgtctctggtctatttttatactcttgtaataattccacatttgtaaatcttgcattgtaataagcattgtacctgatagtgtcagtcctacagctctgttcttgaatattattttgtc

SEQ ID NO: 773641 - DNA, 708 bp, Homo sapiens
acattcactctgtcagaccacagtttcacctcgtcacaggctgattctgttacctgtttgcatttctgctgatgtggtaaatccaagctactgagtacccattatgattgggaaaggtgttgatgacttacagagttccctgtactacgtataatggagtcctttacaaattataccttgcctgaaccgaattagataggtaaaattctctaaaaagaccttctacacaataagaccacattgttacatgtcacaggaatgaaatgttctgtttcaaataaaagtgctggccacagcaagcaggtgccaggatgtgctgcccacagtggcatcatcccagaggggcaayatacctctgcagaatgaggcatcccagagaggcaatataccctgcagaatgtgttcaggacaacttggacacactacacctgtgaaagcaagggaaggagggcaggctctgcaagacggagaaaaatattcccaggatgcaccactaggattaaaatccaatgcaactcaaagtatccccatgattcagttcaagtttcctgaaagtaggtggtttagaatttgtattatctcaaggaaaccttaaaagagcatcatatctaaaaagataaaatgaattatcaggttaataaagtgcttaaaacaatgcttccgaaacaccctgactacgtggcctatgcccaaaacacagaggccatg

SEQ ID NO: 773642 - DNA, 708 bp, Homo sapiens
acattcactctgtcagaccacagtttcacctcgtcacaggctgattctgttacctgtttgcatttctgctgatgtggtaaatccaagctactgagtacccattatgattgggaaaggtgttgatgacttacagagttccctgtactacgtataatggagtcctttacaaattataccttgcctgaaccgaattagataggtaaaattctctaaaaagaccttctacacaataagaccacattgttacatgtcacaggaatgaaatgttctgtttcaaataaaagtgctggccacagcaagcaggtgccaggatgtgctgcccacagtggcatcatcccagaggggcaatatacctctgcagartgaggcatcccagagaggcaatataccctgcagaatgtgttcaggacaacttggacacactacacctgtgaaagcaagggaaggagggcaggctctgcaagacggagaaaaatattcccaggatgcaccactaggattaaaatccaatgcaactcaaagtatccccatgattcagttcaagtttcctgaaagtaggtggtttagaatttgtattatctcaaggaaaccttaaaagagcatcatatctaaaaagataaaatgaattatcaggttaataaagtgcttaaaacaatgcttccgaaacaccctgactacgtggcctatgcccaaaacacagaggccatg

SEQ ID NO: 773643 - DNA, 608 bp, Homo sapiens
tccactcttgtctggaattcagatggtgcatgtaaatgcgttttcagaataagaaagttattaggaagttccttgatgttatccattatggatagaaaacttgctgatattcaccacccatcattccacaaaagcatgcaccgaacatgatgtctccccttcgctctgcctccatagtgtctctatgctccataattatggtactgaactgcacttgcagatmactgcagaagttattaaagtgtccaggatgacttgtccctacactgaatggcccccgaatgatgaatttttaaagcacctttgtctatagttttatgatatttggtcgcctatgctgcatacctcatttcttattgctgatagtgttctctacacccctttatgcctccaacttttaacttgtttctttcaggattccataggctcaacaatgacccaaatgtttgcaattccatttaaatagatttttgatgttattctctcaaaaataaaggacagtatatggactgtagtatgaggtgattttactgttggttttattgttgttaagctactctttttctacttttctcattttcttggtaaagggatcaggtcatagtact

SEQ ID NO: 773644 - DNA, 619 bp, Homo sapiens
cccatatcattacaaatacttaagtatacatatttttatgacaatatatggttttattccatctttctaaacacatagactttcacactttacttgtcccattaggtgtgcattcgtatttcattgttttcatgactctgatagaattatcataatgatcgtttttgatgtaacaattatttttatacgacctttgtgagctatttattgtatcacaaatttgtcctgggtcttctcccagttcctctagttggcattttcagtttcctgrccatgctgtcactatggatactctcaaagaaagaggaaaaaaccagaaaatccatttcatgtaggtcaattcctccaagtctgtactattgtccacccttttccaataactaaatcaatgagtaaaatttacctgcttctattcactctctagtgcccttcagaaatttctgttttgtggttgtttatagattttaaaatggtttactgtaacttactcttccataggagaagaggaactcgggctaccccttcattctgctttctttttgtctttttgagcaggatgctgagcctatcatacattttaaaattttgaatgctattataatggagctgtggaagcttt

SEQ ID NO: 773645 - DNA, 466 bp, Homo sapiens
cataatattataaggacatgaaaaggtaggaaaaccagaagctataaaccaattgtcctcatgaaaacagattttaaaataaacaataatagcaaattgaatttatcagtatataaagaggatgctgaatcataatcatgtagcttatttgtgaaagcatttatttttattcttttaaatacttggtaatcacttgatttatattttctyactaaataaaaaagcaaaatttaaggtcgtctcagtggatgccaaaaaaagcatatgaaaaagtcaacagctagcaactataaacacattgacaagctaggaggcggaggggacttccttaatcataaattattaaaaatgtttattctgaggtctggattgaaacaaggatgtctcctcgcaccatttctatccagcattgtatgaaagtcacagccagaaaaataaaccatgcgaaaaaagaatgaaatcacag

SEQ ID NO: 773646 - DNA, 466 bp, Homo sapiens
cataatattataaggacatgaaaaggtaggaaaaccagaagctataaaccaattgtcctcatgaaaacagattttaaaataaacaataatagcaaattgaatttatcagtatataaagaggatgctgaatcataatcatgtagcttatttgtgaaagcatttatttttattcttttaaatacttggtaatcacttgatttatattttcttactaaataaaaaagcaaaatttaaggtcgtctcagtggatgccaaaaaaagcatatgaaaaagtcaacagctagcaactataaacacattgacaagctaggaggcggaggggactyccttaatcataaattattaaaaatgtttattctgaggtctggattgaaacaaggatgtctcctcgcaccatttctatccagcattgtatgaaagtcacagccagaaaaataaaccatgcgaaaaaagaatgaaatcacag

SEQ ID NO: 773647 - DNA, 620 bp, Homo sapiens
aaagaatgaaatcacagtgatttgaaggtaagaacaaaaaatacgattcttagaaaatctcaaacaatatggattctaaataaattgaaactatacatttagcagaaactaaatataaggtcagcttaagtattgtatttctgtgtaaatattgtatttctataataagcaattagaaaatgaaattttaaactatttataacgtaaagcaccaagtaactgatactaacaaagatgtgcatattctataagcagaaaactacaaaacacagtgaacatgaattaaagtctacatagagaaacttctttgactggaagactcaatgtcaacagaacttcacttaatatgaaaagttctscacctattgatcaaaacatttgatgcaactctaatgaaaataccagaaggtagtttgcctgtttgtttgtttatttattgtcattggcatactgactctaaaattcatatgtgggctcaaagggtcaagagtaactaaaataaccttatatgacaataacaaaatcaaagggtttatggtaccaaatgtcaagacttataatattggtagaatcattaaaaccactgagcattgattgagcattaggtaaacagacagata

SEQ ID NO: 773648 - DNA, 464 bp, Homo sapiens
gacttctgaggaagttgatctagttgaagagctgaaagagtcataaccacctctgttttagccttaccttcccttgggaagccattccacctttttgtcaatgtgaacaatggagtagctttggaagtgattactcaagaataggggggtcatcaaccagcctgcggacttactttcaaatgtcttagacccagttacttgtggatggcctcartattgcggttacaacagtattggtcaaagaaagtagaaagtttacctttcaaggaaaattgacagtaagcacgtttcaccaagttacaactatcttaaaccagaaagcagggaggtggctcacagacacaagaatcttaaaatataacgctatgtttttagaaaaagatgatttaacattaaccactgataatgagcttaaccaagcaggtttcataaagggggatcccaatctaaagagggaacgcaca

SEQ ID NO: 773649 - DNA, 587 bp, Homo sapiens
atacagccaaatgaaacattatcctaaaaagtcacttaattgcagctgtggaaatgagactttgaacattttagaaagaaatcatatttgagacgtaaataaatacacttcaaaattattttaagacattgcctagtgaaaattcttccctgtaaatggtggttattgggtttttttccccacaaaaatggaaaatcagtccttccaattagctaagttagygaacaatctaaagaataatgtagtaaatttcaaaaatatctgtaaataaaatgtaacgaaattacctacctttttgtatataaatgttagtagggcctttttttgtttgttgtgttttattttttaattaggtcatatggaaagtaactcagatggtaatatgaaaactatgtgctaattacttcaatcgcttgtaattttttaattatataattcctaaaagaaaattatatttctcatatgaaaaatgaaaacataaacagagaaaaagataagtataatgacatttgttttacacagggccaacgaaagtaaaaagaaatggaaggtcggaggactactcacagactctttgtaggtttctg

SEQ ID NO: 773650 - DNA, 628 bp, Homo sapiens
gaatgagtcagggcggagcaggtatcacataattggaatgagtcagggcggagctggtaactggaatgagtcagggtggagcagtaatcgaaaaaggttgctttatgaggaagttaagtttaaaagtagaaggcaaagaattgaacatactgacatattgattctttaaaatgaaatttagaactcgtatctaacattttggttggaattctttcataggatttttgatgatcttaaatcatcattttccaaaatatattctacaactgctttyttttaaaatactcagtgaaactgggtttacaaatgctgtataccgaattcccttcatggagtcacagtttaaaatcctgccaaatcctgttttttttttttaaaaaaaaaaaaaaagaagagaaggaaaaccttgtttaattttgtttacccagcatttccccaattccccccaagtaacagctatcagtactctacagagctagtattagcagaatagtttaaagagctctccccactcatcctcccgctcaccataaaaataggatagtcctgagtcttccttgcagaaccaagctgctttttcctcatatgttatatctgcatgatatcatcagggatcttgctgtttaat

SEQ ID NO: 773651 - DNA, 651 bp, Homo sapiens
ctgactttgtgctccacccacctcagcctcccaaagtgctgggattacaggcatgagccactgtgcccggccaggttaatttttgtataagagtgtaaggaagaggtccagtttcaattttctgtatatagctataagcaccatttattaattggaaatcccttccccattgcttgttctgtcaggtttgtcaacgatcagatggttgtaggtgtgtggtcttatttctgagttctgtattctgktccactggtctacatatttgttttggtaccaataccatgctgtttgggttcctgtagccttgtagtatagtctgaagtcaggtagcatgatgcctccatctttgttctttttgcttagtatcatcttagctattcaggctcttttttggttccatgtgaattttaatatagtattttctaaatctgtgaagaatgtcaatggtagtttaatgggaatagcattgaatctataaattattttgggcagtatggccattttcacaatactgattcttcaaatacatgagcatggaatgtttttccatttgtttgtgtcctctctgatttttttgacctgtggtttgtagttctctttgaagaggtgcttcacttgccttgttagctttattcctaggtattttactgt

SEQ ID NO: 773652 - DNA, 645 bp, Homo sapiens
gcccaggagttctaggctgcaatgatctatgattgtcatcagcctgggtgacagagtgagaccctgtctccaaaaagaagaaagaaaattcaaaatgctccaaaattctaaacttgtagtgggctggcatgatactcagaagaaatgttcattggagcatttcagatgtcagattttcagatttagaatgctcaaccagtaaatatgatgcagatattccaaaatcagaaacacttctggtcccaagtatttcagataagggacattcaacctgtaatgtcaactcaaatgtgccaaggaaagcaaatatacaccatcagtgtgaaaaatactgaagaaaggtggggcttcattacaccctcagattcctgtacatctctgttaagttttaataaaagatgtttaattaataacttttttggcatgctgattatcctaaaagtactttgtgagaatctgataaggatttgttaaaagctcagttttttggagyttatctatatgaatataatttcaagacttcaacatttttagagttgccattgattatgttatgctgcatttgtaagaaatggtactgccctgagtatactcatggtaaaggcagttgagaattacagttttatctcatttgaatttagtgcc

SEQ ID NO: 773653 - DNA, 574 bp, Homo sapiens
tttgtcagatggatagatcacaaaaattttctcccattgtggagatggttcattctctctgataatagtttcttttgctgtgcagaaactctttagtttaattagttcctgtttgtaaatttttgctcttattgcaattgcttttgacatttttgtcatgaaatctttgcccatgcctatgtcctgaatgatattgcctagattttctcctayggtttttatagttttgcattttacatttaagtctttaatccatcttgagttaatttttgtataaggtgtaatgaaggggtccagtttcagttttcggcatatggctagccagtggttccagcttcttttatttcttcagtatttattgagcatctgctatgtgccaggccctgttctaagacccaaagacaatgtgcttgatggaaaattgttttgtttttactcttcaccttcatattcccagtacctatcatctgataactgcctgtaaatgctgattgaaaaataaggctcatataaaagaatggaaaagttaatcatttctttggaattagccaataaaattttgtccagcccaagt

SEQ ID NO: 773654 - DNA, 645 bp, Homo sapiens
aggtaaggaaaaatgaaatatgtatcagattacaaatacgaaattttcctggagtcttcttatttcatgtaagcctgtatcaatatcagtgccccatttagaagtcttgactcttcgttttttccttctcctatttttcttcattttttcttctcctccttcactcttaaaaaaaatttctttttcctttccatccttcttttttcctttttcaaaaatacactacctcttgtttccartaggcagcacctgtatctttttttggtgaactctcctcatgctgccacagagcacattgcctacatccctagagagccaagagtacttagaaaattccatgagccttcaggtggtcctaattcagtgggtgctgagatatgaaagcccacctcccttatttttgtcagaacaactttgaggcataactcacactctataaatcccttggatcagtctgaacacccttgagggaccttgagattgcaccctcacttgccttcttccccttcattgttctgtttcccctattccccttccatggtgttcctggggaacttccttaattaatcacttgagcacacatttttattttggagttgcttcacttagaaaataatttcttccgtcaaaaaagttaaattggca

SEQ ID NO: 773655 - DNA, 614 bp, Homo sapiens
tggaagtcggctcaaggaggtcctgaagacgggactcctgggggctcggccctgggacacccgtggccccctctcccacgcggccccaaactggaccccggatccagccgcagccgctgcagcaggcgcgccccctgccgccgcgcagccgcccgtatttaaaggggacgcagcctgcctgactgccaggagccaagcgcgagtcrgcccagccaaagcgcactggaggcgcgcgccgctttttgcttcacagtgcttcccacggttgtcttaggaaccagtccccgaggcttggcaacgcgggagccctccgtggcggcgcttgggtgtcgggcctccgaggctccggcctgacctctccacggggtccacaggaacgtctccggctgccaggagtcacaaggggccgagcaggatgaggaaaccacaggcggagtccgggggaagcagcgtggcatcccagcctcaggcctgccaggacggtgttcgggtgagtctcccgagaagtcgtgcccccgtgatctcgaggacaggtccgcctgcgtgcccgagggctgttctctcagccgagggttgttcccctccagagcagaacccggcagccgcaggggttg

SEQ ID NO: 773656 - DNA, 534 bp, Homo sapiens
tgtgtggtggtgtggcttcatttcgcagagaaggggcgtggaaaggtaaaaccatcttcttggacgtgggtctgctcctctcctgccggacaatgtgctaccgtggggcttttgtcctgggctgcagtgtggtcctctcgatcctagaaaagaggccgctcaggatggggatgagacttccattgctccgkgcccgatgcatcccctcacgttatcgaggcctgcacagacccaaagtggaaccgccgcgaagacgatggacagctggccgcaggacccagggagagacgcagaaagaggctcaccaaagaccggtccacataaaagacatcactttttgacgcacagggcacattcgtccaaagacacacacacacacacacacacacacacacacacacagagggaaagaagcacacagagggtgagagacagagagagaagggagaatgggagacacagccccacacacagtcctaccgcggtggccgagaaatacacgcccccaggcaacccctgcggctgccgggttct

SEQ ID NO: 773657 - DNA, 533 bp, Homo sapiens
ctggaggggaacaaccctcggctgagagaacagccctcgggcacgcaggcggacctgtcctcgagatcacgggggcacgacttctcgggagactcacccgaacaccgtcctggcaggcctgaggctgggatgccacgctgcttcccccggactccgcctgtggtttcctcatcctgctcggccccttgygactcctggcagccggagacgttcctgtggaccccgtggagaggtcaggccggagcctcggaggcccgacacccaggcgctgccacggagggctcccgcgttgccaagcctcggggactggttcctaagacaaccgtgggaagcactgtgaagcaaaaagcggcgccgcctcagctgcgctttggctgggccgactcgcgcttggctcctggcagtcaggcaggctgcgtcccctttaaatacgggcggctgcgcggcggcagggggcgcgcctgctgcagcagcggctgcggctggatccggggtccagtttggggccgcgtgggagagggggccacgggtgt

SEQ ID NO: 773658 - DNA, 591 bp, Homo sapiens
cggcagggggcgcgcctgctgcagcagcggctgcggctggatccggggtccagtttggggccgcgtgggagagggggccacgggtgtcccagggccgagcccccaggagtcccgtcttcaggacctccttgagccgacttccaccgatggacggggagcttcagggcgcctgctgggttctcaggactcctcttcagatgcgattttggaccactctgggcgagaaaggatgggctcaccacatctgctgaggcaggcagggcctcgctgcagcacagwatgatcccatggccctcaaggcctgctgtcagcggaaaattcactgatccgtgagccctctgcctccctcctcctttgaaagagcggtggcctggcccgcttctaaaagccctggggctcctgcaagccgacaccgctttccaggacacgtgcagacagggacggggcgaatcccaggtggagacaatgcgatcacgcctggcactggcgtataccagagcagatggcgtgaatgtatgtcaccggaggcatgtggggcgagggcgaaaacaacagtggtgcccaggcatgcgcccggtagaaaggggatca

SEQ ID NO: 773659 - DNA, 601 bp, Homo sapiens
ggctgcgcggcggcagggggcgcgcctgctgcagcagcggctgcggctggatccggggtccagtttggggccgcgtgggagagggggccacgggtgtcccagggccgagcccccaggagtcccgtcttcaggacctccttgagccgacttccaccgatggacggggagcttcagggcgcctgctgggttctcaggactcctcttcagatgcgattttggaccactctgggcgagaaaggatgggctcaccacatctgctgaggcaggcagggcctcgctgcagcacagaatgatcccatggccctcaaggcctgctgtcagcggaaaattcactgatccgtgagccctctgcctccctcctcctttgaaagagcrgtggcctggcccgcttctaaaagccctggggctcctgcaagccgacaccgctttccaggacacgtgcagacagggacggggcgaatcccaggtggagacaatgcgatcacgcctggcactggcgtataccagagcagatggcgtgaatgtatgtcaccggaggcatgtggggcgagggcgaaaacaacagtggtgcccaggcatgcgcccggtagaaaggggatca

SEQ ID NO: 773660 - DNA, 490 bp, Homo sapiens
aaagcggcgccgcctcccatgcgctttggctgggccgactcgcgcttgtctgctggcagtcaggcaggctgcgtcccctttaaatacgggcggctgcgcggcggcagggggcgcgcctgctgcagcggctgcggctggatccggggtccagtttggggccgcgtgggagagggggccacgggtgtcccagggccgagcccccaggagtcccgtcttcaggacctccttgagccgacttccaccgatggacggggagcttcagggcgcctgctgggttctcaggactcctcttcagatgcgattttggaccactctgggcgagaaaggatgggctcaccacatctgctgaggcaggcagggcctcgctgmagcacagaatgatcccatggccctcaaggcctgctgtcagcggaaaattcactgatccgtgagccctctgcctccctcctcctttgaaagagcggtggcctggcccgcttctaaaagccct

SEQ ID NO: 773661 - DNA, 557 bp, Homo sapiens
  misc_feature 252: n = A,T,C or G
cagtttggggccgcgtgggagagggggcacgggtgtccagggccgagccccaggagtcccgtcttcaggacctccttgagccgacttccaccgatggacggggagcttcagggcgcctgctgggcttctcaggactcctcttcagatgcgattttggaccactctgggcgagaaaggatgggctcaccacatctgctgaggcaggcagggctcgctgaagcacagaatgatcccatggccctcaaggctggnctgtcagcggaaaattcactgatccgtgagccctctgcctccctcctcctttgaaagagcggtggcctggcccgcttctaaaagccctgggcstcctgcaagccgacaccgctttccaggacacgtgcagacagggacggggcgaatcccaggtggagacaatgcgatcacgcctggcactggcgtataccagagcagatggcgtgaatgtatgtcaccggagcatgtggggcgagggcgaaaaacagtggtgcccaggcatgcgccggtagaaaggggatcaagtggcctttccctgagtgcca

SEQ ID NO: 773662 - DNA, 531 bp, Homo sapiens
cgcctgcgcagcggctgcggctggatccggggtacagtttcggggcgcctgtgacaaggggccgcgggtgtccccgggcaaagcccccaggaatcccgtattcaggacctccttgagccaacttccgccgatggacggggagcttcagggcgcctgctgggttctcaggactcctcttcagatgcsattttggaccactccgggtgagaaaggaggggctcaccacatttgctgaggcaggcagggcctggctgcagcagagaatgatcccatggccctcaaggcctgctgtcagtggaaaattcactgaatcgtgagccctctgcctccctcctcctttgaaacagcagtgaactggcccgcttctgaaagccctggggctcctgcaagccgataccgctttccaggacacgtgcagacagggacggggcgaatgccaggtggtgacaatgcggtcacgcctggcactggcatataccagagcagatggcgtgaatgtatgtcaccggaggcatatggggcaagggagaa

SEQ ID NO: 773663 - DNA, 623 bp, Homo sapiens
gctgcagccgcggctgcggctggatccggggtccagtttggggccgcgtgggagagggggccacgggtgtcccagggccgagcccccaggagtcccgtcttcaggacctccttgagccgacttccaccgatggacggggagcttcagggcgcctgctgggttctcaggactcctcttcagatgcgattttggaccactctgggcgagaaaggatggsctcaccacatctgctgaggcaggcagggcctcgctgcagcacagaatgatcccatggccctcaaggctggtgtcagcggaaaattcactgatccgtgagccctctgcctccctcctcctttgaaagagcggtggcctggcccgcttctaaaagccctggggctcctgcaagccgacaccgctttccaggacacgtgcagacagggacggggcgaatcccaggtggagacaatgcgatcacgcctggcactggcgtataccagagcagatggcgtgaatgtatgtcaccggagcactgtggggcgagggcgaaacgaacagtggtgcccaggcatgcgcccggtagaaaggggatcaagtggcctttccctgagtgccaagggaacacaaagaagacctgggaacct

SEQ ID NO: 773664 - DNA, 482 bp, Homo sapiens
aacctgtaacatgagataaatggtatcctctctacataggcacttcttttatgcctcaatcctgcgagacccatgtatacattcatttatgcactcagcaaatatttactaagcacctgttgcatgggtaactgggaaatacagcaatgaacaaaacaaaattcctgctcacatggaggttacattcttgtggtaaaaaaatgtattttcaggtcatgataagtacaatggagaaacaaaaagtggggaaagaagatagagacagtggatggtaggataatgaatttaaatagaatgctcagagaaagtcttaytgagaaaataaaatcttaataaagatttaaacaaggttaggttaggcctggtacagtggctcaagcctgcaatcccagcactttgagaggccaaggaaggaagatcacttgagcccaggagatagaggctgtagtgagcatatctgcaccactatactccagtctggg

SEQ ID NO: 773665 - DNA, 497 bp, Homo sapiens
cactactattcagtatcataccaaaagttttagtcagtataatacagtaagggaaaaaaaaagcacagactggaaaggaaaaagtaaaaccttttctattcatacgcaatgtgattgtcatgtagaaaatcttaaggtttctagaaaaaaaactcttcaaactaacgtatgaatttatcaaggckataagatacaaggataatatacaaaaatcaattacatttctacttattaacaatgaactaacaatccaataaaaatataccatttataatagcaccaaaatcataaaatatttaggcataagtctaataaatagatgaagaatctgaatgttgaaaacaacagaaaaaatcaaagatgatctaaataaatggagagatatacagtgttcatggaccagaagacttaatattgctaagatgtaaattctgcccaaattgctctaacggccaacacaatcccaataaaaattctagaagatcttttggtatata

SEQ ID NO: 773666 - DNA, 532 bp, Homo sapiens
tgacctaatgtaagagctaaaactataaaacttacagaggaaaacatgagaaaatctttgagactttgtttaagcaaaattttctttttttttttttctgagacagagtttcactcttgttgcccaggctggagtgcaacggcacaatctcggctcaccccaacctctgcctcccaggttcaagcaattctcctgcctcagcctcccgagcagctgggattacaggcaagcaccaccaygcccggctaattttgtatttttagtagagatggggtttcaccatgttggtcaggctggtctcaaactgccgacctcctgtgattcgcccgcctcggcctcccaaagtgctgggattacaggcgtgagccaccgcacttggtcctgtttaagcaaattttcttagaacacaaaaagcaagaaccacaaaagaaaaaaaatgataaatataacttcataaaaatttaaaacatttgctctttgaaagatattaagaaaatgaaaatgcaagcctcagactaggaaatatgtatat

SEQ ID NO: 773667 - DNA, 532 bp, Homo sapiens
tgacctaatgtaagagctaaaactataaaacttacagaggaaaacatgagaaaatctttgagactttgtttaagcaaaattttctttttttttttttctgagacagagtttcactcttgttgcccaggctggagtgcaacggcacaatctcggctcaccccaacctctgcctcccaggttcaagcaattctcctgcctcagcctcccgagcagctgggattacaggcaagcaccaccatgcccggctaattttgtatttttagtagagatggggtttcaccatgttggtcaggctggtctcaaactgccgacctcctgtgattcgccygcctcggcctcccaaagtgctgggattacaggcgtgagccaccgcacttggtcctgtttaagcaaattttcttagaacacaaaaagcaagaaccacaaaagaaaaaaaatgataaatataacttcataaaaatttaaaacatttgctctttgaaagatattaagaaaatgaaaatgcaagcctcagactaggaaatatgtatat

SEQ ID NO: 773668 - DNA, 669 bp, Homo sapiens
aaagtgtacatgcatcctctgcatgacccagaaattccattcctagatatttaaccagataaaggaaaatacgttcacaaaagcttggaagcaaatgtccaaagcagctttatctataagtgccaaagactgaaaaagttgccatcagtccagcaacaagagaataattaaccacacaacagtagtcagtaataaaaaggaaaggaaataattgtttatacacatctagcaagggggaatctcaaaaacatcattctgaattaaattatatacacacaaaataattttcatttatatgacttttagaatacggaaaacaaatttttggtgatagaactgagataagtgtttacttcaaaaatgggggaaaaggattgtcagaaggcataaataatgatggaattattttattccagattgtattagtacaggataaatrgtgcatgtgtttgtgaaactgatgagacaatacccttaatttctatgtagttcactatatgtaagttctatttcaaattttaacaatatttcaggccaaatataagtgtttaagtaattgttttggttgttaaactgtctctgaagtttgaaagattaacttgtgttttatacttcatttgtcttaagtgtgtatttttggcttttctatcatgatgtatttttaagaca

SEQ ID NO: 773669 - DNA, 623 bp, Homo sapiens
ctcttctggcccagggtgtgcctagaaatgtcatctgggagctagagcctggaatgagggcctcataaatctgaccagtgccttatcctcctgtggctgagcttgtatcctaaatacaaaacaaagtcatcctccccattcttccctctccactcctcaggtggatagaacggtctctttgaaaccggagtgtgcagcttggggttagggaggggtgatgcctgaactgccttggcttccccagctmgtgtctcagtatgtcgcatgccccacaaaccactgtctctaggcttcatgtcagcactaagactcacctaagagttgcggcccttatagcttagattgcctttcaagtttacttgaagacacagagtgccgtagccctggatggtgaggtttgcagacactcaagttctgaccactgggataggtgatccccctttggatagggctggtttaaaagatccctccatgggcgggtgtcagctgagtattgtccagttttcgtttctgctgtaatagtatggcactgatctccctcccccagagtccagaaatgcattccacaccagatctcaattccagggcatggtggaagtgggggctttggtgattcagaactg

SEQ ID NO: 773670 - DNA, 623 bp, Homo sapiens
ctcttctggcccagggtgtgcctagaaatgtcatctgggagctagagcctggaatgagggcctcataaatctgaccagtgccttatcctcctgtggctgagcttgtatcctaaatacaaaacaaagtcatcctccccattcttccctctccactcctcaggtggatagaacggtctctttgaaaccggagtgtgcagcttggggttagggaggggtgatgcctgaactgccttggcttccccagctcgtgtctcagtatgtcgcatgccccacaaaccactgtctctaggcttcatgtcagcactaagactcacctaagagttgcggcccttatarcttagattgcctttcaagtttacttgaagacacagagtgccgtagccctggatggtgaggtttgcagacactcaagttctgaccactgggataggtgatccccctttggatagggctggtttaaaagatccctccatgggcgggtgtcagctgagtattgtccagttttcgtttctgctgtaatagtatggcactgatctccctcccccagagtccagaaatgcattccacaccagatctcaattccagggcatggtggaagtgggggctttggtgattcagaactg

SEQ ID NO: 773671 - DNA, 627 bp, Homo sapiens
gcagtatcagaataacgatcaaagtgtttacatttgtaatttaccaaggaatatcataaaactggtagcagagtgggtgggaagttagaatcagtgcttagagattttgaagtatcttaaccaggaggatggaacatagataatgactgcatttaatgtcttacattgaacaactatctaaccctttaaaaagtttgctaatgcaaacatgaacaccatgcctgattgttccccatgttattgattgatcagatcatcgttacccaatacagagaaagggattaaaagatttcagagaacaaacatgtttgaatgagtccgccatgtgcttcctgagccactcttggcttcagaayatactaggaagagaagtgcccagatcttctaaaaagcctaccctagttcttctggctatatgcctgtcctgaaaaggtcaggcatatcagaagagaaaagcttcaactgagtaagattgttgatctaccactgaatataaggtgctgtgtgcacagggtccacatggcagtagtttaccacaagtgaaaattcagcaacgtgaatgtggtacctggtttgggaaatgattcaatccatcctatcaaggataatatgtatcaatgtattaca

SEQ ID NO: 773672 - DNA, 634 bp, Homo sapiens
atattattcaacactaaaaagaaatgagcagagaagaggtcagcaagatggcagaataggaagctccccacttgacctcctcccagagatgcacaagtaaagagctgcacacaggtccatttcctctaagaaaaattcaggagctagttcagtgactcctacacactgcaactaaaaaagtattcacatcaaaatgggcaggaaaagctgagacatgcttacgtcacaaaatctaccctggtcacagcaccttaaaattggagggaaccccaaactccaagcttctccccgaggagagaagggtttagaccacacatacagcaccctgacttttacagctctcacttaagagaaagactcctaaatcaccctaggagtgaatgtggctcagcatccatgagttttttctaaaacaaggagaacaaagtggttgccttaaacaggtatgtaagcactctctactaaattcctctgsgctcagtgtagaacaagcaggcaacaatgcccacatcctagtttctccctggaaggaatctgactgtacacttactcagctgatgtctcagaatatgtcttcttactagctggcatctgagaattgacatgacaggtaattagtaagaactctcctact

SEQ ID NO: 773673 - DNA, 657 bp, Homo sapiens
aatagcagagacatggaatcatcctaaatgcccatcagtgaaagactggataaataaaatgtggtacatatatacaacggaatactatgcagccatacaaaaagaacaagattatttcctttgcagggacatgaagctggaggccattatctttaccaaacagaggaacagaaaaccaaatattgcatgttctcacttataagtgggaactaaataatgagaacacatggacacacaggataacaacacacactggagcctgccggagagtggagcatgggaagaggaagagaatcagaagaaatatctaatgggtsctaggcttaatacctgggtaatgaaataatctgtacaataaatccccatgataaaagtttacctatgtaacaaacctacacatgtaccattgaacttaaaatgattttttaaaaaagaaagatagctgcagaccaatatctcaggaatggatatgcaaacatccttaaagaatattaacaaataggatttagcaacatatagaaagaattatatatcctaacaaagtgggttttttacaggaatacaaagctggtaaacattttacaaaattaatgcaatctacatattaacaagctaacaagaaaaaaataattacaccaatctacacagaaatgccat

SEQ ID NO: 773674 - DNA, 638 bp, Homo sapiens
cttgcaattggaaaatatataatctattccacctccaaagatcacaagttgaaagggagccagatcacagaatcaaagctcagccgatagttactccatactacaaaatatacaattgtatcaaaattggagcagattcctgaggcagatattatgattacaatttagtctgttgctgtacctaaaataagatataagaccaagttcagggctttgctaccwactgataattgcagagtggctggtgggtggagaatatgaaaaagttgtgtggtttttaactatcctatcaccttccttaaaaataatcacttcaggccgggcatggtggctcacgcctgtaatcccggcattttgggatgccgaggtgggcagatcacctgaggtcgggagttccagaccagcctgaccaacacagagaaatcccctctctagtaaaatacaaaaaaaattagccaggcctgggggcacatgcctgtaatcccagctactctgcaggctgagacaggagaattgcttgaacctgggagaattgcttgaaccgcagaggttgcggtgagctgagatcacaccattgcactccagcccgggcaacaagggtgaaactccatctcaaataaataaataaataaataaga

SEQ ID NO: 773675 - DNA, 609 bp, Homo sapiens
tatctcatgttgttctcacactgcaaaatacaatgatgacttctctacagtttcccaatgtcttcactcattccagcatttactgaaatgtccaaagcccaaagtctcttctgagacaaggctgccatacgttctacctgagcttctgaaatacaaagcaagttaactacttccaaagtacaatgattgtacaggcattgggtaagtattcccagccaaaaggaagaaatttgccagaaagaagcacaaaacacagatgggacttacaaaccccataggagtcaaaaatccaacagccagtcattgaatcccacagttccaaatccctttttwtgaatccagatcccacatccagagcacaagggtatgaggcctgggctcccaaggtcttgggcagctctgcacctgtgacgttgcagggtctaacctccacagttgccctgatgggctaggctggtgttgagtacctatagcttttccacaatgaaggtgcaagctgctagtgagtctatgaatctggggtttgcagaatggtgcctccctgtatgcggtcccaaccctatatgttccttctgtactgccctagtaaaggaggctctgctctcttgg

SEQ ID NO: 773676 - DNA, 605 bp, Homo sapiens
catccaccaccgtgcttggttaattttttaaagtgtttgtagagataaggtctcactctcttgcacaggttggtcttgaactcttggcctcaagtgatcttcccacctcagcctcccaaagtgttgggattataggtgtgagtcaccrtgctcaacccagaaagtatttttatgtaaaaataaattatgcaatggcattttatgaacttcaaagaaaaatactttatttgtgttgttctcatatctgagaataaaaatgattaattttctaaataaaacattctgttattttacaacttttctcaaaatggaagggtttaaattgtgattaaaagtagtaggtagagtgtacacttatgttcatagcagcattacttacaatagtcaagattagaaactactcaagtgttcatctacagatgaattgaaacaaaatttgtatatatatatatatatatgaatattattcagccttaaaagggaatgaaactctgacacaatactacaacatggaggcatcttgcagatatgctaagtaaaataagcaagccacaaaaagacaaatactatgagtccacttacatgaagtgtctaaagtaataaaa

SEQ ID NO: 773677 - DNA, 628 bp, Homo sapiens
tgttattttacaacttttctcaaaatggaagggtttaaattgtgattaaaagtagtaggtagagtgtacacttatgttcatagcagcattacttacaatagtcaagattagaaactactcaagtgttcatctacagatgaattgaaacaaaatttgtatatatatatatatatatgaatattattcagccttaaaagggaatgaaactctgacacaatactacaacrtggaggcatcttgcagatatgctaagtaaaataagcaagccacaaaaagacaaatactatgagtccacttacatgaagtgtctaaagtaataaaatgcatagaaatggaaagtagaattatggttgccaggagctgaggagaggggaaaatgaggagttgtttaatggggatagagtttcagttgtgacagatggaaaagttctggacactgattacacaacaatgtaattcacttaacactattgaactgcacacttaaaaatggttaagatggtgaattttatgttatgtgtattttaccactattttaaaaattagttgaaaaatagtaggccaaaatttgtttctaactatggcttcccaccgccatttagggggagttttgttgtgaaattttagg

SEQ ID NO: 773678 - DNA, 628 bp, Homo sapiens
tgttattttacaacttttctcaaaatggaagggtttaaattgtgattaaaagtagtaggtagagtgtacacttatgttcatagcagcattacttacaatagtcaagattagaaactactcaagtgttcatctacagatgaattgaaacaaaatttgtatatatatatatatatatgaatattattcagccttaaaagggaatgaaactctgacacaatactacaacatggaggcatcttgcagayatgctaagtaaaataagcaagccacaaaaagacaaatactatgagtccacttacatgaagtgtctaaagtaataaaatgcatagaaatggaaagtagaattatggttgccaggagctgaggagaggggaaaatgaggagttgtttaatggggatagagtttcagttgtgacagatggaaaagttctggacactgattacacaacaatgtaattcacttaacactattgaactgcacacttaaaaatggttaagatggtgaattttatgttatgtgtattttaccactattttaaaaattagttgaaaaatagtaggccaaaatttgtttctaactatggcttcccaccgccatttagggggagttttgttgtgaaattttagg

SEQ ID NO: 773679 - DNA, 500 bp, Homo sapiens
cgattccaagggtgtaattcgttcatcattttcaaactgtgcatcaagggtttttcctgctgcaattcttgtcaaaaactgacatatgtatatcgttctcaactggtaagctgttagactggatagtccatgaataatagcctctgcgctgttgcgggtcctgcagaagtcctcagagcggccgtcgsggaaagctcggcaaagagagaaacagaggaactcgagcatccagccggcagccacggcctcggcctcggcctcggccaccaggcccgcgtcctcctcctcctcctcgggggcccccacctgcacctggcacttgagccgttcctggcattcgaactgctcctcgtcgtttctctctgtttctgccatctgctcctcggtagggtcggcatccctaccatccgccggcatatttattacaatttatttttatgaaaaaagattaaaaagagatatgtctgctctaagcagttacgtgaaaatggataaataca

SEQ ID NO: 773680 - DNA, 590 bp, Homo sapiens
ggggtgtctgcatcaaacagcctgtgctctaatgtgtgaccgaggttatgtgtgaccgaggaaatgacctcaagttggaagttatatgtaaatgacaagcagagctcaaaagtttggaatatctgcagcctggccaagtgatcaaaaagagaagctgattttcagggggaaaattcatgaaggctccagaaatttgcttaaaatggaggccagtgctaatagccaagacaatgggggaaaaagccttggaggcatttcagagatgtttgcagcagcacttgctgtcaggccctgggtcctaggagagatgaatggtttcctgggccagccctgtgaccctgttgctgtgtgcagcctcaggacactgctgcytgcatcccggcagccccagctcctgctccgaccttggctgaaagatgcacaggtacagattgcatcactgcttcagagggtacaggccataagacttcatggcttccacatagtgttaagccagtgaatgcacagagcactagtccagaggcttcggagccttcatgtagatttcggaagacatacgaaaatgcctgggtgtccagacagaaggcgcc

SEQ ID NO: 773681 - DNA, 620 bp, Homo sapiens
aaaactagaaagattttaaattgaactatagccctgttaagattgcttttaataagattttgcataaagtaaaatttaaaagcttgattatgaaataatttaaatcctttcaaaaacttccataaacaaactggaacctccaattgttcatgtaaaacatgaacaatatgtaaacatgtaaaacaatatgcctagcaagctttctagacagcacatgatttgtaactgcatttgtatattctgaaacctttgtagtatatttaaattattttaaatataaattcagtttagcattaagtcaaaaaaatttaaacgaaagttaaarctatcaaagtagttcaaattcaatatcagttttaataaaaactctcaaaacatataatctttacaaccaagacaaattagtttttcatttttctaaactcaatccagtgtttttcctataatgattttaagcactaatgcaagagagaaggtccacaaaacatctgctattttattttgcattaatttgttctttgcagtaatttgagaaaatacattcaaaaattaaacaaagttcaattttcaacgtaactaagaaaccaattgtattcaaattataaaataaatctgtggat

SEQ ID NO: 773682 - DNA, 597 bp, Homo sapiens
catattctgtgtaggaagtttgggagtgaagggggacattgtttttttgataagaccctttcccaccccctataaaagaaagtccccattttggagtccccctacctgaacatgtgttgagaaggcctttctgcgctatagcttcaggcttctttacttcaggcttcttcacttcaggcttcctcacttcaggcttcctctgatgctgggttaggttctgtgggcaggtgatcttctcctcacttcttcaggaatcctgtagaggtgagcggggagagcactgggcttttgagcaagaaggcttctcagcccctcccagcatccttttcttctaaccactctgggaaaaggwgacccttatcggctgccccatccctgtgcccatttccattagaggggaggactttgctccctacctcacacgggggtgggtgtcagagtgaacccttctagcctctcgctgttccttacttgctcttttctaggaaaaaaaaagtagctaattttactgatcattcattcatttgtttattcaattcactcatgaattcaattcaaattcattcatcgaacttcaactctttgcccagtaattac

SEQ ID NO: 773683 - DNA, 612 bp, Homo sapiens
actatgcatattgtaaaataaaataattggcataactctattattgcacaaaacggattcaaggaaaataataatatctgggtatatacccaaaggaatacaaataatattattataaagacacatgcacacatacgttcactgcaacacaattcacaatagcaaagacccggaatcaacctaaatgcccattaattacaraccagataaagaagatgtggtacatatataccagggaatattatgcagccataaaaaataacaagattatgtcctttacagggacatggagggaactggaagccattatcctcagcaaacgaacacaggaacagaaaaccaaacaccgcatattctcacttataagtgggagctgaatgatgagaaggtatggacacatggtgaggaaccacacacactggggccttctggagcatggtaggtgggaggagggagggcatcagaaaaaataactaatggatattagggttaatacctgggtgatgaaataatctgttcaacaaactcccatgatagaagtttacttatgtaacaaacctgcacatgtatccttgaacttaaaataaaaattgaaaagaaaagaaactataa

SEQ ID NO: 773684 - DNA, 616 bp, Homo sapiens
ttttctcactcagtcaaacatatttcatattttttcccaaataacatctaagaggagaggaaaggagtattatcaatctctgatgctttctactcctgtgttttttaatatatatgcacattttaaattgccatattaaaaatagaggagaacaagttatcttgcaatgctatattatcagaacttcaattaggagcactgtggagacatttgcaaaaccattctcttcacagtcaggcatccatttaaacattccttcctactcaatcaaaatgtatccagtttaaagaatttgctagtgacagstttgatcaataatttaagtacccaggcagaggcatcctcattctgtacagtacaatgcttgatagacatcctatctgagagggaaggggattaagagaaagtgttatgagccttttcatacttccacttctttaaaaggttgacatatttttatggatgacatcctgtgacattgataaagcaatcagagtatgttctgggggagaaattacctgtatatgatttgagagtatggacatttttagaagatgcctatccttgagagcatctattttaaaaatgcaagcacagccatttttctatttcctga

SEQ ID NO: 773685 - DNA, 560 bp, Homo sapiens
ccaagacgttacctttaatgtagcttcctccatggtgaagggcttttaatgttcatttagaaacaccctttctttgctattctgcttcctggcttccagggggaatggcagggctgtgacttgtgtcagtcagtagatgcctaagcctttcttttttaataagaataggattccagacaaaataaatcaagtttctccctgtcttcctgagagagtaacatctgaattagccacagtgtaaaatagccaaggataattaattatatgctttgagtcaaccctcattcccttccaattgaagtacacagacatcttttttaaatgtacttacaaagaaaattgtaaggatgtccgccatcttaaatttcctaaagtttctatcattgatactataacytttataatggaacatttggcaaggtaagcttactttacccactgctcctgatttgttttcactcaccttctgttacatgttttatcctatttcctttctagctctgccttagaaagaatctgatttctattcattcagtttgcttatactctgcaaattgtct

SEQ ID NO: 773686 - DNA, 623 bp, Homo sapiens
ttatagtggcatctgaaaaaatagacagaaaataaaacagcagttttcatgggtggaatggggagaaaggaaatggggagatgtaggtcaaataatacaaagtaacagattaggtaatatgaacaaatctaaagatctaatgtaagacacaaggactacagtgactaaaattatattgtattagaaatttttgttaaataagtagatgttagcttctgtgtttaaaaaatgtaactaagtgagatgacagatatgttaatctgcttcagtagagcaaccattttactatctacatgtatcccataacatcatatggtaaacctcaaatatacacaatacaatttaccytttttaaaaaacagtattctcttgaaatatggcatgccccacttttcacacaaaaacttccagtgcagacatttcaagatttgttagttaattcaacacttatttagtgaacgcctagcatgttccaagcatatttcaggcaatatcatccttcaacaaaataaagattcttgttttattacaaaattcattttagccaaaaagacagatgatggacataatggctaaaaagactgtgatgtgataggaggtggtcagggttagggaacacagag

SEQ ID NO: 773687 - DNA, 641 bp, Homo sapiens
accacaacactcagggtgcaaaactgttccattgctccccaaaatgtcctccttttgttgtcacatgttcaccccacctctatcaaccacctgtcattggttttagtggaattgactttatctttgactgaggtggggatcctttggaagattttgagcaaataagtggcataatctgctatattatatgtaatgtatgtatttcttttgttttcgtacttaattcaaatctatagaatgttaaaagaataaaatgaaccgctgtatttctttatgtctgtattttcaaatactggcactttacttgatttgttttatttttccatatatattatttcaatttcatgttgtttttcctactctatgtggtgagccatttgaaagaaatttgtcatgtacaatggcaattactactaaatacacgagtcatctaacaatagggaaattygtctcataagcacaacattatcacaccttccaagattaactttgatacaatgtcttctagtatataggccacaaatttctctcattgtcttaaaatattctttaaaaattttaaatcaaaaatccagtcaagatcacatatcacacttgcttgtcgtttctctcgtcatccctatcctggacaaatagctcca

SEQ ID NO: 773688 - DNA, 624 bp, Homo sapiens
ctaatattttattcatttaaattatattcttacaaaacttttacacttgtatttttatttgaaacttacctacaatttttcttaaaatgtccttatctagtttttatatcaaagcaagaattagttgggtatatttccttttgttttctaatgtctaagtttgaataagacaaatatctttttctaaaagactttcagatacttccttgtaaaatggctggatttagatatttttgaaatatttattgtagaagatgggtaagaaaggatgaagaattgtaactaatgacttgagtttcttaatggcacagggctgctgagattttcctatagctttttaagtaagttgtgaataattatattttgtccaaaaaatcattgacttatgctatttccaacatgatttgtacttgctttttacaagccctattttatttacatttataaamcatttggttttaggccaatattatttctggaccattcccacaatggctttctatgtattctttatttgcattttacaggcattgatgtgtagagatttcatggttgagttctgaatatttttaacgtacattttaaggtaagttcccatagaatgatttaacattatcactatta

SEQ ID NO: 773689 - DNA, 638 bp, Homo sapiens
gctcttgtcagacaccaaatctgccagcaccttgatgttggaatccacaacctttaaagctgaaagaaatgtgtgtgtgtgtgtgtgtgtgtgtgtgtgtgtgtacacaatatatatacacacacaggaaaacaaacaatatatatgaaatatgtatttatatataaatgtatatataaatatacacatatactgatatataaacatacatatatgaaatatatatagtttatttgcttgtttgtttacaagctgccaactcaatggtatttttatagcagttttgttatagcaaggaagggcaaggcagctctaaacatgaccttgtgtgtgtgtgtaattattaaagagcacagtttttgtgtcacagagccataggcttstatcctgtctctgctagtgtctagtttgattttttactcaagttacttagattctctaaagttttcatttcccagtctgtaaaattataatatttattttacaaattgttgcaaatattaaatgtgaggaagtatgtgaaatttttaacatacttctcagggtatatgtttggttgtaacgattattaattgatcaatgatatttcattattgtatgaatcagtctaataactgaggataaatgaatatattaga

SEQ ID NO: 773690 - DNA, 633 bp, Homo sapiens
caagctgtgatgtaattttggacattggcacttaagatattctttccttagcaaaatcttctcacctgcatttcttgaccattctcaactctcagcttgacatgagaattcatacttggtagtgaatacttaacagtggccagtaaaaagctaatttcattttaaatattttgtaatttttcagttccattctctgtctgagtcttgtcattttctgattagcaaagaacataaaataagttatgtagaaaacactatattgagctataaattttcagtattatcttgtcctcagactcaaattattcatatttaaattgatgggcaatgtttattatatttattgtcaaattaagatcaaacttgccttcaataattttagcaaagatttattaagtgcattctagtttccagaaatggtttctgcattctggatatgtagcaaygtacaaataaccctgatagataaagacaaagcttatattcaatagaatattaaaaaaaacagacaacaaataaacaaatgtttgatatatcagatgtatatgagggataaacagaaaaataacacatggtaatgtggctgtgcattgtgttatatagggcagcgaggaaagatctctatgagaagat

SEQ ID NO: 773691 - DNA, 640 bp, Homo sapiens
gtttctgcattctggatatgtagcaatgtacaaataaccctgatagataaagacaaagcttatattcaatagaatattaaaaaaaacagacaacaaataaacaaatgtttgatatatcagatgtatatgagggataaacagaaaaataacacatggtaatgtggctgtgcattgtgttatatagggcagcgaggaaagatctctatgagaagatggtttcagagcaaagatcttgctctacttagtgatgatcattactcttaytgtattttgagtggtatacttttcccggatagtccccttacattgctcatcagtactctttaggtttaaaacaaagaggaagctgtaaataaagataaaatacccaaagaaacaaacaatccacatgcctgagggatgaatccatcccatctgaccgaagagtttcaagtcagttacacaggtattgtgaaactgaaactcactctcctgaatggttggtcatagctcaggtccaatttttctcataggtacaatttaaccagcagttggaaatttcagtgagtatgcatttctttctaagctgttgactttattaagggagatcagatacagttctgtcatagcaaggcttcaaattacaactctggatccctca

SEQ ID NO: 773692 - DNA, 636 bp, Homo sapiens
ccatgctcttttattttttttatttttattttcttttaatatatctactgtcttttttttaattattatactttaagttttagggtacatgtgcacattgtgcaggttagttacatatgtatacatgtgccatgctggtgcgctgcacccactaactcatcatccagcattaggcatatctcccagtggtatccctcccscctccccccacccaacaacagtccccagagtgtgatgttccccttcctgtgtccatgtgatcccattgttcaattcccaccgataagtgagaatatcaaccattgtggaagtcagtgtggcgattcctcagggatctagaactagaaataccatttgacccagccatcccattactgggtatatacccaaaggactataaatcatgctgctataaagacacatgcacacgtatgtttattgtggcattattcacaatagcaaagacttggagccaacccaaatgtccaacaatggattaagaaaatgtggcacatatacaccatggaatactatgcagccataaaaaatgctgagttcaagtcctttgtagggacatggatgaaattggaaatcatcattctcagtaaactatcacaagaacaagaagttcttgtt

SEQ ID NO: 773693 - DNA, 624 bp, Homo sapiens
ttagtcagctttggaataacttatttatgactctcccgtttgcatcatagattatattagttttgactaacttgaatagagtttcgtagatgtggagctaaaatgaaaaaagctggtgatgcacacctataagtcccagctactggggaagttgaggtgggaggattgcttgaggccaggagattgagactgcagtgtgccatgatcatgcctgtgaatagccaccgcacttcagcctggcaacataatggaaccccatctctgtttttttttttttttttttttcttgagtcggattctcgctctgttgcccaggccggagtgcagtggctcaatctcggcttgctgcagcctcccacccccagattcaagcgattctcctgcctcagcctcctgagtagctgggagtacaggcacccaccaccacatccrgctaatttttatatttttagtagagacggggtttcaccatgttggccaggctggtctcaaactcctggcctcaggtgatacgtccacctcggtctcccaaagtgctgggattacaggcattagccgctgcacccggcccaagatcccatctctaaacatatacaaagaaaaaaaaaagttagtgaattattt

SEQ ID NO: 773694 - DNA, 514 bp, Homo sapiens
cctgcagttctactgaatgtcccaggtgttcagtggtatctctctactataccggtcagaaattgaacatctcatagccctgtatgaactctgggaggttttcaatatatagctccctggtagctgtttgctgtctgaccttatagttgcactctactcatgtacaacttaacattcagtcaaagactttaggggaccctatgtagatttgtagagttcttttctctgcatagatctctcctcttctctactttctggattttgttttgtctcttcagctaagtgctcctgtgattctmtgcttgggttccctctccctttgctgtggtgtggaaaatgcttccaggcagatagctggggctatcacacagttcatcttctttgtttcccttttctccaggatcacagcctcgcactgccttttgcctagtgtctgaaaacagctgctccataaattttgtcaagttttctctttgtttacaataggggggttaacctggtgtgagttactctg

SEQ ID NO: 773695 - DNA, 584 bp, Homo sapiens
cccagatgagctgagctatgaagccaatccacaggctcataagaaataataaatgttggttgtttttaaccactaaagttttggtgttgttggttacgcaactgtagctagctgatacactgtcttcttaggtgcattaggattttctttgcttgagggaatattttttaagamtctctagaggccatttcggggagcatgctgtagtcttagtataaataacaatcatttgtttcaggcaaaactgtctgccactggactttctcctagaaaggcagcaaacatctgcagggtattacagtagtgttaggagaaagaggaagtagccttgtcaaggcttacaaaatgaatgctcttatttactatagacaaatgattggagggtgttgtaattgggtgagtggcaaatgcagacagactgtggggtggtgacatgagtgatgctagaactcttaggtagaagatggggcttggccgcccctggttttctggagatacagaatcacactgactacataataatgatggtgatgatagctaacgattattaagcactcacttccagtcatactacatgctttaca

SEQ ID NO: 773696 - DNA, 600 bp, Homo sapiens
actccgattccttgcccattgtctttttgtgtgcataaaggctcgtggaatcttttgttgttatgttagaactattgtagtcatttgtactagttgaaatcagccataactatgaatgcattccttatgctttctctgtgtaaaaataaaatcaaaccaagatcctacttaatttccagttactcttagggtctgtgtgtgtgcccacacaagtgtcaatggaagcagagcctgagagcaggcattccaggtgtatttgtttacctactgctacctaaggaagacacttggtaacttggttaatatgacaaaccaggaaaatattatgtagactttgcagatrgtaaaatttaggatgcagttaatcaagatttctctaattcttataggctttgatctgcagggcaaatatagcagatcttcctgagactgctttgggataattgaggtggtcatagtagtgttggtgcaggacagttctctaggcagccttggactggcccagttctctccctttttcacttgcagttctcaataataactgcagaatgtgctgggaatgcaccatcctgagataagggaggagctggccggaacagc

SEQ ID NO: 773697 - DNA, 578 bp, Homo sapiens
aataaaccctttattcgcaaaggatgttagcacctcctcatcaggatgttgactgcattgaatagaaatgcatcatggccaaccaagaagaggtctgtaagtctgcccttcctccctcatccccacttgaaattaggaaaagaggaggagaaaaatggatacagaacagatcttttsaggcagaactaccctgagttagaggaagaagaagacaaactttcaatgagtttgaggacaggactgaatattatataggagaattagaatgttttaataaccaaaacgggctaaaaatttgtaaaaattttgttccacaattgttatagtaaagtataaaacttttatatttataccatcccaataaaagcaagcatagtcaccaaaccagttacttatcattctctcctcttgcaatcctgattaggtagggagccagaggcatatcgccagctccctctctcttccttgtttgctgtttccagaggaagaggaggggctggttggttaaagtttattgggtctcctttcctaagtgggcagaattgctgtattgaaaggctatgaggacctgccactat

SEQ ID NO: 773698 - DNA, 543 bp, Homo sapiens
tttggcttccttaatatcaaatctattttagtcaaggttctccagagagacagaaccaataggatatgtgtatagatagaggaaggagccttatcagtaggatgggctcacacaattatggaggctgaaaagttccacaacaggccatctgcaagctggagacttggctcagtccaagtctgaagttcacagaaccaggaaagctgaggttgtaacctagttcatggctggaagcctcagcacctaggagactgctggtsaaagtcctgagtccaaagactggtgaacctggagttctggtgtccaaggcagcagaaggtctaccccagctctgagagagagaccaatttgccttatgtgtttcttctctctcctggccttcagctgattggatggtgtccttcaacattgatagcagattcccccacacctggttaatccactcagactcacacaataatctcctctgaaaaagcccttacagacacatccaaaataatgctttaccaggtttgtaggcagtacacaagtccaccctttgtc

SEQ ID NO: 773699 - DNA, 613 bp, Homo sapiens
gttaagatacatggtttcaatgatgtattttgctgactataaaatttgtggggaaacaaatgataatttacatgatctcttttaggatgtgagacatagactgtggagggaaattgctttcagaattgaaaaagaaaattytagtgataaacagggagactacatgtctatattgaatactttggtttttaaaactgtgagataagccacatgaggattgcttgagcccatgagttcgaggacagcttggacaacatagcaaggccccatctctctctctctgaaaaaaaaaaaaaaaaaaaaaagggggggggggagagacaaaatgaatacagttataaagttttaactggggaaaaaagttagtaaaattgatgttactgaacaacctcagaattatctcagaaaggtaatgttgagagtttatatcagaataaatttatatcccaatgttagagaaaagtttaatctctgagctctgaactgaataagttaatgcacgtttatggaattttcaaagaaatggaacatgcacatggtttctactgccttagtttcttcaaaatcaacttttcttctaacaaaacatgaccattacttttccatgaaagaa

SEQ ID NO: 773700 - DNA, 502 bp, Homo sapiens
ataagttcctgcggattgactctgttgaccagattgtgtgactggactggacttacttttttttttttttctgagatggagtctcgctcttgttgcccaggctggagtgcaatggcatgatctcggcccactgcaacctccacctcctggtttcaagcgattctcctgcttcagccttccgagtagctgggactacaggcacctgccaccatgcccggctaattttttgtatttttagtagagactgggtttcaccgcgttagccaggatggtctcaatctcttgacgtcgtgatccccccgcctcggcctcccaaagtgctgggattacaggcatgrcccaccgcccccggcctttgttttttttctttgagacagggttttgctctgtcacccacactaaggctggagtgcagtggcacaatcatggttcactacagcctcaaattcctgggcttgagcgatcctcctgcctcagcctcaagtagctgggattccaggta

SEQ ID NO: 773701 - DNA, 584 bp, Homo sapiens
agcctctctcatccccggccctgtggacactgtggcaggagagctccttgctgtgaggctggcctgtgcattgcagaggattcagcagcatccccggcctccacccctagatgccggtcaccctctgccgccccgccacacacacacacgcaatacacccatggctgcaggcattgccaatgtccccaggaatccagtgtggccgccagtgagcaggaccgccctgggcccatgagtgctggaacaggcatcacacagtcatggccccccgctggccccaccccacagtgacttggctcccagggacccraaggacaactcgtagttgttcaagttcgttcagagaccctcagatcctcgctagtctgggccccgcttatccccggcagacaggggaagggggaaccacttgactgtgtagaaaccttatcactttctcatatcgaaatccacattttaaatgtctgagacttttaaaaagtaaaagccagctcaggcttccctgtccagatgtcagtgggagccgtctctgtgcaccgtgggtgttgtaatctgggtgtccgtgcctcttcccctcgggttcc

SEQ ID NO: 773702 - DNA, 584 bp, Homo sapiens
agcctctctcatccccggccctgtggacactgtggcaggagagctccttgctgtgaggctggcctgtgcattgcagaggattcagcagcatccccggcctccacccctagatgccggtcaccctctgccgccccgccacacacacacacgcaatacacccatggctgcaggcattgccaatgtccccaggaatccagtgtggccgccagtgagcaggaccgccctgggcccatgagtgctggaacaggcatcacacagtcatggccccccgctggccccaccccacagtgacttggctcccagggacccgaaggacaactcgtagttgttcaagttcgttcagagaccctcagatcctcgctagtctgggcccygcttatccccggcagacaggggaagggggaaccacttgactgtgtagaaaccttatcactttctcatatcgaaatccacattttaaatgtctgagacttttaaaaagtaaaagccagctcaggcttccctgtccagatgtcagtgggagccgtctctgtgcaccgtgggtgttgtaatctgggtgtccgtgcctcttcccctcgggttcc

SEQ ID NO: 773703 - DNA, 566 bp, Homo sapiens
gggcggataacctgagatcaggagttcaaagccagcctggcccacatggtgaaaccccatctctactaaaaatacaaaaattagccaggcatggtggcgcacacctgtaattccagctcctcaggaggctgaggcaggagaatctcttgaacccgggaggcagaggttgcacggagccgagatcgcgctaccacactccagcctgggagacagagcgagactctgcctcaaaaaaagaaaaaaaaaactagctatacatggtggggcacgactgtagtcccagctacttcagagggtgaggcgagaggatcatatgagccaggaggtcracgctgcagtgagctatgatcgtgccactgcactccagcctgggccacagagtgagaccctgtctcaaaaaataataaaatactgacgactgggctccacacccagagatttcagtttattcggtctggggtaaagcctggatattggcatgcttagaagtttctttattattattatttttttagcatttaaaaaatgggcagagacagtgagaccttatttccacaaaaaaataa

SEQ ID NO: 773704 - DNA, 592 bp, Homo sapiens
cccagcactttgaaaggctgaggtgggcggataacctgagatcaggagttcaaagccagcctggcccacatggtgaaaccccatctctactaaaaatacaaaaattagccaggcatggtggcgcacacctgtaattccagctcctcaggaggctgaggcaggagaatctcttgaacccgggaggcagaggttgcacggagccgagatcgcgctaccacactccagcctgggagacagagcgagactctgcctcaaaaaaagaaaaaaaaaactagctatacatggtggggcacgactgtagtcccagctacttcagagggtgaggcgagaggatcatatgagccaggaggtcgacgctgcagtgagctatgatcgtgccactgcactccagcctgggccacagagtgagaccctgtctcaaaaaataataaaatactgacgactggrctccacacccagagatttcagtttattcggtctggggtaaagcctggatattggcatgcttagaagtttctttattattattatttttttagcatttaaaaaatgggcagagacagtgagaccttatttccacaaaaaaataaaa

SEQ ID NO: 773705 - DNA, 586 bp, Homo sapiens
ctgggtgtggtggcttacacctgtaatgccagcactttgggaggctgaggcaggtggatcatttgaggtcaggagtttgagaccagcctgcccaatatggcaataccccgtctcaactaaaaatacaaaaattagctgggcgtggtggcacgtgcctgtaatttcagctacttgggaggctgaggcaggagaatcccttgaacctggggggcagaggctgcagtgagccgagatcatgccattgcactccagcctgggtgacagagcaagactgtctcwaaaataataataataaaataaaaatagaaagttgaataagggagaaaacacaattgctagtatcagaaaaaggaggccatcactcagattccacagtaaaaattaaaaattagtagtaagaggagatcataaccaactttttgctgataaatttgacaatttagatgaaatggacaaataagaaaaagaatacttattgaaactgattcaacaggaagttaaaaatctgaatggtcctgcatgctttagagaaactgaaaggccaggtgtggtagcgcccacctgtaatcctagcactttgggaggc

SEQ ID NO: 773706 - DNA, 546 bp, Homo sapiens
gaattactaatttattttcttcctatcctaatgcctacttcatcacaaataaaaatgggtatatgataagatgtgcctgtataatttgatttgcaatttcggacatttaacattttttaaatgttacattgaaaatctccctttcttgctatccacacaattctgatatgtagctgatttaagaggcatgaggaaattcacactaaaagtctacattttgaggattgtatatgtgtgtgaggaggtgggggtctcactatgttgcccaggctggtcttgaatccctgggttcaaatgatyctccctgtaggtctcccaaaatgctgggattacaggtgcgaaccaggcccttgaggatcttaatattggttatcttgacaattttaaagcagacagcatctgaactcttcttctatcttctaaacatgttccaaattctaccacctcaaggaagttttctagaaattatcgatgaaagtggttcacatatgagaaagtaatgcctagcatttagtaattcctaatattctagagaatcttgtttga

SEQ ID NO: 773707 - DNA, 631 bp, Homo sapiens
tacacaccctctgtgatatttttcctaatatccagggggtagaggttgatattactctaaatatcgccgaaggggtagacctcccctgtaacattgtttctaatatccaaaaggagagagaattatattactcccaatatcccagggggtgtacaccgccccacgscgtaatattattttcaataaccaggtgaagagtggatattactccaaatatctcagggggtgtacaaccccatgtatattgttcgtaatatccaggggggagaggatgttttatttccaatatcgcagggggtgtacacccctctgttatattgttcctaacattcaagaagggaaaggatgatcttacttgcaatatcacagggggtgttcatcccccttgttatattgcttctattattcagtggggaagaggtcgatattactcccaatattgcaggagatgtacacccccgctgtggtattgttactaatatctaggaggggagagggtgatattactccccatatcgtgaaaagtgaacactcccctgttatctagttcttaatatgcaggaggggtgggggtgacattactccccatatcagggtgtgtgtacaaccccctgtgatctggttagtaata

SEQ ID NO: 773708 - DNA, 626 bp, Homo sapiens
gaataaatgaaacctataaactattagaagtaataaatttaacaaagttggtgaatacaataccaataagaaatagtttttaatatattgacaaaaaacaagtagaaaatgaaataggaaactataccttttatagcagcatcaaaaayaccaagtacctaagattaaatccaatgaaatatgtgaaaaccactatgatgaaagctaaaaaacatttttgagataaattatggaagtcctaaataaatagatatattcatgaatatatctttgttatgaaaaaatccacattgtaaaacttcagttattttacaaattgatttgaagattcacaacaatcccactcaaaatgtcagtgtattttaaaaatgaaaatggataagctgattctaaaattttggtggaaattcagtatctagaagggccaagacaatgcttaaagaaaaacaaagctgtataactgatactactggatattaaaacttagcgtaataatacagtaattaatacaatgtgctactggcacaagaatagtcaaatagacttaaaacatagagtagatgccagaaacatatccatttatatgaagtcacctgacttacagtaacattccactgcaactcagg

SEQ ID NO: 773709 - DNA, 514 bp, Homo sapiens
accaaagtatacataggggaaatgctcaaccagaatttaaagtacaacacagctaactgacccacaaaatgattgaacccagaacaccagcttgatcagtatgccaagtcagttttctgttacatggtagccttttaaataaagaacatggcaagctggagttggttagtcaaactcattttccttaaatcaaggaagaactaatagtctcttgtaatgaatgtctcttttttcccatttgctttgttattgactacatgcctgaacagtttagcaaatttaatgcagcagattttacaaagaactttttttgacctgtcataatattaaaaagcygagtttgggtaatagtttctgactattttgataaagggattatatttttaaactcacaggtaataactctgtagctttctttagtccagaatatctaatcatggaagatctctggagacagaaagaagatttctagatatgagtccctccgttttttaaaaggacacattctattttt

SEQ ID NO: 773710 - DNA, 638 bp, Homo sapiens
ttttaaaagtttgggatacttaagaaagatgaaaagacattaaaaagcattttaatattttaaagaaggtattattcttttaaaatgacaccgatttttttttctgactgtaagaggaataatggcttattgtagaaaatttagatgactagaaatgaataaaactaaaattcgacactctgtaggtggaaatatccaaagcaataaataaattgtatatggattggaataaaaataactatatatrtatatagattgaaaaagaacagataaagacatttacttggaagtatgtgaactaatacaagagtcagcaaggtgggccaggcagaatattagcatacaaaaattaatagctttctattacacaaacaaaaacagattagatatgtattatacttttaaaatatctcattttcaaaaagcagtaaatctttttcaagttataaataagtaacaagttatggcataatctataaagctttttgaaggccttaaaagagaaacaagtggaacataaaatgtatttaatcaataggaatgctcaatgttgtatcttaataactcaaatttcataaaataaatgaaatcccaatcaaggtcccccaaggtatttcatgaaacttgataatttgatt

SEQ ID NO: 773711 - DNA, 615 bp, Homo sapiens
gtataaaattccatatttcaatttcaatataattttttgatttttacttgaagttatgataaaataagaaaagtgaaaaatagagataaactttaaataccatgttatttgtgcttaataataaaatcaagaaaataaaatatctaaaataattataactatttaaataaacaaagtatcatataatgggcaaaatattcttctggctagtcagatgattttgacaggttgtttatgggttctgaagttcagtttgctcatctctaacatgaggttgaactaggtatggattgtttggctgaactctgtaaagctggtcaaaaaagctgcatttggattcttcttcctgttactgtatgcaataraatgcctcctgtctctaccataagattcagaacacagtctctgacctttccaaataatttccaagtctccttgttctcctgaagccttctataaatggctctaccatgcaccctgtttgtcaacaccaaactcgaagtatacctgatgtcatcccttcctttaccatcttcctacctgtatccaatccgtagctcaaccatttcaaacttgagaaatctctctaatgcatccattctgctcattctctat

SEQ ID NO: 773712 - DNA, 520 bp, Homo sapiens
ctgtgtaccaagacttacctaagtactcttcatttatgtcttgtaccaacacaatgagaagaattttattagctaagttttatatctgagaggagttgagttcagagaggtttagaaacttgaccagtgtcacacagctagaaagttgtcagctagacgcctctgaattgtaggcttaactctcaatgttggtactaacatctgcactattttctttctccttttactcaatgacattattccctaattcaktttaacccatttacagagcagatgtcaattttcagaatttacaaataagtttacatctcgttgattgctttttatgttgcctgttacctggggactctgggggagatctcttaatttattgataacatattaaatgatactttataatgagtatttactcatgagatgtttccctaaggtaaacaaattccatcccaagtggtagatccttagagacttaagataaaaagctgactgagttgagtatgctcgtgccttcatgtatttt

SEQ ID NO: 773713 - DNA, 508 bp, Homo sapiens
aaattgtagtaaaataaattgtagataagttgtagtaagtcttgtaaacatctctttcaagtgtgtgtgtaggtggaggaatttggtgacacatgttactgaggagataggtaaggagtgacatccttgaatagggtacagtagataatatcaaagccaaaagtaaagaacaaattagatgaaaacattgaagttagtttattctttgcaatgggaagaatgggttctactcaggcagtcttttagtgtgagtgtgagtataaaaaattaccaactgtaaatgatgatacagagttttatrtaagtggaaaatggaaataatgcaaagtagtcgccccaagaaaaaagctaacagctttttaggaaatgtgagattaaagctgtcatctaagttgagatttttgtttgtcaacatgtggaatgggtttgcagataggttcaactgtcatggagatttttaggcaagatagctggaaagggaggaaaagaatatgagaagaggaatgag

SEQ ID NO: 773714 - DNA, 529 bp, Homo sapiens
ctctggtacctggtatgcaactattgggctgacaaatgcctttttctacctacctgttcgtgaggcccaccagaagcagtttgctttcagctggcaaggccagcaagacactttcactttcttaccttaggggtatatcagctctccagccctctgtcataatttagttcacagggatcttgagtgcctttcccttccataggtatcacactggtacattacattgatgacattatgttgtttggacctagagaggaagaagtagcaattacwatagacttcttgggaagatatgccagggggtgggcaataaattctaataaaattcagaagccttctaatctcagtgaaatagttagggtttcagtgggggccatgctgagatagcccttctaaggtaaaggaaaagttgttgcatctggctcctcccacaaacaagaaagtctcataatgtttagtgggactatttttatttcagagacaacatatttctcatttgggtgtgttactctggctcatttactgagtt

SEQ ID NO: 773715 - DNA, 529 bp, Homo sapiens
ctctggtacctggtatgcaactattgggctgacaaatgcctttttctacctacctgttcgtgaggcccaccagaagcagtttgctttcagctggcaaggccagcaagacactttcactttcttaccttaggggtatatcagctctccagccctctgtcataatttagttcacagggatcttgagtgcctttcccttccataggtatcacactggtacattacattgatgacattatgttgtttggacctagagaggaagaagtagcaattacamtagacttcttgggaagatatgccagggggtgggcaataaattctaataaaattcagaagccttctaatctcagtgaaatagttagggtttcagtgggggccatgctgagatagcccttctaaggtaaaggaaaagttgttgcatctggctcctcccacaaacaagaaagtctcataatgtttagtgggactatttttatttcagagacaacatatttctcatttgggtgtgttactctggctcatttactgagtt

SEQ ID NO: 773716 - DNA, 621 bp, Homo sapiens
aaggtattttaaataaaattacaaatgtaaagtgatttttttgtaaacaaaaaagatctagcctaagacatggaactggaagctgtcattctcagcaaactaacacaagaagagaaaaccaaacaccccatgtcctcacttataagtgggagctgaatgatgaraacacatggacaggttgggggaacaacacgcagtggggcttgttgggggattgcggggaagaagagcatcaggaaaaatagttaattgatgctgggcttaatacgtgggtgatgggctgatttgtgcagcaaacgaccatgatacatgtttacctatgcaacaaacctgcacatcatgcacagttagtcgatttacatttggagtatctattgtatttaattgatttatttttctatgcttgcaccaacccttataattttgattgctgtataatgatataaagtagggtacatcctccaaaaacttccaaatttccagggttttttgttttgtgtttaactatagtcaccatgctgcacaatagttatcttgaacttatttcctctcacctaactataattttgtatcctttgaccaacatctcctcaacccccggttccaaactcccaccttcaa

SEQ ID NO: 773717 - DNA, 527 bp, Homo sapiens
ccctttatttcgagcctatgtgtgtctttgcacatcagatgggtatactgaatacagcacactggtgggtcttgactctgtccaatttgccagtctgtgtcttttaattggggcatttttgcccatttacatgaaggttaatattgtgatgtgtgaatttgatcctgtcactatgatgctaactggttattttgcccaatagttaatgcagtttcttcatagtgtcaacggtctttacaatttggtgtgtttttgaagtggctggtactggtttttcctttccatatttaatgcttccttcaggagctcttgtaaggcaggcctggtggtaacaaaatctctcagtatttgcttgtckgtaagggattttatttctcctttgcttatgaagattagtttggttggatatgaaattctgggttgaaagtttttttctttaagaatgttgaatattggcccccactctcttctggcttgtagggtttctgcagagagatctgctgttagtctgatgggcttccctttgt

SEQ ID NO: 773718 - DNA, 612 bp, Homo sapiens
agcattcctgtttttccacatcctctccagcatgtgttgtttcctgacattttaatgattgccattctaactggcatgagatggtatatcattgtcgttttgatttgcatttctctgatgaccagtgatgatgagcattttttcatgtgtctattggctgcataaatgtcttcttttgagaaatgtctgttcatatcctttacccactttttgacggggttgtttgttattttcttgtaaatttgtttgagttctttgtagattctggatattagccatttggggagtgtatttttatagtcaaaagaataacaatatgtgtaagctatataactctatgtagcttttagtatgacataaccctattctcttcttgtcctattaggtgactgataattagacaaaaatttcaaagacatgttgtattaataactaaatttcttttattctgcttgttcctgtgytatgtgagaatagcctactaaatatgcaatatgtataagaaattaattgaacaacaaacaagataacgcttttcatttacataaattttgcaaatacacactcaatattcttgaaaatgtattcattgtcattattcttccagttatg

SEQ ID NO: 773719 - DNA, 662 bp, Homo sapiens
ctcctgccactgatttatcaactcaggttatgtaatactctaaatgctttgttattatttcattaacgttcatgatatcttcatcagaattagatttcatctcaagaaactactttctttgaccatctataagaaaaaactcctcatccgcttaacttttatcatgagattttagcaattctgttgcatcgtaagactcacttctagttctatttctcttgctgttttcattaatctgcaattacttccaccactgaagtcttgaatccttcaaagtcattcatgagtgttggaggaaacttttcttgagcttctgttgatacttgatatttcgacctccttccatgattcataaatgtttttaatrgatctagaatagtgaattgttcccaaaaagttttaaatttactttgcccacatccatcagagaaattactatctatgtcagctatgaaatatggttattaaataagacttgaaggtcaaaattactcctggacccatgggctgtggaaagggtgttgtgttagcaggcataaaaacaactttaatgtccttgtacatcttcaacagacatcttggatgatgaggtatattttaaatgagcaagtatagtttaaaattttttttttaatttctgattagtagatcgtcataatggg

SEQ ID NO: 773720 - DNA, 612 bp, Homo sapiens
tttggtctctctcagtattctatttgttttcttcattttactcaccactctgtgtgtatatgcatgcatatgtatgtttatctatttatttcctatctcctcgctagagtgtaaattcctacaaagcacatactacatcttctggtttcactaccatagaactcctgtattttatgtagcatatagtagcccattagttaatgttatgcgaatgaatgactacatgaataggtcactatgtgatacgtgtgatcagtgttgtttaacaatggttttagctttttgctatatttgacatgattgtaaaagatataggacccttcaaagcatgttttaaatctctgaaaccttgaaatggatatgtaaactagacagaaagtagttttagctattgctagtgatttgtcagcattcaaaaaatcagaaatccaggatcttggaaagggatktttatcattaataacaaacactgaatactgttacagattgttttatactaaataaatatcttaataaagttttatgacaacataatttaacagattttgaaaatctgaaaattgtaagagtttcaaagaaatgcatattacatggtaaaatgcatatcatata

SEQ ID NO: 773721 - DNA, 606 bp, Homo sapiens
acccattgagcagtcactccccatttctcccttgctgcggcccctggaaacactaatctgctttctgtctccacatatttgcctgttttggatatttcatgtaaatgaactcatgtatgtggccttttgtgtctggcttcttttacttaatgtaatgtttccaaggctcttccatgcttgtagcacgcatcagtacttcattccttatttaatagctgaataatatttcacgtgcatgcgatataccacattttgtttatctagctgacagttgatrgacattttttgttgtctccccattttagctattatgaataatctgctatgaatattcgtgtatggatttctgtttcaatgcctgttttcagttcttttgggaatgtccctaggactggaattgctgggtcacatggcagttctgttacactgattgaggaagcacccaactgacttccactgctgtgcctgttctttgtctggcatcacctcacgcactgggatgcaatgatgagtaagacatagtctctgcctggttgaattcatagcccagctggagagactggcatgtggtaggggcaattacaggagtgtgtaactgttgacttt

SEQ ID NO: 773722 - DNA, 606 bp, Homo sapiens
acccattgagcagtcactccccatttctcccttgctgcggcccctggaaacactaatctgctttctgtctccacatatttgcctgttttggatatttcatgtaaatgaactcatgtatgtggccttttgtgtctggcttcttttacttaatgtaatgtttccaaggctcttccatgcttgtagcacgcatcagtacttcattccttatttaatagctgaataatatttcacgtgcatgcgatataccacattttgtttatctagctgacagttgatggacattttttgttgtctccccattttagctattatgaataatctgctatgaatattcgtgtatggatttytgtttcaatgcctgttttcagttcttttgggaatgtccctaggactggaattgctgggtcacatggcagttctgttacactgattgaggaagcacccaactgacttccactgctgtgcctgttctttgtctggcatcacctcacgcactgggatgcaatgatgagtaagacatagtctctgcctggttgaattcatagcccagctggagagactggcatgtggtaggggcaattacaggagtgtgtaactgttgacttt

SEQ ID NO: 773723 - DNA, 512 bp, Homo sapiens
cacatggttttcagctgataggcagccattttgtgcctatcccagttggcaaatataacacaatttgatctctttccattcttagaaacaatgaagccctttgtttttgcctttcaagacgataaatggaattgcagtcattcctccagtggctaatacctgccagcagatcctgaaagatgtcattgatttctagatgtatcctgatttcaaggttggtaagttcggagaaaatgtgtttcctagaatagataaaatatatagtatatggtggtagattccattcctaaaactktctaatttgtctactcaaaagaatgaactgcccagcactcccatccacgtatggttatcaatcctaagactataacggcatttgtgaaacattcaccaagagatggggaagtggaggcatgggtatgatatggaagctatgtcttgattttcctctattaaaattttcaataatcaggccacatgggatggctcaagtctgtaatcccaatatttca

SEQ ID NO: 773724 - DNA, 559 bp, Homo sapiens
cctgtgtggaaagcagtttggagatatctcaaagaacttagaactaccgttagacccagcaatcccattattgggtacatacccaaaggaaatcattctaccaaaaagacacatgtactcatatagtcgtcacaacctgctcataatagcaaagacctgaaatcaacttaggtgtccatcaagggtggttcgaataaagaaaatgtggtacctacacataatggaatactatatagccatgaaaaagaatgaaatcatgtcctttgcagcaagatggatgcagctggaggccattatcctaagcaaattaatgcagaaacaaagaccaaataccacatgttctcacttawaagtgggagctaaacattgggtgcacatgaacataaagatggcaacaatagacattgggaattactagggggaaggaacagagtggggcaaatgttgaaaaactacctgttgggtactatgttcagtacttgggcaaagggctcaaacatacccaaaacctcggcatagcacaatatacccatgtaacaaatttgcaatgtacccctga

SEQ ID NO: 773725 - DNA, 601 bp, Homo sapiens
tatatgtatttcaacatttctcagttttgatttctagtatagtgaatatcaatatatatggcccatttaaacaaaagaactttagaatccttggtaactgttcaaggtttaattaagtcctgacagcaaaaggattggtttcaacaatctgtatcttaagtgttgagtttagaccattcaatgtaattgttgatacacttataattatttgtatcatactgttgttttctgtttttctgtctttatttttctgcctctgttgatttcttctttttatttgaattaattttattttagaacttcattttaatttttggttgagttttttgttttaattatatctgttttgggggraattcctggtggctgctctagagatttaaacatatatttttaacttttcactatatacttaaaagtttatatttttccattttcatggtcttcctttattcctgaagttaagtttctttcatgaatcattttccttcagtctcaaatacctcttttagcatttcttttagagaagatctgctagtgaaagttgcttagcaattttccttcatttgacaataactttcaaatttatttctagagaata

SEQ ID NO: 773726 - DNA, 359 bp, Homo sapiens
catgctctgcacggcctctggcaactacccttccacattctatttccatgagtttcactatttcaaatcgttcatataaatcaagtcatacagggtctgtttttgtgcaactggctttttggtttaaaattttaaagtacatttagaagtcatcatactctctgtttgtttttgtgacattttaaatraaagttatattttgagaaattggtcaagttcaaattgtcactttttagcataaaattattcataatattttttatcattttaatgactaaagtgtctataataaaatttttcctttctgacagattttatttctattttttctatctatccttatatattttatatatata

SEQ ID NO: 773727 - DNA, 623 bp, Homo sapiens
ctaggttatttcagacattgttagtctgacataatataggaagtatttttgtgctacacttttatcctggcgtaaaatgtggcataatttttaggttcaagagctgttttactcctattcaaaactttcttccagtgacctaaccaaaatagtatgtattaaaagcatgtataasctactacttttctatgaacaatagccttacaatctgtttgccttgcataaaacacatacatatgtgcacacctatgcaccataagctgtggatcctttgtgtgaagaagacacctgtccaccatggagaagtcccacttcccaggttttacatctccaaccccagagttcaaagccagctattcttcaatgattggaatagtttgctaaaaattaaaagtgaaatacgcaattgcaaataaatatgaaatgttttgctttctttaaatgtgcaccttttaaattttatctcttggatgtattaacacactaatatgagttggcttttcaaagtatttattgtctaaaacatggtttctcaaactttcatgataacaaagttttatgaaaattttttagatttttaaatgaaacgttagatatccctgcaaatgtgctaacacttgaat

SEQ ID NO: 773728 - DNA, 589 bp, Homo sapiens
gcaaattggatctgtcctgctttgtctcatgcttaaatatgaatttgtatgaagtgactatattaaaaatttgcttgtaataccaagctagcaggaatagtcatagaaagaagaaggaaatttagcctctttagttaagccttggcctttctgtttagactgcaaattagcactgattgtgttagaggtttccatggtgtaggcactagtctctcatgaactgaacttacatcgtcaacatttaaagctgaaagccattagacaacagcaactgaggtcacttgttactgttaagaatttatgcagcactttacatttggaaagaggtcaatgaaatctagacagatttgagtgctgcctaaatgracaaatctgtgctggcatcccaacagcacagtcgcttcatagtacagtttttatcccttttgatttatgacagaatgtggtatttataacacagtgcacagtttaatatgtacggacattcactcatactaaaccaaaaaataccatatttgttttaagttaacagctttatcattaactattcctgggcatcagtaaacttgtaaaagatccaatttattcc

SEQ ID NO: 773729 - DNA, 611 bp, Homo sapiens
catatcagaatattttggtcaatgatgaactgcatatacaataccagtccaagaagattataataccgtatttttactgtgccttttctctgtttaggtatacaaatacttgccattgtgctacagtcacctatggcattcagtatagtaatatgctatacaggtctgtagcctcggagcaataggctatataccatataacctaggtgtgtagtaggctataccatctaggttcrtcaaagtacactctatgatgtttgcacaatgaagaaatcacctaatgatgcatttatcagaatgtgtcctcatcattaagctacacataactgtattcatgattttaagagataattaaagctcttgggatagcaattacaaaagcccgcatgacaaggtgaaagtgtgttgacagaaaatattcatattgataaaatacatgtatgatcttcttttcacaacatagctgcctgtcattttttggaaggtcacatgtattcatgaactgtgtgtaatatgctagacttgtctccttattacaagcaacacatggttaatgcacttaacataatataaactattttcaatgtaagtgcattctctatagaattttc

SEQ ID NO: 773730 - DNA, 578 bp, Homo sapiens
gaggctagcatctaataccactttaaacataatccattgttcttactgaaatttggggttgttttaaaatcggaaaaccctgttcttcttcaggtctgcagcatccatcctgttatttaaagtcatatatgagcttttgtcagtggggcataaatgttttactttatttattctttacaataaatagaatatttttgttgattgtcttcattttcaccataagattgataaaggcatttctaattcattgggcatagcattttaccacataaaatttgcagtttaatataagtattaggtacaggttccattatatgtgtgcagagttgtaaatgtctgcagcatttgttaaattttatagctgatcttgttcaaagtagtccctttrgttggagactttgtgtctagatattatcaccattcatatctaatttcacgcaggcatgcatattagtttctgggtaaagacagaacatgccttgattattttcttcttttttaaaagtgatataactaattttgcaattattttaacaactttttataaatggtgctcatatggaggtgttcatataaat

SEQ ID NO: 773731 - DNA, 578 bp, Homo sapiens
gaggctagcatctaataccactttaaacataatccattgttcttactgaaatttggggttgttttaaaatcggaaaaccctgttcttcttcaggtctgcagcatccatcctgttatttaaagtcatatatgagcttttgtcagtggggcataaatgttttactttatttattctttacaataaatagaatatttttgttgattgtcttcattttcaccataagattgataaaggcatttctaattcattgggcatagcattttaccacataaaatttgcagtttaatataagtattaggtacaggttccattatatgtgtgcagagttgtaaatgtctgcagcatttgttaaattttatagctgatcttgttcaaagtagtccctttagttggagactttgtgtctagatattatcaccattyatatctaatttcacgcaggcatgcatattagtttctgggtaaagacagaacatgccttgattattttcttcttttttaaaagtgatataactaattttgcaattattttaacaactttttataaatggtgctcatatggaggtgttcatataaat

SEQ ID NO: 773732 - DNA, 659 bp, Homo sapiens
tctctatatgtaacacttccttcaacacacattgatccacatgtcttctttcaccattaccttgtttgtgggccattattactcctaaatattttaaatgtctttgtctatcactggggagattcacctgtgatatgagagatgcccaatgtacatttagttaaacaaaaataagaatacactccwatgcactataacagacaaacaaatgaatactgggtatcctgtagcaaggttccaaattcacagcaattgaatcttagaaagaacattaaaggtcatccggtccagcggactgcaaatgtcaggcttcagtgaactttttactgatctatgtcaaaatgaggacaatgtaataagttttcataaggctaagttttttaaatttaaagacaatcctttagtcagattatattcttccttatatttgaggaaggatactaaaatgtttttttctttcataaaaagatggtgatagttgatcattgttgtttcataaataattcttttacttagcaaaacaaaaaacttagcaattgttagacttcaattgtttttttctttttttaattttacaggtcagttaaattcaaaaatgtgagaacctctgctctaatccaaccaattttctgctgcctaaatgccttagaacatggtca

SEQ ID NO: 773733 - DNA, 378 bp, Homo sapiens
acgtgatgcgcgcctgcctgacagcccttcctccccgcgagtctccgggagccgggccgatgggttccgctcggacgtcccaggggcacagggggcgaatctcccttcctggtgaggtcccttgccttggctctagaggctgtggacttggagtgacaacgacgctcgggccgggcgccacsgtcccgcagacctgtcgctatcatggcctggaaacccacacgagagaaaaagtgtcatgtgttgttttgaatctagcatggtaggaatacaaaggtttttaaatctttgatagattcaaaccagattaccaaaacaaaaacaaaaacaaaaaaacaaaaaaccagtggcctagtttacagcgtgtatagtacagaa

SEQ ID NO: 773734 - DNA, 516 bp, Homo sapiens
aaacacaaaaataaataaatgggacctaattaaacaaaaaaaacttccacaagaccaaagaaataatcaccagagtaaacacacaacctatagaatgggaggaaatatttgcaaaatatgcctctgacaaaggactaatatccagaatctaaaaggaactcaaacaagtcagcaagaaaaaatcaaataatcccattaaacagtgggcaaatgacatgaacagatatttcttaaaaagaagatatacaaatggtcaacacacatgaaagaaatgctgaacaycactaatcatcaggaaaatgcaaattaaaacctcagcgagataccaccttgccctaaccagaatagctattattaaaagtgaaaaaacaatagatgttggtgtggatgtggtgaaacgggaacgcttatatgctgctggtgggaatgtaaattcgtacaacctctatggaaaacagtctggagattcctcaaagaaattaaaatccaatccagcaatttcactaccgagtatct

SEQ ID NO: 773735 - DNA, 649 bp, Homo sapiens
gctggatcctgtgaatagttggggtataaactgatagtctgtataaactgaagcctcttttgtgccaaaagttaagacattctggtgattcccacttggacttgagacaaaggccataactgattcacctacagagccccaataatatgcaaagcccttcagggcctggggccacatgagcacaaagccaaacagccagtactcagttaagcgtgacttaccttaggcaaaaccaagtgggactttaatttacatgtatgactgaaaaataattagttctctgccaaacagtttttaatattataktttttaaggtattgctataagatgcattttgctagttcaaatatttgtcatttttaagattatttttctccccagagaactgtatctgcttccaataaattcaatttcaattatatacagttttgaatatttttatattaatttacaaaaacagtaagaaaaataaaaaatgtcccatgactgtattaatggtttaaaaattctaattactatgaatcaaagcccatactaaagagtattgtaaaagttatttatatctaattccagttgttacattattaccttagtttttgccctatgctgtgttttcagaggaaatctttaaacagtatggctttgtgag

SEQ ID NO: 773736 - DNA, 649 bp, Homo sapiens
gctggatcctgtgaatagttggggtataaactgatagtctgtataaactgaagcctcttttgtgccaaaagttaagacattctggtgattcccacttggacttgagacaaaggccataactgattcacctacagagccccaataatatgcaaagcccttcagggcctggggccacatgagcacaaagccaaacagccagtactcagttaagcgtgacttaccttaggcaaaaccaagtgggactttaatttacatgtatgactgaaaaataattagttctctgccaaacagtttttaatattatagttyttaaggtattgctataagatgcattttgctagttcaaatatttgtcatttttaagattatttttctccccagagaactgtatctgcttccaataaattcaatttcaattatatacagttttgaatatttttatattaatttacaaaaacagtaagaaaaataaaaaatgtcccatgactgtattaatggtttaaaaattctaattactatgaatcaaagcccatactaaagagtattgtaaaagttatttatatctaattccagttgttacattattaccttagtttttgccctatgctgtgttttcagaggaaatctttaaacagtatggctttgtgag

SEQ ID NO: 773737 - DNA, 649 bp, Homo sapiens
gctggatcctgtgaatagttggggtataaactgatagtctgtataaactgaagcctcttttgtgccaaaagttaagacattctggtgattcccacttggacttgagacaaaggccataactgattcacctacagagccccaataatatgcaaagcccttcagggcctggggccacatgagcacaaagccaaacagccagtactcagttaagcgtgacttaccttaggcaaaaccaagtgggactttaatttacatgtatgactgaaaaataattagttctctgccaaacagtttttaatattatagtttttaaggtattgctataagatgcattttgctagttcaaatatttgtcatttttaagattatttttctccccagaraactgtatctgcttccaataaattcaatttcaattatatacagttttgaatatttttatattaatttacaaaaacagtaagaaaaataaaaaatgtcccatgactgtattaatggtttaaaaattctaattactatgaatcaaagcccatactaaagagtattgtaaaagttatttatatctaattccagttgttacattattaccttagtttttgccctatgctgtgttttcagaggaaatctttaaacagtatggctttgtgag

SEQ ID NO: 773738 - DNA, 649 bp, Homo sapiens
gctggatcctgtgaatagttggggtataaactgatagtctgtataaactgaagcctcttttgtgccaaaagttaagacattctggtgattcccacttggacttgagacaaaggccataactgattcacctacagagccccaataatatgcaaagcccttcagggcctggggccacatgagcacaaagccaaacagccagtactcagttaagcgtgacttaccttaggcaaaaccaagtgggactttaatttacatgtatgactgaaaaataattagttctctgccaaacagtttttaatattatagtttttaaggtattgctataagatgcattttgctagttcaaatatttgtcatttttaagattatttttctccccagagaactgtatctgcttccaataaattcaatttcaattatatacagttttgaatatttttatattaatttacaaaaacagtaagaaaaayaaaaaatgtcccatgactgtattaatggtttaaaaattctaattactatgaatcaaagcccatactaaagagtattgtaaaagttatttatatctaattccagttgttacattattaccttagtttttgccctatgctgtgttttcagaggaaatctttaaacagtatggctttgtgag

SEQ ID NO: 773739 - DNA, 608 bp, Homo sapiens
tggctacccataaggtaatgcatagtcacctttgtctgataaaattaaagtaataagaattttacatatcattatgtatttatatttttgccaataagtatggaatttgtaaataatatctattttagatagtaaaactaggtgagtgctatgctaatatttatataacaaatttggaagacaacaggaytgtaaagtggctttgataagaaaacattaaatttattttctatttgatataacattgtgtttctaattgctttcttagcaaagaagttattattcatcaagaatcatcaaatggattttatccaaaactcttagactgacaggataatggatttctgctaatatggtgattgatggttgatgctaaacttgaatattttttgccatagttatactatagggactcatctttggataataatcagccatagctataaaagattttcactgaataatttgtgttgctccacagtgcaccctaaggcattgaactgattacagaaaggtaaattacctttatgcattttcttcctgactacgtgggtggcaagtacaaacactgaattctatcttgaattaaataattctttcgtagtcta

SEQ ID NO: 773740 - DNA, 608 bp, Homo sapiens
tggctacccataaggtaatgcatagtcacctttgtctgataaaattaaagtaataagaattttacatatcattatgtatttatatttttgccaataagtatggaatttgtaaataatatctattttagatagtaaaactaggtgagtgctatgctaatatttatataacaaatttggaagacaacaggattgtaaagtggctttgataagaaaacattaaatttattttctatttgatataacattgtgtttctaattgctttcttagcaaagaagttattattcatcaagaatcatcaaatggattttatccaaaactcttagactgacaggataatggatttctgctaatatggtgattgatggttgatgctaarcttgaatattttttgccatagttatactatagggactcatctttggataataatcagccatagctataaaagattttcactgaataatttgtgttgctccacagtgcaccctaaggcattgaactgattacagaaaggtaaattacctttatgcattttcttcctgactacgtgggtggcaagtacaaacactgaattctatcttgaattaaataattctttcgtagtcta

SEQ ID NO: 773741 - DNA, 516 bp, Homo sapiens
gcaattgcttacagacattttaacacagacctcataaggtgctgacaaaagattagcaagagtgctcagaaagcatcctccatggtaaagcctgggagaacaggagccacttagagaaaggcgtgaaacccaccccccgacccttccttatctcccctataagtcttacactctcttatcttaaactgctgggggaaaggtaaacaatatccttttcacattactggtacaaaaataggccacagatccwgatatggtccttgagccttacttttgctaaccccttgatgcctgtttcatatcttctctctccagttatcccaaacctcctgtccccctttcactctcagcaaatgaccttgttttctactgttttcccatgcccattatgtatttcctagctgtatcccaggtgcctacttcctggaatatggagttgattcaatatcatatttgttgaatgaatgaaactatgcaaatttccttgtgctacatactcagtagtcaatggataca

SEQ ID NO: 773742 - DNA, 516 bp, Homo sapiens
gcaattgcttacagacattttaacacagacctcataaggtgctgacaaaagattagcaagagtgctcagaaagcatcctccatggtaaagcctgggagaacaggagccacttagagaaaggcgtgaaacccaccccccgacccttccttatctcccctataagtcttacactctcttatcttaaactgctgggggaaaggtaaacaatatccttttcacattactggtacaaaaataggccacagatcctgatatrgtccttgagccttacttttgctaaccccttgatgcctgtttcatatcttctctctccagttatcccaaacctcctgtccccctttcactctcagcaaatgaccttgttttctactgttttcccatgcccattatgtatttcctagctgtatcccaggtgcctacttcctggaatatggagttgattcaatatcatatttgttgaatgaatgaaactatgcaaatttccttgtgctacatactcagtagtcaatggataca

SEQ ID NO: 773743 - DNA, 516 bp, Homo sapiens
atttggtatccatcggaaggccttttatcgcttgttagtaatgatacagatttgttgtagaggcaagcaattctttcagtatttaagcctttgcaattttcattatttttttaaaaaaatgatttttttttttgcccttttgctccccttcctaacaaaggaaattgttaggaactatattactaatgtaatttagtcaaggggttgtcaaggagttccattaggatttggattgaaaagggatttctaggataaagcaccgttttgctgtagatatgatcttctggaaaggatggggccgggcagcctcgtgaagtttgcattcgtgaactttgggttcccgtaatcctacggcatgccttrtcgaggacagcctaggagcgaattggcagtaggttagaaagcatgattagaagagggaaagctgaaatggccttcatgtcggctgttttcctccacaggatactgggtgattcctgtcctaaccagatactgattacttaaagcttagcccga

SEQ ID NO: 773744 - DNA, 589 bp, Homo sapiens
tggaaatttataaattgcctgaaaaggaatttaaaataatgacctgaaggaaattatgaattgtggatgggggaagggaaagtctagaatatttgtatgtgaccaaagttaagttgttatcagcttaaaatattctaagttctttttacataagccccagaataaccacaaagaaaaaaattacagcagatacacaaatcaaaaagagaaatgaatcaaagcttatcactatggaaaaccaccaagtcacaaagggaaacaataaaagtagaagaaagaaacaaagtatctagaaaacagttaacaaaatggcaggagkaagttcttacctgtcagtaataatcttgaatggaaatagattaaattttccaattaaaagatatagagtggccaaatgggggaaagaaaaaaacgcaagactcacctatatgacgtctataagaaactcacttcacatgtaaagacatatagactgaaagtgaagggatgaaaaattgatatcacttgcaaatggaaactaaaagagaccaggagtagcttcacttataccagataaaatagacttcaaatcaaaaatcacaaaaaagca

SEQ ID NO: 773745 - DNA, 609 bp, Homo sapiens
aaaactaatgctaaacagttagtagccctacttaagcaaattggattgctttgagaccaaatccatgttagactgtaaatatgcaacctcattcatgaaaacacatctatcctaatgtagtgaggtgggcgagtcttgaggactcaaccctcaatacattatttattgtcaatwtccttaagatgctttgtggcatttggaaatttttgtttgttttgtaaagaaatgcggagaaaatgagatccagtcttcaggatcaaagacaagacaagacatttcaggtcaatagctctctctgtagtaatggtcagcaaaagaaatgcataaattgaacttatggtggggaaatcataatattccactgtaatattgtgaaatatgtatgtggtctttgtcctcatttcctggcatacaactcataagatccttagaatcttcagagtgacaagtatcttttgtatgctaatgagttgactgaaggctggcaacctactggtagctcaggatctgggctggtcacccaggaaaccaaggcaggattagaggattgggactttcagccccaatcttcaacctcaaggaaaggaagggatctgaaggttatgttga

SEQ ID NO: 773746 - DNA, 578 bp, Homo sapiens
taaatatttcaagtaattacttaacaattttataaaagacattaatccttaaaccaataagctcaatgaactctaagtagaataagtgcagagagattcatacccacatacatcatagtaaaaatacttcaagacaatgacagagaacaaatctttaaagcagcaagaaaaaacatttcatcacattcaaaaaagccccagtatgagaaacagctaatttctgaccagtaacaattgaggagaggaagtgagaagacatactcaaagcactgagagaaaaaaatatcaaccaagaatcttatactgagagcacatgttttcaaatataaaggtgaaataaagaaatgcccaaataaaccatagaagttatttgcaagcaaaactgtttgacaagaaataataatggaagttytttatggtgaaagcaagtgaccccataatgtaattagaatccacatgaaaaaaacagagcacaggtaaaaataattatgtaagtatgaatgatagtaaaaatgcatatttcttcttcttatacacttagccaacttaattagtaactctataaaacaatagttata

SEQ ID NO: 773747 - DNA, 628 bp, Homo sapiens
tgttattggtaagtatgattttctaggaaatatatatttattagtaagggtacaaactaggctaaggtattttttaaaatgctaggttttaagtaagaagttatttttcattcatataataatctacagattatttatgggctttagggcaattcaactgcacaagattatcaagggaatcagactggaaatttggctgagttccccagcattttgcttctccttcagagttctagacggcagtcttaccatctcttaagaatcaagaataaggaaaaaacacagtgtagggtatgtaattacatttttaacgaggtgacccagaaatttcatagttgttataagggagaacagcaaactcttctttaggtatgtaacaaggtgcccamataaacttgagaattctctttctaaaaagaattgatggatactagggatgattataatgctttgtcccatgttaggaatagtagatggatgatgattgtcatggaataaaagactttttatattttttataaatggatttttaaacagcaaaaagaatgatgtatccacattatgaatatcaaaatagatacacttaaaattggaggctagtaaaaattctcctcttacaaaaattgtt

SEQ ID NO: 773748 - DNA, 626 bp, Homo sapiens
agtgtcaacaccaaatcttaataacttctcaaattcaacacatttaagtcctttctttggaattatgaccaaatcaaggatctagagattcaggctctcttagcatctttttgatacttgctcttctcatcaatttctagtttcccttctctagttaactgraggatagggtttaacttccctttttcccccactctttcttctacagtcacagaagcacaactccccacatccgtgcactaggtacagcttagtgaccaacaccttcggtactgctaaggatccctacagaagttctgcctctactgtcaactagcagagctatgaggccttggcccagacccatcacctctctgggattcaatgccctcatctctagaactatgtggcctccagagtctgtttgctctcagaatctttgacgtcatgattccttaccataacaagtatcatttataaatgaaggtaaaaatggtcaactttaaaattaataataataatagtatgagaaaataaattcagtaaaactaggcctcttagacagacaatcaaaatgcaacagaaatccctgaaagattcaattgcttcagtttcttagaacccagtgagtaaatagatcatcttgt

SEQ ID NO: 773749 - DNA, 626 bp, Homo sapiens
agtgtcaacaccaaatcttaataacttctcaaattcaacacatttaagtcctttctttggaattatgaccaaatcaaggatctagagattcaggctctcttagcatctttttgatacttgctcttctcatcaatttctagtttcccttctctagttaactgaaggatagggtttaacttccctttttcccccactctttcttctacagtcacagaagcacaactccccacatccgtgcactaggtacagcttagtgaccaacaccttcggtactgctaaggatccctacagaagttctgcctctactgtcaactagcagagctatgargccttggcccagacccatcacctctctgggattcaatgccctcatctctagaactatgtggcctccagagtctgtttgctctcagaatctttgacgtcatgattccttaccataacaagtatcatttataaatgaaggtaaaaatggtcaactttaaaattaataataataatagtatgagaaaataaattcagtaaaactaggcctcttagacagacaatcaaaatgcaacagaaatccctgaaagattcaattgcttcagtttcttagaacccagtgagtaaatagatcatcttgt

SEQ ID NO: 773750 - DNA, 559 bp, Homo sapiens
tgatttacatgtgggtgttcccagcctggcatgtggataggcgtcctaaggctaagtttatcctttcatttttgaagtacactgagtgctagtctctgtggatagttcctttgcagaagagaacatggcagcagttgggctggtggcttgctcatagccacagaggccaacccataatcctgggtatgttagtgatggtggtgagatgaggggagaggcaagtgctttgtacattragtacctcaccttccagcatgggatccatagcagcttttgaacattggtccctttagaatcaaacactggcaatgtaactttaatcatagggctatttactttttttccgctacaatcttgcaaattttcaaaaagattatgtgaactgcagttaacaatctgtaaattgtgtctcttcagactaaattgttcctttgctgttgatgaaaggctgtaaaggcattctggtttttagtccttagatgagttagaactgatggtgactctagctaaactgaaacagacagtctttatctcatctggccttttttaggagatgttt

SEQ ID NO: 773751 - DNA, 559 bp, Homo sapiens
tgatttacatgtgggtgttcccagcctggcatgtggataggcgtcctaaggctaagtttatcctttcatttttgaagtacactgagtgctagtctctgtggatagttcctttgcagaagagaacatggcagcagttgggctggtggcttgctcatagccacagaggccaacccataatcctgggtatgttagtgatggtggtgagatgaggggagaggcaagtgctttgtacattaagtacctcaccttcyagcatgggatccatagcagcttttgaacattggtccctttagaatcaaacactggcaatgtaactttaatcatagggctatttactttttttccgctacaatcttgcaaattttcaaaaagattatgtgaactgcagttaacaatctgtaaattgtgtctcttcagactaaattgttcctttgctgttgatgaaaggctgtaaaggcattctggtttttagtccttagatgagttagaactgatggtgactctagctaaactgaaacagacagtctttatctcatctggccttttttaggagatgttt

SEQ ID NO: 773752 - DNA, 626 bp, Homo sapiens
gacttgggtaaaagctatcggcaacaggtaacactctaaaggtgctgaaagaatgagtacctcagtattgaagtggaggacctgggtggcacaccatagtatcccctccacaatctaatctaaaaagtaaataatccacacatatggccaatgaagtgaatatatatataaataagtcaacaatgctatttaaccaagaaagtcaagtcactaagtcttgaatattttttaaattacttggggaagttattgggaaaattatgtatctaaaatacaatttctatcatttattctgcctagctatattggataaatcactcaacatattgatttaaataaaactaagaaggcttggatccattgctttccccwaggaggctgatagaaacatactcagcctcatgataacactagctgcctctctagtattgctaatactagaatgaggtaaaatagtgctacagttaacagtattatagttaacaggtcctagctgtgcctgacacacactaaattccctttaatgacagtatggaattttaacattaatataaagacccagtaacactgattggtttacagccgttcttaagtacaaacgcctatacctcaaaaaatgccattat

SEQ ID NO: 773753 - DNA, 526 bp, Homo sapiens
aaaaaggcttgtgttttcttaatggcaaaatattaaatgttttctccctaaaattgggaacagggtaaaaatgtctgcttttattgtttttattcaacattatgtttgggtttcagcttccttgagcagggagcttgctcttgagagaagtgacttcagctgaggcatttcccgcagtgtggactgaaagctgagggttatttgctggcagtactcccagaacttggtaagagcttcactcctgagggagaatttaagtgcctcattactgtgtccattacatattttgtttctgaatcctctacatgaccygttaaacacaattataaaatgaaaaaaatacccagaaacagtgctaagaaagcccctcaatagaaattgtgggcaaatgtcctttgtagctcatgaagaaggttgtccccatcagagggaaaaaaatatggctgctgagttttagaacatttatttaaagatagagttttgtctatttacttctatcagaaattatcagtgtgtctatgactca

SEQ ID NO: 773754 - DNA, 606 bp, Homo sapiens
gattaaataatttccccccaaataatgaatagcatattcttatctgccactgatctctcctaagcagccacatgcacctaaagcactgaagtcttcatcgatgtcgggattgaactgtattttcctcatgcctctctaactttccttatgctggatctgctgcctggagtgagaagaaatcttgttcactggtcaatcttaaagaaagcttcaaggtccagaaacctgccctttactcttgtttaaccattttgtctcctggagagatggttagacgcacccacccttgtgagccagtaamcctgggtggatatgtcaaatcactagagggtgaatcccaggtatgaaaagtgtcctgccctcactcatcacccagggactgctgatatcaccaaaaaacttttcaagaaattgaggaagaatagaatatagaggaattttaagttactgtagtattcccattatagacgatctaatgcccattgatttttccttccttttttattaaaaaatcttttcgatatattgagaccaatgtgcttacacaaaaggagttagtgcccacatattcaaatgtccaatagagagatttctcttatattatag

SEQ ID NO: 773755 - DNA, 546 bp, Homo sapiens
ggatagcaagaatcaatatcgtgaaaatggccatactgcccaaagtattgtatagattcaatgctatccccatcaagctaccattgactttcttcacagagttggaaaaaactactttaaacctgatatggaaccaaaaaagagcccgcatagccaagacaatcctaagcaaaagaacaaagcaggaggcatcacaccacctgacttcaaactatactacaaggctacagtaaccaaaacagcatggactggtaccaaaacagatatatagaccaatgaaacagaacagaggmctcagaaataacaccacacatctacaaccatctgatctttgacaaacctgacaaaaacaagaagtggggaaaggattccctatttaataaatggggttgggaaaactggctagccatatgcagaaaactgaaactggaccccttccttacaccttatgcaaaaactaacttaagatggattaaatacttaaatgtgagacctaaaaacataaaaatcctagaagaaaacctaggcaatatgattcaggacatt

SEQ ID NO: 773756 - DNA, 566 bp, Homo sapiens
tgtggaagctaaaaaagttgatctcataaaagtaaaaagtagaacagagaatactagaggctgggaagggtggaggaaagggggtgtagggagagatttattaaaagacacaaaattacaagaatgtaggagaaatcagttctagtgttctataccacygtaggataactatagttaacaataatatattatatagtttcaaatagctagaaggagaatactgaatgttcccaaaaaaaaggcataagtaattgagatgatggatatgctaattactctgatttgatcactatacattatatgttttaaaatatcactatgttgcccatgagtatgtataattattatgttaattaaaaattttttaagccatgtgctgtggctcatacctgtaatcccagctactcgggaggctgaggcaggaggatcacttgaggctaagggttgaagaccagccagggcaacatagcaagaaccacctctaaataaataaatgaataattttaaaaataaataatcaacagagtaaaaaaattaaaattaaatattttttttaaaaagtaaaa

SEQ ID NO: 773757 - DNA, 625 bp, Homo sapiens
tttagttttttcctgactaaactcttatggagatgacatgaaattttatttggagtacaatctaaatacttcttatgattcttctatgtttggttttgctttagttgcttgttggatttgtcagctaaatatattgttttataaaagagaaggaagctaggcacttctatttttactttaacaaaagtacatcaagaaaactttctccccacagaaacagtaacagatctttgtgattcagatatttagttactatcttctctctgaaagaaaataccagaattgttttacctataggtatattcttcaatttgtcactggtgaaatgccctgaaatatttaggccttgtttaacctagaaattctagcagttttggagacagcaacgctgttaakaatttttttcctgaacgcagttacagtaaatgataactgaaatttcttcccctatatcctaacctaacccagaaactgtgaagtaatcttcctgaattattttgtgtccatccgaggaagaggaagaaaaatggataagggatttttctcttttggattctttgtgtgatctcaagggcttaaaacattaattatactactctcaaatgaaactgctgacaccattctt

SEQ ID NO: 773758 - DNA, 643 bp, Homo sapiens
tagaatactttaaaccaagtaaaagctgtaaattaagaaataagaataaaaaattttaaacgagtaacaagccaaattttaaaccaagaaaactatttttaaaagccctaataaaacagaagtatgagctataagataaatggaataaaggttggagcaagaagataaatttaaaaagaaaattagaaggttaaaataactaaggtcacagttaaaaatgaggtcagttatgaaataatttaaagcagatattctaagtaagtaaaggttgaaagccaacagggtaataaggtaagatttaaaataggacatgagatactttaatccttcatgagagtaggattaaagataaaaataatcagatgatttatatggatgttaagatatcatcaaacataaaaaaaaagtttaagttagaagtaaaaagaagagaaaacatacaaggagtaagagggcttggagcttatctgtcttttcccccaaaayaatcttttaatggagtagtggtgtcttaatggggtaaaaacccaagaggacagagagcaatgtgacaccttggtcatggaggctcccctttgctcccctcagcaagtaccagaatgccagcctcaccagcagtaaccagagaagacagacaggaggt

SEQ ID NO: 773759 - DNA, 611 bp, Homo sapiens
atataaattgtcatttttataggaatatttttataagaagttaaacctttacttagaaattatacatgagggccgggcgcagtggctcacgcctataatcccagcactttgggaggccaaggtgggcagatgacttgaggtcaggagttcgagaccagcctggccaacgtggcgaaaccccgtctgtacgaaaagtaaaaacaaaatagctgggcgtggtggcgggcacctgtagtcccagctactcaggaggctgaggtgggagaaccacttgaacccgggaggcggaggttggagtgagccgagatcgcaccactgcattccagcctgaacaacaaaagcgagactctctctctctctctatacacacacacacacacacacacacacacatatatatatacacattatrtatacacacacatatatatacacatacacacacacacacacacacacacacacatatatatatatttagccaaagtagtatttattgagccaaagtaaatttcctagtaatttcaactttctttagggccacatagaagaaacaatttcccatctatatatatagagagagagagagagtctcactctaaaaaaaaagt

SEQ ID NO: 773760 - DNA, 611 bp, Homo sapiens
atataaattgtcatttttataggaatatttttataagaagttaaacctttacttagaaattatacatgagggccgggcgcagtggctcacgcctataatcccagcactttgggaggccaaggtgggcagatgacttgaggtcaggagttcgagaccagcctggccaacgtggcgaaaccccgtctgtacgaaaagtaaaaacaaaatagctgggcgtggtggcgggcacctgtagtcccagctactcaggaggctgaggtgggagaaccacttgaacccgggaggcggaggttggagtgagccgagatcgcaccactgcattccagcctgaacaacaaaagcgagactctctctctctctctatacacacacacacacacacacacacacacatatatatatacacattatgtatacacacacatatatatacacatacacacacacacacacacacacacacayatatatatatatttagccaaagtagtatttattgagccaaagtaaatttcctagtaatttcaactttctttagggccacatagaagaaacaatttcccatctatatatatagagagagagagagagtctcactctaaaaaaaaagt

SEQ ID NO: 773761 - DNA, 651 bp, Homo sapiens
aacctggctcattgttaggagtcaggctaaagctaaactggtttggttggctggtttttttggaacttcatcttactgaatcattgaactgacagttcattaaaatccagtttttcacatttttctactgggaaatcttccataacttgtatgtatgtaattgagtttcagagtgcatatgcaggatcatactttgttaaaatacttatctmtaaaacctctgaaataataaagagggaagatgtgggctttaatgtcaggtcaaaatcgaggttaattttgttgaaggcagagttctacagaagcataagcaggtgataactgagtaaatccgggaagactctgatgaggaggtgaattaggcttttgaagagtaaacaagttttcactgagtcatatttattgaatgcctactgtgtagtagacactggagatatagcagtgaatcacaaaaaccaaatccctgcccatgtggaattcataccttaaagaggaagacagatgttgaacaaagaagcaaaaaattagtatcttcaattgtgattagaattaatgagaaaaataaaagcagcaaagagggataggaagtgcttgtgattttatacagtggcttgagaagtcctctcttaaaagatggccttggagtaaagg

SEQ ID NO: 773762 - DNA, 628 bp, Homo sapiens
ttggcttacaattctgatgtctcaaaaagttcaagattgggcatctggtgagggcctcaggctgcttccactcatggtggaaagtgaaggggagccagcgtgtgcagagatcacatggggagagaggaagtgctttaggggtggcaagtgaggggttggccggagggaggaggtgccaggctcttttcagcaaccagctctggcagagctcatagtgagaactcactcaccatcaggggagggcattaacctatttatgaagaatccgcccccatgaccctgacacctcccactaggccccacgtccccactgccacactggggatcaaatttcaacataacaccagactggaggaagttataggtgtcaaagtttgaatcttttgtaaaaggaacaaagccttttcaccattgtctttcatagttgttctyctcactagcaaatctgtctctcagacctggcattacctagacttgaggcttacagcatctactggaaggacaggtaggtagtaagtggtaatagtcatgttgtatatactgcaagagcagaatgaagaaggtgcctgggagcacagaaggagctccttcaactgtgcagaggtgaaggagggcttcttgtttgatg

SEQ ID NO: 773763 - DNA, 436 bp, Homo sapiens
ccatgtgtttctgttaaaaattggtcatattgtgctgcttcctgcttctacctttttgagtttctaactaaatcaaggcaaaacaactgatagggcttttaagtaaaaggcatgtttttctctstgtgtgtgtctttccttctctctcactctcccttctctttcccatgccttcctgcactccctaggtccaggtctttctcttcttcaagcaaatttacttaaaagaaggaaagatgagtaataactatacttttctgattggattagaacagcttggggatatatctgaaatcttcaaattgttctttttatgatgatatgaagaacttgaatggttaaaatatttattgttgatttctcatttcattctccaatttgtgctgtaagagagatcaaattcctgtagagtatggctgtgggggatgcatatatt

SEQ ID NO: 773764 - DNA, 512 bp, Homo sapiens
acaaaggagtccctgtgtttggaaggccttctgattccttcccctcacgaaaaatgttctatagtcacaggtccatactttacctgtgacattttaaagcaaatatcttcagcctgtctccaaacccaaagcccggagccagcttctgtacaacaaatgtgtccctctctgtttgcacttctcacattcaaggaggcctcccacggactctgggaaggaaatgtgatatccacgcacagcartgccactgcctgcagagagcaaaatgctcctgatgcggctgacaatatgttccctcctgggaatgtgggttgcactctgtctttcagaaatgtaggattagaatgtgtcatctccttaaccttagaggactggagtttatagatctgctgccaaactgactcaacctactgagcccaccccagtctcatgtctacacatgaatgagaataactgagcaatagttactcaactaggaaacatctaggattctccaactggcattctaggaa

SEQ ID NO: 773765 - DNA, 582 bp, Homo sapiens
ccaaaatatggtatcttttgtgactcaagcaaatgtaatataatgtttaattccccagcaaaaatatatataaatatatatttatatataatacagatagatagatagatagatagataggtagatagatagatagatagggctggccaacatggcaaaacctcatctctaccggaaatataaaattagctgggagtggtggtgggcacctctagtcctggctaaatacctcacatgtgctaaaataaagagaatagtataataagccccatgtaggtatcatccagcttttatcacctaacaagtcatggtcattcttgtttcatctttgcaccccccattcttmcatcctcagatgattttgaagcagatttcaaacatcatgtcatctgtatttatttcagcatgtatcttgaaaagacagcacttttacaagaacaaccacccatagtcataggcaggaaaccgttatgatgcctataacaaatttacaaacatttcttatcatctgctatcaaatatggtcacatttccatgtttttgtatatatctggaaattttttgaaactttgtttaaattta

SEQ ID NO: 773766 - DNA, 478 bp, Homo sapiens
tgagtgaaacttactcaagcatcaagacagaatggactcaagccactgggttctgagttataatcagcaatgttgtcatttaaagtggtaaaatgtaaataaattacttgtacacaattataggagaggaaaaagtcaagatgaataacaggaattggacaaatagggataagactttatttgaaattaagtgaataaactagatatacccaaattcaattaggtcttaattggaaaaaaaacttaaaggtataaaaacaaaataaattakaagttgcagaactgctacactgagaactttttcagaaaattatgtaaactgtgatttttctttgactaggaagatctaacaatattctaattaattgattaatggatggatccattctcattccatcatgaagtgcctattaggtgccagcactgttttggcaaagagtggaagtgataagtagagcagtgagcaaatgtcatgtct

SEQ ID NO: 773767 - DNA, 566 bp, Homo sapiens
agaatagtaaaaactagaatagtgtccgtgaggaaaagaagactagaaaatgcctcctccgctttataaaaggattgctatgaaaaatgtgcagatcaattgtcctgtgtatcttctagaaacaaaaggcttttaagcctgtagcctcattgacataaaaagtaattataatgacaaccaggctaccaagagagatatttgcatcgtcaacttaaaaatgtcaacatacgatgcaagctgcattcagctcaagactccatattaaaggaaaagatacttttctttatcctaaayacttgaggtttccagttctggaaaaattttttttctctctgtagtgaagctcttagagaagtaggcaagaactaccaccttggagttgtgaccacaactcagaaacaccagcaatctaccaggatttgggaaaactgtggcaaccagtttaaacatcactagtgtgactcacctactactttcagttgtcattatcagtatctacctaaacatcttgatattcctttcagttctaaatatctgaaatgtcatgatgaagtctattcatcctt

SEQ ID NO: 773768 - DNA, 653 bp, Homo sapiens
tgattttgtatcctgagactttgctgaagctgcttatcaattcaagaagtttctgggatgagatgatggggttatctaaatataaaatcatatcatctgcaaacagagacaacttgacttcctctctttctatttgaatacccattatttctttctcttgtctgattgccctggccagaacttccaatactatgttgaataggaatgatgagagagggcatccttgtctcgtactggttttcaragggaatgcttccagcttttgaccattcaaaatgatattggctgtgggtttgtaataaatagctcttgttattttgagatatgttccatcaatacctagtttattgagagtttttaaatgtgaagggatgttgaatttattcaaaggccttttctgcatctattgatataatgacgtggtttttgtctttgactctgtttatgtgatggattatgcttattgatttgcatatgttgaaccaaacttgcatcccagggatgaagctgacttgatcgtgatgggtaactttgttgaggtgctgctggattcgctttgccagtattttattcaggatttttgcatcgatgttcatcagggatattggcctaaagttttctctctcttttttttttttatttgagttagggag

SEQ ID NO: 773769 - DNA, 589 bp, Homo sapiens
attcaaaatgatattggctgtgggtttgtaataaatagctcttgttattttgagatatgttccatcaatacctagtttattgagagtttttaaatgtgaagggatgttgaatttattcaaaggccttttctgcatctattgatataatgacgtggtttttgtctttgactctgtttatgtgatggattatgcttattgatttgcatatgttgaaccaaacttgcatcccagggatgaagctgacttgatcgtgatgggtaactttgttgaggtgctgctggattcgctttgccagtattttattcaggatttttgcatcgatgttcatcagggatattggcctaaagttttctctctcttttttttttttatttgagttagggaggagtccttccttttcaattgtttggaatagtttcagaaggaatgrtaccagctcctcattgtatttctggtagaattcagctgtgaatttgtctggtcctgggctttttttggttggtaggctattaattactgcctcaatttcagagcttattattggtctattcaaggattcgacttcttcctggtttagtcttggtagggt

SEQ ID NO: 773770 - DNA, 563 bp, Homo sapiens
gagtttggatgaatgtcagcatcaggctactgtaataatggtttaagattatttaatcccattagttatacacttcattaggctgagtgaattgttggcagtggttcagtaaacttcctcctttagagataaaaggacagaaagaaaataggaaaggagcctattcctcattttctttcatagttataattcttttttttttttttttttttttttttccgagacggggtcttgctctgtcacccaggctggagtgcagtggtgcaatctcggctcaccgcaagctccacctgccgggttcacgccattytcctgcctcagcctcccgagtagttgggactacaagcacccgccaccacgcccagctattttttttttttttttttttgggatttttagtagagatgggtttcaccgtgttagccaggagggtcttgatctcctgacctcatgatccgcctgccttggcctcccaaagtgctgggattacaggggtgagccactgcactggccataattcttaatggataaaggaatgataattacccagctgtagcgtggac

SEQ ID NO: 773771 - DNA, 598 bp, Homo sapiens
gaactcaccactcaatgtttgccagagtttggatgaatgtcagcatcaggctactgtaataatggtttaagattatttaatcccattagttatacacttcattaggctgagtgaattgttggcagtggttcagtaaacttcctcctttagagataaaaggacagaaagaaaataggaaaggagcctattcctcattttctttcatagttataattcttttttttttttttttttttttttttccgagacggggtcttgctctgtcacccaggctggagtgcagtggtgcaatctcggctcaccgcaagctccacctgccgggttcacgccattttcctgcctcagcctcccgagtagttgggactacaagcacccgccaccacgcccagctattttttttttttttttttttgggatttttagtagagatgggtttcaccgtgttagccaggakggtcttgatctcctgacctcatgatccgcctgccttggcctcccaaagtgctgggattacaggggtgagccactgcactggccataattcttaatggataaaggaatgataattacccagctgtagcgtggactccatattagt

SEQ ID NO: 773772 - DNA, 636 bp, Homo sapiens
  misc_feature 554: n = A,T,C or G
acagaggcatttagaaatcatcttgcttgaaagcttccctttcttcagtcattagtgagcatcttcataattttttttaccatatatgtaaactatccatagtattatttgcctaatatttttatttaaatcaattaactttttatccgactttgtcttccttcatgtcaataacatctataatttgattctgtgggttgaagtactaagttgcttctttcctgtaaaagatattaaactgaatactatatttaaattttaaaaatacggctggaattacagatcacatctgtaatcccaacactttgggaggccgaggctggagaattgcttgagtccaaaagtttgagaccaacccaggcaacagagtgagacccccatctctacaaaaaatgaaaaaaatattactaggtatagtgatgcacatctgtggttccagctactcaygaggctgagataggaggatcacttaagcactggaggtcaacggtgcagtgagccgtgattgcaccaccgcactccagcctgagtgacagagtaacagtctgtctcancaaaacaaaacaaaacaaaaaacaaagttcatttcatgcaccagctaatgtttgaaatattgagaaaatgtggatattcatt

SEQ ID NO: 773773 - DNA, 589 bp, Homo sapiens
gggctgaagggctcctcaagtgccgccaaagtgggagcccaggcagaggaggcgccgagagcgagcgagggctgtgaggactgccagcacgctgtcacctctcaccagcactttgggaggctgaggcgggtggatcacgaggtcaggagatcgagaccatcctggctaacacggcgaaaccctgtctctactaaaaatacaaaaaaattagacgagtgtggtggcaagtgcctgtagtcccagctactcaggaggctgaggcaagagaatggcgtgaacgtaggcagcagagcttgtagtgagccgagatcgtgccactgcactccagactgtgcgacagagcgagagactccgtctcaaaaaaaaaaaaaaaaaaaatctatmaactggtgcaccggtaccggtccccatctccccaggttatgaggaacaaatgagataatccacagagcaggcgaaacacattgagtaagccactgttatttactaagaagacaggctcacggaatggttgcggcagcctcattagttcctttgcgaagtgcagacacccgctctctgtttcattgattcctaaatgcattttgtt

SEQ ID NO: 773774 - DNA, 517 bp, Homo sapiens
agagaaaaaattgagttcctctaaaccagaagtagccacaacccttttatttcaattcatgtgctcactccccaaagcaccctttaataacgtctaaattgggccattgacactatcctcagacttcagctttgaagctggtgtatacattgacaagcaacagcatcttgcgtgtttacgttctctttgatgttggcaaactcaacaaattgctggataaaccctttcccttgttggccactaagagctcctctagggcaggattaactcyctgtgtatccatttcatagacactttttaattttcctttttggtacagtagcagaggagctattttcttcaacaataatcgtgggatgtgtacgtctgaactgaagatctctgcaatgggttaattgattccctgacaaaggcctctgtcatctaagaacccagcccttcaagtccattagacacattgattttaagcggacaaaagaaatcaaatcgtttggatgcttagctccgagaagtaaat

SEQ ID NO: 773775 - DNA, 573 bp, Homo sapiens
ttgctgagccctggcaactaccattttactctgctcctctgagtttagcttttttagattctgcatgtgagtgagatcatgtggtttctgtgcctggcttatttcacttaacttcgtgtctttcagtgtcatgtatatattgttgcaaatggcaggatttctttctttctttttctttttttgagacagagtctggctctgtcacccaggctggagtgcagtggcatgatcttagctcactgcaacttctgtctcccaggctcaagccatcctcctgcctcagcctcccatgtagctaggactacaggcacataccaccgtgcccagctaatttctgtattttttttttgtagagacagggttttggggtttttccgtgttgcccagtctggtctccarctcctgagctcaggccatctgcctgcctcagcttcgcaaggtgccgggattacaggcatgagccactgtgcctggctggatttcttttttaagactaagtaatattccatgtatatatacaccccacattttctgtatccattcgttcattaatggacacataggctgactcat

SEQ ID NO: 773776 - DNA, 549 bp, Homo sapiens
gtaatttataaaggaaataggtttaatggactcacagttccacagttctctagggcaggggcaaaatgccaccagtctctttgctatagcataacaagagtcatcttcactccagttaccaataagctcctcatctccatctaagaccacctcagcctggacttcaatgtccatatcacaatcagcattttggtcaaagccattcaacaagtctctaggaagttccaaactttcccacgtcttcctgtcctcttctgagtgctccaaactgttctaatctctgcctgttaccagttccaaagtcgcttccacattttcaggtatctttacagtggcaccccactcccagtaccagaatmtatattagttggggttctatagagggacagaactaataggatagattcatatatgaaaggaagtttattaaggagtattgactcacacaatcacaagatgaagtcccacaataggccctctgcaagctgaggagcaaggaagccagtctgagacccaaaacctcaaaagtagggaagctgccagtgtagt

SEQ ID NO: 773777 - DNA, 591 bp, Homo sapiens
cacccatttgagtgataagcacatctcaatttggaccagtcacatttcaagtgttccatagccatatgttgctagtggctaccatcttggatagcatagctttagcaccacaaagcactgctctaaattttgaaattaccactccttctttaatgtgggacatttggaatctcaggtagaagtggaaagatggccaggcacggttgctcatgcctataatcccagcactttaggagaccaaggtgggtggatcacctgaggtcaggagttcgagaccagcctggccaacacggtgaaaccccatctctactaaaaatacaaaattaactgggtgtagtggcgcatgcctgtaatcccagctacttgggaggctgaggcaggagaatcacttaaaccggcgaggtggagtttgcagygagccgagatcttgctattgcactccagcctcggtgacagagcaagactctgtctcaaaaaaaaaaaaaaaaaaaaaaaagtggaaagaaatagtctaagaggccggagacagtgttttaaaacatttctttcttcctatcacaaatacattataattagggatatatacacacc

SEQ ID NO: 773778 - DNA, 527 bp, Homo sapiens
gcagaataatttgaagtggaaagagacagtgtattagaagcgggcaagaagaatgttctggtaatccaagaagtaaaccagaaactgcatgtagtagagacatagggaagaattggaagactcaaggtggatcagaggagggcaggaaatatcacagcagcctacaagataggtacactgagggcagtggtaatttctgccaatggcatcaacatggcaatggccttcattgagcatggctattacttccttgaacccagaaaactttagcaatttactgcctatgtccccttatgagttcattagggctctctcatgtctaaatgtctccaactacttcttgagtstatttatatcttcagcaggcataatttctcagcgtaagcagtcgcctattgcaggtgactatttgtgatcaaggacagatagaaagaagctgaagatagccctgaagtttacagcttaatgagtcatttggataataaagaaagcatagaaagaaaaaggagtaggggaaaattccagca

SEQ ID NO: 773779 - DNA, 584 bp, Homo sapiens
cacagtgttagttattggcagatctgggacacagactaacttccatctgattcaaggcctctccactgagctatgtttttaggtgcacaggattcgcttggccatgtccttgttaaaggccagcaggactttacaacaggccttcccaatggaggaactgcaaattttagaaatagttttggtctaggcaggatgggctcactagttgggctggtcttgggcctccaggggtcggggctggagtgcttctgtaggctcagctgggagagctggcaaagacagagctgaggaaacaaggaccttccagaatgccagcagctgggatatagaagacaccctaggcagtgcttgcctttaaagaatttgtcattctattggggagagaggcttaataagccccattcaagacactaacaacatgaaagaggattgagttcaagtacaatttttgggagttacaaataygcttcagtgtttagccagtatggcctggacgttagttttagaattgagttcttcattttccattcatggtaaggcatgactgaaactgggttttatttgtgtgggttggatagggatga

SEQ ID NO: 773780 - DNA, 581 bp, Homo sapiens
atttgtcagatggaggtgcaaagggaagttttataatgccactcagattaactcactggtaagtcatggcatcagcagtcaaaccaagcagcctgactctcaagagacacctgtgccttcttttctgtgctctgtgctgacaaccttcaatgggtgggctatgggcatagagtagagatgcctggtagttgcacatctttggcagacacattagctaatttgtaccttggaaatagagaatttagggaatattatccttattttgaaggtaggaaaattaaacttgaggggccattattatctaagtattaataatgacaacaataatagtgactctccaktgagtggctaacacaccctgccaagcatgctggcctggccaggaggactccattggatagtgagtgcaacagccaaggtcacacagatactcatctaagagaaaaatttgatcaggactccaggggactctccagaggcagaagatgtgggcagagagaactagcagcctgctgttttaattcccagaggcaacctggtaggacaggtgggagtaaactagcagaggctgattgaccata

SEQ ID NO: 773781 - DNA, 617 bp, Homo sapiens
ctaggttttaaatacagtatatttatgttgttttatcaagttaaagtactaataattataatgatgactcaatcacaagaaattttgaaattttgaaattttatcttgtataatatgtgttttgcacagaagcattatagaatgctgaataaaagaccataaagcagtaagtttattacattagaaaaaaatgtgaaaggagtgaaatgaaaacattagtccaaaggaaaagggaactgatataaaatttctaactgttaaagaatagcttatctagggccgggcacggtggctcacgcctgtaatcccagcactttgggaggccaagacgggyggatcacaaggtcaggagatcaagaccatcctggctaacatggtgaaaccccatctctactaaaaatacaaaaaaattagccaggtgtggtggcgggcacctgtagtcccagctacttgggaggctgaggcaggagaatggcatgaacctgggaggcagagctcacagtgagccgagattgtccagcctgggcgacagagcaagactccgtctcaaaacaaacaaacaaacaaacaaaaagaatagcttatctatgtatttttcatgaattataaagttgata

SEQ ID NO: 773782 - DNA, 555 bp, Homo sapiens
tggacctggcatggaacttaactggagtttatgtggaatgaaccttgaggggtgagttttcacatggggtgttgattatgtgggaggtgggaggctggaatatgtgaatgttggggggctgtagagtgaatgtggggtgcgtgtgtatgtgtgtgtgagatatggttatagcttagcttagcttttgtttagattttcttttgctctttgtttttgtctttggcctttgttttatctttgtttcrctctttgtttaaactttctttggcttttgtttggtctttctttagccttttgtttaaactttgtgtggcctttttgtagtctttgtgtagcttttgtttttaagtggatcttcgctgaggactcatcaaaaacaccttgtgtaatgaaaaacccagatctataacctctccctatatattctgcatgcattgaagtaggctcaaaccctcagggacctggtatagacgcagaatctgtttcacacaacaactgctatttgaaggtaagaggattccattggtttttattttacttcattttatactttca

SEQ ID NO: 773783 - DNA, 656 bp, Homo sapiens
ttttttatttatttatttatttattttactgttctgaaggtatatcagcatgccaactttttagaccttttactatttggaactgaatctgtttataagttagtagtgggtgttaattgtatttgagattctcatatctactctgatacccagcacttgtgtagcatctactatgtgtaggtatcacatgatgtttactgatttagtaggaagaagagtcaatggggaagaatgttaaagatgcccctagaaaatgtgatttttgggtcaccactaaggcctgggtaygtgcctttttagtaagcattcaccccgcaaaggtacagttatgtagacagtacgcagactacacaatgagcaatgctgacctaaacaatccataaatgaataatccagattatttgtgatgtgaggtaaagaaatgtggagagtgataaatttatggtaccaaaagtgaaagcattaaaaaggcacaagattaggcaagtttaatttgtgaaggaagtaactagtcactaaaactttaatagcaagttgtatgacaggttacctagtcattaactgagtccctcttaaggaccctgagtagaagggtcctaggacaggtaagtattgatatatggaagtagttagaaaatgtatgaaacagaggaaat

SEQ ID NO: 773784 - DNA, 656 bp, Homo sapiens
ttttttatttatttatttatttattttactgttctgaaggtatatcagcatgccaactttttagaccttttactatttggaactgaatctgtttataagttagtagtgggtgttaattgtatttgagattctcatatctactctgatacccagcacttgtgtagcatctactatgtgtaggtatcacatgatgtttactgatttagtaggaagaagagtcaatggggaagaatgttaaagatgcccctagaaaatgtgatttttgggtcaccactaaggcctgggtatgtgcctttttagtaagcattcaccccgcaaaggtacagttakgtagacagtacgcagactacacaatgagcaatgctgacctaaacaatccataaatgaataatccagattatttgtgatgtgaggtaaagaaatgtggagagtgataaatttatggtaccaaaagtgaaagcattaaaaaggcacaagattaggcaagtttaatttgtgaaggaagtaactagtcactaaaactttaatagcaagttgtatgacaggttacctagtcattaactgagtccctcttaaggaccctgagtagaagggtcctaggacaggtaagtattgatatatggaagtagttagaaaatgtatgaaacagaggaaat

SEQ ID NO: 773785 - DNA, 656 bp, Homo sapiens
ttttttatttatttatttatttattttactgttctgaaggtatatcagcatgccaactttttagaccttttactatttggaactgaatctgtttataagttagtagtgggtgttaattgtatttgagattctcatatctactctgatacccagcacttgtgtagcatctactatgtgtaggtatcacatgatgtttactgatttagtaggaagaagagtcaatggggaagaatgttaaagatgcccctagaaaatgtgatttttgggtcaccactaaggcctgggtatgtgcctttttagtaagcattcaccccgcaaaggtacagttatgtagacagtaygcagactacacaatgagcaatgctgacctaaacaatccataaatgaataatccagattatttgtgatgtgaggtaaagaaatgtggagagtgataaatttatggtaccaaaagtgaaagcattaaaaaggcacaagattaggcaagtttaatttgtgaaggaagtaactagtcactaaaactttaatagcaagttgtatgacaggttacctagtcattaactgagtccctcttaaggaccctgagtagaagggtcctaggacaggtaagtattgatatatggaagtagttagaaaatgtatgaaacagaggaaat

SEQ ID NO: 773786 - DNA, 641 bp, Homo sapiens
cacatggatatatcgtgccatcttctgctttagaaaatgattactttgcacctgtgacccatttactaaacctcaaaactcttggtttaagatatgttgttttgtaattaagcttttgaaatgcacatttgttggcttttgtcctgtgcttgttattatctgaactatgaccaattataaatwctaagctatttagagtcttaaaaacaaatggatatctatacttcgtgatttacacaaatattaactttattagctacaaaaaattataaattggactttatataaaattaaaacctgttcttcaaaaaagaaaataaaacacaagccacaaacaggagaaaatattttcaatgcacatatctggaaaagaacttgtaaccagagtatagtaaaagctcttacaactcagcagtaagaagataaaacaaaaataggcaaaatgtgaataaagagttcatgaaagaagagctaaatggcaaataatcacatgaaaagatcttcaacatcattaatcatcagagaaatgaaaataaataccatgaaatattgtatacccattataattgctaaaagtaaaaggactgaaaattccaactgttggagaatttggaacaactggcactcttgcaaaatagtac

SEQ ID NO: 773787 - DNA, 610 bp, Homo sapiens
tgcaagtggctcacttcctccctgcctttttgtctctgctcaaacatcagtttatcagaaaaaactcccctagttactctatatagaattgcacttcctttattctctatcctcttactcagccttacttttcttcatattgattatcacccagtatattaaaactctgcttattgtttactctcaaaagaatgtaaactttttgagggcaaagacttgatctattttgttcactgctgttttcccagtgcctgaaacgttaccagacacaaagtatgtgctcaataaaatgtattttgatgaggattcatactttggtttcttctgtgtgaaatggagataatatgactctctttcacactgggacttatctgttacaatgttagattgtacttcagactgcytgccaggcccttgggccatcttcaataagtcagctcagggaaggctggtgtccactattgacctaagcaagccaatgacagcctacacctgaagcagagagcagaaatgttgagattatcgactgccccttggctttggtaagaggaataaaaaatggctatgttgttttagaaaatatcaccttgaaagctccatgatgatgtac

SEQ ID NO: 773788 - DNA, 589 bp, Homo sapiens
aaggaagctgtgccattttaaaacttttcttcccatgcaggatgagccactggctaaaatggtgagatcaccacccatccagccatgctattataacccaggacactcatgtaggattgaggcctggaaagttaactgcatgattcccaggtgttagggctacttaccaagaatgcctgcttaactttgaaaggaaggtttccctgggaacatacatcctggtgaacaggatcaggtgttgcttaatagatattatgtagatacagagtaaatgtcrggcttacatagaggagttggctgctgaggcaaatttgttcttcagccttggccagcaacccagaatttaagggaggagtcaaggccggaagccacgtgcattgaggatctaggaaaccacccacagagtcatccttcttccagactcagcctcctcagacaaaaaatcccactctgttcccaggccggagagcctcctgggctggaattgctcaagcctcagctcacagatgagtcactgtattcatttgctccacaggtaggcgtgtagtttggccccatatgcaacagacaggccaagttaacagcaact

SEQ ID NO: 773789 - DNA, 589 bp, Homo sapiens
aaggaagctgtgccattttaaaacttttcttcccatgcaggatgagccactggctaaaatggtgagatcaccacccatccagccatgctattataacccaggacactcatgtaggattgaggcctggaaagttaactgcatgattcccaggtgttagggctacttaccaagaatgcctgcttaactttgaaaggaaggtttccctgggaacatacatcctggtgaacaggatcaggtgttgcttaatagatattatgtagatacagagtaaatgtcaggcttacatagaggagttggctgctgaggcaaatttgttcttcagccttggccagcaacccagaatttaagggargagtcaaggccggaagccacgtgcattgaggatctaggaaaccacccacagagtcatccttcttccagactcagcctcctcagacaaaaaatcccactctgttcccaggccggagagcctcctgggctggaattgctcaagcctcagctcacagatgagtcactgtattcatttgctccacaggtaggcgtgtagtttggccccatatgcaacagacaggccaagttaacagcaact

SEQ ID NO: 773790 - DNA, 607 bp, Homo sapiens
ataagaatgatatcaaataactttttaatgcccttccaacccgagatttcctaacacatacataatgtgagggcaaactgcttgcacagagcacataggtgctcaacaaggagtggatggatagacagagagatggacagacaactggatgggtaaacttaaggatgaataatgcagtctgacattttcaaatactcagcacctcccatccacagacacattagccacaggaaataaactggacctcagaaaaaaagaaattaaaatgtatttgtacctctaagagtyttccaaacacttagtatcttggagtacccaaatatatgctgcatttttatgcttatgaaagcaatttcttaagaaaattagaatttcatgtgaaaatgtcttagtttgttctgactggttgactctgagcaagggtcactgtggacctgtattcactggaatttggtacattcagcacagctcagctttaacagtcaggaacccaagctccaggtacaaaagacagccttgagcaacagagaagcagtgaccagccagggtccacgtgttctattatctcttctcccagcagatttctcatgccacattgtgctttata

SEQ ID NO: 773791 - DNA, 644 bp, Homo sapiens
aggaagacctaaacaacggaaatatgggaaatatatattgaattcgtgtgttgaaagactcagtgtcatttctctcaaattgattaataggttcaatatgttcccaataaaatcccagcaatgtagaaattgacaaacacattctaaaattcatatgaaaacactaaggactcaggggaggcaaaacaacttggaaaaagaacaaagttggagaattaacactacctcatttcaaaacttattataaagctacgataatcaaaatagtgggattaatataaaggtagacaaattcatctgtgaaacagaatgaaatatacagaaacagactcatccatataggagcagttgatttttcacaaagatacaaagaaaagtcagtgaagaaaggacagtctttttgacaaatgatgctcggaaaatcgatgtccattcacacacacacactgaaaagaattcataccccarctacatacaaatgtacaaaaaataattcaaaatggatctgtaaaaatcttctagaagaaaataaaagttttctagataccacaaagattttctagattttctaggcaaagattttctagataccacatcaaaagcacaatctatataagaacaaactggacttcctcaaaattaaa

SEQ ID NO: 773792 - DNA, 644 bp, Homo sapiens
aggaagacctaaacaacggaaatatgggaaatatatattgaattcgtgtgttgaaagactcagtgtcatttctctcaaattgattaataggttcaatatgttcccaataaaatcccagcaatgtagaaattgacaaacacattctaaaattcatatgaaaacactaaggactcaggggaggcaaaacaacttggaaaaagaacaaagttggagaattaacactacctcatttcaaaacttattataaagctacgataatcaaaatagtgggattaatataaaggtagacaaattcatctgtgaaacagaatgaaatatacagaaacagactcatccatataggagcagttgatttttcacaaagatacaaagaaaagtcagtgaagaaaggacagtctttttgacaaatgatgctcggaaaatcgatgtccattcacacacacacactgaaaagaattcataccccagcyacatacaaatgtacaaaaaataattcaaaatggatctgtaaaaatcttctagaagaaaataaaagttttctagataccacaaagattttctagattttctaggcaaagattttctagataccacatcaaaagcacaatctatataagaacaaactggacttcctcaaaattaaa

SEQ ID NO: 773793 - DNA, 523 bp, Homo sapiens; identical to SEQ ID NO: 758776

SEQ ID NO: 773794 - DNA, 633 bp, Homo sapiens
tttagtccaatataattattctgacctattctatttcataccaaaataactttggaggaatccaatggagtttggcagaaacacttttggggggatgaaaagaaacgtagcttttgcagtgtcattctttaatatgagccacaaaagactgtgtaggggtgggggtgtctactcaaatcacagaggtgaaaagacttaagacatgagatccaagaataagaaaagatttatagatcctaaaatgtatagagtatgaaaatggacacctttaaaagtattgtatgacatggtcaagttttaaggaaagaaagaaagaaagggcttaatgaatccacctcttctaaagaaattggtcccccaaatttccatttcattgccatgacaactagtactccatcattgccatggtaaccagctgaatagcattagtctaaagacaagctctctgattgggtgaccaacgaaagccaktaggtgccccaccacaatgctgaaagactgttttgcaatcactttgacctatttctagcttttcaatgtgttttaattctccaaagtgtttccctaaaaccaaatgttttttggaatgagacaatttcaagaagtgcataataactgtattcctgcatctcc

SEQ ID NO: 773795 - DNA, 651 bp, Homo sapiens
aatgctaggtatgttatatatattatgtatttaaaaatctttattacaatttcaagagctacacaggtattgttaagcccatttttagctgagaacattgaattatacaaaagttaaataatttgcctgttgatctaataagtagcagagccagactccagaccctcgtctaactagagaaccagtactcttattcattcatcattcaacaggtgctctaagcaaaagaatatatgaggttcctgtcttgaagatattttttttctaatgaaagacaaagacagtaagcaagcaaataaatattaaatattatatcatagagtgatagatgctatgaagaaaaacattgttgcataaggaaaaagaaagtagtgggtgttagtgaggaaagatcttctaatgaggggctctcttttagcagaggctkagatgaagaaagcaagtcggctgtgcaatatctgggggaaaagcaactcaggcatagtgagcagaaactgcaaaggttttaagctactctagtacctcatttcccaaatgaagaattcagtgtgccttgaaacgaactcttagacttgttggtctagaggatgccatccactgtgatgcaaggacaccctaataatcctgtggagaagcctaagtggataggaa

SEQ ID NO: 773796 - DNA, 554 bp, Homo sapiens
ttgtgcacattgaccaaaatttggcagagagctcagcacacagcagcatgctggggcccataatttgaggatcactcctgccctagctccatggttctcaaccttggctgcatgttacagatatctgaggaactttaaaaaatgtactaatgtttgagcccactccagacattctcaattgattggtatgatgagtgactgagggtcaggctttttaaagttttcccagggcttctaatgggcagtcagggttgagaaagaccattgcagatattactactatactgataagaagaataaaggagtgctggactcaaggaagtttgtgccaaagaagacaaagggcattttcctccaattaaccttatttatrcttcttccaataaaaccgtatctcttagtaatggggatagttttttcttatccttgtattatgtaaattcttctctgaagataggagaggaatctccactctctctgaaagatagagtggtccactaataaacttctgatcaactctagaagaatattcaagagagcacatattggctgaa

SEQ ID NO: 773797 - DNA, 546 bp, Homo sapiens
ggctctaaccgcctctaacatgcaggggtgtctccacggcaggcgtaatgcccctgcccatcctcgccccaccaaccgagggtaggtgggggtggacatggagtgggctttctgccagaggctctgactgaacctagaagagggtctggtctgagacagtacctggggtgtcagtgccccagccacggggcctgrggcccagcagttctcaaggcatgagctgggggaccaagaaggccatggtcatgggagatgggggtcagcatggtgaggctggggatgcgaaggagaggccaggaggcagttaagagcccacggacccccagtcccctctggcagcagatggacttccaggtcttagggtggtggcctgaggtggctggtttgtattgtgatgttacaggctggggagatgagatgtcctgagcttggccgtgaggatgccagctggagtggggtcctccaggtgcctgcagaacaagagacagatctgggggaggctgcatcccagggagcctcttgggtggcagcacagggggtgctgaa

SEQ ID NO: 773798 - DNA, 648 bp, Homo sapiens
ttatttatggattttgagttttgtatccaggacttgagttttccacttaatttgtcttagaaacttttcaatgagtatatccagatctgtgtgatatgttttaaagacagcaagttaggctataccatcatttatttaactcccacaatgttcatttagctttgttttcaactttgacatgagcagtagatgctactttttgggttcttattctttgtgtttgtagaacatttcacctgtgataatgctttttttgtatactatttctgggatgtttattccatcccagtcaactccacccaacggggttaaaccagtattaataaagatttttttcttatcgactttttaaagctcctaatatattaaagtcttagttttgtcaaaatagtacaaagttttcctaaagtttatcagttgtctttctgtcttatttatgtcttttgccccctrtggaaatttaagatgttttacctgtccagtttaactaagcttgttctagataactttcaggagggtctgcccacaccctcatactacaaaatatgtttatccatattttcttttagtaattttttgattccacttataatatttaagtgcttgatcaatctcaattttttctgacataagaagtaggaaatagag

SEQ ID NO: 773799 - DNA, 488 bp, Homo sapiens
catggctttgtgatggattaaatgtctttctccagttagcaccttctaactatttatccagaagttactaggactctttattttgttttatttttcttctgatatatgccctgggggaaagcacttatattacaagtacttataatagactaaagcttaggagctagcaccctctttcatagtaaatagagtgacagtctaaatggcmtaagccgagagaacccactgcttttaacaggtagtccataggagtcacttaccttggccagtaaatggaaatgcccatcctcttttgtcatacataatcttgaagattgtgccagttttgaataatgtgagatgtcaagcatcacacttacccaaaatgctacacctctgtaaatggatttaaataagcagaaccatatacaactctccctgcctttcctgcaggctcagcgatatgaggcagcatcgacaatttatggaccgcacacattatctgctta

SEQ ID NO: 773800 - DNA, 488 bp, Homo sapiens
catggctttgtgatggattaaatgtctttctccagttagcaccttctaactatttatccagaagttactaggactctttattttgttttatttttcttctgatatatgccctgggggaaagcacttatattacaagtacttataatagactaaagcttaggagctagcaccctctttcatagtaaatagagtgacagtctaaatggcataagcmgagagaacccactgcttttaacaggtagtccataggagtcacttaccttggccagtaaatggaaatgcccatcctcttttgtcatacataatcttgaagattgtgccagttttgaataatgtgagatgtcaagcatcacacttacccaaaatgctacacctctgtaaatggatttaaataagcagaaccatatacaactctccctgcctttcctgcaggctcagcgatatgaggcagcatcgacaatttatggaccgcacacattatctgctta

SEQ ID NO: 773801 - DNA, 511 bp, Homo sapiens
ctccagatttctgtctctgtgcagctatcctctctatgatgctctgtgctataaactcaagactgtttggcttttgtggacacccagctccatatcctcaacttagactgccagacttggcctgaattctcctccttctgccgtggcccgtaaactctgatgacattgagctggtggattacagggttcttgtttgtctgctgccactcaaatatcactgtctttctttgtcacttgaaaatccattgtttaatatatattttttccagttttttagtcgtttcaggggggaggataaatacacatcctgccactccatctcttataaaaataaaagcttaastataaatgtaagcataaatatgagtcatctgtggaaagttttgactgttctaatttgattcaaatattccctgtatttgtgttgggagggaggtgtgaggaattatcaaggcctgaagaagccattttaatatgctgtcactaatataaactacagctctagatcttc

SEQ ID NO: 773802 - DNA, 666 bp, Homo sapiens
agcaaaaaaccttttattagaagtcattaaatgaatttttactttcagggggaagttgctgaagttatatttgtaggtgctaacccgaagaattcagtacaaaaccaggtaggtatcaatgattttcttttacaaatgtaaatccactttttagccattcattcatttaaatatccctctagaggttaataacataaagacaaaatgttccaacttgttttccatcttattttgtaggtacgggaaaatattcaataggtagttaatgtggattgagtctgggtaaaagcacacaggaaacataattggcttcacttaggaccaagtatagcataatgcatgtatgactgcattgtctgtcaagaagatgttaagttgaatacaatcccatatatataattaygcgccacatacaatgatgtttcagtcaaagatgaactgcatttatgacattggtcccatgagattataatactctacttttactgtaccttttctatgtttaggtatgtttagatacacaaatacttaccattgtgttacaattgcctacaacattcaatacagtaacgggctgtacaaatttgtagcctaggagccacgggctgtaccatatagcctaggtgtgtaggaggttacaccatctaagtttgtgtaagtctaagt

SEQ ID NO: 773803 - DNA, 666 bp, Homo sapiens
agcaaaaaaccttttattagaagtcattaaatgaatttttactttcagggggaagttgctgaagttatatttgtaggtgctaacccgaagaattcagtacaaaaccaggtaggtatcaatgattttcttttacaaatgtaaatccactttttagccattcattcatttaaatatccctctagaggttaataacataaagacaaaatgttccaacttgttttccatcttattttgtaggtacgggaaaatattcaataggtagttaatgtggattgagtctgggtaaaagcacacaggaaacataattggcttcacttaggaccaagtatagcataatgcatgtatgactgcattgtctgtcaagaagatgttaagttgaatacaatcccatatatataattacgcgccacatacaatgatgtttcagtcaaagatgaactgcatttatgacattggtcccatgagattataatactctacttttactgtaccttttctaygtttaggtatgtttagatacacaaatacttaccattgtgttacaattgcctacaacattcaatacagtaacgggctgtacaaatttgtagcctaggagccacgggctgtaccatatagcctaggtgtgtaggaggttacaccatctaagtttgtgtaagtctaagt

SEQ ID NO: 773804 - DNA, 650 bp, Homo sapiens
caaaagaagtctcttaataaattcaattccatgggtttgtctatggacagggttatagccctgaagacagaaggatgacactaagtggtactggaaactgggagtcaaggtaagtttttggttatagaaagtgtattttattattagagcaaatggcaaatacaytcaaggacattgatgttataggggaagagtctcaagggggaaaaatgctaatacaagtataaaaccaaattgctatttatgaaggtaaagtttggtgctgcctcactgtcaactctttccttatactctaactatagtcttgataaagtactcaatattccctctacatggaatagtctatttgcccagtacacaaacacaaacacacactaatacacacatacatgcacacaccattgcctttcttctagctaatttctacatatcttttaagtcttagcttatatgttatttcttccaggaaacttactgaaacatccccaagaccatattaggtgccctctctaattccctgaacaataacaatatgggtcactctgtacagtaattacctgttcatccgtttgctttgttcgttaaacgctaagttccttttggcagggaatagctttgccttcattattgtttcattcttaggatttagc

SEQ ID NO: 773805 - DNA, 592 bp, Homo sapiens
tagagaatacagaggtcatgaatggtggggcacacagggctcaagacatccttagaccacaaactcgacttcagggaaaactgggttcactcctccaggggctctctgacccaggctgcccgccgaccagggtgctgccgcttttcctcagctccctggctcctactcaggtcatccaggagccccagcagraggcccgcttgaccataggctccctggggcccacaggggcctcccagggccctcttgcccggatgctggcgtttttcaggcatcaggtcttcctctctctcttcctcctcctcctcttcttcccagctcctttgagccttgggatctgccagccttctgcctgggtgctgccgcttcgggacagcatatgcaagccagggggagcgccggccaggatgctgccgcttgtgctgggttacatcgactgaccatgaagcctcatcttctcgtcggccagggtgctgccgtttgtggggtcccacagcccccccttcttcctcttcctcttcttcaactccctcttcctcctcctcctctcttttgcctggatgctgacgtttggagagccagtcagattgaa

SEQ ID NO: 773806 - DNA, 381 bp, Homo sapiens
cttgtaagttaaatgggtataggtgtaactctgttagttctgccacatgacccttaaagtgtttgagcactgctattatgtctcctatttaagtcttcacttttcagagctgaatgtttttatttttcttttttttaaagrtattatggagagagatggggtctcatatgttgcctaggcaaactcctggcctcaagtgatcccccttgccttggcctccaaaagtgctgggtttataagcatgagccaccatgccccagccattttaatttctgttagctttttcttatttcttcacccttctggttgttgtaagtgagcttagtttattctttttttttttttttaactttgctactctgaagtatattttaaggtaca

SEQ ID NO: 773807 - DNA, 503 bp, Homo sapiens
gactggctgaaggaagactgaggcgggagctgagagcagagacttcaaccatgaccatgcctggactctccagataaagcactggtgaaatcaaagaccaacaatgtcaagtattggcaagactgtggagcaactggaactctcattccctgatggagggaatgcaaagtacaagctatagccacttttcctcgtcattttacatgaagggcagacatgcacttaaggtagracccagaaattctgcttctaggcagacttatgtccacaaaaggctgccacagggaagttcatgctgacatcctcataattgccaaaagccagaaacagcccaatagccatcaatgggtgtctgaataaacaaattgtgatcaatttacacaatggcgcatccatacaataaaaagaacaaactacctgtgcacaccacagcatagatgaatctcagaatcattatactgagcaaaaaaaaaaaaaaaaaaaaaaagagtccagacataaaa

SEQ ID NO: 773808 - DNA, 427 bp, Homo sapiens
cagttttaccccatgctgttctcatgatagtgagttctcatgagatctgattttatgtgacaatttttcctgctcacactcttgcctgctgccatgtaagacatgcctgcttccccttccactatgactgtaagattcctgaggcctccccagccacatggaactgtaagccgattaaacttmtttccttcaaaaaattacccagtctcagatattctttatagtagtgtgaaaacagactaatacactgtccaatcattagctgaccactaagttaaccaagcagagactttagtaaaacatggcaaagaatacagactttacagaattagtccaggaaagacattaaacaaacagaggcagcaacaacaatgaacagcaacaacaacaaaccctggggagggagacatctgatttccagaatttt

SEQ ID NO: 773809 - DNA, 548 bp, Homo sapiens
atagaagtgaaaccttagccatgtttttcagattttaaaaacatctcccatttatgctttctccttcactgcaggtcatttgaaatggtttcgaaggtaacacatactttatgctttgctacactgaaaatttattcaacagttctattcttaaagttatttctttcttgtgcttctattttataaggagcaacatttttccaaccacctactaagggaatttgtgatttagcaacatcttttaccaaccagtcattcacactcaaaacaaatctttctcttgacctcctggttttataacacattactaacccagtaataggaaayccaagagttaaaacaaaaataagaaaaatataatcaagttcagtagacatttatgactttgaagaatgctggccaggcatagtggctcaagcccataatcccagcactttgggatgctgaggcaggaggatcacttgagcccagaagttcaagaccagtctgtgcaacatagcaagacctcaatctctactaaaaaaaaaaaaaaaaaaaaaaaaaggggg

SEQ ID NO: 773810 - DNA, 619 bp, Homo sapiens
gagcaatgagtcctaggccacacagctgaaaaagggtcaagtcaggattggaacttcctgcccagatgcaggcagggaacagcaagaggggagccaaagcagtgggtggtggaagacggagaagggatctcgctacaggaaaatgcatagaattgtaaaggaccagacacgttgagggtcaagtgagcatccaaaggctgtgttgccattgacaagtcgaaagcaatatgctgggagatttcagaagcagaaaaaaagtctctctttcctcttctaccctaagaggacaaaagatcttctccctctaagaggagaaaagatcagacttagaaaattagaggccaatasaaaattggaggtggctcatgcctgtaattccagcaccttgggaggccaaagtgggaagatcatttgagtccaggagttcgagaccagcctgggcaacatagggagacctcattggtacagaaaaaaaaaaaaaaaaaaaaatagctgggcatggtggtgccgacctgtagtcccagctatgggaggctgagatgggaggatcacttgagcccaggattcaagggtgtagtgagcagtgatcctgccactgtactccagcctgggtgaaaga

SEQ ID NO: 773811 - DNA, 595 bp, Homo sapiens
ccatttggctctttctaaattgaaatgttactgcaggttccatcaccaagtgtattgaccgagtgaaatgactcagcactgcttgctggacaccaaacactccctcctggccaaacggtcacttgaggacctaccacctgctctaccaactacatctgcacgacagtaaacagcaaaataaataccttctacagccacatatagattaggtcttcattaccttaaacatagataaaactgtgagtgtgatttatatagacaagagtcttttggcagctagatcaagcagaaataaatattgatattttgttttagagtcaaggagattasaagctggctctgaataaaatacagattgttttacttagcacagccattttgttgttgttataaaagaatagagatggacaaaagtacctaagaaagggcttcttgctataaccacaggttgacggctgtgcaacactctccagcccggcttccctgtattcacttgtagccacaactacaatttcatactgtttaagttttcattgacaacggcagccaaatatctgcttatttcagatattctgaatgctaagaaagtagatgg

SEQ ID NO: 773812 - DNA, 595 bp, Homo sapiens
ccatttggctctttctaaattgaaatgttactgcaggttccatcaccaagtgtattgaccgagtgaaatgactcagcactgcttgctggacaccaaacactccctcctggccaaacggtcacttgaggacctaccacctgctctaccaactacatctgcacgacagtaaacagcaaaataaataccttctacagccacatatagattaggtcttcattaccttaaacatagataaaactgtgagtgtgatttatatagacaagagtcttttggcagctagatcaagcagaaataaatattgatattttgttttagagtcaaggagattagaagctggctctgaataaaatacagattgttttacttarcacagccattttgttgttgttataaaagaatagagatggacaaaagtacctaagaaagggcttcttgctataaccacaggttgacggctgtgcaacactctccagcccggcttccctgtattcacttgtagccacaactacaatttcatactgtttaagttttcattgacaacggcagccaaatatctgcttatttcagatattctgaatgctaagaaagtagatgg

SEQ ID NO: 773813 - DNA, 595 bp, Homo sapiens
ccatttggctctttctaaattgaaatgttactgcaggttccatcaccaagtgtattgaccgagtgaaatgactcagcactgcttgctggacaccaaacactccctcctggccaaacggtcacttgaggacctaccacctgctctaccaactacatctgcacgacagtaaacagcaaaataaataccttctacagccacatatagattaggtcttcattaccttaaacatagataaaactgtgagtgtgatttatatagacaagagtcttttggcagctagatcaagcagaaataaatattgatattttgttttagagtcaaggagattagaagctggctctgaataaaatacagattgttttacttagcacagccattttgttgttgttataaaagaatagagatggacaaaagtacctaagaaagggcttcttgctataaccacaggttgacrgctgtgcaacactctccagcccggcttccctgtattcacttgtagccacaactacaatttcatactgtttaagttttcattgacaacggcagccaaatatctgcttatttcagatattctgaatgctaagaaagtagatgg

SEQ ID NO: 773814 - DNA, 279 bp, Homo sapiens
cctagaaaagagaaccacacaggccctggaagtgagatggaaatttgaatagagaatactcggtcccaggtacattgagatggagagagatgtcttaaaaggatttgcccacgggggctgcctggagggccaataggagcccarctgatttgtagagatgatctcctaggacgaggggttgaatgggagttgtcaggagaaggctggaaagtacatcacttgtgtcagtaactgcagggggtatggggcatggaaatccccaaagaaccttcaaaacac

SEQ ID NO: 773815 - DNA, 574 bp, Homo sapiens
ataaatattaattaatgaattatctctatctattgcagcataacaaaccactctaaaacttaaatggcttaaaataatgaaaatcatttattttgcttacagttagacaatcaggaacagctcatctctgctcaatgtggtatcagctgggacaactcatcttgagactggaatatctgcttccaagaatatccacaaattgatgctggctgttggctgggagctcarccaatgctgtggcctgggggccttggttctctcccacataatctctccacaggacgcttgggcttcctcacagcatggtggctgggttccaatgtcatcagagatggaggctgtattgccttctatgacccagcctcagaagtcacaaagtgtcctgccaccgaagtcataagccagcctggattcaaggggatggcacaaagacctctttctctcaattgaaagagtatcaaaatcacattatatgcataacatatgaggtgggagatattgcagtgaccatctttgggaaattcatctaatctgtcccatggataggcaaacactctcacttcctggtggaccc

SEQ ID NO: 773816 - DNA, 536 bp, Homo sapiens
ttcaactaaaatttaggcttcctagaagttatgtacatatatataattttatacatattttatattaatatattagattttttattaggtatgtacatatacaataatctccagtgcttagcccagagtctaacacatagcagctgtacaaagagtacaaagaaatcttgtagaataaaataaattaaatamctgcttagtcccgctagatgaagtgcggcttgatgacgtgctgtcaccttctgggcactacggtattgctagccatttcaaaggcatcatgtctttggaactaactacgcaccccttgcctcaagtcactctcagtttacaaggcactctcccagtggctggttttttatgtatctatgtatttatttattttgaaacagggtctcgctctgtcgcccagggtgcaatgcagtagtgcaatctcagctcactgcagccttgacctcctgggctcaagtgatcctcacgcttcagcctcccgagtagctgggaccacaggtgtgtgccaccacacccagctaatt

SEQ ID NO: 773817 - DNA, 526 bp, Homo sapiens
cattcacctgggccactggggacaatcttctgaactcaaactcctggccaacattcccagacagccttaatagtctccttagatcttccccaagtctatccttgccaaaaagccatattaatcttagacctttttgcaagactcacagcaagcctgggcttagaccatcctctagtgccacgatgactgtagtgatcacaggctgaaggaacaaaaagttagtcagcttagaattactgaaaggctttctgaagaacggcaggtacaaacaaaaccagactgtgaagactaaaataaatacctaatccttcaatgtaaagacattgtcagacatcagcaagtgtcaggaacattcaaggaaaatataacactacaaagtggacaaartaaggtgccagagactgaccctaaagtgatggagatatgtgatcattcaagcaaataattcaaaatagttgtttcaggaacctcagcaaacttcaagaaaacacagaatcaattaagaaatctgtcagaggaatttaac

SEQ ID NO: 773818 - DNA, 526 bp, Homo sapiens
taaataatgtacagcagggatcctcaacccttggtactggtccatggcccatttggaattgggccacacagcaagaggtgagtggtaggcgagtgagcattacctcctgagcttcacctcctgtcagatcagtggtggcattagattcttatgagcatgaaccctattgcgaactgggcatgcgagggatctaggttktatgctctttatgagaatctaatgcctgatgatctggggtggagcagtttcacctaaaatcatccccatccctggtccatggaaaaattgccttccacaaaaccagtccctgatgccaaaaaggtttgggaatgctgctgtaggacacaaaaagtagagttataaattaagaataccatagtgctggattttacattcactcatgtagttacatttatcagagccctttgtctcttcacacagttttgagttattaccagtgtcctttcatttcagcctgaaggtctaccttagtatttctttcaagacatgtctagtggtaacagac

SEQ ID NO: 773819 - DNA, 588 bp, Homo sapiens
catttgcttctctattataaatcaagacagtgaccaagtacagcataacaggtgtgaaagcagggtagcatagaaatgatgtaaaatgaaataaattgttcataagaagtgctgaaactaagctgggcacaggggctcatgccagtaattccagtgctttgggaggctgaggcaggaagacagcttgagcacaggagtttgaaaccagcctgggcaacatagtgagacctcgtctctacaaaaaaaaaaatgtttaaatattagccaagtgtgggcgcgtgtgcctgtagtcccagcyactcaagaggcagagaggatcacttaagcctgggaggcggagattgcagtaagatcacaccactgcactccaccctgggtgatggagcaaaacactgtcaaaaaataatttaaaaaaagggctgaaaataataacacaaaaggaaataatagctgatggtaaattcaagtcttctcacaaaccaaacactattagtaattttagtcattttcagccttaaaaacactatgacttaaaaatatatacagaatcaaactgattagttttttttaaccaacagatcagaggaa

SEQ ID NO: 773820 - DNA, 628 bp, Homo sapiens
atctataaggaacttatacaaatttacaagaaaaaaagcaaacaaccacattaaaaagtaggcaaaggagatgagcagacacttttcaaaagaagacataccagcagccaacaatcatgtgacaaaaaggtcaatgtcactgataattacagaaatgccaatcaaaaccgcaatgagataccatctcacaccagtcagaatggctgttactaaaaagtcagaacaataacagatgctggagaggttgtgaaagaagggaagacttatgtggtgctggtgggaatataaactagttcagccattgtagaaagcagtttggcaatttctcaaagaacttaaaacattaccattcgaccctgcaatcscattactggatatatgcccaagggaatgtaaatcattctatcataaagacatgtgcatgtgtctgttcaatgcagcacactactcacaatagcaaagacatggaatcaacctatatgcccatcaatgggaaacaggataaagaaaatgtagtacgtatacaccatggaatactatgcagccgtgaaaaatgagatcatgtcctttgcaggaaaatggatagagctggaggccattatccttagcaaactaattctggaacaga

SEQ ID NO: 773821 - DNA, 617 bp, Homo sapiens
gaaacctccacgtgtcagctatccagaagctctctgaacccactcctttgggtttcaatggaagcctcattatgtaggcatgattgattaaatcattggccattggtgatcagcttaaccttcagtcccttccccatctctggaggttgtggagtgggcctgaaaatatcaaccctgtaaccatgacttgtttttttctgattaccagccccacccttgcacttgcgcttacactcctcaaagctacataggggctgcttgtcattagtcaatcattagcatacaaaacagtctaaagattttggttgtatgccaggaaacagggtcaaagaccaaatatatgtttcacaatatcacaatgacccatgagagaagagtaacacatgaaatttagcctcycatactcttgccaactttgtacttggggcctatttcccaacttttatgaggaaagtagagtccaagaagggtctctctgggaaggcaaagaatagaatgcacgactgctgacccaattggaacttgtggagtagggtactgaagaggacagagctgcacacaggggctcccaagtctttggtcaaagcctgtactgcatatatgtaacgtgaaactcc

SEQ ID NO: 773822 - DNA, 598 bp, Homo sapiens
aatataacatatttaggagtaaattgaaccaaagaagcataagacttgttcactgaaaattacaaaacaacattgaaagaaattaaagacctaattaattataaagatattctgtgttcacagatccaggcataacatttttaagatggaaaaattctccaaattaattcacaaatttagtgcaacctctaccaaaatcttagcttccctcctgcaacctcttttttttttttcagaaattggcaagctgatcctacaatgtatatggaaatgcaagggatacagagaaatcaaaacagcttttcacaawagaccattagaagtctcacactttccaatttcaaggcttactacaaagctacattaataaacaatattttacttgtataagaatggacaaattggtcaatggaataaaatttatagttcagaaataaaaccatacatctatgacaagctaccaagaccattcatgggggaaagaattatcttctaaacaaatgtggtgagacaactagatatccacatgcgaaaataaataaataaataaaggtgaaacccaacctcacaccatatataaaactttacttaaagtaga

SEQ ID NO: 773823 - DNA, 565 bp, Homo sapiens
atatacccttgtaaaaaaaacctacacatgtatccccagaatctaaaataaaaatggcaatttttgaaaaataacaacaaaagttaaacacacatacacgaagagtagaaaattctgtaacagacaaagaaattggatttytaaccataagtattacaagctctacataagaatttgtgtctcactactactattactacacttcagtaataaacatcttgacctaggaagtgccatgtttttcaatccttgaaaccaaatatttctgtatagctaaacttttccatcatgattaaatgtgaaagaggaaaaccagattctaaccagaaagtatacattctgatattagttgtgcaaggtatctacatatgcaagatatataagctttatcttttaactatgaaaatacaggtttcataaaattcctcatttttttggtcatatatacaatcctgctaaaatgacatttaaagacaaatgttcctctaaggtaaaaacaaaaatttctattctactagccctaagtcacttttcattcatttataatagccatttttaatacagg

SEQ ID NO: 773824 - DNA, 565 bp, Homo sapiens
atatacccttgtaaaaaaaacctacacatgtatccccagaatctaaaataaaaatggcaatttttgaaaaataacaacaaaagttaaacacacatacacgaagagtagaaaattctgtaacagacaaagaaattggatttctraccataagtattacaagctctacataagaatttgtgtctcactactactattactacacttcagtaataaacatcttgacctaggaagtgccatgtttttcaatccttgaaaccaaatatttctgtatagctaaacttttccatcatgattaaatgtgaaagaggaaaaccagattctaaccagaaagtatacattctgatattagttgtgcaaggtatctacatatgcaagatatataagctttatcttttaactatgaaaatacaggtttcataaaattcctcatttttttggtcatatatacaatcctgctaaaatgacatttaaagacaaatgttcctctaaggtaaaaacaaaaatttctattctactagccctaagtcacttttcattcatttataatagccatttttaatacagg

SEQ ID NO: 773825 - DNA, 623 bp, Homo sapiens
aagtaagccagaacaccctagagtcaatctgtaattctcctgctctatcagtcccatatccaaatagtcagatttatcacacaattttctctcaaattagtcaccttctctccgactccaatttcacatgttaaattagatgctagccaacttcttcatctagattaactctaacatttaattctatctaggtagcctcaaagcacaaactctaaccccaagtgggtatataaaagcttcagaaaagtgaagcagtgggtgtagtttgacagtttcccatgtgattctaacataacataccactcctctccyttattttctctgtgctcaggggttaaaatcattcctctaatccctttaagtggttcttatccttgactgcacactgaaatcccctggggagacagaaaaatttcaatgtccaggtctcacacctagattcagaaataattgttttgaaaggcagcctggtgattccaatatacagataaggttgagaacaactcttcttgattcatactatctagagtgagtgaacaacattccagggctatagaaaacaatccattggtgtaagataataatagaaaatttaacaatatgtatttttaatcttagtgctt

SEQ ID NO: 773826 - DNA, 615 bp, Homo sapiens
aatagctcatacagtaaaattgtccccagtatcttgataacatcaagaaatcatgaattatgtggcatgttagtcttaaatacaactctgttgtatactagacatgcaatcttgaacataactatttaatacttttgcttcccttttcacaaaagagggatgaacatatatatacttcagtacaaagtccaatagttatcrttcctccaccctgctttccttgatctgatgtgtagtagaatgtgaaccattttggtaacctaatttaacatggtactgaaaatgtttattagtatgttaagtgcacagatttggattgataaatgttatttatcttttaaaacctattgaattgggctgggtgtggtggcttacgcctataatcccagcactttgggaggccaaggagggcggattacctgaggtcaggagtttgagaccagcctgaccaacatggagaaaccctgtctctactaaaaatacaaaattagccaggcacagtgatgcatgcctgtaatcccagctactccggaggctgaggcaggagaattgctagaacccaggaggtggcggttgtggtgagctgagatcgtgccattgcacgccagcctctgt

SEQ ID NO: 773827 - DNA, 571 bp, Homo sapiens
aagaattcctaatattatatgcacattggtgagccaagagtgttagtatagataggtgtaccctttagaaaaattaattttgttggccgggcccagtggcacacacctgcaatctgagcactttgggaggccgaggagggcggatcacctgaggtcaggagttcgagaccagcctggccaacatggtgaaaccttgtctctactaaaatacaaaaattagccgggcatggtggcacgctataatcctataatcccagctgctcgggaggctgaggcaggagaattgcttgagccctggaggcggaggttgcagtgagccgagattgcgccactacactccagcctgagcggcagagtgtgactccatctccaaaaaaataataagaagaaaaattaattttgttagcactatgrgtgttacattattctggggagaggctagtggcagggacacgatttttgtggttgtccagatcagagatgtaaactgtctgaactgagaggtgagatagagacagggctcaacagtaaagagaaatttctaagactaaaatgacaaattggatgactt

SEQ ID NO: 773828 - DNA, 628 bp, Homo sapiens
accacttcataccccttagaatgactaaaataaaaaagactgacaataacacgtgttgtggaggatgtgggaagaactcagaatcccaatacatagctagtgggattgtaaaattatgcagctgcttagaaaacagtttagcaattcctcagttaaacatagacgttctacataacccaacagttctacttctagatgtatacccaagagaattgaaaacattaagttaaaaaagttctacacaaatgttcatagcaacactattcacagcagctaaaacgtggaaacaatacaaacatctatcaatgatgaatgggtaaataaaatgtggtcttacccatacaatagaacattcttcaataataaaaagaatgatatatgaatacacattacaatatggatgaacctccaaaatgtactaattgagagaagacagtcacaaaaactacrtattttatgattccatatttatgaagtgtccagaagaggcaaatccatagacacagaaagtagtttcctggttacctagggctggaaacactttggggaagtggaggaggggtgtgattgctaaagggtataggtttcttttgagatgctgaaaatattctgaaattaattgtggtga

SEQ ID NO: 773829 - DNA, 634 bp, Homo sapiens
gtgtggccagttttgatcatttcagaactgtttacctaatcagtgaattattttaagttcttttcttttcttccctgatgtttagccattatggggccaaataactccataaggtagtctaacagggaaaaacatcaagtaagttagtattgttagggactctagcaagtcctaggattaggaaatagggtaaaaatttaaaatttagayactagcccatttaactcatccatgtcaacttggattaatatattatggaaaattgcaatctggatctgtactgtacattcaacttctttttaaatcatagattctgtgtactatgcattctccagcatccatatggataattttaatttctgtatcttcagcatccatatggataattttaatgctaatagtccccactgggatgtcattaacttaagaaatcatttttatttttatagtacaaagcaaatgaatgtataggcacatttatttcaatcaagtcataatctgaacctaaaatgcaaagcaaaacattaacgtgcatttaatacgtatttcaagtctttgtaacagagaataaaaatcattacaaaattaaggtatgagacatcaagtcactaatgatagagttgattagacaatg

SEQ ID NO: 773830 - DNA, 492 bp, Homo sapiens
cctgataaacccatcagaccttgtgagacttattcattatcatgagaatagctccgggaagactggcccctatgattcaattacctccacttgggtccatcccacaacacatgggaattctggaagatagaagtcaagttgaaatttgggtggggacacwgtcaaaccatattattctgctcctgggccctccaaatatcatctcctaacatttcaaaaccaatcatgccctcccaacagtcccccaaagtcttaagccatttcagcattaacccaaaagtccacagttcaaagtttcacctgagagaaaggcaagtcccttccgcctatgagcctgtaaatcaatagcaaactagttacttcctagatacaatggaggtacaggtattgggtaaatgtggccattccaaatggaagaaattggccaaaacaaaggggttacgaggcccatacaagtccaaaaattcagtagggcagtcaatttttaaagct

SEQ ID NO: 773831 - DNA, 637 bp, Homo sapiens
accctaaaatttgcaagtaccgacccaaaactctgagaataatgttagttccaggaagctgattgcatcatttcagtggaccagaacagaaaataatgagttacatttaataactctttttaagttttctaatttaccacctggctgataaagtattaatgctataggaattggaatccttgaagtcttacggccacgccctcatcagtttgacataagattctactaaactrgtttcaacattagaataaggaaaggaaaattcctactttgtaaaaatcatattattctgatttcatcaccaacctcacagttttccaggcatatgtagaagaagtaattataatgccaaagtatgaaatatagccggtttcataaccggaatgaattatggctaattctcctgcagtaaataatttgtttttcaaatctgtattccccagacagctgagccaggccttgcttctcaagtgttttatttaaataggcagtatgtcagtggagttttaccacagagtttctgagcgcagagagcctttccctaggagtggggtgcagggaactggagggcaatggttcttatgagaaggtgatgatgcttctaagaaaaaagattacacgtaagttaatacctaac

SEQ ID NO: 773832 - DNA, 515 bp, Homo sapiens
gagcgtctctgttgcccattctagagtgcattggcatgatcacggctcactgcaacctcgatctccctggcttcagtaatcctcccacttcagcctcccaaatagctggactataggcatgtgccaccacactaagctaattttttttttttttagtagagactaggtcttgctatgttgcctaggctggtcttgaacccctgagctcaagtgattctcccgccttggcttcccaaaatgctgtgattacactgaacccatgratacatttttctgtatctaatgctactgttaagcccatctattgagtttttaatttgagttattgttttcattcctagacattctagacatttctaaacatttagttctttttcaactatgctagatcaccttttatattttctatatctgcagaaattttttcaagcttgtgtctaataattccaatacttcaattatttgtgggtctgtttctactttctattgttcctgttcttgctcatgatgcctca

SEQ ID NO: 773833 - DNA, 646 bp, Homo sapiens
taatctcctatgatatacacatatatcaaaacaatacattgtaccccataaatgtttcaattattgtttgtcaattaaaatttttttaaataaataaaatttttaaaaccccaaaactaaaacaaaaaaaaagttcagatgaagtagttgagatatatcttatataactttcaatagagtattttagaatggtgatatattattgttaaaaaataatttgagggggtggaggtgagaagagggaacttagaggatgggtcaataggtgcagtgaaccaccatgaaacatatatacctatgtaacaaacctgcacgttctgcacatgtatcttgtttttttagaagaaattttttaaaagtatcataaaaaataatttgcttgacctcatacaaataaaaaataatttgcttgacttcataccatatgaaaaggttaactcgtaatgaatcatagatgtaaaaygagagctaagactaaaaaatatctagaagaaaatctttatgaacttgggtaggcaaagaattcttagatatgacacacaaagcatgatccttaaaataaaaatattaacaaattagattttatcaaattagaaaagtctactctttaaataacaagattaagaaaatgaaaaggcaaatgaca

SEQ ID NO: 773834 - DNA, 623 bp, Homo sapiens
ccctactccgcagcttaactaattatttctgcaatgactctatttccaaataaggtcccattctgaggtactgggggttaggactgtaacgtatcttttgacagacccaactcaaaccataacaactcataagagatcttaatacactgcaaatatctttctcagtttatcatttgcctttgtatcctgtttatgttgtttggtatggataaaaggttttaattttgtcaatttaatctatcagtttttcttttatccagtatttgttgagtgcctactctgtgtgtgtgtgtatctgtgcrtgtgtgtgtgtgtgtgtgtgtgtgtgtgtgtgtgtgtgtgtgtgtaccagatgctgttctaggtgcccttgatccaaagatgaatgagagttggctgtcttatccctacatgctcagagtctaggaggcagacaagtaaacaaataaatatcattcagatgatgactacaacaataaaacatttgaactaggggaagggggcaaaaataaagaatgctcagcgaagtttgggcagttgtagagaggagatcagtcatgccagacccctctcaactccaatagggaatgcaccagcttcaagagcccgaacaagagacccag

SEQ ID NO: 773835 - DNA, 623 bp, Homo sapiens
ccctactccgcagcttaactaattatttctgcaatgactctatttccaaataaggtcccattctgaggtactgggggttaggactgtaacgtatcttttgacagacccaactcaaaccataacaactcataagagatcttaatacactgcaaatatctttctcagtttatcatttgcctttgtatcctgtttatgttgtttggtatggataaaaggttttaattttgtcaatttaatctatcagtttttcttttatccagtatttgttgagtgcctactctgtgtgtgtgtgtatctgtgcatgtgtgtgtgtgtgtgtgtgtgtgtgtgtgtgtgtgtgtgtgtgtaccagatgctgttctaggtgcccttgatccaaagatgaatgagagttggctgtcttatccctacatgctcagagtctaggaggcagacaagtaaacaaataaatatcattcagatgatgactamaacaataaaacatttgaactaggggaagggggcaaaaataaagaatgctcagcgaagtttgggcagttgtagagaggagatcagtcatgccagacccctctcaactccaatagggaatgcaccagcttcaagagcccgaacaagagacccag

SEQ ID NO: 773836 - DNA, 555 bp, Homo sapiens
acattgtactttccatctctatgaatttgactgctcgaggtacctcatatgagtggaatcttaccatatttataattttgtgactggcttattttacttaggataatgtcctcaagttctatctatgttgtagaatgtgtcagaatttccttcctttttaaggctgaatagtgtttcattgtacgtatatgccacattttgcatagccattcactcattgatagacattcacgttctttctagtttttgactattatgaataatgctgccagaaacatgggtgtacctcattctgtcttgaatccactctgatcaggttttcatccccatgactcctctaagactactcttaccaaggtcccaaatatccttgatgtcactaaatccattkaatgtttcttagtcttcatattgtcacagaatttttagggtgttgcttttctggccagaaacctctgtggccagtgacacctttgcccgagttctgctcaggcccgctggactcattctgtccactcagcctggcaggtttcctttgactcatggtaccagcct

SEQ ID NO: 773837 - DNA, 520 bp, Homo sapiens
ggaggggagacagagtcctgcttggggcatctggcaacctcagtcaagtcacagcaggggtgcccaagggccagctttctgcagctgctggaggggtgtcctacaggagttgggccctcctcttgctggccattcccccatgcctcccattggcaagatctagcagggagccaggtgagaaaggarcctgggaaacatccttcacacagtcttagcatcagagcagaagcccgtggcttcctttgctttccctcttccttgttggcctttattatcagttgtattcacttatctgactataaaacagggtaatattagtgagagaggaatctgttactgataaagaacaaggaaaggaatccattaatcccttttgattatcatacagattattccccagtgattattagaaaatacttttatcttaatgaggaaaaatctcaatttatttttaaaatcctggaaaatggaatgccgggtaatattcttatttaacttttgacattttttaaaaagtcat

SEQ ID NO: 773838 - DNA, 629 bp, Homo sapiens
ataaagaacaaggaaaggaatccattaatcccttttgattatcatacagattattccccagtgattattagaaaatacttttatcttaatgaggaaaaatctcaatttatttttaaaatcctggaaaatggaatgccgggtaatattcttatttaacttttgacattttttaaaaagtcatgttctatttggggtatgaacgtgtgtgcccataataattattttcatctgtgtgtgtctatcttgggcctagaaaaaaaatgactcattttcttctaaagattagaattccatgggcatctctttttggtacaattcctttgtttgttcattcctggagataatggagttggtactgatagtgccctccttgtattgtattcagctcagttcaatgagtctttattagggggcctgtcaagtgccaggctgtgcctcaaagrtatggaggcagaggagactcaggcggtgtggaagagcatggcttggggcataggacagacttggctttgaattccagttctaccgcctaagagtctcaccctgtggagctcagttgcttcatcctggatgtgaggatgaacactggtactgcaaggctgttaaagaattgtatgtggtaaagcact

SEQ ID NO: 773839 - DNA, 646 bp, Homo sapiens
aattgtattgtgtgcagtggtttataatggagggattgggttgaacccactgaaatcccctaatcagtcttaacagcacaaaaagtaggcaattactattacatatcttatgatatggtgcaagaggatgtacatagcaccagctattgcataatcttgcctgccacaatgggaacaaatctaatcaagtcttcactacaactaccaacacataggaaaaactaggkgagagaaggcgttatgtgataccaacaggaagcaatgagtcaaatccagaatatgaacattctatagaaacaaacaaacaaaaattccacaaatcaatggcaaataaaagaaaaagacagggttcattacagaataaataaccttaaaagacatggcagccgaatgtaatatatgaacctaattaggttgttgcttggaataagccagctacaaagagaaatttttgagataatcagagaaatgaaaatatgaaggaggtattggatagatttaatactgttacacaactagattataaattcactactactcagctatatatacaaatattgacaagtgaaatgtcttgatgtctagatttcctttaagatactttaagaaaagaagtaggggagttagatataaaaagactagggga

SEQ ID NO: 773840 - DNA, 595 bp, Homo sapiens
agagtgagatggggccgggtgcggtcgctcatgtctgtaatcctagcactttcagaggctgaggtggacagatcacctgaggtcaggagttcgagaccagcctggccaacgtggtaaaactccgtctctactaaaaatacaaaaattagccaggcatggtggtgcgtgcctgtactcctagctacccaggaggctgagggaggagaattactggaacccgggaggcggaggctgcagtgagccgaggtcgcgccactgtactccagcctgggagacagagtaagactctgtctcaagaaaaaaaaaaaatgaaagaaagaatgagatgggaggggtcccagtgcttggttgtcctgttgtcctgggctgatttttgcctatgctaatgcgcaatacagtggagttcagaggagtaaattgattcagtgtaaaaatcttaccagctgttcttagccttaygtctggacaatgtaaataaaacaatactgtatggatctttgctcttttttaaataacatgaatcttcagtttttctcttaaactaatattttatcttgtactttatatgacatcttgtctgggagttggggtcagg

SEQ ID NO: 773841 - DNA, 639 bp, Homo sapiens
gcacttcagcacagatcaaggcagtgacaccagagtatacttgtagtcattatattcttccccaccaggcacaataatttcacttaaaaaactagcataattagaaataatttttactgcttgatgatgcagtaaaagttactactattttactacttcatcaagcagtaaaaattattactattgtcttcatcttttgtgtagttcgtcttaatattctgtgtgataaaataagaagtacgtataacacttatgcttaccaaaatgtgatgtttgtttgagttgagaaatgaaactagctgcttttttcatgaaacaccagttttacttgggagtgactgacaggcaaactatggtgaatcagacktggggattttggcagacattttcttgaaaatgaaggtaacgaacctgttacttcaaggaaaacaactgttaccaatataaaattcaagcttgtgagttagagttattgaaaactttccctgttcttaagaacttttttggtgaaatcaatggtgatattaagggatgtgatattttgataatctacaatgaaatttgtcaatatctggcatggcttattcctagttttcagtgctatatatgtatatatgtgtggtttgtttttttctcttg

SEQ ID NO: 773842 - DNA, 637 bp, Homo sapiens
gaagttaaatgtaattttaaaaaatcatggcatactgtgttgttcatttactagaaaacagtgtgcaaaacatcaggtctaacaaaaatatgagaaataactttagagatcatctccctacggtcaggcttgctctgtttcaggagggcagggatgccactgaatcccagcatcctgcacaatgcctaccacagagtagacaaaaaataaatatttgttgaataaaaaatgaacatggaaaaagatgactgccctataactcccaacaatattacctcacctttaccyctacacagagactaataacaagtttctaaaatcaaattccaaattcttaggacaaggttctgaatagtccaactggggctaaccgctcattcttggtctaatcaattgtgcccaaagaaagtccaaatggccctcagaggctcgctgtggaatgactgaagatttcgaaggtggggcaaaactgtcgattgtatgaataatagatttcagatgcatatacaactacttttcaaatgtttggagatgctgctgtgattgataggctattatatttctcattgtgataaatacacataacttaaaattcaccattttagcaattttaagtgtacagttcagtggctttaag

SEQ ID NO: 773843 - DNA, 637 bp, Homo sapiens
gaagttaaatgtaattttaaaaaatcatggcatactgtgttgttcatttactagaaaacagtgtgcaaaacatcaggtctaacaaaaatatgagaaataactttagagatcatctccctacggtcaggcttgctctgtttcaggagggcagggatgccactgaatcccagcatcctgcacaatgcctaccacagagtagacaaaaaataaatatttgttgaataaaaaatgaacatggaaaaagatgactgccctataactcccaacaatattacctcacctttacctctacacagagactaataacaagtttctaaaatcaaattccaaattcttaggacaaggttctgaatagtccaactggggctaaccgctcattcttggtctaatcaattgtgcccaaagaaagtccaaatggccctcagaggctcgctgtggaatgastgaagatttcgaaggtggggcaaaactgtcgattgtatgaataatagatttcagatgcatatacaactacttttcaaatgtttggagatgctgctgtgattgataggctattatatttctcattgtgataaatacacataacttaaaattcaccattttagcaattttaagtgtacagttcagtggctttaag

SEQ ID NO: 773844 - DNA, 540 bp, Homo sapiens
aagagtcagcgaagggagattaggggtggggccgttttataggatttgggtaggtagtggaaaattacagtcaaagggagttgttctccggagggcagggcccagggtcacaaggtgctcagtcagggagcttctgagccaggggaaggaatttcacaaggttaatcgctcagttaaggtggggcagaaacaaatcacaatggtggaatgtcatcagttaaggcaggaactggccattttcacttcttttgtgattcttcacttgcttcaggccatctggatgtatacgtgcaggtcacaggggatatgatggcttagcttgggctcagaggtctgacaartactctgaccttaatcactcctgcaaagtctctttggtacttaaggcaacatgctcacaggttcacatagggatgaggacatggacatttttgagagcccttattttgtctactacaccactgttcccagtctggccagagaaatgggacctctttttcaggcctggcccacaaaacctcccttgtcctccatgtcttt

SEQ ID NO: 773845 - DNA, 666 bp, Homo sapiens
gagaaaagacctcaatgaaagtgaagaagcaagttttgtggatatctaagcaaaagcattttcaacagtggaaccatcaagtgcaaaggccttggacatgaatgtatctggaaagtttgagtgacaacaaggaagtctgtgtggcagaatctgagtgggtaagcatgagactagtaggagatgaagtaagggagacaagggtgtctgatcacatgggccctaatatgctgttgtgaaggcattggctttgtcatttacaatacaaagatgaatacaacatgstctcaagttgctcactagaggagaggcagatagggaaacaagttggggtaataccattatgctaagtgccgtaactgaaggatgttcaaggaaccatggaggcacagtgagtgttcagctgaacatatcttggagtgggggatcagaggaagtttcacagaagagctgataaatccgtgctgggaatggaaggattttcccagatggtcagagggaggaagaacattcagtaagggagccagcaggggcaaaggcagttaactagaaatagcatggcagagctggggaacactatcacttatgtgtagtaggggagtacagagaaacgatgctgtagatgcaggcagggaacaatcatgttggaccctgattgccatgcaaaga

SEQ ID NO: 773846 - DNA, 657 bp, Homo sapiens
  misc_feature 499, 599: n = A,T,C or G
agtagcacaagagcctggtgttctaggctggaaacaaagcttcccacagtctcatggtaccaagaagacaagtcctctagaaagagggagcctgcttccaacactccattggttttcccctcaatacctttgcctgattttgaagtgattgggaatcaattacacccagaaaacctgaaaggtagaactgaatctcccaggtattcaggatcgaaaagatggagacttcacaggctatcartcacaaacctgggagggaaacatcccaaggaacagagtcaaaccacaagttggctgagtcttcctaaaattgcaacccaaaaccaacccagatgaatagtggattggattgagataatcagttcctctcattatccgcctaacaaagtgaaggaagaaccatctccggcagaataatatcatcaaatggactttctggatttgaaaaacatatcatctgaaattaagaactgagcagaagtgcgtaacagaaaattanacacagaaaaaggattaacaaattcagacaggttaatagaaaatatgcaacctgaagcaggacgggggtgcagggggagagaaacagagagagagcatangacacgtgaaacatggtcaaaagctaatatacgtgtaaactaaagaccagaaggagtg

SEQ ID NO: 773847 - DNA, 657 bp, Homo sapiens
  misc_feature 499, 599: n = A,T,C or G
agtagcacaagagcctggtgttctaggctggaaacaaagcttcccacagtctcatggtaccaagaagacaagtcctctagaaagagggagcctgcttccaacactccattggttttcccctcaatacctttgcctgattttgaagtgattgggaatcaattacacccagaaaacctgaaaggtagaactgaatctcccaggtattcaggatcgaaaagatggagacttcacaggctatcagtcacaaacctgggagggaaacatcccaaggaacagagtcaaaccacaagttggctgagtcttcctaaaattgcaacccaaaaccaacccagatgaatagtggattggattgagataatcagttcctctcattatccgcctaacaaagtgaaggaagaaccatctccggcagaataatatcatcaaatggactttctggatttgaaaaacatatcatctgaaattaagaactgagcagaagtgcgtaacagaaaattanacacagaaaaaggattaayaaattcagacaggttaatagaaaatatgcaacctgaagcaggacgggggtgcagggggagagaaacagagagagagcatangacacgtgaaacatggtcaaaagctaatatacgtgtaaactaaagaccagaaggagtg

SEQ ID NO: 773848 - DNA, 527 bp, Homo sapiens; identical to SEQ ID NO: 767525

SEQ ID NO: 773849 - DNA, 527 bp, Homo sapiens; identical to SEQ ID NO: 767526

SEQ ID NO: 773850 - DNA, 587 bp, Homo sapiens; identical to SEQ ID NO: 767527

SEQ ID NO: 773851 - DNA, 577 bp, Homo sapiens
atgccattggtatgttacaatgagaggaaacagaggatggtgagtttggctgactttctccaagggacccagccatgctacaataaactccaacagtcccttgggataactgcacttatcctcaccctgaactcctgctcttctttccccgsggctggtctaccttttgggaagccttgcccactttctcttctaactcctacacacacatctcactgagaacagttcagttctgattttgctcttgcagccctggcttgcatatgctggtagaagggtcatagtttaaatttagacttgaccacctcactgggaattcactgggaaacaagctgtgtgtggaacccatagacactctggcagagttggctgctaacactctaaaatggaagcactagttggtggtgaagctgtaagttaaattgggaaaggggtagaatttctaaaccaaagcccaaagaaatgggaacttcaaaattagaaaggctggaaaaaaccttaaaaggttattgaggtcttctgctttgaagcagaacccaagtaaacaaacaggattatctctggtttttaaatccct

SEQ ID NO: 773852 - DNA, 474 bp, Homo sapiens
gaaaggggtagaatttctaaaccaaagcccaaagaaatgggaacttcaaaattagaaaggctggaaaaaaccttaaaaggttattgaggtcttctgctttgaagcagaacccaagtaaacaaacaggattatctctggtttttaaatccctttgtggaatgggaattggaaaagatcgtaaaggccactgagtacaacgtcccaaatgttacagaaacaggtctacagcattgcccaaagagggtcatgcagactcagctgaaccctgccagcacaccctgaataacagttatcrcagcaggaggcagcagctgtggatggcaatgcctcagaacagaaatgagagacagatgggaaaggccaaggtgggttgcagggaatgggactctggttcttttaatctggatcccagtgccaacataattatgacgagactcaggttgcaaatcaggaagtaagagccctggcagtgat

SEQ ID NO: 773853 - DNA, 586 bp, Homo sapiens
cattttatcctaagtatacttgttttgggtgccttttaggtaagccttgggataaaggccctcaaagcattgaagtttttactaatcaggggacttgcagagctaactcttaatgatttatcctctaaatatccaggcactaaacacttcttcctccctacctttggttctgttggccacttatccataccttccatgggagggaaggtaaaaggatgtcagaccgagcaaaagagagcagattgaaatacaaatgggtcattttgatttcttgtcagccgctcttgcaaaagrgttgggggtgtgtgtggaggggagcagtggactgaaaaaggttgtcagcatttaccagtggaggacactcagcacaccctccccaaggcctgccataaccacaggggtcagagttggttgtgatgcctacaggataaacgtcactgaaaccctgtgtccacatcagtccctgggcttgcaaccaagagatggaagctccccaaaccatgatgacgagttcttctgggaagaatatgaaaccaagcctgtcctgccatttatactactctcagtcttccttctgaacatgaaa

SEQ ID NO: 773854 - DNA, 644 bp, Homo sapiens
cctgaggaagctgggggtttgtccagtgggcactggaaatgcagacagggcatggcatgtgaacatgcctggagctgggtcactgcctgcatggaggctgtgagcactcagacagctgtggcctggctgcgactcagcgttggggctccgaggtcctggctgcgactcagcgttggggctcctctggaggtcccccagctgagaaggcctagttaggtctctcccacccggcatcctgttctcccccagctctggggctccagacttcatagtcaggacccagctcctactcaggccttcagaccctccaggggtgcaaacataagagctggagggagaagaataggagagacagctgtgagggggctgcgcctgaggaacagttcttctcagcccccagagcccctgcctgctcagttgctgctttgggagggacccatgggaagcagggaaagacagtcgctgcctggccagccccccatctgcgagagccacctccaagacgggttggktgatgtgtcagtgagaaggccttcatatccaatttctttctcttggatgtgaatgtcaggaagtccatctctccccatgactgatgcttccttctgtcatacaatggggcctgtataataggtttggtatct

SEQ ID NO: 773855 - DNA, 567 bp, Homo sapiens
tgtgcataggctctcatctcctgcctgcatgggaatgatgtcaccaaaacattctttactttttctcaataagtggaccaaatggttcctttaagggcagtttcctggggtctttacttacacactggctgcttgctaccttcaggctggcatttgtcccaccatggtgttttggggagatatacaggcgcatccttgaaggttaattaagaagaaaataaagcaccttgaatcctaggagtcagatttacaaagctttccaagaatacccaattaggtaaagggaggtaattctgctctaatgtttacatcctttcccttcccctgcttgtgaatgttttcaagtacaactcctactcccagcagtacatgccacaccaatgccactgcaagattggctctaggtctatgccatcccctcrtggccaagtctcctgcagccaagtctcctgctgatctgtgaccatacctcatggagaactgttctaaagatgacgagtatcatccatagttcagcttacttctttaccttgtactgattaaactttggggtgggggtgaaagggg

SEQ ID NO: 773856 - DNA, 691 bp, Homo sapiens
taaagcttgcgatatgtataatgggatccaagttttataagaagtctgtttatataaagcccaaaagggtatataccagaatgcctacagtaattatctctggattatgacattatggagcttttctttctttctgtttatatttcctatttttttctataataaacagttatctcttttaaacactttttaaagagacccagatgactcaccagtgttatactgaaggttatttgaatcattacatgacatgggtgggaaatgagagaggtgtgttaaaacaaaatggccattttattctaaatttgctctgaatgatgttaatgtatgttgatttgatcacagtggccccagaattccttgtgcccttggtggatgtgacctgyttgcttggggacacagtgatactgcagtgcaaagtctgtgggcggccaaagcccaccatcacttggaagggtccagaccagaacatccttgacactgataacagctcagccacatacacggtctcctcttggtaagccgattgccctaacatcagcaacagcagccccttgcttgacacagcactgagaggctgaatctggggtgcaacttctgctctggtgactgggctctgcaagagaatagctgccctggagcctgttcttgggcaaacacttggacttgattagagagagactgaggagac

SEQ ID NO: 773857 - DNA, 577 bp, Homo sapiens
ctagcccagaaggatttattttgctgggagaaaggcagcatcatcacttagaaaaagcgctcagctgagtgtttggagatctaagtttagggcctggctccataggcttgtgtgtcctagaagaagccccttttccctgcctttgccctgaagyggtggagagaataaggcccctccagcttttctcccaggactgggatgaagaccaaggtgtggaagtactcactgtaaaagcatgggaggaaggcaggaagccagtggtgatgtgtgttatgtgttgttcataacaagtgaacagtcctctaggcaattttacctctcacattacttaaagattcttcaacttcattggaaaacatgcagacctgtcttccatgcctttgaacccttattcaaagcaccccagttcttcagttcctttttcttctaatattgctgcctgtgtttcaggaggtaaaacaggagataaatcagaggctgacactgagtgacttcctcatcaagcccattcagagaataacaaaataccagttgctcctcaaggtaagaagctgggagcctgggtgagggctggaga

SEQ ID NO: 773858 - DNA, 529 bp, Homo sapiens
gttgtgaaaattaatgagagattactgttgttggtaaatattatataaactggaaaacttatacaaaataaagtattttttcatcatatttattattattactattattaaagtagagtctgcctctgttgccccagctggagtgcagtggtgtaaactcagccctctgyaacttctgcctcctgagctcaatcaaccctcccacctccacctcctgaggtcaagctatcttcccacctcagtctcttgagtagttgggactacaggcatgcaccaccaggccagagtagtttttgtaaattttttttttctttttcagagacagggtttcttcatgttgctcaggctgttgtgaactcctggactcaagcgatccacccgacttcacctccccagggtgctggattataggcatgaatcaccatccccagccatactttggccaaaactcaaggttttatcaatcctcaagcctctaaaatttgataaatacttccttttgggaaaatcctcataatacttctattca

SEQ ID NO: 773859 - DNA, 541 bp, Homo sapiens
atagctgtgattttctccataccttgctacaatagctgtgattttctccctaccttgccgcatctgcaattcatgaagctgacacaataatctttccactgaaaacaagatcatatgagacccctgctcaattcccttcaaatgacttcccaatgcactgaaaataaaacccaaacttcttgccatgaacttcaaggccctaaatracctggaccacacttcctggtttatcttttcttctaatatttcatcccttaatcactgtattagtccactttcatgctgctgataaagacatacccaagactaggaaatttacaaaagaaagaggtttaatttgacttacagttccatgtggctggagaagcctcataatcatggtggaaggcaaggaggagcaaatcatgtcttacacagatggcagcaagcgaagagagagcttgtgcaaagaaactcccctttttaaaaccatcagatcttgtaagacctattcactatcacgagaacagcatgggaaagatgtgcccccatgattctatca

SEQ ID NO: 773860 - DNA, 644 bp, Homo sapiens
atagttttctgagaagcactgatgtaaaatagaaaactcaggctgattcgctcaggtgtttgtgagaaagactgaataacattatacataaggtacctagtacagagccatacgaaaggattggaacttggttttgaaggatgcaatgatccactgaagaacattaagctaggagtgacatcatcaggtttgcatttttcaagggtaacgaacagttatgaagcaaatctgaggaaggtggaattgaggagtttaaagacaaaaggatgggtttagagaccatttcaatagcctggaaattacgagaaccaatttaaatcaatggcagtggaatgtggaatacaggggaaagatacaaggtatgcttaggagatagagtcgaaacatttagtaaatgactgagtttgaatygagaaaggttgtaggaaaagagaaatcaaggataacacactggttgttaacttggaagacttggtgcttgatgcttgggtgaattattatgctataaacagatgcaaaaagtttgaagaaacttagaggataggacaggtactagattaaaataatgagtttcattttgaatatgtgaagttttagtaaaattccataaaattaaattaagtaaaattttacttccataaaag

SEQ ID NO: 773861 - DNA, 593 bp, Homo sapiens
aagggtctgcacccttttgcataacctctacttaaacggccctctccttaaactgggcggtagcttgacattgtaaatttgtaattaaacttgcttatactataattctgacgtctcaaaagtttatttccaacaatggactactggagatatgataaaacaaccctacgattaggttgtatctggtttccctcatattgtaaagtaggtgttgagattcttccatgattacctgcaaagggcctagagaaacagcagcccttcaaacagatcatctttatctagtttgtatttatatcaatgctgtttttcatcctctcctttcctcttytctttcctcttctcctcctttcttctcctcctttcttctgttctctcctttcctcatgcctttccagatgggactcactaagaccatcaacctattcccacatgttttttcctgttcctgatagggcaaacaagctgtggccaatcagcaccaataccagggacagctcctttccctagggcttccccgtcaggttaggttcccaattgtgatttttattgcaaggctgacatttgtagctagaagattcttcaatctccca

SEQ ID NO: 773862 - DNA, 569 bp, Homo sapiens
aacttccaacactatgttgaataggagtggtgagagagggcatccctgtcttgtgcccattttcaaagggaatgcttccagtttttgcccattcagtatgatactggctgtgggtttgtcataaatagctcttattattttgagatatgtcccatcaatacctaatttattgagagtttttagcatgaagggctgttaaattttgtcaaaggccttttctgcatctattgagataatcatgtggtttttgtcgttggttctgtttatatgctggattatgtttattgatttgcatatgttgaatcagtcttgcattccagggatgaagcccacttgatcatggtggataagctttytgatgtgttgctggattcggtttgccagtattttattgaggatttttgcatcgatgttcatcagggatattggtctaaaattctctttttttgttgtgtctctgccaggctttggtatcaggatacagcatctgttattttttgactttttagtaatagccattctgattgatgtgactgggcatggtggtttgcatcttaatcttggattct

SEQ ID NO: 773863 - DNA, 550 bp, Homo sapiens
agttgatttgaaatattgaaaaagataaggtaggagcatcagcaaagaatcctatgaaaaagtgtaaattcataaaaaggaaaatttcatgaagttttataggttatacaggttatatagtttattataggttaactaaacatattaacttcaatctctgtgtaaataagactgagtcaccggaatttttcttctrgctttaaatttccatgtctttatccccaaatatatattcctaagtattcccaatactcttgaagagtacaaccttatgagtgagaagttatctctagttttcccaaatagcaaaggcaacaggtgtccctcatggtagctaacagaagtaagtactatatccctctacatacaaagaatggggcttcctttgtcaagcagtggacccaaagcaactgtatatgcagtctccttggtatcagatttagcctgaggataaagatagtgtgagccagtttaggggaggggcaggttaatcctcttgctctctgcagccaggaaaagggcaagccttgtagagagaaagacctaatgt

SEQ ID NO: 773864 - DNA, 666 bp, Homo sapiens
tagtccctgtatatctggaagtggaggagaactagatatttacagcccttatcttctgaactcctaaaattaagttctagttctaagtagcctcagctttccagctttccaagagctaaggaagccaggtgattgattaaaggacttggatatagcacagaaataacaaaagcattgaaaagggtagaaaggagagttttgctttatccgtgtcacccctcccacagatcagagagagatacccttctaactggggggagaagagtgacgtcagcatggaacattgcctcagactccagcaaggggcacaccccagtaagacccagcaccagtcaggacaccacaacccgtctccaggccagtcccactccaggccagtgggctccagtctccagcccactccattaccagttcagccccctcagactcagtctcagagcctgacccatgattaggctagtcccagtggcaccaggccctaggccacctcctgaaaactcaggctgtagacctgctcaggactgcaggyccaccctaccaaaaggcaggcaccaacagccccaggctgcaaaccaccccccagcagcaggccagcccctatctacccagctctaggcttcccccttagctccagactctaggcaaggactcaccaaccgagtcttt

SEQ ID NO: 773865 - DNA, 569 bp, Homo sapiens
tgtcctgctgctggtgatgccaaccttgatcactgggtcaaggtgttggcctccagatctctacattataaaggtattttccccctactttgtaataagtatgatctgtgaaatgatactcgaagtgtcaagatgatactctgagacgaccgtgtgcatgtagtgcccaacatgtttcacccaatggttttagcatccagtgatgatttttgcccaaattaattgttccactggggttgcaaaackgtgactttctaattatgtcatttcttctctgtgtatcagcaggcattcttttgtaaagaagagctgtcttcctgtcccccactctcaccctttattaacatttatacgaacttgtttttgtaatttttaactgaattgtgattacccattaccatcactattttttagaatacttaaattgtcccaaatttggccagggagcatactttcttgtgtccttttaatgtgacctccattgagcacttccttgttttctggaccaaaaaaaatccccaattactttttactttccttgatccagatcttgaatcaaacatttctcc

SEQ ID NO: 773866 - DNA, 536 bp, Homo sapiens; identical to SEQ ID NO: 746282

SEQ ID NO: 773867 - DNA, 628 bp, Homo sapiens
agctcctttgttcaggcttgcttcttttttgacatggattgtttgaattcctaactcaacaataaattcacagcttcctaagttttacttgtgcaatggtaaaatgaaaaacatatagcttgggaaatacagcacaactctggaaaaaaagtaataatcattttctctaattaagaaattttttgagaatggtataaggttgttcctttctatcctttcttctttaggcaaagatcagctgcctttgacgtctgacacaatcacatgcatataatgtgacagttaccaattctgtacttttccagacatcagtccgtactcccttgccttcacctcagttttagtacagcaggaagcccacagccatgctgttaatggctgacgtygtggttgttgtccctcggcaccccagtgtgtggtttcctagcttgatttgcccagtaatgtgtcagagactgagttgtagctgatgtacagggtccaactcacatcagactgatttggatgaaaacccaaataggcaatcacactttctagtagaaaatcttgttggggcatcaacattaagatctgaaaatatggccgggtgcggtggctcacacctgtaatccgagcactttgggaggcc

SEQ ID NO: 773868 - DNA, 497 bp, Homo sapiens
actgagtccctggaaagaagggggtgtctgttgaaggagcagtggaggaaatctgtggtggggcagttagggaagagagtgaagcatgaagaagctctgtccccatcagtaccctacacagcagtttcttgcccaagtagagctggaatacagggtgggcagtgcaggggagggagcgaagagtcagtctggtaggaggcactcgccgwggttgtaatcctgagacatcacttatgggtgctcacccatggagagatgggttttcttatcttgcacattggcaatgaccttgctaggctcttaggtctggagacaatagatagtttcacttgaccggagatagcatgctattttttattaatttgtgcttttatttttctttccctgctctctcaggggtaactatggattgaaaaaaaaaaagaagaaaatctggtacttctttacagaaatatatggttggaatggaaaatcagaataattaaatactagtgaaa

SEQ ID NO: 773869 - DNA, 643 bp, Homo sapiens
tgtatagaacaatctttttggactcttctattagtggtcatatttgatgtataaattctattaaaacttccatatattacatgagaacaatgagaatttgtttttcttttctaatccttataactttattttcttgtcttgtacaatgtcactatatccaatatatagaagtggtgcatgtaagtagtgataatagcccrataagtcttattcttgacttttaagggagacttttaacactccatggcttattattatgtttgctgtaagttttggtgctctttttcaggttaaaggagttcccttccatttcctcattaacccacttatgcccagtgttccattattggaaccctaagcatgtgggagttatttatatcctactactcaaggttatcaccaaggtctgattttttcacttgtgcaaaaattcaaaaaattgcaacctccagcataaatgggttaatattatttttctagtcatgacaggagtttaacatattcataggccttttctgaattccaagtttgattgtattgtttttattttttagtctattaatgaggggaattttattactaggtctttttaatagaaaggcctttcaatttcacacacatatacacatacgtacacacatat

SEQ ID NO: 773870 - DNA, 643 bp, Homo sapiens
tgtatagaacaatctttttggactcttctattagtggtcatatttgatgtataaattctattaaaacttccatatattacatgagaacaatgagaatttgtttttcttttctaatccttataactttattttcttgtcttgtacaatgtcactatatccaatatatagaagtggtgcatgtaagtagtgataatagcccgataagtcttattcttgacttttaagggagacttttaacactccatggcttattattatgtttgctgtaagttttggtgctctttttcaggttaaaggagttcccttccatttcctcattaacccacttatgcccagtgttccattattggaaccctaagcatgtgggagttatttatatcctactactcaaggtyatcaccaaggtctgattttttcacttgtgcaaaaattcaaaaaattgcaacctccagcataaatgggttaatattatttttctagtcatgacaggagtttaacatattcataggccttttctgaattccaagtttgattgtattgtttttattttttagtctattaatgaggggaattttattactaggtctttttaatagaaaggcctttcaatttcacacacatatacacatacgtacacacatat

SEQ ID NO: 773871 - DNA, 602 bp, Homo sapiens
gaaatgtactatactaaaccttttagtaatgaaatgcatagcttgcttaatattttccaccaacagagcagaaagttcctatcccagttatctcaaattcattaacaatggcaactggtttaataaagccttactgtagatatttttactgtastgttcttatcttgtctcatgggtatgtaatctgtttttctaagcaaatgtaaagccttcagtatgtgtcttttatgtgagtctgagcttctcctggacaaaaagttgtatctctcatttctttttttttccaaagtataaattcatattttgtaggaaatgtagtttacaaaacagtatcaatcgctacccccaatccagatgacccactttcctccgaagggggacgtttaggtcctattccactgggcaagggtaaaatgattcagtagtcttccaggttaacagtaaattcttctcccaaggctggggccgtcaaggcacagtctgtatgaggctcaccctgtctgaccctaggctggggctgcttgctcggtaggcaggaattggggtgggggtgggggctcagggaagggtctgcaccctgagacttctgcttacaggagggt

SEQ ID NO: 773872 - DNA, 635 bp, Homo sapiens
caagtgtttcttattaattgaaaccaccaccaccatcactactgtagtatcaacagaatcccgcatttgaacacctctatctactcttcctattactactggcagatttcttgaaagtcatatcaatgtgctgtccccatttccttgcctcccactcattcctcttctccctccagcctgacttccattccataatgccatcaaacagttcctgttaggtgataaaaaaaacttcatgttttaaaatacattcgaataactattttatcttcttagaaactttataattgatggctattccttttatgtaatatgtttccaggttttygtgacccaattcactcctgattctacttttgcctctttaattgctctttattatcctctgaagactcacctttctccatccgtcaccatggactctgctgaagtgccacatggcttttcttgcttgattttctcttcctagaggatttctttcactcccagaattttagttaacactcacactcagatgactctgtatcttcagcttaaacctctctcctagatctgaaattgtatatccagtttacctaacgtcttctgtatgtcacaacttcatgcctaactcaacatctataagattaaatgca

SEQ ID NO: 773873 - DNA, 613 bp, Homo sapiens
tgagatggacgcatctagggagataaaaatcaggcagggctaagattgttgtgggtcaccgcctgccctcataatctatgggtatactaattttcaggtcaattttagtaaaaatgaatatgtattttttttcccatccaaatttaaagacttcttaaattctaccctcatatccctctggggaagctttggacctcaggctgagaactcttaggctgagcagcaagcgctgtctagaagttatgtctcctgtaattacaaaactgacagcttttttagttgaaataaaaacactgaactaatttgtgggtaaatagactttcaatcgtgtgtgctggctctgcctggaactgcccttcccaggagagtggggagtgtgccacttgagtcaggggagactttgcagaggcaactggcctccacagggacygctcaggatggtggtgatgttgaaaataattagcaagctacatccacagcattaattagtttctgggaggcagctgtgggataggaaactgctattttgatcgtcccaattcagagctctgctgtgaaggtttctaaaggaatatatttttccctgtcccaggcactagtaatcttttcctgg

SEQ ID NO: 773874 - DNA, 572 bp, Homo sapiens
atgttctccagagaggacaaaaatctttgtcctcacatggcagaagagcagaagagagagaactcactactacaagcactttgtagagtggcattaatctatttatgagggcagagccctttggcatctcccattaggcttcacctcccaacactatgccattggggattaagtttcaatatgagttttggaagggacaaaaacattcaaaccatagcaatgaatctccrtaattcctcagtttagccaggcacatagtgaatactcatgagatagcaggttgatcataggctggactagataataataagcttgtattattgaacatctattaagtgtcaggactagagtaagtatatcatatatgttacctcattaaatctatatttcccattaaaatgtgggagtctaccaaggtgtgaatccataaagttttagaaatacttattaatattttttaagtggacaatttttttctttgaagaacagaaaaagaaaaaactggtagaaataaggctgtcacatacaggttcttgcctctatctgtctgttcctgaagactaggttagcta

SEQ ID NO: 773875 - DNA, 614 bp, Homo sapiens
tgtgtctgaggactgtgcagaaatgtgacagcaatgggaccccagggatcattttgaatatagagggacatacaaggtacccagcccatcccacagaagagggagagcatgtatatttcctaggaacagagtctctttttacctctttgttctcttttcatttccccagccccaccttaggctttctgacatcctgtgcccagcaccatccctgcatccctccaaccccctttacaggacaggacaggacagaacaatgaagcagattgctgaatgttttatagcacttgccctatataggcctatagcagtcaaagccaactctcacttattaaccactatcaatatttttcctgtcctacttatttcttttccagaaagctttcrtgtcatatggagtgggtgaaacaacatttaactgcctaagtgcattaaattatttctttttcgaaaaacaggctaacaatgtccccccattcctgcacatacaatatttataaaccatgtaatctgcaaatagtacttacaaatagaaaatcctaatattttataattcaaattcactatcaaagtttgttcccttattactcccctacaactcatggaaattattt

SEQ ID NO: 773876 - DNA, 614 bp, Homo sapiens
tgtgtctgaggactgtgcagaaatgtgacagcaatgggaccccagggatcattttgaatatagagggacatacaaggtacccagcccatcccacagaagagggagagcatgtatatttcctaggaacagagtctctttttacctctttgttctcttttcatttccccagccccaccttaggctttctgacatcctgtgcccagcaccatccctgcatccctccaaccccctttacaggacaggacaggacagaacaatgaagcagattgctgaatgttttatagcacttgccctatataggcctatagcagtcaaagccaactctcacttattaaccactatcaatatttttcctgtcctacttatttcttttccagaaagctttcatgtcatatggagtgggtgaaacaacatttaactgcctaagtgcattaaattatttctttttcgaaaaacaggctaacaatgtccccccwttcctgcacatacaatatttataaaccatgtaatctgcaaatagtacttacaaatagaaaatcctaatattttataattcaaattcactatcaaagtttgttcccttattactcccctacaactcatggaaattattt

SEQ ID NO: 773877 - DNA, 398 bp, Homo sapiens
ggttgcatcagaaacattcgaggtttgtttgtttgagaaacaagcagccctcagatgaaactgaaggtcactgagcctgcttactgatgcacaatgcagccttcccctccctccacgtgccttcttctctctcctcctaccctgacctcagctgtgccgtggaggaagatgactggcgaggggtgtgaagcccctatgcacccaaccaagggtgctgggggagtccagagagagatggacacaaacytttttttttttttttttttttgagacagagtctgactctggtcacccaggctggagtgcaatggtgagatctcggctcactgcaacctccacctcccggttcacacaattctcctgcctcagcccccagagtagctgggattacatatgca

SEQ ID NO: 773878 - DNA, 624 bp, Homo sapiens
  misc_feature 50: n = A,T,C or G
aaactctgggtctgaaattctattattcagctactgaaaagctaaaattntgctccattacttcttctttacaattgagtaaatcttgttagaggacaaacttaaaatagttttgtcaccagaatatttttaacagaggcttcaacaatagaaacagccatacgagcagagggaggtggtcttgcttctctaccattgaaggcgaaggtgcgctgaaacctccargaagaattcgactcagacctcattgttattttctggcaagcatggaagtttcaagacaagatccaattatcttaaattgctacaaatggatctttaaatatcatagttgaaggacaagttcaccctgtttgggaaaaggcttaatgaaaagtttataacaaattgtaaaaatctaaatcctactcgagttcattaacatttggtagagcaaacatattagcatattactaaatgcaaacgatatgacactgtaatagtttagcaatccccaaaaccaataaatcgtggaggctgtctcaataacaatagtgtgctggtcgtgatggactctcgagttggacctcccaatttctggtagtgcaccccacagaaaactcagtctgggtgtctctgtctgaa

SEQ ID NO: 773879 - DNA, 622 bp, Homo sapiens
  misc_feature 574: n = A,T,C or G
ttcttttactgttaaagccaaatagaagagtcagtagtcatgtcatccaagacagaggctcttctggccttcaatgtacagagacatgttgcattaaattcagttaagggcaaccaatgaaaaacaagctacacacaaagattacctctcaccccatcatgcaaagtttccattcagcaacatctggagactgcacagcccatttgatttaaatagaagactcagaggcagaaaccatattcagcccagattctttgtgaacatagcttgttgctgaaccaattcactctgcttctaattcacaaatcttcagccctaagcggcatcatttggttyttatgaggcacagagccctttccccacccagggcctttgcttggtccattctcgctgcccgcattgtggctcccctggctcttggcctgctggctccctctcagacttcaggtttcaattaaaataacagcccttcccactcttcttacttcagagttagtctctgacatggcagtctgttgatttctaagtcctattccagggcttgacatctcatagttgcttgttgaattaatanatgttaactccaaaaaaaataataaatgctttctccagctaaaaaagt

SEQ ID NO: 773880 - DNA, 592 bp, Homo sapiens
tcacaacaaccccggtaagagagactcttgagaatttggagcaggtgccccgaagcatccaccaaacctacccttgtatctcatgggcccgaattgggacatatatctgttgtgctctctgaagacactcccagtaaatgggacttctaaattttgatatataaaacaaaagaagaaaatatgacctctacttctaatactgttggaggctataacctagttatacagtggaaattgaggtccatagagattaagttatatgcctaaattatattgcagagtggaatttaaactcaggttgttgactgcaaagtctctaatttttctttttcccagtttacctctttttaaaatatgagcatatctgtaatgtttttgtaagaatgaccatgttcaaacccatgttgtttaaaggtaaagaaaaaaaggatgaccatgtytatcaaaaaattcaatgtagaaaagttcagagaagtaagtaaaagtaaactgagatctcctatccgatgataaaccacaaatacattggtaaacatccttccaaatgtaacactgcataaaatcacatgtaagtgtacaacttaataaaaat

SEQ ID NO: 773881 - DNA, 635 bp, Homo sapiens
aaaagggaaatgagtgctgtgaatcaccaactattagtccaaagtgggacttatctggagttgttcttagtggagaattcattcctgatcgaaagctattgatgggcatggtggcatagacctgcttgtctatggaagagaatgctggctgatttgggagggtctggttatcagtcacaaagttaaggctcgggctattcaaataggcatcattttggctagttctgtccaaagcctgctgcagaaacttggagtattcctgcaacatgttggctttatctgatgaggatgcttgggagcttgatccaacattctctgayggggtgacctctggtacttctgaagaatttattgatatgctagaagtcacttcagtatctgcaacactgaaggatatctcatgctgtccattagctttgtgggaataatgatccaacagagtctgcagtacctcatctggaataacatttttgtcatgattactcttaatctccacattcagtgcctgtgactctaatatggatgccgtggtactttcatcaatgacacttgccacagctgcttgtgttacagaaggctgagaagctatggtacccacattcagcgcatattccctgctgttgttacttgctgct

SEQ ID NO: 773882 - DNA, 646 bp, Homo sapiens
tttaaaatcaagttttattatggggaaactgaagacccacagatattggggtgctggcctagggtcccacagacagtggtagagagaatgctggcttcaagtctcccagtgcaaaatactttaactaccgtcccctttcacttcactagtcagcagcttcgcaaactgcattttcaatgccatgcccyacatgggacttatgtgtcctgcttgttttctaattcagtcagtgaagagcaggcggccccagcagctggaaacaatgtgagcttgatggttaaggacatggaccctgaggtcagaagccagggctcaaattctggctccattgcttaccagctggataactgctgggcaatctaacctctctgaacatcagttatctcatctttatcatggggacaataacacacagggactccatagataggatatagtgagatgtataatgcttagtatagcacctggcacaaacagaatgctcaataaacattagctattacagtatcccccctcccttatccattaggggtacatcccatgacccccaggggatgcctgaaaccaaggatagtacctaaccctatatacaccacgttttttcctatatatgcatacctatggtaaagtttaatttataaattag

SEQ ID NO: 773883 - DNA, 566 bp, Homo sapiens
ggcattagggtctattttgctcctccttgtgttaaatccaggtagacttcctagcggcagcctgtgtccagcaggaaaagctctgcccttttgctaaggaggttgggaagggcagaggaagcccttgtttaggtggccttgacatggctgctgtggggttttgtcatttgccagacgacaycagatttccagagctcatctctgggctctgagttttgaggctgctgtgtggtcctgggaggcagaacttcggcatcaaagttttcacagcctctgatggtcttgccactctgcgggctgagccatgtgtgaccaggtcatgcccttgtgagaatcccagccttgaacaagtgtgaagatgcacagatatggagaaaaaaaaaaaacaacagattgagtctgtgggaatgactagatttcaaccccagctttcataccagctctgtggtagaagagactgacacagccacgaagacctcacatttctaggaatgactaaatctatacagaccaagggtgctgcccagatcctaacccagggaaatcagactttgacggctccaatt

SEQ ID NO: 773884 - DNA, 603 bp, Homo sapiens
gcctactgctgtcaactcatcaaagtcattctccgtccagctttgttccattgctggcgaggagctgcgacactttggaggagaagaggcactccggtttttagaattttcagcttttctgccctggtttctccccatgtttgtggttttatctacctttggtctttgatgatggtgacctacagatggggttttggtgtggatgtcctttttgttgatgttggtgctattcctttctgtttgttagttttccttctaacagtcaggtctctcagctgcaggtctgttggagttygctggacatccactccagaccctgtttgcctgcgtatcaccagcagaggctgcaaaacagcaaatattgcagaacagcaaatattgctgcctgatccttcctctggaagcttcatcccagaggggtgcccgcctgtatgaggtgtctgtcagcccctactgggaggtatctcccagttaggctacacaggggtcagggacctacttgaggaggcggtctgtccattctcagtgctcaaacaccatactggcagaaccactgctctcttcagagctgtcagacagggatgtttaagtctgcagaagttt

SEQ ID NO: 773885 - DNA, 586 bp, Homo sapiens
gtaaaatggctgaggaaggaaggatgcagggcaaatgggggagtctataaattcacaaatctgtgatcttgccactatcattgtctaaagctcaaactggctcttaaatctagtgaatccatgatcttgccatttttgttgtctgaagcttggaattgtgatgccgtgcatctcactgctcattttcttgttaaaacccaaactgtgacacatcagtgtaaccacatgagtgcatgcgtgcgcgtgcacgggtgtgcacacacacacactgcttaccagactttacctaggagggaatttacaccattggtgaactgcagatattccaaaaacacttaaaaatgtaaaatttcaaatatctcttgaattttctttttctttctttctttytttttttttttttttttttgagacagaatcatgctctgtcgcccaggctggaatgcagtggtgtgatctcggctcacttgcaagctctgcctcccgggttcacaccattctcctgcctcagcctcccgagtagctgggactacaggcacccgccaccatgcccagctaatttttgtatttttagtagggatggggt

SEQ ID NO: 773886 - DNA, 623 bp, Homo sapiens
tatgtagagaatctgaatgaaaattttagcaatggagtaactaggaaaacaatagcattttaatcacaattcgtgagcctgcaactatacatgcacactggaatctagctgataacttgctctttaggttttgctaattcaagttctgatcaacatttcttaaaatagtatgtaagaaagtcttgtttcttaagcagatatttcatgtttctgtagagaagaggcaagaaaaatcaagaggaagagagtttgagagtataatgaaaagtagagaaacaaaaaagaaaagatgaaggggtcaaggagttatgacattttgagaactaaatgagtagatttggagacttctctgaacctccgaacttctgatcacttatctgtaaagtgggagkcttagactaggtgatctccattcttgcatacagtgttcaaagaaacataaaacaccatatgtattttccatctgcagttgattgaatgtgcagatgtggaatctgtggatatggagggctgactgtactacccaattttatataaaagacttgagcattcataaattttgatatccaaggggaatcctggaaccaatcccttctaggtacagaaggccaactgtattatgt

SEQ ID NO: 773887 - DNA, 656 bp, Homo sapiens
ctcccttagggaagtacctcttacactttggtcagatccgaatcacctggacacatagcttgctgagcctttccccagtgtttctaattcagtccatctggaacagggacccaacagtctgtagttccaacaaattcccaggtgataccgatgctggttgttcactcttagaatagtttttctggcagtacatatacctttatgatggtatttcttatgttctgcttttcattatttttttttttttgagacaggatcttgctctgtcatccaagctgaagtgcagtagygtgatcacagttcaccgcagcctcctgggctcaagcgatcctcccacctcagccacctgagtaactgggacgacaggtgcgcaccaccacacccagctaattttttgcatttttttagagacagggttttgctatgttgcccaagctggttttgaacttgtgggctcaagcaatctgcctaccttggcctcccaaagtgctggggttataagcataagcaactgctcccggcctgttattatttttatagcaaagacttaggtcagtactgtccaatagaaatatacaagccacatatataattttaatttgtatagcaaccacatgaattaaagtggaaaattaataattagcccaatatatcaa

SEQ ID NO: 773888 - DNA, 630 bp, Homo sapiens
gttttgctatgttgcccaagctggttttgaacttgtgggctcaagcaatctgcctaccttggcctcccaaagtgctggggttataagcataagcaactgctcccggcctgttattatttttatagcaaagacttaggtcagtactgtccaatagaaatatacaagccacatatataattttaatttgtatagcaaccacatgaattaaagtggaaaattaataattagcccaatatatcaaaaataattcaacatgtaatcaatacaaaaattaatggaatattctaccttgtttcatactaagtctttgaaactgcatatatattaatattttatacttaacggtacacaactacatttagagtgcttaatagccaaatgtggctagtgtctaccatattgggcaaggcagacttaaataatgcttactgtgtaccagacagtggtacagactccttacatgttaactcctttagtcttcacaataatccartgaggtggctactgttataattctcattttacttgtgaggaaacaggcacaaagagcttaaataacttgtcccaggccactgagctagaaattgggagagagaagtttgaaccttggcagtctggcctcagggtcag

SEQ ID NO: 773889 - DNA, 561 bp, Homo sapiens
tctgtgtatctttggtgaagtgtatttttaagtattttacccgctttttaaattggatggcttgttttcttactgttgagtttagagaattctttatatattctggttatacaagtcttttgttggacatatgacttgcaaatattttttcccaatctgtagcttgagttttcattctcataacagtgcctttagcaaaacacaaatttttcattttgataaactctaatttaccaactttctgttatggwtcatgcttttgatttcatgtctaagaactctttgcctaatccttggtcatgcagagacagatattcttccttttcaaactatatttcttttgcttgcctggttgcactgtgctatcttgaaaagaagtggtgagagtagacatgcttgccttgttcctgatctttgggagaaagaattcagtctgacaccattaaatataatgttagctgtaggttattttgtagattctctttatcatgctgaggaagttcccttctgtttctactttgctgagagtttttagcacaaatgggtgttaaattttatcaa

SEQ ID NO: 773890 - DNA, 626 bp, Homo sapiens
tgcaattgtaataagaatctcaatgggttttgggggaattgacaaaatgatcaccaaatttatatcaaagaagaaatacttgagtctacccaagaaaaatgtgaaaagaaaatgccggtgaggagaaatttctttttccagatattagaaaataataaaatataaaatataaattgtatataaaatataaaagctaatgttgctcaaataaatataggcttggtataggaataaacaaatagatccatgtaacaaaatagagagatcagaaaaggttgctagtatttaagagtatttattcatgagaaaagtccatctcagaggaaagaaataaattatgtaataagtcctcaactgcctaataacctaagaaaaaagtaaaattttgcttcattttactccatactgaaattaaaaagcatgtctagagaccstaaattctcaaatataatgaaaaagtaaaacaataaaaaaaattcaagaaaatctttgtaactacacatgtatatgttagggaaaaaggaatcattcttaactaagtctagaaacatagaagtttttaaaagtaaacatatttggctacataaaacaataaaacatctgtgtgaccaaaaatctcataatga

SEQ ID NO: 773891 - DNA, 520 bp, Homo sapiens
atcagcagcatgacaatggactaatacagtaaattggtaccagtaaagtaagggggttgctgaaaagatacctgaaaatgtggaagcaactttggaactgggtaacaggcagagactggaacagtttgaagggctgagaagaagacaggaaaatgtgggaaagtttggaacttcctagagacttgttgaatggctttgcccaaaatgctgatagcgatatagacaataaaatccaggctgaggtggtctcagatggagatgaggaacttgttgggaactggaacaaacgtgacttttgttatgttttagcaaagagactggtggcattttgcccctgccayagagatttgtggaactttgaacttgagagagatgatttaggtatctgtaagaagaaatttctaagcagcaaagcactcaagatgtgacgtgggtgctgttaaaggcattcagttttataagggaagcacagcataaaagttcagaaaatttgcagcttgacagtgcaatagaaaagaaa

SEQ ID NO: 773892 - DNA, 609 bp, Homo sapiens
ttcagtatttaaaaagtgcaccttgtggcttggtgcaatttcaaccacttaggtctcataagcttttgagccacagctcaattttcaaaggaacaccctaaatccggttttttaaatggtcatctgatgagtcaatcaacaggtgtaaatttttcaatgccttactgtcagtgtcaagaaattggttttttttggkaaaacacaaaactgctttattagttgagtatataaaaacaccacaggatttatgttcttccctcaacacatgcttgggtaactcccattaggagcagcaggagttgcaacagcccatacagggaaaaatagaagcttcacagcgtaaggctacaaaatgcagcagagacatccagtggagtcatcttaacattataggatctgcttgtctgtgccttagtttctccatgtcactaataggtgtgaatttttgtgctcttctgttcaaaaggtataggataaagactaattaaaggccaatactcatagctgcaaatgcattgaccttgtgtaggtgcccagcattatttaaattctcactactcaaagtgtggtccatggaacagcagcatcaacatcaactgggaggctgtc

SEQ ID NO: 773893 - DNA, 609 bp, Homo sapiens
ttcagtatttaaaaagtgcaccttgtggcttggtgcaatttcaaccacttaggtctcataagcttttgagccacagctcaattttcaaaggaacaccctaaatccggttttttaaatggtcatctgatgagtcaatcaacaggtgtaaatttttcaatgccttactgtcagtgtcaagaaattggttttttttgggaaaacacaaaactgctttattagttgagtatataaaaacaccacaggatttatgttcttccctcaacacatgcttgggtaactcccattaggagcagcaggagttgcaacagcccatacagggaaaaatagaagcttcacagcgtaaggctacaaaaygcagcagagacatccagtggagtcatcttaacattataggatctgcttgtctgtgccttagtttctccatgtcactaataggtgtgaatttttgtgctcttctgttcaaaaggtataggataaagactaattaaaggccaatactcatagctgcaaatgcattgaccttgtgtaggtgcccagcattatttaaattctcactactcaaagtgtggtccatggaacagcagcatcaacatcaactgggaggctgtc

SEQ ID NO: 773894 - DNA, 656 bp, Homo sapiens
agaatgaaaaaagaaaagaacacggtagctcatgcctgtggtcccagcactttgtgaggccgaggcaggaggattgcttgagcctggcagtttcaaatgagaccagcctgggcaacacagcaagaccttgtctctacaaaaaactaaaaccaagaaaaggcagctgagcatggtggtgtacccctgtagtcccagctactcaggaggctgaggtgggaggattgcttgagcccaggagttggaggctgcaatgagctatgatcatgccacagaactccagccagggtgacagagaaaaatgctgtctcaaaaaaacaaaaaaaagatgaaaaagcaaaaacagacacctgttgagaagttagtggctcacccttttggaatataagcaatatttattaaaaatttaaatgtttatattatttgaaccaccacattctttttctgggtgttaaacctattraaataggtttacaaatagaaacacacacacacacagagggagagacagacaagagacagagaaaggagagagaattgagtgtagcactgtttaggataaaaaaacagaataaacatctatcaacaggaggattagataaattgttattatacaacaaagtacaatacagacattgaaaagaataagaaattttaaa

SEQ ID NO: 773895 - DNA, 583 bp, Homo sapiens
atgagaccagcctgggcaacacagcaagaccttgtctctacaaaaaactaaaaccaagaaaaggcagctgagcatggtggtgtacccctgtagtcccagctactcaggaggctgaggtgggaggattgcttgagcccaggagttggaggctgcaatgagctatgatcatgccacagaactccagccagggtgacagagaaaaatgctgtctcaaaaaaacaaaaaaaagatgaaaaagcaaaaacagacacctgttgagaagttagtggctcacccttttggaatataagcaatatttattaaaaatttaaatgtttatattatttgaaccaccacattctttttctgggtgttaaacctattaaaataggtttacaaatagaaacacacacacacacagagggagagacagacaagagacagagaraggagagagaattgagtgtagcactgtttaggataaaaaaacagaataaacatctatcaacaggaggattagataaattgttattatacaacaaagtacaatacagacattgaaaagaataagaaattttaaacaaatacaatatattaagaaaaa

SEQ ID NO: 773896 - DNA, 651 bp, Homo sapiens
gtgagctcgtgtcttctttgtatgtcagcacacaatctgccatctccccaagtctgttctgcatgagtgagtgagagtgaccccagtcactgctgtcatcagcaacatacaggtcatggtgccaaggaaaaggccaatcagaccagatgtaagacctggatccacccctacctgcaccccaaggaccggccaggggagggtggatgtgctgcacaccagagcctcatggagcttttcaaaagtgggtccctgagacaccacccaccacgcctggggacgattaatagatgttatgggaacaaaggattctgtggtcagagagcctrggaaatgctgagtacaaagcgaggtcgagcatgtttcattattgtaggaatctttagctgtaaatatgctgtatcttgtttactctcccagaaggctgtagaatccaggatcctctaacttaatttggtcgtaactggccctttctctgaagtatggcgagcatcacttggcttcctcaacacccttctgggaagcaaggctctgatgctcattagaaaataatccctgggaaggatgaacagacaaataatgctgggtctgtgggggtccagggaggcagcttatggcaagggcgtgtgtgtcctgggctttaagaaaggatga

SEQ ID NO: 773897 - DNA, 518 bp, Homo sapiens
caaaattaatcctagaaaccagtgaaaactaggtaaagctccttcctttagcccttcttagagtaagatgcaccccttaccaggctgggttttcaccttttgaaatcatgtatggaagggctccgcctatcttgcctaagctaaaggatacccatttagcagaaatctcacaagctaacttgttacagtacctgcagtctctccaacgggtacaagacatcatccagctgcttgtcaggggagcacamcccagcccagttcctgaccagactgggccctgccactctttccagctgggtgacctagtgtatgttaaaaagttccagaaaaaaggactgactcctgcctggaaaggacctcatactgtcatcctcaccacaccaacagctctgaaggtggacggcactcctgcttggattcatcattctcgcatcaaaaaggccaacaaagcccagcaaaaaaaatgggtccccaagcctaggccaggccccttaaaactgcgcctaagttgagtaaag

SEQ ID NO: 773898 - DNA, 595 bp, Homo sapiens
gccatcgtgtagctgccatccatttttgacttgcacccccataaccaattcaccaactcagaaaccaagctcaggctttttcctcctccattacctacttataagggatcccccacaccaccgcttgggtgaagcgacggagaggtgctggtgcaacagtggatgacatggctctgagtcacctgctcacatggcttacttgtgccctctggttttgctcatgcttgatcttggataaacacttctgctttggatgcattgttactgagcctacccaacctatggacttgggggtctgatagaacctaggacatgatgtgaattgtggctacattgtcacttttgtcctatgatcaggtactctgcctctgtctgggtctggtagcacaccaaaagttctttttcaaaagacattaaattatctkctgctgatggcatggacttgctccagagtcctaggtcttcattgtgactctcccaattgaggctttctgtaagttctacacacatccttttcccctactgatactctgatactgataccatagggtctgctgggttatacagcccgagcagggctgctcacattgcaacc

SEQ ID NO: 773899 - DNA, 595 bp, Homo sapiens
tgatgtctgcccacagacggagcatttggattggccctagccaaagcgaagtcacccagcccagcaatcagagcttgagttccagcaagcctcgccactgtgggctggagtgctctgggaccctaagtgaacttgtggggcagtctgggccacaaggactgcaattcttaggcaaatcctagtgctgagctgggtgcagatccagtggactaggggggcatgtgacctactgagactcaaaaccatacattacatggaaattgaataatctgcttctgaatgacttttgggtaaatgaygaaattaaggcagaaatcaagaagttctttgaaactagggagaacaaagatacaacataccagaatatctgggacacagctaaaccagtgttaagagggaaattcatagcactaaatgcccacatcaaagagttagaaaagatctcagtgtaataacctaacatcacaactaaaaaaactagagaactgagagcaaaccaaacccaaagctagcagaagacaagaaataaccaaaatcagagctgaactgaaggagataagacacacataaaaaatcaaaagattaacaaatccag

SEQ ID NO: 773900 - DNA, 599 bp, Homo sapiens
  misc_feature 252: n = A,T,C or G
catggaagcttgcttcttcaaggatagcaggggaagcgtctgctgcagtttcttgtctcttcaattggctcatctaattaggtcagtcccaccaggataatctcctttttgattaactcagcgtcaactaattagaaaaccttattatatctgtaaaaatttttcatctatgccacataatgtaatctaagcagggatgtgacagctcatcatagtcacaggtatcccagccactcaaagaaggggagctgnatcatataaaccatgcacatcagagagtgagaatcttgggggctactttagaattctcagtgatactttattttataaagtaaaatttgcmtaagattaacaattttaaaatgtacaattcagtagcatttactaaattcacaatgttgtgcaataataacgtctatatagttaaaaaatattttcatcctcaaaagaaaatcccatgcccagtaagcagacactctccattacctctccctttggcctctgacaaacattaatctgctttacaggtctatggattcacctatcctgaatattccatataagcggaactatacagtacgtgaccttttgtgtctgac

SEQ ID NO: 773901 - DNA, 646 bp, Homo sapiens
  misc_feature 50: n = A,T,C or G
cagctcatcatagtcacaggtatcccagccactcaaagaaggggagctgnatcatataaaccatgcacatcagagagtgagaatcttgggggctactttagaattctcagtgatactttattttataaagtaaaatttgcataagattaacaattttaaaatgtacaattcagtagcatttactaaattcacaatgttgtgcaataataacgtctayatagttaaaaaatattttcatcctcaaaagaaaatcccatgcccagtaagcagacactctccattacctctccctttggcctctgacaaacattaatctgctttacaggtctatggattcacctatcctgaatattccatataagcggaactatacagtacgtgaccttttgtgtctgacgtaattcacttagcatgttttcaaggttcatccacactgtagcatgtacttgattttcattcatttttgtggcagaaacatactctgctgcatggatgcaccaccatttatttacctattaagcagttgatggatgttgtttccaccttttggcagttgggaatagtgctgctataaatattcccatacatgttttttggaatgcttgttttctttggggatctacctaagagtggaattgccaagtca

SEQ ID NO: 773902 - DNA, 616 bp, Homo sapiens
taaaaaagcttcgcacagagagacactcaaaaacactacagatgtgtcatactacaattacaaaaacaagttcaagtaactcacagcaagacagaaaaaaatcagatatgcgaaaaaaacagaacaatcagaaaacaataaatacaatgacagacttaagtctcaacacattaaagagaaaagcaaaaactatgaacgacgttacagacataaatttagcaacttaggtgaaatagaccaattcttacaaaacacagactattataactcccctagtataaaatgatcattttaatggccataagagctattaatgaaattaaatatttaatttaaaattccccaaaacagaaacatctaggccaaagtgatttcactgcrgaactctaccaaatattaaaagaagatttaacatcaattatacaccatctccaaaaaataagagaggaggaacatattcaatttgttttattcagttagcattactaataccaaaactaggcaaagatagtgcctaaaacaaacaaacaaaacacaaaaacaaaagctggggaccaatatccctcataaatatagatgcaaacatcattaacaaaatattagcaaataaaattta

SEQ ID NO: 773903 - DNA, 639 bp, Homo sapiens
taaaaaagcttcgcacagagagacactcaaaaacactacagatgtgtcatactacaattacaaaaacaagttcaagtaactcacagcaagacagaaaaaaatcagatatgcgaaaaaaacagaacaatcagaaaacaataaatacaatgacagacttaagtctcaacacattaaagagaaaagcaaaaactatgaacgacgttacagacataaatttagcaacttaggtgaaatagaccaattcttacaaaacacagactattataactcccctagtataaaatgatcattttaatggccataagagctattaatgaaattaaatatttaatttaaaattccccaaaacagaaacatctaggccaaagtgatttcactgcagaamtctaccaaatattaaaagaagatttaacatcaattatacaccatctccaaaaaataagagaggaggaacatattcaatttgttttattcagttagcattactaataccaaaactaggcaaagatagtgcctaaaacaaacaaacaaaacacaaaaacaaaagctggggaccaatatccctcataaatatagatgcaaacatcattaacaaaatattagcaaataaaatttagcaatatattaaaataattacat

SEQ ID NO: 773904 - DNA, 603 bp, Homo sapiens
cgcactgcaaccgccgcctcccgggttcaagcgattctcctgtctcagcctctggagtagctgggactacaggcatgcatcaccacacccagctaatttttgtatttttagtagagacggggtttcaccatgttggccgggatggtctccagctcttgacctcatgatccacccgcctcggcctcccaaagtgctgggattacaggcgtgagccaccatgcacagccaattgttttcttaaattacacattaggatgatggatatgttaattagtttaatgcagtgattcacaatgtacatgyatgtcaaatcatcatatggtacatcttaaatatatatcatttttgccaattatacatcagttaagttaaaaaaagttaaataaaacaaacaggtttttaataaatgacacaatagggcgtggcaaaatcagaatgcacctctctatctgattttgctgtgttattctgcctcctactgggggaaaaagcattccatcataaagctgctcaggatgattgatacatcaaagtgaaatttttgagaattgatacttatgagaatatttcactgaatggggacacaaagaggaatgcaaccgt

SEQ ID NO: 773905 - DNA, 550 bp, Homo sapiens
ttctcattacccatttccaaagtcacttccacattttcaggtaactttatagcagtaccacatttttggtgccaattttctgtattagtccattctcacactgctataaagaaatacctgagactaggtaatttataaagaaaagaggtttaattggcatgcaggtctacaggctttacaagaagcatggctgaggaggcctcaaaaaatctacaatcatggcagaagtytaagggaaagcaggcatatcttacatggccagagcagaagaaagacagcagggaaggtgctacacacttttaaacaaccagatctcatgagaactctatcacaagaacagcaccaaagcaggaaatctgcccccatggtccaatcacctttgaattataattggagattataattcaacatgagatttgggtggagacacagattcgaaccatatcaaccactttgttaatcactgtcccttcaccccgagggcccagcacagtaactgacactgcttagtcactgtctgttgaataaatgaattaatataaaagactcc

SEQ ID NO: 773906 - DNA, 585 bp, Homo sapiens
cacccctttctttgactaggaaagggaaatccctgaccccttgtgcttcccgagtgaggtaatgcctcaccctgcttcggctcacgcacggtgcgcgcacccactgacctgcgcccactgtctggcactccctagtgagatgaacccggtacctcagatggaaatgcmgaaatcacccgtcttctgcgtcggtcacgctgggagctgtagaccggagctgttcctattcggccatcttggctcctctgatggaaaactttctttaactaaaggaagacttaagtcagtatatcaaagagcacagtatgtaccagaaacaatcaatacagaatatttcaaaccaataaattatagtgaatttaccacaatttaggaataaagaatcatatgaagagtgaagcttaagaaacaaaaatgaaatatacaaaatacatttaataagtgctggctagatgatatctaatagttctgctaaattcatagcttaatttttgagttcctggagagtaaattgctgtctaatgaaatacattagcaaatcctaatcaaattcctcttggaagtcatagaaataattacagtgtt

SEQ ID NO: 773907 - DNA, 606 bp, Homo sapiens
aaggaaagaacagaattacaacagtgaagtgaagtcttcctagtgtcttagcacaattattacttcatgcattttgcaaatgggcataattttttttttgagatggagtctcactctgtcgcccagactggagtgcagtggtgtgatctcagctcaacctccgcctcccaggttcaagggattctcctgcctcatcttcctgagtagctgggactacaggtacgtgccaccacgcccagctaattttttgtatttttagtagagatggggtttyactgtgttagccagatctcctgacctcgtgatccacttgccttggcctcccaaagtgttgggattacaggcgtgagccactgcacctggccacgtgggcataattaaaaaaaaacaaacctccaggtgctacattctttgtgagtttcacatattaatatccctaaagataacatgggaccattcagggaaaaaacaaacttagcatgatactagctcttacccagagcaatcccatgaagtgctggtaggatggctttgtactgtctgggctttttcagctcatcagagtctgccctgcactgacattatgctcctctcatcactcttagg

SEQ ID NO: 773908 - DNA, 606 bp, Homo sapiens
aaggaaagaacagaattacaacagtgaagtgaagtcttcctagtgtcttagcacaattattacttcatgcattttgcaaatgggcataattttttttttgagatggagtctcactctgtcgcccagactggagtgcagtggtgtgatctcagctcaacctccgcctcccaggttcaagggattctcctgcctcatcttcctgagtagctgggactacaggtacgtgccaccacgcccagctaattttttgtatttttagtagagatggggtttcactgtgttagccagatctcctgacctcgtgatccacttgccttggcctcccaaagtgttgggattacaggcgtgagccactgcacctggccacgtgggcataattwaaaaaaaacaaacctccaggtgctacattctttgtgagtttcacatattaatatccctaaagataacatgggaccattcagggaaaaaacaaacttagcatgatactagctcttacccagagcaatcccatgaagtgctggtaggatggctttgtactgtctgggctttttcagctcatcagagtctgccctgcactgacattatgctcctctcatcactcttagg

SEQ ID NO: 773909 - DNA, 511 bp, Homo sapiens
gccacacgtccttgaaaccagccctggatgcacattcacacgtagccctgagcctcagggtgggcctgcacatcgaaagaccgaccgttcatgctgcagaccagtaggaagatgcagcaagtggaacacttcctcctattgtcaactgctmaggcactaacaataaactagaaacattgcctttggccaaattgaaactggctttagttcagaattaaatcaagctaagattaactgaagttgtctcatcctaatttctacctagacacgaattctaatgctttcagtctcagaataaaatgatatacgaatatagtaaatatcattctacctatttaggaaaacactataaaactgacaaaaaaaagtcactaacctccgaaggaattttatgactttagccaaaatgaataaccaaaatacctgtaagattgaagctaaggcctaagtgatttaaggcccaattagtaaagtgactacatcagttatcaagattttattataattagtg

SEQ ID NO: 773910 - DNA, 511 bp, Homo sapiens
gccacacgtccttgaaaccagccctggatgcacattcacacgtagccctgagcctcagggtgggcctgcacatcgaaagaccgaccgttcatgctgcagaccagtaggaagatgcagcaagtggaacacttcctcctattgtcaactgctaaggcactaacaataaactagaaacattgcctttggccaaattgaaactggctttagttcagaattaaatcaagctaakattaactgaagttgtctcatcctaatttctacctagacacgaattctaatgctttcagtctcagaataaaatgatatacgaatatagtaaatatcattctacctatttaggaaaacactataaaactgacaaaaaaaagtcactaacctccgaaggaattttatgactttagccaaaatgaataaccaaaatacctgtaagattgaagctaaggcctaagtgatttaaggcccaattagtaaagtgactacatcagttatcaagattttattataattagtg

SEQ ID NO: 773911 - DNA, 511 bp, Homo sapiens
gccacacgtccttgaaaccagccctggatgcacattcacacgtagccctgagcctcagggtgggcctgcacatcgaaagaccgaccgttcatgctgcagaccagtaggaagatgcagcaagtggaacacttcctcctattgtcaactgctaaggcactaacaataaactagaaacattgcctttggccaaattgaaactggctttagttcagaattaaatcaagctaagattaactgaagttgtctcatcctaatttctacctasacacgaattctaatgctttcagtctcagaataaaatgatatacgaatatagtaaatatcattctacctatttaggaaaacactataaaactgacaaaaaaaagtcactaacctccgaaggaattttatgactttagccaaaatgaataaccaaaatacctgtaagattgaagctaaggcctaagtgatttaaggcccaattagtaaagtgactacatcagttatcaagattttattataattagtg

SEQ ID NO: 773912 - DNA, 632 bp, Homo sapiens
  misc_feature 326, 331, 332, 496, 497, 498, 499, 501, 503, 506, 520, 608: n = A,T,C or G
ctactcctaatcctctattaacataaatgttttatgctgaatgtgtggtaacccacaacaaaatctcattttctagattcagaaatgttaaaacaaaaatgatcaacaccgcccccccgccaaaaaaaaaatcctcaccatggaatatagttccagaaatgactaacagtattaagaaataaacacaggtgttctgagacacagcacttaaccctcagccacatttgcctcctgctactttcagcctactaacctcacccatgaattgacaatatgtaaaaacccaatctgtcctttcacgttgtataaagtactttagtgctaangtatnnaaaacatttaagtaattaatgcrtttctgctgtcacaatgcagcaattttgccagaatgtatgtgggagaatgtagatggattaaacacatttatatctccaagaaaattgagcagctatgtcaaaataaacaagcactttttttggtttttctttttttgggnnnncncnaantattagaccccccncaaactaaactgtctgtctgagtatgagacagattaggggtgtttatttatacctaattccaattagaatatataggattgtcatttntaaaataagtatgattcagtgtga

SEQ ID NO: 773913 - DNA, 662 bp, Homo sapiens
caaaagagcagttacgtgtgtgtgtgtgtgtgtgtgtgtgtgcacgtgcacatgctaggcatttcaattctcagctttataatctctaaattataccttgtcactgttatctcattaggcatacataattaatcttttcaaggaataattccagaagacagagttataatatttcacatcactctaactattgctttatactctctcataacatgaggacttattcctattgaacttttaataagttatatcttctgtatttgtagatataagtgaaaaatctacagcactcatagagagggatacattatgtaagggctatcagaagtaaggacatctactactaattaataccaagggtattcatgtctatatctttctaaaaagtgaagtttcttaaaattataaatgtaattaaaatgcmatgtataaaatagatttaacaagtcaagtcaattatttaagcatttccatggccaataagaaaataatattgataacgtagcacgtaacactgatgtctcttaaaaaatgtaggaaatattttcacttgaaaaatgtaggaaggttacatgaatacaagagttaaaagatctgatatttcatagtcagatcctaatatttgaagtcattattacttttctctttttttgtttcacatg

SEQ ID NO: 773914 - DNA, 659 bp, Homo sapiens
cagatcttctactatctcacaatttttgccctaatacagagtctataatgttaccacatcgtttcgtaacgtttttcctacttatcctttattaattcactattggagaggaaagccttctgtactcatattcagtgcaaaaagccagttctgatgccttatgaatccacaaacacataaaaatattttaggattccaaaattcatatggaaaaattataatttttagcactacatttgatttatatgccactttattttttttccattatggtggtattttccaaaatttttacaggataccacttttgaaaatcctgttgaatgcaagtcctctttgttggtaagagaattattgacttctaatttttactccactaaggctgtgagattgaccttacagcctcgttttgttttcatctagctcattgaacaatgaggatatttagctcccctcagagctaccctcakagttggatgagctatcctcagagttggatgccaccaccgggagcagcaaaagcgaaggcaactcatgattctgcctcagaagcaatcgaataaaatattttgaaaatgaatgaatggacttttaaattttaatcatcgctaaccttggggcctcgattctgtcaatttgtgtgtgggcacagttcttac

SEQ ID NO: 773915 - DNA, 458 bp, Homo sapiens
cgcttgaagggtactcaggaagtaaataaaagtgaacatcctgctatgagctggaaagcacaggcagaatcctccaccaccctgccagcctaactgtactgcccaaagacaaaggaatctttcctgttacaggtacgtgcaacccacaccaggtaaaatgcattcactaaggctgtttggtctttscttgacacatcactgccattacagactgattcttccaaacagacatttcatgaaggcccttagtaaatataggcttgacatagtagctggcaaagttatgaacaaaatgtattttattctgagacagaacctattttaaatagctcattgacctctataatcatagtgtttggtcaaaaaccatcaaaaccaccacatagagccaaataagatgcttccatttatatgaagtaatttcttctcacagtgcagaaaagagtggtgatgttcac

SEQ ID NO: 773916 - DNA, 414 bp, Homo sapiens
gctctgataacagtaccgcttgaagggtactcaggaagtaaataaaagtgaacatcctgctatgagctggaaagcacaggcagaatcctccaccaccctgccagcctaactgtactgcccaaagacaaaggaatctttcctgttacaggtacgtgcaacccacaccaggtaaaatgcattcactaaggctgtttggtctttccttgacacatcactgccattacagactgattcttccaaacagacatttcatgaaggcccttagtwaatataggcttgacatagtagctggcaaagttatgaacaaaatgtattttattctgagacagaacctattttaaatagctcattgacctctataatcatagtgtttggtcaaaaaccatcaaaaccaccacatagagccaaataaga

SEQ ID NO: 773917 - DNA, 628 bp, Homo sapiens
cgtctaaaatattctttacatatatatgtcttatgttttagccaattatgtgatatatcccatagccatatttatgtaaactatttcaattatttgaaccaatcaactaatgcaagacatacatatatatgtatctacatctatgtataaatatacatgggaatatgtatatttatatataaaaaccatgttccctaaaacttatggattcaaagagagatttattgtaggaagcatcagaaggtcttctttcaaagcaatgaaaagcataggaatttttcagggaaatttaaatgagaggatttgaatgttatttctggttctttataacccagcaatgtttgtattaatggtattaaaaaagaaaataaaatgtatagataaggctttgtaggagcatttccrtatttatcagtgactgcataaagtttaaaaaaaagtaaaccctaccaccgattgcattactctaatacacacatcatcataattgtagtgaatatctccacttattttattatatatataggcttatgcacccattgaaatctcatctattattttttcagtgctgtctttacactgagttatattaacatgtggtctttatgtttcctaattccagtattca

SEQ ID NO: 773918 - DNA, 666 bp, Homo sapiens
gaatttttggccgctttctttctttttgatgttcaggaactccaattgtgaggtttttgttttttgttttttggttttttgttttgagacggagtctcgctctgtcacccaggccagggtgcagtggtgcaatctcgactcactgcaacctctgcctcccgggttcaaaygattctcctgcctcagccttccaaatagctgggactacaggcatgtgtcaccacgcccggctagttttttgtatttttagtagagacggagtttcaccgtgttagccaggatggtcccgatctcctgacctcgtgatctgcctgcctccacctcccaaagtgctgggattacaggcatgagccactgctcccggcctaattgtaaggttcttattggactccataaggaattgggctttggagtctgatggattttacccagccactaactagctgattatgtgattttgaggaagtttcttaagctctgagcttaaaaggcttatttacttaaaaaagagaacaatatacttacttcttaatttatgtgtgatgtctcagtaatgactggtaaagattccaaggatccctatatgagtctgctgcctttattagcgttatcttgccaagggttatacataaagaaaggcacattgttgggtggggtttggagttt

SEQ ID NO: 773919 - DNA, 755 bp, Homo sapiens
  misc_feature 1, 2, 3, 4: n = A,T,C or G
nnnnacggagttagttcatcactttaccttgttaatttaggcaatcaattagatagcacctagaggataccaataaaaagaagactacaaaaatcccaaacctccaattacaacaaatgaaaggtcccagagaaaacaattagggctctgaatggcrccactcctctaattcatgaaactcacctcctggcatccgtcattattgtaaacaacctggccacagcaagaaaaactgttataaatttaaccaatctaaatagtcttcttcatttagccctttgactcctgcctcctaatgaaagggatccaaaaatatacaggggctttttccaattcttcccctcaacctccttggcaatgaggtcctacctgttctcattgacacagaagcaaccctatcagtactcaatcccaccaacctaagccaggccttgccttggagttataaaattattcaaatagtaggagtttctaataaaccactgatggcatttcaagctcagcccattgctttttgccttgggtttttacaagatacctatccttttttactagcagaatctgctccagctaacttattgggatgagatttaaaaaaaatatatgtcatgttggcatctctttatccctaaagggggaaataattttggagtctgataagcccaatagcctgttgaactctaccaataatctcccactcatttgttatgttgtcccatgtactaaagaactctccactgagtctcagagttccc

SEQ ID NO: 773920 - DNA, 530 bp, Homo sapiens
gcttccagcataccacagttaccacagaaagaggagcccagtatctcatccctgtgtgcctttgatcccccactgtctaacaaacagaggctgctgctcgggcaagcagagcagctgccccatcccctggctgaacattcccagtagcagtggctctgtgtttctctgaggtgcagctccragaggcaactgaaagcccctctgccactgttcctgtagtggtactgccgtttctgccctcaggccgaggaaggagcaaagactctgagtgctttaaccacacctccaacaagctgtagtaacccaaaagaaaagaagccagtctgtctccccaagccccacccacccctgctatttgttgcaaggcagggccccacttacttggtctcacagcacagctgccccatcctaggccaatcatactgattgatagcagctctgcgtctttctgaggtggagctccaagagacaagtgaaaaaccctctgtcacaaccactgctaactttccttcctctgattcctccaagat

SEQ ID NO: 773921 - DNA, 530 bp, Homo sapiens
gcttccagcataccacagttaccacagaaagaggagcccagtatctcatccctgtgtgcctttgatcccccactgtctaacaaacagaggctgctgctcgggcaagcagagcagctgccccatcccctggctgaacattcccagtagcagtggctctgtgtttctctgaggtgcagctccgagaggcaactgaaagcccctctgccactgttcctgtagtggtactgccgtttctgccctcaggccgaggaaggagcaaagactctgagtgctttaaccacacctccaacaagctgtagtaacccwaaagaaaagaagccagtctgtctccccaagccccacccacccctgctatttgttgcaaggcagggccccacttacttggtctcacagcacagctgccccatcctaggccaatcatactgattgatagcagctctgcgtctttctgaggtggagctccaagagacaagtgaaaaaccctctgtcacaaccactgctaactttccttcctctgattcctccaagat

SEQ ID NO: 773922 - DNA, 504 bp, Homo sapiens
gcttccccctctctactgactgagtctggggtcgttacaggcacagggtgggggctgctggtggtgcatagatacttttggaaaaggcaacattagatttgtgaaaagacattatttagaaagaaccagttgggagagagccagcaaacagggatagaaattctcactttgggccatgggtttcagtcttttcagcttgaaggtggggttttgctggagacccacccatgtccacctagaatttctctggcttctgcctctatcaatgggattatggaaggcattttaatatttttgaatctgtattacctgtrcttaacacgttacttacttaccaaaagatttacacacttgcaaagatattatgacattgattattataattaatatatcctttactgggtcttttttactctttgtgtttggaaaataagtttctaagcaggtagatcctagtatactgggctagattcactcccaagcagaaaaccaactgtatgatgt

SEQ ID NO: 773923 - DNA, 593 bp, Homo sapiens
aattaatacaggatacatgcaaagccccccgctggaagccagaacatacaaaccaaacgttttcactttgtcatgctagattgagtttatattactgtaactgacatctaacttttcaggaacacatatgaagtaaatttaatctgtggtggaaacacaggattattctttttatcttttaggagctgatactctattaatggatctagtgcctaaatcaaaagaacagagagagtctgtataagcaaaattacctgaagaaagtcacgaagaactgtaccaggtccataaaattgctgtgctgagagaaggcaatctgtgacagaaaaacaggtagtgtgattatgcaggtcatgaaaccaccacggattcacgcttctcatttcaagagttaagctgaaaacagagcttacaytttaaagaagttaaggaaacttttttcacttaaggaaaagtacctcacccctttagtttacttgtttagttgccagtcccatagcaatacactgaggctttagcacagcctcctgcagccccttctaagcttcacaccagttctgaggttctgtctgtttgaccctggagaccctcgc

SEQ ID NO: 773924 - DNA, 653 bp, Homo sapiens
cacacacacagctaagcaactaacatttttattttgaataatgagggtgggtaaagaacagtagacttacctggtaaaatttaacaagataactaaaacatggaaattatatgtattttaacaccataaaaactgatggtaaaataatactaacacatgggaaaatactacattactctctgaacaaaataactatacacaaaatagttttctttaaattgatagtgmcagaaatactattaggaatttccgggtttgggaattgttttcttctctctggatttccagattttctacaggaacactgttgtcatttatcccaaatttcccatcatattcatagagtacatactgatctatcatttttgtcacttacatatttgtttctcaaaccaaaataaaatggtacataatacatatataatatcacaggtcaaaatgctctaaagatttgttgtaacaaggttcaaaaaaagcttcaaattgcccactatctacatggtcactgaagtataatggccaacataccatcaatttagaacagagagacagggaagggcagtagaagtaatatttgattaatcaatactcaataaattaatacttagaactattggaaggcagtaacttgaaaagttaacttcaaatggtaa

SEQ ID NO: 773925 - DNA, 605 bp, Homo sapiens
tggccattttcacaatgttgattcttcctatccctgagcatggaatgttattccatttgtttgtgtcctctcttatttatttgagcagtgttttgtagttctccttgaacaggtccttcacaacccttgtaagttggattcccaggtattttattctctttgaagcaattgtgaatgggagttcactcatgattttgctgtttgtctgttattggtgtataagaatgctggtgatttttgctcattgattttgtatcctgagactttgctgaaattgcttatcagcttaaggagattttgggctgagaccatggggttttctaaatatacaatcatgtcayctgctaacagggacaatttgacttcctcttttcctaattgaataccctttatttctttctcctgcctgattgccctggccagaacttccaacactacgctgaatacgagtggtgagagaggccatccctgtcttgtaccagttttcaaagggaatgcttccagtttttgcccattcagtaagatattggctgtgggtttgtcataaatagctcttattattttgagatatgttccatcaatacccagtttattgagagttttta

SEQ ID NO: 773926 - DNA, 574 bp, Homo sapiens
cccccaccaaaggccagaatgtccgacattctagctaggaagatttttattttattttaaatatatagagagacagggtctcatcactctgtcaaccacgctggagtgcaggggcacagtcacggctcactgcagcctcgaccttccagcctcgagcaatcctcccacctcagcctcccaagtagctgggactacaggtgcatgccaccatgcctggctaatttttgtattttctgtagagatagggctttgtcatgttgcccagtctggtcttgaactcctgagctcaagcaatctgcctgcctcagcctcccaaagtgttgggattacaggcatgagtcaccatgcccggcccargaagatttttagtggtgacaattatgtattcatctattactaagctatacataaggtaaccataacaaatttgaccttcctttaaaatggggtttggggactgagatatattcagatattgactgcctaagaactagtcaccctgaaaggttcacagaggacaaattattgggtcaaattaaaatgacctattggaaggtattggaagcattaagca

SEQ ID NO: 773927 - DNA, 524 bp, Homo sapiens
cctggctggagtgcagtgactgcatcttggctcactgcaacctctgcctcccgcattcaagcagttctcctgtctcagccccccaagtagctgggattacacaaatgcaccaccacgctcagctaatttttgtatttttagtagagacggggttccaccatgttggyccggctggtctcgaactcctgacctcaggtgatctgcccacctcggcttcccaaagtcctgggattacaggcatgagccactacgcccggccaagtcctgggcatttttaaattacaagggaagctactggaaattctcagggtcagatcacagttgcctggaggagtaaatgcatattgtgaattcctgggaggggatattgtcattctatcacattcacagccctttgttctccttttctgccgtcactgcctgggatcaggcctcagcctctttcacgtgggctattgctgttgcctcctagaacatttctgtctttagttctgacctctccaacccatcttttgtgctgctac

SEQ ID NO: 773928 - DNA, 515 bp, Homo sapiens
ctagcctcccagcctacgtctttctcccatgctggatgcttcctgcccttgaacatcagactccaagtccttcagttttgggactcatgctgtctctccttgctcctcagcttgcagatggcctattgtgggtcctattgatggcccttgtgagttaatacttaaggaactcccctttatatatcctattagttctgtccctctagagaatgctgactaatatatcttgtctctttttattgttttttacttcaagttcatgttatctaagtgtagctactcctgctcacttttgatttrtttgcttggaatatctttttccatctttttactttcagtctatatgtgtctttccacatgatatctgttttttataggcagtaaataattgggtcttttaaaaaatccattcagccagtctacatcttttaagtggaaagtttaattcatttacgtgcaaagttattattgatatgtgatggctttttcttatcattttagtaaattattcctgg

SEQ ID NO: 773929 - DNA, 515 bp, Homo sapiens
ctagcctcccagcctacgtctttctcccatgctggatgcttcctgcccttgaacatcagactccaagtccttcagttttgggactcatgctgtctctccttgctcctcagcttgcagatggcctattgtgggtcctattgatggcccttgtgagttaatacttaaggaactcccctttatatatcctattagttctgtccctctagagaatgctgactaatatatcttgtctctttttattgttttttacttcaagttcatgttatctaagtgtagctactcctgctcacttttgatttgtttgcttggaatatctttttccatctttttactttcagtctatatgtgtctttccacatgatatctgtttyttataggcagtaaataattgggtcttttaaaaaatccattcagccagtctacatcttttaagtggaaagtttaattcatttacgtgcaaagttattattgatatgtgatggctttttcttatcattttagtaaattattcctgg

SEQ ID NO: 773930 - DNA, 646 bp, Homo sapiens
cattcactggtttcagatggacatgaattttgtggggagggtccctattcaacttgctacaccaggtaatgggtttcctttgtttgggatctctctgctctgtttgttcgtgctttccgcactgtaagttgtgtcctgtcagtgaatattggtgttccaaggctgaaagcatcacgatcccatgcaggtggaatgaatatgatgaaattattggcacagctgaaagaaaatatataactgtttaatttatttgaagaaagaacaaaggccctgagggttgttagttcttaagaattttactgtgtaatcatctatgaagtaggctggaaaatggccgttttctgttacaaagtacagcgatagttttttcctgtgctctttagccgaggaccgcaattctrtccctagaatctcagacatttctagctgaaagagacctttggcatcatctacttctaatctaaccttctcattttacagatggggcctttagggcccaaaaagattaagtgccttgattcaaggtcatcagccaggaaagggcagagcagacactaggacccaggtctcagagcccccagactggagcttttcccagtgcagtggcagtttctcactctatctgtgcctccatctgaaaataatg

SEQ ID NO: 773931 - DNA, 597 bp, Homo sapiens
aaacgtttgtagctgtagaaccccttttgttttatttgaagcatttttaagagactagtaatcgaagacctttctttgggaagctgatgtctcactccctgggaggatgctcagccttgcctggcctggtgccctcagagagctgccttctgtggctcttgcgctggggtcggtaacagcaggaagcctgttgacaggtaacagcaagagaacaggggcgggggtgctgggtctggggagagggctctcagcgacctgcttatagctmcaggaaccttccaagcaagcacagaggagacctctctgagtagtggcctgggaggagcaggcaggcccctgggcaagggaatgggtggttacagcacttccaggtcactgcagaagacagaaggggaacacggcaagtcaggctgggacttgaaatttcctgagttcattatgctaatttatctttgtacactttcccacacagcagctcactccatctccacaacgcttcaggaagtgggcaacgtggatgctgcgcctcccagttttcagcactgaggggagagtttctgtgacttgtcaaggtcacacaatcaaaggtcacagaag

SEQ ID NO: 773932 - DNA, 522 bp, Homo sapiens
catcttgagattttaaatcaattatatctgcaaagatataattatatctgcaaagacctttttccaactaaggtcatattcacaggttccagagattaggtcatggacatgtcctttggggggccaccattcagcccactacagttggttttctttttttttttttttgkctgagacagagtctcgttctgtcacccaggctagagtgcagtgacgccatcttggctcactgcaacctctgcctaccgggttaaagaaattctcctgccttagcctcctgagtagctgggattacaggcgtgcgccatgcccagctcatttttgtgttcttagtagagacggggtttcaccattttggtcaggccgctctggaactcctgacttcagatgatctgcctgtcttggcctcccaaagtgttgagattacaggcatgagccaccacacacagcctacaattggttttcaattcctaaagcccacatctcagtggaaacgtgaaccacgtaggttattttatttta

SEQ ID NO: 773933 - DNA, 626 bp, Homo sapiens
atgttaattgaggagagcaaaaatctcctggtgaccatcaagcagacctccggagacaaaaacccctgtctctgaggaatttagacgtaattaggcttccctattatctaaaggcacctggttccaggcctctttcaagttaaaattagtaagtaactagaatttctatacatctctggaatgcatgcatgcagaacccttgctgatatcaaggcaccaaatgtctaaaaatgtaatcatttatcgtgcaaattacccttcagctcctgctttaggtccataaatacccctgtggaaaagtccgctgtgatgcgctctgtcctgtctcgctgaggcctccactgaactctgctgcagggttccttctaacaaaactttcctttttctttctttctttctttctttttaagatggagtttcgctgttgttgcccaggctggagtrcagtggtgcgatcttggctcaccgcaacctctgcctcccgggttcaagtgcttctcctgcctcagcctcccaagtagctgggattacaggcatgcaccaccacacccggctaatttaaaactttcctttttcaaacttatactgtcagtaaattcttcttactaacccgcaagtcgaccact

SEQ ID NO: 773934 - DNA, 570 bp, Homo sapiens
atcgttcactgcctcgtgacagctattctgcgaacagtcggcattcctattaacatcttttatttctttgttccatgatgaattcttcacctgcctaactaaccttgggcaccccggcgcccctcatagtcctgcagaggaggccctgacctacctgaggaggtttcccctgggcaaattctgctctcgggcctggacgccacccatggtgaggctcagcctcttggccacatccggccttcccttgrtgaggctgccctcccgggcctggcctggggaggtgccataatgctcctccaggcaccgcagaggcaccgtcctgttgatgggctggaagatgatggcgccactctgctgggagatgggccggcggttgcccacgtagcagcgcaccaggccggggatggagtcgaagctctccatctcgaactggtactgcacgcggctgtaggcctcgctgagtcgcagaactgtccggttgattttgaagtgctgagcgaggttcttccactgacaggtcaggacaaagttcccagggctggacagagagtcacgaactaggaagtcacc

SEQ ID NO: 773935 - DNA, 608 bp, Homo sapiens
ggccacgctttattgttcgtttattgtctgacttgcctcccactagactgtaagtttcatgaaaacagaaatccatctactttttccccactgcccttgagcaatgcctgaaaacatcaggcactgggtattcagtaaacaaataccctaggatgagaaaagatgctgactttgcttagttatggagattctccctttcgcyctcaagtcatctgaagccctgttttcgctgggcatgctgccattcagccaaaagaccacattcctcaatctctgtctcttccagggagatgtggccacaggactcagttctgaccaaggagctgagatgtgatggctggagactcaacaccattctggacggtgagtggggagccacaccaaggaattggctgggtggaaggtctgattgaggctgggtccctgatgactgtggggccaacacaccagccctggaccgccagcctccaggtcttctaggtgatctaccttatggaagcctgtgatttgtgggtgttcccgtcactggcagctgaactaaatcctaacccatattgtgacctgacccccattgagtcaccctgacaggcagtctgcaggcttagcct

SEQ ID NO: 773936 - DNA, 455 bp, Homo sapiens
agagggatggtttgggaatgtgttgagccaatgtagggtatgtattttcatttgcctctatggacactaaggctctgaaagcacattcatagaggtctctgacgtaaaggtccaaggggacccagggacccatcttcttgggttgggtctgttgtagcacttctcacacttagttgccctgtggagccgggctgaccagtgccaggaaggcctcataagttgatgccagctggtgcctcatggctggagataaatcaagggaggtgagagagttgcagataaactkaggtgcagtttgacccccttaacttcttatctacaatccgcttgtgcacttaatgcctcttgagcttggagaaaagtagttctatgtgaattatgttgtgtcataaaggccccttccagtaggttcagattcattggccgaaaaaaacaagcatcaagaagccaaattt

SEQ ID NO: 773937 - DNA, 613 bp, Homo sapiens
agttcagtggtgcaatcatagctcactgtaacctcaaacttctggtctcgggtgatcctcccacctcactgagtagctaggactccaggcactcactaccacacccagctaacttgtttattttttgtagagatggggtctccctgtgtgcttgggctggtctcgaactctggccttcctcctgccttggcctcccaaagtgctgggattacatgtgtgagccactgcttccagcctaggagtggactgttgatataygcagaaacacacattgtgttagtctgttttcgtgctgctgataaagacatacccgagactgggcaatttacaaaagaaaaaggtttattgaacttacagttccatatggctggggaggcctcacaatcatggtggaaggtgaaaggcacatctcacatggcagcagacaagagaagagagcttgtgcagggaaactccgtttttttttttgttgttgttgttgttgttgttttgagacagagtctcactgtgttgccctggctgggagtgcaagggcatgatcttggctcattgcaacctccacttcctcggttcaagcaattctcctccctcagcttcccaagtagctgggatt

SEQ ID NO: 773938 - DNA, 605 bp, Homo sapiens
agctgaaacaatctttttttccctttctctagagaggcatgtgaacactcaccacacttcctaagctagttctctttggctaaacctcaagctcttgggaaagaggtggataaccagagttggccaagccaggtgctgtgtgtgggtggtttctggggcagcactggctgcagttagcagtgtccccacacaaagatggaaccacctcaagacaaggtgtcctgtgctgtccccayagccttgcttgtctgtgcagacccagcactcaagatgtcccccaacccacccctgggtgaactcccctgtgctcctgtttggccctccaccataacacacttctcttggcagaagagaaggaaactaggagttgctgagcaatctgtgtcttcccttagcccagggccctttgcttccagcagttggctctccttgttctcagtcttcttatcctagttactagagctttcttatgcatcttaatttttcttttctggttccttgaagctggagctggtattcaagaagagttccctgccctctaaagcagggaacagtcagtgagagcagtcagtctcactgtggaagttaggtccaagcagggggaa

SEQ ID NO: 773939 - DNA, 601 bp, Homo sapiens
cgccaggcctaatttttatttttaattgtaaaatgacaagttagtttgtatatattcatggggtacaaaatgttgttaatacttatgaatttaatgtgaagtaatgaaatcaagtgaattaacatatccatcatatcaagtacataactttttttgtggggaaaatatttgaaaaatatttgaaatttaccctcttggagattttgaaatgcacaatacaatacgatttactayattcatcatgctatacaatatatatccaagaaaaagaaatgtactttttctattcgaggctttgtatcctttgaccatcatctccctattccctttgcctcctgcctctcatagtcaccattccactctgtattcttttgagtttgatggttttagattttacaaaaaatgagaacatgtatcttatgttacttagtataatattctccaattccaaccatgttgtttgttgcaaagaagaatatcttcttttttaacagttttaaaatactttttcaagacatatatatatacacacacacacattgtatacacatacatacaacgtatacatatatgtatcaacacacacatacgatggagtact

SEQ ID NO: 773940 - DNA, 601 bp, Homo sapiens
cgccaggcctaatttttatttttaattgtaaaatgacaagttagtttgtatatattcatggggtacaaaatgttgttaatacttatgaatttaatgtgaagtaatgaaatcaagtgaattaacatatccatcatatcaagtacataactttttttgtggggaaaatatttgaaaaatatttgaaatttaccctcttggagattttgaaatgcacaatacaatacgatttactatattcatcatgctatacaatatatatccaagaaaaagaaatgtactttttctattcgaggctttgtatcctttgaccatcatctccctattccctttgcctcctgcctctcatastcaccattccactctgtattcttttgagtttgatggttttagattttacaaaaaatgagaacatgtatcttatgttacttagtataatattctccaattccaaccatgttgtttgttgcaaagaagaatatcttcttttttaacagttttaaaatactttttcaagacatatatatatacacacacacacattgtatacacatacatacaacgtatacatatatgtatcaacacacacatacgatggagtact

SEQ ID NO: 773941 - DNA, 612 bp, Homo sapiens
gctaagggtcagactgcctccttaagtgggtctttgacccctgtgtatcctgactgggagaaacctcccagtaggggtcgacagacacctcatacaggagagctctggctggcatctggcaggtgcccctctgggacgaagctcccagaggaaagaataggcagcaatctttgctgttctgcagcctccactgatgataaccaggcaaacagcgtctggagtggacctccagcaaactccagcagacctgcagcagaggggcctgactgttagaaggaaaactaacaaacaaaaaggaataccacatccactcagataccacatccaaacgtcaccaacataaaagaccaaggtagataaatccacaaagatrgggagaaaccagcacaaaatggctgaaaattccaaaatccacaatgcttcttctcctccaaaggatcacaactccttgccagcaagggaacaaaactgaacagacaatgagattgacaaattgacagaagtaggtttcagaaggtgggtaataacaaactcctccgagctgaaggagcatgttctaacccaatacagggaagctaaaaaccttgaaaaaaggttagacaaattgctaac

SEQ ID NO: 773942 - DNA, 582 bp, Homo sapiens
actacttggtaaataacgaaatgcaggcagaaataaagatgttctttgaaaccagtgagaacaaagatacaacgtaccagaatctctatgacacatttaaagcagtctttagagggaaatttatagcactaaatccccacaagaaaaagcaggaaaaatctaaaatcgatctracctcaaaattaaaagaactagagaagcaagagcaaacaaattcaaaagctcgcagaagacaagaaataactaaggtcagagcagagctgaaggagatagagacatgaaaaacagtccaaaaaaaaacaatgaatccaggagctggtcttttgaaaaaaatcaacaaaataggtagactgctagccagaagaataaagaagaaaagggaaaagaatcaaatagatgcaataaaaaatgatatgggggatatcaccactgatcccacagaaataaaaactaccatcagagaatactataaacacctctatgcaaataaactagaaaatctagaagaaatggataaattcctggacacatacaccctcccaagactaaaccaggaagaaatcaaatccttaaatagacaaa

SEQ ID NO: 773943 - DNA, 582 bp, Homo sapiens
actacttggtaaataacgaaatgcaggcagaaataaagatgttctttgaaaccagtgagaacaaagatacaacgtaccagaatctctatgacacatttaaagcagtctttagagggaaatttatagcactaaatccccacaagaaaaagcaggaaaaatctaaaatcgatctaacctcaaaattaaaagaactagagaagcaagagcaaacaaattcaaaagctcgcagaagacaagaaataactaaggtcagagcagagctgaaggagatagagacaygaaaaacagtccaaaaaaaaacaatgaatccaggagctggtcttttgaaaaaaatcaacaaaataggtagactgctagccagaagaataaagaagaaaagggaaaagaatcaaatagatgcaataaaaaatgatatgggggatatcaccactgatcccacagaaataaaaactaccatcagagaatactataaacacctctatgcaaataaactagaaaatctagaagaaatggataaattcctggacacatacaccctcccaagactaaaccaggaagaaatcaaatccttaaatagacaaa

SEQ ID NO: 773944 - DNA, 560 bp, Homo sapiens
ctctcaccactcctattcaacatagtattggaagttctggtcagggcaatcaggcaagggaaagaaataaagggtattaaaaaaaagaggtattaaaaagaggaagtcaaattgtctccatttgcagatgacatgattgtatattttgaaaaccccatagtttcagcccaaaatctccttaagctgataagcaactttagcaaagtctcaggatacaaaatcaacatacaaaaatcacaacmattcctataaaccaataacagacaaacagagagccaaatcatgagtcaactcccattcacaattgcctcaaagggaataaaatacttagaaatccaacttaaaaggaatgtgaaggacctcttcaaggagaagtacaaaccactgctcaaggaaataagagagaacacaaacaaatggaaaaacattccatgctcatggataggaagaatcaatatcgtgaaaatggccatacttcccaaagtagtttatagattaaatgctatccccattaagttaccattgactttcttcacagaattggaaaaaaaactacttta

SEQ ID NO: 773945 - DNA, 633 bp, Homo sapiens
acagtcctaataacagaatatcaagaaaatgataaaggaacaatgaagagagctgcaaaaggaaatagacaaatcaaataatcttatgaaattatagccaatatgttttcttcaataattaataggacaaataatcagaatatcaataaatacaatacagatgactttgaaaacacyatcaatttgattcaattgttatatatggaacacatcactcaaatatagcatgatgtacatttatttttaatgcacatgtaacatttaccttgataagatatatttggggtcataatgcaagtctcagcaaattttaaaagactcaaattatacaaatttgttctctgattgagataaaattcagttaaatacatttaaaatattcataaaaaataactaaatatttggaaaccaaatgacactcttttaaatgacctaaggaaaaaaccctagaaatttaaaagagaattagtgagtatgttgaagtgaatgaaaattaaacctcaatatatcacaatttgtggagtgctattaaagccataccttacgggaatgtttataccacttaatatctttaccagaaaataagaaagctatcaaatcagtaacatcaggattcacctaagaaactagaaa

SEQ ID NO: 773946 - DNA, 624 bp, Homo sapiens
gattataaatcattctactataaggacacatgcacacgttatgtttattgctgcactatttacgatagcaaagacttggaaccaacccaaatgtccatcaatgataggttggatgaagaaaatgtggcacatatacaccatggaatactatgcagccataaaaaagaatgagttcggccrggcttggtggctcacacctgtaatcccagcactttgggaggctgaggcaggcagatcacgaggtcaggaggtcgagaccatcctggctaacacagtgaaaccccgtctctactaaaaatacaaaaaattagctgggcgtggtggtgggcgcctgtagtcccagctactcgggaggctgaggcaggagaatggcgtgaacctgggaggtggagcttgcagtgagcctagatagtgccactgcactccagcctgggcgaaagagcgagactctgtctcaaaaaaaaaaaaaaaaagaatgagttcatgtcctttgcaggaacattgttgaagctggaaaccatcatcctcagcaaactaacacaggaacagaaaaccaaataccgcatgttctcatttacaagtggaagtacaacaatgagaacacgtggacacagggaggggaac

SEQ ID NO: 773947 - DNA, 624 bp, Homo sapiens
gattataaatcattctactataaggacacatgcacacgttatgtttattgctgcactatttacgatagcaaagacttggaaccaacccaaatgtccatcaatgataggttggatgaagaaaatgtggcacatatacaccatggaatactatgcagccataaaaaagaatgagttcggccaggcttggtggctcacacctgtaatcccagcactttgggaggctgaggcaggcagatcacgaggtcaggaggtcragaccatcctggctaacacagtgaaaccccgtctctactaaaaatacaaaaaattagctgggcgtggtggtgggcgcctgtagtcccagctactcgggaggctgaggcaggagaatggcgtgaacctgggaggtggagcttgcagtgagcctagatagtgccactgcactccagcctgggcgaaagagcgagactctgtctcaaaaaaaaaaaaaaaaagaatgagttcatgtcctttgcaggaacattgttgaagctggaaaccatcatcctcagcaaactaacacaggaacagaaaaccaaataccgcatgttctcatttacaagtggaagtacaacaatgagaacacgtggacacagggaggggaac

SEQ ID NO: 773948 - DNA, 624 bp, Homo sapiens
gattataaatcattctactataaggacacatgcacacgttatgtttattgctgcactatttacgatagcaaagacttggaaccaacccaaatgtccatcaatgataggttggatgaagaaaatgtggcacatatacaccatggaatactatgcagccataaaaaagaatgagttcggccaggcttggtggctcacacctgtaatcccagcactttgggaggctgaggcaggcagatcacgaggtcaggaggtcgagaccatcctggctaacacagtgaaaccccgtctctactaaaaatacaaaaaattagctgggcgtggtggtgggcgcctgtagtcccagctactcgggaggctgaggcaggagaatggcgtgaacctgggaggtggagcttgcagtgagcctagatagtgccactgcactccagcctgggcgaaagagcgagactctgwctcaaaaaaaaaaaaaaaaagaatgagttcatgtcctttgcaggaacattgttgaagctggaaaccatcatcctcagcaaactaacacaggaacagaaaaccaaataccgcatgttctcatttacaagtggaagtacaacaatgagaacacgtggacacagggaggggaac

SEQ ID NO: 773949 - DNA, 624 bp, Homo sapiens
catttcaataaatctgtgcttttcttttgttgctttgtttgtgtgttttgtccaattttttattcaaaacaccaagaatcgggataccctccatcagtaacaaaacctcaaaaggacaggccacaaaattaaaaacaaacaaatgsaattacatcaggttaaaaagcttctacgtagctaaggaaaaaataaaatgaagagacaacctacagaatgggagaatgtactttcaatctatgcgtctgacaaagggttaatgtctagaatatataaggaactcaaataacccataagaaaaaatcaaataatccaattagaaaatgggtaaaagatgtgaatataaatttttcaaagaagacacacaagtcgacaatggatataagtgaaaatgttcatcatcactaatcatcaaggaaattcaaataaaaacaatgagctatcacctcaccccacttagaatggctattagcgaaagacaaaaaataacaaatgctagtgaggatatggagaaaagggaaattttatataccgtttgggggaatataaattagtatagccattatgaaaaacggtatggagatttctcaaaaactaaacagagaactaccaaatgatccagcaatc

SEQ ID NO: 773950 - DNA, 627 bp, Homo sapiens
cagaagaagaaaatcaatggtatttatatgtaaagataaattaaggacttttaactattgactaatgaaattttaatttagtcattttagtcagcatgggtcaaaggagctatgttacctgactttggaagaaaaagccragattgcaatttttcctcttcactcactttcacttgtacaatcttgacaaaatgctttggtttctttgcacttcaggagaaatatcaaatttcttctttaaatttataattttgaaatttaggagacatgttggaaagttgtcagcagatagcctgactcaaaatgagtgctaaataaaatgttagcttagtctgtacttgataagataatgctttgaaaagattggccaatttgatttttgctgggtattcatccttagcccatttcttttctctcttcattctcatccttctctcctatcccttttataagcaactcaactttatacatgtattacctcagaggagagatgatacagcaaaatatagaaattgatttttggcttttatgttttaagaataaaaacgttttccttgggggaataatttggaagaaaaaatggaagtattgaagagccaggtgagtctccagataggagaaaattat

SEQ ID NO: 773951 - DNA, 621 bp, Homo sapiens
tgtctattaacacaacaaatagtaaaggtttttttcctattactaaatctcaaaatcttgactgttaatgtaagatcagaactatgcacttccatatctatgtgaatttctattttttctgctttgataatttcaatgaaattagtacattttgaagctggagaaaaaatggctttgagtaacatgcattgatttacttaactttatacaactaaaggaaagcacttccaagtgtttcagggtgaattttcaacaatctccataacacataacataaagacgacctatttaaatcttatactaattcatgtgaggtaatttgcattayatgctgatttggtttcatcaatatcccaacatcagcatttaagattcttctttttttatgtatttgacataacaaagaagaaagtggtctttttacacttgacaaagctatattatacaaagaaacaaccataaacaatatatctctgtgctgcctttcaactcactttgtttttcctccttaaattacaactcaatttcaaagtatcactgacaatttacatataacagcaatatcataacatggactgcttgcctaaaatgcagtggagaggctgtcaagtcagcttgttt

SEQ ID NO: 773952 - DNA, 550 bp, Homo sapiens
aaaccaaccaccacatgttctcactcataagtgggagttgagcaatgagaatacatggacacagggcagggaacatcacacaccagggcctgtcagagggttggggagctaggggagggagaaataattaatgtagatgatgagttgatgggtgcagcaaaccaccacggcacgtgcatatacctatgtaacaaacctgcacgttctgcacatgtatcscagaacttaaagtataattaaaaaaaaaaaaaacatactgtatagcccaggtacgtggctataccatctggctttgtagaagtataccctaagatgttcatacagtaacaaaattgcccagtgaaatatttcccagaatgtatccttgtcattatgtgacacatgactatagtagttacctctaggtaagtaatcaaaaattttaatttccaaaattgtcatttttatcaagctgtctaaaattatatactataataagtactatatgataaaagttatggacccatgcatacatattctcatttcacaatttagaaaatgaatagcagta

SEQ ID NO: 773953 - DNA, 550 bp, Homo sapiens
aaaccaaccaccacatgttctcactcataagtgggagttgagcaatgagaatacatggacacagggcagggaacatcacacaccagggcctgtcagagggttggggagctaggggagggagaaataattaatgtagatgatgagttgatgggtgcagcaaaccaccacggcacgtgcatatacctatgtaacaaacctgcacgttctgcacatgtatcccagaacttaaagtataattaaaaaaaaaaaaaacatactgtatagcccaggtaygtggctataccatctggctttgtagaagtataccctaagatgttcatacagtaacaaaattgcccagtgaaatatttcccagaatgtatccttgtcattatgtgacacatgactatagtagttacctctaggtaagtaatcaaaaattttaatttccaaaattgtcatttttatcaagctgtctaaaattatatactataataagtactatatgataaaagttatggacccatgcatacatattctcatttcacaatttagaaaatgaatagcagta

SEQ ID NO: 773954 - DNA, 414 bp, Homo sapiens
ttttaggctacatgttccctgtttaaccaccaagaacaaaatatcaaaatgagttagtgttttgttttaactctctctacaactcctctaactccacagccatacaagtgtgtgtgtgtgtgtgtgtgtgtgtgtgtgtgwgagagagagagagagagacagagacaaagacagaggcagagacaaacagagagaaagagagatgtaataataaataatggtcagtttcttatcatgttactctagggaaggaagacctagaaaaaaatttatttgtgtagtatttcatcctgagtctcctcattactaacatctctccgagtttcaattttaggctgctcactctctccatagtcttctcacacttgtcaaacttctccccaggtcacctatacaaccttcagacagcattct

SEQ ID NO: 773955 - DNA, 604 bp, Homo sapiens
aactacctctcaacctcaaagtcaaattcactgtatcaggccaaactgaaggaccagctaaaggttggcccttctgataggaaatgagagtgccagaattccaggtcaaatagaaggcacagaacagaggttattagggtgaaagtggataacattcatgctcagagccaacctggacaagaatgtcaaggtaasacattcttggaaaggaaagaatatcacatgcatccattctggatttagggtttggggtatagcaaggaaaggggatgggaaaattatcaggcagttgaacagatgggcagatcaatagaacaactggagtttgattgttgacctgagaacaggaactctaccatctgccatggctttaaatatccttcctggtgtaagttgataagaatatggaatgggcagctcctcagagggagacaggattttattagttgtcaggcactatcagggaaggagctaacgtttgtaaggccatgcgccttagatacgtaagctcactaaatcttcattataattccagaagggtaaatattatgcctccccaccatcgccacttttcttgagccaggaaatggaggctcagaaggtt

SEQ ID NO: 773956 - DNA, 540 bp, Homo sapiens
agtatgtctccctacaaaggggttttaatataaatataacgtaaatatatttaataaatttataaatataactaaatataaatagcaatttcaaaagaatatatagagcttagtaagtccaccacagagtttttgttatgtgaacttgtattctttaactgagcctagcatattgacttgtacattatatacatttgataaatgttgcggaattaaccatgtggaatattctacttgtaagaaaaaaaattaacctcggatataaaatcacattaattattttcaaatttawttgttatcacattaaataattatcacattcaattaattaattattttttgagagagggtctcactctgtcacccaggctggagtgcagtgatgtgattttggctcactgcaacctctgcctcctgggttcaagcgattcttatgctgggactccacaagtagcctcccaagtagctggaactacaggcacacatcaccatgcctggctaatttttgtatttttagtagagatgaggtttcaccatgtt

SEQ ID NO: 773957 - DNA, 552 bp, Homo sapiens
atagttttggttctgagctggggaacacaatttccttgaatgttatagtttttatattctattttagtgctataatttttccaagcaataaataatgtacttctactgaattcaaaattacagtaaacgtgctctctgcagataatttaacacctgtgtatttctatgccctacaactgcagactgcgtatctcagaggcttaaggatctgaattatattgcaaaaataatgagctgaagactgattgtaaatgtatatttattaacatagccactaattttttcgactgcagagaakaaatggatcctccagtgtgagaccctcagtaactacagcaatatgttggatttagtaggtttcgatttttcaatgattaaaactgaaatcacagctaatattctttttcgggggattaagcagggagagtgtatcagcaccagcccaatgcgagggcactggcgaggtgtaccttggatgtatggctccagcgctggggagggctgaatagagagtaaagctgagccagggccctgacaaagaaccacacatac

SEQ ID NO: 773958 - DNA, 509 bp, Homo sapiens
ctatcctgacccaggagtcttggcatgaattgcctctggagaggcttgtgaatatggtctaagtttgtttcctttgtttatttcatcaaacactttttgattgcatactgggcaccagctcccaggaggcaaaggccctagctgcctagctcttgatgactagtggggcagacagatgggctctgcaacagtgtgggagtaaattgaaggtgggttgagcttctgaggacagttggaagccatgtcgaggctctaacatgaaataktggggtctgggtgtggggaccaccttgaatttttgttttatcacacagttggtaatgcagaggctcccctctgccatatcctgaagacagacatcatagggttagatcctcaaatgcacgagacggctttttccaaaactcagttaatgtcactttattaaccagcgaaatagataataaaaaagaaatgaggtgaacacattggacaaaaccattacttgccagtgacatgattctctacct

SEQ ID NO: 773959 - DNA, 576 bp, Homo sapiens
ggctgcagcagaggctgtctttacggtaggggcagaggctgcacacgctgatcctcagcttttaattaatccacccctccctggccccttcccaggaaaggtcagagatggattctgcagaatgaggacaggactcggtgtgcgtcaagccaggctctccaaatgcctttcagaagaccttgcccaagaccccattaaattttgcttggagcatggcctccatcactgtgcaggtcttcatgcctacctggccatgacagggtcaggacatgaccttgaaagtgtggcaagaaaaygaaagccacgctggcctccatcccaggagaagacctttggtgtgagcaggggagggtcatcttcagagttggcctcagaggcagtgcagggcactcttgctctgcggtgcctgagcttggctcagttgagcacaggtccaaggcggctgtggacacaggatcaagtctgacacaggccttgaccctgattcacctcacccctgcttggctcccaggggaatgcgctgctgacctcagactgggaacttttttttttttttttgagttggagtctcactct

SEQ ID NO: 773960 - DNA, 633 bp, Homo sapiens
ctgatcagcctgccaggcccttgtaggtcagggctgtgtctgactcatctcctgcagctccaacagccagcccagcctgcagccttcacagtgaccagctcttacctctggtgcattggctgctgctggatgcctgttcccaacttgcatctatcacataagggcaactacttgcagaagggacagagaacagagcaaggtggcctgcagacgtgcaacaggacagcgagaagtttggagcctgttccatgggcagtaggtgcagatgctgtccacaggccagacttccctgccgagtgcctggagcaaacacctgtgacattgacatcagcccctcttggatgccctgtgattggccagagctgtcartcaaggagttctgctgcctcccctgccaaaggatgcccatgtgactctgatgtggccaatcagagtctttctttgggatttgctatggacacagggggaaagagatagtttttctttcttaagacttgagctgtgagggtcttaaacatctggaactgcaggggactattttactttcttgctgaaagagacagcctgaagatgaggccaaaaggaggtgggcagagctaagagatggagagacggtcagagggacccagatag

SEQ ID NO: 773961 - DNA, 609 bp, Homo sapiens
atgtagctccaaaagctgaattctcattttttaaacacttcatgataatgtgaaaaaacaactttttatggcccgatcatggctgccctgttggatgtagatgctttgctgatccctcagtcacaagccccatgaaatacttatgaaatgtgtgaaaggcttctgtggtagcccacaggaccagggacagcgtgggtgtgaagagcatcaggaggagagcctatcagtcactcaccactgtggctgctgggggctgatggcaggaccctyggtgggcagcgaggtggcaggggccctgccaccaacctgcaccacccctgaccccagggccaggctcacccttgggaggccctgggctaaaacagtggtggtacctcccaccccaacgtgtccctatttacgacatcataaagtaaatagaaaagtccagcagagtgctgcttttaccaacaataactgctttatacttttaaaaaatcacatgggcgccccctcattttggtgccaccgtcttgcaaaggcctagacttgtgctttttcccatgaccagccacccttctcccaacctcggaggacatcctcctccttcagtccctcctgccacactct

SEQ ID NO: 773962 - DNA, 609 bp, Homo sapiens
atgtagctccaaaagctgaattctcattttttaaacacttcatgataatgtgaaaaaacaactttttatggcccgatcatggctgccctgttggatgtagatgctttgctgatccctcagtcacaagccccatgaaatacttatgaaatgtgtgaaaggcttctgtggtagcccacaggaccagggacagcgtgggtgtgaagagcatcaggaggagagcctatcagtcactcaccactgtggctgctgggggctgatggcaggacccttggtgggcagcgaggtggcagggsccctgccaccaacctgcaccacccctgaccccagggccaggctcacccttgggaggccctgggctaaaacagtggtggtacctcccaccccaacgtgtccctatttacgacatcataaagtaaatagaaaagtccagcagagtgctgcttttaccaacaataactgctttatacttttaaaaaatcacatgggcgccccctcattttggtgccaccgtcttgcaaaggcctagacttgtgctttttcccatgaccagccacccttctcccaacctcggaggacatcctcctccttcagtccctcctgccacactct

SEQ ID NO: 773963 - DNA, 687 bp, Homo sapiens
aaggatcctaggaggtttcttcccattttgtgaattaatcttctctccctttgtaggtgacctttaatcgtgatccctgctccccgccttgtctgcctccctccagcccttgaattctggaaattagagaacaaagccttatcctaacagctcacagtttaatcagcttcaatcatatctgcctggaaagcagtgtcgtgcagtctgttggaccccaattcttggcctcgttccatcactttattttttattttttttgagatggagtctcgctgtgttgcccaggctggagtacagtggcacgatctcggctcactgcaacatccgcttcctaggttcaagcgattctccttcctcagccccccgagtagctgtgattacaggcacgcaccaccatgcccagctaatttttgtatttttagtagagatggaattggccaggctggtctcgaactcccagcctcaagtratctgcccaccttggcctcctaaagtgctgggattacaggcatgaaccaccgcatccagcacatcacttattttgtctcttagggctatgtatgttacttctctgagcctcagtttcctcaccaaatttcttacgtgactttggtgaggatgatgttaggataatttatctcatcatccacatctgcatcctcagccctaagccctaaacctggcata

SEQ ID NO: 773964 - DNA, 578 bp, Homo sapiens
gtttggaattggaacttatgttgaaaagggaagcagagcataaaagtttggaaaattcatagcctgacgatatggtataaaggaaaaaaaaaacattttctgaggagaaattcaagctggcggcagaaacttgcataagtaattagaaaccaactgccaagaaaatggggaaaatgtctccagggcatgtcagaggtcttcctggctgaagcccttyccattacaggctgggaggcctagaaggaaaaaatggttttgtgggctaggcccagcatcttgctgctttgtgcagtctcagaactcggtcccctttgtctcagctgtggctaaaaggagccaaggtagagctcaagccatggcttcagtggggcaagccccaagccttggaagattgtcagctttgatgtggtgttgagcctgtgggtacacagaagttaataattgaggcttgggaacctctgcctagatttcagaagatgtaaggaaatggctggatgttcaggcagaagtttgctgcaggggcgagaccctcatggagaaacactgctagcacagtgtgaaaggaaaatgtgtgttgt

SEQ ID NO: 773965 - DNA, 578 bp, Homo sapiens
gtttggaattggaacttatgttgaaaagggaagcagagcataaaagtttggaaaattcatagcctgacgatatggtataaaggaaaaaaaaaacattttctgaggagaaattcaagctggcggcagaaacttgcataagtaattagaaaccaactgccaagaaaatggggaaaatgtctccagggcatgtcagaggtcttcctggctgaagccctttccattacagrctgggaggcctagaaggaaaaaatggttttgtgggctaggcccagcatcttgctgctttgtgcagtctcagaactcggtcccctttgtctcagctgtggctaaaaggagccaaggtagagctcaagccatggcttcagtggggcaagccccaagccttggaagattgtcagctttgatgtggtgttgagcctgtgggtacacagaagttaataattgaggcttgggaacctctgcctagatttcagaagatgtaaggaaatggctggatgttcaggcagaagtttgctgcaggggcgagaccctcatggagaaacactgctagcacagtgtgaaaggaaaatgtgtgttgt

SEQ ID NO: 773966 - DNA, 479 bp, Homo sapiens
ttgggtaattacatgttttctttctttgagcttactgattctttcctgtttgatcaagtctactgttaaagttttctaatgagtttttcagtttaacaattttatcctgcatttcaaggatttcatttttttattattttgatttctttctgaaatgtctaatattgtgtctgcattattttccaagtttcttttagttttttgattatggtttatgtgattcctgaacttttcaaagagatttattttgaatttgtygtcagatatttaagcatcttcgaatctttttgtgcattattgaaacttgattggtttcttttggagatgtcatatttccctgttttttttttttttttttaacaatacttgctgtttacattgatgcctgcatatttaagaagatggccacttgattcagctttttaatgtgttatgcagtggtgttaaaatattactgcttaataccagagctgaatcac

SEQ ID NO: 773967 - DNA, 645 bp, Homo sapiens
ttaacggattggatgatacctgcccacaatcatgagagatatctttagtcagtctactgatttaaatactaatctctttttaaagtattgtaacgtttgtcacagaatcataaaaatatctatcctaaaattcatacaaaccccaaaatagccaaataaatcataaactaaaagaagaaagccagaggcatcaaattacctaatttcaaaggatattaaaagcctgtagtaactaaaacagcatggtagtartacaaaaacagagacatagagcaatggaacagaatagagaaccaaataataaagccacacacctactgccacctgatttttaatgaagtcaggaataacaagcaatgaagaaagaaccctctattcaataaatgatgctgtgataattgtatagtcatatgcagaagactgaaatttgacctcttcctttcaccacatacagatatcaactcaaggtgtattaaatacttaaatgtaaaatctaagactatataaatatgagaagaaaacctcagaaataccatcctggatacaagccctggccaaagttttatgacaattaccccaaaaggaaattgtaacaaaaaaaaaattgacaagtgagacctaattaaactaaagaacttgtgcaca

SEQ ID NO: 773968 - DNA, 645 bp, Homo sapiens
ttaacggattggatgatacctgcccacaatcatgagagatatctttagtcagtctactgatttaaatactaatctctttttaaagtattgtaacgtttgtcacagaatcataaaaatatctatcctaaaattcatacaaaccccaaaatagccaaataaatcataaactaaaagaagaaagccagaggcatcaaattacctaatttcaaaggatattaaaagcctgtagtaactaaaacagcatggtagtagtacaaaaacagagacatagagcaatggaacagaatagagaaccaaataataaagccacacacctactgccacctgatttttaatgaagtcaggaataacaagcaatgaagaaakaaccctctattcaataaatgatgctgtgataattgtatagtcatatgcagaagactgaaatttgacctcttcctttcaccacatacagatatcaactcaaggtgtattaaatacttaaatgtaaaatctaagactatataaatatgagaagaaaacctcagaaataccatcctggatacaagccctggccaaagttttatgacaattaccccaaaaggaaattgtaacaaaaaaaaaattgacaagtgagacctaattaaactaaagaacttgtgcaca

SEQ ID NO: 773969 - DNA, 507 bp, Homo sapiens
tagatgtatttagcatccaatggagataattctaagaagtgaagtatttgtggtcttgtttctacaggtttttttttttttacatgactctcattaatggggccttttttcctgtttataagttaaagcggctcgttttacccaaaattttgtatatgaaaaatatttcagccctgggttgaaatcatttgactccaaagaaagctttcttttgttatttcagacatcagggagcaccaccacacctggaaaatgttaaatgaaattcttggcttgctgttttgtatgacacagtagtgtaaacttarattgtaaattcatgggaggttcagcttgtggttagggattcttaagaaagtgtatttattttttcttaaccaagtgccaaattcaaaaccagcgaatttgcttgttatcttattttttgtggcaagattatttattttgtggttctatatttatgtagggggttttctgtcctctctgaacacctttcacaaaagaatc

SEQ ID NO: 773970 - DNA, 625 bp, Homo sapiens
cgggtgccactgtgctgtaatcccagctactcaggaagctgtggctggagaacctcttgaacctggaagccagaggttgcagtgaaccaagatcatgccactacactcaagcctgggtgacagagcaagactcagtctcaaacaaacaaacaaacaaataataatactactaggaaacttcaatacacattttcagcaatggacagacagatcatccagacagaaaatcaataatgaaacatccaaattaaagtatatgttaggtcaaatggatataaaagacatatatagaatgttccacccaactgcagcagaatacacatttttctcaagaattaatgaaatattctgctggacagatcatatrttacgtcccaaaagaagtcttcagagatgttcaaaatttaaaatcatttcaagttcttttcctgaccacagtggtatgactagaaatcaataacaggagaaatcctggaaaattcacaagtatgtggaaattaaacaacatgctcccgaacaaccagtgggtcaaataaaaaactaaaaggcaaattttaaaatatcttgagacttacaaaaaatggaaacacaacatacaaaaacttctgggatgctgcaatagcag

SEQ ID NO: 773971 - DNA, 636 bp, Homo sapiens
gcaaaccaaattcaatggcacattaaaaagatcatataccagaaatccctgatgaacctagatgcaaaaatccttaacaaatactagcaaaccaaatccaacagcacattaaaacagcacatatatcacaatcaagtaaaatttatccctaggatgcaacaatggctcaacatacacaaatcaataaatgtgatataccacattaacaacctgaaagacaaaaatcatataattctttcatagatgcaaaaatgaagcatttgacgaaattcaacatcctttcatggtaaaaatgctcaacaaattaggtatagatgataataaaggccttaaatgacaaactcacagctaatattatactcaacagtgaaaagctgagagcttatcctttagraacaagagaaagatgcccactcttgctgcttctattctatttttataagggtgtgctatttagtgtattgtggctctgacataaggatggacagaatggcaatgccagagacagacccagtactatatggaaagatggtgagctgtgtcaattagagggaaaaaatggtcctggggcaactaattacccatctgaggaaatcatcagtttgaaacccactctcaatccaaaacaattccaga

SEQ ID NO: 773972 - DNA, 602 bp, Homo sapiens
tttttttttttgtttgtttgtgtttgtttttattgatgatggaagtgatcatgaatggtgagtgaaccactgaatcatcttttgcttcctatggggatctatctttcagaagtcaaacagataaattatcatcttgaaaagaaagttatttgttatttaggatttttttctctcttctcatcaatkagcttttttttaaaatttgacttaaattcttcaagtatgaaacagcagaaaaaaaaagagaggcaatattctcttatagctccttgggaccatgcatggagttccatcactaagtggtgatatttctttttaactttatttcagtcatctagtttatttcagcatcatcttgtcaatgtccagatcatcagcatgtggcatgtgctgaactgagttgcttgctgcttctgcatatgtctggtaggaaacccaattttccgcatttatgcctattacccagcattctttctctcttttatttcactggaaggtaattaaaattgcttttgtcaaccagtcttcatgggactttggagttttgcataaggatctggtgttcactatgagggattctgggagctctttctttttgacaa

SEQ ID NO: 773973 - DNA, 529 bp, Homo sapiens
aaaaaaaagaaggttgttaacaaacattgtgtttcttcaaaaattatggttagattacacttgccatattctccagaatctaagaatgacctatatttggttggcaaaatgtgagcagaaggaacctgtgacctctcttatagaagttttaacataaaatgcacaatataccatgtcccttttttctgccttgataattatggaagtgcacttcaagaagaagtgtccctcaacttgcattcctaagtgactatggtaaaaaaagccccctgcccaacacatakggcttgtaccatgtgcaacaaataaacatttgttgtattaagccacagagctctggaggttacttgttacagccctataatctagagcatccagactgatgcacagactaatatgcattaacataggaaaatagtcatcacgtgattgtttaatcaaagctagcatgatcaccattatgttgagatctcaagtcagttgagtaacatactcaaagctgataaaacacaatttgctctttcagcta

SEQ ID NO: 773974 - DNA, 630 bp, Homo sapiens
attatgagccaatatgaattaaagaatacagtcaattttttgacacccccgccccactatcccaagcaaatggacaaaatttaatgtgtaaacctcttagacaatgagataacaagctcacgtatttggagaaaaaggaaattattcagcaaatcagtggctattacggaggctgtcaagggttctttagccagggagctcagaccagcaacactagcatcacctggaggcttggaaggcacacacatccatagcgcaccccatacctgctgaatcagagtctttgtagcagggcccgggagtgtrcccttggcaagatctccaagtaatgatgcacactaaagttttagcagcactctactgcagcaatggttctcaaattttagtgtccatcagaatcacctggaggattgttagaacagattgctgggcttcacctccagagtttgtggtgcatggatttggaggagggccagaaaagtctgcatttctcacagccttccaggtgatgatgatgccattcaagatccataattggaaatagttgtacgtacccatccagagataaatgtattggtttatttttttctttgcagatgaatccttaaatagggattttttttaaattaa

SEQ ID NO: 773975 - DNA, 643 bp, Homo sapiens
caacaaaagaatgtattttgggtgatttttctttaggacatgcccacacattttatcatgatacatgtactattccagaagggcggggagagtgggactgttgaaagtccatgtaaagaaatcataatgtgaagcaagcaacaagagagaaaacccttcttatggtttcacatctatacatcaattgctacgattttttttaagttttagtgtaagatatttaagttcatgtttgcatatcagtgtgcagcgtagaaacatacatatttctccgggctcaaccacacatgtggcaatgtctctccagcagcrgactcctctcacagtaagtctaaggagcgttggccgaatgagacttcacattcagtgaatttccactatctcttcagtttctccgtgctactgaaatctcattgttccactcagaatttatcttctcctaggaatctctttcaaagcatttcactgactatgtcaagccagagtaagtaaaacgctgatgagcttggatttccactccagtctctcagcctttctgtcttatagtttggcatctcatttctacatgatatcagatgccatattagaaattcctgcttgatcttgagatacatcaaaggtactgactgacaggtcattaggt

SEQ ID NO: 773976 - DNA, 607 bp, Homo sapiens
tatgaatattctgagtttaatttacatttctccaaaacaaatatgcattttcttcccccaggtatgttagactctaccaccctggggccaaattaagacaaatattcatcttaggagtttgtgaagaagtcagataggtaatataatatttttattttttatgaaagtaaaatacgtatgcacaaaaatgtgcacgtattacaatgaaagggaaaaatgaattttcacaaactaagcatatctgtgaagccagtaccgaaaacaagaaacagaaaattataggtacctagatgccccccacacgctctgccgtgtgtgtgtgtgtgtgtgtgtgtgtgtgtgtgtgtrtatatagtttgtttgcttttgttttatttttcttggccctgagcaaaggctgagttcaggaggtgccctccacgtctcctgtatgggtttagctcacctgtcctggggctgggctctgttttctcacctgttggggtcccagatattatccacccacggtcccaggttgtatccactcttctgtctgtgattggccaaattacgcttagggaattagaaatatgtaaatatccccagggcaaacattgtttctagcact

SEQ ID NO: 773977 - DNA, 592 bp, Homo sapiens
tttgacatgggctttctaaacactgaagttataattatataaacatttttgggccgggcatggtggctcacgcctgtaatcccagcactttgggaggccaaggcaggcggatcacgaggtcaggagatcgagaccatcctggctaacatggtgaaaccccatctttactaaaaatacaaaaaatcagccaggcatggtggcgggcgcctgtagtcccagttactcgggagactgaggcaggagaaaggtgtgaccccaggaggcggagcttgcagtgagctgagatcgcaccactgcactccagcctgggtgacagagcaagactccgtytcaaaaaaaaaaaaaaaaaaaaaaatttctggctctgttttagtttcatggtggtggaaattatagccataaaaatcctctaactgtatgtattatagggagaaaaatgacattaatcctgaacaatgggtaataattgagacgtgttgtcaagcagtgcagtgacaaaaaataaccttgctgatctcctctgtatctttgaataattatcagctataaaaaaggaataggttggtgctataatctttttgtttttattggg

SEQ ID NO: 773978 - DNA, 624 bp, Homo sapiens
acagagtcatccagtgatttaaatggtgcttgtggatccagtgagtttaggaatgagagtcaaccattgcatttggcaatgtaaagagaaatgatattgtatttaaagggacatatggggttgaaggaaatattgttgaaaccgagatatgttacarcatattatagaatgtttgtatatcctgagaataattcaatagaaagggggaaaattgaggatgcagaaatgagacaaacacctggaagagttaaatacttggatgagcaagtagtgataaggtccagaatccatgtggaacaaggagaaagaaagcgtcttccaatagaggggactgaacacacaggctctgagcagaaatattggtaaattggattttacagaagatggagttccctttgattgttttatttttcttattgaaataagaagtcacacattgatgggaaggaaggggctgggagctagaagtgagcttactgaggaggtgtaaaatagttatctcaaaaaaaaaaagaaagaaaaagaagaacagattgacgagggaattacagaatttctggacatcacttaggtagccactgaggtcagcagtcatgaatataagatgaggccatttggtagttt

SEQ ID NO: 773979 - DNA, 624 bp, Homo sapiens
acagagtcatccagtgatttaaatggtgcttgtggatccagtgagtttaggaatgagagtcaaccattgcatttggcaatgtaaagagaaatgatattgtatttaaagggacatatggggttgaaggaaatattgttgaaaccgagatatgttacagcatattatagaatgtttgtatatcctgagaataattcaatagaaagggggaaaattgaggatgcagaaatgagacaaacacctggaagagttaaatacttggatgagcaagtagtgataaggtccagaatccatgtggaacaaggagaaagaaagcgtcttccaatagaggggactgaacacacaggctctgagcagaaatattggtaaattggattttacagaagatggagttccctttgattgtttyatttttcttattgaaataagaagtcacacattgatgggaaggaaggggctgggagctagaagtgagcttactgaggaggtgtaaaatagttatctcaaaaaaaaaaagaaagaaaaagaagaacagattgacgagggaattacagaatttctggacatcacttaggtagccactgaggtcagcagtcatgaatataagatgaggccatttggtagttt

SEQ ID NO: 773980 - DNA, 557 bp, Homo sapiens
tctggtttccagacacctcctgattcaacagggatgtgttgcattagcactcagagtttctaacatagtagcaaatctacatctttactctatttttccatctcattagtaggaaggaaggaaggtaacttaatagaggaggacgcagagaattctaacagaattgccagctcttttttttttttttttttttttttctggggggctttaagcctggtgcttgcagcaraaaaaacccttgaaattcttgaagctaggaagctaaggtttctgaaggaatgaatttgcactgcacacataatctataatttattaccctgcttcaatggtcattattgaaatttgattgtaatgcttagtggcgttaacatcccttccacatctccctaacaacatttatggtcagtaataatattggttcagtgcttgagctgtgctctgaaaaatgaatctgctaaagctcatcttgcctcattacttctaacaaggctcctgtagtcatgtcaaactccggtgacatgccaaacagaacgacatcttttaaatattatctctga

SEQ ID NO: 773981 - DNA, 557 bp, Homo sapiens
tctggtttccagacacctcctgattcaacagggatgtgttgcattagcactcagagtttctaacatagtagcaaatctacatctttactctatttttccatctcattagtaggaaggaaggaaggtaacttaatagaggaggacgcagagaattctaacagaattgccagctcttttttttttttttttttttttttctggggggctttaagcctggtgcttgcagcaaaaraaacccttgaaattcttgaagctaggaagctaaggtttctgaaggaatgaatttgcactgcacacataatctataatttattaccctgcttcaatggtcattattgaaatttgattgtaatgcttagtggcgttaacatcccttccacatctccctaacaacatttatggtcagtaataatattggttcagtgcttgagctgtgctctgaaaaatgaatctgctaaagctcatcttgcctcattacttctaacaaggctcctgtagtcatgtcaaactccggtgacatgccaaacagaacgacatcttttaaatattatctctga

SEQ ID NO: 773982 - DNA, 557 bp, Homo sapiens
tctggtttccagacacctcctgattcaacagggatgtgttgcattagcactcagagtttctaacatagtagcaaatctacatctttactctatttttccatctcattagtaggaaggaaggaaggtaacttaatagaggaggacgcagagaattctaacagaattgccagctcttttttttttttttttttttttttctggggggctttaagcctggtgcttgcagcaaaaaaaacccttgaaattcttgaagctaggaagctaaggtttctgaaggaatgaatttgcactgcacacataatctataatttattaccctgcttcaatggtcattattgaratttgattgtaatgcttagtggcgttaacatcccttccacatctccctaacaacatttatggtcagtaataatattggttcagtgcttgagctgtgctctgaaaaatgaatctgctaaagctcatcttgcctcattacttctaacaaggctcctgtagtcatgtcaaactccggtgacatgccaaacagaacgacatcttttaaatattatctctga

SEQ ID NO: 773983 - DNA, 557 bp, Homo sapiens
tctggtttccagacacctcctgattcaacagggatgtgttgcattagcactcagagtttctaacatagtagcaaatctacatctttactctatttttccatctcattagtaggaaggaaggaaggtaacttaatagaggaggacgcagagaattctaacagaattgccagctcttttttttttttttttttttttttctggggggctttaagcctggtgcttgcagcaaaaaaaacccttgaaattcttgaagctaggaagctaaggtttctgaaggaatgaatttgcactgcacacataatctataatttattaccctgcttcaatggtcattattgaaatttgattgtaatgcttagtggcgttaacatcccttccacatctccctaacaacatttatggtcagtaataatattggttcagtgcttgagctgtgctctgaaaaatgaatctgctaragctcatcttgcctcattacttctaacaaggctcctgtagtcatgtcaaactccggtgacatgccaaacagaacgacatcttttaaatattatctctga

SEQ ID NO: 773984 - DNA, 567 bp, Homo sapiens
  misc_feature 1, 2, 3, 4, 5, 6, 7, 8, 9, 10, 11, 12, 13, 14, 15, 16, 17,18, 19, 20, 21, 22, 23, 24, 25, 26, 27, 28: n = A,T,C or G
nnnnnnnnnnnnnnnnnnnnnnnnnnnnccaggaagtccctgacctctggcggggcaccccggcctcctcaacctccccctgaaaacctggccacctgtctctgtctccagggggacttttgcctgttcggggtgcctttggtgggtgagattcacaacctgggtggaagccaggarctccatgaccccctgggttcccgcacggtagcttccgggagggccctgacctctgccagagcaccccagtctcctcaacctgcccctgatagcctggcctcctgtctccattccccgggggaattcttgctgcttttgggtgccttcagtgggagagacacacactccagttgggagccagacactccacggccctgagggtaggacgtgtgggctgccaggaagtccctgacctctggcagggcacccttgccttttcaacctccccctgaaagcctacccgcctgtctcagtcccccatggaacttcttgtcgctttggggtatcttcagtgagagagaaacacacccggggtggtagccagggactccacgaccccacagattgggc

SEQ ID NO: 773985 - DNA, 499 bp, Homo sapiens
gatccgaaacccaacccaggttggaggtagaagtccaggttccccgtgtggtttctactgacaatgtgtgaggagaggcttgttgtcagccagtgagggttaatgtcctgtctttttctgacatcactctttttttttttttttttttaatttggagacagagtctcactctgttccccaggctggagtrcagtgacgcgatcttagctcactgcaactaccatctcccaggttcaagcaattcttgtgcctcatcctcctgagtagctgggaccacacccagctaattttttgtatttttagtagagacggggtctcgctgtgttgcctgggctggtctcaaactcctgtcctcaagtgattcgccctcctcagctttccaaagtgctgggatttttgggatgagtaaccacacccagcatttttctgacaccactcttgcagatgtgtttgagcatctcattatagcctcatgaggttggaaatctagctccccctg

SEQ ID NO: 773986 - DNA, 531 bp, Homo sapiens
aagaataaatatagaaacaaattgaacagaataaattgaacagaataaatatagaaacacatatagctgaccttaaaaaaaaaggcaatataaactattgtgtattaactcctccttccattcaaacacaggtcagtaaaacatgctgctttactgtgctaccacactacataggtacaaaatgacactgcagacacagattgtaaaacggctctaaaatggctgtttacctcaatatatcagtatgctgatatatgtacgtatctcattaaatatctattataggtaaaatactgaacaggaaatacaaagtaaacataaatacataaggctcagtgagtaatctgaatgaggttaamatttccatggatatatgaaataaatctctaccctttaaatggaaaaatcttatcaactggctattgggctgaatatatcacactcaaaaacatcatttgccaagtcacctattcaaaattttaatctctctgaagagcatattattgtttttgatgttaaagttctattaaa

SEQ ID NO: 773987 - DNA, 629 bp, Homo sapiens
aggacaaaggaactagcttgaagagacttctactggccaaatctatctgggggagtgggaagagatagggagttactacttaaaccatatgaagtttccttttgggttgacaacaatgtgctggaactagatggtagtgctagttgcataacactgtaaagatattaaatgccactgaattgtgcaatttaaaatgataaattttatattatataaattttgcccaattaaaacaagtttttcattcctcctaagaacttgaacaaggcaaggatgctcactttcaccacttccattcaacaccgtactggaagtcctagccagagcaatcaggcaagagaaagaaataaagggcattaagaggaagtcaaactatctccgtttgttgatgatgtgatcttatagctagaaaaccctaaagacttctcsaaaagactcctagatctaatcaatgaattcagtaaagcctcaggttacaaaatcaatgtacacagatcagtagtactgctaaatgccaacaacaaccaagctgagaatcaaatcaagaactcaatcccttttaaaacagctacaaaaaaataaaataccaaggaatatacttaaccaaggagatgaaagatctctacagg

SEQ ID NO: 773988 - DNA, 629 bp, Homo sapiens
aggacaaaggaactagcttgaagagacttctactggccaaatctatctgggggagtgggaagagatagggagttactacttaaaccatatgaagtttccttttgggttgacaacaatgtgctggaactagatggtagtgctagttgcataacactgtaaagatattaaatgccactgaattgtgcaatttaaaatgataaattttatattatataaattttgcccaattaaaacaagtttttcattcctcctaagaacttgaacaaggcaaggatgctcactttcaccacttccattcaacaccgtactggaagtcctagccagagcaatcaggcaagagaaagaaataaagggcattaagaggaagtcaaactatctccgtttgttgatgatgtgatcttatagctagaaaaccctaaagacttctcgaaaagactcctagatctaatcaatgaattcagtaaagcctcaggttacaaaatcaatgtacacaratcagtagtactgctaaatgccaacaacaaccaagctgagaatcaaatcaagaactcaatcccttttaaaacagctacaaaaaaataaaataccaaggaatatacttaaccaaggagatgaaagatctctacagg

SEQ ID NO: 773989 - DNA, 637 bp, Homo sapiens
ttttatcttcaaagctatagaaatgtgcaactgcctcaagatacatttagtatctgctacatcaaaaacctatactccttggcatgatgcctaacacacaggaaatattcacttcgtaaatgtttgctgtgggttcatcatggtgacaacagtagtaagaattatcgtcactccttcaatgtgaaaaaccacctgaataattcaaatcagattgactrtttaaaatgcaaagaattggaataacaaattaaaagtctaataggtacttgctaagccagagataaaaggacaaaacaataccttaaatttatgcctactgttccattattggaacgctgagcatgtggaagttatttatatcctactgcttaaggtcactgccaatgtctgatttttcaaaactcaaaaaaattgcaatctcaggcataaatgggttaaagaaaagtaaggaattggctggatggttagaaatactactgagttgaaacaaaactggttttgtttgtgtaatatccaacagctatgacctatgaaaatggcaattttataaagttcaacttaatataatgaagcaactttaatcaaaactaaaagcaagttaacttttctcttaaaatttttatatatgatttcattc

SEQ ID NO: 773990 - DNA, 617 bp, Homo sapiens
agcctgttgacttaaaggtagaaggatcccaaagtggccaggtgtcaatcttaacttccagtttaatgggatcgttgttgtttctcctggtggcagcattcctccctctggaactaagacctctaggccagtagaatgtaatgtcgtgggaacaagaatggggctgatagtgagtggtgccacttccaagtccactccttgattcctggacccatgaatcctggctatgggagaaacagtactatattttggacactgattcagagcgtacgtggccttctggagaactttgccccaggcctgcaaagtattgtcacctagttggcattgtaattgtgacttcagaaggccattccaccgttctatcaatccagctgcttcaggatgatggggaacatrgtacagtgaattccatgagcatgagcacactgccgcacttctttagccatgaagagagtgctttggtcagaggcaatgctgtgtggaataccatgacggtggataaggcattctgtgagtccacagatggtagtcttggcagaaagattgcatgcaggataggcaaacccatgtccagagtatgtgtctattccagtgaggacaagcgtctgcccttt

SEQ ID NO: 773991 - DNA, 617 bp, Homo sapiens
agcctgttgacttaaaggtagaaggatcccaaagtggccaggtgtcaatcttaacttccagtttaatgggatcgttgttgtttctcctggtggcagcattcctccctctggaactaagacctctaggccagtagaatgtaatgtcgtgggaacaagaatggggctgatagtgagtggtgccacttccaagtccactccttgattcctggacccatgaatcctggctatgggagaaacagtactatattttggacactgattcagagcgtacgtggccttctggagaactttgccccaggcctgcaaagtattgtcacctagttggcattgtaattgtgacttcagaaggccattccaccgttctatcaatccagctgcttcaggatgatggggaacatggtacagtgaattccatgagcatgagcacactgccgcacttctttagccatgaagagagtgctttggtcagaggcaatgctgtstggaataccatgacggtggataaggcattctgtgagtccacagatggtagtcttggcagaaagattgcatgcaggataggcaaacccatgtccagagtatgtgtctattccagtgaggacaagcgtctgcccttt

SEQ ID NO: 773992 - DNA, 617 bp, Homo sapiens
ggtaccagatgtgttaatttgctcaagcaatgaaaccacatctggtacagcagctgaaattggagtcaccacttgattaagcttatgataatccactgtcattctccaagatctatccctatctgccactgacatttcaagcacctttggatctgctgggtcatatggcccaagtggcagagcagcttgcacaacagcctggaactgttgcagagccttcttctgttctggaccccactcaaaactggmaggcttttgggtcactcaataaatgcgccagagtaaggcacccaaatgaggaacgtgttgcctccaaaatccaaatagacccactaggcatgtgcctctttcttggttgtaggagggaccaaacgcagcaacttatcctttaccttagaaggaatatctctacaggccccacaccattggacccccagacattttcctgacgtagaagttactttaattttagtcagatttatttcccatgctctgtcatgcaaatgtctcaccaataagtccagtgtatttactacttcttgctcactggatccaatcagcataatatcatcaatgtaacggaccagtgtgatatctcatggaagagagaagcgatc

SEQ ID NO: 773993 - DNA, 617 bp, Homo sapiens
ggtaccagatgtgttaatttgctcaagcaatgaaaccacatctggtacagcagctgaaattggagtcaccacttgattaagcttatgataatccactgtcattctccaagatctatccctatctgccactgacatttcaagcacctttggatctgctgggtcatatggcccaagtggcagagcagcttgcacaacagcctggaactgttgcagagccttcttctgttctggaccccactcaaaactggcaggcttttgggtcactcaataaatgcgccagagtaaggcacccaaatgaggaacgtgttgcctccaaaatccaaatagacccactaggcatgtgcctctttcttggttgtaggagggaccaaacgcagcaacttatcctttaccttagaaggaatatmtctacaggccccacaccattggacccccagacattttcctgacgtagaagttactttaattttagtcagatttatttcccatgctctgtcatgcaaatgtctcaccaataagtccagtgtatttactacttcttgctcactggatccaatcagcataatatcatcaatgtaacggaccagtgtgatatctcatggaagagagaagcgatc

SEQ ID NO: 773994 - DNA, 507 bp, Homo sapiens
caggttgataggtacagcaaaccaccatggcacatgtatacctatgtaacaaacctgcacattctgcacatgtatcccagaacttaaagtaaaataaaaatacaattaaaaaggtggcttatgcgtggacaattgttcactgctctattagaactagaactggagtttcatcatctcagtgagtggaataatataaacacgaatgattaggtcaaaataaagcattcaaaccagcagtcacctggaagcacttgttaaaatgcagattcatggccccagacaatctaattcaataaagaccaggataagaccctggaatctrcatgataacaagcacctcaggaggaatgatgcaggtgatcctggaaaccttatctgagaaacactggtctaaatttactcagacacaggttaagtggaaatatttcaaaaaatgggaatgtgggggagaacatcttaaaaactgctggcctgggggtctcatacttaagcttaaattgatgtatt

SEQ ID NO: 773995 - DNA, 607 bp, Homo sapiens
aaaatgaagaggaaaactacagattgtgataaaatgttagcaaaaacattatctgacaaagggcttatatccaaaagaaataaaaagcttctgtaactcagaaataaaataaaaagaactcaattttaaaagagatgaggctgggtggtggctcacacctgtaatcccagcactttgagaggctgaggtgtgcagatcacctgaggtcaggagttcaagaccagcctggccaacatggtgaaaccccatctctaccaaaaatacaaaaaaattagccaggtgtggtggtgtgcrcctgtaatcccagttacttgggaagctgaggcacgagaagtgcttgaacctaggaggtggaggttgcagtgagcccagatgacgccattgcactccagcctggatgacagagcaagactccatctaaaaaaaataaaaaaataaaagagatgagagcaaaagatatgaacacacactttgcagaaaaagatatacaaatggcaaataagcttgtgaaaagatgctcaacatattaataatcaggaaaatgcaaattaaagttgcagcatggcagcacacgaccaccagaaaggctaaaattaaaaaaaggtgg

SEQ ID NO: 773996 - DNA, 569 bp, Homo sapiens
acaaagacttatacatgaatatttatagcagttttatacataatagcctacaagtagaaacaactcaaatgtccatccaaagacaaataactaaagtatggaatattcatacagtaaaatactactcagcaatcaagaggaatgagccactaacacattcaacaacatcgatgaatgtcaaaaacgtcatgttgaggaaaagaccccagacataaaagaatatattatatattagtccayttatattaaactctagaaagcacaaatctaatctttgatcatagaaaatagatctgtggtcatctaaaactgggggtgtgaggtcaggattgacagcaaaggctcacaagcctgacttttgggggtggtgggcaagttctacatcttgattgtgacagtatttacaatcaactgtcaaaactcatggagctgttcacttaaagttggtaaattatattttatgtaaatttttccttgataaagtttttttaaatgatctcaaggtggattaaagacttaaactgtaaaactcccaggagaaaacatacagaggatccttcattatattg

SEQ ID NO: 773997 - DNA, 499 bp, Homo sapiens
ttttgtatatgatgtgtagtagggatccagcttatccccaccacataaatgttcagttttagcaccatttaataaaaaacttcctttccctattacattgcttttctgttgttaaaaatcagttgaccatacatgcgtttgtctatatctggattatattttgcttcatttgtctatttgtcaatttatatgttactatcataccatttcaattctgtagctttatagtaagtcttcaaatcaagtagtatataccctccaacttatttttaaaattgttctcmctattttaggtccttttgatttccatatgaattatagacttggttcatcaatttctaccaaacaaaaacaaaaccaaaaaattgctgggttagggagaaatgacatctcaataatcttgaactttccaatccatgaacatattatctccatttatttagatattctttaatttctctcagtaatgttttgaggctttcagtgtggagctcttgtg

SEQ ID NO: 773998 - DNA, 580 bp, Homo sapiens
agttcagccaaggcactaaacaaaggaataaatgaccaagaaagcaagaatgacatcaattcaggtggcaatggtgcagagtgggagagggaagagagttagtatccagatcactataatacattatctaaaatataaagttttcaacaaaataattatgaggcatgtgaaagttataggacttcccaaacaggataatatggtcccagttcaggaataaaagcaatcaacaaaattrtctgtgaggaggtccagatgttgaacttcctaaacaaagatttcaaatcagctattataaatatgtccaatgaaataaaggacattttgtctaaagtattaaaggagagtataataacaatgcctcactaaaaagagaatttcaataaagagacaaattattttcaatgggcattctattatatcatatttaaactccatccaaaaactgcccaactgatgaagtgatggagtggtttctgtgttagtccattttgcattgctataaaggaatacccgagactgggtagtttataaagaaaagaagtttctttggctcattgttctgcagactgtacaagaa

SEQ ID NO: 773999 - DNA, 415 bp, Homo sapiens
atagttcttccttaaatattagacagaattcaccagaaaagccatctagcgtttcaggttttctttgtgggaaggttttgtttttgtttttgttttttgagacacagtctcactctattgcccaggctggagtgcagtggcactatcttggctcactgcaacctccgcctcccaggttcaagcgattctcctgcctcagcctcttgagtagttgggactacaggcgcgtgccaccacacccagctaacttttgcatttttagtagagacgggggtctsgtcctgttggccaggctggtctcgaactcctgacctcaggggagctgcccaccttggcctccccaaagtgctaggattacaggtgtgagccaccatgccaggccctttttgtgggaaggttttgattgacaattcaa

SEQ ID NO: 774000 - DNA, 603 bp, Homo sapiens
aaaggcggaacagttcactctttttcttttttttggacacaaattctcactccctcacccaggtcagagtgcagtagcatgatctcggctcactgcaacctctacctcctgggttcaagtgattctcatccctcagtttcccaagtagctgggatttcaggcrcgtaccaccatgcctggctattatttgcatttttagtaaagacagggttttaccatgttggctaggctggtctcgaactcctgacctcaagtgatccttctgccttggactcccaaagtgctgggattaaggtatgagccaccttgcccggctaccggacagtccactctttacaggggggcgtcttggtataagtatggaaagctccgtagatgccgtgtcagtccataccctcaccaccttcttgaccctgtgccgataaactaagagatgtgggcagtgtaccatctggaaaggaaaaggctttggagccaggtagtcctgcctgcatttgaatctgctttctaccacttacttacatcaggttttccttgtctataaaatggaagtccttgtacccaccacctagaatggaagtgaggattaatccagaccaacga

SEQ ID NO: 774001 - DNA, 581 bp, Homo sapiens
gatcacaacttatgtgaaatacagaccatcacccacagtttacgtgttcacactaaagtgccagtctctctatgggttttagagctgatttagatacatgcattgctaatacagtcagcccagccaagatagtgccatcctccgcaagcatccactaaggcatggagtcagcttccgtcattgttagatcagtacttgtttctttsccttgcttatttttcctaacctctctgaacctgctgtgttggaagcttaaggaacatcatcctctgttgggcagaattcttccatggccaccccagcattatgccccacaccatttgacttactcatttgtgaatgccaactcagaatgtattgctttgattcttgattaggatctcaacctctatttattgttaagactatcaccctttgattcccccccatcccattgtgtccttctaaaggcacagaatagaacatcttctgccagaaataacatacaaatttatcatcatacaactgtacaatatgcaaataacttgctagatgatattactgaagattctacatccaattaaaataaaaagagaaaacac

SEQ ID NO: 774002 - DNA, 647 bp, Homo sapiens
atgaggggaagaacagtgtctagggcaacggtccctgaacttgtttgcacaaggtactcacccagaagcctcgaaaacacggatgcccagtcccacccctggaaatggtgattcagttggtctagaggtgggggtggcagcctggctttggaatcgtcaaagctccccaggtgataataatgtgcaaacaagtttagatctgcctacagtcttgtgactgttaaaacagagatggggcaggacacaaaaggcaccttccatgtggaggtggggggaacgaggcaatggtcccgcttgctacagcagggaggacttggcctgacccagctgggggtcatccatttctgagtgctccaggggcctggaaccagcaatggcttgatacacatggactcaggtattataacctattttccctctaaggactctgggactaaggcaggttattattaacmtccaagtcagacaacctccagtggagccaggactcaaacctgggactgcccagctggagaaggagtctggttccaggttcctgagctacgtaactagtaagtgagaccctacctccagttccctgatgtaatatccaataatgagtcgagtactactcatcttccttttaaatttaattgtgggaaaatatc

SEQ ID NO: 774003 - DNA, 611 bp, Homo sapiens
taaccatgtcaacaatgtacaacggaactgtcgataagtcccctccatatcctggtctaattaaaccctttctcacaaatgccagcaatcaataaaaaattatttcttattcaatgtggacttcagttttaattactagcagtacaacacgctgtgattctgagagcatctgatctgcttgaatatacttcttaccaagtctaaaagaatgacatgatgacatagtgycttctttcctttcctcacctgtagcactgttgttggactgaggccttagaaggcccctgggagcagctgatgcatacagctttatgagttcttacagaaaaagaacaaaaggaagttagcagacaaggtgagaatgagttaacttccattcattttttaacaccttataccccttagagcaaaaataggtgagtttggaaatgctttaaaggccttaagcgacttaagcaacaaaacacaatgcctatcccttcatggacaaattagccacaaggtacataccacaaaggtacagaaatgttactctttgatgctatttgcttacaaagaagatcaagaatcttcctgtctaaaaatgttcaagcactgaaagaaatacatat

SEQ ID NO: 774004 - DNA, 628 bp, Homo sapiens
ttatacgttgggataagagaaccatgagaaaaggtatattctaagtcctgaacatctttctataccctgaagatgtttttatagctcttctgctgactccctgccaaaaaaactatttacggtttggggtagggggcgtgtcatgccatacagctaaatacacttttttcctaatctaggaggcatgtctacttacaaataaattgcttaaactagttaggcttgtgtaaatgtaactgacatttccttgagatcagaaaaagttttgctgattaactatatttgtgtgtgtgtgtgtgtgtgtgtatttagagagaaggagggattttataattattacaatttgatttgaaatgtctagagaaagtgagagattatggaaattaccataaatgctccctttttcatagatttagatctgttaattgcaagmaatctttttttaagtgaatcaatgggaactttttatttcttccctaagattcatttagccttgaaaaggccaaaagttgaatgaagcttctaaatgccaatctttccctccttctgttaaagagtatgcttcaactataattacatttgcattgtttaaaatattagtaattctacagccagacctctgagatag

SEQ ID NO: 774005 - DNA, 636 bp, Homo sapiens
tatgctaagcctacctaaatgaaattttttaaacaaggaaagaaataggcaatagtgtcctccaagaacaacaaaacttgaataacgggcaattgacaggcccttaaataatgcacagtggaggtctcatggaaagaaaagagataattcccaccctgaccacagcacacaacccctttaagatattccacgtgcaatatgtgagtgtccagtggagtctaaatgtagcttacatagtacctcctcctggctcttaattctaacaacttctggaataaccactgtagctactgaaaatcaagtcctaagggtagagcaagaatggctcaagaataaacgcaattaactaaatgtttgcagtgaagataccaacttacatatatccattrccaatggactaactacttacatggcaaaaagtgttcacatactctgaaagctgacaaaggccagtgagttctacaagtgaatattataagtcatagaagcgatttgttttagatcctacagttttctaattttccagtttcctacagttttccaattttccaattctggagtgcaagtcaatagaaaatgacgatttgcacgctcatttccactttacacataattgctaaagaatgcacctaatga

SEQ ID NO: 774006 - DNA, 654 bp, Homo sapiens
aaataacgaacaacacacacccatttagccctttgaattctttaccacatgcacctgggggcctcaactctcaaattaaaaggcaaaacacaacaaccaaacaagcaagttcttttgaaacccaaggggaaatttaatcagcagaccttgtgacttgaacaatgacaaggaaaaggagaccaaaggagaacaagttcatgttgtctggaaatattcctttctgcaaactaagaaaatatctagttttgcctccactggtgtagatgattttagaagcactcaggactgtggggaagacactcatggagcaggggctgccgggatgactcatctgagaggcgccctgacagtgtacaaggtgtgctaagttacactaaaaagacatctatccaggaggcatgcactcacaccttttgtttggttttccggcaagtctscaagaatgccatccaagagaccaacctagacagagttccagagaaccctgcacctgaggagatagcactaagttttgatacataatgcaagcacagacttttaaaaatgatacaaagatgtacactgaggtgtgtcactcccatacctgtcccgacctagatgtttccccacctaccccggtgaatcatcgtgtttttcagttacttggtttccctt

SEQ ID NO: 774007 - DNA, 610 bp, Homo sapiens
gtttattaaaaaataaaaatttacagattaaaaatataaaactttgccagtcatgatggttcatgcctgtaatcccaacactttcagaggccgaaacaggaggattggttgagtccaggactttgagaccagccagggaaacatgatgaaaccctgtctctatraaaaaccacaaaaatcagcctgccatggtagtgtgtgcctgtagtcctagctccagaggaggctgggaggttgaggctgcagtgagctgtgatcatgctactgcactccagcctgggtgtcagaatgagaccctgtctcaaaaaaaaaaaaaaaaaaaaaaaaaaagcccataaaaattcttcagctagacacattacaccacaaaacagtcttcatcaattacagcaataatcataagtttagtaatacacaatgtcctgagtttatggagaaatgattattcaaaaagtgttgataaaatgtgtatccacatttaaaatacaccttaatttcaatcccaaaattctactggtgttgacttattctacagataggctgtgtctgtacagaaaaagtaagacaatttggactgcatggaagacaaaaaaaaataataaagaataga

SEQ ID NO: 774008 - DNA, 644 bp, Homo sapiens
aattcataatatttgaataattggtgtatattatattcttattataatgatttctcaaagacaaaggccaaatgaatacaaatacataaaagacaataaattattgaatataagcaactatatttttcataaaacatatgttgttaatggaagagaagaaaaaaagaaatatttaaccaagttcttgaagacttgttcacaaggaagaaattggagaaagtgaaaataatatgtgacaaatgggctgaaagatgaaatgtctacaatgtctatgtttatacctttcaatttaaaaattaaaaagtgacaatatttctgagaaaatattgccttctttttaagcaaaaacaacatcrccacaacaaaatcctaaaagtgaagtaacagttagctactagtataaaatgcatacatgcaggtatgtttaaaggggagacttccagatacagttttgtgctgtggtagaatacctgctttttcctgcttttttctggtgctgattagagaggatcttaagacacagtctccagtgaaagaataaaattgtgctttgcaatatccataaatacagggcaagagactcaaatgtatgctctacacattttccctttatccccactaattcaagtggaggctctgcctat

SEQ ID NO: 774009 - DNA, 610 bp, Homo sapiens
gctttttaacgtagcacaatagataaaagtatgaaaacataaattagaaaaaactaaaaatcataccataagggatggataagttagaatacaggaataacaggccaggcatagtggctcacatatgtaatcccaggattttgggaggccaagtcgggaggattgcttgagcccaggagttcgagaccagcctaggcaacatagtgagaactcgtccctagaacagaacaaaaaaaattagccgggagtggyggtgcactcctgtagtcctagctacttgcggggctgaagcaggaggatcacttgagcctgggagttcaaggctgcagtgagccaagatcacaccactgcactccagcctgggagacaaagtgagaccttatctcaaaacaaaaacaaaaacaaaaacaaaaacaaagaaaccacaataacaaaaaaacactggtaacaataaaatcatgattacataaagactgtatagaaaaaaaatcctcagaatatagaaataaaattatgtattttacctgtagctatattagaagagagtattcttgtagacaaggatgactagaaggatatgcaaaaatgaaaacagctaataacactcatt

SEQ ID NO: 774010 - DNA, 490 bp, Homo sapiens; identical to SEQ ID NO: 754340

SEQ ID NO: 774011 - DNA, 550 bp, Homo sapiens
acaaaaccctcaataaagtccacgagggaagagaaggaatggtggatccgttccaaatatgaggagaagctctttctggccccactaccctgcactgagctgtccctgggccagcagctgctgcgggccaccactgatgaggacctgcagacagccatcctgctgctggcacatggctcccgtgaggaggtgaacgagacctgtggggagggagacggctgcacggcrctccatctggcctgccgcaaggggaatgtggtcctggagcagctcctgacggggtggacgtcatggcccgagatgcccacgggaacacagcgctgacctacgcccggcaggcctccagccaggagtgcatcaacgtgcttctgcagtacggctgccccgacgagtgcgtgtagtatctgttttatttgactgcagtctccttggtgcaaaaacaaaatgggaaaaataaggataactcagaatttcaaaaggaaatcacaaattcagctagtaatagcattttcagtacttttcgtaaactaagtaaatacacaaaatgttg

SEQ ID NO: 774012 - DNA, 550 bp, Homo sapiens
acaaaaccctcaataaagtccacgagggaagagaaggaatggtggatccgttccaaatatgaggagaagctctttctggccccactaccctgcactgagctgtccctgggccagcagctgctgcgggccaccactgatgaggacctgcagacagccatcctgctgctggcacatggctcccgtgaggaggtgaacgagacctgtggggagggagacggctgcacggcactccatctggcctgccgcaaggggaatgtggtcctggagcagctcctgacggggtggacgtcatggcccgagatgcccacgggaacacagcgctgacctacgcccggcaggcctccagccaggagtgcatcaacgtgcttctgcagtacggctgccccgacgagtgygtgtagtatctgttttatttgactgcagtctccttggtgcaaaaacaaaatgggaaaaataaggataactcagaatttcaaaaggaaatcacaaattcagctagtaatagcattttcagtacttttcgtaaactaagtaaatacacaaaatgttg

SEQ ID NO: 774013 - DNA, 602 bp, Homo sapiens
ttcactttccccctccatcaaagaatatccctttttttgagacagggtgtcactctgtcgcccaggcaggaatgcagtggtgcaatctcagctcactgtagcctccacctcctggactcaagcaatcctcccaccttagcctcccaaatagttggggctataggcatgagccactgcacctggcctaagagtattcctcctcccaatacctactgacttgttgaaatttcactcatgctctaagctaaccagaggcatgccactggttttacagagccttcctctgagttgcaatgatttccttcctttagtaatttgttagctccagaccctgtcactccttgcctcctgctggtatcgtagttacacatgttcccgtggccttctgtaggcactgactgcatactcatkcagggcatggttaagttatagttatcttgctcactctataattatgctaactatagggcctaccatcccaaatcagagcgtgtggtctgagatgtcttcctgtacatgcaccaggatcaagtgggtaaaatactggatactggcagtcttcaggaatatcccggaacaggatcctgaagatgcaatagaaa

SEQ ID NO: 774014 - DNA, 584 bp, Homo sapiens
tttttttttgcctcatcttcactaagggatgcctgaattcttgacagggccagatagaatgcaaaagtggttttctacattgctaagaaataacaggcaagtctagataccacgagagctagcaacctgaagaagtcatctgttcattctttcatttatttaccgtatacggtgttgggtgcacaaaaagcatggagcaaggtgcttcagggtgtttagcaatgagcaasacaaagacactgacaaggagctttcattctgcaagccgaaaaagacaggagctcaaattgataccatacaagtagcatgaaataggcaccccagagagggacacagctatggaaaaatcaaatgagggaaagattacatctcattgggaaagacttggtggaggttcaggtcagttctgggaatgatgagtctgaagtcattggggcattcaagggaagcatgagcaggcagtgggaacctgggaccacaatcaggaagaaaagggtgggtaggatataaggggtccaaagtcacttggaagaggttgtcgtggctggagcagtgaggggctcacacctgagactccagtactt

SEQ ID NO: 774015 - DNA, 619 bp, Homo sapiens
aaatgttgtaagttaaacagatttactattttgttttcctttcctctgagatcaatttttccaagcaactttctcttaactgggtgtcagtcagtaacttctaagttcctctagtgcaaggtttctcarcctcaacactattcacattttgggccagacaattctttgttgtgaagtcctgtcctgtgagttgtaggatgttcagcagaatctctggtctctaccagtagatgctagtagcactcctcaagttgtgccaaccaaaactatccccagacggtatttctgggatcgagagtctaaagagatcttttgatttgctgccactggcaactgttaaaagaaaaatcttagacaaatgaaatttaacagagtttaattgagcaaagaacaattcacaaatcgggcagccttccgaaccaaagtaggctcaaagggactccagccctgcagtgcagtccaagaagatttatggacagaaaaagaaagtgatgtacagaaaatagaagtaggcacagaaatagccagatgggttgcagttccgcgtttgccttatttgaggatgatttgaattgttggtcacctctgattggctgaaacttggttattgacacaaaag

SEQ ID NO: 774016 - DNA, 610 bp, Homo sapiens
tcctgcagagcttttcccaaatcatagcaactcttgatccaatgcactccaccttgacccagatttctgctctatggaaaccagggagaaaggtagaggggaggagagaggcgatgatgaacctggtcatggcatttgacagcccytcccctcccccacagcatctatttccactctgcccctccaggacagtcttattcacagcattctgtttcaggggaagaaccattttcttcaaaatcctgatttaagagccttcagagtcagggacacagggctcagtggaaggcaaggatgatatttgggctcaaaatgggagttacaagggaacgttgggaagaatgatgcttccttgcatcagcctgcttcccttgctctctgcctggaacaccagaaatcgggatgttcttcctacgcagggggatggaaaattcacccttggagggactgtaaattctcaagagaaaacaccttcagacattgacattttcccaaaggaaaaatcatctttctgctgctttatcattttccgaaggcaaccactcaacacgttctacccatgcttacaggacagccaattttaaggcccctatcttagttaaatatgaac

SEQ ID NO: 774017 - DNA, 529 bp, Homo sapiens
cctggatccaggagggccgtcctcctgcaggtgaaccagggatgaggggcttccaggtgggccaccctgctctgaccaaggtcagcgtgagcctctacagggtgctgctgactgctgccagctcctgaggcagggcccctggcttcggctatgctataaaggctcctggtagagcctgagtgccgtgaggctcatggtggccaatctgtgggcttctggctgtgtcaattctaccaagtgaaaaaagtctacagcagtttttctggtattkttctatcctgcctgtgcagagggaatcagcacgtgtggttttaaaccacagtgctagttctcacttctgccctgtacgaccaagcccggctgcctggctcctggtgggctagcagggcagctgtcgaagaacacatctgggcagttgctgggatcagccctggacaagaggggagtttaagatttcgtttgttacatctcgttcttggcatttcgaggaacagtctctctgaataaaggaggccccacttgggccata

SEQ ID NO: 774018 - DNA, 627 bp, Homo sapiens
attgagcagcggtggcatcaggtggagaccacacctctccgggaagagaagcaggtgcccatcgcccccgtccacctgtcttctgaagatgggggtgaccggctctccacacacgagctgacctctctgctcgagaaggaggtaatagcctgggaccagatccccaccctgctcccagcagcctttccagagcatcagctgtgcccagctgtggcctgaggggttcatctagacagtcctaccckcgagggacttgcagacccctaggggagacagacgcatagatgagtcctcatagttgaggcagacctgagagctgtgggagcgtgccagtgcatgcagggcagggaaaggggccttccaggcacagaggaattcttccgatggtgggggcccctgccattgagaggcaagcggcgttgcagggcctagatggtttcctcgttctgactcccgatggcaggaggggcgcgagcagggcaaggcttttgcattacgcagccctggcttggacaggtcaaagctgtaggcagagaccagccccaggtgctcttacagtggcttggggacggccgatcagatctgaagccaggggcatccagcaggagatgacagctgggtcctagg

SEQ ID NO: 774019 - DNA, 615 bp, Homo sapiens
cctccttttgtctccagcaggtggcagacgcgttccagggatgaatcccactgcctctgtttaatgcagacggtccagccgctcccaacagcaggtggggctataagcatccatcctacctgctcaaggaacccaggcatcagaactgctctctcccaagtccattgcaagaaggcagtcgtctggtcatgagagggttaacagtccacattccagagcaagggaaaaggaggctggagggtcatagacaaggggaggtggygcggagggccagcttctcacaacactaccggctctgctgggagagatagatcacccccaacaatggccacagctgttttcatctgccctgaaggaaactgacttaggaagcaggtatcagagagggcccttcctgagggggcttctgtctggcttgtaaaactgtcagagcagctgcattcatgtgtcggatgatggatgatggaaaggaggacagtcggctgcagatggacacagcgacttgcaagttgaggcaggtggcaaaggacttgcagaggctctgcaggtggggcatgctgattcattgcccagttaaaataccagaggatctgggcagcctcttcacaggagctg

SEQ ID NO: 774020 - DNA, 659 bp, Homo sapiens
gtctgggaggatcccaaacacagagcttccatatcttctccccatggagtcaggatgtatcaccctcctagcacactggtgttcacccaccaggaggctcaattgagccttgaggtccagagtttttattggtgtttcatcacgaggcatgattgatcaaataattggccatgtgattgaactcaatctctaacctccctggaagtcaggctgatataatctggctcaaaaccccaaccctctaatcatttggttggttcctaatggctagtccccatcttgaaactatataggggcccmccatgagtccctttgttagtataaactcaggcatggtcccagtggctcactatgaataacaaagacatttcttatcacttgggaaattccaagggtttagaagttccttttcagaaacccaagacaattggagaaattattatgcaacaaatgccagcctatcttcaccacagtgtgccccatgaccccttttctatgctcttggcttaggtcaggcagagcagcttgcggctctccatgtggacctggagatttttcacctcgcttcctttgcttgcactgatccctttgtctggaattgcctccatgagggtacccatccttcgtgtagatataactgtcctcattttagatgagaa

SEQ ID NO: 774021 - DNA, 659 bp, Homo sapiens
gtctgggaggatcccaaacacagagcttccatatcttctccccatggagtcaggatgtatcaccctcctagcacactggtgttcacccaccaggaggctcaattgagccttgaggtccagagtttttattggtgtttcatcacgaggcatgattgatcaaataattggccatgtgattgaactcaatctctaacctccctggaagtcaggctgatataatctggctcaaaaccccaaccctctaatcatttggttggttcctaatggctagtccccatcttgaaactatataggggccccccatgagtcmctttgttagtataaactcaggcatggtcccagtggctcactatgaataacaaagacatttcttatcacttgggaaattccaagggtttagaagttccttttcagaaacccaagacaattggagaaattattatgcaacaaatgccagcctatcttcaccacagtgtgccccatgaccccttttctatgctcttggcttaggtcaggcagagcagcttgcggctctccatgtggacctggagatttttcacctcgcttcctttgcttgcactgatccctttgtctggaattgcctccatgagggtacccatccttcgtgtagatataactgtcctcattttagatgagaa

SEQ ID NO: 774022 - DNA, 555 bp, Homo sapiens
gggatccaccacagtcaagataaagcacagctctgtgaccacaagtctttctcctgttgcccacctccttccctccttttccctccctcccacaactaacccctggcaactactcatctaatctccatttctgtcatttttttttttcacttcaaaattgttacataaatgcgrccaggtgcggtggctcactcatgtaatcccagcactttgggaagccaaggcaggcagatcacttgaggtcaggagttcgagaccagcctggccaacatggcgaaaccctgtctctactaaaaatacaaaaattagctgggcatggtggcacgcacctgtaatcccagctacttgggaagctaaggcaagagaatcgcttgaactcaggaggcggaagttgcagtgagctgagatcgcgccactgtgctccagcctgggtgacagagtgagactgtctcaaaaaaaaaaaaaaaggttatataaatggaatcaattagtatgtagcctttggggatttttttttcactcagcattatttccattatccaagttgtacatatc

SEQ ID NO: 774023 - DNA, 612 bp, Homo sapiens
atgtgcagccatatttgaaaactattgctccagaatttatgatcagagccataaggaattagaatgtgtttctcttacttccactagccctggccataataatacctcctctctgttattctggatgtgacacacagagagagagagagagaatttgaagattaggagaaggaggaaaaccagatgaagctaggaaacatatgtgtatcataacagatctcttattttgtgagtgcctagtgtgcgctatacaygcacagaaatgcatgttttttcagacccatgtaagattatattgtaatgcctccttactttgcaatgccaaatactttcatgtatgtttcttagaaacaatgactacacacctattagaatggctaaaatccaaaacagtgacaacaccaaatgctgatgagtatgtggagcaacagaaactctcattcattgttcctgggaatgcaaaatggaaaagacactttggaaaatcatctgccagtttcttacaacactgaatatacttttatcatgtgatctagaaatcatgctccttgatatttacccaaatgatttaaaaacttttatgtccacataaaaaccaggacattaatgttt

SEQ ID NO: 774024 - DNA, 646 bp, Homo sapiens
tatagagacagtaaaaagatgagtggttaccaggggttgggaggaagaaggcaaaaataggcagagtatacaggatttttagggcctatgatggtgaatacatgtcattacacatttgtcaaaactcatagaatgtacaacaccgagagtgaaccctaatgtaaactatgagctttgggtgacaatgatatgtcaatgcaggttcattgtttgtaagaaatgtaccactgtggtgcaagatgtcaatagtgggggaggctgtacatatgtgaggacaggggtatgtgtcctatctgctcaattgcactgtgaaactaaaactaaaagtttattaattagaaaacaagggcaagcgcattcttttacaagcacagtttaattatcaaaatcaagaacttactatttatgtgactattatctaatctacggaatttagtcaaatktcactaattattccactaatgtccttgatagcaaaaggaagaaaatgtcttttttttctgatccagaattatatattgcatttagtcgtcatgtctctttatcaccttataattcctcaatctttctttgtctttcatgacctcgacattcaaggtatacaagccctcagtttggggttatctgatgtttcctcataaatagg

SEQ ID NO: 774025 - DNA, 600 bp, Homo sapiens
actaatcaagcacaagaaagaattagtgagcttaaagataggctatttgaaaatgcacagtcagaggagacaaaagaaaagataataaaagagaatgaaacatgcctacaagatctaggaaatagcttcaaaggggcaaatctaagagttactggccttaacccatttcccgtttgcccawaaatactcttgtctctaatcctaatgtaatatcatatacatttctgttacattaggattagagacaagttctatttagaaataactccaagaacagtttttatattttatttttacattgtaaatcagtcagatttgtttcagcctcaaagagtatgttgatataaaattaaatgagcacttggcagcaagctgcacttttttttcctaaacaggtaataggttaaagaggagattgagaaacagatcaggggagaaagtttattcaaaaggataataagagagaacatctcaaaccgagaaacatatcaatattcaagtacaagaaggtcataaaacaccaagcagatttaacccaaataaggctacctcaagacacttaataatcaaattcccataggtcaaggataaagaaagtat

SEQ ID NO: 774026 - DNA, 438 bp, Homo sapiens
aaacttgatcattgtggataaacattttgatgtgctgctggattcastttgctggtattttattgaggatttttgcatctatgttcattagggatattggtctgaagttttctttttttgttgtatctctgccaggttttggcatcaggatgatgctggcctcatagaatgagttagggaggagtcccttcttttcaattgtttggaatagtttcaataggaatggtaccagctcttccttgtacatctggtagaattcagctgtgaatccttctggttctggctttttttttgtttttttggttggtaggctacttattgctgccttaattacagaactcattattggtccatttagggaaataaggcacatacagaccagagtttttcctggttcagtcttgggagagtgtatgtatctaggaatttatctgtttc

SEQ ID NO: 774027 - DNA, 626 bp, Homo sapiens
ggaaactggcctgatacccttgtctatgcagtccctgtacagggttcctgactgtggtcagtaaagaatgtcactttctaacaggtctaggagctccaagtttatcttgggaccttaagagagaggatcatccaactcacaggtgtttgaggatacaaacccatggttgggcttggctttaaaaagtcttatctgagattccttgtggaagagaattccatcaaagccaatccaaaagccctatgtagaaataattattgtggctgtactttatacaaataatcaggccaagtataaaactaaagtctatttaaacaacttagtcctatgatgattttttttttttaacaaacatgaggaatggagagagatgaatcatgtttcaaaacttatayttgtcattaatttctaaactcattacttgtttttaagtttttgcctacatttttagactaaccatgcttgttcgtgtgaaccaaccagcaatctctggttgcagctcaaaaagaacaagagggatgggtaatgtagaaatccagattaatattctagttctgagcaattatcctgcagatcctgccaggtgatggaataaataggatccgcatcacccagaggtttctttt

SEQ ID NO: 774028 - DNA, 619 bp, Homo sapiens
aagagattaggggaggggttatttttgggaaaaaaatcaagaagagtgtaatttatcactgacatttaattggcctccatggtgagatgcatggaattaccaccagtatttaaaaggctatagacaaggaagacagaatcaatcaatcagatttccaactgaacttatccctctgttaagtgttgtagcaacagaaaatacatgcttccttaagggaagttagaagaccaaggtagcatatgaatcaattagaaaatactgtttcaccgtacagaatactggtttctacagtccstctaaaacacccttgctcaaagtgattgattagtaaatacttgttaaataaacctaagagctgtttgtgttttctagattctatacactataaaattagaggggagaagaaatttaacaagggtaaagggcaagacagatctaaaaggagatggagcctgaactatgcatttgatagtaaaagataggggcaacaagaaggaagagaagaacaaatgggagaaaaatgaaaagggatgagtaaaataatgcctcaataaattaaatcattgctcagatgttaagccaaaattccagagcctaaaacccagttgtctaatcctat

SEQ ID NO: 774029 - DNA, 619 bp, Homo sapiens
aagagattaggggaggggttatttttgggaaaaaaatcaagaagagtgtaatttatcactgacatttaattggcctccatggtgagatgcatggaattaccaccagtatttaaaaggctatagacaaggaagacagaatcaatcaatcagatttccaactgaacttatccctctgttaagtgttgtagcaacagaaaatacatgcttccttaagggaagttagaagaccaaggtagcatatgaatcaattagaaaatactgtttcaccgtacagaatactggtttctacagtccctstaaaacacccttgctcaaagtgattgattagtaaatacttgttaaataaacctaagagctgtttgtgttttctagattctatacactataaaattagaggggagaagaaatttaacaagggtaaagggcaagacagatctaaaaggagatggagcctgaactatgcatttgatagtaaaagataggggcaacaagaaggaagagaagaacaaatgggagaaaaatgaaaagggatgagtaaaataatgcctcaataaattaaatcattgctcagatgttaagccaaaattccagagcctaaaacccagttgtctaatcctat

SEQ ID NO: 774030 - DNA, 562 bp, Homo sapiens
ggactacaggtgcatgaccaccatatctggctcattttttgtgtttttttctagagagaaggttttgccgtcttgccccagttggtctcgaactcccgggctcaagcaatccacctgccttggcctcccaaagtgctgggattacagacgtgagccaccataccctgtccagtttggaaatttcttacaaagctaaacctagtcttagaatacattcctgcaattgttctcttaggtattttctcaacttacttgaaaacttccatccatataaaaatgggcactctctatacaatcacctcaaagtgactttaatccttattaatgtatgattcttcacacacctccggagtccattattgaatattttatagttcagggccttttagctcctaagcattcttcccactgggcatctgttcctgtaacgtggattcacactgcatattcagtcccgctcaaactgaccagcgttatgatgtgttcttctctgcaatgtgccctcaaacaaaacgaattgaatcctttcrtgtttttacatttctttagttaattattagga

SEQ ID NO: 774031 - DNA, 613 bp, Homo sapiens; identical to SEQ ID NO: 748099

SEQ ID NO: 774032 - DNA, 609 bp, Homo sapiens
aatcatcagattctccaaggtctaaattaaagaaaaaatgttaaggtcagctacagaaaaaggccagccatctatgaaggaaagcctgacagacaaacagtggacctctcagcagaaaccctacaagccagaagagattgagggccaatatttaatattcttaaagaaaagaaattccaaccggaattttatatctgataaaactaagcttcataagcaaaggagaaggaagatctttttcagataagcaaatgctgaggaaaattattaccactagacctgtcttacaagagttcctggaggaagctctaaatatggaaaggaaagaccatyaccagccactatgaaaacatactgaagtacacagatcagtgacactataaagcaaccacataaacaagtttgcaaaaggtccagctaacatcatgatgacaagatcaaattcatacatgacaatattaatcttaaatgtaaattgattaaatgccccaattaaaagacacagagtgacaagctggataaagaacgaagcccattgttatgctgtctttaagagactcatctcacatgcaatgacacacataggctcaaaataaagagatgaaggaa

SEQ ID NO: 774033 - DNA, 529 bp, Homo sapiens
aaaattcaacccaagatgaattaaatacctcaaggtaagacctgaaactgtaaaactagtagaagaaaaaataggtgaaacacttcaagacatcgtcctagacaaagattttatggttaaaatcttaaaagcataggaaataaaaacaaaaatagacaaaagggactgtactaaactaactaaactaaaaagcttctgtacagcaaagtaaacaactgacagagtgaaaagatagcctgttgaataggagaaaaattttgcaaactattcacctgacaaatgactaatatgcagaatatataagcaactcaaacaacagttaaaaaaaacaataaaagggggacataggacataatagacatttstcaaaagaagtcctacaaatggccaacagtatatgaaaaaatattcaaccccagaatcaccagggaaatacaaagcaaaacaacaatgagatatcaccttaccctagttaaaatggctattgttaaatagatgggtaaaaaacagatgctgatgaggatgcaga

SEQ ID NO: 774034 - DNA, 437 bp, Homo sapiens
tataaatataacaccttaatgctcctgcctttcttgcatatcttacctgttctggttggctggtagattctgttggtatacactttgtattcagaggaagacaagacaacttgcaagggtaggaggaatttctttttctgtcgtggwtaattaattaggctataggtttgcatcaatagccctctgttgcttccctcctctctctctcatgcatgtgtacacacacaccaacacacatacatttacaccaacccttctccacatacacactctgcctgtcatttaattctacaacccatcttgccaatcctctttgaaactcagtgcaagccctataatttgatctttctcttttcttttaggaactccaatgtcatttcatttctagaactttccttctaatctgctccactgacttttggaatttcctgagctca

SEQ ID NO: 774035 - DNA, 437 bp, Homo sapiens
tataaatataacaccttaatgctcctgcctttcttgcatatcttacctgttctggttggctggtagattctgttggtatacactttgtattcagaggaagacaagacaacttgcaagggtaggaggaatttctttttctgtcgtggataattaattaggctataggtttgcatcaatagccctctgttkcttccctcctctctctctcatgcatgtgtacacacacaccaacacacatacatttacaccaacccttctccacatacacactctgcctgtcatttaattctacaacccatcttgccaatcctctttgaaactcagtgcaagccctataatttgatctttctcttttcttttaggaactccaatgtcatttcatttctagaactttccttctaatctgctccactgacttttggaatttcctgagctca

SEQ ID NO: 774036 - DNA, 622 bp, Homo sapiens
tcctgcctgtgtggctgtctaggactttgcaaaatacctttgggtgtgttttctcatgttattctgggagcacagtgaaaggagaagggcagagctttcagtcctcattttaaacataagaaaacctcagttttgaagacatgaatgrcctctgcagtgggtcacatagctaggtaagtccttaaagttggacgaaatcctgctgttttctgattcctggcctggccctctttcttcttcaccagtgtttcccaaacttcagtcatcctaggcaaccatcttattttaccatgcctggctaccacttgttaatatttttaggtatttttaatatattcactttcttacccaaattaaaaatatctaagaactttctatcattatcataagtagaaaattagcacttctttcccagtggaagataactgactataagtacattaaaacaaagcaatattatgaaattctagctaaataagttgctttcatgttgccaagtcaaagactctgaagcctaggcctactttattattattattatgaaaaaaagttggcaaatgatagagatatgttaagtatatgctagcatgaactggagactctccatgagaatgttaaatgc

SEQ ID NO: 774037 - DNA, 627 bp, Homo sapiens
gtatcagagaaatttaacaaagagattgaaataattttttaaaaattaagcaacattggaacacccagatacataaaacaaatgttattagagctaaagacagagatagatagactgcaatacagtaatagctgggtacttcaacacctcactttcaacactggagagatcatctaaacagaaaatcaaccaaaaaaatgtcagacttggtctgcactatagatcaagtggatctaatatatatttacagaacatttcattcaacagctgcagctacacattcttctcttcagtaatggaacactctctaggctatgacatatgttgggccacaacacaagtctcaaaatttttttgaaaaatgaaattatatcaagtatcttctctgaccaccatggaataaaactagaaatcaataacaagaggaacattagaaactataaaaacaygtggaaattaaacagtatgcccctcaatgaccaatgcatcaataaagaaatttttaagttttttttaaaatttcttaaaacaaataaaaatggaaacacaacataccaaaacctacgggatatatcaaaagtagtgttaagggagaaatttaaagtaataaaatcctacatcagaaaa

SEQ ID NO: 774038 - DNA, 414 bp, Homo sapiens
tgatgcaaaagaagcttccacatgagcgaataatggattcttatttacataagaacagaaacaagttattgctgctgcctgttctgcaaaaatatactttttacatcctaaaattaaatgagaattagaagagccatamcaagggaaaacaagggtaaaatttcttaaattatttttaaaaatagaaatgagcataattttaatattttatatttcaaatatatttcccttcttgataaaaacagtggcatttttctaaccagctatatctaaatatgtatagttaccaatctggatgttggcaatagattcagtgtgacgatcgcaaagtggactcacacccaaatgatattttttttctatatctcctataaattaaaaaaagagaagtattaatatgaagaatatctattg

SEQ ID NO: 774039 - DNA, 616 bp, Homo sapiens
agtctgagatgtggggagcgcctctgccccgccgccccgtctgggatgtgaggagcgcctctgcccagccgcgaccccgtctgggaggtgaggagcgtctctgcccggccgccctgtctgagaagtgaggagcccctccacccggcagccgcccygtctgagaagtgaggagcccctccgcccggcagccgccccgtctgagaagtgaggagcccctccgcccggcagctgccccgtctgggaagtgaggagcgtctccgcccggcagccgccccatccaggagggaggcggggggcagcccccgcccggccagccaccccgtccgggaggtggggggcgcttctgcccagccgccccttctgggaagtgaggagcccctctgcccggcggccaccctgtctgggaggtgtacccaacagctcattgagaacgggccatgatgacgatggcggttttgtcgaatagaaaagggggaatgtggggaaaagatagagaaatcagattgttgctgtgtctgtgtagaaagaagtagacataggagactccattttgttctatactaagaaaaattcttctgccttgggatgctgttgatctatgaccttacccccaacc

SEQ ID NO: 774040 - DNA, 616 bp, Homo sapiens
agtctgagatgtggggagcgcctctgccccgccgccccgtctgggatgtgaggagcgcctctgcccagccgcgaccccgtctgggaggtgaggagcgtctctgcccggccgccctgtctgagaagtgaggagcccctccacccggcagccgccctgtctgagaagtgaggagcccctccgcccggcagccgccccgtctgagaagtgaggagcccctccgcccggcagctgccccgtctgggaagtgaggagcgyctccgcccggcagccgccccatccaggagggaggcggggggcagcccccgcccggccagccaccccgtccgggaggtggggggcgcttctgcccagccgccccttctgggaagtgaggagcccctctgcccggcggccaccctgtctgggaggtgtacccaacagctcattgagaacgggccatgatgacgatggcggttttgtcgaatagaaaagggggaatgtggggaaaagatagagaaatcagattgttgctgtgtctgtgtagaaagaagtagacataggagactccattttgttctatactaagaaaaattcttctgccttgggatgctgttgatctatgaccttacccccaacc

SEQ ID NO: 774041 - DNA, 616 bp, Homo sapiens
agtctgagatgtggggagcgcctctgccccgccgccccgtctgggatgtgaggagcgcctctgcccagccgcgaccccgtctgggaggtgaggagcgtctctgcccggccgccctgtctgagaagtgaggagcccctccacccggcagccgccctgtctgagaagtgaggagcccctccgcccggcagccgccccgtctgagaagtgaggagcccctccgcccggcagctgccccgtctgggaagtgaggagcgtctccgcccggcagccgccccatccaggagggaggcggggggcagcccccrcccggccagccaccccgtccgggaggtggggggcgcttctgcccagccgccccttctgggaagtgaggagcccctctgcccggcggccaccctgtctgggaggtgtacccaacagctcattgagaacgggccatgatgacgatggcggttttgtcgaatagaaaagggggaatgtggggaaaagatagagaaatcagattgttgctgtgtctgtgtagaaagaagtagacataggagactccattttgttctatactaagaaaaattcttctgccttgggatgctgttgatctatgaccttacccccaacc

SEQ ID NO: 774042 - DNA, 614 bp, Homo sapiens
atgtccctagatagctaatggatcaaggaagaaattaaaagaaaaatttaaaataatgtattgggacaaatgagaataaaaatacatcataccaaaacatacaggacagcaaagcaggaaaatttataagaataaatgcctatatcaaaaatgaaawaaaaaaagatttcaaataaacaacctaacaatgtacttcaaggaactggaaaagcaaaaacaaactaaacccaaattggtaaaggcaagaaaataatgcaactcagggcaaaaataaaccaaacagaggttaggaaaactatctaaaatatcaacaaaacctggagtttgttttgggaaaagataaacaaagttgacaaatctttagctagacttactaaaaaaataagtaaagcatacacaaataaaatcagaaatgaaaggatacgaggaagatttatcatctgcaaatcaataaatgtaatccaccacattaacaagaataaagacaaaaaccctatgatcatttcaatagatgcagaaaaagcatgtgacacaacaagcatgtacatcccttcgtgataaaaactctcaacaaattaggtatagaaggtaatacctccatacgaaaaaggcca

SEQ ID NO: 774043 - DNA, 596 bp, Homo sapiens
  misc_feature 1, 2, 3, 4, 5, 6, 7, 8, 9, 10, 11, 12, 13, 14, 15: n = A,T,C or G
nnnnnnnnnnnnnnncttgcagagggcatggtagccaatttgatgaaagaaattcatgcccaggaggtctagcaaataggccaagtgggattgactaggtatttgaggaggttgacagtgatgaaataaagttaagtagaccccgaaattcagcaaccatttcttaaataactgtgaatgcagtaaaggaatgttataatattgatggtcagtaagcagagtatgggtataaagaagttatataattatgagaccaccgatgttaactccattataaatgaaatttaaagtagggaagtaagtgaagtgtcatttaaatccrgtaaagacagggagttaagtcccccagagtgattatagtccatgtgcttccaagataatgcaggtaacactgaaataactaaagtgaatactcaaaaagcaagttgttattaatatgacacacattattatcaaagcagttgagagtggacaagattgacttctcagtaaagttttctctgcctagtttaagtatataagtaagctatatttggtttaaaaaaccagaattttttccatatttatactaaactatggttataaaaatttacatg

SEQ ID NO: 774044 - DNA, 529 bp, Homo sapiens
taacactttaaccacatcaatatatgtgtaataggcatagcagaagaagaggagaaagaaatagaaaaaaaataagaaaattataactgaaaacttctaaactgtatgaaaaaaatcaatctacacattcaagaagcacaataaactagcagtargatcaacacaaaagagatcaacacccaaagacatcacataaaataatgtcaaaaaaacaaggagaaattcttgaaaacaacaagaaaaaatgacttacgcacaaggtaacttcaataagatcagcagctgtttcattaatatcatcgcaagcaatggagacctgagcaagtgagaaaataattgaacagaggactaagagaaaataaagcaaacataaaaatcaaccaataatattacaccagcaaaaattgtctttcaaaaatgaatgggaaataaagatattcccagataaaaactgagataattagtggcaagaagacaaccttataagaaattgttcgggaatttcttcagaatgaaagtctgttcttca

SEQ ID NO: 774045 - DNA, 452 bp, Homo sapiens
aaatctaatagtatgtttgttcttccatctctcagtgtctttaaaattcctaaaattatataaagtaataactacaacattaaattttggggattatgatgcatatatgtaatatgtatgacaaagttttcaaaaaaggggrgaaaagaaaatagagatatataaagtaaaacatctatgtcttttgtggaattgagttagtataaatctttagctaattctgaagaactgctttatatgttaagccctataataactactaataaaataactaaaaatatagttaaaaaaattaaagaaataaaatatgtcgtcataaaatactcaggcaaaaaaatcagtgaagaagaaatggaggaacgaaaaaagccgtgacataatagaagcaaatagtaaaatgacaaatgcaaataaatcaattacaacataaaacgtgaatggagaaaacaatt

SEQ ID NO: 774046 - DNA, 452 bp, Homo sapiens
aaatctaatagtatgtttgttcttccatctctcagtgtctttaaaattcctaaaattatataaagtaataactacaacattaaattttggggattatgatgcatatatgtaatatgtatgacaaagttttcaaaaaaggggagaaaagaaaatagagatatataaagtaaaacatctatgtcttttgtggaattgagttagtataaatctttagctaattctgaagaactgctttatatgttaagccctataataactactaataaaataactaaaaatatagttwaaaaaattaaagaaataaaatatgtcgtcataaaatactcaggcaaaaaaatcagtgaagaagaaatggaggaacgaaaaaagccgtgacataatagaagcaaatagtaaaatgacaaatgcaaataaatcaattacaacataaaacgtgaatggagaaaacaatt

SEQ ID NO: 774047 - DNA, 585 bp, Homo sapiens
atataatccaacaataatactactgggtatatatcccccaaattgaaatgtttcccaaaaaatatatttgcactcccatgtttatttaagcattattcacaataaccaagatatagaaacaacctaagggtgaatgaatgaatgaaaaaaatttttaagtgtgatgtgygtgtgtatgtatatgtattcgactatttttaaaagaacaggaaattcagtcatttgcagcaacacagacaaatctagaaaacatgttaagtgaaataagccagacatagaaagacgaatactgtatgatctcactcatacgtgaaatcttaaaaagttgaacttatagaagcaaggaatagaatggtggttatcactggctgttggggaagggtgagaggagaaagaggagaagttgatcaatttgttcaaccttacagttagatagaaataaggtctgagattctattgcacagtagagtggctatagttaatattctattatgtctttcaagatgcctggcagagaagatttttaatgtttttaccacaaaggaataataaatgtttgaggtgatgaagaatacgctaattacc

SEQ ID NO: 774048 - DNA, 636 bp, Homo sapiens
tccataaaagcagtgaagatgaaaatgaatattttcttgtgaagaatatggtgactaatttaaagatctttcaatttatgaatacttcatttagactacctactatttgagtaaagtaataaatttaatatgttttccatgatgtaacccacatgatgraaactcaaaattaactacattaatcataatggataatcaaattgaatattaaaaatgcaattaatcttttaaaagaaagtattttttgagatcattaagctgaagaggagaacaaaaagaaacaaatagaaaaatattttcaaggaatctctttatatctatgttatgttatctgataaattattgatctttttcacttctcttctatgggtggttctgtgtgtgtgtatgtgtgtgtgtgtgtttgtgtgtgcatgttcattgtgtttgtattatataataatggacataattttgtgattgtagaatatcttcaagatgtttgagccatacatgtagagtgactatcctttctagtatcaaatgaatgacctaatcatttaaataaataattagtttaaataattagattatattttatcaattaggaatgatctgcattcagtttataatcattaaacatgaatcctttaatag

SEQ ID NO: 774049 - DNA, 608 bp, Homo sapiens
tatttttcttacacacattaactcattaatggaacttagacaagttctgatgacaaacctgaaacaatcaaggccacttggttgaacactgaagtttctggcatgtgtttttcctacaagtaaactaaagtgcaaggcaactaaacagctttacttatacaatttttcttagtatgaaattatgaaggttaaggtacttatgaaagtctatggcactaaaccattgtggtttaaatgtcaagtttgccaaaagttaaacatgcagctagctcgagtgccagtccatggctttaggctgtccttaakggtatggcccatgcttaatttgtttctgtatagtgtcatggtgttctataaatgttgttgagtcagctcactgtgtactctcttagatatgagacattgattgtacatcctagatgtaaaaaagaaaaattttgatatttaatccttaaatatatttgacatatgaaaagagaataaattggaaataaatttgctgatgggtgaaactatgagtcttagcttttcactgaagccttcttatttgtgattagcatgtaccttcacacatttcctttaacttctttctctggggctacaggaaa

SEQ ID NO: 774050 - DNA, 605 bp, Homo sapiens
taaaagaaaagacaagtaaatacagcttcattagatgatatcttgggctttagatttgcagttgtttaaagcccatataaatgagaatatgataaaatggttaaaactgagcaaaatgaatggacaacattctattcatataacaacacaatgcactgaaaaaggcatgtctttcatttcagtccaactatttttcaagcttgccatgaataggtattatttgtgtaccatgtgcagaatgtctttctaggagctattggtacaaacatgaattttaaaaaattaattttccttccccaaagtggcttatagtagagagaattaaaaatatagagataaataaatawaatgttatctatgaccatttttcacgaacagtttgatactataaacaactaactgtcactggggtgcactcagcaaaattttttaattttaatacttgaatatgaaatctaattaatgtgtcacaaacaatggtaatagaaactggtaagatgaaaaagtgttagtcacacttatactgagatgcaggtttaatgaatctgctcttgctagatacaaaataattagctaacctacattgggaaggtcaggtattttgt

SEQ ID NO: 774051 - DNA, 626 bp, Homo sapiens
acaaatgagtgaactcacttttgacaaagttgccaagagtatacattgggaaaagacagtcttttcaataaatggtgctggaaaaactagatatccatatgcagaagaaagaaactagatccctatctctcaccatatacaaaaatcaaatcaaaatggattaaagacttaaatctaaggcctcaaactatgaaagtaccaaaagaaaactttggggaagctctccaggacattggtctgggcaaagatttcttgagtaatagtctacaagcacaggcaactaaagcaaaaatggacaaatgcaatcacatcaagtttaaaagctgcagcatagcaaagaaaactatcagcaaagtgaagaaacaacccacagaatgggagaagatatttgcaaactatccatctgacaggggattaataactagaatatataaggagctcaaacaactctataggaaaaaatctaatmatctgatttaaaaataggcaaaagatatgaatagacatttctcaaaagaagacatacaaatggcaagcaggtatataaaaaggtgctcaacatcactgatcatcagagaaatggaaatcaaaactgcaataatataacatctcaccccatttaaaat

SEQ ID NO: 774052 - DNA, 680 bp, Homo sapiens
aagggagtttccccagcatcagtcggtgctgtcttacttttgagcagcctactttgatcagctgtcagagtgcacttttactttccaataaactcctttatttttttttattttttacttttttgagacagagttctactctttttgcccaggctggagtgcaatggygcgatctctgcttaacacaacctctgcctcctgggttcaagtgattctcctgcctcagcctcctgagtagctgagattacaggcatgcaaaccacgcccagctaattttcatatttttagtagagatgggttatctccatgttggtcaggctggtctcgaactcctggcctcaggtgatccacccgcctcggcctcccaaagtgctgggattacaggtgtgagtcactgcacctgacttcctttgtctacttttatttggactcactgtcaaattcctttgtgtgatgaaatcaggaacctgaactggcccaccgacaacatgtctgtgctgtgcagtatggtagccactagccacatgcaactattgagaatttgaaatgtgtcttgtgccacagagtaacccaattttttaaaaattttatttaaattgttttaaatttaaatgtagacagccaacatgactcatgactactgtatttgacagtgtagatttagaaagggttttttatct

SEQ ID NO: 774053 - DNA, 643 bp, Homo sapiens
caggcttctgctggtatttactgaggacccaagggcccttcagtcagcttgtggtgaattctgacaggcctgcatctcttccttcaaaacagtaggctcctctctggcccagggtggttccagaaatgccattgaggagccaaggccaaaaaccatggacctcaggagccctcttgttactctactccactgtggctgagttggtaaccaagcttcaagacaaagtcccctttcctcttccctctctcttcttcaagcaaggagtctctccacatggctgccacagcttgaattgcactgggtcatacctgaagccagcacagctctgggtctcacccaagcctgcagcaagtactacctgattactgctaacatttattcaaggcccaagggctctttagtcagcaggtgatgaatcctgccaggactaagtccttccctgcaaggcagtgtgttctcttctgtccccgggkgtgcctagaactgtcacccaggagttaagtcttggaatgggggccttaaaaccattcctggtgccatattctactgtggcttagatggtatccaaattgcaagacaaagtcttctttactctcctcttccctctccacaagtagaagaaaagagtttcttccagagcttt

SEQ ID NO: 774054 - DNA, 607 bp, Homo sapiens
cttgtacaaacatgatagttgcatcatgttttttagtctgttttgctgatctctgccttttaatttgatagttcaatccatttacatttaaaataattattcataggtagatttctgtcattttgctatttgttttctgtataccttacgtctttttattttacattttctacattattttcttcttatgtattgggttaattttttttagtaaaatattttaactttttatttcctttgtgtatattctatagcttctttttgtgattaccatyatggtgatgacatttaacatcagaatttatttattttaattgctgcatagtactatattcaattatatgaacatagtataatttttaaatctattctacttttgatagtcatcactgggatatttaatatgacttattttttagatgagtatcgagtttacataaacattgagcggaacatacagagttcccatatatcctctccccacacccagcttctcctctattattaacaccttacattagtgtggcatatttgttactcttaatgaactaatatagaaaagttattaactaaaatctaaagtttgcattcgaattcatgttttctg

SEQ ID NO: 774055 - DNA, 648 bp, Homo sapiens
ggatcccttttagttatgcaaatttctgtagcaaatgggtgttctgctgcctgctacaattcctctcccagaaaagctttttctttctctgctacatggccaaccttcaaatttcccaaacttttatgctctgcttcctgtctaaatataaactccaaacttaagtcttttcttttctctcaaatctgagtgtaggttgttcaaagcagccaggccacatcttgaacactttgctgcttagaaatttcttctgccaaataccctaaatcaagtttgtccaacctgcagcctgctggccgcatgtgacccagaatgactttgagtgaagcccaatacaaattcataaactttcttaaaacattgtgagttttttgtgattttttttttctagctcatcagctatcgttagtgttagtgtatttyatgtatggtccaagaacaattcttcttccactgtggcccagggaagccaaaagattggatacccttgccctaaatcatcactctttagtttaaacttccacagatccttaggacatggacaaaatggagacaagttttttgctaaggcataacacacatgacctttgctccagttcccaatacgtttctcatttccatctgagacctcataagcctggacttcat

SEQ ID NO: 774056 - DNA, 604 bp, Homo sapiens
ctgtgtgaagagcgtgtgcactggcctccgtgtgtccttcctgcagaccggctggggcaggaggagagggagcttggcagcgcccttgctggggggagtctgtggggctaggagggaagggtgtgccagaggcccctgcctagagcctgaatttgagtgctggctgagggagaggtgggagcagatgggagagaagcctgttttctccaaaccccacaaatgccctccrcctctctcatgttcctttcttcttcctggtccatcctgtctcctccaggttccggcctccagcctggtgtcccctcctcaggctgccttttcctcctcctcctccctgtttcctggctcttagccgctccatctgggaagtcttcctcaactttaaaccctcgaacccttgtcctctgccctccatctcccactcctcaggctttcagcagcttcacgtggagcattgggctggtcctgtccacagttgttcagttgctgtaacagcttgtgcaggctgccctggagccctgttctgggaagcacaggtctgggcaccctggggctggggcgaggcccggagctgatctcctctgtccatcccagtagagccagc

SEQ ID NO: 774057 - DNA, 604 bp, Homo sapiens
ctgtgtgaagagcgtgtgcactggcctccgtgtgtccttcctgcagaccggctggggcaggaggagagggagcttggcagcgcccttgctggggggagtctgtggggctaggagggaagggtgtgccagaggcccctgcctagagcctgaatttgagtgctggctgagggagaggtgggagcagatgggagagaagcctgttttctccaaaccccacaaatgccctccacctctctcatgttcctttcttcttcctggtccatcctgtctcctccaggttccggcctccagcctggtgtcccctcctcaggctgccttttcctcctcctcctccctgtttcctggctcttagccgctycatctgggaagtcttcctcaactttaaaccctcgaacccttgtcctctgccctccatctcccactcctcaggctttcagcagcttcacgtggagcattgggctggtcctgtccacagttgttcagttgctgtaacagcttgtgcaggctgccctggagccctgttctgggaagcacaggtctgggcaccctggggctggggcgaggcccggagctgatctcctctgtccatcccagtagagccagc

SEQ ID NO: 774058 - DNA, 615 bp, Homo sapiens
gaggaacagttaaatcaactttgtcagggtgtttctggaacatagggtcacctagatcagttaaaggcctgattgacttaggtgggctccatgagaccaaaattttcttttggatggtgaacatagttccaacatcgaatcctgagatataaagtctcaatccccatgacatgctataataccattgagctgaattagggtcatggacagttatagtaagaggattacaattctttttagttcatgatttaggacgagaaccacgagttatggaatgaagatctggttgatcccccagagtaggtggctaaagttacacatgtccaagcagggcagaaaaactgataagtatctcgacagctagcgtcagggtgatttccaggacagaggtaaaagttaacattttggagtcctttttctgcacctttggagcttccacatccagtttggctcccggagygtccaaatcctgctgcaaagttgacactttctgcttctgggaccggcagattgtgttgctcttggtgggtacgggctggctctgggaacagtacacataaatcaactgcaaaggagacttccttggaggtactggccctccaagtggtgtttgca

SEQ ID NO: 774059 - DNA, 626 bp, Homo sapiens
ctcaccttgttaatgaaagcacagaatttggaaagtctaaacaaggttattggaaaaatacaatacacacatatctaattttggaaagtaaactttataactcttttgtagtcaggcatcgtcaatgtgtttatagcctcagcagcctcaacagctacaataattttaagtattatttttaccctgcagaaaagtcaattcattttcaacaatgtttcagtgaaattaagtggcagattactttttaattaatcagagttttttgttaatgtttctgttttataatgttgaatacatttctaagggagccactgtgtcacacatacacacacacacacacacacacacacacacacacacacacacacacacacasagagagaataagaaagaaatagaatggttccactctgatattctggagctctagtttcttgctgagcttggaagtattacttttcaacatcttaacgttcttttggtttctgcaaagatctatattctttatttgttaagtgcctaagaacatttgtttatttaaagggagtcttaaaggattagatatgaaatgtttgcctggtttagagaaacatggatcttttcaaataagtagatatgccaccagc

SEQ ID NO: 774060 - DNA, 577 bp, Homo sapiens
tgctgggaaaagaattcagcgatatttctcctactcgcacgtccatctataggctttctgcaggaagaaatatatggctctattttgcccgaccccgcaggcagtcagaccttgtggttatcttcctttgttccctgaaaatcactgttattctgttctttttcagggtgcattgatttcatattgttcaaacacaygttttacaatccatttgtacaatagtggtcctgaggtgacgtacattttcagcttaagaagataatgtgattaagagaataaagtaaagacaggcataagaaattacaagagtattgattggggaagtgataaatatccatgaaatcttcacaatttatgtttggagactgcagtaaagacaggtgtaaaaaattataaaagtattaattttgggaactgataaatgtccatgaaatcttcacaatttatgttcttctgtcttggctccagctggtccctccgttcggggtccctgacttcccgcaacaaacaatggacctaatatatatttacagagcatttcattgaaaagctacaaaatatacatttttctccccag

SEQ ID NO: 774061 - DNA, 577 bp, Homo sapiens
tgctgggaaaagaattcagcgatatttctcctactcgcacgtccatctataggctttctgcaggaagaaatatatggctctattttgcccgaccccgcaggcagtcagaccttgtggttatcttcctttgttccctgaaaatcactgttattctgttctttttcagggtgcattgatttcatattgttcaaacacatgttttacaatccatttgtacaatagtggtcctgaggtgacgtacattttcagcttaagaagataatgtgattaagagaataaagtaaagacaggcataagaaattacaagagtattgattggggaagtgataaatatccatgaaatcttcacaatttatgtttggagaytgcagtaaagacaggtgtaaaaaattataaaagtattaattttgggaactgataaatgtccatgaaatcttcacaatttatgttcttctgtcttggctccagctggtccctccgttcggggtccctgacttcccgcaacaaacaatggacctaatatatatttacagagcatttcattgaaaagctacaaaatatacatttttctccccag

SEQ ID NO: 774062 - DNA, 573 bp, Homo sapiens
tttacacatatttgtcaattatttttgtcttttactgatttctatcttaattccattctagtcatcaaatatatcttggatgattttaatatttttaaattgattgagacatgttttgaatcttaatatatggtttatttaggagaataatcaatgtggacttctgaaagatatgttgtctgttgttgcatgaagtgcttttcttatgtctgctaggtctactttgtttttagtatttttcagtcctcattttaaaatttatattgtgtctagatgtctaaccattayttaaggtagtgtagtaacgtctccagttattacggcatcactgtctagtaataaccttaatcctgtcagtttacttcccagattatgcgctcattgtttataaacaatgtttataattgttatatcctctggatgaattgaactttatatcaatatataaggcctttctttgtctcctgcaacagtttcgacttaaagtccagtttattattagtttagccacctcaactttcttttgtttaatatttgtgtagcatatcattcttcatcttttcttttgtatct

SEQ ID NO: 774063 - DNA, 606 bp, Homo sapiens
ctttcaaagggtagattattacttatttctttcttggcatacatctggactttagctcaagagtggtcttgaaagttagtaatcccttattaacattttgttacttggtttctatctgtgagaatgctaaaagcaaaattaaaattaaaaagatgctagagaagttgctaagcactttgatatgagtgctgcacggtatcagcaggctgcaatctgatctggatgtgtctgacacagcagctattggaatatgtatgaagaatttctgagaaatttgtaggaaatgccttgtaaattatygacaacaattccgacctttgctcaccaatcaggaacagccaccaaaatgacaataaaacattctccacagcctcctggagaaattccagaagtctcagtagagccacaggaaaaaggaattttcctgcctagattggaactaaatttatggaaaggagtaacaactaaggaacagcataaacttatgatgcttactggcttcttcccaagagaatacaaatgaacagaaaattcaaagagcacagatctactttcttctgtctttacctttttaaaaatatgtaaaattatcaagtttcattttag

SEQ ID NO: 774064 - DNA, 601 bp, Homo sapiens
tctatattctgtgtatctcacactgaagaaaatattgtcaattttgctttctggtgctttttaaaactgtgaaaacaatttgtaaacggaatatatatgttttttgaatgtatctctttcccatccatccctattcccatcctatagactctggcagacgggctggaggttctggttaagaatcagtgttcagcktttaaccatatagcatgattccagttgtttgctggatcttaaggtatttttaaaggtcttgttagttattttaaatgtatcttataatttcgaactatcaccatattactggaatgaactccacatgacatgatgtggtattcttttaatatttttttaatgtagcatgagatttaagggtttcattttaaagaaatttcctgtagatcctttcagtatgtaacaaatcaaaaacttcttaacaaaatggtttcaagaaaagtgatttaaatacttgattggctatttagagtcaatatttgatcaattagaagtaaaaggaaaggcagaaactgtaaaattgtaggtgaaaaaagaaatctaaattaccaaaagctgagctacatacatttctatgtattaaata

SEQ ID NO: 774065 - DNA, 614 bp, Homo sapiens
ctctcctctccctgggacagagcacctgggggaaggggcagctgtgggtgcagcttcagcagacttaaacgttcatgcctgccagctctaaagagagcagcagatctcccagcacagtgctcaagctctgctaagggacaggctgcctcctcaactgggtccctgacccccgtgcctcctgactgggagacacctcccagcaggagtcgacagacaccttatacagaggagctccggatggcatctggtgggtgcctgtctggaacaaagcttccagaggaaggagcaggcagcaatctttgctgttctgcagcctctgctggtgatacccaggcaaatagagtctggagtggacctccagcaaactccaccagacctgcagcagaggggtctgactgttagaaggaaaackaacaaatagaaaggaatagcatcaagatcagcaaaaaggatgtccacacagaaaccccattcgaaggggttcagagaagaacataaatgacctgacggagctgaaaaacacagcatgagaacttcgtgaagcattcacaagtatcaatagctgaattgatcaattggaagacaggatatcggagattgaagatcaacttaat

SEQ ID NO: 774066 - DNA, 615 bp, Homo sapiens
gttcaactcccacttatgagtgagaacatgtggtgtctggttttctgttcctgtggtagtttgctgaggatgacggcttctagcttcatacatgtccatgcaaaagacatgatcttgttccttattatggctgcatagtattccatggtgtatatgtaccacattttctttatccagtctatcattgatgggcatttgagtgggttccatgtctttgctattgtaaacagtgctgcrataaacatatgtgtgtatgtgtctttatagcagaatgatttatactcctttgggtatatacccagtaatgggactgctgggtcaaatggtatttctggttctagatccttgaggaatctccatactgtcttccacaatggttgaactaattacattcccacggacagtgtaaaagcgttcctatttctccacatcctctctagcatctgttgtttcctgacttctcaataattgccattctaactggctcgagatagtatctcattgtggttttgatttgcatttctctgatgatcagtgatggtgagcttttcttcataggtttgttggctacataaatgtcttcttttgagaagtgtctgttcatatcctttgccc

SEQ ID NO: 774067 - DNA, 615 bp, Homo sapiens
gttcaactcccacttatgagtgagaacatgtggtgtctggttttctgttcctgtggtagtttgctgaggatgacggcttctagcttcatacatgtccatgcaaaagacatgatcttgttccttattatggctgcatagtattccatggtgtatatgtaccacattttctttatccagtctatcattgatgggcatttgagtgggttccatgtctttgctattgtaaacagtgctgcaataaacatatgtgtgtatgtgtctttatagcagaatgatttatactcctttgggtatatacccagtaatgggactgctgggtcaaatggtatttctggttctagatccttgaggaatctccatactgtcttccacaatggttgaactaattacattcccacggacagtgtaaaagcgttcctatttctccacatcctctctagcatctgttgtttcctgacttytcaataattgccattctaactggctcgagatagtatctcattgtggttttgatttgcatttctctgatgatcagtgatggtgagcttttcttcataggtttgttggctacataaatgtcttcttttgagaagtgtctgttcatatcctttgccc

SEQ ID NO: 774068 - DNA, 607 bp, Homo sapiens
agtttggaaggcctgtagaacctttgcctctgtctttcagtagatttggagaaataacatctcacttctggccttgttcgtccttccatgggaaaactataaggataataactcctactcacaggactattggaggattaaaggtggcagcatctatacatgtccctagtgcttcttcatagcagggactcaagagaatgtcagggagtcaaaaatgatttttttwaaaaaaaataagagctgattcctctaatcttggagcaaggttctttcaaagttgaatcatttataatcacaaggtgatttttatcgtctgtctttgtaaatccctatagccaaataggttagggtcagcagaattctcagaaagtaacagcagaggaaaggggaagcctaggctttaatccagagccccagaactttggggttttttcttgatggctctcaacccttccagagaaagagatctctgaccaataaaatagaaagggagttggtcagaaaccagttgatgcccgggaaaaatgagactcttgagcaaagagtctggctgataaagttgtcacagtaaccactgagaaggcccttctactagggggccttactg

SEQ ID NO: 774069 - DNA, 696 bp, Homo sapiens
catggaaagacataaacattcaggctgtagcaggttggcctgtcaatttcattccatgctttgcattctccagaaagtaataaaaatactcagtcatctgatggcttctctcccactgtcagtgtcattgacattgtcatttacttattcctgctttttatttattctagtgatttgaccttgaagagggaagagcactaatgccaatcaggatgggcatatgctttatcttatggcaccatgtgcaaaataaagttaacatgaaaggcctgagactgctagcctgagatttcatctgggaacttgggtttgggaagattcccaccattccttgactgataagggtggctcactgtgcctaaaccaattgagcacataatgtggtttatgctgaacrtgtgctttcttctgaaagtctgcattgatatgtgctaggcagagggtgtctacatgaccagcccccaataaaaaccatggacacggagtctctgctgagcttccctggtaaacatttcacaggtattctcacaatttgttgttggaggaattaagcatgtcctgcatgactccattgagagaggactcttggaaacttgcttctggtttcctctggacttcagcccatgtgtctttttcctttgctgaccttgaattttgtgtgtgtgtgtgtgtgtgtgtgtgtgcacgtgtgtgtgt

SEQ ID NO: 774070 - DNA, 493 bp, Homo sapiens
tgcatcaaaatggaattttagaaaatattcaagtaacctaaagaaaggcaagaaaaataaaacagaaatgaaaaacagagaaaacattttaaaaagtcggacttaagccctaacatatcaataattacattaaatgtaaatggtcaaataattcagttaaaaaatagagcttgacaaagtgtatttaaaaacgtaactgaactctatgctgtctataagaaactcacttcaaatgtaacaatataggcaggttaaatgtcaaagaatgaaaaaagacatatcgtgcaaagatttgccaaaaaaagaaggagtggctacttwaatttcatataaagtagactttggggaaaagtaaattttcagagataataaaaggactttcagtaatgattaaaagggtcaatccatcaagaagatacagtaatcttaaatgtctatgtaaaacacagcacagcctgcaaaatacgtgaagtgaaaactaacagaactgaaa

SEQ ID NO: 774071 - DNA, 624 bp, Homo sapiens
attgcttaatgatgggcatacattctgagaaatgtgtcattaggcaatttcattgttgcatgaacatcataggatatacttacacaaacttagatggtgtaacctactacacacctggctatatagtatagactatgctcctaggctataaacccatacagcatgttactgtactgaatactgtaggcaactgtaacataatagtaagtatttgtgtatctaaacatagctaaacatagaaaaggtacagtaaaaatatggtataaaagacaaaagatgctacatctgcataggacacttaacatggatggaggttacaagatgaaagttgctctgggtgtcagtgagagagtgctgagtgaatgggaargtctaggacattatgccactgtagactttataaacactgtacgccagcagaccccaaccttcctggcaccaaggaccagtttcgtgaaagacaatttttccacggacaggggtggggtgatggtttggggatgaaactgttccacctcagatcatcaggcattagttagattctcataaggagataacaacaacaacaaaaaagaaacaaacaaatattctcataaggagtgcacaacctagatccctcgcatg

SEQ ID NO: 774072 - DNA, 592 bp, Homo sapiens
gagtgctgagtgaatgggaaagtctaggacattatgccactgtagactttataaacactgtacgccagcagaccccaaccttcctggcaccaaggaccagtttcgtgaaagacaatttttccacggacaggggtggggtgatggtttggggatgaaactgttccacctcagatcatcaggcattagttagattctcataaggagataacaacaacaacaaaaaagaaacaaacaaatattctcataaggagtgcacaacctagatccctcgcatgcacagttcacaacagggttcgtgttcctatgagaacctaattctcctgctgatatgacaggaggcggagctcagacagtcatgcttgctcgcctgccactcaccttctgctgcatggcccggttcctracaggccatggaccagtactggtctgagacccaggggttgaggacccctgctgtacactatactaaatttataaaaaacaattatgttataatgttatgacagctacgatgtcatgaggataggaatttttcagctccattataatctcatgggatcactggtgtatatgtggtatatcattgactaaa

SEQ ID NO: 774073 - DNA, 562 bp, Homo sapiens
ggtctcttccttcttacctttcttttttgaaacatgtatccggggcgtactttgctcttgagagactaaaactgctaattcccaaatgcggagggcacctgtctattctcagccatgcccagggcagggcacagagctggggctccaccatggtgtgcagagagagctgctgggagtgtgggtgccatcatccctgcacagacagacgacagacacacagagctcggcctgttagatgagtgtcagctccactgcttccccaggggcttctyggagcccagggctcccgctaaggatcaactgccttctgtgcctggaagaagcagaatttctttcctctttataatctgagctccacagtcaggtttgctcagtgactcctgtctctaagtccctgcaaagctcctgaaggttgaatttggggacttctggccgagtacagctgaagaatgaaagaaagccattctgcttgacatgaagctaacaaataactagaaaacttttccaggccctgcaaggatataatccttggagctgtctcagcctgcatgcccggggccaa

SEQ ID NO: 774074 - DNA, 622 bp, Homo sapiens
atagtgaaaccccatctctactaaaaatacaaaaagtagccgggcatggtggtgcgggcctgtaatcccagctactcaggaggctgaggcaggagaattgcttgaacccaggaggcggaggttgcagtgagccaagatcgctccactgcactccagcctgggcaacagagcaagacaccatctcaaaaaaaaaaaaaattacctttgtttttcaaaagctatcttccctggatrtagaattctaagtggacctttttttggtttatttttgttttttttctttcagcactttaaagatattgcttcactgtcttcttgaacacattgtttctaatgagaaatttactgtcatccttgactttctctgtatggaacattttttttctttgggtaatgaacattttctcttatagccctgattttgaacaatttgtttatgatgttcctcgatgctggctttttgttttttcacatttgttgcatttgaggttcattgagattcttaaatctgtaggtttatagatttcatcatgtttggaaaaatttcagtcattatctcttcaaatattttctctgtcctctcttctccctccttcagggatcctgtctggctggaaaaggg

SEQ ID NO: 774075 - DNA, 616 bp, Homo sapiens
agacacattgtgcttgaaattaaattatcatcgcatgccagacacgtggtgctgaccaagaagggttgtctcctcactgacatcaaatgatcccctcattcgacaacccaaattttgactatgtgcttgacactgttctagtgacagataggtagacataactaactatgctcttgaagtattttgtatctagacagacttaacaragaaggcagctagtaaccctgacaagagaaggcaggaaatatttccgaaaaaaaaaaaaagaggtggggacatttaggctagctcttggcagatgcataggagtatgcagggtggctaagaagagaggaacatccaaggagagaaaacagtgtgtgcaaacgtgatgtttcaggaatctgagtgcctgggtgaggctgcagcttggggcatatggggattggaaatgtgggcaggtaccagatgctaagaagccccatgtctaattaattctttaaatccatgtcatcctccatcaagtccacaaagacatcttgagaagccactcagttttgttgtggagctgagtgtgcctgaagttccaagtagcaccacttcttgataaataattcaaagccctgtcttcatgaat

SEQ ID NO: 774076 - DNA, 576 bp, Homo sapiens
ctggcctaaattaaattttgtcaagaaaagagagcctggagtaatggagtttaacgaccagttgacatcatggatttgtagttttctagggaggtttagcagggctgtcacaaggggcgtcattaattctccgcagtaagccccagacagttgcaaatttagcttattcttaaaggcttctggaagggaattccacgctaacctcccctatctcattcctacaacttakcatccctcactgggcagaagtcctaccccagggctaatcctagttcctcctgctgcacttaaagcccccttgctttgattgtcatccatggagctggatgttctcagcggccatcatctgacctctgtattttctagctcagaagcctccatagggaggggtaggcaacaatccacttgaggtacagatacgttctgagaggctcgggcttcccccatgtaatggccaaggcaagcgcggagcaagccgaaagcagcctcgggagtgagaggaggacaagcctattggagagggatctgctggctggtcactcggcgagcacacgactcagcatatcagtgccattg

SEQ ID NO: 774077 - DNA, 602 bp, Homo sapiens
gtggaaacccagctgacatgatttgtttcctcatttgaaaaatcaagatgattttagtacccactctgtagggctgttgtgaggatcaaagactgtgatgtgtggaggtacttaacttagagcctggctcataataagtgcttgatacatgttagcttttatttgtgctgtataactcaagagagctaaagagctggggcttgaatctagggtttaaattctatcaaagtccttgytctatgcaatgttgctgtttctttctctcttagtttgagtctctgtatgtctgcttgtgtgtctttctttgtgtctatctctatgactcctgtactccatctctgcttatctgtctgtctctgttcttcactcctctctctctctctccctctctggctttcactctgtctgttcttcctttctctgttctctctctctgcttcctttcttcctaccagactgagagccccactgtcttctataggcccaagagcaggcaactctccacggtgctgacgaggtgtgtaggtcccagacttccatctctcattagggaacagaaatggatggcagtgattttcctccagcagccagtcagcagggac

SEQ ID NO: 774078 - DNA, 602 bp, Homo sapiens
atttgtctgtggcttttttctaaatcaaagaatctcagaagtgagtgggagcttggaggtgtaccatgtgtgttaataacttagcactgtttcagatgcatcttcatctctgttttcctccaggagatctcatgcctgcaactactctgatccctccagccygcataggtcagtaacagctctcagagaccacaggaggcggtggcagttctggggtactgtctggttctgggggaagggaagagagaaaggaagggactcatcactgcaaacctcacaaagagtcaggccctggagagcggtgcatggtcgctccccatacccccttgtcctatccacagagaccctagaattccttatctgacagcctccaatgtgcccagcaggaaccccactcccgatccccactctggcagaatgccaagctagatgctgccatgagggaggacacaggtgcatttctggaggcagaaggaagcgagggatgcagagatgagagaggaaagcactgaaggtggggattggaggtggaggctgtggttggagcccttctttgttcgttgccagccgtaccttcacctctggatgccccgcagttgctg

SEQ ID NO: 774079 - DNA, 567 bp, Homo sapiens
ttcacaagttacagctgggctcccttgtagccaggactatactgtaaatatcagtatgatctgggtgtggtcaaaaacaattttcaacagagagaaagaagaaagaagagagagaaagaaaaaggaagagaaagaggaagaggaaggaatgaagaaaaagaggaaggaaggaaggaaagagagaaaggaaagagaaagaaagaagaaagaraaagagaaagaaaaagaaaagagaaagggagggagggaaagaaggaaggacctacgcgaggaggggctccgccaaccctctaagccccgcaacccccgcatgccccgcctccttctgcagacctccccgtccctcatcccagcaagtcctcacgttagttgccggaagcctaggaaatgtattcctaaatctggagtcgtctccatggcagcgagccccgaagtggagccagtcttggagtaggagaaaggccagacacaaacaagtgtgtggggatgggggagacacacatgcatgtccgctttggatccagattctcttttttttttttagacggaggctcgctctgtcgccca

SEQ ID NO: 774080 - DNA, 511 bp, Homo sapiens
ttcttttttttttcgtgcagtggcatgatctcagctcacctcaacctccgcctcccaggttcgaacaattctcgtgcctcagcctcccaactagctgggactccaggtgcgtgccaccatgcccagctaattttttttttttagactgaractcactctgtgccccaggctggaatgcagtagcctgatcttggctcactgcaacctttgccactgggttcaaacaactctcctgcctcagcctcccaagtagctgggattacaggcgtgtgccaccacacccggataatttttttgtatttttagtagagacggggtttcaccatgttggccaggctggtcttgaactcctgacctcaagtgatccacccgcctcagcctcctaaagtgctgggattacgggtgtcagccactgtgcctggtctgggcctccattttctaccccagattccaacacctggttcccatgactatactgttattagatcttattgcctctacaatattaata

SEQ ID NO: 774081 - DNA, 511 bp, Homo sapiens
ttcttttttttttcgtgcagtggcatgatctcagctcacctcaacctccgcctcccaggttcgaacaattctcgtgcctcagcctcccaactagctgggactccaggtgcgtgccaccatgcccagctaattttttttttttagactgaaactcactctgtgccccaggctggaatgcagtagcctgatcttggctcactgcaacctttgccactgggttcaaacaactctcctgcctcagcctcccaagtrgctgggattacaggcgtgtgccaccacacccggataatttttttgtatttttagtagagacggggtttcaccatgttggccaggctggtcttgaactcctgacctcaagtgatccacccgcctcagcctcctaaagtgctgggattacgggtgtcagccactgtgcctggtctgggcctccattttctaccccagattccaacacctggttcccatgactatactgttattagatcttattgcctctacaatattaata

SEQ ID NO: 774082 - DNA, 637 bp, Homo sapiens
ccctccaggatgccaaatctgataagtcctttagaggcctccaatcagattctgaccacacgccaccccttccagtaaccttgcagactccagggacaatcatctgctcctggggtcactctgttcattttccatagctgctgcaacaagttatcacagattaagtggcttaaaactacacaaacttattagcttatggttctgtaggtcagaaatttgacataagtctcactgggctaaaatcaaggacaggactatggacaggactatgttcctyctggaggctgcaggggagaatccatgtctttgcctcttctagcttctaaagggtacctgcattccctggctcacggccccttccactacctacaaagccagcagaggctggtagagtctttctcacaacccatcgctccaaccttctcttctacctcccctttctgtttttaagggcccttgggattgcattggtttcaccaagaacaatccagaataatttcttcttcttaagtcatctgattagcaaccttaattccacttgcaaccttaattcccctttgctgtgtaagctaacagattcagaggttctggggattaggttgtggacatcttgggagggacattattctccctgcca

SEQ ID NO: 774083 - DNA, 637 bp, Homo sapiens
ccctccaggatgccaaatctgataagtcctttagaggcctccaatcagattctgaccacacgccaccccttccagtaaccttgcagactccagggacaatcatctgctcctggggtcactctgttcattttccatagctgctgcaacaagttatcacagattaagtggcttaaaactacacaaacttattagcttatggttctgtaggtcagaaatttgacataagtctcactgggctaaaatcaaggacaggactatggacaggactatgttcctcctggaggctgcaggggagaatccatgtctttgcctcttctagcttctaaagggtacctgcattccctggctcacggccccttccactacctacaaagccagcagaggctggtagagtctttctcacaacccatygctccaaccttctcttctacctcccctttctgtttttaagggcccttgggattgcattggtttcaccaagaacaatccagaataatttcttcttcttaagtcatctgattagcaaccttaattccacttgcaaccttaattcccctttgctgtgtaagctaacagattcagaggttctggggattaggttgtggacatcttgggagggacattattctccctgcca

SEQ ID NO: 774084 - DNA, 670 bp, Homo sapiens
cattatttttatattaatgaccacatagcaagtcactaaacatcactttctaataggtcaaatttggacattaagacctgtgtcagagggttgttgagagaagtgaatacagaggtgcctgtgaagtgactggcacagaggagattattattaggtttcctacatgctcctgctcccccttcacctgctgaaagtgaggtctccctggaacccaaggtgctgatgctgacccctgggcatagcagatgaaagttgttggcagtggtaattatgggggccaagaccttcggagcggtgcacaggatgcaggttgagagtggagcacaggatgagggttgagagggagggactgaatagctcacggcaggggatcccttgcagagtaagggagggcagggctgagaaggggctttgctgcaggtcctcagatacacctctgtttctgtgccatgctctggggccagcctgctcactcctsttccattgctatcagccactgcttctgagaaaggctgctgtccttcctgtgtcaacacagcaccttctttccattgctctttcctcacttgttcctgaagggagaaggaactcaccaataatggtaggcacacacctgaagactgaaaggatttttttcattccattctcacccttttctattagattgtta

SEQ ID NO: 774085 - DNA, 600 bp, Homo sapiens
agaaaccagcccacagctggtgtccaaactgagatggggcagggatcccctcttaggggcctgcaggtccccccaaacataagttttttaaaatctagggtcccttaaaggggaattccaggtacctacctagccttgagaagttaataagcaacttggtaaacaaggtaatagtagcctaaaacaatagccaaaaaaaaaaaagctaaaatcacaaaacgtttggttcccctctaaaaactaaagataacatcttacttaacgtatgtctctgagttgtttttcagaaactctgactcccaccaaatggacctgccagcacacagacctcagataaggaggctgacctctcaccaccattcttattctaaatttcttcctgaggggyctggagaaagacccacccatgaggtgcagctaacattcttttctgctgaccccaagtttttaaacaaagtttcccttctttaaccaattgcaaatcagaaaatctttaaatctaccaatgatctataagccctctgcctcaagatattccccccatttaaaagcccaaaaccaacgtgtaacctccatgtattattgatttatgattttgcc

SEQ ID NO: 774086 - DNA, 579 bp, Homo sapiens
atcacacccctggaagcagtgtcagggaggagcaatgggctagaaaagccttccacaagggcgggtgggcagcactgcccctcctgtaccaacccctggctcccacccctgcgctttgcagaagccagcccaggccacagcctcagccctcgccagtccaggcccaggtcatttcggacccatggttctggaggcagccacgaacatcattgcttgtgctcctcttagggtatgagatccgtgtctaattgttttttttgtttgtttgtttgctctgtcacccaggctggagtgcaaytgcatgatctcagctcactgcaacttccgcctcccgagttcaagcaattctcctgtctcagcctcctgagtagctggaattacaggtgcccgccaccatgcccagctaatttttgtatttttagtagagatggggtttcaccatgttggccaggctggtctcgaactcttgtcctgaagtgatccgccctcctcagcctcccaaagtgctgggattacaggcgtgagccacagcgcccagccatgtctaactttttgcctaagattgtcataccaattttt

SEQ ID NO: 774087 - DNA, 366 bp, Homo sapiens
ttaagctgaagtcaaagctgcctggggtacaggtgacttttcgctagttttgggctcagctagttttcagggtcttttgaagaggttgaaaatacacacatacacacacacacacacacacacacacacacacacacacacacacacacwctgcaaaatttaatgccttctacttggagaacagaagagcttggactatttctttcttggcttgttttatctgtaaagtgttctgacttgcaggacgagaggaaggttgtgcatttcctggcagtgttactgcctaccccagaagcccacaggtggttcatctccccagtcagcccagatgtggcttttccccttgttttgatggacttgggtgct

SEQ ID NO: 774088 - DNA, 631 bp, Homo sapiens
gcgacagggttctaccctgagcaactgatgcagaccccgtggttcctctgctgtgggtctccaaagcagagtcaccaggactttttggtttgtcctgtcttatactttgtgtaattgctttcacactagtttgcaaactccctgagagcaagtcttttatctttctttcacacttcatggagtccaataaatgtttgtttgacttgaatggaattgagtctattccgagatcatccggtgaacaaacacacacacacacacacacacacwcacacacacacagagagagagagagagagagagagagagagagagagaacgagaacattgtagactacctgccaggtttacaatgcatgactcaactgcagttaaaaatgatagccaagggccatgatgaaatcttttctgagccagccagacccatgcctgtgtgggctcagaatagtgggaagagagatggaacttcacttcaaatgcagctccaaggctccccatcctggctctggagcagccaggaagactgctttgtgagtgggaggattggaagaatttgggattttggggaattttgccagatggtttgacctctggtgtttgaaggccagtcacaaagattctactttgtaac

SEQ ID NO: 774089 - DNA, 595 bp, Homo sapiens
tccagcagcaaagctgctcacccagaacctttcccagacaaataagagctatgtgagttcattattactagacttgccctacaagaaatgctaaagggagttcttcaagttgaaataaaaacaatagcaaacgccgggcacggtggctcacacctgtcatcccagcaatttgggaggctgaggcgggcggatcacgaggtcaggagatcgagaccatcctggctaacacggtgaaaccctgtctctactaaaaatacaaaaaaattagcctggcatggtggtgggcgcctgtagtcccacctactcaggaggctgaggcaggagaatggtgtgaactcgggaggcagagcttgcagtgagccgagatcatgccactgcactccagcctgggcaacacagtgagactctgtctcaaaaaaaaaaaaaaaagaaaaaaraaaaacaaatgaaagtataaaagtcactgaagtgtaaaaatatcaactacaaaatactctaatactgtatggtagtgtgtaagccacttttaactgtagtataaaagttaaaaaaattaaaagtggtggaggggagagcatcaggaaaaatagctaat

SEQ ID NO: 774090 - DNA, 516 bp, Homo sapiens
cactggccactgttttgggggatttcctttgttcagctgagcatggcctctgacttacctgaatccatgctgcacatacacagttacaagctgcccgcataacccgatcttctgactgctgtatttttgtatttttttttctttgcaactattggtacacttgaaagcgggtaggggcatttgttgtggatattgggatgaattctttcaactcctcaatggattccaatgaaagaggaaaaaaagaatctgcccttggtaaaatggacaattgccacttcaaggaatctgtccaaggtccggaatatcatragagagtacatatttaatggctcactttgctcctatttctttcagaactgtgtctctttaaatctactgaggaagatattccttctggcccacaggatgccaaaatgacttgatgatttatttatgcagcacttggcagcctatagtccagattgtggctgaagctgaattttatgagccttcccctagtaagtgtattttaaa

SEQ ID NO: 774091 - DNA, 516 bp, Homo sapiens
cactggccactgttttgggggatttcctttgttcagctgagcatggcctctgacttacctgaatccatgctgcacatacacagttacaagctgcccgcataacccgatcttctgactgctgtatttttgtatttttttttctttgcaactattggtacacttgaaagcgggtaggggcatttgttgtggatattgggatgaattctttcaactcctcaatggattccaatgaaagaggaaaaaaagaatctgcccttggtaaaatggacaattgccacttcaaggaatctgtccaaggtccggaatatcataagagagtacatatttaatggctcactttgctcctatttctttcagaactgtgtctctttaaatstactgaggaagatattccttctggcccacaggatgccaaaatgacttgatgatttatttatgcagcacttggcagcctatagtccagattgtggctgaagctgaattttatgagccttcccctagtaagtgtattttaaa

SEQ ID NO: 774092 - DNA, 590 bp, Homo sapiens
aaaagcatacttactctcaatttcgcttctcattcgtttttatgatgccagagaaattcagattatataggctttctttgtgctgagatggtaattttatatcactgtagattaatagcatttttagtgatatttggtatcactcatttgtctcctatggtcataaagatatatattttttctaatttggcttttccaacaaataaaaaataagagtctttttctgttgaatgagggaaaaagtcattctgatcatgaagaattattctcttttaacatacccacaatccaccatctaattgttttggttattgcagcaatacagtttctacaaaaatgtgtgtgtgcatgagtgcatatatacagtctgtcctgcagaagattttctcctttttgctacttgatctttgrgttctcattactgagaactctgttacagcttgttcatctaggtactcctgtttaggaagatgtaaactttcccttccttccccttcctctcccttgattctagagtttcgcccacattttactttgtgaacatattgatatttctggaattctattctgggaactgattctgcagtgct

SEQ ID NO: 774093 - DNA, 639 bp, Homo sapiens
aaagcctaagagacctatgagacaccatcaagtggaccaatatatgcttaatatgagtttcggaaggagaagagagagaaagggacagaagactattcacagaagtaatgactgaaaactaacgaaatccaatgaaacgtatgaatctgcgtgactccaagaagctcagtgaactccaagcaagttaaactcaaaaagatccacactgagatacytaatagtcaaactgctaaaactcaagagacagagaatcttgaaagcaacaagtgaagtgattcatcatatacatccaagggatcctagataatattaacagctgatttcttatcagaagccaaggaagcaagagggcagtgaaacaacatgtttaaagtgctgaaagaaaaaaaatctgtcaatgaagaattctatatctggcaaaactacccttcaagaatgaaaaagaaatgaagacatttttaaatagactgaagctagggggagtttattactagtagacttgctctacacaacatattgaaggcagtcctgcaggctgaaatgaaaggatactaactccaagccatataaaggaataatactggtaaaggtaactatgtaggtaatataaaaaccagtattattgcacttttggtttgt

SEQ ID NO: 774094 - DNA, 556 bp, Homo sapiens
ccgcctttgcaaagatgatgacagtgagagaagtctagcatggctgactccatcttccttctagcctcacaggctggctgtccttgctcgttcctgggcacagaccaagctaatcgtgggaggaatttagtttagagtttaactttaaagaaaggatgataataaccccaccctcagactaacctctgccctgctagggagtaaagccacctttgtaaaactaatggaaggctatgagattaggattatgggaagaacccgaattctgctaaatgtaggcgtagtttctataatcccttactgctcaggagtcatgtggctagaagtcaaagatttgtgacttccccaattgttcctgtagagaacatcactrctatagcacctaagattggtcttttgagatgtttttcagacttttgcattctggcaaccactggaccccaccaggacctgtgaccatgagtcaactagtcctgtggccctcacccaaagggcatactcagtgcataaagactgttttccatacccctgtaatttcatccccaatcagcaaccc

SEQ ID NO: 774095 - DNA, 605 bp, Homo sapiens
attgggtcattcttgtcatgaccaactaaaaaagtcaagaccaggtgcggtagctcagcgctttgggaggctgaggcaggaggattgcttgagactaggagcttgggcaatgtaaggagactcttgtctctacaaaaaacaaacaaaaaaattagccagtgtggtggatcatacttgtagtcccagctacttgagacaattgctagagcccaggaagtcaaggctgaagttaagctatgattgcaccactgcactccagcctgggygacaggatatcttgtctctaaaaatttttttttaattataaaagggcatttagaggacaggaagaaaaagcacacagggcacaaaacattgctccaagaatgcaattcttggcaagcttgactgctgaaaccgtcgttaaaacctgaaaccagttttatctagtagctactgaaacagctgctaagactgtaagattaattttacccactgcaaccactcaccaatcagagtttgcccccttcccaaaactttactagcgctgatgaacattctttcaaaacaatatgtaacatttctcctttttataaaacttccaaccttctctttgttctttgaac

SEQ ID NO: 774096 - DNA, 653 bp, Homo sapiens
gtatgatacttggtggaataattggggaaaggttatgaattttaggataaaaacaactgaaatatataatgtcatttcatgtataattactttaaaaattatcctaatttttacttcacttttacttttaaattgtgctcattcaccattttgttttcattccatgacatcactctcattattttcccactgtttctgcatgtgaacacttgagaactccttgttcaacaacttgagctcctcagaacaaagggctataaatctgacaggtaatctatatttaccaaggaaagcctgtggaagaataaggctaaattcttttgtaaataaataaatatttatttgaaaaataatatttgagaagtaaaagtaaccagaaatatcataaaagaaagcaataaagaagaaagtgattatgtttatttttacatttttctttcagagaagccattttaagrtatccaaggcaagccacactatagattaagctataaactaatcaacctgttttgagtatgcatatggtatccaggacatcaaatagaaacaaatattatttgaactttgtcataaaatattctacatccattattctcaagagaaattacctcattttattgataataatgctgaagttagtcattttgtattgg

SEQ ID NO: 774097 - DNA, 619 bp, Homo sapiens
atagaggactaaaattaccaacattgagctgtaatacgatgtccacttcccaaattgtgaaatgactcatatatgcttgacatgtgcaggtctattatatggtataatgtgtctgaatacttcatataagctaggtcatcatctaattatgttatgaatgagcattatattaatgagtttcaccttaaatattttctcatgtgtgaattttttttgaaaacctgtatcttaaaataagaaaaatgtcttctttctgtatgtgtcaggctctaggtctcaagaggagaggacattattcgatcttgtcctctctttttcctctaaccyctttccctcatcgcccctgttaggaggcccctcttagaagtacgacctgttttctctgagttagagaaggagtccaaccaaaggtctcccatgtctaagtgtgagcactttggcattgcagagtcctgttcataacctgggtttcattagggccagaatttacttttgtgtggaggagcaaaagggagagatattctgagaaaaataagagcaaaggaatacattaaccttatgggaatttgcctactgataaatgagaagagcttacaggcaaaaaaaaaaaaaaaaaatg

SEQ ID NO: 774098 - DNA, 716 bp, Homo sapiens
ttctcaaaggaagtcctctcagaagaaatcagcaatggagatagggttttttttccctatctctgctgggaaactaagtaatgtagggattagatttcagatgaagtctcagcttcaacctgatcctgcggggaggtggagaatgtaaattatacttcagaacctcagtaaagacttttactctccacttgtgagttattggttacgaaccacaggatgagggaaggtgaattgctagataactccagctccttggataaagcaggttagaacacccaaagggagtttcccaaaactgagttgcaggtgcaggtcattagagaaaactcacattgaaactggggggaaagacacacagaaaaggtaagaagcatccaaaaagatccaatattcactacgatttcttacaatgaatctggtactgtggtaaagagttagagatttagaaataaatacatttcctgtataaatctgtaaaaaaaaaaactgactctattgcaatatgataaatactgcattaaaaatgtacaaagkgtaaagagctcacagataaaaggatgattaattattggagctttttcaaatattttattattgagataacaaggatctcattgccaaatagactcatatgaatactagatcttagtatcaaacttttttaatatctcaaagatgcaagtgaacacaaggcataagcaaaaaagggggaaaaa

SEQ ID NO: 774099 - DNA, 541 bp, Homo sapiens
ttctagtccctgactccctgagggtacttctggatccacccagggcctggggatcttgccactctgaaggaaaagacacagacctggatggctttgccacctgctggttgtagagctgtgggaccttgagtgagcataggcagtagccagggaatggttgcagcaggccttgggtgagatccagtggtctacaggtttcaggtctgacccagtgtagttacagtggtggtggccacagaggtgcttgtgtcactccacccccagctccaggtgcckcagaacagagagatgcagagactctgcatgtttgggagaaagtaagagaagagtacaagaacctctgcctgttaatccagagacttctccccgatcttgtccaggaccatcaaggtagtacttctacaagcctgcatcaaccacagtgttactgggcttgggatgccccctaacacagaaacagctcagatcacaacacacgagtcttttcaaatatctggaaagccttttcaagaaagacagctacaaacaagctaagactgtg

SEQ ID NO: 774100 - DNA, 614 bp, Homo sapiens
agagtaccaaggaacaatcctggagaaacagagatatataacctttcagacaaataattcaaaatagctgtgttagggaaactcaaaattcaagaaaacacagagaaggaattcagaattctatcagataaatttaacaaagagattaaaataattaaaaagaattaagcagaawtgaaattctggagctaaaaaaaaatgcagttgacatgctgaagaatgtatcagagtcctttagtagcagaatttgatcaagcaaaagaaaaagttagtaagtctgaagacaggccatttgaaaatacacaatcagaagagacaaaagaagaaaaataaaaaaccataaaatatgcctataggacctaaaaaacagactcaaaaggggaaatctgagagttattggccttaaagaggaggctgagaaagagataggtgtagaaagtttattcaaagggataaatattaacagagaacttcccaaacctagagaaagacatcaatatccaagtacaagaagtttatagaacactaagtagatttaacccaactacctcaaggcatttaataatcaaattcccaaaggccacatataaagagaggatcctaaaagcagcaag

SEQ ID NO: 774101 - DNA, 491 bp, Homo sapiens
tggtgaaaaggaaacgtcttccaataaaagccagacagaagcattctcagaaacttgtttgtgatgtgtgtactcaactaaaagagttgaacctttctattgatagagcagttttgaaacactctttttgtggattctgcaagtggatatttggattgctttgaggatttcgttggaagcgggaattcgtataaaaactagacagcagcattcccagaaatttctttcggatatttccattcaactcayagagatgaacatggcctttcatagagcaggtttgaaacactctttttgtagtttgtggaagtggacatttcgatcgccttgacgcctacggtgaaaaaggaaatatcttcccataaaaaatagacagaaacattctcagaaacttgttggtgatatgtgtcctcaagtaacagagttgaactttgccattgatagagagcagttttgaaacactctttttgtggaatctgcaagtggatatt

SEQ ID NO: 774102 - DNA, 464 bp, Homo sapiens
gagcaggtttgaaacactctttctggagtatctggatgtggatatttggagcgatttgatgcctacggtgaaaaagtaaatatcttcccataaaaacgagacagaaggattctgagaaacaagtttgtgatgtgtgtactcagctaacagagtggaacctctcttttgatgcagcagtttggaaacactctttttgtagaaactgtaagtggatatttggatagctctaatgatttcgttggaaacgggaatatcatcatctaaaatctagagagaagcmctctcagaaactactttgtgatatctgcattcaagtcacagagttgaacattcgctttcttagagcacgtttgaaacactctttttgtagtgtctggaagtggacatttggagcgctttgatgcctttggtgaaaaagggaatgtcttcccataaaaactagacagaagcattctcagaaactt

SEQ ID NO: 774103 - DNA, 526 bp, Homo sapiens
caaagttcaactctgttagttgaggacacatatcaccaacaagtttctgagaatgcttctgtctattttttatgggaagatatttcctttttcaccgtaggcgtcaaggcgatcgaaatgtccacttccacaaactacaaaaagagtgtttcaaacctgctctatgaaaggccatcttcatctctatgagttgaatggaaatatccgaaagaaatttctgggaatgctgctgtctagtttttatacgaattcccgcttccaacgaaatcctcaaagcaatccaaatatccacttgcagaatccacaaaaagagtgtttcaaaactgctctatcaatagaaakgttcaactcttttagttgagtacacacatcacaaacaagtttctgagaatgcttctgtctggcttttattggaagacgtttccttttcaccaaaggcatcaaagcgctccaaatgtccacttccagattcttccaaaagagtgtttcaaacgtgctcaaagtaagggaatgttcaactctgtga

SEQ ID NO: 774104 - DNA, 579 bp, Homo sapiens
tgctgtctagtttttatacgacttcccgcttccaacgaaatcctcaaagcaatccaaatatccacttgcagaatccacaaaaagagtgtttcaaaactgctctatcaatagaaaggttcaactcttttagttgagtacacacatcacaaacaagtttctgacaatgcttctgtctggcttttattggaagacgtttccttttcaccaaaggcatcaaagcgctccaaatgtccacttccagattcttccaaaagagtgtttcaaacgtgctcaaagtaagggaatgttcaactctktgacttgaatgcagatatcaccaagtagtttctaatagtgcttctgtctagattttagatgatgatattcccgtttccaacgaaatcgttagaactatccaaatatccacttacagtttctaccaaaagggtgtttccaaactgctgcatcaaaagaaaggttcaactctgttagttgaggacacacatcacaaagaagtttgtgagaatgcttctgtctagattttgtatgaccatattcccttttccaacgatatcgttaaagcaatctaaatatcaattt

SEQ ID NO: 774105 - DNA, 576 bp, Homo sapiens
gtttgcattcaactcatagagttgaacattccctttaatagagcaggtttgaaacactctttctgtactatctggatgtggacatttggagcgctttgacgcctacggtgaaaaaggaaatgtcttcccataaaaaattgaagaattctcagaaacttgtttgtgatgtgtgtcctcaactgacagagttgtacctttctattgatagagtagttytgaaacactctttttgtggaatctgcaagtgaatatttggatagcttggaggatttcgttggaagcgggaattcaaatgaaaggtagacagcagcattctcagaaattactttctgatgtctgcattcaactcatagagttgaagattcccttccatagagcaggtttgaaacactctttctgtagtatctggatgtggacatttggagcgctttgatacctacggtgaaaaagtaaatatcttcccgtaaaaactagacagaaggattctcagaaacaagtttgtgatgtgtgtactcaactaatagagtggatcctttctttttacagagcagctttgaaactctatttctgtggatt

SEQ ID NO: 774106 - DNA, 576 bp, Homo sapiens
gtttgcattcaactcatagagttgaacattccctttaatagagcaggtttgaaacactctttctgtactatctggatgtggacatttggagcgctttgacgcctacggtgaaaaaggaaatgtcttcccataaaaaattgaagaattctcagaaacttgtttgtgatgtgtgtcctcaactgacagagttgtacctttctattgatagagtagttctgaaacactctttttgtggaatctgcaagtgaatatttggatagcttggaggatttcgttggaagcgggaattcaaatgaaaggtagacagcagcattctcagaaattactttctgatgtctgcattcaactcatagagttgaagattcccttycatagagcaggtttgaaacactctttctgtagtatctggatgtggacatttggagcgctttgatacctacggtgaaaaagtaaatatcttcccgtaaaaactagacagaaggattctcagaaacaagtttgtgatgtgtgtactcaactaatagagtggatcctttctttttacagagcagctttgaaactctatttctgtggatt

SEQ ID NO: 774107 - DNA, 679 bp, Homo sapiens
actcaactaatagagtggatcctttctttttacagagcagctttgaaactctatttctgtggattctgcaaattgatatttgggttgatttaacgacatcgttggaaaagggaatatcttcatacaaaatctagacagaagctttctcagaaacttctttgtgatgtgtgtcctcaactaacagagttgaacctttcttttgatgcagcagtttggaaacactctttttgtagaaactgtaagtggatatttggataggtctaacgatatcgtyggaaacgggaatatcttcatctaaagcatacacagaagcagtctcagaaactactttgtgatatctgcattccagtcacagagttgaaaactcccttacttagagcaggtttgaaacactctttttgtagaatctggaagtggacatttggagcgctttgatgcctttggtgaaaaaggaaatgtcttcccttaaaaagtagacagaagctttctcagaaacttgtatgtgatgtgtgtactcaactaaaagagttgaacctttctattgatagagcagttttgaaacactctttttgtggaatctgcaagtggatatttggattgctttgaggatttcgttggaagcgggaattcataaaaacgtagcagcattctcagaaatttctttctgatatttccattc

SEQ ID NO: 774108 - DNA, 545 bp, Homo sapiens
tgaacattccctttaatagagcaggtttcaaacactctttctgtactatctggatgtggacatttggagcgctttgacgcctacggtgaaaaaggaaatgtcttcccataaaaaattgaagaattctcagaaacttgtttgtgatgtgtgtcctcaactgacagagttgtacctttctattgatagagtagttttgaaacactctttttgtggaatctgcaagtgaatatttggatagcttggaggatttcgttggaagcgggaattcaaatgaaaggtagacagcagcattctcagaaattactttctgatgtctgcattcaactcatagagttgaagattcccttttatagagcaggtttgaaacactctttctgtagtatctggatgtggacatttggagcgcwttgatacctacggtgaaaaagtaaatatcttcccataaaaactagacagaaggattctcagaaacaagtttgtgatgtgtgtactcagctaacagagtggatcctttctttttacagagcagctttgaaactctattt

SEQ ID NO: 774109 - DNA, 581 bp, Homo sapiens
aaagctgctctgtaaaaagaaaggatccactctgttagctgagtacacacatcacaaacttgtttctgagaatcgttctgtctagtttttatgggaagatatttactttttcaccgtaggtatcaaagcgctccaaatgtccacatccagatactacagaaagagtgtttcaaacctgctctatgaaagggaatcttcaactctatgagttgaatgcagacawcagaaagtaatttctgagaatgctgctgtctacctttcatttgaattcccgcttccgacgaaatcctccaagctatccaaatattcacttgcagattccacaaaaagagtgtttcaaaactactctatcaatagaaaggtacaactctgtcagttgaggacacacatcacaaacaagtttctgagaattcttcaattttttatgggaagacatttcctttttcaccgtaggcgtcaaagcgctccaaatgtccacatccagatagtacagaaagactgtttcaaacctgctctattaaagggaatgttcaactctatgagttgaatgcaaacatcacaaagaaatttctgagaatgct

SEQ ID NO: 774110 - DNA, 471 bp, Homo sapiens
tgtcctcagctaacagagtggatcctttctttttaaagagcagctttgaaactctatttctgtggattctgcaaattgatatttgggttgatttaacgacatcgttggaaaagggaatatcttcatacaaaatctagacagaagctttctcagaaacttctttgtgatgtgtgtcctcaactaacagagttgaamctttcttttgatgcagcagtttggaaacactctttttttagacactgtaagtggatatttgaataggtctaacgatatcgttggaaacgggaatatcttcatctaaagtatacacagaagcagtctcagaaactactttgtgatatctgcattccagtcacagagttgaaaactcccttacttagagcaggtttgaaacactctttttgtagaatctggaagtggacatttggagcgctttgatgtctttggtgaaaaaggaaatgtcttccctta

SEQ ID NO: 774111 - DNA, 644 bp, Homo sapiens
ctatggtagaaaaggaattatcttcacataatatctagacagaagcaatctgagaaacttctttttgatatgtgcattcatctcacagagttaagccattcttttgattgagcagttttgaacctctcttttcatagactctgcaagtggacatttcgagcgctttgaggcttacggtgaaaaaggaaatatcttcccataaaaagtagacagaagaattctgaaaaactttgtgatgggcacgttcatctcacagagttgaaactttcttttgattgagcagtttggaaaccctctttttatagaatctgcaagtggacatttggagcactttgtggcctatggtagactaggaaatatgttcacataaaatctagccagaagtaatctgagaaacaactttgtgatgtgtgcaatcatctcacagagataaacgtttcttttgatggagcagttttgaaactgtctttttgtagaatctgcaagtggacatttggagygctttgaggcctacagtggaaaaggaaatatcttcacataaaaactacatagaagcattctgagaaagattttgtgatgtgcccattcatcacccagggttgagtctttcttttgaaggaccagttttgaaatactctgtttgt

SEQ ID NO: 774112 - DNA, 517 bp, Homo sapiens
gaaagagtgtttcaaacctgctctatgaaagggaatcttccactctatgagttgaatgcagacatcagaaacaaatttctgagaatgctgctgtctaccttttatttgaattcccgcttccaacgaaatcctccaagctatccaaatatccacctgcattttccacaaaaagagkgtttcaaaactgctctatcaatagaaatgttcaagtcctttagctgggtagacacatcacaaacaagtttctgagaatgcttctgtctagtttctatgggaagacattccctttttcaccaaaggcatcaaagcgctccaaatgtccacttccagacactacaaaaagagtgtttccaacatgctctaagaaagcgaatgttcaactctgtgacttgaatgcagatatcacaaagtagtttctgagagggcttctgtctagattttagatgatgatattcccgtttccaacgaaatcattagagctatccaaatatccacttacagtttctacaaacagagt

SEQ ID NO: 774113 - DNA, 495 bp, Homo sapiens
agaaagagtgtttcaaacctgctctatgaaagggaatcttccactctatgagttgaatgcagacatcagaaacaaatttctgagaatgctgctgtctaccttttatttgaattcccgcttccaacgaaatcctccaagctatccaaatatccacctgcattttccacaaaaagagggtttcaaaactgctctatcaatagaaatgttcaagtcctttagctgggtagacacatcacaaacaagtttctgagaatgcttctgtctagtttctatgggaagacattccctttttcaccaaaggcatcaaagcgctccaaatgtccacttccagacactacaaaaagagtgtttcmaacatgctctaagaaagcgaatgttcaactctgtgacttgaatgcagatatcacaaagtagtttctgagagggcttctgtctagattttagatgatgatattcccgtttccaacgaaatcattagagctatccaaatatcca

SEQ ID NO: 774114 - DNA, 408 bp, Homo sapiens
gctgctgtctagtttttatacgaattcccgcttccaacgaaatcctcaaagcaatccaaatatccacttgcagaatccacaaaaagagtgtttcaaaactgctctatcaatagaaaggttcaactcttttagttgagtacacacatcacaaacaagtttctgagaatgcttctgtctggcttttattggaagacrtttccttttcaccaaaggcatcaaagcgctccaaatgtccacttccagattcttccaaaagagtgtttcaaacgtgctcaaagtaagggaatgttcaactctgtgacttgaatgcagatatcaccaagtagtttctaatagtgcttctgtctagattttagatgatgatatgcccgtttccaatgaaatcgttagaggtatccaaatatccac

SEQ ID NO: 774115 - DNA, 521 bp, Homo sapiens
agtttcaaagctgctctataaaaagaaaggttccactctgttagctgagtacacacatcacaaacttgtttctgagaatccttctgtctcgtttttatgggaagatatttactttttcaccgtaggcatcaaagcgctccaaatgtccacatccagatactacagaaagagtgtttcaaacctgctctatgaaagggaatcttcaactctatgagttgaatgcagacatcagaaagaaatttctgagaatgctgctgtctaccttttatttgaattcccgcttccaacgaaatcctccaagctatccaaatatccacytgcattttccacaaaaagagtgtttcaaaactgctctatcaatagaaatgttcaactcctttagctgggtacacacatcacaaacaagtttctgagaatgcttctgtctagtttttatgggaagacattccctttttcaccaaaggcatcaaagcgctccaaatgtccacttccagacactacaaaaagagtgtttcaaacgt

SEQ ID NO: 774116 - DNA, 552 bp, Homo sapiens
tttccaaattaattattatttcttttttgacgctattgtaaattgaaatgttttcttagtttcattttggggttttcattgtagatgtgtgcaattgatttttctatatttatcttgtatgctgtaatattgctgaaataatttactagttctgtcgttcagtggattccttaaaattttctatatacaagaatgttatttgcaaataaagtttyatttctttctattcaatatgggtgactcatttctttagttgccgatttgccatgcataaaatctttagtataatgttgactagaagaggtcaaagtatatatcctattcttatctctgaccatagcgggaaagtatcctttcttttaccattaagttgcatgtttgctgttggcttttcacaggtgccatgtatctggcgtagaaagttctctattcctggttcattgagtttttatttttatttttaatcattaaagaatttggattttgttaaatgtcttttctgaatctatcgagatgatcatgcaattctcgtttcttattctatggataaga

SEQ ID NO: 774117 - DNA, 633 bp, Homo sapiens
tcaaagcaattcttatcaaaattccaacagcccctttgcagaaatgaaaaagccagtcctcaaactcatatggagttgcaaagggatctgaatactccaaacaatgctgaaaaagaaaataacaaaatgaaaggactcacacttcccaattactgcaaarctagatggtcaaatcagtatggccctggcaaacagttaaacatacaagccaatagaattaaacagagagtccagaaataaacccatacatctatggaacactgatttttaataaaagcaccaagtgtattttatggggaaaagaatagtcttagcaacaatggtgtgggacaactgtatttctacatttaaaagaataaaattgggtctgcgttttatgccatatagcaaattacttcaacgtgattcattgacccaatataagagctaaacttatagcatgcttagaagaaaacatgagtaaatctacatgatttttaaatttggcatttaatctatttttgtgtaaaactaaaataatgagcaacaaaagaaaagttagacaaattgaaattcatcaaaatttaaatatattgtttatcaaaggacattataaagtgaaataacgtatagaagtggataaaaatatttgca

SEQ ID NO: 774118 - DNA, 520 bp, Homo sapiens
cagtctgaaactttagatatgtacacacccacacacatacacatgtcctgttttgatgttctataattaattttctctcagtttttaacttttatctatcttattaatgtacagaatcaccctgaaatctggctatggaaaatatcttggtataaattcagatgaacttgttgttgggcgttcagttgcaattggaccaagagaacaatgggaaccagtctttcaaaatgtaagtgctgtttttgtttataaaaacttcctgtcagtttaayacaaagtctgtaacagtaaatcataatatatttaaaaagaaaaagtaggatgcagtagtataatacattaaattggaataaaccactaagaacatacagccttaaagagatttcaaaatgtagtgcaacaaaaatagcattagtacttttgcccacaattatttctctatacccttagtgcctaggtatggatctcatttccactgaagaaccagtcaattttaggtcacagagtaggaaaacagaat

SEQ ID NO: 774119 - DNA, 520 bp, Homo sapiens
cagtctgaaactttagatatgtacacacccacacacatacacatgtcctgttttgatgttctataattaattttctctcagtttttaacttttatctatcttattaatgtacagaatcaccctgaaatctggctatggaaaatatcttggtataaattcagatgaacttgttgttgggcgttcagttgcaattggaccaagagaacaatgggaaccagtctttcaaaatgtaagtgctgtttttgtttataaaaacttcctgtcagtttaacacaaagtctgtaacagtaaatcataatatatttaaaaagaaaaagtaggatgcagtagtataatacattaaattggaataaaccactaagaacatasagccttaaagagatttcaaaatgtagtgcaacaaaaatagcattagtacttttgcccacaattatttctctatacccttagtgcctaggtatggatctcatttccactgaagaaccagtcaattttaggtcacagagtaggaaaacagaat

SEQ ID NO: 774120 - DNA, 488 bp, Homo sapiens
agatatttcctttttctccataggcctaaaagtgccgcaaatatccatttgcggattctacaaaaaggctgtttccaaactgctcaatcaaaagaaaatttctcctctgtgaaattaaagcacacatcacaaagcattttctcagattctgtctagtttttatgtgaaggtatttcctatttcaccttaggctgtaaagggctcacaaatatcaatttgcatattcagaaaaaagactgtttccaaactgttcaaacaaaagaaagattcaactctgtgagatgaatgcacacatcagaaagagatttctcagaatgcttctgtctagtttttatgtgaagatatttmtttttcaccgtcagccacaaacggctcagaaatatccctttgcagatcttacaaaaagactgtttctaacctgctcaatcaaaagaaagtttcaacgctgagagacgaatgcacacatcacaaagaaggttctcagaaag

SEQ ID NO: 774121 - DNA, 608 bp, Homo sapiens
tacatttggatcgctttggggcctatggtggaaaaggaaatatcttcacataaaaacaagatataatcattctgagaaaattctttgtgatatgtgtattcatcttaaagagttgaacctttcttttgattgagcagttttgaaaaactcatttgtagaatctgcaattggtcatttagaacgcttagaggtctatggtggaaaaggaaatatcttsaaataaaaactagacagaagcattctgagaaacttccttatgatgtgtgcactcacctcacagactcgaaactttcttttgattgagcagtttggaaacactctttttgtagaatctgcaagcggacatttggagtgctatactgcctatagtggaaaaggtaatatcttcacataaaaactagacagaaacattctcagcaactcctttgtcatgtgtacattcacgtgacagagttgaaattttcttatgttgagcagttttgaaacattcttttttagaatctgcaagtggatatttggagtgctttgaggccttttttggaaaaggaaatagcttcacatgaaaactagacagaagcattctgagaaaattctttgtgatgtatcca

SEQ ID NO: 774122 - DNA, 608 bp, Homo sapiens
tacatttggatcgctttggggcctatggtggaaaaggaaatatcttcacataaaaacaagatataatcattctgagaaaattctttgtgatatgtgtattcatcttaaagagttgaacctttcttttgattgagcagttttgaaaaactcatttgtagaatctgcaattggtcatttagaacgcttagaggtctatggtggaaaaggaaatatcttgaaataaaaactagacagaagcattctgagaaacttccttatgatgtgtgcactcacctcacagactcgaaactttcttttgattgagcagtttggaaacactctttttgtagaatctgcaagcggacatttggagtgctatactgcctatagtggaaaaggtaatatcttcacataaaaactagacagaaacattctcagcaactcctttgtcatgtgtacattcamgtgacagagttgaaattttcttatgttgagcagttttgaaacattcttttttagaatctgcaagtggatatttggagtgctttgaggccttttttggaaaaggaaatagcttcacatgaaaactagacagaagcattctgagaaaattctttgtgatgtatcca

SEQ ID NO: 774123 - DNA, 471 bp, Homo sapiens
tcaaatgccactgaagtgtatacgtaaaaatagaaaaactggcaaattcaatattctgtatattttacctccacacacacacaaaaccaatggagaaaaagaaaattaatcaaaattaaaatttcagctaaagacgattagaaagmaataaaactaatgacaatttagatgactgagttatagctgcaattgttttcagtaaaagaaataatgctttattcagaatcattatgaacagtgttatgattagcaagtctttcctataaatgtaagttaataattttaaattagttttattttgtatgttctatgccacgttcaccaagtacacttaatattaaataaaatcatttaaatataatatctcattaatgttttgcaaatgaagaagaaatttctggcagacaagttcctcaaaattttcaccctctgtccaagtagggaaatgatactacaacattacttataata

SEQ ID NO: 774124 - DNA, 471 bp, Homo sapiens
tcaaatgccactgaagtgtatacgtaaaaatagaaaaactggcaaattcaatattctgtatattttacctccacacacacacaaaaccaatggagaaaaagaaaattaatcaaaattaaaatttcagctaaagacgattagaaagaaataaaactaatgacaatttagatgactgagttatagctrcaattgttttcagtaaaagaaataatgctttattcagaatcattatgaacagtgttatgattagcaagtctttcctataaatgtaagttaataattttaaattagttttattttgtatgttctatgccacgttcaccaagtacacttaatattaaataaaatcatttaaatataatatctcattaatgttttgcaaatgaagaagaaatttctggcagacaagttcctcaaaattttcaccctctgtccaagtagggaaatgatactacaacattacttataata

SEQ ID NO: 774125 - DNA, 562 bp, Homo sapiens
gtatacgtaaaaatagaaaaactggcaaattcaatattctgtatattttacctccacacacacacaaaaccaatggagaaaaagaaaattaatcaaaattaaaatttcagctaaagacgattagaaagaaataaaactaatgacaatttagatgactgagttatagctgcaattgttttcagtaaaagaaataatgctttattcagaatcattatgaacagtgttatgattagcaagtctttcytataaatgtaagttaataattttaaattagttttattttgtatgttctatgccacgttcaccaagtacacttaatattaaataaaatcatttaaatataatatctcattaatgttttgcaaatgaagaagaaatttctggcagacaagttcctcaaaattttcaccctctgtccaagtagggaaatgatactacaacattacttataatattgtcaactgaaaaagaaattaatttgagcagatgccagtattttttctcaatgggatttcaaagaataagaaagctaaacacagtatcatcgagaattaaatgtgag

SEQ ID NO: 774126 - DNA, 674 bp, Homo sapiens
atattttcacatagatgagaatgtttccatatgtctggcatgcttgtaatccagcactttgagaggtggaagcaggagaatcacttaagcccaggaattcaaaatcagcctaggcaacaaaaggagacccccatctctacaaaaaaattaagaaattagctgggtatggtggtacaaggctgtggtcccagctactcgggagtccaaggtgagaggactgcttgagcctacgaggtcgagggtgcactgagccatgatcatgtcactgcactccagcctgagcaacaaagcaacagcctgtctcaaaaaaaaaaaaaaaaaaaaaaaaaaaaacctggcccgatgcaccagggtcatggctgataaggtactatcagggcaccctcattctaccatcaagcctgtgtgacagctcacctcacattctgactaacccagtttttttgtgctaaggacccccttaaatctctgccttcattatgtgcttggcacaaaggaatgatatatcttaratttggaaatggaattttctttcccaatcttactgtagtctaagtacctttcacaaaacttctattaacccatagctgacttagctttagttcctgggtaaatcaaatctgtgttttgcaaactacgatgttgtaagttcaattgcttctgaatctagcaga

SEQ ID NO: 774127 - DNA, 625 bp, Homo sapiens
ataggcacatgcttacttatacggcaagttgagaaaatccacaatgcaaaagaaggtggaaggacaaagagaaaaagacgcagaaggacttactcttccagccaagatggacttgccctcccacgatgaccaacgagaaaactgaaactagatagaatatttgagaaaactcttttcggggattggaacacaggcagaacaggactgtratatttgagaacaagaaaacacaggaggcaaatctcacacacaattctgttttctgcccaatggcagtttcttgaccatgcagagaggtagagacctccagaaatgaggtaatgtcactttcactaagctgagagtcttgcagtgctaacatgtttggagtttatagaataaggtactggagaagagggaactacatacaggtgaggtctcaaaagagtatgcaaaagttctcggcaggtctggggccaagggctgggggggaatgcatagagcaggcaggctccacaaggcctcggcagagtggctggcacttctgagggctgattggagatgccagagatcacacaaatttgggacatagcagagtggagagaactcacaaagtatacctagaacatgtggctgagacccatga

SEQ ID NO: 774128 - DNA, 625 bp, Homo sapiens
ataggcacatgcttacttatacggcaagttgagaaaatccacaatgcaaaagaaggtggaaggacaaagagaaaaagacgcagaaggacttactcttccagccaagatggacttgccctcccacgatgaccaacgagaaaactgaaactagatagaatatttgagaaaactcttttcggggattggaacacaggcagaacaggactgtgatatttgagaacaagaaaacacaggaggcaaatctcacacacaattctgttttctgcccaatggcagtttcttgaccatgcagagaggtagagacctccagaaatgaggtaatgtcactktcactaagctgagagtcttgcagtgctaacatgtttggagtttatagaataaggtactggagaagagggaactacatacaggtgaggtctcaaaagagtatgcaaaagttctcggcaggtctggggccaagggctgggggggaatgcatagagcaggcaggctccacaaggcctcggcagagtggctggcacttctgagggctgattggagatgccagagatcacacaaatttgggacatagcagagtggagagaactcacaaagtatacctagaacatgtggctgagacccatga

SEQ ID NO: 774129 - DNA, 626 bp, Homo sapiens
ttcatcatataacagagcaatttttggccaggcgcggtggctcatgcctgtaatcccagcactttgggaggccgaggcgggcggatcacgaggtcaggagattgaggccatcctggctaacatggtgaaacctcgtctctactaaaaatacaaaaaattagctgggcgtggtggcaggcgcctgtagtcccagctactagggaggctgaggcaggagaatggcgtgaacccgggaggcagagcttgcagtgagccgagatcgcgccactgcactccagcctgggcgacagagtgagactccatctcaaaaaaacacaaacacaaacaaaaaaaacagattaattttccygaatggcctaccttcccaaggccaaattccttagcatggctcataagctcctccatgctttggtcctggcctccactgcagtcttgtcctgcctgcccctaccctccaggccagctgaccctctggattcagctcaccctcattacactcattcattcaggaaacattaatgaggccaggcctagtggctcaggcctgtaatcccagcagtttgggaggccaagatgggaggatccgatgaacccagaagtttgagaccagcctgggtaacatagtg

SEQ ID NO: 774130 - DNA, 634 bp, Homo sapiens
cagagaaaggcacaccctagtgggtcttccagttccgtggtgaaatgcacagggttttatagacaagcttgaggaggcggtttctgatttacatggggcacaagagattggtcagacgaggtgtgccgtttgcatagcacgcaaagaagttggccgtyccaccctaatcttttattatgcagatggagtctttacctggacagtgccatgttgcctgctttcttactgcacacatggtgacaaagaaaaggaaggagggaacctctacgttgaacatccctggcttccaggtatccctttgctattggcacagctgccagcatttacctatgcaagcttttagcttgcttattcatctctgcttgcagcttgattttttaggctgctctttgttagaaaagaaatgatttcggggctgctttttattaaaaggaaaccttactgaagactcttttaccctcaccatctgcctaaataatttctttctagctcctgtatcagtaacttgcccaaagttaaaatatggttcccagacaaatatatacatatgtgtgtgttagtatgtgtgagagagagaaagagagagagaaagaaagatttgtttgacttatcagtgaaggaatctgcagatagt

SEQ ID NO: 774131 - DNA, 634 bp, Homo sapiens
cagagaaaggcacaccctagtgggtcttccagttccgtggtgaaatgcacagggttttatagacaagcttgaggaggcggtttctgatttacatggggcacaagagattggtcagacgaggtgtgccgtttgcatagcacgcaaagaagttggccgtcccaccctaatcttttattatgcagatggagtctttacctggayagtgccatgttgcctgctttcttactgcacacatggtgacaaagaaaaggaaggagggaacctctacgttgaacatccctggcttccaggtatccctttgctattggcacagctgccagcatttacctatgcaagcttttagcttgcttattcatctctgcttgcagcttgattttttaggctgctctttgttagaaaagaaatgatttcggggctgctttttattaaaaggaaaccttactgaagactcttttaccctcaccatctgcctaaataatttctttctagctcctgtatcagtaacttgcccaaagttaaaatatggttcccagacaaatatatacatatgtgtgtgttagtatgtgtgagagagagaaagagagagagaaagaaagatttgtttgacttatcagtgaaggaatctgcagatagt

SEQ ID NO: 774132 - DNA, 634 bp, Homo sapiens
cagagaaaggcacaccctagtgggtcttccagttccgtggtgaaatgcacagggttttatagacaagcttgaggaggcggtttctgatttacatggggcacaagagattggtcagacgaggtgtgccgtttgcatagcacgcaaagaagttggccgtcccaccctaatcttttattatgcagatggagtctttacctggacagtgccatgttgcctgctttcttactgcacacatggtgacaaagaaaaggaaggagggaacctctacgttgaacatccctggcttccaggtatccctttgctattggcmcagctgccagcatttacctatgcaagcttttagcttgcttattcatctctgcttgcagcttgattttttaggctgctctttgttagaaaagaaatgatttcggggctgctttttattaaaaggaaaccttactgaagactcttttaccctcaccatctgcctaaataatttctttctagctcctgtatcagtaacttgcccaaagttaaaatatggttcccagacaaatatatacatatgtgtgtgttagtatgtgtgagagagagaaagagagagagaaagaaagatttgtttgacttatcagtgaaggaatctgcagatagt

SEQ ID NO: 774133 - DNA, 626 bp, Homo sapiens
ttgtaaggccaatatgagggcacctaactccgcctgttgcgtagttttaaaacgttcctggattttgtgctgccagttctgcgtggcatcttgccacactatagttgcctttccagtttttcctgaaccatctgtaaagacagaagtggcgtraagcaagggctcagagacaacataaatacaaatttaacaggcacagtttgtaaaaagttcaggagtttagaggctggtcaatgaaagctgatattaccaataaagtcagtcattgctacttgccaatcaagatcacaagctaggagagtatgaaattgtttcttgtttaacagtaggaaaagagtagtggggttattttggccatatgcccagttaggccacaattataatacgtggccccagtcaacattgcagcaaaggtctgagccagatgggttgtagtgcctatattctggcacactttaataaacacgctgatttcagtggcagtggctcggactggagttattgctgcctgacaatccttatttgcattttcaaaagccaattacaacataagaagtttggcagctttaggatagggtgcctgtttttttattgcagcctgcaatcagttgataaattcaatgtat

SEQ ID NO: 774134 - DNA, 604 bp, Homo sapiens
atatccatgaaaaaagaggataatattactcccaatatcgcaggggatgaacaccaccctgtgatattgttcctaatatccggggggatggagagtatgatatcactcccaatatcgcagggggtgtacatttcccctttgatattgttcctaatgtcaacggagatagaggakattattcccaatattgcaaggtgtacatcccccttgtgatattgtttttaatattgaggaaggaggagaatgctattactcacaatatcgcagagggtgtacagcctccttggatattgcccctaatatccaaggtgggagagaatgatattactcccaatattgcagagggtgtacagcccctctgtaatatagttccaaatatccagggaaggagagaattatactactcccaatatcgcagggtgtgtacacccctgctgcgatattgttcataatatcaggggaaaaagaaaatgatgattccctttatagcatgaaatgtacacataccctgtgatattatttctaacatccagagaggaagaggatgatattacctccagtatcatagaaggtatacaccctccctgtgatattgttcctaatg

SEQ ID NO: 774135 - DNA, 597 bp, Homo sapiens
cttgtgccattttctccgaccttctcttccctccagaagcaggattgcccacccattctcatgtttcctgcctaagtgacaccttctagatctgaatcaggggtgactggttcttcttcctctgctcctaggctcaggcctcacctccaccacccacctgcaggtgcaacatgtgacatgcttgggaaaacaagcycttgtttacctgcctggtaacaaagtaggaattctacggacatttgattccattgtaacagcataattaccttcaaacaaattctaactttctggaaatgtcaagtgtgtcatattcactttaattccctgttgggcaagtaccttgcatttattacatatgcagtcaaatattggttaaattgaattatatttgatttttaaaatattgataatgaatacagggaggagagtgtctttgtatatggatgtaggctggactcctccccaggcctacctctgccagatttctttttatccaactcttaatttatctaatatttctcagaggagagctttgctccttgtccacattattcttggggggaaaaagtcagttgcttctccttaggctaggggccc

SEQ ID NO: 774136 - DNA, 568 bp, Homo sapiens
aaagtaacccagtagtatatgctgtggaatttagaactgtaataactcattcctttacatatacccaatcctatgccatccatacataccatattttaccaagaaatttaaatcacggattatttaaatcacattcctttttttttttgagacggagtcttgctgtcgcccaggctggagtgcagtggcgtgatctcggctcactgcaagctccrcctcctaagttcacaccattctcctgcctcagcctcccgaatagctgggactacaggtgcccgccaccacacccggctaattttttttattattttttagtagagacggggtttcaccatgttagccaggatggtctcgatctcctgaccttgtgatccacccgcctcggcctctcaaagtgctgggattacaggcgtgagccaccgcgcccggcctaaatcacattcctttacatgtttgaaagtagtttataaataactttagggtattctacatggaacctgtattttcttccacatctgttaaaagttaaaaaacaaaaacaaacatgtatggagccatcgcacagaaa

SEQ ID NO: 774137 - DNA, 523 bp, Homo sapiens
tagctagagaaatagccagaaaagattaggttattattatttttttgcctttttttggttgttgtttgcccaaccttcaataaggattgggttcttaatcttttacctgcacactgcagactttaggaagctaattgatgaaatcagaataggcttggaccttatgctctttggtgatttctgtaacctcccttcctttctctagatttttagaaaattttattttttaaacttttatacagatggggtcttgctatattgcttaggctggtcttgaactcctggactctagcgatcctcccaaagtgctgggattacaggcatgagccactatgcccagccaactttctytagattttaataacccggggacctgttggcttgatgacttgttccatccctgtaatgatcacaaggtcgatggtggacctgtggtgtgtgttcagctgtgtttttcagacctgctcccaacagactctcttctttagtcccctctcaatcctgtggggtctattttgcataa

SEQ ID NO: 774138 - DNA, 530 bp, Homo sapiens
ctcctcacccccgtctcttttctcgtggttagttatgccaacgattgttccagaatccaaactcacacagcagagagaggcagctcagcacacggaccttgcagccagttggccctgaattccagccctgccacttactagctgtgtgatcctgggcasgtgatttcaccgtctttcattgtggagttgtgaagattcataagctaactctcacacggtagtgagcgcagggcccggccactcacaggtgcatggtaatgtcggtggtacaggtgtcttgtggctgtcactgaggttgttcataatctcctggctcctgttcctgctggagccacggggagctgcccttcccacccacttaagttaggcaccatcccgtgacttgctttgcccaacaaaatgggagcagaggggtgtcacttccagccgaagtttgcagaaccaacagtgtgtgcagtaccacaccctctcttcccgatatctggcaagcatcgggcagtggctctatgagcttgggtcctgagtgaggg

SEQ ID NO: 774139 - DNA, 629 bp, Homo sapiens
tgtgcatgcatgtatctgtgtgtgaatgcgtgtgcatgtacatgagtatatgtgtgtggcatgtgcctctccaggtctgctcatgaagaagggaagggcatgtatgtcaggcactagaacaaatggttttccagattcccaaagggcagagcagtcaggcaggagccagatgccttctgraaataccctttgggagatgacacaggtttcaggaccaaggcctcatgccggcctagggtgggaagtctggggagcctggcatttgggaatggggtttcctgactctggggtgcccaggagactcctgaagaccagccctccatccccacatggatctgtctgcctcccatccccacatggatctatctgcctgttgctcctccacctgctcctggtggcctgggggcccagctcctaccgggtgtcccgggctctgccagctctccagcagccctccaggacctcagagcctggagtggggctggtgtcacagagtggcagtgacggtgacaggcagctcagctcagaggtgctatgggctttcccgcacctccctgggctcgtcatttattgagtcatctcttcaaggttctggaggagctccaggaggagcgggtgggcagggggac

SEQ ID NO: 774140 - DNA, 629 bp, Homo sapiens
tgtgcatgcatgtatctgtgtgtgaatgcgtgtgcatgtacatgagtatatgtgtgtggcatgtgcctctccaggtctgctcatgaagaagggaagggcatgtatgtcaggcactagaacaaatggttttccagattcccaaagggcagagcagtcaggcaggagccagatgccttctggaaatacccttygggagatgacacaggtttcaggaccaaggcctcatgccggcctagggtgggaagtctggggagcctggcatttgggaatggggtttcctgactctggggtgcccaggagactcctgaagaccagccctccatccccacatggatctgtctgcctcccatccccacatggatctatctgcctgttgctcctccacctgctcctggtggcctgggggcccagctcctaccgggtgtcccgggctctgccagctctccagcagccctccaggacctcagagcctggagtggggctggtgtcacagagtggcagtgacggtgacaggcagctcagctcagaggtgctatgggctttcccgcacctccctgggctcgtcatttattgagtcatctcttcaaggttctggaggagctccaggaggagcgggtgggcagggggac

SEQ ID NO: 774141 - DNA, 568 bp, Homo sapiens
gccccagaccccaggggggctcctggggggtgagaccctcaggcctggcgatgaggtcagcatggggaatccagaggagagaaagcggaggctcaaaggcagaccccagagaccctcctgagcactcaaaggtccctgttggagaagggaatcggggcggcctgtaggctgattgaaattattcagcctcagttgagactccactctctgggcccccatctmtaacagagtgcttcccaggacagaagatggcggctctggccacagcacccctcctcctgccccagctccccggagaggtcaaagcatcaccaggggccaagtggagggggtgggtggcagttttttgtcaaaaatgaaccctgggctccctggctctgaggctggtgaggtcccagtgccttgggccttggatcctgcatagagacagggctgcgttggaatcggctctggcagcctgtggatagccacctgtgggaaacactcaggtcctgagctttcttctttcttccccctttaaaacataagcaggcgcctttgttccagggcttaggcaggagctccctgg

SEQ ID NO: 774142 - DNA, 574 bp, Homo sapiens
ctcgggcccctggtgcatcagatggggaggatggtacctgcctctgtagtcacaggggacaataaatgtgaccctaaaggaagccaccattttcaaaaatgccctgggacatgggaaatgccgtggaaaagcacggcccgtccgcaggacagcgctgtctctgcagctcagacggaygctattaaccctgataacaggtaaacagtgtgcctgcttcagctgcaaattagacacggctttatctctgttcggtaaggctggtgaaagtgacagaggcctcctgaggaggcctggttatcgctggtggcccatgtcctcgttgccgctcagcccatatccccccaagtgccctctggcccgggtgtgatgctcgtgcagcctcatgagtctgacctggacgctgccctcccctgccgcttgatgccattcctgcatactacttctctgacgcctctcctattttcccgtctgcacatgtgtgccttctcctactcctggaatgttctggattattcataacagactcagggtcaccagagagtagagttgggtcagcaggagagctcagtgttgg

SEQ ID NO: 774143 - DNA, 567 bp, Homo sapiens
ctaccacgtgcttctcaagctagggaacccccctcagcccccaagggtgtgcagaggtgagatgagggtggctggccacacagcccacgcatgtgcctcctctcaaagtatccgttctagccaaagtgtctgggggaactattactgtcaggttayagccagcacaagcatattgtggattcaatgtaagatgtgcttgaagttttaagagaacaaataagacttcaaagaaatgtcatcctttctctggaccccttctggcaacacacgcccagtccctcaggggtacaggtttaatatttcctctcttctggagtcttccggggaaaatgtatacctccagggaaatgctgtgtgcctctctgtcatccaagacaggccacttaatctccctttgcctgagcacagcccactgcacgcatgttctagctctgtgatgcaccaccacgaaaaaaataacagcagaaccagcccttcctttctattcactgaaggagaaaaaacagaattaactgcttcatagacagtcaaaataagctttctgctggcctcagtgacaatgcttga

SEQ ID NO: 774144 - DNA, 518 bp, Homo sapiens
cctgtcttgctaaggccatttgagttctgggggtgaaaacagcaaaccctccgaaacgcgtgtcctttgcccccagcagtcacggcaagggtcacggtcagggtccagggcaacccctctggtgagcccccatcagyccctccccggggagtgggggcagactgtggtagaaactccggtgcctttgggtacagatgtggaggtggcgccgtgcctggggaggtgggaagatggtgttggcacccggtgccacaggtcaaccccggctgatgggcagcccctccccacccagagttgcccgttgctcgtgtgcttggagagtggcacagtgccaccggatgcccaccagctgcactgggcgcagtgagacagctcagagcagatgcccccaggctgtccaggggtggcagagctggtgtggttggagcccctcctcgctctccttgtgtggtgggccgtgggctggatagcaggcggcggtgagcgagtgactgggatctgccttttcctgccttcgt

SEQ ID NO: 774145 - DNA, 462 bp, Homo sapiens; identical to SEQ ID NO: 734500

SEQ ID NO: 774146 - DNA, 510 bp, Homo sapiens
atacacattttaggataatgccaggttgtattctcctgaatagaggattttatgtctaatttccaccacttgcttgcagagaatggcatcctatgtaatagttcctctatgctaccttacccttgctgaaagctctaaagatggagcattcaggctttattttgaacttcctagatcgagaaaacgttcccaagcccaaaatgttgttgtagcatatttgagtgtggattttaacaaagtacaactcttytgaaataattgaccagcactaaaatgttcactcttcaagttagacttttgtcattcttgaaacaggaaatggttctctgcaaatatttagaaatgctgtggaaactctgaagttcacagccatggcaaccctcaggatttcaggctgtaaaaggcatcatgccttccttaagataattatttaatttccaaatatttgtcataagtgaaaatatgggggctgtcttagaagaggcaagctcttccagtccattttcagaa

SEQ ID NO: 774147 - DNA, 618 bp, Homo sapiens
ccaccaggcacagagtcttgagggggtgcatgactccctccccacaaggaatagggtctttggatgaaccagggtcacaggtgaatgaccctacaaggcataaagggctataaatcattaacagtttgtattagtcagtgttctccagagggacagaaccaataggatatatgtatatatgaaaggtagtttattaaggagaattgactcacacaatcacaaggtgaagtcccatgataggccatccgcgaagtgagaaggtaggaagccagtaatggctcagtttaagtccaaaagcytcaaaagtagggaagctgacagtgtcagtctatttccagaggcccgacggcccccggcaaaccaccagtgtaagttcaagagtccaaaggccaaagaacctggagtccgatgtccaagggcaggaagcatgcagcacggaaggaagatgaaagccagaagactcagcaatcaagcttcttctgccatcttccacctgctttgtttcagccgtgctggcagccaattgaatggtgctcacccacactgagggtaagtcttcctctcccagtccactgactcaaatttcaatctcctctgtcaacaccatcacagacacac

SEQ ID NO: 774148 - DNA, 546 bp, Homo sapiens
aaacatgagtttatgagccaatatcagggaaggcgattgggcataacagctagaattaattttctgttattcttgaagacatttaaaaggcagagcctattaccaaggaaaccaattccaactttgaagctctgcttgagcatttgctggaggcaaagcaatgtgctaaaatgttgcatagggtcttattgatccccacaatgactccatgaggcaaacattakcactcagttcccgctttctgcatcaccagtgtagagatgaggcacagggaagtaaagtgatttgcctaagctacctatgttgtacatgttatggagccagactgaaccaaagcagcctggcttcagggactgctctcaaccaccatgttcacagcctgcctagtggaaacatcagtgtgtacttgagatcaggagataaggcttagactctctgacttgcttcttaatagtttgtgcagcattggacaaggtgcttcagctttctgggtcttatttccttttgtataaaatgaagattgtatactatctacttcttagggct

SEQ ID NO: 774149 - DNA, 634 bp, Homo sapiens
gactcccatctctagtgttctttatttatccttcctcttactcagtcctccttcttttccctctttgctggctagtctatgttctcccaccaccaccaccccaaatgcatgctttgcttttacctgccccacttttgccctagaagcaaactcctatgaatggcagcttccaggctccctgccctctaatttgcaggtgagtacagccattgaaagatcgaagcaggtaatcatgggttaggtagacagaatggaggggggccttattctcccctgcttcctccctggttctctgctgtgctccaggcagtggctctatacctctgttcccttaggcatttctgcctctatgattctggctctcaccgggctctttcacagtttcctgtccttgccacttcagactcaggaatagtaatggctgtcaatcattgctagtctcaggataccttcacttttctagctggtttccttaaccctgcctacacayggctaaatggtcttccgtcattaaaaatctctaagttgaaccacctgagtcaaatttgtttttctgtccggactctgaccaacatatcctccctcctattgctgtctgtggtgccttggaactacccatctataatcagtaaat

SEQ ID NO: 774150 - DNA, 541 bp, Homo sapiens
tacccttaaaaatttgtcctatacaaattatcagataaatggatattcattgcacttttattcacatgataggaaaaaatgggaaaaagaaaaatatccaattataggaaataaactgtggtatatcaataaaatgaatgacttacccagtcattaaaagttgtatttattaagaatatacargctgggtgcggtggctcacacctgtaatcccagcactttgggaggctgaggcgggcagatcacgaggtcaggagatcaagaccatcctggctaatgcggtaaaaccccgtctctactaaaaatacaaaaaattagccaggtgtggcggtgggcacctgtggtcccagctactcaggaggctgaggcaggagaatggcattaacccaggaggcggagcttgcagtgagccaagattgtgccactgtactccagcctgggtgtcagagtgagagtctgtctcaaaaaaaaaaaaaaaaaaaaagaatatacaacaccaaaaattacttacgttataaataatgtgatgaagtaaacattc

SEQ ID NO: 774151 - DNA, 630 bp, Homo sapiens
aattaatgcaagtaaagggcctaggacacaagctggtacatagtaggaatttttaaagtgtctgtacttattgtaattgttagaattatataaacaccaatgcacacaggggctgttgaatattatttgttgttgactgcgtctgttgtacaagcacagtgaaagtctcaatttgggaacccatacacaattccagtcaggttaagagtggctcacatagaattgcaggaacaaaaatcttactaagtttcacagtacgttatgcatagtcctttgctcttagccactgctcartaagtgtggaacctaaaaatataattcaaaatgttacctgtttgtttaaattcaactgtttgaacacagatgcaaggttcttgagggtctaggatgtctctgtggatatttcctgaaatcaagtaaatttaaatagctcaccttacccttcccaaaaatgaaaagtctgcatttagcgcatgcatgggcaatgccaaagaaaaatacatgttaataagccaatatttctataggtccgtattctacattttgcacaatggattcctctggagatgagggcccaaagcaggaaagcttttctgaaaaagttcaagggaagaaaaggtttctctagga

SEQ ID NO: 774152 - DNA, 625 bp, Homo sapiens
ggatagctgaagctgacctgaaaacctgcaaaagccagaaacttctgaaataagagtcactagatatttgggagtctagagatgtgtgtgtagctagcaagcaggacaggagtaggcaagggaactcctgagaacccctgaagctcagaatactttgacatgataacagatcttgggaatttcaaattggctggggaactctgtgaaatcaacaggcaggaaggcagggatgaatagaggccatgaaaaaacaaaatctgaggacaaagtyaacaatatgaaggccaggaaagtagaactgccctaagggaaagatgagaaataaacgaagattcaagaaaagatgaagatgccaaaagctgtatggcatgatgtggtaacatctgagggaatatatgagatgtctgaaccaatacacatagtttattaggtcaacaaaagtttaaatcagaattccatgccagctatgaatcaaaataatgttcctacctcaatctttagatatttatctttcacttaacattttctgatgcttttaatttagacttagacatgcaaatagctatgacaaagtaagaacttcccaacaagctggacaaatttctggatgacgcttgctgcaatg

SEQ ID NO: 774153 - DNA, 625 bp, Homo sapiens
ggatagctgaagctgacctgaaaacctgcaaaagccagaaacttctgaaataagagtcactagatatttgggagtctagagatgtgtgtgtagctagcaagcaggacaggagtaggcaagggaactcctgagaacccctgaagctcagaatactttgacatgataacagatcttgggaatttcaaattggctggggaactctgtgaaatcaacaggcaggaaggcagggatgaatagaggccatgaaaaaacaaaatctgaggacaaagttaacaatatgaaggccaggaaagtagaactgccctaagggaaagatgagaaataaacgaagattcaagaaaagatgaagatgccaaaagctgtatggcatgatgtggtaacatctgagggaatatatgagatgtctgaaccaatacacatagtttattaggtcaacaaaagtttaaatcagaattccatgcyagctatgaatcaaaataatgttcctacctcaatctttagatatttatctttcacttaacattttctgatgcttttaatttagacttagacatgcaaatagctatgacaaagtaagaacttcccaacaagctggacaaatttctggatgacgcttgctgcaatg

SEQ ID NO: 774154 - DNA, 557 bp, Homo sapiens
  misc_feature 418: n = A,T,C or G
tacttaaaaataggctttttcttcacataaataaattgtataccatttaatgtgttttatttcaacagactaatagatcttttaacacttcttagtcctcaaaataaattattaaaaactttgtatttcatgtcatattatataaggaaatagaattttgaagaataattcatgctgttttaaatttttacattgtacattttaatagctaatcaactcttaagtatacatttgatggtaaatagatgctagctaatctrgaatcatttgaaatattgattatctgatttatagtttggttgcaaggaaatctactgtaagcaaatcataatagatagcaaatcttagaacatgtagaaaaaaagaaattaaaaaaagcaaatcttagaacatgtagaaggaggaaattaaaaaatanatagcaaataacacaaattatgcatactatatgtggttattttcatacaactttgataacggtgaagaatcatacttattgaattttaaaatgatgatgtttaaaatcactctatgactaaagcacatgagaataaatg

SEQ ID NO: 774155 - DNA, 611 bp, Homo sapiens
atctacaattcagtttctctcttacgggttcaataagcttcaacaaagcacttggtgatcacatattggaaattcatctttgactgaagacatgacactctcaatagaacctatgttctattaacatcccatttctcccagggagggccacatcgtccgcccactgaaactctccaaggtccaatagcaatcttactggagtgcagtttgagagaactggtcaagagtgatgataggggctttacaaagaaaaaattgagctcaaattttagagcaagaaaaaatggattttaaccaaagataagtattcccaaactctacgatgtggcaaataagctgatggtagctcctctgtattagacacagacacagataaaaatcagtagaccaatccaattcttctactaacaatcacatcaactaccaaacttctcttctgctccttctgcacttgtttccagaacygacgtccactccccgggacaacccgccacatgtacactggctccgctgcccagtgtttctgttgtttggaattatttaggcagagctgtaacccctttcccataactaccccctccccaccatccaattgctttcttctggttctt

SEQ ID NO: 774156 - DNA, 531 bp, Homo sapiens
gatcagcaagccccaccctcatcccttccctgctgcaaatgcttcctggatgagtagctagagaaacaactcataccctagcctccccagcaaaccctccctagctgggacagtaacccagccaaggcttcacagctaagcaatgagacttgtgggagagctgggaatgagttcttgctatgcatcagggagcaagcatcacatggtgtttcatcctgccaagccacagggcagtctcagaaccagataggcagatgaacaggttgtattaatttgttttcacactgctgayaaagacatacccaagactgggaagaaaaagaagtttaattggacttacagtaccatgtggctggggaggcctcagaatcatggagggaggcgaaaggcgcttcttacatggtggcggcaagagaaaatgaggaagaagcaaaagcagaaacccctaataaacccatcagatctcgtgagactaactcactatcatgagaatagcacttgagagaccagcacccataattcaattacctc

SEQ ID NO: 774157 - DNA, 585 bp, Homo sapiens
gtcttgtgggactgagctttaaactacggggcctccactaactccgggagctaatgccacaattgaattgaattattgggcacctagttggtattgattggtattgaaaaagagaacatatatttgatgttagaagtggcatcagaaaacatcacttaggaaccaacagtaatttctgacattgacctaaaccaagtttatagcaacaagcagagaaagatamaattgaaggaagcaacagccacacaatctttcttttttcttttttttttgaggcggaatcttgctctgtcgcccaggctggatctccactcactgcaacctccacctcccaggttcaagcaattttcctgtctccggcccccacgagtagctgggattacatgtgcctgccaccacacctacctaagtttgtattattagtagaaatgggggtttccccacgttggccagactggtcttgaactcctgacctcaagtgatccacctgcctcggcctcccacaatgcttgggattacaggtgtgagcccccgtgcccggccagccccccaattttaacgagaaggcaaaaaaaaaaaaaaaaa

SEQ ID NO: 774158 - DNA, 585 bp, Homo sapiens
gtcttgtgggactgagctttaaactacggggcctccactaactccgggagctaatgccacaattgaattgaattattgggcacctagttggtattgattggtattgaaaaagagaacatatatttgatgttagaagtggcatcagaaaacatcacttaggaaccaacagtaatttctgacattgacctaaaccaagtttatagcaacaagcagagaaagatacaattgaaggaagcaacagccacacaatctttcttttttcttttttttttgaggcggaatcttgctctgtcgcccaggctggatctccactcactgcaacctccacctcccaggttcaagcaattttcctgtctccggcccccacgagtagctgggattacakgtgcctgccaccacacctacctaagtttgtattattagtagaaatgggggtttccccacgttggccagactggtcttgaactcctgacctcaagtgatccacctgcctcggcctcccacaatgcttgggattacaggtgtgagcccccgtgcccggccagccccccaattttaacgagaaggcaaaaaaaaaaaaaaaaa

SEQ ID NO: 774159 - DNA, 649 bp, Homo sapiens
ttatttattatttttaggaggtgaaaaatattgtattttatatcaaattatattatcacaaacataagtattatatatcattatatttatgagataaaataggataaggatttactgtaataggaataaacatttcatatattttcatgaaattttaactgctttattgactaaaatacaccagtagaaatcatttaaatttttatctgtggattatattcaaataacccaaaatgtggaagccttaacaaatagtctagttacatttaaaataacaactttcattattctacttaagactttgtcaattcagtcttaagcaagggccaaataccctgtgtctaacgcagaacttcactctagctacaaatatgtgtatgacaagccaagacaagattttaggagctttgattaatttttaaaggagtcttcccctgaagcaaaatacaatttgtatkcctatgttaggagccctgaggttgttacacaccagtatgcattctgtgttaagatttgtgatgggtgacaagttaatacttttctatatatgggagaagaaccattgtaaaaagaggatggaaacatttatttccttaaaattctctgtgcaggagaacactcagacataggcacatttctagtttgaagc

SEQ ID NO: 774160 - DNA, 644 bp, Homo sapiens
gtaagcactaaaacagatggaaaatagctcctgaacaattcttatattgattgtttggtcaaatgaaatctattcttaaaattaaattttaaggccaggcgtggtggctcacacctgtaatcctagcactttgggaggcagaggcaggcggatcacctgacgtcacgattgtgagatcaacctggccaacatagtgacactccaacttcattaaaaatacaaaaattagccgggcatggtggtgcacatctgtagtcccagctacttgggaggctgaggcaagagaaacgcttgaacaagggaggtggaggttgcagtgagccgagattgtaccactgcaccccagcctgggcagtgagccgagatcacaccactgtaccccagcctgggctatagagtaagactccgtctcaaaaaaaaaaaaaaaaaaaactaaattttgcttatttctttctacatttttacargaaaatccaaaattatatatgtgtctcgaactatatttctactggatgtctccatcctggacttttctacaacaaataactgtcactctttataattttaactccctgcataccgttttctgcccaccatctttctgtttacagcttacttgttttaccatcctgacctcagcaatc

SEQ ID NO: 774161 - DNA, 631 bp, Homo sapiens
tctcaaacatttctaacagaggtgattccatgatctttcatcattttgtagtttaaaaattgtagctttcctcgttatcaatgagaaatgcctgtggaatattgtccaaaacctttgtgcaacttaccttgatgagttatgataaaaagatgttcatcatggattttatttccttttgtttcactttgcagttcttgtgcattcaaaactttttccaacttgaaatgaaaaataaaaagcctgtctgaaattgcagaacttggtttttatsaactttagtaagaagtagaatatgataatgacaaatgctcctccaaactcaaaattctcagaaaccaatctagtttcttttaaacaatggacgaatctcatcataaagagtgaattgaatttgtgatttttattcttctcagaaaatttctatttggtaggattttatcataataaatcctattaagctctttgagacatcatatcccttttcatgaaatgaatatgatgaaaacttgaaaacttgctgagctgactatgcatttggcattcttttattcccctaaagagcctattctaagaatattttaacattctttatcagttaatccttagaaactcaccgatgaagacatcaagg

SEQ ID NO: 774162 - DNA, 514 bp, Homo sapiens
aactggggagagttaatttctcaaactttaacctagtttgcttaggattgggctcaggggaagggaacccagaagcctgacatgctggctaaagggtaaaagtttttttttttttttttaccagttaggtttttggcctccctctccctgtgcaaactggtaaaaggcctcagaattttttagctgtcctcaaccccacccccattttgttttgatacatgttttctataayctggtttatttctcaccttcaggcaatcaaactccaaacgttcatgcaactggagacttggatgagggccccttttgccagggaccctttgataggcttctgagggagctctgactgccgttttccccaagcagtgccccctgtcagcagaaagcagttcagatgagtctttgtccttatccttattccaacagcagttaggtatacttctttagagggggaaatgatagagacaggaggcagccaagggtcccccagtgaaaccctgccttcaagcctaag

SEQ ID NO: 774163 - DNA, 604 bp, Homo sapiens
tacctttatacagggctaagttaattcatgtaaaacacttagaatgaatacttgcattcaatttaacaatcccttcaaccctttgtatttagtgcattcagtggctgagaactttccttgtagagaaatgaaaactcaacagtttgctcataaaagattcgcttactcctttagaaacagttgagtacatgcaagaagaaaatacatgatttcatttactcttacttagtggcagtctgtgagaaagatttcacagatttttcccctcagggaagtagattaaggaaacatctgagaacccctcaagycaccctccttgggtttctactctttgattgttttgaacatgaccattttcctcttaacttaccctagccggagcattatctaagactgtggttacccacagctggaaaggtaagagggccaagatgcctgagatagctggaagggctttctgatcctgtaagaaaaatgttgatttctgaggaattttaaaactgcagcctaacctcctcatgagactggttcaggtctcttgtcaatagagttatcctgttttatgatcagactgaacccatcctctgtttgttgtttggccttg

SEQ ID NO: 774164 - DNA, 604 bp, Homo sapiens
tacctttatacagggctaagttaattcatgtaaaacacttagaatgaatacttgcattcaatttaacaatcccttcaaccctttgtatttagtgcattcagtggctgagaactttccttgtagagaaatgaaaactcaacagtttgctcataaaagattcgcttactcctttagaaacagttgagtacatgcaagaagaaaatacatgatttcatttactcttacttagtggcagtctgtgagaaagatttcacagatttttcccctcagggaagtagattaaggaaacatctgagaacccctcaagtcaccctccktgggtttctactctttgattgttttgaacatgaccattttcctcttaacttaccctagccggagcattatctaagactgtggttacccacagctggaaaggtaagagggccaagatgcctgagatagctggaagggctttctgatcctgtaagaaaaatgttgatttctgaggaattttaaaactgcagcctaacctcctcatgagactggttcaggtctcttgtcaatagagttatcctgttttatgatcagactgaacccatcctctgtttgttgtttggccttg

SEQ ID NO: 774165 - DNA, 459 bp, Homo sapiens
atcaacccgagtgcaatcgaatggaatcgaatggaatggaatgcaatggaatggattcaacttgaatggaatggaaagaatggaatcaacacgagtggaatggcatggaatggaaaggaatggattgaattcaacccgagtacaggggaatggaatggaatggaatgcaatggaatggaatcatccgtaatgtaatggaaaggaatggaatggaatggaatggaatggaatggaatggaatggaatggaatcaactcgatwgcaatcgaatggaatggaatggaattaaccctaatagaatggaatggaatggaatggaacggaacggaaaggaacggaatggaatggaatggaagggaatggaatcgaacggaacggaatggaatggaatggaatggaattgaaaggaataaacgtcagtgcaggggaatggaatggaatggaatggaatgcaatgga

SEQ ID NO: 774166 - DNA, 696 bp, Homo sapiens
ggcacagacgctgagccactgtggggagcaaggaggggtgggcctttagcatcaagccctctcctctccctgcaccgtaatcttgcacaccctataccctctcccctgcaggaggcctgcatagccctcacctccatccctagcaaaccccagcatgacactccctggcagtagctcccgaacgtccacatcgccacctccgttcctagtcttgccaaagaagatctctagcttgtccagcagctcctcctcactcagcctgaggctggcaggaaatccagtgaccaacaccctccggccactcaactggctggacayctagggggagacagcaaggggtggtcccagacacagctccacttccccatgcccaggtgcatggcatgctttgcatgccccaggattctgtcataccatcacctggatggtggtgaccatgggcagctccaagggctggacctgcacccgcagccggcactcctccatgttgatcgtgtgctccttttgttgcagcacctgctcagccactgggtggtgggaaacagggtcagtactgggaaccctccccacctccctcctgaggctccccatgagcttacctttggggtcatcaaaggtgatcagagcagagcccgcaagcagagggcagtggatccgcaaattggaaactaaagacttaggcacttccgggtcctg

SEQ ID NO: 774167 - DNA, 628 bp, Homo sapiens
catccatccacacgctatcttcctccttcccatccatcctccatccatcaaatcctcttacttttaccccttaaatatctctaaaatctgccatttcttgccatttctactgctgcctaccccagataaaagtcaccaccatcaatggcaatggcctgcaatggccttctttttttctttttttttttttgagacggagtttcaccttgttgcccaggctgatcttggctcactgcaacctccgcctcccaggttcaagtcattctcctgcctcagcctcccaagtagctaggattacaggcccatgtcaccacgcccagctaatttttatatgtttagtagagacggggtttcaccatgttggccaggctggcctaaaacttctgaccacaggtgatctacctgcctcggcctcccaaagttctgggattacaggtgtgaaccamcgagtccagctgcaatgggcttcgtaaatgttccctgcattcactctcgcccttttcatatccattcaccaaaagactgatggagtgatctttttaaacccaaaatctgatatcacactcttgcttgaaactttttaatggattatcactgttcttaggatataaatctttattatgaaaaa

SEQ ID NO: 774168 - DNA, 589 bp, Homo sapiens
tacacccgcctcggcctcccaaagtactgagattacaggagtgagccaccctgtctggtctcacttctttttgtatctttttccttcatcttttattttctacccatctctccatttttaaattaatacatacataaattttaaaaaggaaaaaaacttgtamatgaatattcagagcaggattattcataatagctaaaaagcagaaacaacctgaatgtccatcaactaatgataaataaacaaaatatagcctagccatagagtgcaatattatttggccatggaaggaatgaagtatgaatacatgctagagtgtggatgaaccttgaaaacattatactaagtgaaagaagcaaggcacaaaagatcacataccatataattccatttatagaaatgtccagaatcggcaaatccatagagacagaaagtagattggtggttgcctaaggctagatgtttgggggaaatggagagtgactgctgaaggctgcagggttttttttttagggtgacgaaaatgttctcaaattgactgtggttatgtacaactctgtgaatatactaaaaaccaatgaattgtatt

SEQ ID NO: 774169 - DNA, 616 bp, Homo sapiens
gtatgaatacatgctagagtgtggatgaaccttgaaaacattatactaagtgaaagaagcaaggcacaaaagatcacataccatataattccatttatagaaatgtccagaatcggcaaatccatagagacagaaagtagattggtggttgcctaaggctagatgtttgggggaaatggagagtgactgctgaaggctgcagggttttttttttagggtgacgaaaatgttctcaaattgactgtggttatgtacaactctgtgaatatactaaaaaccaatgaattgtatttttttctttttttaatttctttctttyttttttttttttttgagagagtctcactctattacccaggctggagcacggtggcatggtcatagctcactgcagcctcaacctcctgggctcaagagatcctcccaacttagcctccagagtagttgggaatacaggtagataccacaatgcctgggtaactttttaatttttcatagagatgaagttgcactgtgttgctcaggctgatctcaaactcctggcctcaagcaatcctcccaccttggcttcccaaagtgctgggattataggcatgagccaccatgcccggctgaa

SEQ ID NO: 774170 - DNA, 513 bp, Homo sapiens
ctagtgatttttctagtccagtgatgggcaattcgaagctcaaagtctaatttcagggagaaagatgaaaaacaacctgcatccagccgggcctggtggctcacagctgtaatcccagcactttgggaggtcgaggtgggtggatcacctgaggccaggagttcragaccagcgtagccaacatggtgaaaccccgtatctactaaaaatacaaaaattagccgggcgtggtggcttatgcctgtagttccagctacttgggaggatgaggcaggagaatcgattgaacctgagaggttactgtgagctgagattgcgccactgcactccagcctgggcaacagagtgaggctccatctcaaaaacaaacaaacaaacaaacaaataaaatacaaagctgcatctggactgggcatagtgtcttatacctgtaatcccaggactttgggaggtccaggtaggattgcttgaggccaggagttcaagagcagcctgtgcaacatggcaagaccc

SEQ ID NO: 774171 - DNA, 555 bp, Homo sapiens
actcacatcaactttctaccaggcaccgtgggagacacagagaaacctggaagaacagatactgacagaaatgacaacttttgttaagtaccaacttcctgtcaagcccagtgctaggagctttgggtccgtcaccctatttggatttcagagatcactgtcacaaagtgaaaagcaataaattgccctgagaaatgcagatgataatgaggatagtaatgatcacaacagctaacagatgttgagtgtttactgtgcaccagctactgwcctaagcattttgcacgtatcgcctccttgagctaatgtactatacagaggtctcttaatgtttccccctgccctttctcagtttccccctaatcatcccagcttccccttcctaagtttccctccagggcctatgagcctgtctttggtctcagtccataaagtgattctgggaaagagaagaggttggtggaactcccaaaaagctgagtaccccccagggtggtgtgggttggtgccttggcccaaacggaattgtccaaggagaagagcagggaagagcag

SEQ ID NO: 774172 - DNA, 477 bp, Homo sapiens
tgaaaaacacagcacgagaacttcgtgaagcatacacaagtatcaatagccaaaccgatcaggtcgaagaaaggatatcagacactgaagatcaacttaacgaaataaagtgagaagagaagattagagaaaaaagaatgaaaaggaatgaacaaagcttccaaaaatatgggactatgtgaaaagaccaaacctacatttgattggtrtacctgaaagtaaaaaggagaatagaaccaagatggaaaacactcttcaggatattatccaggagtacttccccaacctagcaaggcaagtcaacattcaaattcaggaaatacagagaacaccaaaaagatactcctcgagaagaacaaccccaagatgcataattgttagattcatcaagattgaaatgaaggaaaaaatgttaagggcaaccagaaaggttggggtacccacaaaggccgaagtccatcagatgaacagtggatc

SEQ ID NO: 774173 - DNA, 477 bp, Homo sapiens
tgaaaaacacagcacgagaacttcgtgaagcatacacaagtatcaatagccaaaccgatcaggtcgaagaaaggatatcagacactgaagatcaacttaacgaaataaagtgagaagagaagattagagaaaaaagaatgaaaaggaatgaacaaagcttccaaaaatatgggactatgtgaaaagaccaaacctacatttgattggtgtacctgaaagtaaaaaggagaatagaaccaagatggaaaacactcttcaggatattatccaggagtacttccccaacctagcaaggcaagtcaacattcaaattcaggaaatacagagaacaccraaaagatactcctcgagaagaacaaccccaagatgcataattgttagattcatcaagattgaaatgaaggaaaaaatgttaagggcaaccagaaaggttggggtacccacaaaggccgaagtccatcagatgaacagtggatc

SEQ ID NO: 774174 - DNA, 477 bp, Homo sapiens
tgaaaaacacagcacgagaacttcgtgaagcatacacaagtatcaatagccaaaccgatcaggtcgaagaaaggatatcagacactgaagatcaacttaacgaaataaagtgagaagagaagattagagaaaaaagaatgaaaaggaatgaacaaagcttccaaaaatatgggactatgtgaaaagaccaaacctacatttgattggtgtacctgaaagtaaaaaggagaatagaaccaagatggaaaacactcttcaggatattatccaggagtacttccccaacctagcaaggcaagtcaacattcaaattcaggaaatacagagaacaccamaaagatactcctcgagaagaacaaccccaagatgcataattgttagattcatcaagattgaaatgaaggaaaaaatgttaagggcaaccagaaaggttggggtacccacaaaggccgaagtccatcagatgaacagtggatc

SEQ ID NO: 774175 - DNA, 568 bp, Homo sapiens
gaatcttctagaagttgcctacattccctggctcatggccttcctcctccatcttcaaaaccagcaatattgagccaagtctttctcacattgcatcattctgacccagtcactacttctgcctctttctttcacttttaaggacaatgatgattatattgggcccaattggctaattcaggacactttccctattttaaggttaggtgatcagcacatatctgcaaccttaattmcccttggctacataacatatttgacaggttctgaggaattagaatgtggacatcaatgagggccatagatagggaaagatataccatgaaagtattaataaaaaagaaagccagggtagctatagtttatgttttagagatagatgtcttgctatattgccgaggctcacctcaaactcctgggctcaaggaatcctcttgccttagcctccccagtagctgggactgtgggcatgtgccaccacactcagcttcagtgtagctatatttatattagacacaacaaaatttaaaaagtcaaaaaagacctaaatacatatgccctattcatc

SEQ ID NO: 774176 - DNA, 592 bp, Homo sapiens
cagctctgaagagagcagcaaatcaccaagcacagcattcgagctctgctaagggtcagactgcttcctcaagtaggtccctgacagccgtatacactgactgggagacacctctcagtagaggccaaaagacacctcatacagcagaactctggctggcatctggcaggtgcccctctgggatgaagattccagaggaaataataggcagtaatatttgctgttctgcagcctccgtggtaatagccaggcaaaaggtctggagtggacctccagcagatgtgcagcagagggacctgactgttagaaggaaaactaaaaaacagaaatgaatagcacgtccactcagagaccacatccaaaggtcaccaacwtcaaagaccaaaggtagataaatccacaaagatgtggagaaaccagcacaaaaagcctgaaaattccaaaaaccacaacgccacttctcccacaaaggatcacaactcctcgccagcaagggaacaaaactggacggagaatgagtttgacgaattcacagaagtaggcttcagaaggtgggtgacaacaaactcctccaagctaagagagcatgttc

SEQ ID NO: 774177 - DNA, 610 bp, Homo sapiens
tgccagttaccagaatattccaagtcgtggctgctttccctgcttggatcctacatgtgaactacatcatgtgaacagagtacccagacacctgtgacagacatgttgtatgagatagacacctttatttttattctttctcaattgagtgaactgctgggctccagcaatcttcctgtctcatactcctgagtagatgagtgtgcaccaccatgcctggctatttttaaaaattttttgtagagatggagtcttgctctkttgcccaggctggagtgcagtggcatgatcatagctcactgcagcctcaaactcctgacctcaggcaatcctcctgccttggcctcccaaagcctgggattataggcatgagccactgcacccagccaagaaaatttttttttttctgagacagggtctcactctgtcacccaggctggagtgcggtggtaaaaacatgcctcactacagccttgacctcttggtctcaggtgatcctcccacctcagcctcccgagtagctgcgaccacaggtgtgcaccatcacacccagctagtttttaaattttatgtagagatgggattttcccatgttgcccagactgcctca

SEQ ID NO: 774178 - DNA, 641 bp, Homo sapiens
atttaggagaatagcagcattaattgcaatgactccaaaatggaaacaacccaaatgtccatcatcagagtgtgcaattaaattgtagtatggcaatatcatggaagacttttgagagaagaaaatgaatgaactaaaactattctcaccaaatgtggatgaagcctaaaaacttaatgttgaaggaaagaaacatgacaccagaaatatagacagtattaattcatttacataaagttcaaaaacctgaaactaaaaagcagaaactaaaacacagaatttaggggggctatccatasatggtaaaagataaagaaatacaaagaaagtaattatctaaaaagtcagaatagtgtttactcaccctctgtggggaggggacacttaaggggttttgggaccttggcaaggactttccttgacccagtatgagtacacagctgttccctttaaaattactcattaaactgtatatttatattttttggtctttttaaaatatgtagtaatacacaataaaaaagctcaaagaaaagtctgaaaaatgtttggaattaataaagaaaacgtattaatattttaaaattattttaaatatattattcgtagatgtttgaatcgaattggaaagaattctatat

SEQ ID NO: 774179 - DNA, 765 bp, Homo sapiens
agcggtgaaggcggctggaccagggtggctgctctggaggtgcacgggtgggtggaactccaaatgtattttgcaggatgagccaatacaatttgctgatggttgggggtggggcatgataaaaagagaggaatcaagaatgatccaaaagtttttttgcatgagcaactgttaggttagagttgcttttccagagacagaaagattacaacagaagcagtcggcaaatatttgagaacatactatgtgccgaggttacacctagaagcatggcaaccttgtcttggagcttggcaagagagacagacaagaaccactgaacaagtaggtagaggagaaaataccagctggtaagaagggccacttagagcaacagaacagggtgatgggagtctgcattttattcaaagagcagccaggaactgtgggagggtttgcagcagagacagaatctgctgtaccctttagaagaccactctggaatagactgttgggggcaagatgagacagggagacccgtggggaagctggtgaggaggctgccgaggcctgaaggtgggagatagtggcactgccgtcraagacctctagcagacgaacaggggtaggaaaccgactcctgttctctgtgagaggcattttaggagcatagtggcatcactgtcccccttccaggggcttggacaggtgcctttgccccgggagtctcaactccccagtctctgccacttcctcggtgactgtcgcatcctcacggatcccttc

SEQ ID NO: 774180 - DNA, 577 bp, Homo sapiens
gcattgtgggcagcagtgggctttgggacaaattttaagtttgaaaatcaagattccctcttttcgaggggctgccagactgagcagatacagacaccgtgaaaagagggtgccacattcagattcaggaaacaaggatggtttctgttcagttcctgcatcatccttcaggtcatgcgattcccatttccctcggtggaccaagaaattcagtggggtttctgccttttaaatatttcattatcaatatgtcatccttttagcctccagaaagcattttaacatggagattctggcttaaaacacttgtgggtctgtctctctctctctcttttccttgaaacagggtctcactttgtcacctacactggagtgcagtggcrtgatcccagctcactgcagcccgaccttctaggctctagcaatcctcccacctcagcctccaaagtacttgggactacaggcacacaccaccatacctggctttcttttttttttggtagatatgaggcttcaccacgttgcccaggctggtcttaaactcctgggctcaagcgatcctcccccttcggcctct

SEQ ID NO: 774181 - DNA, 531 bp, Homo sapiens
cttgagcctaggagtttggcgctgcagtgagctatgggtataccactgtactccagcctggatggcagagcaagaccctgtctcttaaaaaaaaaaaaagaaaagaaaaaaaaagagccaggcgcagtggctcatgcctgtaatcccagcactttgggaggccgaggcgggcggatcacaaggccaggagatcgagaccatcctggctaacacggtgaaaccccgtctctactaaaaatacaaaaaaattagccgggcttggtggcgggcgcctgtagtcccagctactctggaggctgaggcaggagaatggcgtgaacctgggaggyggagcttgcagtgagcagagatcacgccactgcactccagcctgggagacagagcaagactccgtctcaaaaaaaaaaaaaaaaaaaaaaaaaattgccgggcacagtgggtcatgcctgtaatcccaccactttgggaggacgaagcaggcagatcacctgaggtcaggacttcaagaccagtctggccaacatggtgaag

SEQ ID NO: 774182 - DNA, 578 bp, Homo sapiens
aggggccaggacccaaccacagggccagatacaccttcccgggaagtgttgcttcatccgagacttaaaggacaaggacacataaagcaaaaaaagaggcaggaaatggacattctaagaggaaagaacagtcggtatcaagtcctgcagggaggagtggagagcaagagttgtgayagtcacaagcaaccgaggggattcacacgagggtggagcagagtgagaagggggatgtgggagagaagggcggagtccctgggtccctgagccagaggaggaagctccatcatctctgttgggaaggtctttaaagcggacgtaacatgagcaggtgtgcatctagaaatgacattgctctggtttctagaaagagaagatatttagggaagccattgatggcctccagtgagaacaggcagaaaggtttgcagcaagtccagacaggaagcaatgacagccgggacaaggtggacagaaatgggcagatccaagagcaatttgggaggtaaaatggatgggacaggagctaaaatggacaggatgcggttggatatggcagatgaaaaggaaggggtcag

SEQ ID NO: 774183 - DNA, 578 bp, Homo sapiens
acaggctccaccagcacccaggatccccctcctgccagccactgggccaaacaaaccatgctgtgagtgacagttggaaagttgagccaagcatgcacccctcccacaggcctgctggccccatccagggtagacaagagtattgcaacctccatgctgaaaygcactagttgagtgagaggttttttccctctgaatcacccttggaatgctctatggcactgccagcccagggtggggacagctgcctcgccccaagacatggtggagtataagcacctaacctcagccctgcctgctcccaggctctggcttggagggaggccagcggctgtccatgggcaggggaaggagaagaaagctgggtgggggtggggctgagaagccagagggcaggagagcagcaggccaagatcccaggaggcttcaaggcggcaggaggcaggaccatgtgagagccgcccaccaagtacccccacacatatgcactgtcccgtcagacttcactcacaaaacacaaacttggccgggcatggtggctcacgcctgtaaacttagcactttgggaggccaaggtg

SEQ ID NO: 774184 - DNA, 588 bp, Homo sapiens
caatactctggaatcttcacaaatatattagaataattgtatttatgaatcttacaggatacaatgtcattatatttaaaaaatcaattattgctctacataatagccaccaaaaaatggaaaataaaaacttttttttttttttttgagacaggatcttgctctgtcacccaggctaaagtgcagtggcacaaacagggatcactgtagccttgacctccctggctcaggtgatcctcccacctcagtctcctgagyagttgggaccacagatgcatactgccatgctgggctaattttatttagttttattttttgtagagacggggtcgtgccatattgcccaggctggtgtcaaactcctgggctcaagcaatcctcctgccttggcctcccaaagtgctaggattacaggcacaagcaataaaatgtttttaaattgtcatttgcaataaaattaataaactcaaatacctaggtatgattctaattaataaggagcaaaagcactgtactgaaaactacaaaacagttgctgagagaaatttaaaagacttttaaaatggaaatatatcatgtttgtggatt

SEQ ID NO: 774185 - DNA, 609 bp, Homo sapiens
gtgattcaggaagctccctcaggctgcaggtggcaggtggttcagaggaaggaaagaaaagccgagaggacattgaagagaaagtggagggtctgagaggcattttttggtaggggatggattgggtttggtaatgcccagatcagatgtgcaggatgagagaaagggaaggtggaggacagctacttggtctgtggcttgggtgaccacgtaggagktgccactattggaatcgcgcagcaggtggaagggaaggagttgacctccctctggggcatgtcaagtgtgcaatgcctgagagtgacccgcgggtagagggtcaggagatggtggcgtctcccagttgggaactcagaggccctgcttctcaaactctgaagtgcacaagcatcacctggagatcttgttgacatgcatattctgattccataggcctaggggcggggagagggccggaagttctgcctgacaaggtgccaggtggtgttgatgctgccagagtccatggaccacatattgagtagcaaggctctggacacagccagaaggactggcaaggagggcagtcgcagggctcagaaaaatgacaagaggcatggtgaggctgcg

SEQ ID NO: 774186 - DNA, 585 bp, Homo sapiens
ggcctggtacacagaaaattctaagtcatccacaaaaattcaattggaactaatatatgaattcagaaaatctgtatagtacagatcagtatacaaaaatcagttatttacctatactttagcaatgagcaatgcaaacatgaatttgtgaaaacaatccatttatattagmatcaaaaataataattagaaatcaatttaataaaaaagtaacgtttatatactgaatactacaaaacactgttgaaagaagaaaaataaaaccaaaatcaataaaaaattcagtatttatgaatcaaaatatttcattttgtgaaaatagctatactctacaaacttatctacaaattcactgtaatccctattaatcccgtttataatcccagctgcacttttgcagaaattgacacattgatattaaaactgaaaagacccatttttgcccggacaatcttaaaagagcaagcacaaaattgggccgctcatacttccctatttataagtttactacaaagctatattaatcaaaatacaaaaaatataaatcacttttacaattcaacaattaaaaaaaaaacaagaaaa

SEQ ID NO: 774187 - DNA, 581 bp, Homo sapiens
aagatggatatagcacaaatcactatgtacaatttctggaagagcgtaaaggtaatttaatattattatgaaaaatacctgtataatggaatcatttgtgctattatagcaggtctagaaatataaaataatgtgaagagaaagtgacctattgttgcaamcttacattacagagatattactatgccccagccaatcatttttcatctagctaaatttaaataataaattagaaataatatattcattcatagcaataaataaccataaaaaagatttcaaaactgaacatttgccaagtaaatttattaaaaaataggatatttctatgtatttatttgaattactatataattcagtggcttccccctttattctaaacatgtttcttttagggtgtataataggtgagatatgtgaggtacagttacaaagaagctatcttctccaaattttgttgtatttatttttttcttaatgttctttagaaaatttcaatggataacctttataggaaatatacatatgttcaagaatgcaagcaaatgttttcatgctcatctatttatacaatatatttg

SEQ ID NO: 774188 - DNA, 581 bp, Homo sapiens
aagatggatatagcacaaatcactatgtacaatttctggaagagcgtaaaggtaatttaatattattatgaaaaatacctgtataatggaatcatttgtgctattatagcaggtctagaaatataaaataatgtgaagagaaagtgacctattgttgcaaccttacattacagagatattactatgccccagccaatcatttttcatctagctaaatttaaataataaattagaaataatatattcattcatagcaataaataaccataaaaaagatttcaaaactgaacatttgccaagtaaatttattaaaaaataggatatttctatgtatttatttgaattactatataattcagtggcttccccctttattctaaacatgtttcttttagggtgtataataggtgagwtatgtgaggtacagttacaaagaagctatcttctccaaattttgttgtatttatttttttcttaatgttctttagaaaatttcaatggataacctttataggaaatatacatatgttcaagaatgcaagcaaatgttttcatgctcatctatttatacaatatatttg

SEQ ID NO: 774189 - DNA, 629 bp, Homo sapiens
tttagtacatttacaccactgggtaaccactattacaaatgagttttagaaccttcatattaccctgaaaagttcctcgggtcttgtttgcggtcaaaccctgcctcacttccagccacaaatgaccactgattttccttctgtctccacacattttccttttctagaaatttcatgtaactggaatgatacaacttgcctttcacatctggtttcttttacctagcatcacgtatttgaggtttgctattttaggggggcatatatcagtattccattccattttattactgaactccatgtagcatattttgtttacttattattcacaagttgatggacatttagattattttctggttagggctagtataaataatcctgctatgaacattcatatactaatctttgggtggatacatggttttayatttttcttaagaataaatctgactggaattgttggtttgttaagtttacattttttatggttttttgtaataaaccgtcaagctattttcaacatattggcaccattttacattcccagcagtgatgttttagagttccagtttctccatattctcaccaacacctagtattgtcagtctacttaattatagccattc

SEQ ID NO: 774190 - DNA, 532 bp, Homo sapiens
acttacttctgcctttagggcctgcttgaatctgatcttgtatatactactttcatttcataatagagtgctgctgtgcaagcccaattttatgacatggagggtcagacaacagcctgttcatgatgagcagctcaaattttatgataactctgtggcctgtggttaaatgtgaaatcactgctaatgaccagccacaaacaaaagctattcctcaaaggcagaataattatctgtgaggatggcagggttttcctccagatttaaggatctgcactgtgattcacctatgtgggctgatcaaaggtcccaaacagcatccctatctgtcactgacactttggacctgctrggtcatatggcccaagtgtcagagcagcacgcatagcagcctggacctgttgcagagccttcccttgttctgggtcccacacaagattagtagctttggggatcacttggtaaatgggctggagtagcacacctgaatgagaaaaatgttgtctccaaactcccaagaggcccattagct

SEQ ID NO: 774191 - DNA, 595 bp, Homo sapiens
gtcactgacactttggacctgctaggtcatatggcccaagtgtcagagcagcacgcatagcagcctggacctgttgcagagccttcccttgttctgggtcccacacaagattagtagctttggggatcacttggtaaatgggctggagtagcacacctgaatgagaaaaatgttgtctccaaactcccaagaggcccattagctattgtgcttctattctggttgcaggaaggaccacttgcagcaatgtatcttttaccttggaaaggatattttgacagagtccaggcaactggacctctagagattccaatgaggtaaaaggcccctgatttttttatgtttatttcctatcctctgacacatacttatcttaccaatatctttagagtagctgcaacttctttctgacattggccratctgcataatgtcatcagtataatggattagtgtgatattttgtggcagggaaaggtgaccatggcccctacagactaaattataaacctgaagactggctacatcctggaataagacagaaagatctattgctggccttgccagctgaaagcaaactgctcctattggagttt

SEQ ID NO: 774192 - DNA, 648 bp, Homo sapiens
actacctttttcttgtgtggtacaatgaacctcattttcaacactgtcaagtttgtgaaaaggacaagagaaccaaaggtaagttctagaagctaagatcttcattttcttcccttctgaagcccaagccttgagctaatgggaacataggaacataaaactgagtatcagactakaggaaaaagtgacaacaaatcaactccatctatctatatctaatatatatatataacaatataatatacaattttatgtatatataaaaatctatttaattagtcacactacagaaaaatggggttagagcagtggtcataattaatgatggggaatgaatggagacacatggagttatcccaccacctaccgagttagacagggtacagtgcctgttctgtcttctcctctgcagccctattgccaggataggaaatacaggttacatgagctttttgatcagctatatatccttcttgaatgctttgatgaactgttataattggttttgcaagtttctatttctctccactgttatgctaaggaattaaattcaaaatgctacagataatctttgaataaatatgatttcaatgaaaaggggtccataaccctgtctaattaaacctttctattctctgacatcgtttc

SEQ ID NO: 774193 - DNA, 648 bp, Homo sapiens
actacctttttcttgtgtggtacaatgaacctcattttcaacactgtcaagtttgtgaaaaggacaagagaaccaaaggtaagttctagaagctaagatcttcattttcttcccttctgaagcccaagccttgagctaatgggaacataggaacataaaactgagtatcagactataggaaaaagtgacaacaaatcaactccatctatctatatctaatatatatwtataacaatataatatacaattttatgtatatataaaaatctatttaattagtcacactacagaaaaatggggttagagcagtggtcataattaatgatggggaatgaatggagacacatggagttatcccaccacctaccgagttagacagggtacagtgcctgttctgtcttctcctctgcagccctattgccaggataggaaatacaggttacatgagctttttgatcagctatatatccttcttgaatgctttgatgaactgttataattggttttgcaagtttctatttctctccactgttatgctaaggaattaaattcaaaatgctacagataatctttgaataaatatgatttcaatgaaaaggggtccataaccctgtctaattaaacctttctattctctgacatcgtttc

SEQ ID NO: 774194 - DNA, 513 bp, Homo sapiens
ccaactgtttacccagcctagcacttggaactgtaaatcctgtatgtttagatagggcatgaaggctgtctgaagctgcaaatcttttgtcatgatacaaatatgctatgaccactaagtggtcaacatagtgagctttgagttgatttaattgccagtaaatacatggaccagtaaacaaatttactaagtagttgactgagagagaaaagttgggggagtttactgctaraaacaaatatttggatgggttatgctaattaaaaatggaaagtttgcactctggatagggataaatgaattcacatgtttgtactaggtagattaaggcaaatgtctttgttcactggccaagaaagtgttttcactttgatccagtagggctctggcatactgggatctcttaaaggtcttagtcatttgtcatctttgtagagtgaattgctcaaagatgatagtctccctctctttctcttttaaactttttatttagacatgtctataggaaaacat

SEQ ID NO: 774195 - DNA, 506 bp, Homo sapiens
aagactggagaaccttgttataaagactctttctactttctggaaaaagagaacattaaaccttcccccaaacccccaaggtaatagggggaatattcggtacttctcattgtttcccccatctgaaactgaagatatgaaggaagagatcattgaacaaaacaagagcctttaacagacggactgtgtgccaagcctttttytaaatgtttttcctacattaatcctcaaatccccacaaccctatgaagtagacactgtcatcatccccactttgcagatcagtaacgtgaggcttagtgatggtgagtaacctgccctaaggcatcccgccctcagaccccaggctgcctgacatcaaaccaccccaaccactctgcttgactgcctgtgctgaggcggagccttggagggataaaaacctggacagaaggaaggacctcttcctctgagggcggagggaaagtgggcaaggtcaagtctggcattggaaaaggaagtcagct

SEQ ID NO: 774196 - DNA, 657 bp, Homo sapiens
tttcttacaagacttcatttagtttcagtcttcaaagtcatattattaaatatgcttacaattagagtgttctgcaagtacatataataattcaaaagtcccgtctctgctctcaggtaattcacactctgaatggaacacagcatttgttgtggcactagcatggaatacagttttatattgtcaaactcttgcctttcttccttgttcccccaaatgtaagaaggtcatggggtggaagtgaccaaatgaattgattacaaattgtcagtggaactaagccagggaagtcctgatgatgataaactcaatgcacgtcatatggcagacagaaaaaaacatgtgatctggaaactctgtcctgctcaccagcaaaattaggacacttgattgtaaaaracagaaactcaacctaagctagttgcttgagcaaaaagggaaacttattagaaggctcacatacccatctggaaggaggaggtgccactggacatcagagacgggatcagagactcgcaagccccagcatgcatcatgctcacatgctcacatgcactctctctctctccctctctctctctttctctgtctctctgtctctctctcctcccctctgcatttctctgtgatttagttttatttctaccagactggctt

SEQ ID NO: 774197 - DNA, 591 bp, Homo sapiens
tcccccaaagtcctaactcatttcagcattaactcaaaggtccatagttcaaagtctcatctgagactaggcaaatcccttccacctatgagcctgtaaaatcaaaagcaaattagttatttcctagatataatgagggtacagacattgggtaaatattcccattccaaatgggataaattggccaaaatgaagggkctatagaccccatgacagtcagtcctaaacccagcggggaagtcaaatcttaaaggtctgaaatgatctcctttgacttcatgtctcatatccaggtcacacagatgtaagaggtgggttcctgtggtcttggacagctctgccactgtggctttgcaaggtacagccccacacctggctgctttcatgggctggccattgagtatctctggcttttccaggcacatggagcaagctgttggtagatctaccattctggggtctggaagatggtggccctcttctcatagctctactaggcagtgccccatggggactctgtgtgggggctcccaccccacatttcccttcagcactgccctagcagaggttctccaagagggcttcacccct

SEQ ID NO: 774198 - DNA, 599 bp, Homo sapiens
tcaagaagcatcggtttcatgattttacaggtcatgaaaaagagtctacagatcagctggaggtacacagctggttagcagcagagcctagacaaagaccctgccctccgatcccatcacaggggtgcctccaatacatgaagtgcagctctctgtggtgcagaagtgtgccaagaagtggccatgccaaactgttcttataaagacagctctgaaacctcttaaaaacagggagagttgaaattgtatgcgaacaagatttgtatggctctctctggaaacatccgaagatcctaattcttttgatccgtgagactttgggatagcatcttcctcagaacgtgatctcgagcagccacatgtcacagcacttcccccaggtgctgctgaaatgtttgtgccatgatgcaagaagggtcaggaaacttcccattattatatttgctattattttttgtrataaccttagaatatatcaacgttggtgaccaccactttccagcacttcaaccccctggcaatctttcttgtttcttggagagcttggcagagtcatcttggaacagagaatgtacacttcagtgctaaaggaaagatgc

SEQ ID NO: 774199 - DNA, 562 bp, Homo sapiens
ctacactaaaggtaacccagagcagttttttgtctctttatgttagggaccaaggtgctcagcactgctctggaatagcaggccttcaaacacttggtgaataaataaataaacaagcagattccagccattctcaacatgtctgtaaaccttctgtcaygagaaatcaggagtaaaagctgtgtttgcagatcctctgtgcctcggataactctctagacacagccactactcagcccttctccgatcctacacgtttactttttctgcctatccactctgtcctcataatgtgccaatctcttaagaagcctctgaagagaactactccaaattactgaaatttaagtacttcatctaaatcctcataacatacttctatactttccctgtgacatttttaaacttcttccctatattacagtcatccttgtacatgactaatattccacaatggatcataaattgagggtaaagcctgtgtataatttgtatgttaattttccaatgtacctaccatagtgccttacacagagcagatatccagtaggtcttggaatac

SEQ ID NO: 774200 - DNA, 562 bp, Homo sapiens
ctacactaaaggtaacccagagcagttttttgtctctttatgttagggaccaaggtgctcagcactgctctggaatagcaggccttcaaacacttggtgaataaataaataaacaagcagattccagccattctcaacatgtctgtaaaccttctgtcatgagaaatcaggagtaaaagctgtgtttgcagatcctctgtrcctcggataactctctagacacagccactactcagcccttctccgatcctacacgtttactttttctgcctatccactctgtcctcataatgtgccaatctcttaagaagcctctgaagagaactactccaaattactgaaatttaagtacttcatctaaatcctcataacatacttctatactttccctgtgacatttttaaacttcttccctatattacagtcatccttgtacatgactaatattccacaatggatcataaattgagggtaaagcctgtgtataatttgtatgttaattttccaatgtacctaccatagtgccttacacagagcagatatccagtaggtcttggaatac

SEQ ID NO: 774201 - DNA, 603 bp, Homo sapiens
gtaccttggagagtagctcctgcaaatgaatacattgttatagactaaaaagtgcatcaatcataagtgtacaatttttataatctttcaatatggactcagtcatgtgaccaccataaacaagagcacctcagaagcctctttcatgcctcattrattttcttctaccgaatagaacacttttctgacttcctctacaatagattcatttttcctgaggaaatttctatgaatgcaggcatatttgtgacaccacagatgtagcagcagttctttaattgctgtattttattccactctatcaatgatccataaaatatttttacattctgctgttggtggacaattgaactgttttgagtgtctgcatataaaaataatattataatgaaagtcttttggtgtaaaaaattcccagtcatatctgttgggtatatacttaaatgtagaatggttgggtcatagataggtatctgtaaaaccaaactgtgctttattaatctacttatttttcttttaaatattaatgtataatttacacataacagagtgtacagatcttaagtatacacctcattgaattttcacatagcttcatacacg

SEQ ID NO: 774202 - DNA, 603 bp, Homo sapiens
gtaccttggagagtagctcctgcaaatgaatacattgttatagactaaaaagtgcatcaatcataagtgtacaatttttataatctttcaatatggactcagtcatgtgaccaccataaacaagagcacctcagaagcctctttcatgcctcattaattttcttctaccgaatagaacacttttctgacttcctctacaatagattcatttttcctgaggaaatttctatgaatgcaggcatatttgtgacaccacagatgtagcagcagttctttaattgctgtattttattccactctatcaatgatccataaaatatttttacattctgctgttggtggacaattgaactgttttgagtgtctgcatataaaaataatattataatgaaagtcttttggtgtaaaaaattcccagtcwtatctgttgggtatatacttaaatgtagaatggttgggtcatagataggtatctgtaaaaccaaactgtgctttattaatctacttatttttcttttaaatattaatgtataatttacacataacagagtgtacagatcttaagtatacacctcattgaattttcacatagcttcatacacg

SEQ ID NO: 774203 - DNA, 574 bp, Homo sapiens
tcttaaggctggacagggaatgatttatttgcagactcactcacatagttgttggctttagttttgtgccaggtgttgtgctgtaaactcccttggttccttgtcacgtgggtctctccacaaagcatcacacaacatggcaactctctttatcaaagcaagcaagcgagagggcaagagggaatgccagcaagagttgggggtggctagcaaggggcaagacatagttccttgttagctaaccaaggaagtaacaccgcattrcttttgttgaattctgtctcttaccagcaaggcaccaggtccagctcatactcaagaaggggagataatacaagatatcgggaggtggaatcagaaacatgggagctgtgtcagaagccacccatcccaccactccagatagttatcactttcttctattatgttatttttttctccttaaaatacttaaatgacctagagtagtggtctctacagttttttttttatcctgctcttcactcccagagtatattagttgatgcagcagtttgtctctcttcattatcaccaaactcacacataattcatg

SEQ ID NO: 774204 - DNA, 574 bp, Homo sapiens
tcttaaggctggacagggaatgatttatttgcagactcactcacatagttgttggctttagttttgtgccaggtgttgtgctgtaaactcccttggttccttgtcacgtgggtctctccacaaagcatcacacaacatggcaactctctttatcaaagcaagcaagcgagagggcaagagggaatgccagcaagagttgggggtggctagcaaggggcaagacatagttccttgttagctaaccaaggaagtaacaccgcattacttttgttgaattctgtytcttaccagcaaggcaccaggtccagctcatactcaagaaggggagataatacaagatatcgggaggtggaatcagaaacatgggagctgtgtcagaagccacccatcccaccactccagatagttatcactttcttctattatgttatttttttctccttaaaatacttaaatgacctagagtagtggtctctacagttttttttttatcctgctcttcactcccagagtatattagttgatgcagcagtttgtctctcttcattatcaccaaactcacacataattcatg

SEQ ID NO: 774205 - DNA, 574 bp, Homo sapiens
tcttaaggctggacagggaatgatttatttgcagactcactcacatagttgttggctttagttttgtgccaggtgttgtgctgtaaactcccttggttccttgtcacgtgggtctctccacaaagcatcacacaacatggcaactctctttatcaaagcaagcaagcgagagggcaagagggaatgccagcaagagttgggggtggctagcaaggggcaagacatagttccttgttagctaaccaaggaagtaacaccgcattacttttgttgaattctgtctcttascagcaaggcaccaggtccagctcatactcaagaaggggagataatacaagatatcgggaggtggaatcagaaacatgggagctgtgtcagaagccacccatcccaccactccagatagttatcactttcttctattatgttatttttttctccttaaaatacttaaatgacctagagtagtggtctctacagttttttttttatcctgctcttcactcccagagtatattagttgatgcagcagtttgtctctcttcattatcaccaaactcacacataattcatg

SEQ ID NO: 774206 - DNA, 599 bp, Homo sapiens
aaatgaaggagtttattttaaacctgctttaaattatttcgtggttaaagtatttaaaaccttttcttctatttttaggaaaacaatgagaaagctaaacacaggtctaacttgttattcaactaaaaattattttaaaaatatttgagtacwgacttctggcaccagccaagacaaagcatgctcaccaaggcctatttctctttctgactgaaattaaaactctggacataaaaagcaactatcaaggactcttaaaagtaaacaataacagatggattgaaggcaaaatcaaaataccaatagtgacctgtaacaggggtgggtttaatggctattttttttttttctaacccaggtgtgcaaaatttctactgtttttagctagagaaccaagaatgaagcctctgcaagatggagcatatgtagagtgttgggagcaggccccccaaaatctggccataaactggccataaataaaatctctgcagcactgtaacatgttcataatggccctaacacccatactggaaggttgtgggtttactggaatgagggcaaagaacacctggcctgcccggggtggaaaaccgcttaaa

SEQ ID NO: 774207 - DNA, 537 bp, Homo sapiens
catgagtgatctgtgccttaaggacatgctcctgctgcagttaactagcccaacctattcctttaattcggcccatcccttcgtttcccataagggatacttttagttaatttaatatctatagaaacaatgctaatgactggcttgctgttaataaawacgtgggtaaatctctgtttgtggctgagctctgaaggctgtgagacccctgatttcccacttcacacctctatatttctgtgtctatgtctttaattcctctagcaccgctaggttagggtctccctgaccgagctggtctcggcatagagaaataattcttttgtttttctctttcttccccacccagccttgcctggaagccagctctggttctgaagctgctgtcatgatactagctgtgtagtggcagcaatgcacaggcactgagaacttcaagagagacaatctctctcattatttctctttaaagaaaaaaaaaggggggtacagacacttatgagaaaacaaaaacacatgaagacaaatataaaaata

SEQ ID NO: 774208 - DNA, 667 bp, Homo sapiens
tgtagtggcagcaatgcacaggcactgagaacttcaagagagacaatctctctcattatttctctttaaagaaaaaaaaaggggggtacagacacttatgagaaaacaaaaacacatgaagacaaatataaaaatacaatactaagatatcaaatctagcaatatttaaraacaatactttacaaacaagtgatttataccatgaatgcaaggctggttcaacattcaaagctcaacagatataaattgcaacattattaggtagatgaagaataaacgtgtcatttcagcagatgcagcaaaagcatttgacaaaattcaatagctattctttataaaaactctcagcaaaatgagaaaagggaacttatcctgatagagggcatctacaaaacaaacaaaaaaaaaacaaacaaaactaccactaaattacacttaatggtgactctccaactgatttaaaaactgggtccaaggcaagaagtcagatcttttaccacttatattcaactttatactgatagtcctagccagatcagtaatgtagggaaaaaaatcagtgacatccacatcagaaaggaagaaataaacctgtttctattttcagacaacagtctatgtaaaagtattcaaaataacctattaaaatgctcaatatgcgagttta

SEQ ID NO: 774209 - DNA, 667 bp, Homo sapiens
tgtagtggcagcaatgcacaggcactgagaacttcaagagagacaatctctctcattatttctctttaaagaaaaaaaaaggggggtacagacacttatgagaaaacaaaaacacatgaagacaaatataaaaatacaatactaagatatcaaatctagcaatatttaaaaacaatactttacaaacaagtgatttataccatgaatgcaaggctggttcaacattcaaagctcaacagatataaattgcaacattattaggtagatgaagaataaacgtgtcatttcagcagatgcagcaaaagcatttgacaaaattcaatagctattctttataaaaactctcagcaaaatgagaaaagggaacttatcctgatagagggcatctacaaaacaaacaaaaaaaaaacaaacaaaactaccactaaattacacttaatggtgactctccaactgatttaaaaactgggtccaaggcaagaagtcagmtcttttaccacttatattcaactttatactgatagtcctagccagatcagtaatgtagggaaaaaaatcagtgacatccacatcagaaaggaagaaataaacctgtttctattttcagacaacagtctatgtaaaagtattcaaaataacctattaaaatgctcaatatgcgagttta

SEQ ID NO: 774210 - DNA, 667 bp, Homo sapiens
tgtagtggcagcaatgcacaggcactgagaacttcaagagagacaatctctctcattatttctctttaaagaaaaaaaaaggggggtacagacacttatgagaaaacaaaaacacatgaagacaaatataaaaatacaatactaagatatcaaatctagcaatatttaaaaacaatactttacaaacaagtgatttataccatgaatgcaaggctggttcaacattcaaagctcaacagatataaattgcaacattattaggtagatgaagaataaacgtgtcatttcagcagatgcagcaaaagcatttgacaaaattcaatagctattctttataaaaactctcagcaaaatgagaaaagggaacttatcctgatagagggcatctacaaaacaaacaaaaaaaaaacaaacaaaactaccactaaattacacttaatggtgactctccaactgatttaaaaactgggtccaaggcaagaagtcagatcttttaccacttatattcaactttatastgatagtcctagccagatcagtaatgtagggaaaaaaatcagtgacatccacatcagaaaggaagaaataaacctgtttctattttcagacaacagtctatgtaaaagtattcaaaataacctattaaaatgctcaatatgcgagttta

SEQ ID NO: 774211 - DNA, 627 bp, Homo sapiens
atagtaaatatgagtaaatacaaataaaagtctgtataaaaatgatatatagaagcttccttttctgtcagaaaaaattaaatttcttagtgttatctttttatgtattcatggatttttaaaaattaagaaaaaaaatcaccaaatacaaggtctgaggtgagctgaatattgttatctgtaattgttttgtgtactaaaatatatttagaattattatagctggttattagaaatrgagtttctacctattgtggtttttaaagtacctgtggtccgggggtggtggctcacacctgtaatcccaggactttgggaggccaaggtgggcggatcacttgaggtcaggagttcaagacgagcctagccaacatggcgaaaccccgtctctacaaaatatacaaaaattagctgggcgtggtggcacgtgcctgtaaacccagctacttggcaggctaaggcacgagaattgcttgaacctaggaggcagaagttgtagtgagccaagatcatgcctccgcactccagcctgggtgacagagcaagactctgtctcaaaaaaaataaaaataaagtgcctgtgtatgcagtgggaattcaacaaatagttgttgaatgaataaatta

SEQ ID NO: 774212 - DNA, 627 bp, Homo sapiens
atagtaaatatgagtaaatacaaataaaagtctgtataaaaatgatatatagaagcttccttttctgtcagaaaaaattaaatttcttagtgttatctttttatgtattcatggatttttaaaaattaagaaaaaaaatcaccaaatacaaggtctgaggtgagctgaatattgttatctgtaattgttttgtgtactaaaatatatttagaattattatagctggttattagaaatggagtttctacctattgtggtttttaaagtacctgtggtccgggggtggtggctcacacctgtaatcccaggactttgggaggccaaggtgggcggatcacttgaggtcaggagttcaagacgagcctagccracatggcgaaaccccgtctctacaaaatatacaaaaattagctgggcgtggtggcacgtgcctgtaaacccagctacttggcaggctaaggcacgagaattgcttgaacctaggaggcagaagttgtagtgagccaagatcatgcctccgcactccagcctgggtgacagagcaagactctgtctcaaaaaaaataaaaataaagtgcctgtgtatgcagtgggaattcaacaaatagttgttgaatgaataaatta

SEQ ID NO: 774213 - DNA, 594 bp, Homo sapiens
gaaagtagattggtggttgcccagggctggcagtgactaatgggtacagggtttcttttgggggtgaaaatgtcctgaaattacatagtaatgatcattgtgcaactttcaatatactaaaaatcactgaattgtacatctttttatatatgtagatatattttatatatatatgcatatatatacatatatacgtatatacgtatacatacatatatacgtatatatgtatatatacatatacacatacatatatacatatacatatatacgtatatatacatatatacacatatacatacatacatatacagattatatatatgtatacatatatacacatacatatatacatatatgtatgtacgtatacatgcatatatacatatatgtatgtacrtatacatgcatatatacatatatgtatgtacatatacatgcatatatacatacatatatgtatacatatatatacagattttacatatatatatatatatatatatatatatggtctgtgaatggtattttaaaacagctgttacttaaagaaaggaaaattatagactgggtgcggtggctcatgcctgtaat

SEQ ID NO: 774214 - DNA, 622 bp, Homo sapiens
gtgctgcttcattgctgctttttctgctttgaggatggcaaactagaaaagcccttagattaagtttttactttacctaagacagcattaaagctgattaaaaggttccactgaaatggcaaaatggccatatctctaataagcgccagtataaaacttaatcttaaattgggcagtcctggggaaaagaattagatttaatttataccaatttgaattatagaagtcagactcatagcagccrttggctacttattctgtgtgctaaactaaatctcaactcagtcccaggaggacacatttcctactacagggcaacccttttctgcccagtgatcttaggttcgattatctatgaagggtagaccatgtggtagtaacatattttccagggaacaaaacaaatcagttttaatagtgatcaaaccccacccagcctctttatgtgttaatacccaacttacaaaaccgtatgttaagctgtacaattcctccactggaaatttaagcgcacattattatgagttccttatttcctgataagtcccaatggttacaaaattactcagtttctttgaagaatcaggaagccaccacccatgggcactcaatactgattgtc

SEQ ID NO: 774215 - DNA, 577 bp, Homo sapiens
gagtttgtttagtgaccttgcagttgtacagttagggaattagggtttttataatgcccgggaagggaggagagataaggctcactgccatagaaaaacaggaggtagtagttttttttgaaggactctagctcttctctttctcagggggaattgggtttttttacatacaactgagtttttgtttacacatttttwaatttcttttaattcctgttcccatcccagcaccctgagaggacgaggcaggcagataacctgaggtcgggagtttgagaccagccccacgaacatgaagccccatctccaccaaaaaaaataaataaataaattagccgggcatggtggctcagcctgcaatcccagccactcgggaggctgaggcaggaatattttctccctcccttagataaaagatagcatataccattgtgcactttgttttttgacctggggtggggtctcactctgtcactgaggctggagtacagtggggtgatcttggctcactgaaacctctgcctcctagactcaagctgtcttcccaccccagcctccagggtagctggaaccacag

SEQ ID NO: 774216 - DNA, 554 bp, Homo sapiens
ggtttttttacatacaactgagtttttgtttacacatttttaaatttcttttaattcctgttcccatcccagcaccctgagaggacgaggcaggcagataacctgaggtcgggagtttgagaccagccccacgaacatgaagccccatctccaccaaaaaaaataaataaataaattagccgggcatggtggctcagcctgcartcccagccactcgggaggctgaggcaggaatattttctccctcccttagataaaagatagcatataccattgtgcactttgttttttgacctggggtggggtctcactctgtcactgaggctggagtacagtggggtgatcttggctcactgaaacctctgcctcctagactcaagctgtcttcccaccccagcctccagggtagctggaaccacaggtgtgtgccaccacacccggctattttttttgtatttttggtagtgactgggttttgccatgctgcccaggctgatatcgggctcaggcgatccacctgcctcagcctcccagagtgttttcaaagtgctggg

SEQ ID NO: 774217 - DNA, 622 bp, Homo sapiens
gtgctgcttcattgctgctttttctgctttgaggatggcaaactagaaaagcccttagattaagtttttactttacctaagacagcattaaagctgattaaaaggttccactgaaatggcaaaatggccatatctctaataagcgccagtataaaacttaatcttaaattgggcagtcctggggaaaagaattagatttaatttataccaatttgaattatagaagtcagactcatagcagccattggctacttattctgtgtgctaaactaaatctcaactcagtcccaggaggacacatttcctactacagggcaacccttttctgcccagtgatcttaggttcgattatctatgaagggtagaccatgtggtagtaacatattttccagggaacaaaacaaatcagttttaatagtgatcaaaccccacccagcctctttatgtrttaatacccaacttacaaaaccgtatgttaagctgtacaattcctccactggaaatttaagcgcacattattatgagttccttatttcctgataagtcccaatggttacaaaattactcagtttctttgaagaatcaggaagccaccacccatgggcactcaatactgattgtc

SEQ ID NO: 774218 - DNA, 583 bp, Homo sapiens
gcgtgtgcctgtagtcccagctactcagaaggctgaggcaagagaatggtgtgaacctgggaggtggagcttgcagtagccaagattatgccaccgcactccagcctggtgacagagcaagactctgtctcaaagaaaaaaaaaggaattctgggtttgaatcctgcctctccatctgctctgctagggatatgatttagggcaagttgctagacctcatcgggcctctcttttcacatctgtataatagaggtgatattgtttcacttccatttgtgaaattttcatgagatttgttattgttgtttttatgttaatccctagtacatggcctgctgtaaacactcaggacacccaggatatggtctttgctgtttgattttcctcatccccagtckcaaggggaagccaggacaatgagaacagccacttgccatcaggagtcactgaaggggccccaggatgggatggtggggagataagaaccatgagagaagttggcacaaaggagttatgggacaaagggtccaagataggcagaaaagaaaatgttgccagttgatggggaagaaaggaagtcaga

SEQ ID NO: 774219 - DNA, 600 bp, Homo sapiens
catacttatttctcatgcaactgttaaaacggacatagtgtgcctttcaaagtgtgccacggatttgatttggaatctcaacagtatcatattaaatataatctgagaattgtttccagttcctaatttccatcattagcacatttccatttcttaaattcagtcctaaatttttatacagcatgaaaaagagccaggcatggtggctcaygcctgtaatcccaacactttgggaggccgaggtgggcggatcaataggtaaggagttcgagaccagcctggccaacatggggaaacgccatctctatgaaaaatacaaaaattagccaggcacggtggtgggcacctgtaatcccagctactctggaggctgagactggagaactgcttaaacccgggggcggaggttgcagtgagccaagatggcgccactgcactccagcctgaggatcaggggaggagaaagaaaaagcagtcctgacagtcaggagctggcctgttaatgtcaatgttaggccatttcacagaacaaatgacaggacaagtttacagaacacgaacatcagataaggccactctgtgactgatgaatcaaggcac

SEQ ID NO: 774220 - DNA, 601 bp, Homo sapiens
cattgggattgactatgtatacaatcatgacatctgtgaatcaagatggctttactggttcatttccaatacttacatattttatctctttttcttgccttattgaaatactgaggatctctagcacaatgttgaacagaagtggtgatagggtacatctttgtccttttcctatgtttacaaaatttcccactccataagccttgttgagaaacagagcctgcctcctacctaggagccgaaatgccagattcttattttcctggctttctttgcagctaaggcatcaattcagtcagtatccccacgggaaacagggcagattcattcagaagggattctgaagagaaggtaacaaagggctattcatagagatgcagacaggattaagggaaccaataaaggatgtcaaggcattcagagactaacaatagtgggaagcgatttccgtgcccatayctggaaggggcaaggtgagaaaacagtgttactcaaggcttgtgagtttggatccctggaagaggaccactcaacaggagctgaaatcttggaaagaagcaggtactgccagaaaagctgccctgagttagaagggagtaag

SEQ ID NO: 774221 - DNA, 536 bp, Homo sapiens
tacttttaaaagaaaataaacacagatatcattgtgcagagatgggcaaccgagtccctcagcctcccttccccagctccccgactggctgctgtcccttatttcttatcgttggaaagttctctggctgaaaccaccaaccctgttgcttagcagttcatctgctcctgcctgttcccctcctgtccccaggaactcggggccatgtgttcccttggcccatatgctgacaagcatcctcccacccaacctgccaccaacccaggcaccagccagggccacctgctccatggctgcccctccctgacttcacaagagttgggggtggaaggggaatggagagaggtggagaaaaagacaaaagggctccagggccttctacagacctccttccccaatccctcctgtgttccttgcccctacttttaattgatctctkcttggaggatgcttcaggaaacaaaaacagccaaaagtggagctaggcaaagaaggacattgctgcagggagaatctaaactaccaatccttcattg

SEQ ID NO: 774222 - DNA, 655 bp, Homo sapiens
gagggtggggggtaggagcaggcttctctttgctggaaaatttaaaaaaacaggtaactaatttttcaaggatgcagtgaagaggacatgtgcaacaagtaacgaactaggctacttgagggacattcgaactctaaaatcctggcacctatgatcttgctgtcctaaaaaatcaatgtcataacttcattgacatcaaaccctagccagtgaagagtcagtattgagaggtccctaaggcaaaatagcagagtcattgatttctgaagctgtagaagctgtggttcacttttcctttgcctatgagctagtgagtgcagggctacagctggaacgcaggatataaagaaatagaaatttaatgggtgcccacacagccctcatttttgctaaaccttttaggtgtgactcarggtgccctgtggcacaaggatatatttcccctaaccaacaagaaaaaaagtggtccaggatcctgtgtctcattttcattctgcttctgcagacaccaaagcactgagcaaagatatgctctgtcccctattcaccaccatagggtatggagaagagaattttcctttaatgcctcagtaaaatattccaaggtcctgagggctatcctatttaaatgcaatgattttatctattatttatc

SEQ ID NO: 774223 - DNA, 630 bp, Homo sapiens
ccctacaaaatggacactcacctggtataataggaagagaaccaggatttgaggagccctatggacctatttgactccaacccttgcttgcactttgaccttaggtacaactcttaaactctctggcccagacattctcatctactgcatatacagcttttccccacatgtatcttataagaaagggctttaccaatgtttctcccattttacgtattctaaaagaggaattaagtaatatccccaaaccacacaattagtaagtgacaaagttacaacttgaacccagggtctctgtttctaaattctgtgccctcctcactccactaggttgactttmcctcaaatgacagtggttgtaaggagattacctccctgttcccacagcctttgaaatgctctggtttcaatactctcttcacccagggttgcctttaatcacttctcccacctcagctctcagtctccaagcacctattagggcaaagcctctggaagagtgagtcaggggccctggctcctcaccttggaaatggaggtttccctcaaactggaggaagatcctcagcacatcccgtcaaaaacccacactgtgatcttaggaaaattatcttccaactgaatgctatg

SEQ ID NO: 774224 - DNA, 588 bp, Homo sapiens
atatattttcagcttaattttaaaagaaaataaagtatgtttgtggtggttaatattgagtgtcaacttgattggattgaaggatgcaaagtattgttcctgggtgtgtctctgagggtattgccaaaagagacaaatatttgagtcagtggactgggagaggcagacccacccgcatctgggtggtcaccatctaatcagctgccagcgyggctagaataaagcaggcagaagaaagtggaatgaagagacttgttgcgtcttccgaccttcatctttctcccgtgttggatgcttcctgccctagaacatcagactccaagttctttagcttttggactcttggaattacaccagcgatgtgccaggggctcttgggcctttagccaaagactgaaggctgcattgtcagctttcctacttttgaggtttgaggactcagactggcttcctgctcttcagtttgtagatggcctattgtgagacttcacgtgtgatcgtatgagttaatactcctaataaactccttttcatatatacctatatcttattagtcctgtccctttagagaaccctgactaacacaat

SEQ ID NO: 774225 - DNA, 640 bp, Homo sapiens
gaataatggcctccaaagaatgtccatgccctaaactctgagacagatgagtatgttaaattatctggcaaaggagaatcaaggtagctgatggaattaaggttgttaatcagttgatcttatgatagggagataatcatgagtttgtccaggtagacacaagataatagtaagagtccttaaatgaggaagagggagaaataagaatcagtgtcagagtgacgcaatagaagaaaatcttgactggctattgctggctttgaagatggaaggcagccacacaccaagcaatgcagaaagcctctgaaagctggaaaaagcgtggatataggctttcctcttgagcctccagaagtaacggagccttggcaacaccttaattttacccaataagckctatttcagactcctgacttccacaattgtacagtgataaattcatgtaattttaaaccaccaagtttgttacaaaagccatagaaaactcataatttgttataaaagccatagaaaactcataatttgttataaaagccatagaaaactcatacaagaggtacacaggaactctctgtactatggttgcaattattctaaaatcattacaaaatcaaaagttattaaaaagaaacttcaagaa

SEQ ID NO: 774226 - DNA, 601 bp, Homo sapiens
gagcagaacgagtgccaggaggtgtcgtcagagagggccagaaggggcagagccttgtaggtcaatataaggactcaggcttctaagaagagtgagactgggaagtactgaaggactcagagaagaagaggagggacacgatggaactcattgcttaagagagttctcggccgggcgcggtggctcacgcctgtagtcccagcactttgggaggctgaggcgggcggatcacraggtcaggagatcgagaccatcctggctaacacggtgaaaccccatctctactaaaaatacaaaaaattagcagggcgtggcagcgtgtgcctgtagtcccagctgctggggaggctgaggcaggagaatggcgtgaacccgggaggtggaggttgcagtgagccgagattgtgccactgcactccagcctgggcgacagagtgagactccgtctcaaaaaaaaaaaaaaaaaaaaagggagttctctggcaactgtatggacaagagttgagggaggcaaagagagaagcagaaagtccagttaggggtggctgcgataatcccatggttgccaaaataagccactactggccaggcacagtggctc

SEQ ID NO: 774227 - DNA, 576 bp, Homo sapiens
tattatttttacaaaggacgcaaaagggaaaaggaataaacagttattgagtacctgatgtgtgttagagaataaatacatacagtatgtctcattgcttctaatctcatgccagtaccaaataacagtcagaacatgagtttaaaggccaaactgacttggttcaaacattggcctggccactgccttactatataaccttggccaagttgtataatttctctaagtctcagtttctgctttttttttttttttgagayggagtcttgctctgtctcccaggctggagtgcagtggtgcgatctcagctcactgcaacctctgcctcctaggttcaagtgattctcctgcctcggctcccgagcagctgggattacacacacctgccaccgcgcctggctaatttttatatttttagtagagatggggtttcaccatcttggccaggctggtcttgaactcctgacattgtgatccacccgcctcagcctcccaaagtgctggaagtgctgggattacaggcgtaagccaccgtgcctggtggggattttataaagattaaatgtttataaagtg

SEQ ID NO: 774228 - DNA, 576 bp, Homo sapiens
tattatttttacaaaggacgcaaaagggaaaaggaataaacagttattgagtacctgatgtgtgttagagaataaatacatacagtatgtctcattgcttctaatctcatgccagtaccaaataacagtcagaacatgagtttaaaggccaaactgacttggttcaaacattggcctggccactgccttactatataaccttggccaagttgtataatttctctaagtctcagtttctgctttttttttttttttgagacggartcttgctctgtctcccaggctggagtgcagtggtgcgatctcagctcactgcaacctctgcctcctaggttcaagtgattctcctgcctcggctcccgagcagctgggattacacacacctgccaccgcgcctggctaatttttatatttttagtagagatggggtttcaccatcttggccaggctggtcttgaactcctgacattgtgatccacccgcctcagcctcccaaagtgctggaagtgctgggattacaggcgtaagccaccgtgcctggtggggattttataaagattaaatgtttataaagtg

SEQ ID NO: 774229 - DNA, 583 bp, Homo sapiens
ttaggcaaataagtttccttttggtttgtcattgagtaaacctttgcaacctgtaatgtttagcaagtgactacttctgtatagtaattttccttttagttgagaatttattcaagcaccaaacataaaaaagaataaaagtgaaataagctttcttttgcataagggactttctataatttgctactttttatcttcttttttttttttttgaggtggagttttgctcttgtcgcccaggctggagtgcagtggcgtgatctcggctcactgcaacctccacctcccaggttcaagcgattttcccacttcagcctcccgataagctgagattacaggtgcgtaccaccatgcctggctaatttttttttttttttttagatggagtcttgctctatcgcccaggctggagtgcagtggcgygatcttgactcactgcaagctctgcctcccgggttcacgccattgtcctgcctcagcctctggagtagctgggactacaggtgcccgccaccatgcccagctagttgtttttttttttttttttttagtggagacggtgtttcaccgtgttaaccaggat

SEQ ID NO: 774230 - DNA, 496 bp, Homo sapiens
gaggctgaggcaggagattcgcttgaacccgggaggtggaggttgcaatgagccaagatcgtgtcattgcactccagcctggaggacaagagactctggtttttgcagcaagtaactaatttatggtgtcaaggctccttctgtccttttcgggcttccatttctccagcagcatttccacagcacagcagcaagaggtaaggtgagggttcaagtagatgttggttgaaaacatgaattcccagctgtgcaactctggaaagttagtctttccaagcctctgtttattggaaaatgaggatatcactgcctgcctcacaggagtgcagtgagttgamtggattctattcagcacacagaatatctggtgcatggttggcattcatgctaaagttctcccctgttgatgttttagaactaagagttatcatttagctatcttcttcagctatcatttagctcttagttctagagtatcaacagaagagaacttttc

SEQ ID NO: 774231 - DNA, 502 bp, Homo sapiens
tactggttccagtccatggcgtattaggaaccaggctgcacagcaggacgtgagcattgggcaaccaagcattgccacctgtgcttggcctcctgtcagatcagcagcagcattagattctcataagagcactaaccctattgtgaagtgcgcatgcgagggatctagggtgtgcactccttatgagaatctaatgcamcccccacaccccaaatgtggaaacattgtcttccacgatactggtccttggtgccgaaaggttggggaccgctgctttacagtatagaactaggaaatggaactgctgagtcctgtggggtaattctgtatttagatttctgcggaacctccctgacttacttttctccttcttcctctcttctttggtctggaaccagctcctctcgggctcttggaccactgcctccttccccttctccaggagccgctttgctgtattgatctgtagagataacaaaaggatgcctgccgtgaaacccgt

SEQ ID NO: 774232 - DNA, 481 bp, Homo sapiens
tctctgatttgctttaactttgaaatgttggaaattgcaaatctagtccctaaatttagggtaaattaacaaaagattcatgtttcagctgagcaagttattgtatgaaacttataggtaacagatgtcattagctgcaaaaaccaaaatwgtatgactacattcagtaactatctagccatgcaaatgatagaccaattagattaagatcctaactggtgcatgtagaaagcatttatgcacaatgttttgaccctcccccaaacatctttttctgtctccttacagagataccaaattttcctgaatacctcaaggtgaatactgggaactgagaggctcagtgttcagagttgactactgggaacagagttaacacatttcttctatattataaagaaattttatgaatcttgctctgcctcagaaaggcttttagtaaaagattgttcatgtgtaacactctatttggattcatgaa

SEQ ID NO: 774233 - DNA, 481 bp, Homo sapiens
tctctgatttgctttaactttgaaatgttggaaattgcaaatctagtccctaaatttagggtaaattaacaaaagattcatgtttcagctgagcaagttattgtatgaaacttataggtaacagatgtcattagctgcaaaaaccaaaatagtatgactacattcagtaactatctagccatgcaaatgatagaccaattagattaagatcctaactggtgcatgtagaaagcatttatgcacaatgtwttgaccctcccccaaacatctttttctgtctccttacagagataccaaattttcctgaatacctcaaggtgaatactgggaactgagaggctcagtgttcagagttgactactgggaacagagttaacacatttcttctatattataaagaaattttatgaatcttgctctgcctcagaaaggcttttagtaaaagattgttcatgtgtaacactctatttggattcatgaa

SEQ ID NO: 774234 - DNA, 615 bp, Homo sapiens
aggatggaatatattttaggtggctgcctagagtggcaaaggcaatatgagaagaattttgatagctgggcaagaaaatgcataccacatacacacattactcttctctgatttgctttaactttgaaatgttggaaattgcaaatctagtccctaaatttagggtaaattaacaaaagattcatgtttcagctgagcaagttattgtatgaaacttataggtaacagatgtcattagctgcaaaaaccaaaatagtatgactacattcagtaactatctagccatgcaaatgatagaccaattagattaagatcctaactggtgcatgtagaaagcatttatgcacaatgttttgaccctcccccaaacatctttttctgtctccttacagagataccaaattttcctgaatacctcaaggtgaatactgggaactgagaggctcagtgttcagagttgactactgggaacagagttaacacatttcttctatattataragaaattttatgaatcttgctctgcctcagaaaggcttttagtaaaagattgttcatgtgtaacactctatttggattcatgaaaattttcaatattccatttaagtcagacac

SEQ ID NO: 774235 - DNA, 515 bp, Homo sapiens
attcatgaaaattttcaatattccatttaagtcagacacactgaaatgtcaaccaaatttcataaaacatatttgaatgagatcaagcctttcttagctaagaattttatttcagcagtaaatttagaggaaaataagaaatgtgtgtactttgggccaaataacagtgttggccacttgggaacaattcagacaagtgctcttcatcattactcttaaagtagcaatagcaccacatccatttcctggcaccagccggcctgyttttcactgatatgaagtgcagaaggcattgaaacagttaagaagggtgaaataaatggaatacttatatgaagtacaattgttaataaaaagtagcatttgatattgtacaactatagataagatgacaagtgtgagataatatttttactttaattgacaataactttattcacaatatttctatttcaaataatttttttgcttttcatccaatattacctgagctcaataggaatcaataaaatgaa

SEQ ID NO: 774236 - DNA, 596 bp, Homo sapiens
acagtcctggtaaatttgataccaaacaggagaaaattataaaatgacagttatttaaaaagaaagtaacaagtgggagtttaatatatgctcagcaatgttttaagctccccagtaacagagtatatttgagaaatgtatgaagaagatacattgaactgtwttgcagttgaagaatttgggcatacagagtttaaattaccaatttcagtttacactaaaaacatttgtaatattattttgaagtaaaatagcattagactttcaaatatttagggagatgctttgtgttctaataaaaattactaagtatgaatttctgcaaaatcacatttgaaacctccactggataggaaatcataaagcggaaaacacacaacatctgtctgtggtgtttctggaattgatgaacccatcccaattcagcactactctcacacatttcagacatggtgcaaacagagaaatgaaaaaatggtttaacatataatttctcagtaatatgcagatatttctgtcctcaaaagcaatggaaaagcagtgaaatcacaccatctcttacaggccatggagaagacttattgtcactgtaaact

SEQ ID NO: 774237 - DNA, 414 bp, Homo sapiens
tagagaattcaagagcatgaaatagatgttcccacgcgaaagcaagagaaacaaacccaggcttctcaaaaactacttccattggagcagagcttctcagaccacatttcaagaccagcctagccaacgtggtaaaaccctgtctctactgaaaatacaaaaaratagccgggcatggtggtgcatgcttatggtcccagctactcgggaggctgacgtgggaggattgcttgagcccgtgggcaggaggtcgcagtgaaccgagattgcaccactgttctccagcctgggtgatagagtgagatcctgtctcaaaaataaatacattaattaattaaagtaatattaaaattagccaggcatggtggcacatgcctacagttccagttacttaggaggatgagatgtgcagat

SEQ ID NO: 774238 - DNA, 543 bp, Homo sapiens
cataagggtggaacctgaagttaggtgatgtaactctcttgcctgggtcttgtcctaaggtagcctgtgacatacctcaagacccagcacccaggtgatgtgactcttctgcctggtttctgcccacatgttacattgtgacatacatctagagaagcacctaggtgatacaacttcccttttctgcctgagccctgcctactggggayattgggacatatctctgagcctatgagctaagtgatgtgactctcttcttccacctgggcctttacaatggggcgattgtgacatattgctgagtccagcacttaggtaatgtgactctcctctttcctgaaccatgcccacaaaaagggaattttaacatattgctgggcccagcacccagatgatgtcactcttctgcctgggtcctgcataaagagggaattatgacatattgctagtcccagcaccctgatgatgtgactctcctgcatgtgctggagccacagaaggtattttgacatatcttgggcccattctgtaggttttttgtct

SEQ ID NO: 774239 - DNA, 627 bp, Homo sapiens
actacttacatttagaagagaaataattattttgcagtaaaccaaatgaggcaattgttgctcaaaattatcagtgattacaatattaatatcatcatctagatagaacttatagatatctgcatgttgaaattgcttcaacttataataatttaraaactagaaagttctataaactataaagaactaaaaaatgtatcaatgcattttcctcagtttttctgtgctgtttgttatttaacttgtcagcaatagcaatagaaactctgatatttacagcatattctgggtccagcagcacatgggaggagccaatatacttcagggcttttactttcagcttggggacctttagtttctggtgctgatggcaatgtaacggagggcactaaaaatcagctgttaccctctgtcacatgactggtcactgtgtgacacaataaacatctttgcatgaaaacaactgagtaaatgttttaacccaaaagctgccataatctccaaaattttcccagaaaaatgaccaaaatgttggctatgcttaggtgactaagagtgaaaactgtagactgtgaatctcacccagtcaaaataatcataaagtaatggaaaaatctctcaagattg

SEQ ID NO: 774240 - DNA, 569 bp, Homo sapiens
aaaatgggtatagtgatgttaataaaacagttgtgttcatttttacatataaaacaaaactgaatgagtcaatacagacacctgagttttcatccaactaatgactatgtgaatattcacaagaagtttaattcaacttcaccctctatttgaggtgaaatgaggtgcatttttttttgtatagtattaacaacatacttgatcattgttctctgagaatcatttcatgctggcccctctgtggccratacataagagataaaaatggaaaatggctcatgattttttcttaaaatgctctaaaatcttccttgcataattagaaaaaaaaaaaagcatattctttactattgccttcaaggcagaatacgagctgtacctagactcacttatttccctaccacatttccacttattcccaactaacaccccacaatgtctttgtgtcctattccaaacatgctcagctatttgtagacacaatgtcctgacgcctcctgttttcttttttaaaatttgcatacatttaagaggtacaattgcaattttgttacatggctatattgcct

SEQ ID NO: 774241 - DNA, 626 bp, Homo sapiens
aatgggtatagtgatgttaataaaacagttgtgttcatttttacatataaaacaaaactgaatgagtcaatacagacacctgagttttcatccaactaatgactatgtgaatattcacaagaagtttaattcaacttcaccctctatttgaggtgaaatgaggtgcatttttttttgtatagtattaacaacatacttgatcattgttctctgagaatcatttcatgctggcccctctgtggccgatacataagagataaaaatggaaaatggctcatgattttttcttaaaatgctctaaaatcttccttgcataattagaaaaaaaaaaaagcatattctttactattgccttcaaggcagaatacgagctgtacctagactcacttatttccctaccacatttccacttattcccaactaacaccccacaatgtctttgtgtcctattccaaacatgctcagctatttgtagacacaatgtcctgacrcctcctgttttcttttttaaaatttgcatacatttaagaggtacaattgcaattttgttacatggctatattgcctactggcgaagtgtgggattttagtgtatccatcactggaataatatatatggttcccag

SEQ ID NO: 774242 - DNA, 563 bp, Homo sapiens
tcctggaaccagtggattttctgctgaattctagcaaacatttaaagaatggctaatatcaattttactcaaactattctgaaaaatagaggaagagcgattacttccaaattcattttaccactcttttctcttcctgtcttccttcctttcttcttttctttctttcttcctttctttcttttctttctttctgtctttttcttttctttctttctctttctttccttctttctttctctctctctctctccttccttccttcctttatttttttttgagacagagtcttgctcttgtcacctaggctagagtgcaatggatgttgaaagaagtggaaaaagtggacatccacttttcttgagaacattaccttgctcacacaaggtccctctaactcctccctgtgcttgagmtgtagcagtgggcaccatactgggtgtacaccatttttttactaagggatcttcaacacttgtgtcttcacatcactgaatcccttgcagaaaatgcccagacaccaatgaacaacacccagataccaaagaacattcacaagcatc

SEQ ID NO: 774243 - DNA, 550 bp, Homo sapiens
ctctgaaattcaaaccaaatctagtattattgtctgatttacataagttcatttattaagatgtgtcccaactccatctgtagaattaaattgctgctgcctacttccacctgtaacatagttctttcttccctggctaatttgggagaccttggacaaataaactagttttttttttaaataaataaatcccyatggacttcctcaaattagggccatcagctattttaaggaaactgcaatgggacttaaataacatctgcccctttcacatttttggaatcagaatctaaatacacctttcttattgcaatcaaactgattgtctttctggcacctctcaacctctattcagctaagacttcatagcatatcaggatctatttaagtttcataatatatgctttgtataattatttgatgactaatcagtaaatctttaaagattggaaaaaattagaaatatttatgatggtaactatgtacaataatacaatattgacattaatacaatattaatatattaatactaacaaaatatttaaacttt

SEQ ID NO: 774244 - DNA, 624 bp, Homo sapiens
agtgaggttacatagcattcccaaggtcatatagttggttagtgttagagccaggattcaaaaacagaaaaatccaggattaaacccagtaaggattctatgaaaccaaagtatttatttacttaacttcctcaggaaagtttctagaaaactataagcaaatgcccaacctcctgagatgcggacatcgctatgagtgcaactagaaaagggttccagtgatgtgaggaaacgaggcaaatatatttttctgtttctggcttacagcccaagatactggagcctccctcctctcatagcttcttatcatttaattattagcagccttagctaatcattaattatgcactgtcaattatgcttacattattatttgaaatggatacaatatctgactgatttgactaaaataacccccttgtttaattgtcaatttgcataaattcagatgyaatgagatgttgcacagtgattcattaggcattgaaaacagcagcaacaacctgaacgacgggaggctcagtcttgcaaattattgccattttcatcaggaaaggaattccattacaactgactttccttagtctgaaattgtgatgaggaatttgcaaacttgagccatca

SEQ ID NO: 774245 - DNA, 606 bp, Homo sapiens
agtcaatgggtcagaaagaataataaacataaaataactagttcaaaatatagtatagggctagatctaatttcaaaagttgagagccttacattcaatagatgagcattaaattcaccttttaaagaaaactgcccttttaaacttacaaatcagttattctttcattgttaaaatgatggagacaatttgattgttttaggcagttctctgtccaaaaaggagagaaaaacttgaaagtttgtttgttgtttggctaatttatatatgatattctatatctagatcacatatatcatattggggtgagaaatctaayctcactccaaatattgcaggaagatatgccactcattaaaaactctggggtaatatttttatggccagtgttctttgcttgacaaaatatattcatttagtaaataattacggagcatcttccgagctccaggtaatgaaacccatacaggagatttttaaaactgcccatctttaaggaactctaaatcctgtgtataatgtaaacattgaaaatactatgatacaaataccacttatgtaataaaaatcagtaaaaagtttgtggaaacactgaagggaaagtga

SEQ ID NO: 774246 - DNA, 605 bp, Homo sapiens
ggtttccttgaatcttcaactttctgattgattttaaaacatattgttttatagcttatgtggtttttctttattgtttttaggttgagaactatggtgtttaacaactttttaagtcttaaataaggagtagatttattgttatttgctgttattttggattcagtctccacaaatttgtgctttgtagattttatccgaaattctattatcaaacagaagttggagattttttttcatccttctgtatccaaagacaaagtataagaattttaggccaaaatatctgtactgaagacagttcaaggtggattaatcactaaaacattttgaattgcagtactttwttcattgaaagagaatactaattagtactatttaataagaccagcttcggcaaacaaactgtcctatgaatcatagagtagaagtgaaaatgaagtagagttcatgaaagctctttataaattgtaagttagtatgcacctgttgatttttataaccattaataaatggtaacatttcgaaccagtaatttttctaagattgcattcaagatcattccaatttgtagcaaaatcatgcactcacaactgccatcagct

SEQ ID NO: 774247 - DNA, 586 bp, Homo sapiens
agtccttatattcagtgtgatgggacaaacatagtcctactgctcaccccctgagtcactcaggaaattccaaagccaactgtctttacctaaactaagtctactgctaaagttgagatgaggtcagtttccacagatacacatggcatatggagcagtgctaggttcagtaaggaggaagacaatttgcagggtccactgctaactatatactttcttttaaaaagagaaaattttcagatactattatttaagacagagatttgaaacttttataaattgtccttaggttgtaaagataaagagagactattagagcaaatgttaattcatcaaagagcatgttaaaattgaggctccaccatttgaggcctttattytaagaagacagatgattcagaggcttactacaagataaaaacgaagacatttaatggttatctcttaaaaatatgggatgaaaaatgtttgagcccttatgcaaaaaaaaaaaaaaaagctggctttaaagtgaattttgagaacattccttctgcaaagcagatacttggtgctccacacatacttccccaataatccaagggta

SEQ ID NO: 774248 - DNA, 649 bp, Homo sapiens
atggctctgagggatatttgtgggctctctcagtttagatggcaatttatacataaggcatgtatgtcttcctgcaggctccagccagagtatcttagctttaaattggcttctaccttttgctcagcaacttggacatttgtgcaaatttgcaatgactctctttgctgttcccctctttggttttggacattgatacttcacaaatatctcaaccacactcctcattattaacacagcagtctcaacacactcttaccttcttgtcccamcttccagaaccttgccccaggactcagttccaggacttcctgggcacctgaaatgagagttcaaggacattttatcattagaaaattcattgccaaacatttttttaaagcttatccaatggatataagccttaattcttgattctgccagatacatacactaacaaccagacaaaaaaaggaaaacaaagttcaaaaaaacaaaaaaagaggtagttatcaatgcgtcagaagagtgtggaatagcttattttttgttctaggcttattattcattttcacctaagtgttacagctctgagtgaagagtagccagccttttttaatcaatccaaaatcttttttggttcactgtgcaaaaagaaagagatttggca

SEQ ID NO: 774249 - DNA, 571 bp, Homo sapiens
actgccatttcattttgtttttcacttgtccatcaattcttttcagactcctcggggtgagtaaaatacaggtttgtcaaccctgtggagtatctgatacgggattaaatttacctgctgctttaaattgcctcaatccaggacatttctgcaatcatttcccttgattattgaattatgtttgcaattttaaacacttaaaagacaatgtccaagaagaattttatttaaaaagagaaacacattggtttgtgacagagggaaattttactaagtttttctgtacttcttgaatgtttcatttccaaagatttarttagtgtggagcacatagtacattgctatcaagagttaatagacaatattcagcaaacaagcatactgtctttataaacaagtattcctctgaaggtgtggtttgaaatacagagtttcagatctctgatgatagagttgtgtttttgatgcaaaagcattaactcaataattccagcatgttgtagtatggactacattaaaatccaacatggccctctgggactcattatgaattttttgggcccagcatttt

SEQ ID NO: 774250 - DNA, 485 bp, Homo sapiens
ttattcctgcaagagcacagagattgctctgactggtcaaaaagaagaagtaagaaatatccactctggctggcctgaggaaagcaaacacccatgttgggttcccagtgagagcatctgcttctaggaactgagacagtccccagttgatagtttttagggaaatagaaacctcagttcatcaactgcaaggaacttyattctaccaaccacaagactaagtttggaagcagattccctcccttaccctgcaacccccagaacctctgtgagaaatcagttcagctgatccctttatttcagcctttgtattttgataaccagctgtgatatacaggcagagaaacctaccaccccatgcttgacttatgactgacagaactgtgagctaatacatgggtattgtttcaagctgctaaaattgtggtattttgttacacaacaatcatatgtgctcctcatacgtattttgcattgttatcaac

SEQ ID NO: 774251 - DNA, 644 bp, Homo sapiens
tgaggccccccttatatgcagcaagaatacaccaaaacgtcataaagaaatcccttttcgcagcctctctcttctgttaattggcttcactgtctcctcaattcaaatttcataacaaagtgataacgattacatcaacctggaggagaacagatggcagaaaacctgagttctggcactactgctgccaattatgagatctgtgatcttggaaattcacttgacttctgtatctgttttcttataaagtaagaaaaatcatgtcagcctcacaggattgttgtgagaaagatgtttaaaacaaattggaacgcatattatgatgaaaggcatttccattataataattactggttacttggcagaaagaaaacacacaccctgttcaatggtataacacctcctggtattcctcactacactggyactgcaattatcagcatgtctttctataaagtcatatataatgggtttcaggtccttaaaaaataatttctaataatattatgtaacatattcttctaaaattcggtgtttctaaaggcaattcaaggagaggggaccttgtagaagtattttcctatacagcgtggtctatagaccagtacccacaatgaacattagttgaacaaatgagaacaaat

SEQ ID NO: 774252 - DNA, 612 bp, Homo sapiens
aacaagttccttacctccgtctgagaccacctcaacctgtacttcattgtccatttcactatcaatgttttggtcaaagccactcaacgagtctccaggaagttccaaactttcccacatcttcctatcttctgagcccacaaaatctctagaaagttcgaaactttcctacatttttctgtctttatctgagcctttcaaatggttccaacctctgcctgttacccagttccaaagttgcttccacatttttgggtatctttatarcagcaccctgctctctgcagtaccaatttactgtattagtccattctcatgctgctataaggacatacccaagactggataatttataaaagaaggaggtttaattaactcacagtttcacagggctggggaggcctcaggaaaattaccatcatggtgaaaggggaagcaaacatgtccttcttctcatggtggcagaatgagagcagaatgagaagaagaatgacagccgagcaaagaggaaagcactttataagatcatcagatcttatgtgaacttactcactaccataagaaccgcatgggggaaactgcccccatgattcaattgcctcctaccaggtc

SEQ ID NO: 774253 - DNA, 513 bp, Homo sapiens
tccatatatcagcataaatcatccttaaatctctgggtaaaacaaggtcacctcagtcttaattctttttctaatttttgggttgactggttaagccttgatattcattgtcaggaaattagtgggtttcttgagagaaatgctttattagtttctgttatgtatcaatgctggagaaacaataagggggggctaacagaaactcaaagtgagccatgtgtcaggtaacatgtttatgctcttgtatataatcatcgccacaagcctgcaagaaaaatactattatttcagtttttaccagtgargaccatgagactcagctttgcccaaggttacccagttagtaaatggtaattccgcaattcaaactgaagcccattcgattccatccaatatcttttcacggcatgatgcttgagtgattaaagtgaagtgttctatttaaaccaattattctagactagtgttttccaaactctgtggtcatgaaatcaattttatggattgctattg

SEQ ID NO: 774254 - DNA, 531 bp, Homo sapiens
tgagtgtgcatgtctttttcatataatgacttcttttcgtttgggtagataaccagtagcaggattactggattgaatggtagttctacttttagttatttaaggaatctccatactgttttccatagtagttgtactagtttatactcccaccagaaattaaagatgacacaaacaaatggaaacacatcccatgctcatggatgggtagaatcaatattgtgaaaataaccatactgcccaaagcaatctacagattcaatgcaattcccatcaaactaccatcgttcatcacagaactagaaaaaataatcttaaaatkcatatggaaccacaaaagcacccacatagccaaagcaagactaagcagaaagaacaaatttggaggcatcacattatttgacttcaaattatactacaaggctatacttaccaaaacagcatggtactggtattaaaatgggcacatagaccaatggaacagaatagagaacccagaaataaagtgaaatacttacagacaactgatct

SEQ ID NO: 774255 - DNA, 620 bp, Homo sapiens
gtgagagcgacctggtaggaggcaattgaatcatgggggcagtttcccccatgcggttcttatggtagtgagtaagttcacataagatctgatgatcttataaagtgctttcctctttgctcggctgtcattcttcttctcattctgctctcattctgccaccatgagaagaaggacatgtttgcttcccctttcaccatgatggtaattttcctgaggcctccccagccctgtgaaactgtgagttaattaaacctccttcttttataaattatccagtcttgggtatgtccttatagcagcatgagaatggactaatacagtaaattggtactgcagagagcagggtgctgytataaagatacccaaaaatgtggaagcaactttggaactgggtaacaggcagaggttggaaccatttgaaaggctcagataaagacagaaaaatgtaggaaagtttcgaactttctagagattttgtgggctcagaagataggaagatgtgggaaagtttggaacttcctggagactcgttgagtggctttgaccaaaacattgatagtgaaatggacaatgaagtacaggttgaggtggtctcagacggaggtaaggaacttgtt

SEQ ID NO: 774256 - DNA, 504 bp, Homo sapiens
tccatatatcagcataaatcatccttaaatctctgggtaaaacaaggtcacctcagtcttaattctttttctaatttttgggttgactggttaagccttgatattcattgtcaggaaattagtgggtttcttgagagaaatgctttattagtttctgttatgtatcaatgctggagaaacaataagggggggctaacagaaactcaaagtgagccatgtgtcaggtaacatgtttatgctcttgtatataatcatcgccacaagcctgcaagaaaaatactattatttcagtttttaccagtgargaccatgagactcagctttgcccaaggttacccagttagtaaatggtaattccgcaattcaaactgaagcccattcgattccatccaatatcttttcacggcatgatgcttgagtgattaaagtgaagtgttctatttaaaccaattattctagactagtgttttccaaactctgtggtcatgaaatcaattttatgga

SEQ ID NO: 774257 - DNA, 640 bp, Homo sapiens
ccttctcaacaaactgtggctcagacctaagtccccaaagcattctgcatgtatgattttgcagatgtgtgaagttgttgatgaaaaacttttcttggatgtgttgggtgcaataacacatatgaccagtagatagagcacaaacctcactgattgaggaaatggtagcaaaaccagttcatatgcacagataaggaatgcttcttttgacatgtcactgcatacctgtcttctcctctccttttcctcccattttgcctctctcagactccactagagcatcagccccccaagtagcttccctgctgctcatccccctcctctttgcacaatctgtcctgcactcagatcctgcaatggccagtccccttgcctagggctgggggtgcacagatgagcargcagtaggaatccattaggcagccctgggcagaaggcatcctagtggaaagaacagtgagtgcaaaggcagggagatgtgaaagagcaagcttcctaaattcaagtacctatccacaaagtgggagaactttagtccagaaatccaagttagggaaccttcgattatgaagcaaagatctaaaaaagggccccttaaccttatgtaaactacaaatctccagcctatggaaaaccaaaa

SEQ ID NO: 774258 - DNA, 599 bp, Homo sapiens
caatgtgtaagatcctcaaggacagttcctattcattgttttctccatttccactgtttattgttgttgtttattctagttattagcatagtgattttctgacttagttctgcaaagtcaacattcctttttgtgggtgatcactgatatctctattctgttagctgagtcatcaagtaatgattggacagacatttctataaacgcttagaaccattaagtctcccagtgtttgytgagcagctctgtatgttgagagtacactttcaacacttagcctaagccgtaactgattgtttatgcagagccttaaggtaggctggaattgaaagctaagggccttcttgtcttttctaatcaagtacatagccttggacatatgcacagtcctacaaatatgagtggtattctaaaatcccaggaatgtgtggtagcttttcaaagccccctatgcacacattcagctttttctttgaaggtttttcattggtctattgtttaattcaatggctatccaccatttcagttggcaatgaggtttaacaattgcctgtaattatttcttttaaaaatgccctccagggcaaagattttgcact

SEQ ID NO: 774259 - DNA, 596 bp, Homo sapiens
cttccttacaccttatataaaaattagctcaagatggattacagacttacatgtaaaacctaaaaccataaaaaccctagaggaaaacctcagcaataccattcaggacataggcatgggcaaagtcttcatgactaaaacccaaaaagcaatggcaacaaaagccaaaatagacaaatcgcatctaattgaagtaaagagcttctgcacagcaaaagaaactgtcatcagtgtgaacaggcaaattacagaataggagaaaatttytgcaatctatccatctgacaaaggtctaatatccagaatctacaaagaacttaaacaaatttacaagaaaacaaacaaacaaccccatcaaaaaatgggtgaaggatatgaacagacacttctcaaaagaagacatttatgcagccaacaaacttatgaaaaaatgctcatcatcattggtcattagagaaatgcaaatcaaaaccacaatgagatatcatctcatgccagttagaatggcgatcattaaaaagtcacgaaataacagatgctggagaggatgtagagaaataggaacccttttacactgttggtaggagtgtaagtta

SEQ ID NO: 774260 - DNA, 562 bp, Homo sapiens
aaaaaaaaagaccagcctggccaacatggcaaaaccccgtcactgctaaaaatacaaaaattagccgggcgtagtggcgtgcactgtaattccagctactcgggaggctgaggcaggagaatcgcttgaacccgggagacggaggttgcagtgagcygagattgcaccattgcactccagcctgggcaacagagcgagactctgtcattaacaaaccaaccaacttcccccagcgctcaggggcccacgctggggagcaaagtgggtctcctctgagacaaacgtggagactgctcgagagcgagggtggagaggtgctgggggcgctggtcggggcgcgggttgcgggacggggaggggctgggcggggcgctcgcgctcgccttctgcctgaggcctggtctggggccgcgggtccacaccgcctcctcgtggacactcgccgcgagggcccgcgccgcccgcggaggctgggcttgagcccacgggaaatgaatacggatcctataagattcgagctttcatcactgggtcaccagacggttctgggcgcgtgtccggg

SEQ ID NO: 774261 - DNA, 562 bp, Homo sapiens
aaaaaaaaagaccagcctggccaacatggcaaaaccccgtcactgctaaaaatacaaaaattagccgggcgtagtggcgtgcactgtaattccagctactcgggaggctgaggcaggagaatcgcttgaacccgggagacggaggttgcagtgagctgagattgcaccattgcactccagcctgggcaacagagcgagactctgtcattaacaaaccaaccaacttcccccagcgctcaggggcccacgctggggarcaaagtgggtctcctctgagacaaacgtggagactgctcgagagcgagggtggagaggtgctgggggcgctggtcggggcgcgggttgcgggacggggaggggctgggcggggcgctcgcgctcgccttctgcctgaggcctggtctggggccgcgggtccacaccgcctcctcgtggacactcgccgcgagggcccgcgccgcccgcggaggctgggcttgagcccacgggaaatgaatacggatcctataagattcgagctttcatcactgggtcaccagacggttctgggcgcgtgtccggg

SEQ ID NO: 774262 - DNA, 562 bp, Homo sapiens
aaaaaaaaagaccagcctggccaacatggcaaaaccccgtcactgctaaaaatacaaaaattagccgggcgtagtggcgtgcactgtaattccagctactcgggaggctgaggcaggagaatcgcttgaacccgggagacggaggttgcagtgagctgagattgcaccattgcactccagcctgggcaacagagcgagactctgtcattaacaaaccaaccaacttcccccagcgctcaggggcccacgctggggagcaaagtgggtctcctctgagacaaacgtggagactgctcgagagcgagggtggagaggtgctgggggcgctggtcggggcgcgggttgcggracggggaggggctgggcggggcgctcgcgctcgccttctgcctgaggcctggtctggggccgcgggtccacaccgcctcctcgtggacactcgccgcgagggcccgcgccgcccgcggaggctgggcttgagcccacgggaaatgaatacggatcctataagattcgagctttcatcactgggtcaccagacggttctgggcgcgtgtccggg

SEQ ID NO: 774263 - DNA, 563 bp, Homo sapiens
gaaattctattctactcctaatttcttgagttttttcatgatttgaatattgaattgtattgaatattgaattgttcagtttttcaaatgtcttttctgcatgtgttgcgatcttgtggttttcgttttttattttgttaccgtggtgtgtcacatcagttgatttaaggatattaaatcaacctgtgttcctgggataamtcccacttggcggtggtatataatccttttcatgtgttcctgagttggtttgctaatattttgttaggatttttgcatctgtgttaatactaataaaatatattggtctgtagtttcctatctttgtgatgtctttgtctgactttggtatcagagtaatactggcttcataggatgagttaggaaatgtttttttcacttatgttttctgaaggagtttgtttaagattgagatttattaaatatttgatagaattcaccagcaaaatcctgtaggcctggtctctttttgtgggaagatctgtaattactaattcaagtttcatttgcttgtaataggtcttttcaaatttcctatttct

SEQ ID NO: 774264 - DNA, 631 bp, Homo sapiens
tcttttctgcatgtgttgcgatcttgtggttttcgttttttattttgttaccgtggtgtgtcacatcagttgatttaaggatattaaatcaacctgtgttcctgggataactcccacttggcggtggtatataatccttttcatgtgttcctgagttggtttgctaatattttgttaggatttttgcatctgtgttaatactaataaaatatattggtctgtagtttcctatctttgtgatgtmtttgtctgactttggtatcagagtaatactggcttcataggatgagttaggaaatgtttttttcacttatgttttctgaaggagtttgtttaagattgagatttattaaatatttgatagaattcaccagcaaaatcctgtaggcctggtctctttttgtgggaagatctgtaattactaattcaagtttcatttgcttgtaataggtcttttcaaatttcctatttcttactgagtgaatttcaataatttttgtctttgtaggaatttactcatttaaattgtctaatgtgttggcataaagttattctatactgttataatcctttttaattctgcagtgcctgcagtgatgctaattcttgatttgggtaattttatcttcct

SEQ ID NO: 774265 - DNA, 610 bp, Homo sapiens
aggacacgtttacaagtaagaagcaaggaaccaacaagtctgtgcacattccagaggctacgaggggttttatgccctgagccctgggttccatccaagccacaaggggttctatgccccgggcttagattgtggtgcggcagggcagccttccaccctttggcacagagcttggtgttccaaaggccacgaggggttttagaccctggaccctggacatcttcctagactcttttacattatgacagataagccagtcctgcctcagctcttctaccaacagcrcacgcctgttgatcccagacagagtggctcacgtctataatcctagcactttgggaggcagaggcaggtggatcacctgaggtcaagagttcgggaccaacctggccaacatggtgaaaccccatctctactaaaaatacaaaaaaattagccaggtgtggtggcatgcgcctgtaatcccagctacttaggaggctgaggcaggaaaatcgcttgaacctggagggtggaggttgcagtgagttgagatcctgccactgcactccagggtgggcgaaagagcgaaatccatctcaaaaaaaaaaaaaatcaaaaggtgtgaagg

SEQ ID NO: 774266 - DNA, 581 bp, Homo sapiens
cagctggcccacccacaaggagccataaagaaaaggacaaatccagggtctcaaccgctctcccctcactgagggccttctcttttctgggagggccacccaggcaggggcatgggacagcctctaaatccccacctttgagggtttccatgtgagacttggaaatcccagaaccatcagtgccactccagaccagcatcctagactggggagcggtactgagggccgcccgggagccaggcacctggtccctccatgagggctttctccaaacacctcgacctttagtgttcccatccaagggcccctggggcacytgcaggcaaggctatacttatcccaccaccaagtgcccttcgtggagcccaagactggccgtccccctgcctccagcctcagaggcccctgttctcggctcagccaggctcaccgctcatgcttctgggtcatccagccctgtcccaggttctccttgtagaagcgctgggaggagatgatggtgcctgttgtccagtagagcatgacgttggtcagcaggtcgtccagggagaacttcctgggaacgcagaacacaaagcccc

SEQ ID NO: 774267 - DNA, 581 bp, Homo sapiens
cagctggcccacccacaaggagccataaagaaaaggacaaatccagggtctcaaccgctctcccctcactgagggccttctcttttctgggagggccacccaggcaggggcatgggacagcctctaaatccccacctttgagggtttccatgtgagacttggaaatcccagaaccatcagtgccactccagaccagcatcctagactggggagcggtactgagggccgcccgggagccaggcacctggtccctccatgagggctttctccaaacacctcgacctttagtgttcccatccaagggcccctggggcacctgcaggcaaggctatacttatcccaccaccaagtgcccttcgtggagcccaagactggccgtccccctgcctccagcctcagaggcccctgttctcggctcagccaggctcaccgctcwtgcttctgggtcatccagccctgtcccaggttctccttgtagaagcgctgggaggagatgatggtgcctgttgtccagtagagcatgacgttggtcagcaggtcgtccagggagaacttcctgggaacgcagaacacaaagcccc

SEQ ID NO: 774268 - DNA, 360 bp, Homo sapiens
ttcaggtgaatcaggaagttggtgacatattttcaaaggcaggtgagtcatgttgtaggaaaaccacgaaacctgctcagcaggtgcctgccctctctgtccacagcggctgccgccctgacctgtgcagtgcagacacttcccacaaacccatgctctccagggccctctggctcttatgtgtcccccctccccmacccccaaaacttactgcaataaaaatccacccctggccgggcaccatggctcactcctgtaatcccagcactttgggaggccaaggctggtgaatcgcttgagctcaggagtttgagaccagcctaggcaacatggtgtgaaatcccatctctaccaaaaata

SEQ ID NO: 774269 - DNA, 573 bp, Homo sapiens
cacacacaagtcaagtccctcgatggctacactaggcgcctatggctggagcctccttggcacgagcgcaccatccgaggcacagctgcacttctgcaccctcatgttgggcaggctgaccacctggggcctggtcctgcctccctccttgatgctgacgatcatgggcagcgagkcagtctccgaggcgatgcactgtcgaggccccagaaacggccacttgaaggccagggcctccgggggctgccggcaggtgcccacacactcataagccaggaagcccgggggctccagcacccagttctcggcccacttcatcccctgcaggtcaatgtacatctcctggcggcagcagcgggtgccctcggtcattggtgcttcagggtcacagtcgccctgagctctgtgtgggcaaagagagcagggtcagcggtcagctgggagggctgaggtcagagggcgtctgggatggagatttatgatccacctctcaacttcaaaaagctggatgtttgtgatataggatggacagctagaaataacttgaaaattaataaccgatatttactgagg

SEQ ID NO: 774270 - DNA, 609 bp, Homo sapiens
aatatactgcccagaaatagatctaaataattatagtcaactgatatttgacaaaggagcaaagacaatataatggagcaaagatagtcttttcaacaaatgatgaaataactagacattcacatgcaaaaataaataaatctagacaaagatcacacacaaacgctaactcaaaatggatcacagacctaaatataaaattcaaagccataaaacttctagaagagaacattggagaatatctagatgatgtaactccaaagaaagacaaatagaaaattatagtcagatttcaaaaatcccctctcaaaaattgaaaaaagataatcagtamagccagaatgtttgagataaaccaacaatctacgtaaactaattcacatttatgaaacacttcacctaacaacagcaaaatacacattctttttaagtacacaaaatacttaccaaggtaatctaaattcagggccataaaacagcatatacttaaaagaattcatcttatacaagatatgttttgtatccataaataaattaaacaagacaataagaaagataactgaaaattcacaaatatttgaaaactaaagagcacttttaaatggcaat

SEQ ID NO: 774271 - DNA, 548 bp, Homo sapiens
caaatttattccttcattctcagttgataaatgttttggttacatgcagattttagctacaagttggcttgctgcattatagcatatatgtataattaacttcttaagaaacaaccccagcagttctctgtatagttttaccattttaattcccaccagcaatgtatccagcaatgtatgagtgatccactttgcttcaaatccttgccaacatttgaattttcagtcattttaatttcagccattctatctggtttaaaatggtatttcattgtaattttattttgcatttccctgatgactaattatgtttagtacattttaagtgttgattggttattcaagcacattcttttgtaaagtgtctgtttcygtctttttttagttgaatgtgccttttaattaaattttctaagcaggtcaaggcattttttattatactggacattgctggatccataatccattatgtgaattatgttgactccttaaaaacctgttgagattgttcttggtggccattaaattactggtggctcccttagatc

SEQ ID NO: 774272 - DNA, 548 bp, Homo sapiens
caaatttattccttcattctcagttgataaatgttttggttacatgcagattttagctacaagttggcttgctgcattatagcatatatgtataattaacttcttaagaaacaaccccagcagttctctgtatagttttaccattttaattcccaccagcaatgtatccagcaatgtatgagtgatccactttgcttcaaatccttgccaacatttgaattttcagtcattttaatttcagccattctatctggtttaaaatggtatttcattgtaattttattttgcatttccctgatgactaattatgtttagtacattttaagtgttgattggttattcaagcacattcttttgtaaagtgtctgtttctrtctttttttagttgaatgtgccttttaattaaattttctaagcaggtcaaggcattttttattatactggacattgctggatccataatccattatgtgaattatgttgactccttaaaaacctgttgagattgttcttggtggccattaaattactggtggctcccttagatc

SEQ ID NO: 774273 - DNA, 548 bp, Homo sapiens
caaatttattccttcattctcagttgataaatgttttggttacatgcagattttagctacaagttggcttgctgcattatagcatatatgtataattaacttcttaagaaacaaccccagcagttctctgtatagttttaccattttaattcccaccagcaatgtatccagcaatgtatgagtgatccactttgcttcaaatccttgccaacatttgaattttcagtcattttaatttcagccattctatctggtttaaaatggtatttcattgtaattttattttgcatttccctgatgactaattatgtttagtacattttaagtgttgattggttattcaagcacattcttttgtaaagtgtctgtttctgtctttttttagttgaatgtgccttttaattraattttctaagcaggtcaaggcattttttattatactggacattgctggatccataatccattatgtgaattatgttgactccttaaaaacctgttgagattgttcttggtggccattaaattactggtggctcccttagatc

SEQ ID NO: 774274 - DNA, 612 bp, Homo sapiens
aaaatacagcgataaaagaagaaacggcagcacagaacacctggtgtgggggagcccagctgggccccagggacagtgcagggagatttgtggggtggggcagcatgcccgccactccgatcgggcttccctgggccactctgtgacctcctatcctttaaagcatttaatcctagagatgcccgatgccaaggatcacaccccttgatttgcctggctcagaagagaatctgacaggctaggaacgaacgagtgaatgaatraacaaatgagaaagtgaatggatggttggggcaaatgcagcatctgggatctggctttgaggagggtgcctgtgaccttggcctgggtgcagccagaccgcagagcagggacactgaggggtgcagagagggacccgagagggcatctgcacagctgcagaggcagcaggcggccaagccagctcccgcagaccctgaggcccaggccctgggtggctgcagagggtcaggcagaccagcctgggggtcagaggtcaggctcaccagaatgggggcgggacggcatgaacctcattgatcagatagtagccaagtgtcaggagccctcactaaccctgtgccagggccg

SEQ ID NO: 774275 - DNA, 536 bp, Homo sapiens
cccaagcgctcctgatgcctgctcacccttcttgtctttgttagcgccccgttagcagaggcctgcttaacttgtctctggtcttgcttctcaggagccgtgtcacattcaacagtggcagcacagaggccctgctcagccccagtccctcaccctaggcctccactgccagatgtggtcctggtggtcctgcggactcaagctgtccccccctgcccaaccttcacaggccaccagcaagtcccaggcctcccacaggcatggctctgggcagtatctttaccttcccagcctcagtttccctgatggtgaaacagggtgagatctacttcctagcagagaatccgggggaatggaggccrtgggaggaagaggacttgaggaaaggagcattcctgaggggtcccagagcgggctggggctgacaggactgagtttgcagggcctggggacattccctggggaggtgctaagatgccggtcagctagagcagcggggagtgatccaggatggctgcccggatgaggggctgggt

SEQ ID NO: 774276 - DNA, 472 bp, Homo sapiens
gtgagaagtggagggtgagaattggggtgggagttggggtgtcccctcccaaaccctctcaccctcagattaagaagcccctcctatgggccctggaggaacaggcctttgacccaccccaaccccactggtgtcttgggcagggagatctcgaggtgggggcctcagctccccrtaggaccgtctagccctggaccacctgaccacagctacagtgggacaaggcccctgttgcctgtctgctgggggccgagcatggtatggaggagccagcagcccccgccttcatcacagaggaggaatccgaggcccaggagggtgtctctggcacccaacacgtgagaccctttgaaaatcccccgagtgtgtggggggctgggatgaacatctgggggcggcagcagcaggtggcccacctggccaaacacactcctgtgtccccttgtttttggcaatttcaatgaccaaaatc

SEQ ID NO: 774277 - DNA, 472 bp, Homo sapiens
gtgagaagtggagggtgagaattggggtgggagttggggtgtcccctcccaaaccctctcaccctcagattaagaagcccctcctatgggccctggaggaacaggcctttgacccaccccaaccccactggtgtcttgggcagggagatctcgaggtgggggcctcagctccccgtaggaccgtctagccctggaccacctgaccacagctacagtgggacaaggcccctgttgcctgtctgctgggggccgagcrtggtatggaggagccagcagcccccgccttcatcacagaggaggaatccgaggcccaggagggtgtctctggcacccaacacgtgagaccctttgaaaatcccccgagtgtgtggggggctgggatgaacatctgggggcggcagcagcaggtggcccacctggccaaacacactcctgtgtccccttgtttttggcaatttcaatgaccaaaatc

SEQ ID NO: 774278 - DNA, 579 bp, Homo sapiens
cctgtagaaaacagtgtggtgggggatgctcggcctgcagatcagacaggccagggtcaaagccccgaactaccacctgaactagtcctggccgagtggcgctgatgctctaggccgagggcccccttgacagaacagccatcatctagctccgccgcagggtaggggaggtggcagtgtgggccrcagccctcggctgaagcgggggccaagcggggctctgcctggtgcagggggtttcctctatggggcaggggctcccaaattagccctggtgacatctggagctcacctctgggggctctgggggctgagagagcaggcggggccccagttctatcaatcatctgccttgttcctgggggatcgcggtcagtcccagcctccccacaagtcctggggcggggcaggcctgctggaaacccaagatgcagagaagagcgccaagcacctgagacagggctctgagcacggaaggcaaggacgcctccctcagcctcagctggggagccagtggccctgcatgcactttctcccatctggggagcctgagccctgacccagtcccgaggcccatgt

SEQ ID NO: 774279 - DNA, 655 bp, Homo sapiens
ttgggggtgagtctggggtgctgatttcaccctcctgggccaaagtctccccgtgactttatggactgtctccctgtgctccctgagaccctggttctccctcaccagcctgggtccttcttgtctcagctcagctgtcacctcctccgggaagcccccaagcccttgagtgggtgcccagcaggcatggtcagtgctgaggctacaagccctgccggcacccggcagggaacacaaggccaggtcaggctctggggacagtagacaagcttatccctgcacactggggactgcccacctgggggagagagctaggtcaggctggggagacgtcaggggatggccgggcacccctccctgaggagagctccacctgagcaagagtrtcaccaggcccactccagacacatgcactgcctcagacgggctggagagagggtgtggccgggccatgggatgaaccattctgggcggttgtcctggcatcaccagacatgtggctctattaagcatctcgactccacaggagcccatgtggcatgtcctctgacctcctgttcacttctgaaaggggcggccctctgagattctgcctggaacctgtcagccctcctgacaaggtctctggttcccggccatcacaggcacccagcca

SEQ ID NO: 774280 - DNA, 460 bp, Homo sapiens
gacattttcaggaaactgaatccacaggctggagccttctgcttccccacaacccaaacggcccccagccagccaaacagccacgagaacccagctgctagcaactgccagcaggaaacccactaccagccgctcacagatggacagcccatcccaggagctggccccacctccccgcccctctsctgaccaacccagcagctccttgggtgggtgtggccaccctgctgccccaacctgctcccggaccctgtgccaggaggtgcttcgcctcagcggggccttgcctcccccagagccgctctgctgcctgaccttgcaatgtcatgggtcctctgggcaccggcgcagttgggtgggatcagctttggccagcaggtggggggcaggtgggtaaatcctccctctctgccatctccgcttccttcctcctgcccggcttccctgcctttttcctact

SEQ ID NO: 774281 - DNA, 460 bp, Homo sapiens
gacattttcaggaaactgaatccacaggctggagccttctgcttccccacaacccaaacggcccccagccagccaaacagccacgagaacccagctgctagcaactgccagcaggaaacccactaccagccgctcacagatggacagcccatcccaggagctggccccacctccccgcccctctcctgaccaacccagcagctccttgggtgggtgtggccaccctgctgccccaacctgctcccggaccctgtgccaggaggtgcttcrcctcagcggggccttgcctcccccagagccgctctgctgcctgaccttgcaatgtcatgggtcctctgggcaccggcgcagttgggtgggatcagctttggccagcaggtggggggcaggtgggtaaatcctccctctctgccatctccgcttccttcctcctgcccggcttccctgcctttttcctact

SEQ ID NO: 774282 - DNA, 521 bp, Homo sapiens
atcttggctcactccaacttccacctcccggttcaagcgattctcctgcctcagcctccctagtagctaggattacaggcatatgccaccatgcctggctaatttttgtatttttaatacagatggggttttggcatgttggccaggctggtcttgaactcttgacctcaagtgatccgcctgcctcggcctcccaaagtgctgggattacaggartccgccacggcacccagcttgcattttcattttattcattgtattcttcagttctagaatttctgtttggttcttattatttctgtatctttattgaacttttagttttgttcatctactattttcttgatattattgagttgatatatacattctagtaaatttcactgagctgtcttaaatcaattattttgaattgtcagacaatttgtagatctctatttttggggggttgattacaggagatttatgagtttattttggtagtgtcatatttgctgattcttcatgatctacagactttc

SEQ ID NO: 774283 - DNA, 495 bp, Homo sapiens
cctcatgtcctcatcctcaggtgccctcccagcccttcaggggtcctgttttccagctgtgggcaggatgttgctcctctgccctgtctgttcacgactcagggtgccaaggctggtggagcctccctgcagccccaagggaggaggctggggccagagacgccctggggtggggcacgtctcttcccagtgaacctcagatccctcgggcgcccacgctccccactgagggcctggggccacagcactctgcctgtgaggggtgggcccttggaggcttggggacatgcrcgcccacaggcacgtggggagagcctgctgagcgctgtctcagtgatggttccccacactggcccctgacatggggcttggtgtggcagcttgttggggaggtggtgcgtggagcaggatggggaccgggaggtggttgctgtgggctctgcggggcgtgagggccggtgtttgccccaagttcagtgcctgcctgtgaccaca

SEQ ID NO: 774284 - DNA, 573 bp, Homo sapiens
aactcccaggccctcagcttgcagcgcagagaagggtgactgctctgctgttaaaacaatttattttgctcttcaaaaagctaacagctgtttacagtcagcatgtgggagctgccccctgggtgatggattctgccaatccagccctcccttgccttccggcgaggaggggtcatcccaggcttcgggtcaggatgggcagagcagaccactgggggccaggccatgatgttcctggccactccaygtcccctcggctgccgtcctgtgtgctgccctgggagagtgcaaggaagggtggccccctgaggctgatacgaaatggtacggtgatgtgagggggtcaggagggaggaccactgtgggaggcgtgaggtgcagtggaaaggtcagggagaccttctgagaaggccagcagggagggctgcccagggcctggagagcgtgcatagctgggggcagggtgggggcagccggcaagggcaaagcccagtgggtgtggcgatgccctgggggatgggccccgatgcccctaaactggttcggctctctagaccagactagtgtgctatg

SEQ ID NO: 774285 - DNA, 551 bp, Homo sapiens
gcctggagagcgtgcatagctgggggcagggtgggggcagccggcaagggcaaagcccagtgggtgtggcgatgccctgggggatgggccccgatgcccctaaactggttcggctctctagaccagactagtgtgctatgtcggagccgagcaacagtccccctcaactgtatgcatgtacagtaggcgctcaacagacacttgctggatttgacaatagccctggayggaggactgaggcctgggctgcacacattctgggctcctgcaagcccctggcagccctgagctggtttctgagtgcagagggaggggctgtcaagggtggaacccacacatgccaaagcctggaggccagtgcaggggcagggcacctgctgcctcgggacagcgctgaggttcaaagccacctgctggttcccacctgcctggcacaggaccctgtgtcggtgggggtggccagatagggcagctccttgtctccctggaacctgtaccctcagaggtccaggatccctgggggaggttccggggctggagagacggcccct

SEQ ID NO: 774286 - DNA, 596 bp, Homo sapiens
tgcggttgtatttcctgtggcctcaatgttctggggttagggttaacagggataattcatttctgtgttcaagtctctaattcttccatcatgtaaactgtaagtgggagcagactggattcagcattgctacaagagaaaaacaacaaataggaacaccaccaacaccatgtgttgggagccccatgtgccaggcactgtgccaaatactcgatattgaytatctcttttaatacacaatcctgtgtggcagatcctactatgagacccattttacagatagacaactgaggctgggggaagttggaaatggaggagccaggattcaagtcacagcagtctggctcctgcgcccaagcttttaatttgtatcctattcacttttcataaataaatgactcgtgttggaggtgtttgtatccttggggccactcagttttattcagccagctttccttggttgtggttttaatgtgttagggaagaatgaatgtattccccacagctgggcatctttgtgctggatcacctggccacagctcatgaatagtgcagattatcacaccccacccccatgactccagcaaatgtgctgt

SEQ ID NO: 774287 - DNA, 642 bp, Homo sapiens
ctctggctattgattgtcagtgaaattttaagacagagttaaataaactctgtgaatatggtattagattagtggtttcttttctttctttctttctttctttctttctttcttttttttttttttgcctaagtttagattcttacctttgtacctattacaaggaaattactgaggaaaatggtccaggaacacgtgtatgaaaacatcttctccaggtgtcttacagtcattctacagactgatgtttgaggaacattaagagaagttttcaaacttttgggaagcagtgaatcctttcattaactgaaatcttacatgaaactctaccatgtaaaacagataaagtgctatcttactaggataaactctttgaagtttacgttcatgaagtttatttactgccgtgtcagtaagaacaatgaggctgttacgaagacagaaaacattttaagtcaggtgttgttaacttatcatggctatattcacatcatcttctttckttaataaaattgtatactttgctttaaatgcaggatatttttaaagtctgtttttatagaaaattgtttgcaaactataacagagtttttggtttggtttaaataccttgccttaggatcccaggatacattttagttc

SEQ ID NO: 774288 - DNA, 582 bp, Homo sapiens
catcaagagaaaactggcagataaagccattccacaggacagttgacccaggtttttcaagaggtcaaggcacaaattttggggaggagaaactgtcctagataaaaaggcttcagaaccaaatcaatgtaataaatcttgtttaaattttgcttgaaacgaatgatacagaagggtattctgaagacaactggggctatctgaacatggctaggtttgtagacaagtggaattatatttaatttaataagatgtggtaacagagctgctgttatataagaaacgcccttgtccggatgcggtgactcacgyctgtaattccagcactctgggaggccgaggcaggtggatcacaaggtcaggagttcaagaccagcctggccaacatggtgaaaccccgtttctactaaaaatacaaaaattagccaggtgtggaggtgcacgcctgtaatcccagctactcacagggctgaggcaggagaattgcttgaattcaggaggcagatgccgcagtgagccaagattgcaccactgcactccagcctgggcgacagagcgaggctctgtctcaaaaaaaaaaaa

SEQ ID NO: 774289 - DNA, 638 bp, Homo sapiens
cctgcatttaaaaccactatgtgttttacttcaactcacaacaaaacactgcctgcttattaagacttgaactaacacgttggaacttcgaatgtgggtatcaacacacagaagttcttcttttgtcaatacaggaatatttgycacattttccaatggtacagaaaggatcaagaaatgggattctaagatattagacaagactggccacacatggtagctcacacctgtaatctcagcactttgggaggctgaggcgggcagatcacttgaggtcaggagttcaagatcagcctggccaacatggtgaaaccccttctctactgaaaaaaaaaaaagatattagacaaggcagaaaaggttgttttgttattaactctaagaaccatgaaattatcggtgccctctaaccatgacatcattagcaatgttgggggagagacctcaaaacactcctaactgactgagaaagatgaccactgcctgtgtttttggtcttggttttggttttcttaagcaaggtgcagagaacatatgtatttgtggaaccatggaaccctcaatttagcatacagtgtcagaggagttcatggaatctaatctagaaacccatccaaagatcccagacttacattatc

SEQ ID NO: 774290 - DNA, 638 bp, Homo sapiens
cctgcatttaaaaccactatgtgttttacttcaactcacaacaaaacactgcctgcttattaagacttgaactaacacgttggaacttcgaatgtgggtatcaacacacagaagttcttcttttgtcaatacaggaatatttgccacattttccaatggtacagaaaggatcaagaaatgggattctaagatattagacaagactggccacacatggtagctcacacctgtaatctcagcactttgggaggctgaggcgggcagatcacttgaggtcaggagttcaagatcagcctggccaacatggtgaaaccccttctctactgaaaaaaaaaaaagatattagacaaggcagaaaaggttgttttgttaytaactctaagaaccatgaaattatcggtgccctctaaccatgacatcattagcaatgttgggggagagacctcaaaacactcctaactgactgagaaagatgaccactgcctgtgtttttggtcttggttttggttttcttaagcaaggtgcagagaacatatgtatttgtggaaccatggaaccctcaatttagcatacagtgtcagaggagttcatggaatctaatctagaaacccatccaaagatcccagacttacattatc

SEQ ID NO: 774291 - DNA, 586 bp, Homo sapiens
gacctggtgggaaaatgtggattctggatttcctgtgaaaatagaagtacttgaaaagcaatgcttaaaatggtagtgttaaaaaaaaaaaaagtcacatatatccagctaagagttgctaattctgtcgtattgcacattatagatatgtttacatttttaaaaagctgtgtgacattggactctagactcagaactagaatattttaccaaacctctttgttattttgcagtaatatttagtaatgattctgtatccaaaaatgtcctaataacatctaacaaaccatgttcctaaagtctgtgcatgttttgtatttgggatttttatcattttcaaatatctagaacgtttggatttcctagcattatgcctaaaagagattagtrtttatgtcagtaagttccgtaactagaatctgagtgattttttttgccttgtcattaatctgaggaggtttgaaactaagactgctgtcatcgtttctcctttcttgtacagcctatcttgctacggtttcttacatataccatagaagcaacaggccagcctgtggtgtagaaaagtgagatttttggagggcag

SEQ ID NO: 774292 - DNA, 644 bp, Homo sapiens
gctggtcatatatccttagcatttatggcaaattattaatcaagtcccacctgaaacaatttgttaaattgattttaatcactgggcctctcatgtgaagctttgtataatcagcatttcatttacaaaattaattgcctgattgattttcaggaggcagttgctgtcattaccctgctgtcataacttctgagtagggtgtcacaacatgaaattctgacagtatgaaaagcactgytattttaaaaatgggtgtggggagaaagggagaaaggagggaaactaaagaagttacattatccttttcagcctaaaaaagttcaaagtgtttcatgctaattacactcaatatcaatacccttctgctaagtgaattaatataccaatctagcatcagcgcacgaaggatctttactatcttaaaataataactagaatgtatatggacaaactcaacagtagaaaattttaccctacgttacaaaatatacacatttctggatatgtctatatcaagataaaaagagcactatcttacagtggcatgctacttgtctactgccagccatttcaatttcccatactcttcttttcttagactttctaataaaaaagccatgaccagaaattttaggaatttacaa

SEQ ID NO: 774293 - DNA, 644 bp, Homo sapiens
gctggtcatatatccttagcatttatggcaaattattaatcaagtcccacctgaaacaatttgttaaattgattttaatcactgggcctctcatgtgaagctttgtataatcagcatttcatttacaaaattaattgcctgattgattttcaggaggcagttgctgtcattaccctgctgtcataacttctgagtagggtgtcacaacatgaaattctgacagtatgaaaagcactgctattttaaaaatgggtgtggggagaaagggagaaaggagggaaactaaagaagttacattatccttttcagcctaaaaaagttcaaagtgtttcatgctaattacactcaatatcaatacccttctgctaagtgaattaatataccaatctagcatcagcgcacgaaggatctttactatcttaaaataataactagaatgtatatggacaaactcaacagtagaaaattttaccctacgttacaaaatatacacatktctggatatgtctatatcaagataaaaagagcactatcttacagtggcatgctacttgtctactgccagccatttcaatttcccatactcttcttttcttagactttctaataaaaaagccatgaccagaaattttaggaatttacaa

SEQ ID NO: 774294 - DNA, 667 bp, Homo sapiens
aataattaaaatgcatcgaagcagaagcttatctcagcaatcacgataggcattataaaagtacacagtcatgaattcatgaaataggaacatccagcatctcactcattcatacttactattttaattgcgaattacacaatctccgatatttgaatagagtcgctttgttgcctcagtcttaacctttagtaatatccgtagattaccggggaggcygacaatcccctcctgatggacatgactgtcccccaccccctggttgtacagctgatgggtcggtggggaccagcagatgccatctcagaattgcacactgcagtctggacgcttacggcccgaactagaaataaggcacgacggaaaaatcatagctgtttctatctgtaattgcaaacctcagatgtgagggtgatatacttccatttcataattcttttttcccttgagattagagaaagctattgtgtatgagtgaacatttaatacattcctgctgaatactgacatgtagaacaggtggatgaaataggaagtttgactcatctttcccaaattaccacattaagttttgtttactcttttgtcataacagccgtaggactgacaaggatattgctggcgctgaagatgagatttgtggtattcacactccagctctgccatt

SEQ ID NO: 774295 - DNA, 583 bp, Homo sapiens
tgaggtttcttccatgtttctagaagcagtattataccccctttctgaaggttcagtatgaaataatgaagcaataacaaatcattgtaatgcttctgaatggcaataaagattcattttatgataatttcacattttatttagctaagttttctattttcaagttgtragtccttttgggagtattagatataattatcattcattcaaaaaatgagtttttctgatattaacctcgaataagttaatatttaatttcgtgtgatcaaaattacgaattgcaacagtgtatttttctcaaccaaatgtttcattgctgagcataggtaaaattggtaattggttatttttctcacagtagtttgcgtttaacgggaaacttcagtgattctagagcttcagcatttccagagtccagcctgtaccatggtgtagaagaacactgaaagtatctttagtcccgagtgatcaatccatgagaaaaagtgcagtgatatgtttttggtagacaaagggcgagattgcaccattgaataaaaaggtgggacttgccaaagagaaatggatatttctacttcttatc

SEQ ID NO: 774296 - DNA, 606 bp, Homo sapiens
tagagtaattatcacaatcattttagggattttcccccctcattgtcaaatgtggggagggtatgggctatagaattagatgatgggccgggcgcggtggctcatgcctgtaatcccagcacttttggaggccaaggcaagtggtttacctgaggtcaggggtcgagggaggtgtattacctgaggtcaggagttcaagaccagcctgaccaacatggcaaaaccctgtctctactaaaaatacaaaaattagccaggcatggtggcgcgtgcctgtaatctcagctactctggaggctgaggcaggagaagcgcttgaacccrggaggcggaggttgcagtgagctgacattgcgccattgcactccagcctgggcaacaagaataaaactctgtttaaaaaaaaaaaaaaaaaaaaaaaagaagaattagatgatgatctcattaacacgactctcttccacaggatccctcaattcattaatctccaaaaaagtaatctgtttagaagattgttgaaacagccttgagtcacttaagatgatggcataatgatcccctgagactcgcccccatatgaaatccttccacaagaagtatgttttc

SEQ ID NO: 774297 - DNA, 606 bp, Homo sapiens
tagagtaattatcacaatcattttagggattttcccccctcattgtcaaatgtggggagggtatgggctatagaattagatgatgggccgggcgcggtggctcatgcctgtaatcccagcacttttggaggccaaggcaagtggtttacctgaggtcaggggtcgagggaggtgtattacctgaggtcaggagttcaagaccagcctgaccaacatggcaaaaccctgtctctactaaaaatacaaaaattagccaggcatggtggcgcgtgcctgtaatctcagctactctggaggctgaggcaggagaagcgcttgaacccgggaggcggaggttgcagtgagctgacattgcgccattgcactccagcctgggcaacaagaataaaactctgtytaaaaaaaaaaaaaaaaaaaaaaaagaagaattagatgatgatctcattaacacgactctcttccacaggatccctcaattcattaatctccaaaaaagtaatctgtttagaagattgttgaaacagccttgagtcacttaagatgatggcataatgatcccctgagactcgcccccatatgaaatccttccacaagaagtatgttttc

SEQ ID NO: 774298 - DNA, 625 bp, Homo sapiens
ccccctgactctctccctgtagagatgggaggtgctgcctcacctcccttacagccctgttgttggaatgaagatctgctgtgtatgttgtcatcgtgccctgcaaaatgcagagctttacacacatgcggagtagcatgaggaagaagatgctcactttttatatagtatatcttaacatgttaatctgttaactttaaaaaaacaggttactgtgacagacaatggtagtccccccaaatcaaccattgcaagagtcattgtgaaaatccttgatgaaaatgacaacaaacctcagtttctgcaaaagttctacaaaatcagactccctgagcgggaaaagccagaccgagaaagaaatgccagacgggagccgctctatcrcgtcatagccaccgacaaggatgagggccccaatgcagaaatctcctacagcatcgaagacgggaatgagcatggcaaatttttcatcgaaccgaaaactggagtggtttcgtccaagaggttttcagcagctggagaatatgatattctttcagtgagttaagattgtagtactgtaatttttcatatgttgtgactataaaccttattttgtattttttctttagtaactttatttcta

SEQ ID NO: 774299 - DNA, 609 bp, Homo sapiens
atgtgactttagactagtcgtttgatccattttattagtgttttctttggaactctgaaagtttgaactaaatgagttctgagctgctttccagcctcgccagtctatgaatagaattccatttttggctccacgcctaatcctgccggcaccagtactkcagggacaaacaatagctgctgagacggccacagctgccgaaagagcgcgcagccggctgtagtgacgtgtggtcttaggacaccacctgagtaaagacggtgcggtgctgcggagatctccgagctcacagtccagagctctgaggggctgggtgctgagtgataaagtgaaggagaagctgcgtgtttgctcgtggccagcaaggcaatctgtgttttgcagaagcggaggacgtgacgcctccctgccggtggactagtcggcttgtcggctctgcatgttcagtgttggctctggtgtgtgtttcggggggatccagtgttggctcaggtccttatgggccaggaccaccttcattcattattgtatccaccacagaaccaggcgtgatactcatgaaagatttttaaaagcagccacatttgaaggatcttccctttcacccat

SEQ ID NO: 774300 - DNA, 660 bp, Homo sapiens
atatagtccacatggaagatgttaaaggtgaaaaaaagaaaaaacaatccatgaggaattaaacctgttaaactgttcagagccattgtaagagctgcttcagaaatctatttagaaatcattgctcttgtatctgaatcattacagagacaccagcatcacccacttcttattgctgcgaacatagcaacagttgccatgctagcaagagattcagcttcgcaacacaaatactggagtcaggagggagcagggcgaggccagagctggagtcagggaggatgaacagaacacagtgctgcctgtatagatttaattaggccggttgttctctttggtccctgtgcttgtcctgtcagatatttcaggacagcagaagcagtctcaaaagcagcatttttgggccaagtcttactttcagttgtacacacacgcaactgccaaaggcgggatctgtgtgctttgatgtgcttaagagtgggcccgggccctcctttstgtatgaatggagagggtttctcttcattttcaggaatgaaaacctcatagaactctcatcactagaaagtcaggccattcgttgtcccaatatgtcatttcatctaattgaaaactgagaaatctgtcaccatttatttagcagtttgcctccggcgaatc

SEQ ID NO: 774301 - DNA, 489 bp, Homo sapiens
atttgtgatttgcttccctggggttgactattctaatatcacctatagacctcccagtgacaatggactcctctatccttatgacactgtcatttgcagtcaaaacaatgttagcatgataaagatgtgttacaatgactcctgattataatacttctttattgagttaaaatgctttgatttstaatgacagagcagtgatagctctgaggtgattatggtgaagggatttaacagttggaagccctgagtaccacctgtcatcacatgatggacttcattggagggaacagatattagacaggaggccaagatggcccagactataatgagaaccccactgacaggtacttgggttgtctggattgaatatatatccttaccaagttgccaacttttagcctggggctagaaagcagaaatcaatgctccttctcactctccccatcccaactcgcacctttacttttgggagaaaagatgattgac

SEQ ID NO: 774302 - DNA, 640 bp, Homo sapiens
attgtattaaaattattagctctatttccacctattcaaccatcagctcctcaagatcagggggtgaattttgtttggcttctcatatggagtgtctgatatacagcagagtctcagttgctatttgtgaatggcattggactcatgtatgtgttttcccatttaggaagaagaatccatggtaattccagagrtgggtgattttcccagcagaacttcctctcacatccccgcttccctttcatctattcaggctttcactcccttccttgactgatttgtagaataggttacacagaactctaatgaagcaaacaaaaaaaaaattacagtactttggggattgctgtactttgcttctagagataatttttcactcaggtcttcacttcaccttttattcttttattcagagaaggaaatgctttatgctttctggagaatgagagagaccacaagttatttaattgaaagtatattggtcaacataaaaattcagcaaagatggcgggtatggatatgcatatctgttttctggtattagtaattttagaagaatgttagataggtttttaactcttcttgtgtattgaatcatttttatagccttttccagacatttctttgattttaatttatt

SEQ ID NO: 774303 - DNA, 483 bp, Homo sapiens
caaggggtcagggagttccctttctgagtcaaagaaagtggtgagggatggcacctggaaaatcgagtcactcccacccgaatactgcgcttttgcgacgggcttaaaaaacggcgcaccatgagattatatcccgcacctggctcagagggtcctacgcccatggaatctcactgattgctagcacagcagtctgagatcaaactgcaaggtggcagcaaggctgggggaggggcrcccgccattgcccaggcttgattaagtaaacaaagcagccaggaagctccaactgggtggagcccaccacagctcaaggaggcctgcctgcctctgtaggctccacctctgggggcagggcacagacaaacaaaaagacagcagtgacctctgcagacttaaatgtccctgtctgacagcttgaagagagcagtggttctcccagcacgcagctggagatctgagaacgggcagactgcctcctca

SEQ ID NO: 774304 - DNA, 599 bp, Homo sapiens
cagtagaatgatggtttccacaggctggatggaggaggatatggggagatgttaaccgaggggtccaaagtttaagtcatgcaagataaataaattctggaaattcaatgtacaacatggtgactatacttagcaatactgtactgtgtaattaaaattttcttacaagttagacttcaagggttytaaccaaaaaaaaaaaaaaaagcttactatgtgaggtgatagatatgttaattagctctattgttaatattatatatatatatacacacacaatatgtcaagttgtacatcttacatgtaaatttttattgtcaattataccacaataaagtgggggaataatcctctaatttatttccacaagcccctaattatcttattttctgggagtattttttatttcacctcagccttccaccagaatctggggacatctttcttttgaagagtacattgcctccctttgtcagcttgatagccacaatatctcaaaaccgatttttgttaacaatagccatatgacatagcaacccagagctccacaaatctctcagtttaacagtgttctaaaacatgtatttccattttttgta

SEQ ID NO: 774305 - DNA, 561 bp, Homo sapiens
gaggacccctgtagcagaaacgaggagacaacggagcaagggatgaccagagagagtgggagagagagactaggaaataagtgaagaacattttgaatcagaaggtagtagagagctttcttgacagggattctgatagtttgagtgaaatgaggactaaatattgaccactgaatttggaaacattcagattaactatgactttgaccaaaactgcttctgtggaatggtaagggcaaatgcctgagtgcttgactggcttgggtttaagggaaatagaagtaacgagggaaaaggaatataaactactctgtgaggaactttgtggtaaaagcragtgaagaagttaggcatcagctggaaagatgtgggaaaatagcacagatattgtgagatggtaaatattttaggatgtttttatgaatacagaaaagttgcattacaagaaaatagcaggcaagaaaaagacaggtaaattgcagaagtagtgtccttaagtacacgtgatgcaatgggatccattacacaagtggaaccttagagttaaatgcaagcacaggc

SEQ ID NO: 774306 - DNA, 548 bp, Homo sapiens
tttgtgaagattcaaaatcattgagcttgctctgggcgtacttcatgttccatcccatgtgtcacatgacagcagaggattcaaggtgaagttaatagcacagagattgcaaagaaaaagacaaagaaatgagataatgagaaatgctatctttttttttttttttttttttttttttgtgacaaaacctcgctctgttgcccagactggatgcaaccttggctcactgcaacctttgcctccagggttcaagcgaatctcctgcctcagcctccccagtagctgggatcacaggtgygcaccaccacacctggctaattttgtattttagtagtagagcatgggggtttcaccctgttgatcagactggtctcaaactcctgacttcaggtgatccgcatgcctcagcctcccaaagtgatgggattacaggcgtgagccaccacgccctgccctaatgctgtccttcttagtgaccacttgcctgtttcatttatgcttaacgttcactacagtgaagcaccgtgtgaattgtgaggtgcaagatt

SEQ ID NO: 774307 - DNA, 412 bp, Homo sapiens
acagctcactgctgggcttaggcgagcctcctacctcagcctcccaggtagctgggactacaggtctgtgtcaccatgcctggcaaattttttgtattttttgtagagtgggttttgttatgttgtccaggctggttttagtttttatttagaaataattatagattcataggaggttctaacatcttttgkgggggaggccctatatacccatcacccatttctccccagtagtaacaccttatataaccatagtacactgtccaaacaaggaaactgacattggtaatctgtgacatccacagaacttattcagattttaccagttttacatgctcatattgtgtgtgtgtgtgtgtgtgtgtgtgtgtgtataattctatacaattttattatgtgtagatttgtgtaa

SEQ ID NO: 774308 - DNA, 562 bp, Homo sapiens
ggagaagacgcagcagaaaacttttactgtctctctttttatttttattttttgctgttttccttatagtcccttgaaacttggcaacttggcatgccagtttttttctggaagggcaaaagatgttatgaaaaccattgaaggctatttcccttttttaaactaaattttaatttttgtctaagttatggaagtacacagatgaaaatatccaaactttattgctgaggcttaagaaagacagcagttccttgcctggaactttgcccaccctcaaatcctgataccaagaggaagctacttccacactttcagttgtttcttgagatagttctcttcctgtctcaaaaccgtgtgcttctattcccgtactttgatttytcactttttttatacatgtgaactttttgttgtgattagggttgccagatttagcaaatacaaatacagaacacccagttaaatttgcacttcacataaatgatggctactattttagtataagtatgtcccatgcaatatttggtccatacttatagtaaatggttatttgttgcttacc

SEQ ID NO: 774309 - DNA, 483 bp, Homo sapiens
gtgattcagagcacacacttgtctcgatctgaaaacgtctccatgctaaccgcgcgggcggcaggtacgcaccacgtaggtgctgaccgtctcagtcaccacgctgcgcacgggggctttggcactggccccggaggcggcgggacccggggagggcagcagggcagggcccgcggcggcctgggcgagcagcggcagcggcacgggcgcagggctgacgagcatggggccgggggcgggcgcgggggccggcggtggggtcttcggcctgttctgcgagggcgccggcttggcctcgggggcagggaccaccttgctgatgacactgtcaacaaaagaagakaaggtaaaagtcaaaacaggatcatcatcgaaccaaacccgtgcttaaaaacatgatcgtaaaatagcttttcttccagtagcgaaatacttcaacgtctagaggcagctcaagaactgagttccaggccctgcatgaag

SEQ ID NO: 774310 - DNA, 605 bp, Homo sapiens
actacataagcaacctcgtttcatccactggaatatctgccatgtcaaaggacttactgggacttattgagcacagagatgttctcaatgaatattcgctgaatgaataaacttagtaagtagtggtgaggctctgaacccagatccctatgaatccaaagcctatgttctttcsagcacacaacagacagtctatatttctgaagaaaataattgagtacgaacccaattacatttctttttgtcaattaacttacttcaaaattattatgtattaagataaacaatatggctcagatagtaagtaaattgaaaagcaccattgttgaaagaagaaacctacttacactcctgggttgagttaaggcaacaagatatataaccatccacatttatacataaaaataaaaaggatttttaaaaagattcccttaaatatcaagttgtgctaaagcagttaagccgggatttgatctacaaaattaaatatatatatatacactttatttttaaaagctcacctattattaaaaacatgtcttttgcaagtttaactgccttgaaatttccattaaaaagaaaattatgtgttaaacatgatgtta

SEQ ID NO: 774311 - DNA, 562 bp, Homo sapiens
agcttaaattagataagattgtattgtcattatcatcagcgccaacagaaattcaaacaccactaattcattccattagactcttctacggtcaattaaataagatctaattaacaggtgatattgcggattttatgtgcaaatatacccagccagacatggttttacaagttatattaaatatttgaatcgttgctaagttgcttattaggtaccagattttggaaactgctagaagggggagattaacgttttggaaccatattctgaagactatacccagagggctgtcataaccaatgytgttttataagagtgttcatagatttgtgccaccctttggtgaaccacagaagagaataagtcattgtgttatgtaatacacagtggcttcaacaagccatcaagacaattcttagaaaggacctcagatttttggtcttattgaataactccatgattggcactcaagaacacaataagaatactgctacatcctagaagagagaaacataactatattctgaggccaaagattttggtctactgggaaaaaaaacaa

SEQ ID NO: 774312 - DNA, 625 bp, Homo sapiens
aattggatcaagaactttttagaacagtatcctgaggcgtatataatcctcagcaatggccacttgagggatttttttgagaaaataaacatgttttccaatggattatatctaaactatatagcccataagggtaacaactgtccagaaagcaacacatttttcagtaaaatgttaattatwattaacgatacccaattctagatgctgtgctaagttctttgcaagctttaatctgttaaaaacccagcaagaattccattggatgattttattagctcataccacaccctgataccaagtaatatctcaataaactatgatttttgactctttcataaaaagaactccatctgaaaatagacaaagttggatgaaaataataccctttttctttttactgtataacggtatcaacttgataacataacaaaaagaggaagttaaagtgaaattttcagtctggatacttgttgtcacataaaggatcttttactcaactcttcatcaaaaaagtaagagaaagagaaagaaggaaggagggaaggaaggaagggagagagggagagagagagaatgaaggagggaaggaaggaagggagagagggagagagagagaaagaaa

SEQ ID NO: 774313 - DNA, 626 bp, Homo sapiens
ttctccaacatgaatctctttcaagctaagtaagtaaataatagaaaaacaaaaactctagagcttgctactggaagaatgacatatggatcagcagcattagcatcaattgagagcttgttagaaattaagaatctaggacttcccctagacctactgaatcaaaatactcactttcatgagatgctgcataattgaactacaatcatctgttggtacactgaaacactggtttctagacctcaacgtacccaagtccatgaatacrcaagtcccacagtcagccctgtggaagctgtggatattaaaagttggctctctgtatgggtttctcatcttttgaatgctgtattttttatccacatttggttgaaaaaagaactcactgtattaagttgacccacagagttcaagcttgtagtggtcaagggtaaactgtgtacattaaagtttaaatactgctcaaggaaacaagtcaccacaggcaagatcttgcataaagaacgtattagacttccaaaaacctttagtagaggaaataatgaatgcagactaaaacgtaaatacattcaaaattatttgagaaaaaaatacaaggttctaaaataggtaaaacagaacatgat

SEQ ID NO: 774314 - DNA, 584 bp, Homo sapiens
ggagatctggctcccatttgcagctttgcctcaaattaagtgacttggcttaaattattttacctctcctagactcaagcttcccatctataaaagagtgtatgatccagcaatcctgctgttaagaatatatccaaaagaaaggaaatcagcatattgaagagatgttgacacacgtactcatgtttatagtggccctattcacaagagccaaaatatggaaccaaactacctgtccatcaattgatgaatgaataaagaaaatgtggcctatacacaaaatggaatactattcagccatgaaaaagcaggaaatcctgtgacaggaaacaacatggatgaaaccagagataattatgttaaatgaaataacccaggcacagaaagacaaatattgcttgttctcactcatatgtgagagccaaaaaggcagatttmaaagaggcagagagtaaaatagtggttaccaaagcttgggaagggaggagagaggggaacgaagttagttaatgggtacaaatgtacaggttgagagaaggaatatgctctagtatttgagagtatagttgggaaattatatttaa

SEQ ID NO: 774315 - DNA, 657 bp, Homo sapiens
tctctctgagcattgccaagaataggatccaggtcagcactggagaaagcgtttgctccaagttctcatcaaacagaatttccacttgttctccaaacaataaatcctgaaaggaacatctcgcatgcactttcgtttactgagatgactgttcagcggcacacatcgttgcctggcatcattgcaacatgagctatatttataatccaatgtttcatctaatgttcaatagcacatggtgagtcaagaacctcctaatgttagtgagaagaaatataaagttataaacccagactaataaataaggcatcattttgggggtgttatgggctgaattgtgtccctgcaaaattcctatgttgaagtcctaattctcaatatctcggaaggtaactatatttggaggcagagtcttgaaataggtaatcaaggttaaatgaggtcgttagcgtgggcactaatctattatsattggtatctttattagaagagagatgaggacgcagaaaatacaggtgaagggacaactatgtgaggacacaatgagaagatggccatcttctagccatggcaagaggcctcagaagaagctgaccctatgacacctcagtctcagacatctagcctccagaattcagaggaaattaatttctgctc

SEQ ID NO: 774316 - DNA, 631 bp, Homo sapiens
aatttagtttgcaaggaacttggctatgttacttttccagaagacatcacaccggtccattatatcgatgataaactgactgcataaaaacactcagcaagaagtgcaactagtgaataagaagtacaagtaccctagatttattaagacatttgcatatcagagggtaataaataaatctgactacaattcaggggcattctactaaacttctagggatccagtggtgtgggacgtgtttagatgtcccttctagaataaagcataaattgttgcatctggcccttctaaaaccgagaaaaaggcatagtgcccttttcttatagtgggtctatttaaatagtgggtctatttagatttggaggcaaaataatggatctgtttagatttaggtgcagtcagtttattccagattatgcatctggaacagggaaatatccacaagatggattcaaggacccactggaccaactgcccatctacctagtgactaaaaacgctgctagttttgagtggggcccagagcaggagaaggctatgcaacaggcgcaggctgctgygcaagctgctctgccacttggaccacatggtctagtgaatccgatggtacttgaggtgtcagtggcagatg

SEQ ID NO: 774317 - DNA, 680 bp, Homo sapiens
gcatgtcctgaaggtacaagcaagttacatgctgaagtggccaaatgcccatggtctccactcctgctacactgctttctctctccctgtatctatgacctcgtgggaagttctctatgatcagtagagatcacactagaraagactagaaccttgtttacagatgtttctgcaggatatgtaggcatcaccagaaagcgagcagctgtggcaccatgcccctttctgggacagccattaaggacagtagtgaagggaaatcttctcaatgggaagaaatggccagatgtgcaattgtataccagatcctgggctgtagcctgtgggttggctggatggtcagggacttagaataagattgaactattggtgacgaaggtatctgggaaaggagtatgagcatagacctctctgcatggggaaagaatatgaatatatttatgtcccatatgaatgctcagcaaaggcttaagtgagcagaggaggactttaataatcaagaaaataggatgacccattttgtggataccactcagcttctttccccagccacccctgtcatccttcagtaggctcatgaataatttggctatggtgtcagtgatgaaggttttccaagggctcagccacatgaactactctcaccaaggctgacttggttacagcaccataataaaggg

SEQ ID NO: 774318 - DNA, 555 bp, Homo sapiens
acactagaaaagactagaaccttgtttacagatgtttctgcaggatatgtaggcatcaccagaaagcgagcagctgtggcaccatgcccctttctgggacagccatkaaggacagtagtgaagggaaatcttctcaatgggaagaaatggccagatgtgcaattgtataccagatcctgggctgtagcctgtgggttggctggatggtcagggacttagaataagattgaactattggtgacgaaggtatctgggaaaggagtatgagcatagacctctctgcatggggaaagaatatgaatatatttatgtcccatatgaatgctcagcaaaggcttaagtgagcagaggaggactttaataatcaagaaaataggatgacccattttgtggataccactcagcttctttccccagccacccctgtcatccttcagtaggctcatgaataatttggctatggtgtcagtgatgaaggttttccaagggctcagccacatgaactactctcaccaaggctgacttggttacagcaccataataaagggatagcat

SEQ ID NO: 774319 - DNA, 586 bp, Homo sapiens
aaatactaatgaaagaaatcagagacctaaataagtggagagaggtactatgttcatttaaagactcaacatggtgagtacactttctctccaaattgacctataggtttaatataattccctccaaaatctaagcaagtttttgtagatgttgacaagtttattctaaagattatrtggacaagcagggaccctagagtagacaaaaaataatcttggaagataagaataaagtgacagaaaacactgtacccaatactaagacttactacatagctacagtaatggagaaagtgtagtattggtaaagaagcaaacatgtaaatcagtggtacaaaatagtgaactcataaatagacccatataaatatcctgaaatgatttttgacataaaggcaaaagcaactcaatggaagaagtagatcttttggagcaattggaatctcaaccaaaacctcacaccttatatataaaaagaaaaacctcaaaatggatcacagacttaaatttataactgtataacttttagaaaaaaaagcaggaggggtgtttgagatctagggctaggaaagactttttaggcaca

SEQ ID NO: 774320 - DNA, 632 bp, Homo sapiens
ctgtctgtggaaggcaatataggccttttctatcatgcttctcaaaaaggtttcagcctctgctcactgcccaattccaaatctatgttcacatttttaggaatttattataacgggacaccacttccaagtactgaattctatattcttctcctttttttttttttctttttggagacaaagtctcactctgtcacccaggctggagtgcagtggtgcagtcttgtttcacagcagcctctatctcccgggctcaggcgatctcccacctsaagcctcctgagcaaccgggcctacaggcacatgacaacatgccctgctaatttttgtattttttgtagcaacgaggtcgcgccatgttgctcaggatagtctcgaactcctgggctcaagtgatcttcctgtctcagcctccaaaagttctgggaatacaggtgtgagtcaccgcgcccaggctgtattcatttttttctgttgccatctcgacatattcacagatgtatcactagattggagggtcagaatcatggggaaccaacattccgccttccatactgtcactcttgctaggatccaagtcagagctctgaatataccattataattagccaaagcctaatcctcagctgaag

SEQ ID NO: 774321 - DNA, 596 bp, Homo sapiens
ccctccccctgccttctgggtacccagacttcctgagctctgcccccactcagctcatatcagtctcgctgttcatctttccccagtcctcattcaagtggaactgagcatctcattctaagaacccttttgattttagtatctccatagcttcaaaaaagacctgaacaccagaacaccgytgagcagcagggatgcttcccagggtgctattatcatccccagtttgcacatggggaaactgaggcagagagcgctaaataacctccccaaagtcaaatagctggcaggtggccaagctagcacccaggtgattggctgctggtatggcaagaatgaggaaataggagggcttctccctggctctgctggaaatcccaacttccccaggagtgtggagctgagtggttccatatctctaacattcttgtctttgtgcataagggatttttagcttcccagtgagtgatcaacaagggaaagttgtgggatactgcttattgacttcttcctgaagtcaaggtaccaagagggtgacagaacaaagctgagagccgagagtagacatttttcccaagttacttagaatccatgtc

SEQ ID NO: 774322 - DNA, 596 bp, Homo sapiens
ccctccccctgccttctgggtacccagacttcctgagctctgcccccactcagctcatatcagtctcgctgttcatctttccccagtcctcattcaagtggaactgagcatctcattctaagaacccttttgattttagtatctccatagcttcaaaaaagacctgaacaccagaacaccgctgagcagcagggatgcttcccagggtgctattatcatccccagtttgcacatggggaaactgaggcagagagcgytaaataacctccccaaagtcaaatagctggcaggtggccaagctagcacccaggtgattggctgctggtatggcaagaatgaggaaataggagggcttctccctggctctgctggaaatcccaacttccccaggagtgtggagctgagtggttccatatctctaacattcttgtctttgtgcataagggatttttagcttcccagtgagtgatcaacaagggaaagttgtgggatactgcttattgacttcttcctgaagtcaaggtaccaagagggtgacagaacaaagctgagagccgagagtagacatttttcccaagttacttagaatccatgtc

SEQ ID NO: 774323 - DNA, 662 bp, Homo sapiens; identical to SEQ ID NO: 767456

SEQ ID NO: 774324 - DNA, 662 bp, Homo sapiens; identical to SEQ ID NO: 767457

SEQ ID NO: 774325 - DNA, 582 bp, Homo sapiens
aaaacacacaggtgtgtttgtggcatgttgacttaacttattcaaaagcatctctcccatgtatctgctgagatgcttgaaattcccaactttggctgaggcattgaaggctccagttaaagtacacacatgttgtttgagataagttgagactgtgtgtgtgtgtgtgtgtgtgtgtgtgtgtgtgcgtgcatgcggtctgggtcagggctcctgggagggatgggaaaggtatgagttagaggcattgctgaaataaaacaaataccaaaatgcaagagattccaaaaacaaatcgacttcctttacctttttcccccaagggctgggtgctgttgagagatggaatctgtgcccttccatcargaagtggtctgtctatgggtatgaggctccaggttagcattgcattggatggttgtataatgtgctgcttcggggtccaaatggccactctttctctcttccctgcatggtttctactcccaccagagatggttttgaacgagcacttatgtcttgcctgctagaactgtgaaatttcagactttctagaaaaaaactaagcatttatttcagtag

SEQ ID NO: 774326 - DNA, 644 bp, Homo sapiens
gaagcctggaaaggcacctttgccaccgtgtcccggagccgtcttgattcaggttcctcacggtcaccttcatccccaagccccataacctctgagcccttggtagcagctttcatggggctcacttacctaccttgtgtcatcggcacctcaaaaatgaagtgcagacgagggtagtaaacctgaggggtggaatgtctttcagaccaggggacaagacctctaatcacatccatgatagatctggaacatcaccccaccatgctygaagggcaggcaggggcttcacattgagccagcaggacacgtgcacaaagtcctgcactcagaaagactctggctcggcttaaagtcctgctgtcactgtcttgaaatccttaatactttctgaacaaagagctgcacatttgcattttctcctgggtcccataaattctgtagctggtcgtgataccctgatttgctggctgggctgtgtccacctagaggatgggaggtgcctccctgtttctttccctttgtggggaagatagaagctgtgagtgttgggccatcatcaattgcctcttatcctcagatagcgaggggagtcacctttccttgtagcccctgcaccttggcactgccctttctgattcttatcc

SEQ ID NO: 774327 - DNA, 536 bp, Homo sapiens
  misc_feature 515, 516, 517, 518, 519, 520, 521, 522, 523, 524, 525, 526,527, 528, 529, 530, 531, 532, 533, 534, 535, 536: n = A,T,C or G
cccactccagacctaccaaagcagaacctgtgagggtggaagcccaaccatgtggattttgacaagcctcccagagaattctaatatatgctcaagtttgagaaccacagctcgattgcattttaaagcaattaggccaaggggaaatatccttgttcttacataaaaccaagatgaccttaactagcattggctcctttctttcaacaggctcaaagtgaactcattttcataagaattgcattgtttaaataaatatgaagtttaaactgtatatatcctgtcccatgccaataagtccaatgcatacaaatcactttaaaatccacccatggagatctgtactcagygatgttgctagaatcactcctctgttagatatcaatagtggcagatgataaactctcttctgcaatgtgacaccttctttactaatagaccattacgctgtctgaatcagagtttcactgattaaacaggaaatgccatctgtagagtctggtatccttccaggnnnnnnnnnnnnnnnnnnnnnn

SEQ ID NO: 774328 - DNA, 627 bp, Homo sapiens
cccattagttatttttcctgatcctctccctccttctaccttccaccctccgaaaggccccagtgtgttactcctctctatgtgtccatgtgttctcatcagttagccaccacttataagtgagaacatgtggcatttggttttctgtttctgttagtttgctaagaataatggctccatccatgtccctgcaagaaacatgatcttttttttaatgcacacttatgttcattgcagcactattcacaatagaaaaacatggaatcaacctaaatgtccatcaatgatagaccggatgaagaaaatgtcctacgtaaacaccatggaacactgttcaagtagttttcctgatagtaccacctcacttaaatccatacagcaactgtttaatatrtattgtgtgcaaggccctgagctagatgatgcaataactcaagatgataaaaggtaagaaaacatgtaatgctaagacatttccctaaggctaatctatcctatttattaatattatggcatatgaggccttcaattatctaattcttgcctaatttgggaactctttttttttccaccaaactctacactgcattataaccaaatacagtggaattattttagaaacgtgcc

SEQ ID NO: 774329 - DNA, 550 bp, Homo sapiens
ataaaagttaaagcaaacaaaatcataagactcagactttagctgaaatatgttagaagagaaaactgggcccaggtgcaatggctcacgcctgtaatcccagcactttgggaagccgaggcgtgcggatcacgaggtcagggattggagaccagtctagccaacattgtgaaacactgtctctactaaaagatmccaaaaaaaaaaaaaaaaaaaaaaaaaacctaaactaaagtaaactaaactaaactaaaattagctgggcctggtgttgcatgcctgtaatcccagctactcgggaggctgaggcaggagaatcgcttgatcccaggaggcggagttgcagtgagtggagatcccacccctgcactccagcctgggcgacagagagagactcggagaaaaaaaaagaagaaagaaaggaagattgattaaataagagttttaaattatgaagtcccaaaaaaatttagaacactcttaggcaagagaacaaactactacttgccatattcacattctcctaactctagggaaattcagtttaagt

SEQ ID NO: 774330 - DNA, 623 bp, Homo sapiens
ccaaggcatttacagggaagtggcaaaatagactaatacacagaccattacaaagcagtgagggtgagagttaaggtggaggtcagcagaatgcatccatggagtcccaggatgtggaagtttcattcctcactccaagaggctagaragatattctattggaggtgacactcaagttgagaaggacaagtaaaatttaacccagcaaatatgagaaggacagtggtacaaaggaagcagcaggtgtcaaggcactgatgagtgaaacagtatgacacatttagagagcactaagtagtccctatgaataaagaagcccatgtgacagtgaaagagatagcctggagaggtgaccatgctaaggagttttcattttaccctgaagtattttaaacaatggtatggtatgtagtgtatgctggtagtaccttttggaagtggcctaatctaagtcatgccctacttttcttatagcataaaatcttacatttctgatccaaaggtagatggattgtctttcagatggcctgactacccagtgctagtattaggaacctgtggccaaaaatgaaatacaataatccagttgattaacaacccatacttcccatttggaaaaaata

SEQ ID NO: 774331 - DNA, 634 bp, Homo sapiens
aggagtaatgtctccttatggtattaatcattttccccagtggttttgtctatggtctatttggtctattatcattacctagcaggtcagattccagctttgacaatgccctaactttctggaaggagcaggaaaaaggccagagagagcactgccttgggattgccttcytaggctctgtctggatgacactcaccatgtgttctgggtgccacaggtgctgtgcctctgaggaaaactacagagtgtagaggtgttgcagctcctgagcagctgtaatactgtctatctgtccaagtataatttattcccttggcttcttctgctgagctactgggaagtccatgggcataacaactaaaagagaaaaagttaggtgtctttatttctttttgtccaagatgccttgatccatcctctttccaggatacatggcctacataggagttgggccttatataggaaagctacagaatcactccagatgttgtgtctggattcacttaatctggagtattgctcacacaagctggttcattcttttaattcataacattgagtgtttctctttgttttgtttaaagttccttctgatattactttgttttaatgttcagatgctaatctgcatact

SEQ ID NO: 774332 - DNA, 500 bp, Homo sapiens
tcagaatgctctgggaaagccagatgctttaacaagtgcaaggatttaggaatttcttctctcacagatcccaaaacagtatccttaagtggtgatccttatgtcaagctgtgagaatatacctcaaaataatagaaggcatccaaacttgatcagtatagtgtcataaagctgctgatgtagaagtgtggagaagyccatcagatagagatatggaaaaaaaagcttggttaaaacaggtttccaaagttctctccctttctctgccattgtggtatgtgtggttgaccatttctcatcatgttttcttacaagactttcaggatcaagcaattcctcgccaaaaaacaaaatcaaggacacgttgtagctatttcttggtgagttaccagaagctgtgaagagagagcatgaggcccatacttttttttttttttgaagggtctcgctctgttgcccaggctggaatggagtggcatgatcatgattcattgcagctt

SEQ ID NO: 774333 - DNA, 582 bp, Homo sapiens
aactctttgaagatgttatttctgaagaaaagacagaaaaatttgaagccagggaaataattctaagttccccaaagagagtaatctgtccagtccattcatttgttaattcctttgttcattcattcattcagcagacagtatataggtattggaaatatagtggaattttttttttaagatctttgctctaaaggatcttacagaaaccagagagtgaatgcaaggctgcctgcaagactctctgtggctcaggttccttggatacctaggggatctatagctctaaattaagagtattcagaggagtcttaaaccttttgccacaaagtagactaagactctctccatactgcagctaaaacagtccctttaaaacataatctgactttccttcttaaaakgctgcaatggttaccttttgtccttaggataaaatataattccttaatacattatcatgatttggcccctcttgccctccagcctgaacacccctccttgcaatctatgctttgcttttagttacttgaaaaccacaatgcttactttttattaattttttttacaaaatttcaataa

SEQ ID NO: 774334 - DNA, 582 bp, Homo sapiens
aactctttgaagatgttatttctgaagaaaagacagaaaaatttgaagccagggaaataattctaagttccccaaagagagtaatctgtccagtccattcatttgttaattcctttgttcattcattcattcagcagacagtatataggtattggaaatatagtggaattttttttttaagatctttgctctaaaggatcttacagaaaccagagagtgaatgcaaggctgcctgcaagactctctgtggctcaggttccttggatacctaggggatctatagctctaaattaagagtattcagaggagtcttaaaccttttgccacaaagtagactaagactctctccatactgcagctaaaacagtccctttaaaacataatctgactttccttcttaaaatsctgcaatggttaccttttgtccttaggataaaatataattccttaatacattatcatgatttggcccctcttgccctccagcctgaacacccctccttgcaatctatgctttgcttttagttacttgaaaaccacaatgcttactttttattaattttttttacaaaatttcaataa

SEQ ID NO: 774335 - DNA, 501 bp, Homo sapiens
ctgtgaggcagttattgtatctacttactaatcctgatatctccagtacttcacacagggtctagaataaagtagctgcttattatatttttgactgaatgaatgactgaataaatgaatgctacctttgacccaagtcagtcttaccttatttgcacagaacccctgtaataaactggcatgatatatgacaccctcaatagtttgttctcttttcccataaactatgcctcaaaatgcaagaccctaaaatcttaaactatagctggatctgggctcaacctgctgtatacctgtttggattgagtctgatcattatgctttcttaagaaaccaaaaggtgccattttcacagatccttgcawatagtgcttctaattttccctgcccacccagtttcccatcctttgttttccaaataggtagttacattgctctccaagtatcacaagctgctctggatatgtacttgtgaaacagagaaggcacagatgaaaacaa

SEQ ID NO: 774336 - DNA, 400 bp, Homo sapiens
  misc_feature 1, 2, 3, 4, 5, 6, 7, 8, 9, 10, 11, 12, 13, 14, 15, 16, 17,18, 19, 20, 21, 22, 23, 24, 25, 26: n = A,T,C or G
nnnnnnnnnnnnnnnnnnnnnnnnnnggtcaatatatgttaactcgcttagactagtgccattttagtttaggttgttcggaggttaaattatgctccaaggtcaccccagccaaaatttttaatgcaatggtaatgggttagggcgagtttctatttgccttaatgaattaaagctccatagggtcttctcatcttgtttatrtcccgccggataggtcagtttcactgattaaaagtaagagacagctgaagcctcgtgtggccatttatacaagtccctatttagagaacaagtgattatgctacctttgcacagtcaggataccacagctgttgaacatatgtcactggggacatgtctaatactggtaatgctagaggtggtgtttttggtaaac

SEQ ID NO: 774337 - DNA, 511 bp, Homo sapiens
ttatattaacattattgcttctattaagtaatagattagtccaacgtaatgttaggagttcagtagagtgattagaatttaaaatagatgttgagcttgaatgctttcttaattggtggctgcttttgggccaactatggtggtaataatgtttactctctggaggaaggttatttcctagggtctaaagatctgtccctcttcagactagcagttaaacttacaggggactaagtaattctgtgggtacgtagacggctaggcttgatgtggctagtataaatakaaggcctttattaaaattaattagaggatctggtatagggagttgtctaagattctatcttggacaaccagctatcaccaggctcggtaggtttgtcactgctactcatgaatcttcccactattttgccacataggtaggtgtgctcttcagctgttcttgggtagcttgtctggtttcaggggacttggctatgggtctctgtgtaaagttagttatttctag

SEQ ID NO: 774338 - DNA, 345 bp, Homo sapiens
agtcctaaatggaaaataggtgttcaacatatgcaccaagggaaaatgacattccaagcaaagaaactgaataaaagcaaagaggtacgacataacatgctactttcaagatcctcaagtagttccgtgtgactacaccatagaatacaaagaaggtaaagcatgagatgatatgagagaggsaagatgcagctcatggaggaccacaatgataagtgtttaccatatcacataattagaagccattgaaaggcgacaataaacatgatcacatcttagaaagatttatctggtagtggtactgaggagtcactgaagcaatacaatataagataaaatggttaa

SEQ ID NO: 774339 - DNA, 581 bp, Homo sapiens
caggagacaaaagttgtagctttagttctgccatttattagcaaagtgacttccttaatgtctctggacattagggtttttttgtttacccaaggaaggctgcactaggtaatttcttggatcccatttagttttagtctgagagggctgaggctgaggcaaggaggtggtttctgatttagttctattacccgctactgtcaagtatctatagaccaacccccacccctccttttttttttgagacagagtcttgctctgycgccaggctggagtgcagtggcacgatctcggctcactgcaacctctgccttccaggttcaagcaattcccctgcctcagcctcccaaccagacccctttgatgaggttatttctctttggaagaaatcgatatttttgatgaggttggcaacattgcttatactaagtattcacacaccttctttttttacgcactatagattagtcctttttatgttgcaaagcctaaaactaagagattatgatttggaaatgggatgtgagttgcaaactaatcactgaattcctacctgtttgcataagggttgaaaattctct

SEQ ID NO: 774340 - DNA, 470 bp, Homo sapiens
tatgtggccaagaaacatatgcaaaaagctcaacatcactgatcattagagaatgcaaatcaaaaccaccacaatgagatactatctcaagccagtcagaatggcgattattaaaaagtcaaggaacaacaggtgctggtgaggctgtggagaaataggaatgcttttrtactgttaaagggaatgtaaattagttcaaccactgtggaagacagtgtggtgattcctcaaagacctacagaaccaaaaataacatttgactcggcaatcccattactgagtatatacccaaaggaatataaatcattttattataaagatgcatgcatgcatgcgtattttcattgcagcattattcacaatagcaaagacatggaatcaacccaaatgcccatcagtgatagactggataaagaaaatgtggtacatatacaccgtggaatactatgcagcaataaaaggaacaagat

SEQ ID NO: 774341 - DNA, 582 bp, Homo sapiens
tcagaatggcgattattaaaaagtcaaggaacaacaggtgctggtgaggctgtggagaaataggaatgcttttatactgttaaagggaatgtaaattagttcaaccactgtggaagacagtgtggtgattcctcaaagacctacagaaccaaaaataacatttgactcggcaatcccattactgagtatatacccaaaggaatataaatcattttattataaagatgcatgcatgcatgygtattttcattgcagcattattcacaatagcaaagacatggaatcaacccaaatgcccatcagtgatagactggataaagaaaatgtggtacatatacaccgtggaatactatgcagcaataaaaggaacaagatcatgtcctttgcagggatatggatggatctggaaggcattatcctcagcaaactaacatgggaacagaaaaccaaacactgcatgttctcacttataagtgggagctgaacaatgagaacacatggacacagggaagggaacaacacacattggggtctgttgggggagctgtgggaggtagagcatcaggataaatagctaatgca

SEQ ID NO: 774342 - DNA, 652 bp, Homo sapiens
caaatgatgaatgatcacataccaagtgcttgtgtggattcaacacagaaccagatgctttatgaatgaaattacactctctgaggaagatattagtgtccccattctgcggataaggaactgaggctcaaaacagttacatagacaacaaataggcagaggagtttgaatttaawcccaataatctgcctttttgtatacagcaaatagaatacttcaaaagttaccttatatatttttattatatttacagctctacaagtctctctctctctgtatttgccagatgttcatttatttatttatttattgttgtatttgtttatttttttgagacagggtctcactctgtcgcccaggctggagtgcagtggcacgatcttgactcactgcaacttccacctccagggttcaagagattctcatgcctcagcctcctgagtagctgggactacaggtgcacatcaccacacctggctggtttttgttttggtggagacagggtttcaccatgttaggctggtcccaaactcctgacttcaaatgattgacctgcctcagcctcccaaagtactgggattgcaggcatgagccactgtgccccagatgttcagttttttaaaatgcagggttggcattttcaaaatttgta

SEQ ID NO: 774343 - DNA, 571 bp, Homo sapiens
cctacacatgaagtattagagactgagaatacaagccctgatctagaaaattgggctctaagaatggaaaggaaggaatgggtgacaagacagagactgttaaaaaaaaaatcagtaggtcttggtaactaaatgaattcaaacaaagagtgattgtgtctgacagctgtgtttaaagcctagtgagtagggaatggagtcacaattaacagaaaaatgaagacgtgggaaacaagaaagtctttgggcaaatgtagtggtttgggatctatttagtctgaggtgaggttatccaggtgtatttggaggactataaattcttccctgaagtaaatactacctaacacaccttttatcargaagttatgaatattgaatttttttcaaaagtcattgcacccttcccttgagacccatgtaattacatgtaagaatgaatgtcaggttcttcattacctatccccatccctacatactaggattttagccaacttctcttattctgatgagtggggatgaatttatcaccatgacatgttacacataggatactctaaagaaatagttagtg

SEQ ID NO: 774344 - DNA, 500 bp, Homo sapiens
aatttcactcgtgaaattaaaattgaaactacacagagactcttctcattcaccagattagcaactattcaaaagcttgataatacattccattgaagagactctagggaaatacacactctcaaacactgatcatggaaatgcaaaatggtatagcctcatgaagggggatttgtcaatatctaacaaaaccacacagacatttactcttcaattaaggagtcctaattccaggaatatatcatgaagatacatcttcaaaataccaaaatatgggtcagttgtagtggctcatgcctgtaaccccagcaatttggtagactgaggcaggcagttacagaccagcccggccaacatggcaaaracccatctctactaagaatacaaaaaaatttagccaggcgtggtagcatgttcctgtaatcccagctacgcaggaggctgaggcacgagaattgtttgaacctgggaggtggaagttacagtgagccaagattgcg

SEQ ID NO: 774345 - DNA, 602 bp, Homo sapiens
tgttttctgaccacaatagaattaaagatcaataaccaaaagatagttggaaaaaagcccaagtatttacaaattaagggacatactactaaataactcacaggtcaaggaaaattttaaaatattttgaattaaaggctgatagcatcttaaaatttgtggaatgcagctaaasccatgcttaaagggaaatttatagctattatagggcaaaagaagtcagacacaaggcgatatattgtgggattccaatagatgtaaagtacaaaaacagacaaaaaacaaatgctcttggaagtcaggatagtggttcccctggggcaggtgtagcccttttaaggacgttatattagtctgctagcactgcaataacaaaatattaatctaggtggcttaaataacagacatgtattttctcccggttctggaggctgaaactctaagatcaaggtgcaggtagggttggttatttctggcctccctcctttgcttcagatgtctgccttcttgctccatcttcacatggcctgtgacctgttgacacacatccttggtgtctctttctcttcttattaggacaccagtgctattggattaggatc

SEQ ID NO: 774346 - DNA, 637 bp, Homo sapiens
taaaattagcagttatctatcaaaatttaaaatatgtgtaccctattgactcagccattcaactaaagactctatcctaaagaaatatttaaaaaatagatgctagtgatattgtggtgaaaaatgaacgcttatgcactgttggtgggagtttaaattagttcaaccattgtggaaaacagtgtgatgactcctcaaagacctwaagacagaaattccatttgatccagcaatcccattactgtatatacacccgaaggaatataattcattctactataaagacacatacactcatatatttattacagcactattcacaatagcaaagacatggaataaacgtaagtgtccatcaataataaattggataaagaaaatgtggtacatatacaccatggaatactatgcagccataaaaagaatgagatcatgtcctttgcaggaacatggatggagctggaggctattgtctttagcaaattaacagaggaacagaaaaccaaacaccacatgtcctcacttctaagtgggaactaaatgatgagaacacatggacacatacaggagaacagcacacactggggcctattggagggtcgagggtgagaggagggagaggatcacgaaaaataac

SEQ ID NO: 774347 - DNA, 560 bp, Homo sapiens
ttgactttttttttttcccatatgggctctgtagttgaatttatttttaaggttttttttttttttaagtgcattatactttgttgctaacataattgagtgtgatatgttctcggtcagtgctttctaatggaactttstgggatgatataaatattctccctttgccttgaccaatgtggccaacactagcctattgaatgtttgaaatggggttagtgtaattgaaaagctgcatgtgtacattttaataaatgtcaatgaaagccacatatggctacaatatgggacaacatagttctatgtgattattgctgctttattagatgaccaaggcagtatagcaaaatggttaaaagcatgggctctggagttacatggtctgagttatatcttagctccaccattactagcttagtggacatacactgggaaataaccctaagtattggtctggaggccggggggcaggtggagagaccctcaaataagcattgttttatagaggacttgtgtcatttaaggtttgtttcatcatagtcttcaagcaaaaagctggg

SEQ ID NO: 774348 - DNA, 560 bp, Homo sapiens
ttgactttttttttttcccatatgggctctgtagttgaatttatttttaaggttttttttttttttaagtgcattatactttgttgctaacataattgagtgtgatatgttctcggtcagtgctttctaatggaactttctgggatgatataaatattctccctttgccttgaccaatgtggccaacactagcctattgaatgtttgaaatggggttagtgtaattgaaragctgcatgtgtacattttaataaatgtcaatgaaagccacatatggctacaatatgggacaacatagttctatgtgattattgctgctttattagatgaccaaggcagtatagcaaaatggttaaaagcatgggctctggagttacatggtctgagttatatcttagctccaccattactagcttagtggacatacactgggaaataaccctaagtattggtctggaggccggggggcaggtggagagaccctcaaataagcattgttttatagaggacttgtgtcatttaaggtttgtttcatcatagtcttcaagcaaaaagctggg

SEQ ID NO: 774349 - DNA, 560 bp, Homo sapiens
ttgactttttttttttcccatatgggctctgtagttgaatttatttttaaggttttttttttttttaagtgcattatactttgttgctaacataattgagtgtgatatgttctcggtcagtgctttctaatggaactttctgggatgatataaatattctccctttgccttgaccaatgtggccaacactagcctattgaatgtttgaaatggggttagtgtaattgaaaagctgcatgtgtacattttaataaatgtcaatgaaagccacatatggctacaatatgggacaacatagttctatgtgattattgctgctttattagatgaccaaggcagtatagcaaaatggttaaragcatgggctctggagttacatggtctgagttatatcttagctccaccattactagcttagtggacatacactgggaaataaccctaagtattggtctggaggccggggggcaggtggagagaccctcaaataagcattgttttatagaggacttgtgtcatttaaggtttgtttcatcatagtcttcaagcaaaaagctggg

SEQ ID NO: 774350 - DNA, 571 bp, Homo sapiens
cccagcttcttgcttgaagactatgatgaaacaaaccttaaatgacacaagtccactataaaacaatgcttatctgagggtctctccacctgccccccggcctccagaccaatacttagggttatttcccagtgtatgtccactaagctagtaatggtggagctaagatataactcagaccatgtaactccagagcccatgctcttaaccattttgctatactgccttggtcatctaataaagcagcaataatcacatagaactatgttgtcccatattgtagccatatgtggctttcattgacatttattaaaatgtacacatgcagctcttcaattacactaaccccatttcaaacattcaataggctagtgttggccacattggtcaaggcaaagggagaatatttatatcatcccasaaagttccattagaaagcactgaccgagaacatatcacactcaattatgttagcaacaaagtataatgcacttaaaaaaaaaaaaaaccttaaaaataaattcaactacagagcccatatgggaaaaaaaaaaagtcaaagctttattag

SEQ ID NO: 774351 - DNA, 584 bp, Homo sapiens
tcccgtcttcaggagctccgccaggtgaggcaccttgcttagagggtcgtggacgcaaaccccaaggacccctgtgggctgtttttcagggacctctgtcgggtgggctattgcgtgatggctttggattactggaatgttttctttcttttaaaaaatttaacacccactgttcttcagaattctttaataagctgcagggaaatgaataaagttactytcaaaggaaaaaggattttgatggaatttggggtgcacaaaagtctgggctgaagggcctttgggagggatgggagtgggtcagctgcaaccctgatccaaggtgaccccagggcgccaggtgccctgctaggtactgctctaggtggtccacacggacaagtctctgtgatcgccatgacaaccccatggagcaggacctacctgcatccctggatgacaggcaggcggtgaggaaagctgcctggggcacatggctacggaggacacagccaggattccagcccccgatggccaggccagggcctgggctcctaaccacgagagactccaacgccactccagggtcccagcaaggcttgtgc

SEQ ID NO: 774352 - DNA, 604 bp, Homo sapiens
gttagggcttcagcactcaagttctggaggacacaatccaacccataataccctctgtctctttccctatgccgccctcatcatgcttcctcccacttcggagctgctgcggaggccaagggcattttggggatgtagctgaagggggattgagttggggatgccttggtttgggtytagtggggtgtgtttatgtaggtctgagccagtctgtgtgggtcgagttgttgctccctgaacaggctaatggctcccaggagtgccctccttgccatggcactggcaatgtgtgctatggtgcctggcaccaggagtctatgggcagaggaagagacataagggttgaaaatgtcattcttccaataggagaggtctggatttgcagaccctcagagtcacaaggcaactgggggtgtcgcatagcccaggactgctcagcaggagtcacctggggcatttagtaaaatgctgattcctagaccctgctactctgaggcttcaattcagtgggatgtggaggagcctgggcatctgcatttctcctatgcctctccaggtgatgggcgccagcactgaggtttaggaggtgttagtcgagtcatgt

SEQ ID NO: 774353 - DNA, 527 bp, Homo sapiens
ccacagttggtgacaaaccaccagttcatgccttaaccccatactgtgccaagaatggcagaagagctgtgtgtcagtttaaaatttctgatttatagacagtgcaagcacaccaatactgagtcctcaggaacagtctccagccccttttctcwatcacgtatgttcatgggtttgtgttcaggggagctgtcatcacatggtgggaagagaagcctttggagagaggctgccctgagtgattctgggctccccatttgtttgccatgtgaccctgggacaggtggttactgtctccaagcctctagcacctcacctataaaatgggggtattcccatatctgccgagagttagaattaaacaagcaagtgagctaaagcatgtagcagcttatagtttctgtaataggatacttgtaaaatgtgttcttctgttataggaaaaatgtatatgtaagagaagtaaaatgggggaaaaaatactctgtgtatttgcacaagagacggtttgagcttaatttaaaatg

SEQ ID NO: 774354 - DNA, 558 bp, Homo sapiens
gccccacacccttattagggagggacatattagccaaagctggagccattaactatatgaatatggggaacaagttacccatttgttgtcccctacttgaggagggaatcaaccctgaagtctgggcattggaaggacaattcggaaaggcaaaaaatgcccacccagtccaaatcaggctataagaccccaccacttttccttatcaaaggcaatatctcttaaggcctgaagctcataaaggattacaggatattgttatacatttaaaagttygaggcttagtaagaaaatgcagtagcccctgcaacaccccaattctaggagtacaaaaactgaatcgtcagtggagactagtgcaagatcctagactcatcagtgaggaagtaattcctctatatccggttgtacccaacccctataccctgctctctcaaataccaaaggaagcagaatggtttcactgttctggacctcaaggatgctgccttctgcgttcctctgcacttggactcccagtttctctttgcctttgaggatcccacagaccacaaaacc

SEQ ID NO: 774355 - DNA, 596 bp, Homo sapiens
aaaaaaagggcactctgacagaacagaaatggaacatgggcagggacaaataagggaataaaagctggccaccacagccagcagcagcaacccacttgggtccccttccacgctgtggaagctttgtccttttgctcttcacaataaaccttgctactgctcactctttgggtccatgccatctttaagagctgtaacactcaccatgaaggtccgcagctccattcttgaagtcagcgagaccatraacccaccggtaggaaccaactccagacacaaaaagacatagaggaaacttacacgcatattgccacatgaaagaagccaatgtgaaaagggtacatactgtatgattccaactttatgacattttggaaaaggcaaagctacagggatagtaaaaaaaaaaaaaaaaatcaggggttttggggattgggaggaacaaataagcagagcacaaagagttgttaggacacatgtcatctatttgtcaaacacagaatgtacaacaggaagaatgaactctaacatgaactatagactttagttaataataatgtatccatattagttcaatttcaacaaatgtaagatgc

SEQ ID NO: 774356 - DNA, 619 bp, Homo sapiens
tcactcaatgaatatttactgactgcccattatgggaacaagcagtattttaggtactattcattcaccagggaagaataagaatgagaataaggataagaataccatccctccttttgcagagcttgcagactagttgaggagactgatgattaacaaataaatatataatatgtaaggtgcttaaaagaaaaacacagaaggctagaggactgagagggatggggtggatgctattttatgtagatcagggaaggstgctttgataaggtaactcaagaattcctacttaaggaagcagagaagcttaggaatgaaatatggatcactttctccttgcttagactctaaccaatatttgagcacagaggtggttttagaaaactcaagttcaaaaatcgttcctgtttattttcaaaaggaccaatgagtgtggaccctaaatttaaacagctaaagctatagtctaaggacagtctcaaataaatacctttgaattgtcatatggtgcccaggagggtcttgtggaaagggtttcatggtagtgaaagatgtaataactctttttttcttttaaccctaagactgtgctcaatgttttaaaaacagttgtaaatga

SEQ ID NO: 774357 - DNA, 477 bp, Homo sapiens
ctctgaccctggtgtgttttgttcccctccccatttccatgtgttctcattgttcagctccgactcatgagtgagaatatctggtgtttggttttctgttgctgtgttagtttactgaggatgatggttccagctccatccatgtccctgcagaggaagtaatctcattcttttttatggcygcatagtattccatggtgtatatgtaccacattttcttgatccagtctaatattgatgcgcatttgggttgattccatgtctttgctattgtgaatagtactgcaataaacatacatttgcatgtatctttataatataattatttatattcctttgggtatatacccagcaatgggattgctgggtcaaatgatacttctggttctaggtccttgaggaaaagccacactgtcttccacaatagttgaactaatttacattcccaccaacagtataaaagtgtttctatttctc

SEQ ID NO: 774358 - DNA, 613 bp, Homo sapiens
catcattctgaaaggaaaaaagagaaatcttttccattaagtgctggaacaagacaaggatgcccactttcaccactctattcaatagagtactggaagtcctagccagagcaattacgcaagataaagaaataaaggacattcaaattggaaaagaggaaatcaaaatgttcctctttacagagagcatgatcttatatatagaaaaacattaaaactctaccaaaaaattcatagaactgataagggaaatcagtaaaggcacasgatgcaaatccacatacaaacaacagtagtatttctatacacttaaaaacaaactaactgaaaaagaaaccaagaaagtaatcctatttacaatagttatacaaaaataacataattaggaataaatttaaccaggaaggtgaatgatctctatgatgaaaactacaaaatactggcggaagatattgaagaagaccccactcccccaaaaaaagaaaagatatctcatgcttatgaatgggatgaattcatgttgtaaaaatgatcatacaaatcaaagtaatctgcatattcaatgtaatctctatcaaaataccaatggcattcttcacagaactagcaaaat

SEQ ID NO: 774359 - DNA, 568 bp, Homo sapiens
cttcaaaataaatgaatggtttataatatgatatagttatttctaaaaattaacagtgcctcaggtatttatcttcatctctttctctcgaggtctctattgaagagaccgtttcaaaaccacttgtatgcttctcttcrctctttatttacacagcagaggtagagacaatgggccatgtattttaccaattcatatagcatttcttccctccccaggtgcccatatggaaaacctttacaaagagccccgtccccaccccgatcaccatcattagaagtgtgcgatttatattacagaaggacagaaaattaaaggatggcaatttaagatgagaaaactcaaacacaatttttaaaattccatcgttcatctgattatctgctttgtaacttatccagacagcttagctcttttctcacttgttgccaataatgtggatattgaagacagcaaaagaatcaacagtcgtatttcccaaatgttagaggggtcaaggaaaatgtagcaaaagaaacagattaacattttttttgtttaagtattccttatgcttttttataactac

SEQ ID NO: 774360 - DNA, 591 bp, Homo sapiens
tagctggcctctaattaatttattagatttttaaagtgtgatttcacataattacaaagacatatttgctgatgacgtaccaaatatctggtacattacaaatgtccaataaatgtaagttcccctttcattcctctcatggcatggatcattcagtctgcttatttacatagtgttcacaatgttaacaagtttagacagtggttttatatttattaccctctttttaatcacatctttaattttatcggtttttaaaatattttccagtctcagggcaagtccagtacatatgatttatattcagcaggagcaaacatcaagtggttcagaaggcatcaaacgatttttcaaaaactgtgtgtgtgtgtgtgtgtgtgtgtgtrtgtatgtatgtatatatctgcatacacacatacagttgactcttgaacaatgcaggggttaggggcacacagtcagaaatccacattccacatagaacttttgagtcccccaaaatttaactactaataccctactgttgcctgaaagtttcaccaataacataggcaggtgattgacacatagactgctctctacatatatgca

SEQ ID NO: 774361 - DNA, 575 bp, Homo sapiens
gaagttcctcttcaggaacccttgtacactgtttgtgggaatgaaaattgctttagccattatggagaacagtatagaagttcctaaaaaaattaaaaatagaactaccatgtgatctgacaatcccactactggttatctatccaaaggaaatacattactatctcaaagtgatatctgcactctcatatttactacagcactatccacaacagccaaagatacagaaacagtgcaagtgtgcatcaacaggtgaatgaggaaagagactgtggtgtatctacacaatggaatactattcagccacaaaaagaaggarattctaccatttgcaacaacatggatgaaccttgaggatgtcatgccaagtgaaataagccaggctcaggaagagaaagataaattccacatattcacttacatgtggaatcttaaaaagtcaaactcagaaacaaagtagaagggtgattatcatgggttggggtcgggtggaggaaaggggtagatgttggtcaaaggacataaattgcagttatgagaaattctggagacctaatgtacagcatggttaactg

SEQ ID NO: 774362 - DNA, 586 bp, Homo sapiens
gctggttttgtgtgtaatgctgtgtgctgatagggcagctccaccatgtctgtctgatgaggracattcttcccacttacctctgggtggactgggggcttcaccatcagccttccagctggaaagcgtgctggggcagggcctgtgggttgggggccgtggacagatttctgcccgaagaggaagcagctctctgttatgaaaccaccttccagagcctggacccagatagaatactctactcatttgctattagaaaacaagcaaaaacttttttttctaagcaaaaacgtacatatttacatatgtaatgtataaaaatatagatttcttatatataaggatgcttgccttttttggatttgtcctttgctttcatttgcacatacacttttgtatcatttgcaggaaggaggagcaccctgtgtccctgtggccttgctgctgttatagcgtggtctggtaccatgggcttttagggtagggccagctgccattcaaggtgctcagccagatctctgggctcccactccaacaggcaaagtccttttgagcaggacaggaccatcttagatcctacagtggg

SEQ ID NO: 774363 - DNA, 594 bp, Homo sapiens
tgcggtgctcgcgtgccagtgcgagttccgggtggatgtgggctcggcgggccgtactcagagctgctggccagtgctgctagccccgggcagctgaggggcttagcacccgggccaacagctgtggagggtgcgccaagtctcgccagcagtgccagcscgcaggtgctgcactggaattcttggtgggcctcagctgcctcccacggggcagggcttgggacctgcagcccaccgtggctgcccacaaggtgggctcctgcacggtggcccgagcttcaccgacaagcgcgcccctcgtctgcagcacctggtcccatcgactgccgaagggccgagtgcgggtgcacagcaagggactggcgggtagcttcacctgtggccctggtgcaggatccactaggtgaagccagctgggctcctgagtctggtggggacttggagaacttttatgtctagctagaggattgtaaatacaccaatcagtgctctgtgtctagctcagagtttgtgaatgcaccagtcagcactctgtatctagctaatctggtggggacttggagaacatttatgtctagctaagggattgtaaat

SEQ ID NO: 774364 - DNA, 679 bp, Homo sapiens
cctaactgtgacatgacttaggatcctattttccatgttattttaatttttcattttcaaatagtttgctgatagcttatagaaatgcagtgggtttttgcactactttgtatcctaagacgagtctaaatttatttattaatttgtcrataaaaagagtcaaactctgtaaaatatttgaagagatttattctgagccaaatatgagcgaccatggcccatgacacagctctcaggaggtcctgagaacatgtgctcatgctggtcagggtactgcttggttatgtacactttagggaggcatgagacttcaatcaaatacatttaagaaatacattggtttgacccagaaagacagaacaacttgaagggggcggagcttacagcttattatttagatttaaaaattttctggttgacaattggttgagtttatccaaagacctggaatcaatagaaaggaatgtctgggttgtgataagagtttgtggagaccaaagttttatcatgcagatgaagactccaggtagcatgctttagagagaataggttgtaaaatgtttcttatcagaattaaagtctgtgttgatgttaacgccagagaagtaaaatgaagcatgtccaagtcatggcctgaaccagtcttacagattaaattttaaaagacccctggctgagg

SEQ ID NO: 774365 - DNA, 679 bp, Homo sapiens
cctaactgtgacatgacttaggatcctattttccatgttattttaatttttcattttcaaatagtttgctgatagcttatagaaatgcagtgggtttttgcactactttgtatcctaagacgagtctaaatttatttattaatttgtcgataaaaagagtcaaactctgtaaaatatttgaagagatttattctgagccaaatatgagcgaccatggcccatgacacagctctcaggaggtcctgagaacatgtgctcatgctggtcagggtactgcttggttatgtacactttagggaggcatgagacttcaatcaaatacatttaagaaatacattggtttgacccagaaagacagaacaacttgaagggggcggagcttacagcttattatttagatttaaaaattttctggttgacaattggttgagtttatmcaaagacctggaatcaatagaaaggaatgtctgggttgtgataagagtttgtggagaccaaagttttatcatgcagatgaagactccaggtagcatgctttagagagaataggttgtaaaatgtttcttatcagaattaaagtctgtgttgatgttaacgccagagaagtaaaatgaagcatgtccaagtcatggcctgaaccagtcttacagattaaattttaaaagacccctggctgagg

SEQ ID NO: 774366 - DNA, 443 bp, Homo sapiens
gcagctggagggtgactccatgaggtatcagctacaatggtctggaggaaaagcgtgaactggcagtatagacaaaagcagggcatttagaagtaggtgagaatggtgattaggggcataagtagacagagtttaaatagtggggtgactgtgtaaaggtctactgtaaataaaaggtatacaggkttattgttctttttcaggaatgcgggtaagtttaagggaagtaggagagagtacttgtgacttccaggaggaggtggaggagctaggctggtcgtcagatgggcatagttttatcctggagcgatgaatccagtggggaggattctgtagactgaccactgttggggtactatagatgaccaggtaggatcctgtccacagaggttgtagagtttgaggggttaggttcttaacgagaactgacagtccagctaggg

SEQ ID NO: 774367 - DNA, 432 bp, Homo sapiens
atgtgatggattatgtttactgatttgcatatgttgagccagccttgcatcccatggatgaagctgacttgatcgtagtggataagcttttttactttctgctggattcggtttgccagtattttattgaggatttttgcatccatgttcatcagggatattggcctgaaattttctttttttgttgtgtctcttctctgttttggaatcaggattatgctggctaaactaagytttacatattttaagttctcaatttgttctttaaaagtatgtaattgctataaaaataatagagaattcagaaaaaatgttttaacaaaatgctaatatcttttgcaattatatttaaatgcaacagggatgctatttgaaataagaaaaaaaaacaaacaaccccatcaaaaagtgtgcaaagcatatgaacagaca

SEQ ID NO: 774368 - DNA, 627 bp, Homo sapiens
ataggaatcctaataattttctacgttgattttgtatcctacagctttgctgaagttgtttatcagctggaagagcttttgggctgagattatagggttttctatatgtagagtcatgttgtctgcaaatagaggttgttggacttcctstcttcttatttggatgccctttatttctttctcttgcttgattgccctgaccagaacttctaacactatgttgtatagaagtgttgagagagagcatccttgtcttgtgccagttttcaaggggaatgtttttagcttttgctcattcagtataatattagctatggaattgtcatagatgactcttattattttgaggtatgttccttcaatacctagtttattgagagtttttaacatgaaagggtgttgaattttattaaaagtctttctgtgtttattgagataatcttgtggtttttgtctttagttctatttatgtgatgtatcacatttattgatttgtgaatgttgaatcaactttgcatctggagaaaaagtctgcttgatcatggtggattagctttttgatatgctgctggattcagtttgcaagtgttttgttgaggatttttgcatcaatgtttatcaaggata

SEQ ID NO: 774369 - DNA, 652 bp, Homo sapiens
atgttgagagggattgcattgaatgttatattagtccattctcactctgctatgaggaaatacctgagactggatattttataaaggaaagaggtttaattgactcacagttctgtattgctgaggaggcttcaggaaacttacaatcatggcagaaggcagaggagaagcaggcaccttcctcacaggatggcatgacagaatgagtgcaagcaggcgaaatgccagaatcttataagaccatcaagtctcaagagactcattcattaacatgagaacagcatgggggaaactgcctccatgacccagttacctccaaccttggtcctaccctagacatgtgggggttatgggcattacaattcaagatgagattttgggtggggacaaagccaaaccttatcaartgtatacatcaatttaaaaaaattgacatcttcacaattaagtctttcattctgtgaatatggaatatctttcaatttatttagattttatttgactttttttcagaattctgtagattttttgcatgtagatcctgcttacattttgttagatttatacctaagcatttaatttggggagtgtattagaaaggttactttcaaaaattttaaatctcaattgtttccatatgtttaatctaaca

SEQ ID NO: 774370 - DNA, 652 bp, Homo sapiens
atgttgagagggattgcattgaatgttatattagtccattctcactctgctatgaggaaatacctgagactggatattttataaaggaaagaggtttaattgactcacagttctgtattgctgaggaggcttcaggaaacttacaatcatggcagaaggcagaggagaagcaggcaccttcctcacaggatggcatgacagaatgagtgcaagcaggcgaaatgccagaatcttataagaccatcaagtctcaagagactcattcattaacatgagaacagcatgggggaaactgcctccatgacccagttacctccaaccttggtcctaccctagacatgtgggggttatgggcattacaattcaagatgagattttgggtggggacaaagccaaaccttatcaagtgtatacatcaatttaaaaaaattgacatcttcacaattaagtctttcattctgtgaatatggaatatcwttcaatttatttagattttatttgactttttttcagaattctgtagattttttgcatgtagatcctgcttacattttgttagatttatacctaagcatttaatttggggagtgtattagaaaggttactttcaaaaattttaaatctcaattgtttccatatgtttaatctaaca

SEQ ID NO: 774371 - DNA, 635 bp, Homo sapiens
ttcattatcacaagaacagcaatggggaagtcggcctcatgatccaatcaacttccagcaggcctcttctccaacagtagggattacaattccacatgaaatttgagtggggacataaatacaaaccatatcatatgcaaagaaacaatcatgtagtttttgaaactaactctgtgattaaagggaaagtatgtaaacaactatgttttgttaaatatttataagagcattgtgacctgaccaaggaaatagaagttctcaacctcctcagacccttgttggtgcccagatgtctgcagttgtcagtcacctcttgatcccacccacctttccttccccctgttcttaacataaaaataatctgcaatttgtactgacttaagatggtactttaggacaacagtttmtcatcttcttggtctgctggttctccaaataaacctgcgtttcctcccaccaactctcttctctctttattttagttttcaagtggcgagcaggcacatctgtgttcaggttacaacactttactgtaactacttgtattttgcccattttctgtattagacaataaactcagtgatggtagagatgagtctcttatttattacaatattactaatattattggtaat

SEQ ID NO: 774372 - DNA, 635 bp, Homo sapiens
ttcattatcacaagaacagcaatggggaagtcggcctcatgatccaatcaacttccagcaggcctcttctccaacagtagggattacaattccacatgaaatttgagtggggacataaatacaaaccatatcatatgcaaagaaacaatcatgtagtttttgaaactaactctgtgattaaagggaaagtatgtaaacaactatgttttgttaaatatttataagagcattgtgacctgaccaaggaaatagaagttctcaacctcctcagacccttgttggtgcccagatgtctgcagttgtcagtcacctcttgatcccacccacctttccttccccctgttcttaacataaaaataatctgcaatttgtactgacttaagatggtactttaggacaacagtttatcatcttcttggtctgctggttctccaaataaacctgcgtttcctcccaccractctcttctctctttattttagttttcaagtggcgagcaggcacatctgtgttcaggttacaacactttactgtaactacttgtattttgcccattttctgtattagacaataaactcagtgatggtagagatgagtctcttatttattacaatattactaatattattggtaat

SEQ ID NO: 774373 - DNA, 535 bp, Homo sapiens
accttatgatcacctactatgtgactgtaaagcactgtactttattacattagctctaattcttacaatcatccttgaaggtagttagtactcccattgttatgaatgaccactcttcagaagcaggagggaccctcatccaaatttgatttggatgtcaaaactgatgatgccacacatccacctcacataggtatgaaaactattattcrcataatgaggctttctggggatagcagtgtggtttccaagcagataaaaaaaaatggcttgagagagagcacagaaaggagactggcttagggtttgttttgttggtggttgaggtggggccagggtgagggttcccacacatggtttgaagttgccatgcagcttcctagtagcaaaggagggaatatcctggttttcttatcagttctcctggatatgggcagatgaggaagagggaggggtaaggcttaaaagctggcagtagtcaaaagtcaaaaaatggagtcagattccttattatacccattttaccaatgaagaa

SEQ ID NO: 774374 - DNA, 535 bp, Homo sapiens
accttatgatcacctactatgtgactgtaaagcactgtactttattacattagctctaattcttacaatcatccttgaaggtagttagtactcccattgttatgaatgaccactcttcagaagcaggagggaccctcatccaaatttgatttggatgtcaaaactgatgatgccacacatccacctcacataggtatgaaaactattattcacataatgaggctttctggggatagcagkgtggtttccaagcagataaaaaaaaatggcttgagagagagcacagaaaggagactggcttagggtttgttttgttggtggttgaggtggggccagggtgagggttcccacacatggtttgaagttgccatgcagcttcctagtagcaaaggagggaatatcctggttttcttatcagttctcctggatatgggcagatgaggaagagggaggggtaaggcttaaaagctggcagtagtcaaaagtcaaaaaatggagtcagattccttattatacccattttaccaatgaagaa

SEQ ID NO: 774375 - DNA, 623 bp, Homo sapiens
acattttacccagaatttcaatggttttgtagcagccaggaaagtctagctctctgttatgattcttttaacttgttcagtcctgggttgtggaggtatgaggagctatccatcacacatggcaatttcaaagcaacatgcaaaatacaataatataagcggaacacatgaaagctggaggacagtgagagatttttggttttgcataatagctttactgagacataattaacatgccatacaactcactcatttatgtgcaactcaatggtttttgtatttacagagttgtacaattatcaccacaatcttagaaaattttcattacccccagaagaaaccccatatccatttgtattcagtctccattttgtcccattcactccctttagccctaggcaaccactaatctactttctgtctctgtagatttgtctattctgaacacttcatatacataaaattacattctatgtggtcytctgtgattggctcctttcatgtagcataatgttttcaaggtttatctatgtagcatgtatcagtatttcattcatttttatggcctaataaaatcatgcaccacataatgaccttttggtcaatgacagacctcacacttg

SEQ ID NO: 774376 - DNA, 613 bp, Homo sapiens
atcatagctaaaaaaatgaagaatgccataatatcatctaatacacagtccatattaaaatttccccaattgctccatggctttttttttttttccaacattcaatcttcaatcaaggttcacacgttgctattgattttgtttgyttttttttagacagggtctcattctgtctcttaggctggagtgcaacagcatggctccctgcagctttgacctcctgggcttaggtgatcctcccacctcagcctttcaagtagctgggactacaggtgcgcaccaccatgcctgagtaattttgtattttttgtagagaccagtttcaccctgttgcccaggatggtcttgaacttctgggctcaagtgatccacctgccttggcctcccgaagtgctgggattacaggtgtcagccacctcgcctcgctgcatttgattattatgtctttttagtcccttaacctaaaacagccccacccctgtctgttttgcctctcactagattgccctttctgaagagtccaggctagttgtcttgtagaatactactcatgctggatgggtctgattgtgttttcattgttagatctgggttacaacacacctttgagaag

SEQ ID NO: 774377 - DNA, 620 bp, Homo sapiens
cgaattaggtactgacccttggaaagggcctatgcaagtgaaggggccctggagctcaagcttcagaaaaggatacatgcaagaagaaaataaaacaggatggccaggcgctgtggctcacacctataatcctagcactttgggaggctgaggcaggaggattgcctcagctcaggagttccagaccagcctgggcaacatggcaaaaccatgtctccactaamaatacaaaaaattagccgggtgtagtggcgcacaccagctactcaagaggctgaagcacaagaatcgcttgaccctgggaggtggaggttgcagtgagcagagatcgcaccactgtactccagcttgagtgacagggcaagaccctgtctcaaaaaaaagaaaagcatatttgttatggccaatgatgtaatcaatcatgaccaggaatcacccacaaaacgcaaaaggacagtgttcagagagcttccaggtaggtgaacaagaagacttccatctgctgggagggtggttcaccccaactccacagagatggaagctcctgtgctgagaccagctcggtcggggagatcctaacccagcggcgttagaggaattaaagacacacacacacagaa

SEQ ID NO: 774378 - DNA, 620 bp, Homo sapiens
cgaattaggtactgacccttggaaagggcctatgcaagtgaaggggccctggagctcaagcttcagaaaaggatacatgcaagaagaaaataaaacaggatggccaggcgctgtggctcacacctataatcctagcactttgggaggctgaggcaggaggattgcctcagctcaggagttccagaccagcctgggcaacatggcaaaaccatgtctccactaacwatacaaaaaattagccgggtgtagtggcgcacaccagctactcaagaggctgaagcacaagaatcgcttgaccctgggaggtggaggttgcagtgagcagagatcgcaccactgtactccagcttgagtgacagggcaagaccctgtctcaaaaaaaagaaaagcatatttgttatggccaatgatgtaatcaatcatgaccaggaatcacccacaaaacgcaaaaggacagtgttcagagagcttccaggtaggtgaacaagaagacttccatctgctgggagggtggttcaccccaactccacagagatggaagctcctgtgctgagaccagctcggtcggggagatcctaacccagcggcgttagaggaattaaagacacacacacacagaa

SEQ ID NO: 774379 - DNA, 648 bp, Homo sapiens
ctgaatgtgcacaataaacttcaataactgttctccccacgtcctgcttgtcctgcttcttaaagtctattctgtcctccacactgcagccagagggatctgattaggtcaaacccctgacaaagttcacttttctttttttttcttttttttgagayggagtcttgctctgtcacccaggctggagtgcagtggcatgatctctgctaactgtaagctccgcctcctgggttcacaccattctcctgcctcagcctaccgagtagctgggactataggaacctgccaccacgcccgtctaattttttgtatttttagcagagacggggtttcaccgtgttagccaggatggtctcgatctcctgacctcgtgatctgcccgcctcagcctcccaaagtgcttggattacaggcgtaagtcaccgtgcctggccaataaagttcacatttttagcttggcacttaaggtcctttgagatctggtcctatcctgctcactcagaaagcactgtaatactggcatatttgcctcccctaaacatgctcccagtcttcccatctccatgtctctgttcatgccatttcctctgtcacccttcaggatccaattcaaacatcatctcttctgggaagccttccagagtgaca

SEQ ID NO: 774380 - DNA, 629 bp, Homo sapiens
ggtatacattcctctcaattctgtgcttctagaatataaactctgaatgttaagtggtgaattagtgtactccatactcagccaaagcaagcttgttactgtttccaaatcgagcagccctgccttccggctaccaccacttttcctttccacatccacaggttgaataatcctttccggattttttttgggcatttggcaaaattttctccatgcatgtttctcatgattggtaataataataataagaggcaacttgaaagagcactcactgtgttccttgtgctaagttttttacagatcttgcctcatttaattccataacaacccaaagagggctgttatattcccatcttacagctgaggaaacagagacccaaasaggtgaggaaacttgcccaaagttccacagctgttaagtcctagagttgggatgggaagccaggcctgtctgactcgaagccccttaagtcctaagaactcttcttaaaggaatgctttttcttttgaatcccaaagactttgaaaggaagtacttcctattcatatgaatgaatacattgtcattcattcccagcgctcaagctaggacacagtttgataaacctaggttagagttccccatggtt

SEQ ID NO: 774381 - DNA, 607 bp, Homo sapiens
actattaaaaaattacattccagggccaggtgcagtggcttatgccaggcaaaagcatttagtgagcacttattgttttttctctggccactgtgaaccaaggtgagcaccaagtgtttgccaaagtggcgtgaccgcattgtcccatgcatcacccatatgggtgccagccaggtgcaagggtcttcaaactgatggcagcatgacgcttcctggcaggaaagacaccaggggrcagagagaggtgcagtgcacatggctgctggttagtgcttggcaccatctattgtgcccatggccattccccaacactctgccttacagctgccactagacagcaaagggacttcatccaaaacactccttcagaactgtgcctgccagtgagcccttccccttgcaaacagccaccttgggaggccacacacttacaccagccaatattactgtttttccaaaagttggggaaagacatccttggcagctgccaatgacccctggggaatattctcttgaatacactccatggagaaaattgttcatcctttgagagtttggaggggatgcaaagcgagagctgatggcagagatgatagttcaagatgga

SEQ ID NO: 774382 - DNA, 613 bp, Homo sapiens
ttaattgtctctctaaaataatcattggttgaagccagggccaggcagtttcccaataaatagaaaacacctgaaactggtgatcagcttcctagtaagatctcaggagttgggtgagtggactcaagcatgcgcactaagaggcaaaatggcagagtttaactggtatatgaatcctcarctgataaggagaaaaagccctcaagtgagcacgtacacaacttcagtaaacacactgcgcacgctcaccccccaagtgcctgaatgccactgtggatgcggacagcccactccaagggaagaatcaggggagaagagatgcaacccccctggaagcatgccaacatatgaaacaccaagtcaaaggtcaaaccacccggctgatctcaagtcacccgcttggccctcttctaagtgtacttccttttgttcctgctctaaagctttttaatacacttttcactcctgctcaaaaacttgccttggcctctcaccctgccttatgacccttggttaaaaattctttcttttgaggtgttaagaattgaggttgctacagatttgccaccagtaacacttccatagccttagatgatttaggtttcaaaattgg

SEQ ID NO: 774383 - DNA, 613 bp, Homo sapiens
ttaattgtctctctaaaataatcattggttgaagccagggccaggcagtttcccaataaatagaaaacacctgaaactggtgatcagcttcctagtaagatctcaggagttgggtgagtggactcaagcatgcgcactaagaggcaaaatggcagagtttaactggtatatgaatcctcaactgataaggagaaaaagccctcaagtgagcacgtacacaacttcagtaaacacactgcgcacgctcaccccccaagtgcctgaatgccactgtggatgcggacagcccactccaagggaagaatcaggggagaagagatgcaacccccctggaagcatgccaacatatgaaacaccaagtcaaaggtcaaaccacccrgctgatctcaagtcacccgcttggccctcttctaagtgtacttccttttgttcctgctctaaagctttttaatacacttttcactcctgctcaaaaacttgccttggcctctcaccctgccttatgacccttggttaaaaattctttcttttgaggtgttaagaattgaggttgctacagatttgccaccagtaacacttccatagccttagatgatttaggtttcaaaattgg

SEQ ID NO: 774384 - DNA, 575 bp, Homo sapiens
ctctggattaggctttggtttaagggaatgttgtgtggctggtttgttcttctatccagacactaaaactttctccatatcagcaataatgctgttttcattttcttaaccattcatgtgttcactggagtagcacttttaattttcttcartagctttttctttggcttgacaacttgtctgtttggcacatgagggctagacttcagcctatcattacttttgacatgccttcctcttcaagcttcctcattttttaaaagcttaatcatttttagcttttgatttaaaatgagagatgtgcaattcttcctttcacttgaaggcgtagaggccattgtagggttattaattggcctcatttcaacattattgtttctcagggaatagggagacccaaggagaggaaagagatgacctgaacagtggatcggtcaagaacatgtacatttattaagtttgttgacttacctggatgcggcttatggtacccctaaacagttacactagtgcctcaaactagatcctgttcagagatattataacaaattactgagtttattttggtgcaaaaa

SEQ ID NO: 774385 - DNA, 641 bp, Homo sapiens
tgcagaaagaggttatgagcgtcacagagcaagtcgagaaaaagaagaacgacatagagaaagacgacacagggagaaagaggaaaccagacataagtcttctcgaaggtttgctctttaataaaatagtgaaccaatagtwtgtgagagattttgacttactacattgtcgcattggaagaggggaaattttggcctatgaaccagtcttgcttggtttcattaaagaaaaattcagggccttgtctcaaatttttttaaaaaagcattaaacaaaatacctattgtttgccaaaaatcaaccctatacagtatttccggttttgagttaatgcctgtttctaatttgttactgtatattataatatgcatttcagaagctgtgtataggcactgggaatctgagataatatcagtgaagatggccctataaaataaatacaatccctgcataaaagtcacataaaactgattattcctcacattatatttatgagaaaatgcattagattattttaaacccagtgttatattgagaatttccttagagtgattggatttttgtcactgattgtgtatttaaacagaacacaccttttttttttttttttttttccagtaatagtagacgtcgccatgaa

SEQ ID NO: 774386 - DNA, 616 bp, Homo sapiens
tctgagattttagtgcacctgtcacctgaatagtgtacactgtaccaaataggcagtttttcatccctcaccccactcaccctccccttttctgagtctccaaagtccattatattactctgcctctgcatctccagagctaagctcccacttacaagtgagaacatgcagtatttgattttccattcctstgttacttcacttaaaataatggcctccagttccatccaagttgctgcaaaagacattttttcattcttttttgtggctgagtagtattccatggtatatacataccacattttctttatctacctatcagttgatgggcacttaagttgattccatgtctttgtgattgtgaattgaaggtaaaggattttgattaggttgtacatattaatgtatgaagtcatccccatatttctaaagtgctaaacctttcctatgcccaaatatttgcaagtgtcaggctcaggatttctcttcctgcagtggcaagttactgccattaactccatctctttttctttactgtgtaccattgatcttagatctttgctttgggctgctactttacacagtgcacctaattctatctgggaagaacttaggg

SEQ ID NO: 774387 - DNA, 640 bp, Homo sapiens
tcaattatatgggttagatagaaaaagtcatttgatagatctgattcaatgaatactcattaagtgaaagtatcatgctggatactttcccagagtgaaaattatttcactactttaagctcatgtattctgggctactttgagtaaataaaggaagatgatatcaaatttgcctctacaaatatgtatccttaataatattgtcaattcattcaagagggtaggtagctcagatgggtgaggaattatgccatttaaaagtccaggttcaagagataaactgtgaagtttcccaagtacagctgctgagcctgaggagccacagggggatggtatcttaagagatttagtcagctgtctgaaagatgcttctttcgggtcagaaaggactcaaggcctttctcttttttctcctcctgtctttttgctcttgctgtggttattctgtataagaaagwtaagcaaaaggggacagaaaaaaacaggatgaagataaaaaaatagaaaatggaaataggggagatgtatattttaatttctcttttctgcaaaacatctgggtggaaaatgatgaggccaaacaaagtggcttgttaacaaatgacttgttaacagaacataagctagaggattatatgat

SEQ ID NO: 774388 - DNA, 654 bp, Homo sapiens
tatggctggatgatgttggtgagtattgaggttcactttgtgaacaactcttattctattataagtgggtaagttcagcatcagaaaggagctcttcatgggaacccagatcacgctgccctgttgggtgacctttgcagakgataccctatcagaacgtctgtgaatcacatctgagttccctcctgtgtctcgtctccaactctcattagcagtgaactcagaagttttgcaggaaggagattcattttctttccttatcccccctccaaccccaaaagagacaaaaattctggcattgagtattaacattcttatattaagacagatttacctctactcactttgataaaagagctcaggatctcccaagaaaactgatttttcagagttgctcatttgaatggacagcacctccaaagcttgtgctttggttgaaaaggggttttctgtgttccttgtattcatccttcaagttcatggccatcacccatcaccatctgagagtacttagtgctcagagtaactgaaaggaagcataaatcctccttgctttgaacacaacccagggtttaccgtatgttcttgtcctggccaatgctaatcagctcttccccgcttcttccatctttaatgcttgtaaatcaagctgcc

SEQ ID NO: 774389 - DNA, 654 bp, Homo sapiens
tatggctggatgatgttggtgagtattgaggttcactttgtgaacaactcttattctattataagtgggtaagttcagcatcagaaaggagctcttcatgggaacccagatcacgctgccctgttgggtgacctttgcagaggataccctatcagaacgtctgtgaatcacatctgagttccctcctgtgtctcgtctccaactctcattagcagtgaactcagaagttttgcaggaaggagattcattttctttccttatcccccctccaaccccaaaagagacaaaaattctggcattgagtattaacattcttatattaagacagatttacctctactcactttgataaaagagctcaggatctcccaagaaaactgatttttcagagttgctcatttgaatggacagcacctccaaagcttgtgytttggttgaaaaggggttttctgtgttccttgtattcatccttcaagttcatggccatcacccatcaccatctgagagtacttagtgctcagagtaactgaaaggaagcataaatcctccttgctttgaacacaacccagggtttaccgtatgttcttgtcctggccaatgctaatcagctcttccccgcttcttccatctttaatgcttgtaaatcaagctgcc

SEQ ID NO: 774390 - DNA, 654 bp, Homo sapiens
tatggctggatgatgttggtgagtattgaggttcactttgtgaacaactcttattctattataagtgggtaagttcagcatcagaaaggagctcttcatgggaacccagatcacgctgccctgttgggtgacctttgcagaggataccctatcagaacgtctgtgaatcacatctgagttccctcctgtgtctcgtctccaactctcattagcagtgaactcagaagttttgcaggaaggagattcattttctttccttatcccccctccaaccccaaaagagacaaaaattctggcattgagtattaacattcttatattaagacagatttacctctactcactttgataaaagagctcaggatctcccaagaaaactgatttttcagagttgctcatttgaatggacagcacctccaaagcttgtgctttggttgaaaaggggttttctgtgttccttgtattcatccttcaagttcatggccatcacccatcaccayctgagagtacttagtgctcagagtaactgaaaggaagcataaatcctccttgctttgaacacaacccagggtttaccgtatgttcttgtcctggccaatgctaatcagctcttccccgcttcttccatctttaatgcttgtaaatcaagctgcc

SEQ ID NO: 774391 - DNA, 632 bp, Homo sapiens
aaatcagctaaaagaagtaacactaaagaccaatcttcagagccaaaaaaataacatcagtaatttcatatcaagatttgaatgctgatgtctgggcttggtggctcacacctgtaatcccagcactttgggaggccaaggcaggcagatcacctgaggtcaggcattcgagaccagcctggacaacatgacgaaactccgtctctaytaaaaatgtaaaaattagctgagtgtcatggtgggagtctgtaatcccaactactcgggaggctgaggcaggagaatcacttgaacctgggaagaggaggttgcactgagccaatgttaagccactgcactccagcctgggcaacagagagagactctgtcccaaaaaaataaaaaacaaaagatttgaatggggaggcattctgaggtattattaaacctttttcctatggctccggccttgtctccaaaattctagagccaggcttacaggatgtactattaacatctgaatcggagcttgcccaacagagatatcttttcaggttttgcttttctcattccatggtttatatctgaccacagcaacaggtgtatggaaaaggaaacacgatccctaaggggaaaggccacttcctccttct

SEQ ID NO: 774392 - DNA, 671 bp, Homo sapiens
cctaaatcagctaaaagaagtaacactaaagaccaatcttcagagccaaaaaaataacatcagtaatttcatatcaagatttgaatgctgatgtctgggcttggtggctcacacctgtaatcccagcactttgggaggccaaggcaggcagatcacctgaggtcaggcattcgagaccagcctggacaacatgacgaaactccgtctctattaaaaatgtaaaaattagctgagtgtcatggtgggagtctgtaatcccaactactcgggaggctgaggcaggagaatcacttgaacctgggaagaggaggttgcactgagccaatgttaagccactgcactccagcctgggcaacagagagagactctgtcccaaaaaaataaaaaacaaaagatttgaatggggaggcattctgaggtattattaaacctttttcctatggctccggccttgtctccaaaattctagagccaggcttacaggatgtactattaacatctgaatcrgagcttgcccaacagagatatcttttcaggttttgcttttctcattccatggtttatatctgaccacagcaacaggtgtatggaaaaggaaacacgatccctaaggggaaaggccacttcctccttctgtcttacgctttggcatgatgggccgtgtgactaca

SEQ ID NO: 774393 - DNA, 457 bp, Homo sapiens
taatattggcatgctgacagtaaagagagagaaactgaccccagggggtgagggtgcagaaagactgaagacctcaagaaggtgggataggatgacacccagagcacatccaaagggagtggtctttgatggaaggagggaaccccgccttcattgtgagaagatgggatgcttctaatttctctatggtaagatgatctctgagccagagggatgaaagttggccaggagtatgaacagagtgtatgaaatagctgtgtcattaaatggtggaataaatttatttgagaaacmtaataatgtttttgccaagctgtgttgagtctctatttgagtttagttgtcaagaatacgtagtaacatcatctagaccagtctttgtttccacttcccacatcctcttctggagttcctcaccccaagccagtttctgccatttttcacatgatgtaatgac

SEQ ID NO: 774394 - DNA, 578 bp, Homo sapiens; identical to SEQ ID NO: 747261

SEQ ID NO: 774395 - DNA, 612 bp, Homo sapiens
aacatatacatttaaagtaatagcacaccaagatgtaatagtacaccaagatgtaaaattgacaatgcaatcactcattccctaattaaagagcctttccgacaaatcttcattcttagattttcaccgtttctgtttcctgatgaattaaagtgtgaggaaaatgggctgagggctactgggttttacactaagaaaacatttttaaaacagtaattatttacagtgggttctagcttttgggcatctcaaccaaatgagaataaaaataacactgtcctttcatgcaggtgagtcttccctaacaaaacaaatgtgtgcatgcacaaacacacagacacacatgcacacacacacacacacacggagtcctaaggtagagttgcamccagggtatgtttcaattcaaggcagcctccctaacccccatctctacccataggacagagaatttccagttacttttgaactcaataattcagttctggcttcagcttagagaaaatacccacggatcaaaatatctgagaagcagaactcccgaatctgtggaaaaggcacttgtcaattttcatggaaagtaattatacagaccaatcatgattttcacca

SEQ ID NO: 774396 - DNA, 607 bp, Homo sapiens
gcagtggctgcccgggccgaggaggggcgcgctgactgctcaccgcgagtcaggaggggccggcgggctcacggagggagacagggtgggcgggggcaaaggctaggcgctagggcggcggcgccagcgtagagcggcggtttggaggaaagatgagacggtgagtgggctccggggacacagagtttctttgcttctttacaggctgtagggacaaaagcccgggctggggtcggcagtgcccakgctgcgcagctgggtgggtgggggtggcgaaccccgttgtgcatgactctcggggggctgggtagatctccggttgaggggatcccggggagggagtgtctggtagggaagatgcttccagagtgattgtagaaaacaggcagaatgtgggggaactgggggcaactttttccagcaactctggaatgcacatggagagagggatggggatccttgggatagctccctgagaaagagaaggtccgctgctggatggtgtagggcgcgggattcagagaagactccctccccgcaaatatttggctagctgcgcttctagttccactttctttcaagagtgaacctacgagctttaaccgcc

SEQ ID NO: 774397 - DNA, 562 bp, Homo sapiens
taaatgctaagctgttatcatcagaggcgttaaaccaccttgggccacaggcagctcttctccttggcaggaggacgagggccttgtcaactccaagcctcactctacctctgtccagaaaaactcacttccgtgggagcaggagcgccagtacctcccaccagcagctgagaggggacagtagcactttgccgcttggcctggggtgaggtcgggggtcaccagaccacagaggagggagttttgtaggtttcytgaggagctgcaggggtcaaactgcatcttcagcacctgaagcagacaactgcttcccgagccagaattaggatcaaatcatagtctaagtatctccagtaagttctgtgcccccaccacagcaacctggctagcactgggaattaaattttgtataataatctgattttctctctaattttgaaagtaacacatgctccataaaatattcaaacatcaaagaaatatgtaatttagaaaatgaaacaccccttttcccaacccagatagctactattaacaatttggcatgcaggatattcatcta

SEQ ID NO: 774398 - DNA, 569 bp, Homo sapiens
aggattataaatcatggtgctataaagacacacacacacatatatttattgtggcactattcacaatagcaaagacttggaaccaacccagatgtccatcaatgatagactggattaagaaaacatggcacatatgcaccatggaatactatgcagccataaaaaatgatgagttcatgtcctttgtagggacatggatgaagctggaaactatcattctcatcaaactatcgcaaggagagaaaaccaaacactgcatgttctcactcacaggtgggaattgaacaatgagaacacttggacacagggtggggaacatcacacactggggcctgtcatggggtggagggaagggggagagatagcattaggagatatacctaatgtaaatgacgagttaatgggcrcagcacaccaacatggcgaatgtatacatatgtaacaaacctgaacgttgtgcacatgtaccctagaacttaaagtataaaaagaaaaaaatagggaactataaacagtaaaaaaaaagagaagaaaagaaaagaaaaaagaaataaagggagagaagagga

SEQ ID NO: 774399 - DNA, 682 bp, Homo sapiens
atcaaaagtatataacttataattttgcagctcaatgaattattacaaagaaattatattattcttgaaataaaatctgaactgttctcctctggtctaatagacacacaaagcctctctatacactctcttctatatataactaaataagacaaaattattctagttgttcagaacaaaaacactgatgttatcctttgttcctttgtcatatgccacataggaaatcattaatcagtcataataacactatctttaaaaatatccagaatctagcaacttgtcatcatctggactacaagtaccttattcacaaccactatcatttctcatgtgagtagcatagtagcctccaaactgggcatcttgcttccattcttctcattttgagtctattctcaaaatcaacatcattacaagagcgatcatttcagaatatcagccatgttttttcactcttctgctcaaagccttccgtgagattcctatgtcataataaaagtgagaatacctttaaatgttggctctcatctctttgactatgyctcctaatgttcttccttctactataacactcctactataatactgggctgcctggcaacctttgaaaacactggatatattcctaactcaagggcttcgcatctgctgtttcctttgccgagaatgctcattttct

SEQ ID NO: 774400 - DNA, 621 bp, Homo sapiens
aaataatgcacatgcatctaagatatatttcatcaatgaaccagtaaatacataaatacattttacctgactggtatgtataactacatcctttttctccttatatttccacaaaataaataatacattgttataaataaaaagcaagtcataatagataaataaaaagtagttctttaaatatatttaatataagtggtttgtacttactttctgagagatgccggcagatttcctwaaaaaatataaatagtatgtttaattacttataaaatttttatttttccctttctttggacttttaattattcccggagatgaaataagggaaatcaaactaggctttttattgggtggctatatttactggtcctgtaacaagacaaaaaacctttaattttatgatttgatcaaaaggctgaggagaacttgtgttatttattgctcatattagaaaaagttccctaaaacaaattcattttatgaaacaaaatggaaatggttacttggcgtttgagcaagtacttccttacatttccccatattacatttcctttgttaaatgaaggtactgatttctatcctcccccctacatgaaagaattatttgaaggaccaagt

SEQ ID NO: 774401 - DNA, 609 bp, Homo sapiens
gtggtgatgggtgcctgtaatcctgtaatacgcaggaggctgaggcaggagaatcgcttgaacctgggagttggaggttgcggtgagctgagattgcatcactgcactccagcctgggtgacagagcaagactccatctcaaaaaaaaaaaaacagaaagacttcagggttctgccctcctcscctcccgtctcctggccagcatcggctttgctgcctgcaagatcccaaaggccagagccaagttggcacataaaatacctgtgaggcctttcacatttcacccacgactagcaccaaactgtctctaccctgcacctcagcgtggcctatttccacccgtgaatacaagatttttctagcctctagagcattttcttcacatgtgcatgtaatttaaacaggtgctagcaaagcactaaccccacccaggttcgagtcctagtgtctttgtaaacggtcccctccatacaaagggatggctgctgctcagcctgctctgtcccccttggtgaagggccctgtgccaggctctggcagttcacgggcagcctgccaggaaagggggctcaccttgacaaggaagctttgtgatgtgttttgtcggta

SEQ ID NO: 774402 - DNA, 609 bp, Homo sapiens
gtggtgatgggtgcctgtaatcctgtaatacgcaggaggctgaggcaggagaatcgcttgaacctgggagttggaggttgcggtgagctgagattgcatcactgcactccagcctgggtgacagagcaagactccatctcaaaaaaaaaaaaacagaaagacttcagggttctgccctcctcccctcccgtctcctggccagcatcggctttgctgcctgcaagatcccaaaggccagagccaagttggcacataaaatacctgtgaggcctttcacatttcacccacgactagcaccaaactgtctctaccctgcacctcagcgtggcctatttccacccgtgaatacaagatttttctagcctctagagcwttttcttcacatgtgcatgtaatttaaacaggtgctagcaaagcactaaccccacccaggttcgagtcctagtgtctttgtaaacggtcccctccatacaaagggatggctgctgctcagcctgctctgtcccccttggtgaagggccctgtgccaggctctggcagttcacgggcagcctgccaggaaagggggctcaccttgacaaggaagctttgtgatgtgttttgtcggta

SEQ ID NO: 774403 - DNA, 548 bp, Homo sapiens
cagaggggccgggttgctggccgccctcagtgcgtaccctcctcacctccatcctccccagctggaaggagatggcttctttggcgatatgtgaggttgtgttgttttgtaggaaggtagggactgatttatcacatcagtcaggccaggctaggctgtgcttaggtaacacatagactgccaatttcagtgccttatcacaacaaagattcacgcccccagtatgcaacatccagtgtgcgtagggaaacgctcttccatcagatggtggcaccatctggaacatgtggcctccaaggttgccatgacgagcgaagggaactgagggtcatagrtgtttgcaaagggccaggtctggaagtggtctccatcacctccccacccatcctatccgccagactccagacacaggagcccaacttaactgcagtggcagctgggagagttcctccttgtgcccagaaagaggacatactgtggtgaatacataacatcctctctgccacattaggatccaaccctagggatgcagtgtccctgaggcagtg

SEQ ID NO: 774404 - DNA, 564 bp, Homo sapiens
ccctataatctgcgggctgtgaattatcccatttgaatcgaatgccctgattttttcttttcctaaaagctgaaagataatttatatgttttaatgatataaattacaagaaaacctgttttattttatactatgtctagttaaaacaatataaatagctcagcttcagtatcacatggtgaggtgaggtggaaccctccagtcgataaggactaagttaaatataataacttgttacagtaagcaagttaaaaccaaagcaatgttattaatgcaaactcacaaaaagaawgctacagttgtaaccattgtcaagtaagaaatgctcagaaaacagcaagtatataaaatatatatacttatatattttctaagccatgtggaaaattccatctgggttcaaaactggattctagccctttgggagtttctttaaaatctgatgtttcattgttttttcccaagcagtaggggatttcatgcattcctgtaaaatattaattacacatatcttgggcactaagtctaaaaggaaaagggaagagaagataagcccaggatgat

SEQ ID NO: 774405 - DNA, 506 bp, Homo sapiens
actgtcttgtgctgctctcagttttccggaccatacaaacgtggagggcaacggtcacacctttgatctattttgtatcttccaaagctgtgtcagaaacatagtagatgatccatgcatgccacttcttggccataactcttcacatctgtgtttggctttatrgtttgtaaattctttcatttatgtagtcttcttagatcctcaagataactcagtgaagtatgcttgcttgctgtttttaatctcaacttaacagatttaaggaaatggtaattgaataggtaattgcaaaacccagggtcacccaggtgataaatgatacatccaggaaaagaatgtgttctctcccctatgcaaatgattgataggtggattgacttccatgcctttagcagatgtgtcaaatttcacatccgcattaacacttctaatcctgtaacgtaattctgtctttttatagatgtcaaactggttttatctcagaaaagggaactgcaaaatac

SEQ ID NO: 774406 - DNA, 581 bp, Homo sapiens
ggcagttacaggagttgaagtaatttacgtggtcataagggagtaaaattctgccctggaatgtgcatgtgtattcaagcctccccctctgtggtttgccacaggaaagcatggcaggtctgaggtctttggaagccttgctcatgattgcaaacgagaccaggccagggtctgtgagagcttagccatgcacccaacctcattgtgatgtcctgacatcttctagattgcaaacatcaacgtgttcctttgcatgagaccactggggtgggagggttactcttagctctgagatacccagtgagaagcgtgagggcaccttccccactcagtagtgcatctgaggttggtaggtycccaggctagcccaccacactgactgacatgatcttgtctgatggagacccaggggtttccatcccacatccgagcatgttgttattcatgccccagcctttgcacagggccgtgctgtttgcacaccaagccctccgcagtgtgggggtggtagtggagggctcagttaatagctgctgctttgatatcaggctgtgaaggacactcttggggctctggagcca

SEQ ID NO: 774407 - DNA, 623 bp, Homo sapiens
atggaaaggataagtaagatctagtacgtgatagcacaacaaggtgactgtagtcaatgagaatataattatacattttaaaataactaaaaatgtacaattaggtcgtaacacacaaaaaatgtgtgaggtaatggatacccattttactctgatgtgatgattacatatggtatgcctgtatcaaaatatctcatatgccccataaatatatatacctactagttatccacaaaaaytaaaaattaaaaaaatttagaaaaatttttaaaagacatggttaggtatgaatcagagtggaaaatgttaatggtaataacagtagttaacaccattatagtaattatagaactagcagtattctttgtcactgtcatcacagtagtagactgagtgcttgctgtgcactggtctccactctaagtgcattacatcgatgagcttattaattcccacacgacaagcttgccagagtgacacaggtccccaagccagagtctgtggattcaaatcctggtcccagcacttacaacctatatgacccttgggccaactactttaacctctgtgagcctcattttccaacatctacttgagagtacaccaagagaaatttatttcta

SEQ ID NO: 774408 - DNA, 623 bp, Homo sapiens
atggaaaggataagtaagatctagtacgtgatagcacaacaaggtgactgtagtcaatgagaatataattatacattttaaaataactaaaaatgtacaattaggtcgtaacacacaaaaaatgtgtgaggtaatggatacccattttactctgatgtgatgattacatatggtatgcctgtatcaaaatatctcatatgccccataaatatatatacctactagttatccacaaaaattaaaaattaaaaaaatttagaaaaatttttaaaagacatggttaggtatgaatcagagtggaaaatgttaatggtaataacagtagttaacaccattatagtaattatagaactagcagtaktctttgtcactgtcatcacagtagtagactgagtgcttgctgtgcactggtctccactctaagtgcattacatcgatgagcttattaattcccacacgacaagcttgccagagtgacacaggtccccaagccagagtctgtggattcaaatcctggtcccagcacttacaacctatatgacccttgggccaactactttaacctctgtgagcctcattttccaacatctacttgagagtacaccaagagaaatttatttcta

SEQ ID NO: 774409 - DNA, 607 bp, Homo sapiens
gatacctgagagcacatgacaccaacagcagctttattcacagcccatcttttgagctatttgtatgtggttttaataattagctttcgcattcaaatggtaaagaaagttcttatacacacaagaagcatttatggctattataccagatgacacggcttccagggcagtaagaaggatctttaatctcatttcacaaatagaaaaacaaaggtatggaacaataaagccaagtgtaaagttaacattatgtccctcaggctgcccctcagcctgccatgccttaatgtgagagtccartcaaagcctcaaagcccagtatgtaaagcctaataaattctgcacatagcagatagataaattcttcctaggaggaggaaaagaatcagagatgtcactgagtcacacaaaatacaacctagacagaaagtcaagatccctggtcaatcttttccaggtggaattcttgctcattctttgccccaagaaaaaaaaaaaaaaaaaaaaaaaaaaaaaaaaaacaaaattctaagtcttttttttttttttttttgagacagggcctctctctgtggcccaagttggagtgtggtggcatgatcacagc

SEQ ID NO: 774410 - DNA, 571 bp, Homo sapiens
ctactagtgtttgccttgaaaaagagtgacatttcaagcagaagtgagagagtaaaggaggattcatggaaaatatttcctgtaccctttaagacttttctcatagtcattttatgtaaagatgggtctgatggacagaacttactctgaacaacttggcaactgttcaggcctacaggcttctttgaaaattaaaaaaaaaacaaatgcacactttctcatttcccagcacttcaaacatgatctaagagtacagaaggttacattcaagtagcagaataagcttcaaaatggttatatcaaacagtcaaatttgcttatgcatattcagaacgacaagagaaaatattaatttcaatttagaagtcatcaaaaagcaccttgtgggcaatataatgaatagccccatgttaargtaatacatgtttgttctttaacaaataaattttcctctgaaatatagacatctgtcatggagtcaattatcttgcacagcatgtgctgtaaaagcacataaaagcaataatatactacattgcttatttgaaatcgatcaggaataggcagctcc

SEQ ID NO: 774411 - DNA, 633 bp, Homo sapiens
tcaaacctaccccttggctgggactccagatgctccgtaggcaagagggagctggggggaagaggccgtctagcgggctccagaccgagactggtaacagccaggtgaccaagggaagggagtttaaagcttttttcagctgtggcgccctttcctctagggaaagcccattgtggaaacagctgaaactgcactccagtggatggtggggtgggtgggcgaggttggccgggtagaagccaggagcagagctstgtccgagctcaccagagtgtggggacagctgctggaatgtatccaccgggcttcctgggtgaagggtctagagccacatgtggaccagagccaccctcggaaactcagcaactgtccctgaggaaagtgactgggggactagtgtcagtactgtgaggccttagtgtcccctcttggctaggcagtgcgcagggtgaacatcacgtgccctgggggctggggcatcccatgccatcaccctccccacccagccctgtgggcctggtcaccttcccaggcaggggccggcttctgccaggctctttgggtgaggaggctggctgtgctcccagcagctggccggtgaggtgatgacaattctttctgtcactgctgcct

SEQ ID NO: 774412 - DNA, 431 bp, Homo sapiens
gctcttggcagaactagctacaattacccattgtggggttacagaacgaggctgctgaccagctactgtggctggggaaacaggaggctcctaccctctttccagcgagggctgactggggtgggagctgtgcccagatcccagccagagaaaagcaggaacctttctactctatttgttttcactttgctaagttccagaaaggattgcaggggacttaaaaggatacattaagacrccataaatcaaaagtaggagagagaatcacaagtgtaggagcaggaaacggaggagggaatgttgcctacatgaaaccgtatttagaaaatgccatacacaggctacaggtgggccacaaatctgcctccaggcttgcgcagtgcttctgaccttggccacacccatcagaaccacctggggagctttacaaa

SEQ ID NO: 774413 - DNA, 545 bp, Homo sapiens
tactaaactgtatacttaaaaatgggttagataggccaagcatggtggcttacgcctataatcccagcactttgaaagactgaggcaggtggatcacttgaggtcaggagttcaagatcagcctggccaacatagtgaaaccccatctctactgaaaatmcaaaaaaaaaaaaaaaaaattagctggtgtggtggcacgctcccataatcccacctactcaggaggctgaggcagaaatattgcttgaacccaggaggcggaggttgcagtgagtcgagatcatgctactgcactccagcctggggacagagcgagtctctgtctcaaaaaaaaaaaaaaaaaaaaagttttgatagtaaatttaatgttatgtgtcttttactacaattaaaaacttaaaaaaactcaacattataattatcccctttgattcaagattaataaatattatttatcaatgaacaactcaaaagtgatagtgaatctcctgagtgggggagaaacagggtctaagaaataattccctgaagactcttgtttgcat

SEQ ID NO: 774414 - DNA, 499 bp, Homo sapiens
tgcattgtacaaataatccattgttctttcaagacagtttggaaaacaagtacaaaaagaagtacaaaaatgagaaaacatgacctagattgccgttcccctagaaaaacagctattgatgtttttcttcatcttctcctcctcctcctcctcttttctcttcctctcttttttaagtggatttgtaattggctgccctgctttttaaaaaataaaacatcataacttatgtctgcacatttagataagctctattggagacatartcatagtaaaccctgaagtcggcttggtgggaatttgattatagcgaatccacagtgatgtttcagttgcctgagaagcttgggtgcattcatcccacccactgcttgtccaagagaggtggggaagaaacctcagataatagctgataaataaatggaattttgtgccttggaagtgagaaaactagggtcaatacaccatactcaaaagaagcttcaggaggctgtctgtt

SEQ ID NO: 774415 - DNA, 499 bp, Homo sapiens
tgcattgtacaaataatccattgttctttcaagacagtttggaaaacaagtacaaaaagaagtacaaaaatgagaaaacatgacctagattgccgttcccctagaaaaacagctattgatgtttttcttcatcttctcctcctcctcctcctcttttctcttcctctcttttttaagtggatttgtaattggctgccctgctttttaaaaaataaaacatcataacttatgtctgcacatttagataagctctattggagacataatcatagtaaaccctgawgtcggcttggtgggaatttgattatagcgaatccacagtgatgtttcagttgcctgagaagcttgggtgcattcatcccacccactgcttgtccaagagaggtggggaagaaacctcagataatagctgataaataaatggaattttgtgccttggaagtgagaaaactagggtcaatacaccatactcaaaagaagcttcaggaggctgtctgtt

SEQ ID NO: 774416 - DNA, 642 bp, Homo sapiens
cagatctttggatcatttgggagccacctctttggaatctgtgtggaagtcatccgcagttcacaccatctttgactaaaatacagtaagtccttacttcacatcatccttgggttcttggaaactgagactttaagtgaaacaactttctgtataaccaaaccaattttaccgtaggctaactgatacaaacaagagttaagttcctatggcatacatatgttgtttcacttaaagtcacagtttccaaggatctgtggatgatgttaagtgagggcctrctatattgggagatggctgtagacctggggaaatataagctgtggcccctaagtactagggagttctgtgtgcaagaggaaggaggaggactcataggaacaaatctggtcaggtgaggctgtgtgccagcagggggcagccaaggaatgctctggtgacagccttctgtgtgtgagtcagtgacacccagaggtgttggacctggtgccttctctgtgcctctgtcttctaggtcaattgctgaactgccaggaagtcttcccagccgatcactgcaggggacattcttatctatagatatattgtttaaggatccccctgctgagttccccgatgctaaaggattgccattttttcttt

SEQ ID NO: 774417 - DNA, 584 bp, Homo sapiens
caccctgttaatttctgggtcctataagcctcaattattggacaatattgcatagctagaggaggaaaagaattcactcaccccgcaggacgacttagttgtctgagacagaaactgtataatggtaccacaaaaacagtcacttagtggagttcacatcacacagagagaaatccatttagtaaattcccaaatttgcaaaccgtgtggacycacccagagtcccaccaggactggacagcccccactggattatattggatatgtgggcatagagctataccaaattacctgaccagtgggcaggtagttgtgttattggcactattaaaccatctttcttcctactgcccataaaaacaggtgaactcctgggcttccctgtctatgcttcctgcaaaaagagaatatggctataggaaattaaaaaaatgataaatggccccctgagataatcatacaatattatgggcctgctacttgggcacaagatggcccgtggggataccggacccccatttacatgatcaaccaaatcatacggttacaagctgtcttaaaaataatcactaataaaaccagca

SEQ ID NO: 774418 - DNA, 635 bp, Homo sapiens
agaaccttacttgccatgggattctttggtatactcatgaaaacaagtactcatatagaacttacgtactatgtgttaggctgttctgaacactttttctggtttaattcatgaaccttcacaactaccatttgaggtaggtattattttccctgttttatagatgatgaaacaggcacamagaagataaggaccctcatcaagattaagaagctaataggttgtttgggcttcagggtctgtgcttttgtcctatatgccctctgcttcttttaacctcttgggatttctgtttcttcatctgaaaaattagaagattaaatcctacattgaatatgaggttgcacctgctaatctccagggcccttttcctaagactcaggttcagattcagcagtctcaaaaagagcattcatgaccacatgtgactaagaaataatcaagacaaaaaataccctaggaattaaaacacccagaagcagcttctttgtgcctccaaagatgtctgaagaaccagattcaataaaaggaaatgcccataattatcattgtacatgatgttgacaatcaattcagccttagattggtgggtaccagagtctttgtgatggatccaagtatttgtaccatgggcc

SEQ ID NO: 774419 - DNA, 582 bp, Homo sapiens
atctgtgaccttacccccaaccctgtgctctctgaaacatgtgctgtgtctactcagggttgaatggattaagggtggtgcaagatgtgctttgttaaacagatgcttgaaggcagcatgctcgttaagagtcatcgccactccctaatctcaagtacccagggacacaaacactgcggaaggccacagggtcctctgcctaggaaaaccagagacctttgttcacttgtttatctgctgaccttccctccactattgtcctgtgaccctgccaaatccccctctgcgakaaacacccaagaatgatcaataaaaaaaataaaataaaaaataaataaataaataaataattaaaaaaataaaaaaataaaaaaaagatcagaggcttcttaaatcaagtttgtatctaagttctggtccagtctgtgctacttagcatgggattttaagccaattgtttgttggctttgagcctcagttttctcatttgtaaaataggataagagtgggttgcaaattcaaagctcactgctgggcacacagtaaaaaaaaaaacaaaaaacaaaacaaaacaaaaaaccc

SEQ ID NO: 774420 - DNA, 562 bp, Homo sapiens
caagaggcagagtttcaagtgtctctggccacctgcctgctgtggtcctggatcagttcctccacacctcttgtgaagtgtcttgctctgtgcctgacacataggagatgctcacaaacttcttgtttttctgtatcttatccacccaaattaagggaggagaccacccctcatattgtcttatgcccaatttctgcctccaaagaaagaagaagtaaaaactaaaaggcagaaatggaatccacaggcagacagcccagcgccacgccctggacctgatagttaaagatcaacccctgacctaactggttatgttatctatagattccagacattgtatggaaaagcattgtaaraattcctgtcgtgttctattgcgttctgattaccgatgcatgcagcccccagtcacgtaccccctgcttgctcattcgatcatgaccctctcatgtggacccccttagagttgtcagcccttaaaagggacaggaattgctcactcagggagcttggctcttgagacaggagtctcgccaatgctcccggccgaataaaccccttc

SEQ ID NO: 774421 - DNA, 569 bp, Homo sapiens
ggtttaatgtagaggaagggatccaaaggcttagggagattgggatggtggagtggattagtcactttagacctactcatccaaagctgtgagggtccagaagatatatccttgacccatgccttgcaagatagatttgcaagggcagcacctgcatgtttgaagagccccgtaattgctctcctatgcatgccagatctaatggtgggaaccacagtcactcatctacaaaatttaaatacaatgggaataggtggatcccgagggggcggaagccaagtggcggcactcaatcatcaaaggcaaggtgggcatagctaccataatggacagcagaggcaaagcgacaatcagaatagcctgactcatgtagaactctggcactggctaattaatcacagtgtwcctagaagtgaaattgatgggaagtatactgcattcctacttaatttatacaagcagaaaacttctatggacaaaggactaatttgagttataaaaacaaagaatcacagcctctcaatcaatttccagatgtaagccagtttacagacccataaccccttgaa

SEQ ID NO: 774422 - DNA, 548 bp, Homo sapiens
ttggatttgtgtattattgctttctaaattgcatgcctagttcagcaaaattgttcatcagtgtttactggctttatgcttaataagatgccccacaataccttgctgccagggtgtaatgcagccagtaattgcctagtaaaaataaattacataaagtcggcattatcaacttatcttaatcctctcacgccacaaycagtaattaaatgctgagaatgtttttttcaaaaaatataactcaatgattgttacttcactcattttaatgactgcatttggggacagacagtaattccttcaatgtgaagggtgagatggagagacgccagctgggtacgtccctgcgaggccacttccttggactcagggcaggagagatgatacagcccctgctgtcctgaggtgaccacccatgtgtgcagacaggccatgtgccaggaaatgcatgaggggtccaggtgggagaaaccacctcaaagcacaccaggcatttgtacattgtgtacaagtctaaacaacaagcttctcccaagcactttttatgt

SEQ ID NO: 774423 - DNA, 628 bp, Homo sapiens
tgactttctagagggccaaagaacaataacatctgctgattatgagagtgttgagaaagttagacaaaactttggcagaaaaacacccgggaaagcttcccagagagtcctttgccaccatggcagggctcctgctcattcctctcatcaaacaagagcaattttctgacagctttgatggaaatcattaggcatccaccttacagccacgattgggctccttctgacttctttttctttcctaatcttaaaacatatgtaaagagcatccatttttcttcatttaataaggtaaaagactggcactgacatggttaagctcttgggatcttcagttctttaggctgattaaatggctggtatcaccatttacaaaagtgtcttgatgttgatggagtttatgttgaaaaataaagtgtgtrtatatatatatatatatatatatatatatatatatatatataaaaattcaattttctcataaactttttgaagtccccttgcatttatagggcactgggtctatgagaggccatgtgctgtttatgatgaaatgactcttaggaaacatgcaccctttgaaagcagggactcaaacaggtccttacacacccatgttcataacctc

SEQ ID NO: 774424 - DNA, 625 bp, Homo sapiens
cgtagcttcttcgtctttatacagatgaccctatgcacggattcaccataatctactcaactagtccctgctgatggaagatgagctgtctctaatccatagctattataaacagtgctgtaataactgatcttatgcacacaacatttcctacatgtgcaaggatatccatagaacgaattcctggaaatgaaattgccaggtcaaagagtctaagcgcctgtaattttgatagatgttacgaaatcattctccatcaggaaagatcacgctgctgccagcaatacttttgagtgccagattccctgcacccctaccaatagtgctttgcctcacatttgactgcagccattttgatttggaaaaaaaaaaaaagaagtcagtatactttaactggaattcctctgtcctgagggagctttagcatgttttcatgtgtaaatgartctttccttatgtgtaaaaactgcctgtttccaaccttcttttattttgatgattgggtcatatttttatggatttctagaaattctgtatgtattagcgagatagcctctcttgagacctggacttacctagctgggacatgtgcctgcggacaagagattataaaaggtacttccct

SEQ ID NO: 774425 - DNA, 606 bp, Homo sapiens
agagattataaaaggtacttccctctggattactggagcgaataggaagcatttgcaagaagatgaatggtcattcaagaaagtttgcgaactccagcccatgagtagcaccgagaacaagtttcatatcggagcagtgtatgtttgcagctttcctatttgctgcttaccaacaatgtcacttagagcaatcatgtagcctatttaagccttggccttcttacctgtaatgtaaaaggcttatcttccygtccctttggcttatggctaacacatattaagaagctgatactgcagtaattacacagggtcaaggtagttggaaacactcccagcgctcctcaaggtgagctcccttcacctgtcctaaaggtaaaggtgcagcaagagaagaaagctccggcagtcacaggggaccccagacacatccaggtgcagctccccagaaccctttcccaggtgatggggagatgtttgcctttggattatgaaccacagaggtgtgtgcaaggaaccttggttttagggagctgaagcagaaacttctagtggcataaataataccccactggtgatgtagccaagccaaaatgtgtaatcagttaa

SEQ ID NO: 774426 - DNA, 585 bp, Homo sapiens
ctaaaaaaaaaggtccctatatacagtaggtgctcaataaccacttgttctcctgacttttctgaggacatttgctctcttggcctccattgctggtaggagccatcatttctgcagctgagcccatcatgcctcctgcagaagagtctggcttcatttccaagacagagtgggtactctggtcagtgctctaaccccgggctggccagccgcctcctcctggctgccaccctccctgagtgactcctgctgtgggactcctcacgctttgggggatccatcctttgaatttgttcacttctcacccctgacgcatgtgaggtgtctaacgatttgaacaccaccaaggtccccaggttccataggtcagactcacrgggcctggctcactgtctggccttctcctcagggcatgtgggctgcatgtctagggctgaaaacccctgcacaaggttttgcagggactaatctcctctgctgtaccccctacaggggctgcatctggcctggctcaggtgcatgcccttatgtgctgtccggaggcagaaggagaacactgacgagggggggctctagagcccgagg

SEQ ID NO: 774427 - DNA, 474 bp, Homo sapiens
ttcctccccgctgttctcatgacaagcgagtgagttctcatgaaatctgatggttttataaatggtagtttttcctgtgctcacacacaccctctctcgcctgcctccatgtaagatgtgcctgcttccccttccaccatgactgtaagtttcctgaggactcccmaaccatgaggaactgtgagtcaattaaagctctttataaacctgtttacaaattacccagtcttgggtagtatctttatagcagtgtgagaactgactaatacaccccatttctaatgctcagaaaacctcagagagtaccaaattgagggacattctaaaaaatcactggccactactcttcaaaagtgtcaaggccaagaaagaaaaagaaagcctgcaaatctgtcttggattgttggaaagcaaggagatgtaacaactaaatgcaatgtgagatcctggatttggatcctgcaccagaaaagg

SEQ ID NO: 774428 - DNA, 650 bp, Homo sapiens
gtgcacacacacacatacacacccctctgactttttaattatacagaactacctataatttccaaaatttccggctggttcaatactttgtgccttggaatgctcctcccctgtttttttatctttgtaactcctaactccagacttggagtcacctcctcaggaaccgtttctctggtgtcaccgctgccgcctcttccatctcagtctgagtgagacacactcctgtgtgctcccagagcacctgtgcttttccttccacactgctggragagctgatatcctgctctctttctttcctgttaggttgtaaacatcttaaaggcatgtcttattttcctttgtgcctcccagggagtggggcatatgctaaacatttaatatgtacctgttaaataaatgaatgaacaaatagatgagtgaattatgggcaatatgctgacaccagatgaaaccttttttttttcttagcctagctggtgcccaacggtcggtttcttagtgtatgggcttcagatcacctgcatcagaatcttctgggttgcttaataaaattcacattctagggccctactttgcacctgttgaattgaaacttctggggatgtagcctgggaatatgaattttatcaagctgtgcaggtgattct

SEQ ID NO: 774429 - DNA, 650 bp, Homo sapiens
gtgcacacacacacatacacacccctctgactttttaattatacagaactacctataatttccaaaatttccggctggttcaatactttgtgccttggaatgctcctcccctgtttttttatctttgtaactcctaactccagacttggagtcacctcctcaggaaccgtttctctggtgtcaccgctgccgcctcttccatctcagtctgagtgagacacactcctgtgtgctcccagagcacctgtgcttttccttccacactgctgggagagctgatatcctgctctctttctttcctgttaggttgtaaacatcttaaaggcatgtcttattttcctttgtgcctcccagggagtggggcatatgctaaacatttaatatgtacctgttaaataaatgaatgaacaaatagatgagtgaattatgggcaatatgctgacaccagatgaaaccttttttttttcttagcctagctggtgcccaacggtcrgtttcttagtgtatgggcttcagatcacctgcatcagaatcttctgggttgcttaataaaattcacattctagggccctactttgcacctgttgaattgaaacttctggggatgtagcctgggaatatgaattttatcaagctgtgcaggtgattct

SEQ ID NO: 774430 - DNA, 611 bp, Homo sapiens
ggacagcatccaggcagagctggtcccactgttatctccagaagcaaatgcccaagctgtgctcagaactggaagcaatggatgacttgtatcaggtgcttgtttgagaggatatattgacattattgccatagtaagcttaaaaaaatgtgcccactcattcattctttgtccatggaccactaatcatgcattgtcatttccaaagataaggggaaacatatcacatatcattgaaatagaaattagggaaagtttgtcaatttgttttcactataaggcatcaatggcagaaactacatatgagtaattttcaaaatagaccrttgcttaaatgtttaaatgaagctaaaagaagtatgaacccattggttagagtgcagtggcttctttcaggcagacagcagatgctctcagatttggtggtgagttttggccttggcatggttggcatggagtcagcacaggaagccgggaggtatgaaggggcatccacctgggtgaaactgtcttgccaagccaaagccccgaggcctgccctgaagcagctgtagtggaggagaggcctgggattccttagagtcacctttttacgaatgtaccgccactct

SEQ ID NO: 774431 - DNA, 611 bp, Homo sapiens
ggacagcatccaggcagagctggtcccactgttatctccagaagcaaatgcccaagctgtgctcagaactggaagcaatggatgacttgtatcaggtgcttgtttgagaggatatattgacattattgccatagtaagcttaaaaaaatgtgcccactcattcattctttgtccatggaccactaatcatgcattgtcatttccaaagataaggggaaacatatcacatatcattgaaatagaaattagggaaagtttgtcaatttgttttcactataaggcatcaatggcagaaactacatatgagtaattttcaaaatagaccattgcttaaatgtttaaatgaagctaaaasaagtatgaacccattggttagagtgcagtggcttctttcaggcagacagcagatgctctcagatttggtggtgagttttggccttggcatggttggcatggagtcagcacaggaagccgggaggtatgaaggggcatccacctgggtgaaactgtcttgccaagccaaagccccgaggcctgccctgaagcagctgtagtggaggagaggcctgggattccttagagtcacctttttacgaatgtaccgccactct

SEQ ID NO: 774432 - DNA, 612 bp, Homo sapiens
gtactacaaaataggtggggagttttttaaaaatagcctccaagtatggaaataattttaacatatgacacaaaacccaggagcaaaggaaaaaaagatgtgtgtacattttcatgctacacatggcaaaacagtctctaaataaaatttaaaaaaactgaaaaaatgaggaagatatttatatctcatattaaagggmtttgcaattcaacaaagataataatcaagtttccactagcaaatctggcaaaggacaacagacaggaccagcagttcatgggaaagaaaaatgcaagcatctcggacacagatgaaatgatactcaccctctcataatcagaaaaccgacacttaaagtcacacttagacatcatttatttgtctttcaagttgccaaacattaaaaaaaaaaggttgacaaaacatagaggtcctctcctatactatgggtgggagtctttcttggtacaagcaaataactgtaaacacttaaataggtatcagtaggagatgggggcattcgtataacgcaatatacggtgcagtctttaagaatgagggaggagctatatgtgtactttatatttcactatcatatcctgtgtaaatatg

SEQ ID NO: 774433 - DNA, 612 bp, Homo sapiens
gtactacaaaataggtggggagttttttaaaaatagcctccaagtatggaaataattttaacatatgacacaaaacccaggagcaaaggaaaaaaagatgtgtgtacattttcatgctacacatggcaaaacagtctctaaataaaatttaaaaaaactgaaaaaatgaggaagatatttatatctcatattaaagggatttgcaattcaacaaagataataatcaagtttccactagcaaatctggcaaaggacaacagacaggaccagcagttcatgggaaagaaaaatgcaagcawctcggacacagatgaaatgatactcaccctctcataatcagaaaaccgacacttaaagtcacacttagacatcatttatttgtctttcaagttgccaaacattaaaaaaaaaaggttgacaaaacatagaggtcctctcctatactatgggtgggagtctttcttggtacaagcaaataactgtaaacacttaaataggtatcagtaggagatgggggcattcgtataacgcaatatacggtgcagtctttaagaatgagggaggagctatatgtgtactttatatttcactatcatatcctgtgtaaatatg

SEQ ID NO: 774434 - DNA, 549 bp, Homo sapiens
ggcaggaatgggtaggcaaggtcaaggcactttctccaaataaggagcaaacgtcctcctgtcttccattacttggcgcagccttctccctccttgacggcataacacgtctagacattgtataaccccctctccctggaaattcactcaaaaataataaatgtgcttcccctgagcctttctcaggcaaaaagcattttaagtaagtttggtttggagaacaaatggtcccagagctgcaccccatgccaggaatcccatccagatgttgctcattaatccacaagaaatgatgatcaccgttgacgatgatagtgatggattcygccactggtttctatcctgggaatttaagtgtttaagtgttcagaatgctttggagtttcctgttgccccttcaggaggctgcattataacccaaaaccccagctctacctgttgctaaggatcttttcacatcgggaggagacagagtgaaatagaaacagtctcagctgtgagatttacatcacagctctgccacttaatagatgcaaaatcttctgcaag

SEQ ID NO: 774435 - DNA, 577 bp, Homo sapiens
tgtccctgctctgtacactgcactgttatctccacacattctcgggtgcgatctttcttcctctttagcaacaagactctgtgccccaggaagcaggacttcactctcaccaagctactctctgctttttattcttatttatcattattattattattattwttaccagtcttgccctgtcgcccaggctggagtgcaatggcaaaatcttggctcactgcaacctcagcctcctgggttcaaaggattctcctgcctcagcctcctgagcaggggtgattacagtcacctgccaccacgcccatctactttttgtatttttagtggagatggggtttctccatgttgcccaggctggtcccaaactcctgacctcatgatctgcccgcctcagcctcccaaagtgctgggattacaggagtgagccaccatgcacggcccctactccctgctcttgatgctgtcacttatagacagcacaggttctattaggagtagactcctcttgaagcccctcagagcaggtactggctactatcaccaagtttccctcagagtcactagaacagagctttgc

SEQ ID NO: 774436 - DNA, 577 bp, Homo sapiens
tgtccctgctctgtacactgcactgttatctccacacattctcgggtgcgatctttcttcctctttagcaacaagactctgtgccccaggaagcaggacttcactctcaccaagctactctctgctttttattcttatttatcattattattattattatttttascagtcttgccctgtcgcccaggctggagtgcaatggcaaaatcttggctcactgcaacctcagcctcctgggttcaaaggattctcctgcctcagcctcctgagcaggggtgattacagtcacctgccaccacgcccatctactttttgtatttttagtggagatggggtttctccatgttgcccaggctggtcccaaactcctgacctcatgatctgcccgcctcagcctcccaaagtgctgggattacaggagtgagccaccatgcacggcccctactccctgctcttgatgctgtcacttatagacagcacaggttctattaggagtagactcctcttgaagcccctcagagcaggtactggctactatcaccaagtttccctcagagtcactagaacagagctttgc

SEQ ID NO: 774437 - DNA, 548 bp, Homo sapiens
aacagcgtgttggcttggctgttgacatggatggtgagtacctttctatgaaggtgataaggatccactgagtcttctggttagggtcatattcctactgcaagtggcccttactgagctgagagatgtcattgccacagggaggwcctataggcacatgtaggttgaatgaaactctagttccacttggaagcccagacaagggatgggtcagtgagcaaggctctcttcctagtctcaggccatgcctgtggcgccctaatcctactctcatgacgttggacctgggcagatgtgacaaattcacacaactctgattttgtctcaattttgtagatcttgtagatttcatccttcactctaatttcagtgtctaaaatcctcgctaccgtgaacaatctgagtatttgatgagacagggctgaatagtgcagtttttctcctagcaaccatttgggggcatttgctttaaatcgattggaaaaatatggcataaccatttgcacaaacttgggacaaatgatattgggataacgatctaccagaat

SEQ ID NO: 774438 - DNA, 646 bp, Homo sapiens
acttactataggttgaccatacctcaaaggctgtatggcaactgcatggaatcttgagcaagtttatggaaaattattgagcccactcttttcatgatcactgttcgctgtgtgtcccgagggcactaactcagagtgtcctttgaccccttcatcagtgtgtcacccggccaactcgctgagctcactttctcctctctctctctctctctctctccctccctctccctgtctttctctttcattcttttctacctggccctggtctatsccaacataaaggcaataattcattacctcattaatggatctgtcctttttctttttaaacagttccttatgttagccatgaaatctagctggggctgtgtggtttctgattccccctggcttattctttactttttcctacttttccaggctcagcagggagctgctggatgagaaagagcctgaagtcttgcaggactcactggatagatgttattcgactccttcaggttatcttgaactgcctgacttaggccagccctacagcagtgctgtttactcattggaggaacagtaccttggcttggctcttgacgtggacagtgagtatcttactgtgaaggtgataagcctccacctggtcttccagataggg

SEQ ID NO: 774439 - DNA, 602 bp, Homo sapiens
gaattactcctcctgacattgctgttggttttcattgcagtagatgtttaggtttccatttcttcctccccttatcatttactaacttactataggttgaccatacctcaaaggctgtatggcaactgcatggaatcttgagcaagtttatggaaaattattgagcccactcttttcatgatcactgttcgctgtgtgtcccgagggcactaactcagagtgtcctttgaccccttcatcagtgtgtcacccggccaactcgctgagctcactttctcctctctctctctctctctctctccctccctctccctgtctttctctttcattcttttctacctggccctggtctatcccaacataaaggcaataattcattacctcattaatggatctgtcctwtttctttttaaacagttccttatgttagccatgaaatctagctggggctgtgtggtttctgattccccctggcttattctttactttttcctacttttccaggctcagcagggagctgctggatgagaaagagcctgaagtcttgcaggactcactggatagatgttattcgactccttcaggttatcttgaactgcctg

SEQ ID NO: 774440 - DNA, 592 bp, Homo sapiens
ggatccactgagtcttccatataaagatcatattcctgctccaagtggccattactgagctgagagatgtcattgccacagggaggacctataggcacatgtaggttgaatgaaactctagttctacctggaagcccaggcaagggatgggtcagtgagcaagactctcttcctagtctcaggccatacctgtggcgccctgatcctattctcatgacattggacctgggcagatgtgacaaattcagagaactatgattttgactcaagggtttgtagatttcctttttcactctaatttcagtgtctaaagtcctcacaaccatgaacaatctgagtatttgatgagacagggctaaatattgcagtttttctcctagaaatcatttgagggtatttgctttaagttgattggaaaaatatggcataactgtttgcasaaacttgggacaaatgatattgggataacgatctactagaatagggacattttacccacagtttctgggagaaaaaccgaggaagttctatcatgaacagccttcaggcctcctgaaatatatctctcaaagtgtcctattcttatgctggg

SEQ ID NO: 774441 - DNA, 455 bp, Homo sapiens
caacatgtttttcctccaatgcataaaaggaacttccatagggctggcaggagtcaggctgttcaagacaactggaaggagttgaataacatctatccagtgagtcctgcaagacttcaggctctactacctccagcagctccctgctgagcctggaaaaggaggaaaaagtaaagaataagccaggggaaatcagacacaacagagccccaactaggtttcatgggtagcatagggaagtggttaaaaaactaaaaggatagatccattaatgaggyaacaaattattgccttcatgttgggacagaacagggccaaatggaaaagaatgaaagagaaagacagatagacacacacacacacacacacacacacacacacacacagagagagagagaacgagctcagtgaattgtccaggtgacacactgatgagggagtaacaggacactctg

SEQ ID NO: 774442 - DNA, 506 bp, Homo sapiens
tccttatcaccttcatagaaaggtactcacctcccacgtcgagagaaaagccaacatgtttttcctccaatgcataaaaggaacttccatagggctggcaggagtcaggctgttcaagacaactggaaggagttgaataacatctatccagtgagtcctgcaagacttcaggctctactacctccagcagctccctgctgagcctggaaaaggaggaaaaagtaaagaataagccaggggaaatcagacacaacagagccccaactaggtttcatgggtagcatagggaagtggttaaaaaactaaaaggatagatccattaatgaggtaacaamttattgccttcatgttgggacagaacagggccaaatggaaaagaatgaaagagaaagacagatagacacacacacacacacacacacacacacacacacacagagagagagagaacgagctcagtgaattgtccaggtgacacactgatgagggagtaacaggacactctg

SEQ ID NO: 774443 - DNA, 594 bp, Homo sapiens
tctctcagctcagtaatggccacttggagcaggaatatgatctttatatggaagactcagtggatccttatcaccttcatagaaaggtactcacctcccacgtcgagagaaaagccaacatgtttttcctccaatgcataaaaggaacttccatagggctggcaggagtcaggctgttcaagacaactggaaggagttgaataacatctatccagtgagtcctgcaagacttcaggctctactacctccagcagctccctgctgagcctggaaaaggaggaaaaagtaaagaataagccaggggaaatcagacacaacagagccccaactaggtttcatgggtagcatagggaagtggttaaaaaactaaaaggatagatccattaatgaggtaacaaattattgccttcatgttgggacagaacrgggccaaatggaaaagaatgaaagagaaagacagatagacacacacacacacacacacacacacacacacacacagagagagagagaacgagctcagtgaattgtccaggtgacacactgatgagggagtaacaggacactctgagttagtgccctcaggacacacag

SEQ ID NO: 774444 - DNA, 547 bp, Homo sapiens
acctcccacgtcgagagaaaagccaacatgtttttcctccaatgcataaaaggaacttccatagggctggcaggagtcaggctgttcaagacaactggaaggagttgaataacatctatccagtgagtcctgcaagacttcaggctctactacctccagcagctccctgctgagcctggaaaaggaggaaaaagtaaagaataagccaggggaaatcagacacaacagagccccaactaggtttcatgggtagcatagggaagtggttaaaaaactaaaaggatagatccattaatgaggtaacaaattattgccttcatgttgggacagaacagggccaaatggaaaagaatgaaagagaaagacagayagacacacacacacacacacacacacacacacacacacagagagagagagaacgagctcagtgaattgtccaggtgacacactgatgagggagtaacaggacactctgagttagtgccctcaggacacacagcatacagggatcatgaaaagactgtgctcaataattttccataaa

SEQ ID NO: 774445 - DNA, 582 bp, Homo sapiens
attgccttcatgttgggacagaacagggccaaatggaaaagaatgaaagagaaagacagatagacacacacacacacacacacacacacacacacacacagagagagagagaacgagctcagtgaattgtccaggtgacacactgatgagggagtaacaggacactctgagttagtgccctcaggacacacagcatacagggatcatgaaargactgtgctcaataattttccataaaatgtgctcaagtttccatgcagtcgccatgagaatacagtttttgaagtctggtccacctacagtaggttagtaaatgataaggggaggaagaaatggaaacctaaatatctactgcaatgaaaaccaacagcaatgttagtaggaataattcaggcttgctggaaaagatgtaatcgataatgtcagcccgctctgttttccctgaaccaggagtctccagatgtcaacacagaagtagctgttcacaattgctcagttacctggggcatggtgggccttggtcttcttcctcttcttggtcctttttagttcctgcaatacattcagacagggacagacaaa

SEQ ID NO: 774446 - DNA, 477 bp, Homo sapiens
caatgcataaaaggaacttccatagggctggcaggagtcaggctgttcaagacaactggaaggagttgaataacatctatccagtgagtcctgcaagacttcaggctctactacctccagcagctccctgctgagcctggaaaaggaggaaaatgtaaagaataagccaggggaaatcagacacaacagagccccaactaggtttcatgggtagcatagggaagtggttaaaaaactaaaaggatagatccattaatgaggyaacaaattattgccttcatgttgggacagaacagggccaaatggaaaagaatgaaagagaaagacagatagacacacacacacacacacacacacacacacacagacacacacacagacacacacacacacagagagagaacgagctcagtgaattgtccaggtgacacactgatgagggagtaacaggacactctgagttagtgccctcaggac

SEQ ID NO: 774447 - DNA, 545 bp, Homo sapiens
cctttctcatccagcagctccctgctgagcctggaaaagtgggaaaaagtaaagaataagccagggggaatcagaaaccacacagccccagctagatttcatggctaacgtaaggaagagtttgaaaagaaaaaggwcagatccattaatgaggtaacaaattattgcctttatgttgggatagaacagggccaggtagaaaacaatgaaagagaaagacagagagagagagacagagacagagagagagacagagacagagacagagagaaagtgacctagtgaattggccaggtgacatactggtaagggagtaaaaggacactctgagttagtgccctcatgacacacagcaaactgtgatcatgaaaagagtgagctcaatagttttccataaaatatgctcaaaattcgatgcagtggccatgagagtacagcttttgaagtatggtcaacctatggtacgttaggaaatgataaggggaggaagaaatggaaacctaaacatctactgcaatgaaaaccaacagcaatgacagtaggag

SEQ ID NO: 774448 - DNA, 587 bp, Homo sapiens
aatggccacttggagcaggaatatgatctttatatggaagactcagtggatccttatcaccttcatagaaaggtactcacctcccacgtcaagagaaaagccaacatgtttttcctccaatgcataaaaggaacttccatagggctggcaggagtcaggctgttcaagacaactggaaggagttgaataacatctatccagtgagtcctgcaagacttcaggctctactacctccagcagctccctgctgagcctggaaaaggaggaaaaagtaaagaataagccaggggaaatcagacacaacagagccccaactaggtttcatgggtagcatagggaagtggttaaaaaactaaaaggatagatccattaatgaggtaacaaattattgccttcatgttgggacagaacagggccaaatggaaaagaatgaaagagaaagacagatagacacacacacacacacacacacacacacacacacacacacagacacacacacacacasagagagagagaacgagctcagtgaattgtccaggtgacacactgatgagggagtaacaggacactctgagttagtgccc

SEQ ID NO: 774449 - DNA, 601 bp, Homo sapiens
aatggccacttggagcaggaatatgatctttatatggaagactcagtggatccttatcaccttcatagaaaggtactcacctcccacgtcgagagaaaagccaacatgtttttcctccaatgcataaaaggaacttccatagggctggcaggagtcaggctgttcaagacaactggaaggagttgaataacatctatccagtgagtcctgcaagacttcaggctctactacctccagcagctccctgctgagcctggaaaaggaggaaaaagtaaagaataagccaggggaaatcagacacaacagagccccaactaggtttcatgggtagcatagggaagtggttaaaaaactaaaaggatagatccattaatgaggtaacaaattattgccttcatgttgggacagaacrgggccaaatggaaaagaatgaaagagaaagacagatagacacacacacacacacacacacacacacacacacacacagacacacacacacacacagagagaacgagctcagtgaattgtccaggtgacacactgatgagggagtaacaggacactctgagttagtgccctcaggacacacagcatacag

SEQ ID NO: 774450 - DNA, 537 bp, Homo sapiens
actcagtggatccttatcaccttcatagaaaggtactcacctcccacgtcgagagaaaagccaacatgtttttcctccaatgcataaaaggaacttccatagggctggcaggagtcaggctgttcaagacaactggaaggagttgaataacatctatccagtgagtcctgcaagacttcaggctctactacctccagcagctccctgctgagcctggaaaaggaggaaaaagtaaagaataagccaggggaaatcagacacaacagagccccaactaggtttcatgggtagcatagggaagtggttaaaaaactaaaaggatagatccattaatgaggtaacaaattattgccttcatgttgggacagaacagggccaaatggaaaagaatgaaagagaaagacagatagacacacacacacacacacacacacacacacacacacacagacasacacacacacacagagagaacgagctcagtgaattgtccaggtgacacactgatgagggagtaacaggacactctgagttagt

SEQ ID NO: 774451 - DNA, 678 bp, Homo sapiens
ctttatatggaagactcagtggatccttatcaccttcatagaaaggtactcacctcccacgtcgagagaaaagccaacatgtttttcctccaatgcataaaaggaacttccatagggctggcaggagtcaggctgttcaagacaactggaaggagttgaataacatctatccagtgagtcctgcaagacttcaggctctactacctccagcagctccctgctgagcctggaaaaggaggaaaaagtaaagaataagccaggggaaatcagacacaacagagccccaactaggtttcatgggtagcatagggaagtggttaaaaaactaaaaggatagatccattaatgaggtaacaaattattgccttcatgttgggacagaacagggccaaatggaaaagaatgaaagagaaagacagatagacacacacacacacacacacacacacacacacacacacagacacacacacacacacagagagaacgagctcagtgaattgtccaggtgacrcactgatgagggagtaacaggacactctgagttagtgccctcaggacacacagcatacagggatcatgaaaagactgtgctcaataattttccataaaatgtgctcaagtttccatgcagtcgccatgagaatacagtttttgaagtctggtccacctacagta

SEQ ID NO: 774452 - DNA, 538 bp, Homo sapiens
agccaacatgtttttcctccaatgcataaaaggaacttccatagggctggcaggagtcaggctgttcaagacaactggaaggagttgaataacatctatccagtgagtcctgcaagacttcaggctctactacctccagcagctccctgctgagcctggaaaaggaggaaaaagtaaagaataagccaggggaaatcagacacaacagagccccaactaggtttcatgggtagcatagggaagtggttaaaaaactaaaaggatagatccattaatgaggtaacaaattattgccttcatgttgggacagaacagggccaaatggaaaagaatgaaagagaaagacagatagacacacacacacacacacacacacasacacacacacacagacacacacacacacacagagagagagaacgagctcagtgaattgtccaggtgacacactgatgagggagtaacaggacactctgagttagtgccctcaggacacacagcatacagggatcatgaaaagactgtgctcaataatttt

SEQ ID NO: 774453 - DNA, 580 bp, Homo sapiens
aatggccacttggagcaggaatatgatctttatatggaagactcagtggatccttatcaccttcatagaaaggtactcacctcccacgtcgagagaaaagccaacatgtttttcctccaatgcataaaaggaacttccatagggctggcaggagtcaggctgttcaagacaactggaaggagttgaataacatctatccagtgagtcctgcaagacttcaggctctactacctccagcagctccctgctgagcctggaaaaggaggaaaaagtaaagaataagccaggggaaatcagacacaacagagccccaactaggtttcatgggtagcatagggaagtggttaaaaaactaaaaggatagatccattaatgaggtaacaaattattgccttcatgttgggacagaacagggccaaatggaaaagaatgaaagagaaagacagatagacacacacacacacacacacacacagacacacacacacagacacacacacacacasagagagagagaacgagctcagtgaattgtccaggtgacacactgatgagggagtaacaggacactctgagttag

SEQ ID NO: 774454 - DNA, 587 bp, Homo sapiens
ggttgatctatatttttctactgggatgctgagaaacatagtactgaccctgcgagatagagatgaagtgtattagcttgtgatttatgatgtcatgttcagagtccaaaattcaccttttgtaccagcttgcttacattgtttattaaatgtgaatagatggtggtgtgcatctggtttcagctgagtgaccagtgagatataaatgagtcaggcaaacttccaccttagctcacctgggactaaagcatctcacatctattttggtaattcacagtcaggagatggagyacctgctgtgtggctgggaaagggctctgagagctatgcatggacttctctgatattttcttatgctttcttctcctgctgtactatctatcttcattaaagcctcgtatgactgacccctgtggagtctcctgaggcttctcaattatctgacctctagtaattgccataacaatatataatatcagcccttttacttgtgaaatgtaaatgcttgtgtgtctataagaattaaatacaaataaaattgatacagtttttattagtttagtgatataataattaaagtaagagtt

SEQ ID NO: 774455 - DNA, 511 bp, Homo sapiens
taacatcagcttgtagtgctttgttgatcctttctcatatcatcatgatcgtcttatccatgaacttatttctttctgtcaaaaaattaattcagctttctcaatctcttgggaattttctttctttgcttcaagaacatctcatttgggttaatgttcctaaataaattaatttccaaacttataaaatatataatctactttcacagcgtctaatttctcatgacatggtcatttctctttcagttgcagtttagcttttatcccaaatcagtgccgacattgttttcccaggtatagaatgtgatctatgcgacaaaagaaagaccatttttggtrtttatttgcatttattctctctacagaactgccattgttagtgttttcctgtttttcacatttcattttatttttaacttttatagccacctagtaggcttatatgtttatggggttcatgagatattttgacacaaacataaaattttgtttgtttttaaatctgttctct

SEQ ID NO: 774456 - DNA, 634 bp, Homo sapiens
gtctttattataatgtcagtgtgatttggcctcaagatcagaccgcaggaaacaaaatttctctctctgaaattctcctgtccttttatttggccaagataggactctaatctttttttggtttaaaagatccttattccagagcagtcctgccccatacatataggatgaaatcatagtaatagccatgtgcccttttgatgcaatcacacagctacatgtggacacctctatatgtgattggacaaaaaggctrcatggttgtcagtcacacctatttaagcctccataaaacccccaaaggacagggtttgaagaacttctggagagctgaacaagtggaggttcctggaggatgacttgccaaaggaggtttagggaacctaggtgccccttccctcatactttgtcctgtgcatcttttcacctgtatcttttgtaatatcttttaaaataaactggtaaacaaaagtaagagtttttctgggttctttgaactgcttcagaaaattaatgaaagccaaagatggagtcatggaaactttgacttgaagacggttggtcagaagttctggagtctaggactcgtaatagatctctagtggggggcatacatcaggactgaactctcaat

SEQ ID NO: 774457 - DNA, 627 bp, Homo sapiens
tgaaaatactcgactggcttagcctctgagtctacatctttctctcatgctggctgccttctgccctcgaacatcagactccaagttcttcagctttaggactcagactggcttccttgctcagcttgcagacgamcttacctcgtgaccatgtgagttaatactccttaataaactcccctttatgtatacatctatcctattaattctgtccctctggagaaccctgactaatacacaaggcttcatgcaaataaaataaaataaaatcttgagaatccatgtttcagtaatccagccaccaattggtagtttatgacttgaattacttggctctcaataaagattcagtagacacgttatacctggaagagaacattttattatttgtaagaataccctaacagaatttttatttattatgatgatattgaattttattaaaactatattgttcaaagaatcccttacagaacaattaatatcatgaattactcagagatattaatgaaagaaataaaccaatatttcccattgcaaaactggaatgccctctcattagagaacgagcattttgtccaggtgtggtggcgcatatctgtaatcccagcactttgggaggcagag

SEQ ID NO: 774458 - DNA, 571 bp, Homo sapiens
tttgatttgtagaaactataaaattatttgataaaaagttgtaaaattattccaagcattaatgtaaatctaatgtaattagattgaattacattaatatcatgtaatccaatctaatgtaattgggatacattagatgctagtttaaatatagaaaaattgggtaaaatcttccccaagaactgtttttttttttttttttttttttgagatggagtctagctctgtcgcccaggctggattgcagtgggcactgccctcggctcactgtgagttctgcctcccgggtttgtgccattctcctgcctcagcctcccgagtagctgggactagaggcgcgcaccaccacgcccggctaattttttttccgtatttttagtacagacagggtttcaccrtgttagccaggatggtctcgatctcctgacctcgtgatccgcctgcctcagcctcccaaagtgctgggattacaggcgtgagccaccgtgcccggccaagaactgttatttttagtttatttctgttactaaatgctactaataccaacttgaaagcatatattatgtaatga

SEQ ID NO: 774459 - DNA, 613 bp, Homo sapiens
tttctagttatcagtctgttttaattattttgatccaaagttttcctatcaattcaagggagagatgttttgctttttttttttttttcctttgagatggagtcttgctctattgcccaggctagagtgcagtggcgagatatcggctcactgcaacctctgcttcctgggttcaagcrattctcctgcctcagcctcctgagtagctgggactacaggcgtccgccacacacccagctaatttttctttcttgtatttttagtagagatggggtttcaccgtgttggccagggtggtctcaatcttctgacctcgtgatccacctgcctcggcctcccaaagtgctgggattacaggcgtgagccatggcactcagccgggagaaacgtttttcttggaaagctaggatgctgtggcctgtgaagaaaacaaagataacacctgatgtcttctacattgtccagaaaaaatgaaggatgcaacaactgtagctgagatgagtaccttctaaaaatagagaattattaaggaattataaacatgttatgtttatacactgttttctgttaagcctctttattttaatataatctgctgacagttacttttgtt

SEQ ID NO: 774460 - DNA, 658 bp, Homo sapiens
tccacatgtctttataatgtctgctaaaatattttgcctaatttttattaggctgtttgttgttatattattgagttctgactgttctttttatataaatatataaacaagttgggtatcaaatatatatttgtccttatttatgaaaagccaccagtaagagccttctcattttctttgaagtaacctttaaagaatataaaattttcattatttttcttatatagtttttaattttgtrtcctctctaagaaataattgcctaacataagatgacaaaaatttttttacccaagttctcttctatacgttttatagttttggctgtaagttatctataatacatatttagctaatttacatatgatttagggaaatactggaggttcttttaaactttttttaacctctatttttgccattgctatctccaacatctagttcatatttagcctctgttaacattttcctttgttaacaatggatcaaatttttttactttgtttcttgatttttgattatattctagatattttgctgaaaatatgtagacacagaaataaaaatcattttctcaaggaaaagtcttgccccttttgcctttcatctagctagtaagaatgacagtcaattgagtgtttacttgagtgaatctagg

SEQ ID NO: 774461 - DNA, 659 bp, Homo sapiens
atacagaatcatttcactgcctaaaacccctgtgctccacctattcattcctcccttccctcaaacccctggcaactactgatcattttactgtctctatcgttttgccttttctagaatgccgtatagttagtatcatcagctaggacttttttttttttttttttttttgaggcaraatctcgctctgttactcaagctggagtgcagtggtgcaaacttggctcactgcaagctccgcctcccaggttcaagcgattctcctgcctcaaccttccaagtagctgggattacaggcatgtgccaccatgcccagctaatttttgtatttttagtaaagacaggattttgccatgttgcgcaggctggtctccaactcctgacctcaagtaattggcccgcctcaacctcccaaagtgctgggagtacaggcgagagccacctcgcctggccatcagctaagctttttaaagagactttaataagtaactatttacagaagtgtgggcaggcctaaaggaagccaccagggatgcctgggcactcagggactagtaagtagagaaggcatcactacccccaggcccccaggccagaagatgtaaccagaatctggttaagagttagttctatgcagaggatccatcccatggaggcta

SEQ ID NO: 774462 - DNA, 659 bp, Homo sapiens
atacagaatcatttcactgcctaaaacccctgtgctccacctattcattcctcccttccctcaaacccctggcaactactgatcattttactgtctctatcgttttgccttttctagaatgccgtatagttagtatcatcagctaggacttttttttttttttttttttttgaggcaaaatctcgctctgttactcaagctggagtgcagtggtgcaaacttggctcactgcaagctccgcctcccaggttcaagcgattctcctgcctcarccttccaagtagctgggattacaggcatgtgccaccatgcccagctaatttttgtatttttagtaaagacaggattttgccatgttgcgcaggctggtctccaactcctgacctcaagtaattggcccgcctcaacctcccaaagtgctgggagtacaggcgagagccacctcgcctggccatcagctaagctttttaaagagactttaataagtaactatttacagaagtgtgggcaggcctaaaggaagccaccagggatgcctgggcactcagggactagtaagtagagaaggcatcactacccccaggcccccaggccagaagatgtaaccagaatctggttaagagttagttctatgcagaggatccatcccatggaggcta

SEQ ID NO: 774463 - DNA, 659 bp, Homo sapiens
atacagaatcatttcactgcctaaaacccctgtgctccacctattcattcctcccttccctcaaacccctggcaactactgatcattttactgtctctatcgttttgccttttctagaatgccgtatagttagtatcatcagctaggacttttttttttttttttttttttgaggcaaaatctcgctctgttactcaagctggagtgcagtggtgcaaacttggctcactgcaagctccgcctcccaggttcaagcgattctcctgcctcaaccttccaagtagctgggattacaggcatgtgccaccatgcccagctaatttttgtatttttagtaragacaggattttgccatgttgcgcaggctggtctccaactcctgacctcaagtaattggcccgcctcaacctcccaaagtgctgggagtacaggcgagagccacctcgcctggccatcagctaagctttttaaagagactttaataagtaactatttacagaagtgtgggcaggcctaaaggaagccaccagggatgcctgggcactcagggactagtaagtagagaaggcatcactacccccaggcccccaggccagaagatgtaaccagaatctggttaagagttagttctatgcagaggatccatcccatggaggcta

SEQ ID NO: 774464 - DNA, 588 bp, Homo sapiens
gagttccaagctctctctctggaagggagcctctgcaggctcagagaccaggccaccgcagctcctgtccctctcagatttcttcggcccacccacaccctagcctgtctctcccctttggccaccaccccagtacttggtttgtgaggggtatataagaggctgcctcgctttgtggaacagggccaggatctcaggttagagaggagacagcatgtgttgagttcccacatggtttcatatgaagactgtgtgttaacgggatcggcrtgttctcctgagacccagcattccctgaggtgtctgccacgtggcgtggagggagggaaggctccaggtttctcacccttcatcagcaggaacagcttccttttcgtgtcttaccactgtaatcgtttgtttgaacaagagttttattgctgaaaagacatcacaaacaagttttgaaggccaccaatgacagccccttcctcaagcactgccttcacctcactggcctctttccctaggatccagagggaggctgaggccattcaaagccaccccaacacacaccccacccagcaccaccccctgtttatccccagc

SEQ ID NO: 774465 - DNA, 588 bp, Homo sapiens
gagttccaagctctctctctggaagggagcctctgcaggctcagagaccaggccaccgcagctcctgtccctctcagatttcttcggcccacccacaccctagcctgtctctcccctttggccaccaccccagtacttggtttgtgaggggtatataagaggctgcctcgctttgtggaacagggccaggatctcaggttagagaggagacagcatgtgttgagttcccacatggtttcatatgaagactgtgtgttaacgggatcggcatgttctcctgagacccagcattccctgaggtgtctgccacgtggcgtggagggagggaaggctccaggtttctcacccttcatcagcaggaacagcttccttttcgtgtcttaccactgtaatygtttgtttgaacaagagttttattgctgaaaagacatcacaaacaagttttgaaggccaccaatgacagccccttcctcaagcactgccttcacctcactggcctctttccctaggatccagagggaggctgaggccattcaaagccaccccaacacacaccccacccagcaccaccccctgtttatccccagc

SEQ ID NO: 774466 - DNA, 625 bp, Homo sapiens
tgtatgacacatatattcaatggctaatcacgaggcattatttcaatacttatcttctacctttttcctccccgtaatccagaaagactggaatctgcatgatgttcaattctgtcaataaaatcataatttcttgcattttacgtagctttgcttttccagtgaagtcaaagacccttatgaagaaccttctcctggaaacggggtgcctggttgttcatgcatagtgaccatttgttttgtggtctgatcagcaatattttctttgagctccatccctcatcctatttcatattaatatattcagttcrttacccccaaccttcacccaaaggtggccacatgacccattgaccaatcagagacttccctgggatttttactacagctattaaaaatatttctttttttcctcagattgtaacataggggccaccagcagccatctcatttattgtatagaattagagaagcatgattaaatcatctgttcccctcaaaagaccaaatatctagggattcttatttataagaacccaaataaatctttctgttcttattgcttaaactggtttcatttgaatgcctccaatttgtatgtcagagtccccactaatgcaactga

SEQ ID NO: 774467 - DNA, 684 bp, Homo sapiens
cataagttttctgtcatcctcatagccctgcaatggtaaattttgtcatgttctcatatttgaattgattttctcacttttaatatatttttcctaatctgaagttatgtgagtgaagggattatatactttaattattgcttttataaaaaatatcttgaatgaatgactctttataaaatatggaattggaacaagggtcattcatgttttaggattaagaaaaactttagagtggaacaatttgaaatgtatgggttttgtcttacaatggaatagagcttcagcttaaaaaaaaaagacagttggtggaaggtaagggcttttactgcttttctgaaacttcacatcacatcatgagttttgaaagatcaggtaagtatatatgttgtcttagtagccagaaagccagactgagagccccagtcaaatgtctgaattggtggggaagtgacagtacgatgacgcaggtagataaagcagrcatttacttgcattagaaagtcccaagctctcctagccaaaaagtatttcactagcactgtcaaaagttatatagaaagaagaccttagagtctgaccttttccctggtccttctttctttagtggaaatgccaaaatactgagaaccattctaaatggaggaaaagagcagggcaagatagggaacaagtaagtgacct

SEQ ID NO: 774468 - DNA, 628 bp, Homo sapiens
gaccctgggcttcacacagctcttgtttcactgaaatccctcagcactccactcctaaaggtaatacctttatgtctggaaggttattatgcaaatgattttttaaaatattcctgcatatttttgtgctatttataatgtcatttataattcaccgcatatttacatttagtggctacattaacacttcagtgagtgtttataatgccatatatctttttctrcttggtccagttctttttttattttattttttttttgagatggagtcttgctgtgtcacccaggccagagtgcagtggcatgatctgggctcactgcaagctctgactcccgggttcatgccattctcctgcctcagcctcccgagtagctgggactacaggcacccgccaccaccccagctaatttttttgtgtttttagtagagacagggtttcactgtgttaaccaggatggtctctatctcctgaccttgtgatctgcccgccttggcctccaaaaatgctgggattacaggcatgagccactgcacccagccctccagttctaattttatcttctattttgcccatgagtaggcgttttctatattttagatattagcaagaccattgctgatgtggaa

SEQ ID NO: 774469 - DNA, 628 bp, Homo sapiens
gaccctgggcttcacacagctcttgtttcactgaaatccctcagcactccactcctaaaggtaatacctttatgtctggaaggttattatgcaaatgattttttaaaatattcctgcatatttttgtgctatttataatgtcatttataattcaccgcatatttacatttagtggctacattaacacttcagtgagtgtttataatgccatatatctttttctgcttggtccagttctttttttattttattttttttttgagatggagtctygctgtgtcacccaggccagagtgcagtggcatgatctgggctcactgcaagctctgactcccgggttcatgccattctcctgcctcagcctcccgagtagctgggactacaggcacccgccaccaccccagctaatttttttgtgtttttagtagagacagggtttcactgtgttaaccaggatggtctctatctcctgaccttgtgatctgcccgccttggcctccaaaaatgctgggattacaggcatgagccactgcacccagccctccagttctaattttatcttctattttgcccatgagtaggcgttttctatattttagatattagcaagaccattgctgatgtggaa

SEQ ID NO: 774470 - DNA, 635 bp, Homo sapiens; identical to SEQ ID NO: 756856

SEQ ID NO: 774471 - DNA, 576 bp, Homo sapiens
ttgtacctcccataattcccaagtgtcatgggagggacccagtgggagataattgaatcatgggggattgaggggagtctttaccatgctattctcatgatcatgaataagtctcacggaatctgatggttttataaaggggagttcctctgcacatgctctctcttgcctgccaccacagtaagaagtgactttgctcctcatttgccttccaccatgattgtgaggcctccctarccatgtggaactgtgagtccattaaacctcttttttttttttttttttttttttttgcaaattacccagttttgggtatgtctttattagcaatgtgaaaacaaactaatacaggttgcaaaagttcacaggacgtttaagccatgaccaagggcatggagtttatactaaatgaaatggaaagccgttggagggtttgtagcagggaagtaacatgacttgatttatggttttaaatgatcctcctggcagccatctggaggactaatagcaagggaataagaatggaagcatcagcccaaagcttctgcagaaatgagaaaagattttggtttaaac

SEQ ID NO: 774472 - DNA, 628 bp, Homo sapiens
atatcagcataattctgcttgccaccttccattttcatatatctgagtttgcatttctaatcccaatgcaggagtcaaaattttttttaaaagccaggattacaggacttaaggtctacttttagtatcaaataatttataagtataaatttaaagtataagtataatacaacatttctagcacatggaaaattcaggagaaaaaargaaaaaaatattgattcataacccaaattatcaggtgcaaatattttgaagtattaagttttataatttattattattgttaagaatattacattttattgtatatacaatttttaacttgtttaactaaattaaggaattgtcatcatacttaaacatttgatggttatataatacatcatataataatctattgtatgtttataataatctatagtatatttcaaaatagctagaagagaattattggaatgtttctagcataaggaaaagatatttaaggtgctggatatcccaattacatcgacttggtctttataacttataggaatatattaaataagcagatatactctgaagacatgtatatctattatgtattaaaaaaattaaattatatatattaaaaagtacattagaa

SEQ ID NO: 774473 - DNA, 628 bp, Homo sapiens
atatcagcataattctgcttgccaccttccattttcatatatctgagtttgcatttctaatcccaatgcaggagtcaaaattttttttaaaagccaggattacaggacttaaggtctacttttagtatcaaataatttataagtataaatttaaagtataagtataatacaacatttctagcacatggaaaattcaggagaaaaaaggaaaaaaatattgattcataacccaaattatcaggtgcaaatattttgaagtattaagttttataatttattattattgttaagaatattacattttattgtatatacaatttttaacttgtttaactaaattaaggaattgtcatcatacttaaacatttgatggttatataatacatcatataataatctattgtatgtttataataatctatagtatatttcaaaatagctagaagagaattattggaatgtttctagcatraggaaaagatatttaaggtgctggatatcccaattacatcgacttggtctttataacttataggaatatattaaataagcagatatactctgaagacatgtatatctattatgtattaaaaaaattaaattatatatattaaaaagtacattagaa

SEQ ID NO: 774474 - DNA, 578 bp, Homo sapiens
actataagcaatcaagaaaagccatggagcaccctcaacacattgctcagagatttatttggccacatattccagcccatcactctaaagttctgccttccctgccttccactgagtactagagcatggacacaattcatccatttctttgmcactttttaacaagggtgacgtttccttcatttccaataatatagtcctcatttttatctaatacctcatcagaatggtctttacccaaagcacctttcagattaaatgaaatccctttaaaaatatcaatgcattcttcacagaaattaaaaaaataatcctaaaatttatatggaaccacaaaacacccagaatagccaaagctatcctaagcaaaaagaacaaaactggagcaattacattaccagacttcaagttatactacagagctataataacaaaaacagcaaggtactggcataaaacaaacacacagaccaatggaacagaatagagaacccagaaacaaatccacacacctgcagtgaactcatttttaacaaggtgtcaaaaacatacactagagaaaagacactctcttcaat

SEQ ID NO: 774475 - DNA, 578 bp, Homo sapiens
actataagcaatcaagaaaagccatggagcaccctcaacacattgctcagagatttatttggccacatattccagcccatcactctaaagttctgccttccctgccttccactgagtactagagcatggacacaattcatccatttctttgacactttttaacaagggtgacgtttccttcatttccaataatatagtcctcatttttatcyaatacctcatcagaatggtctttacccaaagcacctttcagattaaatgaaatccctttaaaaatatcaatgcattcttcacagaaattaaaaaaataatcctaaaatttatatggaaccacaaaacacccagaatagccaaagctatcctaagcaaaaagaacaaaactggagcaattacattaccagacttcaagttatactacagagctataataacaaaaacagcaaggtactggcataaaacaaacacacagaccaatggaacagaatagagaacccagaaacaaatccacacacctgcagtgaactcatttttaacaaggtgtcaaaaacatacactagagaaaagacactctcttcaat

SEQ ID NO: 774476 - DNA, 624 bp, Homo sapiens
agtgtcaacaccaaatcttaataacttctcaaattcaacacatttaagtcctttctttggaattatgaccaaatcaaggatctagagattcaggctctcttagcatctttttgatacttgctcttctcatcaatttctagtttcccttctctagttaactgraggatagggtttaacttccctttttcccccactctttcttctacagtcacagaagcacaactccccacatccgtgcactaggtacagcttagtgaccaacaccttcggtactgctaaggatccctacagaagttctgcctctactgtcaactagcagagctatgaggccttggcccagacccatcacctctctgggattcaatgccctcatctctagaactatgtggcctccagagtctgtttgctctcagaatctttgacgtcatgattccttaccataacaagtatcatttataaatgaaggtaaaaatggtcaactttaaaattaataataataatagtatgagaaaataaattcagtaaaactaggcctcttagacagacaatcaaaatgcaacagaaatccctgaaagattcaattgcttcagtttcttagaacccagtgagtaaatagatcatctt

SEQ ID NO: 774477 - DNA, 624 bp, Homo sapiens
agtgtcaacaccaaatcttaataacttctcaaattcaacacatttaagtcctttctttggaattatgaccaaatcaaggatctagagattcaggctctcttagcatctttttgatacttgctcttctcatcaatttctagtttcccttctctagttaactgaaggatagggtttaacttccctttttcccccactctttcttctacagtcacagaagcacaactccccacatccgtgcactaggtacagcttagtgaccaacaccttcggtactgctaaggatccctacagaagttctgcctctactgtcaactagcagagctatgargccttggcccagacccatcacctctctgggattcaatgccctcatctctagaactatgtggcctccagagtctgtttgctctcagaatctttgacgtcatgattccttaccataacaagtatcatttataaatgaaggtaaaaatggtcaactttaaaattaataataataatagtatgagaaaataaattcagtaaaactaggcctcttagacagacaatcaaaatgcaacagaaatccctgaaagattcaattgcttcagtttcttagaacccagtgagtaaatagatcatctt

SEQ ID NO: 774478 - DNA, 631 bp, Homo sapiens
ttttagttttttcctgactaaactcttatggagatgacatgaaattttatttggagtacaatctaaatacttcttatgattcttctatgtttggttttgctttagttgcttgttggatttgtcagctaaatatattgttttataaaagagaaggaagctaggcacttctatttttactttaacaaaagtacatcaagaaaactttctccccacagaaacagtaacagatctttgtgattcagatatttagttactatcttctctctgaaagaaaataccagaattgttttacctataggtatattcttcaatttgtcactggtgaaatgccctgaaatatttaggccttgtttaacctagaaattctagcagttttggagacagcaacgctgttaakaatttttttcctgaacgcagttacagtaaatgataactgaaatttcttcccctatatcctaacctaacccagaaactatgaagtaatcttcctgaattattttgtgtccatccgaggaagaggaagaaaaatggataagggatttttctcttttggattctttgtgtgatctcaagggcttaaaacattaattatctactctcaaatgaaactgctgacaccattcttttgatg

SEQ ID NO: 774479 - DNA, 542 bp, Homo sapiens
taaacatctcctaaaaaaggtcagatgagataaagacagtttgtttcagtttagctagagtcaccatcagttttaactcatctaaggactaaaaaccagaatgcttttacagcctttcatcaacagcaaagaacaatttagtctgaagagacacaatttacagattgttaactgcagtttcacataatctttttgaaaatttgcaagattgtagcggaaaaaaagtaaatagccctatgattaaagttacattgccagtgtttgattctaaagggaccaatgttcaaaagctgctatggatcccatgctrgaaggtgaggtactcaatgtacaaagcacttgcctctcccctcatctcaccaccatcactaacatacccaggattatgggttggcctctgtggctatgagcaagccaccagcccaactgctgccatgttctcttctgcaaaggaactatccacagagactagcactcagtgtacttcaaaaatgaaaggataaacttagccttaggacgcctatccacatgccaggctggga

SEQ ID NO: 774480 - DNA, 637 bp, Homo sapiens
ttcagctcatgcacagtgcgctgcacccactgtcctgcacccactgtctggcacaccccagtgagatgaacctggcacctcagttggaaatgcagaaatcacccgtcttctgtgtcgctcacgttgggagctgtagaccagagctgttcctattcagccatcttggctcctcccagcaacaaagactttttaaagaggaaaaaracactggctaacttatctagattttaaaaaacttaaacattagtaaatcaattaaagcattacattttttaaaatgcatcatgattaaaggatttattccaaaaaatcaagtttggcttaacattatcagaatgtccagacagggcacggtggctcacggctgtaatctcagcactttgggaggctgaggcaggcggatcacgaggtcaggggttcaagaccagcctggtcttgaaaccctgtctctactaaaaatacaaaaattagccaggtgtgatggcatgcgcctgtaatcccagctactcaggaggctgaggcaggagaatcgcttgaacctgggaggtggaggttgcagtgagcagtgatcacaccactgcattccagcctgggcgacagagtgagactctgtctcaaaaaaaaaaaagaatgtcca

SEQ ID NO: 774481 - DNA, 567 bp, Homo sapiens
tagttaataacaatatattgtactcttgaaaattattaagagagtagattttaagtgttctcaccacaaaaaataagtatgtgaggtaatgcagatgttagttagcttgatttagccattccccagtgtatacatatttcaaaccttcatattatacatggataaatatatacaatttttatttgtcaattaaaagcccctcgatgaatacagtttccattctgtcctygaggtggagcttgtagacttggtggggtccggggatcaacttttaaacaggcagttccaaagtgtggagtggataggcttattctctttgttgcttttatgataggtatttagaatgcactttcctctgttaagttaagccagccaccattccctcattcagtttccatcctccatgaatttgctcacatctgcggtctactgtcactcattctttccttctcttcctgagggcttgtgtgacttatgttcttggctttctcttaggaacatggtgcagcttggccctgcattatccatctggaaaaacagatcataaaacagtccttctctgtacta

SEQ ID NO: 774482 - DNA, 567 bp, Homo sapiens
tagttaataacaatatattgtactcttgaaaattattaagagagtagattttaagtgttctcaccacaaaaaataagtatgtgaggtaatgcagatgttagttagcttgatttagccattccccagtgtatacatatttcaaaccttcatattatacatggataaatatatacaatttttatttgtcaattaaaagcccctcgatgaatacagtttccattctgtccttgaggtggagcttgtagacttggtggggtccggggatcaacttttaaacaggcagttccaamgtgtggagtggataggcttattctctttgttgcttttatgataggtatttagaatgcactttcctctgttaagttaagccagccaccattccctcattcagtttccatcctccatgaatttgctcacatctgcggtctactgtcactcattctttccttctcttcctgagggcttgtgtgacttatgttcttggctttctcttaggaacatggtgcagcttggccctgcattatccatctggaaaaacagatcataaaacagtccttctctgtacta

SEQ ID NO: 774483 - DNA, 589 bp, Homo sapiens
atctactcaggcaggtacctagacaaagaataactagattaattactcaagagtctttttatttcttcctgccttcacttgttaactatactaatagagagatggtattaggcatagggaaaaatacatctgttaccaagaaaaaatgtctgggagtcttaaacctgtggaatcctctgcctgtaaacatctagttgaatatttttgtctggagggttggcctttaatttttttccctgtgttttaagatgatatactttacaaaatgtggtcctgatttatagatccagcagtgtttaaattggccagaaagagagtgtgagaaatggatgtactatagctcatttgttttctgttggtcttcctttttcattgctgtcatggtacatcacagaggcaagtctggtttctttggctaacctctgaataaagggcactgtggcyactgcaggggagcatgcagaagtggtgaatgaatgacagaaaaaatgcgagttgagtccattcagggaggtgatttgtggccatatgataaaatgtgcagatgttaattgcgcttctgtttctcacgcatgattaccttgttgct

SEQ ID NO: 774484 - DNA, 525 bp, Homo sapiens
tggcatagattgcatgggttgcctaaggagagtgaatgcccaggatccatctctgggccactcaaaatgtaatcatatcgagacaatgaggagcctataaagagtatctaataaaagaaaacacagtggaaccagggaaaaatctggaaagagtggtctcatgaaagccaaaagaggagagtttcaaagagtgaattgtggactaattgggaaatggaataacatgtatagagaaatgtgtctattggatttggaaacatgcaacagtttcatgtgcatgatttggaaggaakccagattagagtgggtttgtccattaactgattcatgatgttcacacatatttctttgagtaccgaacatgcatcagatattacttcggttgttgggggaatcattggtgcaaaagcaagcatgattctttacgggatcatggtagcttatgtgggaagacaattttccaatcacattacttctaggttcctggccatctagccaaaccataggtcacagcccttgaactgg

SEQ ID NO: 774485 - DNA, 681 bp, Homo sapiens
aacaatttcctgtcctctttattgccagcacactagccttagtcaccattgtctctcacctggatttctgcagaggcttcctgtcgggtctttctgctgtcacccttgacaccttccctcccgtcccatgcccaccacgtctgttctcaacataggccagagcaaatctttaaaagtgtttcagtgtgtcactgggtcctcagaactttgcagtagctccccatctctcagagtgaaaggtagtctttaaaatggccttccagattctacatgacctggctcctgttacctctgaacctcctctcctacttcctcctgtttctggaatatatctggcatggtcttaactaggcctttgtactgtcccttatcaggaatactcttcgggcagacttcttcctgcttaactctctcatctcttccattcagtctttgctcaatgttcctgcttaaaattgcagctcatccctgctacacacaatcaggagacttcccaccctactctattttttttttatataaaacagttactgtstatcaagttaccatataatttactttgtaattatattattaattgtctccccccaatagaatgtaatccaaaaaaaaaaaaaaaaacagaaataggctctgttttgttcatagaggtaactcatgcctagaacagtgcctggcaca

SEQ ID NO: 774486 - DNA, 643 bp, Homo sapiens
aagacatcattaatgattcacagcactttctctccttaacccgattacatgctgcttatcttcatcagagtgcttcatacagtacctctgacggcctctaccagtcagaggtaaaagcaagatgaaacctttctgttacctttctgtcatcttttaatctaagttaactttctccttataaagacggtcaaaccagatactgaaggggttgtctcttgactaggatcacaccctagtgaaacaatactgcygttgtttcataacagtgaaggtaaatgagtaatttcacaacaaaaatcaatattccagagacagatttctagtattcggttagaaaatgtatcagccatcaagagattctcttctagttagctgtgtatattatttgtacctgtcagaagtgtgctgctaaagaattttaaatggttctgaaagggaccagtcataaatgggatgtaataaattaagaatatgtatttgaactgaacaaggagaacacacgggcacagggaagggaacaagacacactgaggcctgtcatggggttggctgaggggagggagagcattaggtaaaaacagctaatgcatgctggacttaatacctaggtgatgagttgacaggtgcagcaaaaccaccatgg

SEQ ID NO: 774487 - DNA, 599 bp, Homo sapiens
ttggctaaacgctgtttaatattacaagatcaagtgaacattctcacaaagacaaagaggatgaggtaatatgggaaagagagtctgataagaaaaactgactttaaaaataccatgctgaaaatgcctgccattccattttgtttagtctcccaaacctcaaaasttcatcaaagcaagcaaggatgtagagtttccctttcttgcaattcacttcacattcactgtggtacacttccaaaaggaatctttctgagaaagattcattaggaacatattaagttgcagaaaataaaatcagagtctgacattacataggtaagtacattgttttcaacacagattgtctattgcatcttgtggggccttttgtttgtattaaaagagactggagtccctgtctgaattctggctttaaataattgtggaactttggcaagttactggatctttctgaggcttggctctctcatttacaaagaaaatctgaagggtttgcactagatgacctctaaggtctcttccagatttatattctatgatgttaatatattttaaaatacaaatatttaggctaaattattgagcacagggaaaaa

SEQ ID NO: 774488 - DNA, 471 bp, Homo sapiens
attgagtacctgcatcttttccaggcacatggtgcaagctgttggtggatctaccattctggggtctggaggacggtggctgtcttctcacagttccactaggcagtgccccagtatggactctctgtcggggctccgatcccacattttccttctgcactgctccagcagaggttctccataagggccccactcctgcagcaaacttttgcctgggcatccaggcatttccaaacaycttctgaaatctaggcagaggttcccaaacctcagttcttgacttctgtgcacctgtaggctcaacaccacgtggaagctgccaaggcttagagcttccaccctctgaagccacagcccgagctctacgttggcccctttcagtcacagctggagcgactgggacacagggcaccaagtccctaggctgcacaaagcacggggatgctgggcctggcccacgaaacctctttt

SEQ ID NO: 774489 - DNA, 591 bp, Homo sapiens
catcagggaaatgcaaattaaaagcacaatgagataccatctcactccaattagaatgactactctcaaaaagacaaaaaaggccaggcacagtggctcatgtctgtaatgccagcactttaggaggctgaggcaggcaaatcatttgaagtcaggagttcaagaccagcctgaccaacatgtgaaacccaatctctactaaaaatacacacacacacacacacacacagctgggcacagtggtgcacacctgtaatcccagckacttgggaggctgaggtaggagaattgcttgaacccgggaggcagaggttgcagtgagctgagatcgcatcaccacactccagcctgggtgacagagtgagacaccatttcaaaaaaaaaagcaacaacaacaaaaaaaaaacagatgctggtgaggatgcagaaaaaggacaattcttatgcactgttggtgggaatgtaaattagtacagccactatggaaaacagtatggaggtttctcaaaaaactaaaaatagaactaccatgtgacctagcaatcccactgttgggtatgtatccaaaggaaaagaaataggtatgtgaaa

SEQ ID NO: 774490 - DNA, 605 bp, Homo sapiens
agtcagggtttcaccatgttggccaggcttgtctccaacttctgatatcaggtgatccgcctgcctcagcctcccaaagtgctgggattacaggcctgagctaaggcacccagcctctgtattgattttttaacttcgccctagatattaatccaggtacaggaggaggaagtctagggcaatcccatcaaccataacaaccctagccagttggtttagactgacttaaatggctttagcgggagaatgtcatagctgtgatcacttcagctaaaaaaagtggcgaattccaaaccaccttttctcattggrtgcttcccctcacagaaaaaaactgccataggacttacataaataacaagtcagttatcctatccctccaagacacaagccacagaaccaagagcagctgcttctggagaactctgcacaatcatctgaggctgcatggtctcctggtgctgtttcctcaaaccctcaaaggtctgttatggccatccccggggtacaagtccccatgagaaaggctaattaacacctggcttccagactaaaagcaaatatcaagggtgcacacgctgcccctggaaagagagcttacaatt

SEQ ID NO: 774491 - DNA, 605 bp, Homo sapiens
agtcagggtttcaccatgttggccaggcttgtctccaacttctgatatcaggtgatccgcctgcctcagcctcccaaagtgctgggattacaggcctgagctaaggcacccagcctctgtattgattttttaacttcgccctagatattaatccaggtacaggaggaggaagtctagggcaatcccatcaaccataacaaccctagccagttggtttagactgacttaaatggctttagcgggagaatgtcatagctgtgatcacttcagctaaaaaaagtggcgaattccaaaccaccttttctcattggatgcttcccctcacagaraaaaactgccataggacttacataaataacaagtcagttatcctatccctccaagacacaagccacagaaccaagagcagctgcttctggagaactctgcacaatcatctgaggctgcatggtctcctggtgctgtttcctcaaaccctcaaaggtctgttatggccatccccggggtacaagtccccatgagaaaggctaattaacacctggcttccagactaaaagcaaatatcaagggtgcacacgctgcccctggaaagagagcttacaatt

SEQ ID NO: 774492 - DNA, 595 bp, Homo sapiens
attttttaattttttctagagatagagtcttaccatgttgtgcaggctgggcttctcttttttttttttttttttcaacagagtctccctctgtcacccaggatggagtgcagtggtgcgatcttggttcactgcaagctccacctcccaggttcaagcgatactgcctcagcctcctgagtaagtgggaatacaggtatgcaccaccacacccagccaatttttgtatttttggtaaagatggggttttgccttgttagccaggctgggttcaaactcctgacctcagctgatccacccgccttggcctctcaaagtgccgggattacaggcgtgagccacygcacacagccacttcacacttcttgatgatcactctcatatcttttgtcctgatcattaccaaggaagcagccaagagaatataattcctttctgaagacaaccaaattcagtgaccaaactgccttactacagtgcatggaccaggacaaggtgagagagtagagtgagaaatatttttcagtcagtttttgaggaggcagtttcaatactcaacacaggaagcttgtgaatggtaaggaactgtgctggt

SEQ ID NO: 774493 - DNA, 563 bp, Homo sapiens
ggttccatttttttcatatcagagtgtactggctttgctttaggtaagttactgccttgccttatttgtgccacaggaggttttccatttgtgattcagttcacaattgtatgtttggaggggctggtactgcctcaacaggaaaagttcttaatggggaacaagggaggaagttagtcacctaaagatagactgcacaggcaacagccttccaggctcagagtgacccttgggttccctcccccatcctccaagtagaatgactacactaccctaacaacagttacggaagggaaaagagacagtcaaacattagacttacttcactgtggttgtcttakgtggcctacaggtgaaaggaaattgggaaagaatgataaaggaaagaaagaaaacaggaaacagatgtctggtgatgaataatgctcagatagtacttactcagtgagcatgggcttagtcacaaacagctgtatcctggtctcaatattagaatcgtgcagataagttctcagccaaaacaggcacgttccacaaaatctgtctattctgtttaataaagt

SEQ ID NO: 774494 - DNA, 604 bp, Homo sapiens
tctttcactctcaaaagtatcttcttgaaggttcatctttctgcctttgaaaaattggaatgtaatatactggttcatctttctgcctttgaaaaactggaatgtaatatactgagccagtaaaacattaaataaaatgctattccctgctgtatgagttagacaaattcttaatggtttctctgaaactgtgtttyttattaaggctggcataatgtctgacatctactagaaattataatatttaaacacggaaacttaatttaaaaaatccacaagaactgatatatcacagctaacccattagtactaaagagagatacaccgagaaactatatcatactttagcaagattttcaccaaaatgataactctaaattttacaagaacaccttagttcattaaaaatattcaacaattgcttttgattgccatatttgattgttatgggctgacattgggagtaaagtttcttaggggatgcaaagaatctttggggtcctcagcaaaccctccacaatatcactaatgctctatatgccaataagtgctcattcaaacttcaatgttaccattacataaattctaacttgcaaaaaagatg

SEQ ID NO: 774495 - DNA, 604 bp, Homo sapiens
tctttcactctcaaaagtatcttcttgaaggttcatctttctgcctttgaaaaattggaatgtaatatactggttcatctttctgcctttgaaaaactggaatgtaatatactgagccagtaaaacattaaataaaatgctattccctgctgtatgagttagacaaattcttaatggtttctctgaaactgtgtttcttattaaggctggcataatgtctgacatctactagaaattataatatttaaacacggaaacttaatttaaaaaatccacaagaactgatatatcacagctaacccattagtactaaagagagatacaccgagaaactatatcatacyttagcaagattttcaccaaaatgataactctaaattttacaagaacaccttagttcattaaaaatattcaacaattgcttttgattgccatatttgattgttatgggctgacattgggagtaaagtttcttaggggatgcaaagaatctttggggtcctcagcaaaccctccacaatatcactaatgctctatatgccaataagtgctcattcaaacttcaatgttaccattacataaattctaacttgcaaaaaagatg

SEQ ID NO: 774496 - DNA, 617 bp, Homo sapiens
tatttattttatcatggagagcagaaggagtttagacaattccttcgacccctgaaagtaaatgatggtttgaaattttgaagtttagagaatgaaaatgagtaagcaagtcataatagaaccaaacagtttgtgggtgtggtggacagacaggtggtgaggagtgttcacagattctgaggacagaggagtataatgtgaaaaaattttgtaatgaaaattcacaaaatgggctcggcatggtggctcacagctgtaattccagcactttgggaggccaaggccgatggatcacctgcagtcaagagtttgagaccatcccggmcaacatggcgaaagcttgtctctactaaacatgtaaaaattaactgagcgtggtggcgggtgtctgtaatcccagctactcgggaggctgaggcaggagaattgcttgaacctgggcggctgagttgcagtgagccgagatcacaccattgtactccagcatgggcaagagagcaagactccatctcaaaaaaaaaaaaaaaaaattcacaaaatccagttgaaaagtgagatgttttgggtgaacctggagaaacagacaagggtcaagtcacgttaaatcttattcacat

SEQ ID NO: 774497 - DNA, 629 bp, Homo sapiens
tatgacaagaggttaaatatctttcttaaatgaatcccaacaatcaagcatagttttgcctcttaattccaagtgagagaaaatagtttggcaaaaaaaaaaaaaaacgtatgaaaatatattgggtagctcatagaattttccaaagagacagacagccaagcccacatgctatgcaacttgcaacagtaaccaaaatcacaccacagrattgatgccacgaagacacttttgctgccaatgctgagaataaagattttattgtcagatacaggacacaattgataactgatcatgagatactgatttcaaaactattcctggaaactagatatagctgctactgttcccatcagtcttcaactagaaagaggtctaagacattacaaatttttcctgccctggcttctgattaaacatcagtgatggatactgattggtataatctaactcatatatacatgtcccctagatttgagagagtagggaaattgtatggaattatgaacttctatgatgagaaacaggattatcccagtgagattatttcacaattgccatatatttcagatcagttgacaaaagtattggaaaatgtccagttaatttatatacctcttttttgattt

SEQ ID NO: 774498 - DNA, 629 bp, Homo sapiens
tatgacaagaggttaaatatctttcttaaatgaatcccaacaatcaagcatagttttgcctcttaattccaagtgagagaaaatagtttggcaaaaaaaaaaaaaaacgtatgaaaatatattgggtagctcatagaattttccaaagagacagacagccaagcccacatgctatgcaacttgcaacagtaaccaaaatcacaccacaggattgatgccacgaagacacttttgctgccaatgctgagaataaagattttattgtcagatacaggacacaattgataactgatcatgagatactgatttcaaaactattcctggaaactagatatagctgctactgttcccatcagtcttcaactrgaaagaggtctaagacattacaaatttttcctgccctggcttctgattaaacatcagtgatggatactgattggtataatctaactcatatatacatgtcccctagatttgagagagtagggaaattgtatggaattatgaacttctatgatgagaaacaggattatcccagtgagattatttcacaattgccatatatttcagatcagttgacaaaagtattggaaaatgtccagttaatttatatacctcttttttgattt

SEQ ID NO: 774499 - DNA, 589 bp, Homo sapiens
cccagtgtagtggctcacgcctgtaatcccagcactttgggaggccaaggcaggtggatcacctgaggtcaggggtgcaagaccaacctggccaacatggtgacaccccgtctctactaaaaatacagaaaattagccagaaatggtggcaggcacctgtaatcccagctactcgggaggctgaagtaagagaatcgcttgaacccgggaggtggaggttgcagggtgccaagatagcgccattgcactccaacctgggtaacaagagtgaaaccatgtctcaaaaaaaaaaaaaaagaaaaaaaaagatcattcatcataataagtgggatttatccttgggatgcaagcatagtataacatgtgaaaatcaataattgtgatataccacattaataaaatgaagggcaaaactatatgctcatattaayggatacagaaaaagcattttacaaaattcaacattctgtaatttaaaaaaacctcttaaccaactaggtatagaaggaatgtacctcaccacagcaaagaccatatataaaaaacctagagctaactccatgctcaatggtgaaacattgaaagcttt

SEQ ID NO: 774500 - DNA, 716 bp, Homo sapiens
tagaatatacagttgtgtctcaccctggaggctggaaagagttgaaggttctgtgcaacagttgtttcagctgctcttggaggggtcagaaatgtgacctgcatctttgccaacatatgttattttttgactttttagtaataaccattcggactcatgtaagatgatatctcattgtggttttcatttgcatttatctgacaattagtgatgytgaaaatttttttatatgcttgttggtcatttgtatgtcttctttaaaaaaatgtctattcaaatcctttgcccacttttgttgttgttgctgttattgttgttgaagtttgagtttttcacaaattctggatgccagtcccctgttgaatggttgaatggatagtttgcaaatattttctcccattctgcaggtctgttcactctattgatttttttttctgtgcagaagctttttagtttaagtcccatttgtctatttttgtttttgttgcttgtgattttgaggccttagtcataaattcgttgcctagatcaatgtccacaagagttttacctaggttttcttctagaatttttatagtttcacgtcttataattgagtctttaatccatcttgtatatcgtgagagataggagtccagttgcattcttctggatgtggcaatccaatttccccaccatcatttattgaaaaggggatcctttccccagtgtatgtt

SEQ ID NO: 774501 - DNA, 613 bp, Homo sapiens
atgtctattaggtttatctatgttgctgcaaagggcaaaacttccttctttctttggctggatgataatctatcacatatatgtaccacaatttttatactcattcatcaattgatgtacacttgggttgtttccatattttggctatagtgaatgatgctgcagtgaacatagcagtatagttatcttttagagatacttatttcatttcctttgggtatatatctagaagtgagattgctggaacatatggaagttttattttttattttttgaagaacatctatattgttttccataatgcctgtgccaatttacattcccatcaatastgtgaaagggttcccttttctccacatccttaccaacacttgttatcatgtgtcttctcataatggccattacagtaggtatgaggtgatgtttcattgcggttttaatttcattttcccaatggttgatgatgttgagcaccttttcatatacatgttggctatttctatgtctgttttgggaatatgtctgttaaaatctttgccaattgtaaaaatcaggttgtttgttgttttactgttgacttgcgtacttcctaatatattatgagtattaaccc

SEQ ID NO: 774502 - DNA, 589 bp, Homo sapiens
tgttagtatcctcagaaactccttcactaaagaaacttggcaaacccttctcatgcctcctggtgtctctgggcgatcaatgtggccttaagatgctcgacagtttccaaggcaagtaactgctccctttggccttggactataaatcattcaactgaacattgctgtctacaacctggactatttggacacatccagctaactattgtgtttggggtcacrggaacagcaccccacacacttagcatggctccagaggccttcttaagacaggataaagcaacacccaggccctctgtcatttctgcttgcagcaggactggcttcctatatccacagtcacctggcaggtgcccaagtgctggaggaggccacctctcggccacatgggaagaacgctgggactcactgagtggacagtgactggcatttgcgggctgcaaggatgacaagtgatggggcttggggcatgcttctgctctccctctcttggccatatgtcccaacaaaggatggggctggggatccccaaaattaggcagacatcaggcagtcacaccagcattgggtgccctatcgaaccaatggc

SEQ ID NO: 774503 - DNA, 536 bp, Homo sapiens
ggtgttgggagctgagcactgaccacctaaatttttccagaaatgaagccagttggctgaatccaccttataccacaatcaaaccctcaagatcatccaataggataaaagaaaataaaaatgtatccaaaagtcagcaacctcaaagactgaaggtggatatgcccacaaagatgagaaagaaccagtgcaaaagtcatgagaacaaaaagkgcgccctcattcctccaaacaaccgcagcacctcttcaacaggggttctgaatggggctgagatggctgaaatgacagaaacagaactcagaatatggagagtgaaaatgtagatgaatacagctatttatggagaatactataaatgttcctcaaaaaataaagaaacaaaatctactgtagaatccagcagtctcactactggctatgtatccaaaggaaatgaaatcaacatgtcaaagagatatctgcactccatgttcatgttcattgcagcatcttttaaaatagtaaagatatggaaacatcctaaattcccatga

SEQ ID NO: 774504 - DNA, 589 bp, Homo sapiens
tgttagtatcctcagaaactccttcactaaagaaacttggcaaacccttctcatgcctcctggtgtctctgggcgatcaatgtggccttaagatgctcgacagtttccaaggcaagtaactgctccctttggccttggactataaatcattcaactgaacattgctgtctacaacctggactatttggacacatccagctaactattgtgtttggggtcacgggaacagcaccccacacacttagcatggctccagaggccttcttaagacaggataaagcaacacccaggccctctgtcatttctgcttgcagcaggactggcttcctatatccacagtcacytggcaggtgcccaagtgctggaggaggccacctctcggccacatgggaagaacgctgggactcactgagtggacagtgactggcatttgcgggctgcaaggatgacaagtgatggggcttggggcatgcttctgctctccctctcttggccatatgtcccaacaaaggatggggctggggatccccaaaattaggcagacatcaggcagtcacaccagcattgggtgccctatcgaaccaatggc

SEQ ID NO: 774505 - DNA, 516 bp, Homo sapiens
agtttgtttattatcattttatccttttatggacatttgggttgtttcaaatcttaggccaccaataaggttttcattagcatgcgaatttaaatcatttcatagacatgtcttagctaaacacgaatgggattatcaggtcataaggtagctgtttgtttacatctacctgaaattacctgaagtttctattaagtttttcagagtggttagccattgtaaattcccaacatcaatgtatgagagttcaagttactccaacaattaattcaccaacatttggtgttgtgttttacttatgccattatattttctgcatttctaatgctttratgtcttgtgccttcctaacactggaggaactatccctcttatggctagccaattcctagagatggtaaaagcctcacttgcaaccaatctagaaaccacactccagccacttcttttatcaggcacctatagcgctattacactccaggccactatttgccttccctaatcaccccagggcca

SEQ ID NO: 774506 - DNA, 600 bp, Homo sapiens
tcaaatcagtggtccctttcccaagarcatcagccctagtttgatgaaagataagtgacaaaatgaatagaagtctggctagaccaaatatagagaaatgacagtaagatgataaaagatttagaaacgtaactcatcattttatcatattatatatatatatcttttgtactctatattttttcatgctgtgttacaaaatgttagagaagtctactgctttattcacttccaggtgatgagaagtcaagtcaaaaatcaggacttataacgtcaatctgtgcctttgggttcctagaagagaagcaacatagcattgaagatcgaagaaggtcaccataaggaaaaattcccaaagcaaaaaacaagctttgtgtaccaccattccatcctgtgcatctgagatacactgggtctggcacaaattacctcctcaattaataaataatatctctgtaaataaatagtaactctaggaatagttataccatttgtttctatatattcattcccaatgttgacaaggatctaattcacttaaaatttagtccatattacattatcaaatttaaaaaagaagactaaagattaatataccca

SEQ ID NO: 774507 - DNA, 617 bp, Homo sapiens
gtgtgctggtgtttgaagagcatatcaaatcagtggtccctttcccaagagcatcagccctagtttgatgaaagataagtgacaaaatgaatagaagtctggctagaccaaatatagagaaatgacagtaagatgataaaagatttagaaacgtaactcatcattttatcatattatatatatatatcttttgtactctatattttttcatgctgtgttacaaaatgttagagaagtctactgctttattcacttccaggtgatgagaagtcaagtcaaaaatcaggacttataacgtcaatctgtgcctttgggttcctagaagagaagcaacatagcattgaagatcgaagaaggtcaccataaggaaaaattcccaaagcaaaaaacaagctttgtgtaccaccattccatcctgtgcatctgagatacactgggtctggcacaaattacctcctcaattaataaataatatmtctgtaaataaatagtaactctaggaatagttataccatttgtttctatatattcattcccaatgttgacaaggatctaattcacttaaaatttagtccatattacattatcaaatttaaaaaagaagactaaagattaat

SEQ ID NO: 774508 - DNA, 530 bp, Homo sapiens
ccgcaccactgccctccagcctggtgacagagtgagactccatcaaaaaaaaaaaaaaaaaaaaaaagagtagtcaaggctgggcgcagtagctcacgccggtaatcccagcactttgggaagccaaggcgggtggatcacctgaggtcaggagttcgagaccagcttggccaacatggtgaaaycccatctctactaaaaataacaaaaattagccaggcatggtggcaggtgcctgtaatcccagctattggggaagctgaggcaggagaatctcttgaacccaggaggtagaggttgcagtgggccgagattgcaccattgcactccagcctgggtgacaagagtgaaactgcatctcaaaaaaaataaataagacatacacttggccaagaagcatatgaaaaaaaatgctcaacatcactaatcattagagaaatgcacatcaaaagcacaatgagataccatctcacaccagtcagatgggctattattaaaaagtcaaaaaatcatagatcatgctggcaagt

SEQ ID NO: 774509 - DNA, 548 bp, Homo sapiens
cgcaccactgccctccagcctggtgacagagtgagactccatcaaaaaaaaaaaaaaaaaaaaaaagagtagtcaaggctgggcgcagtagctcacgccggtaatcccagcactttgggaagccaaggcgggtggatcacctgaggtcaggagttcgagaccagcttggccaacatggtgaaaccccatctctaytaaaaataacaaaaattagccaggcatggtggcaggtgcctgtaatcccagctattggggaagctgaggcaggagaatctcttgaacccaggaggtagaggttgcagtgggccgagattgcaccattgcactccagcctgggtgacaagagtgaaactgcatctcaaaaaaaataaataagacatacacttggccaagaagcatatgaaaaaaaatgctcaacatcactaatcattagagaaatgcacatcaaaagcacaatgagataccatctcacaccagtcagatgggctattattaaaaagtcaaaaaatcatagatcatgctggcaagtttgcagagaaaacggaatg

SEQ ID NO: 774510 - DNA, 548 bp, Homo sapiens
cgcaccactgccctccagcctggtgacagagtgagactccatcaaaaaaaaaaaaaaaaaaaaaaagagtagtcaaggctgggcgcagtagctcacgccggtaatcccagcactttgggaagccaaggcgggtggatcacctgaggtcaggagttcgagaccagcttggccaacatggtgaaaccccatctctactaaaaataacaaaaattagccaggcatggtggcaggtgcctgtaatcccagctattggggaagctgaggcaggagaawctcttgaacccaggaggtagaggttgcagtgggccgagattgcaccattgcactccagcctgggtgacaagagtgaaactgcatctcaaaaaaaataaataagacatacacttggccaagaagcatatgaaaaaaaatgctcaacatcactaatcattagagaaatgcacatcaaaagcacaatgagataccatctcacaccagtcagatgggctattattaaaaagtcaaaaaatcatagatcatgctggcaagtttgcagagaaaacggaatg

SEQ ID NO: 774511 - DNA, 539 bp, Homo sapiens
agccgagcccgcaccactgccctccagcctggtgacagagtgagactccatcaaaaaaaaaaaaaaaaaaaaaaagagtagtcaaggctgggcgcagtagctcacgccggtaatcccagcactttgggaagccaaggcgggtggatcacctgaggtcaggagttcgagaccagcttggccaacatggtgaaaccccatctctactaaaaataacaaaaattagccaggcatggtggcaggtgcctgtaatcccagctattggggaagctgaggcaggagaatctcttgaacccaggaggtagaggttgcagtgggcygagattgcaccattgcactccagcctgggtgacaagagtgaaactgcatctcaaaaaaaataaataagacatacacttggccaagaagcatatgaaaaaaaatgctcaacatcactaatcattagagaaatgcacatcaaaagcacaatgagataccatctcacaccagtcagatgggctattattaaaaagtcaaaaaatcatagatcatgctggcaagtt

SEQ ID NO: 774512 - DNA, 530 bp, Homo sapiens
ccgcaccactgccctccagcctggtgacagagtgagactccatcaaaaaaaaaaaaaaaaaaaaaaagagtagtcaaggctgggcgcagtagctcacgccggtaatcccagcactttgggaagccaaggcgggtggatcacctgaggtcaggagttcgagaccagcttggccaacatggtgaaaccccatctctactaaaaataacaaaaattagccaggcatggtggcaggtgcctgtaatcccagctattggggaagctgaggcaggagaatctcttgaacccaggaggtagaggttgcagtgggccgagattgcaccattgcactccagcctgggtgacaagagtgaaactgcatctcaaaaaamataaataagacatacacttggccaagaagcatatgaaaaaaaatgctcaacatcactaatcattagagaaatgcacatcaaaagcacaatgagataccatctcacaccagtcagatgggctattattaaaaagtcaaaaaatcatagatcatgctggcaagt

SEQ ID NO: 774513 - DNA, 631 bp, Homo sapiens
acaatacctgtgaagtaggtactgttattatttccattgcactaatgaggcacactgaggcagaggtaagtgagttgcccaggattacacagctagtaagtgcttagctgtggttagaatgaaggcactgagaaataaaataaaaatgaaacccttagctccccaagctactgaatggaccctctcttggccaagggcaccccagagtaaccttaaaagctgagttttcatccatgacaagatgggcggtcagaggtgccttcttacatccccgccctcacttaactaccattagactttcctacctaagtgctaaatagaaaccagctcttttgaaagactccactgctgatatcaacaaatcactgaagcagtycctctttttttgtggttttaacatggcaattaaccagcattccttcctgataagagaccaactatatgctactcatgaaggggcatgaagcacaattgtgcatgtgcatggttgtcctttcataaatattcaagattcctcctatagcttattgagcatatgtatttggccacctcactcagtacatattccttttgtcactgtctcgaaatatttgtttctggctcctggccagaggctatatttcccagcctg

SEQ ID NO: 774514 - DNA, 573 bp, Homo sapiens
gccaagcaatgtgttgctgcaagagctgaaggaaaagtcaacacatgggaaggaaaagcaatccattgggtgactacattaatggatggggagagacttctaggacacagactttggcaaaatatggtcatcataaagaaaatggctgagtatatctctaggctttcgagtattgtcatttgcactgtgttatttttccctccaaggggttatttggggaaaattgtatacatcccaggrttgaacttccaaacaaatgcaagctgcaaccagccccagagctacatatgggcatgtccctgggtggctttagaaaagcgtagttctctctgtgctcagctcaacctgccccctctgccctgagacgcacacacacacacacacacacacacacacacacacacacacacacacaccactccccccgcccccccacccccacagttccttcccttgcagaagagatgagaaaacctctctttctttctactgtagagcaattcctttggaggacaaagactgttgcaatgagctttttgtctcggcagagtttgctaatacatttaaaaatat

SEQ ID NO: 774515 - DNA, 605 bp, Homo sapiens
aggtgccccactgcgactgttccaaaagggaggatgagggctctgaagaagctaaagtcacagtgaaatgaatacaaaccttgggagttctagtgcagggacagccctgtgaattggatgtagtcagttaccctgaggggtttaggtggggactgtgttaaaggcaaggacataagtgtgtgtccctaagaccctggtctcaaagacagaaggaagctgaagtgagatatactgtttaggagtaacaacygcactacatgtcatgccttacaagtggaggatgtgacagagggccactccacatccagaacaacctttagcaggctggctaaaggatgccttccagacacaaaagccttggaataccaggacacagtctgtagccaaatggtacttgtggtggtcaccaccaacataaaagtgggccaactgtgccagcagaagttagccccacagaactttcccccacctaagagaaggcagtgaaccacgatgtgggatgccaccactgtggaattgggggagcttagacttggattcagacacaaggggagagagtggatcacagggtggcttctctatgggacagggggtggagagtgtta

SEQ ID NO: 774516 - DNA, 514 bp, Homo sapiens
tacattcttctcatcaccccatggcacatattctgaaactgtttcatggaggaaactgtttcatggagaggaagccacagggctgacaggaaaccagaccttaacctccctctgcacctgccctgaggctggctcttgtgctcagtgggtcctgagcgyccccaggtggtcctgttccctcttcagggaggcttgtttctgggctcatactgacattttttctaattgtgttccccaaaatggagacagagtaaaccgtgaatccatgcatctcagagaacacagaacagcagaattacacccactgatccccccacacacatttaggtaaatcttattaaaactgctgaaaaggaaagacaaatagaaatatatgcaggcaagtggaggtgagcagagggggcattccttccaaaagaacagaaaagatgatgacagcattcttctggttaaaaccttacaagcaagaggaaagttgatggtatctgtaaagtgttggatgaaaagtcaaccc

SEQ ID NO: 774517 - DNA, 514 bp, Homo sapiens
tacattcttctcatcaccccatggcacatattctgaaactgtttcatggaggaaactgtttcatggagaggaagccacagggctgacaggaaaccagaccttaacctccctctgcacctgccctgaggctggctcttgtgctcagtgggtcctgagcgtccccaggtggtcctgttccctcttcagggaggcttgtttctgggctcatactgacattttttctaattgtgttccccaaaatggagacagagtaaaccgtgaatccatgcatctcagagaacacagaacagcagaattacacccmctgatccccccacacacatttaggtaaatcttattaaaactgctgaaaaggaaagacaaatagaaatatatgcaggcaagtggaggtgagcagagggggcattccttccaaaagaacagaaaagatgatgacagcattcttctggttaaaaccttacaagcaagaggaaagttgatggtatctgtaaagtgttggatgaaaagtcaaccc

SEQ ID NO: 774518 - DNA, 634 bp, Homo sapiens
cacaatgaataaagggacatcattatgtttaaaaaaccccacaacattggtttttaatatgctgaactttagatgtctaagaaacaacaaggtagagaagtccagtaaaggtagttaaagggagcttaagagaaagatttaagcagaagagctgggtaactttgtaaactgaacagtgactgaggcaaatttcaatcaattagaggttaattttgccaaggttgaagacactcctgggaagaagaaatgcaagtcatagcaggatgtgtgaccagtgctttttcaaaagatggttttgggagcttcaatatttaaaggggaaagagcaagcgggaggggaacaaaaaaggagagtgggtaagcaatgagacaagtggttacattcttgtgagggtctgattagctttgtgaatctacattttacatgtaaaagaaaggagcagaggaaaagycaattttgcatttgtctggcactcagtaaatctacactttacgtaagtccaaggcattgtactggtgggaagggagatgcgaggatggaagagaagtgctgtatacggcacttcttcccggaaaggtttagaatttgaataatctgtgacaactattagtttggagcataatactaagttat

SEQ ID NO: 774519 - DNA, 615 bp, Homo sapiens
aaaacatttcttcccatttacattctgttcttttttttttcttttttttttttttttttagatggagtcttgctctgtccccaggctggagtgcagtggcgttatctctgctcactgcaacctccagctccctggttcaagcgattctcctgcctccgcctcctgagtagctgggattacaggctcccgccgccacgcccagmtaatttgtgtgtgtatatatatatatattttttttttagtagagacggggtttcacatgttggccagggtggtctcgatatcctgacctcatgatctgcccgcctcggcctcccaaagtgctggaattacagacgtgagccactgcgcccggactagattctgtcttacttaacattacattcaagaggttgtcagcggagttgctactaagaagccttattggagagcatttttaggctgtataaaatagtcccactttgaaagtgctgagagctgtttctgctgaggtgtaagccatagtaaaatacttgtgaacaattttcagacatcattacactaaaaaatacaatttttaatagcaccttgaagtttatacttgccttacactttcaattttaagtacaaatgaaa

SEQ ID NO: 774520 - DNA, 576 bp, Homo sapiens
ttctaatgtgaattcaaggagaaaatagcataagcaatatttgttccttcaaagaaactcaggatgtcctaaccattttataagagaatgatttccctcttgtatttctccatgaatgtctttgcatgagttaaatatttgaaaggttgacagacttagttatttctagaagaagtttctgttgatcagtgtgcaggggttaattctggcactgccccttagagatatttttctagggcagaatgagccacaaagagaaagatacacaggacagtgtcaatacagcatcactacgtcatttaatggctgatggtggttatggcagccaatagtctgaggaaagcagattttccctgaatgatgaaaaaaaacccatcayattcaataaaatcacaaacaaataccatatattcctgttaaccatccaatgatgaaactgtatatgtgaatacactaatgcattccttaaatgcaaattactgctaaatttctaagtaaactgtcttccacttcagagccattgtaatccatctcttatgtcagatgaactgtgagacttatccttctgatcgcata

SEQ ID NO: 774521 - DNA, 538 bp, Homo sapiens
agctcccaatcagggcagaaggcaaagtgggagcaggcacatcacatagcgagatagtgagaatgagatcaagcaagaaagagaaagagacagagagagagagagaagccacacactcttttttcatttttcttttctttcttccttttctttttttgagatggagtcttgctctgttgtccagcctggagtgtaatggcgtgatcttggctcactgcaacctccgcctccagggttcaagtgattctcctgcctcagcctctcaagtagctggaattacagrtgcccaccaccatgcccggatagtctttgtatttttagtagagatggggttttgccacattgacccggtctcaaactcctgacttaaagtgatccgcctgcctctgcctcccaaagtgctgggattacaggtgtaagccactgcatctggccacgtcacacactttttacaaccagatctcatatgaactcagagcaagagctcacatatcaccatgaattggctgaagccattcatgagggatccactcctcca

SEQ ID NO: 774522 - DNA, 538 bp, Homo sapiens
agctcccaatcagggcagaaggcaaagtgggagcaggcacatcacatagcgagatagtgagaatgagatcaagcaagaaagagaaagagacagagagagagagagaagccacacactcttttttcatttttcttttctttcttccttttctttttttgagatggagtcttgctctgttgtccagcctggagtgtaatggcgtgatcttggctcactgcaacctccgcctccagggttcaagtgattctcctgcctcagcctctcaagtagctggaattacaggtgcccaccaccatgcccggatagtctttgtatttttagtagagatggggttttgccacattgacccggtctcaaactcctgacttaaagtgatccgcctgcctctgcctcmcaaagtgctgggattacaggtgtaagccactgcatctggccacgtcacacactttttacaaccagatctcatatgaactcagagcaagagctcacatatcaccatgaattggctgaagccattcatgagggatccactcctcca

SEQ ID NO: 774523 - DNA, 562 bp, Homo sapiens
atgagcagtttttcttgtacaatttttttttctaaattgtctttcctttaaaagaaactgactttctagaccacatggtatgatggtgctttctctgcagatatgaaaatttgatcattaatacaatctccagttgttctatattaaaaagtgttttttaagatgattaactgcatgttttctgtagaactaataaaagaaaggaggatctcccagatggttctaatcaaataaggaaaacagcaaaggatggagttgatatacaacaaaatttgaaagcaacattttgagatttgacttattttagagaagaaaaatgtattrtgtcctttctgaagtctgtttttcttaagagtccattataagattctcttgcccagctgctgatgttctttcctgatgccctgccctacagagctccacctcttattgcgtacccattttcatgccatcacagatccatggaattcaaaatgatatttgatacagacttgaatagagctagtttttaattctcagctctatgtatgacttcaaaacatatgcaaaggttttttttaca

SEQ ID NO: 774524 - DNA, 580 bp, Homo sapiens
ttcaaatgtgtcttctgcttccactctttaccccccaattaattctctactcaacaacaacagtactcattaaaaatttaaattatgggggccgggtgcggcggttcacgcctgtaatcccagcactttgggaggccaaggcgggcagatcacaaagtcaggagatcgagaccatcctggctaacatggtgaaaccctgcctctactaaaaaaaaaaaaaaaaaaaaaaattagcctggcgtggtggcgggygcctgtagtcccagctactcgggaggctgaggcaggagaatggcgtgaacccaggaggcagagcttgcagtgggctgagatcgtgccactgctctccagcctggccaacagagtgagactctgtctcaaaaataaataaataaataaataaataaataaataaataaataaataaaaataaatttaaattatgttactcctctggtgaaaactcttcagtggctttccactgtattttagataacacattaatgcctttctcagcacctaccctgtgcaacctgctccccgatgccctcctcggtgcctttcatatcattctctgcct

SEQ ID NO: 774525 - DNA, 580 bp, Homo sapiens
ttcaaatgtgtcttctgcttccactctttaccccccaattaattctctactcaacaacaacagtactcattaaaaatttaaattatgggggccgggtgcggcggttcacgcctgtaatcccagcactttgggaggccaaggcgggcagatcacaaagtcaggagatcgagaccatcctggctaacatggtgaaaccctgcctctactaaaaaaaaaaaaaaaaaaaaaaattagcctggcgtggtggcgggcgcctgtagtcccagctactcgggaggctgaggcaggagaatggcgtgaacccaggaggcagagcttgcagtgggctgagatcgtgccactgctctccagcctggccaacagagtgagactcygtctcaaaaataaataaataaataaataaataaataaataaataaataaataaaaataaatttaaattatgttactcctctggtgaaaactcttcagtggctttccactgtattttagataacacattaatgcctttctcagcacctaccctgtgcaacctgctccccgatgccctcctcggtgcctttcatatcattctctgcct

SEQ ID NO: 774526 - DNA, 631 bp, Homo sapiens
atattgtcaaactgtcactccatattgatatattactgctgaagattaagaaacattttgtcaaagagcaggaacataaaaatactctgaaagaagatgaaatctgatacaaatgtgagggagagtatgaagaaataaatgcctgcaaaaagacagcatgcagtgtttrcatctgtccagggacttgcttttaattcccccattcaatagcagcaaactcctatataacactcaatatctgccaggcactcttctaagcatgttagatataaactcttttaaaacacaagaaacccctagaagtagctactattttatttctatctgtatttatagatgtacagagaggtgaatcaatttgcctaaggtcacatagctagtaagtggcagaaccaggattcaaagtcaggcctcatgcctccagaggccatactcccaagcttcttttccacttggcccggttagaatgttattaaagatagagttggctgagtctatgccaatcttgtatccttaacatcactttaaaaatctctttgctagaacttttttttgatagtgttgtgtcaaaagagtggagagcaagaaagagaatcattttacttgtttagatccatgatagatgaaggtt

SEQ ID NO: 774527 - DNA, 513 bp, Homo sapiens
tccattgtgtgtgtgtgtgtgtgtgtgtgtgtatatatatatatatatatatataaaaaacgttttctttattcattcatctgtcagagaaaattgattccatatcttggctattgtgaataatgctatgatgaatatgggagtgcagttatctcttcaacatattgatttcattcactttggatatacacccagaagcaagatttccggatcatatggtagttttatttttaattttttgaggaacctccatgctgtttccataatggctatactatttttagctaatttattgattgattgattggcatctgctctaggaatcacagtatgcatacttcactwaccacagtttacttagaattagtagtcagtcacttcatataaaatgtgagaacctttaacattataaacccacttgtgccgcctctatcttttgtgctgttgttgctagatattttgcttttcatatgttttaagtccccatgtcattatgttattattttgttttat

SEQ ID NO: 774528 - DNA, 621 bp, Homo sapiens
attaactgtttttttttcttctaagaaatctttgcttaccccaggtcaaaaagatattctttctttttttttttaaataagttttagagttttatttgtatgtttaggcctatgattcattttggattaatttgtatgatcatgtgagataagaattgagatgaattaaaaaaaawttctcacatgcatggttctaacaccatttgttacaaaagaacacctgatcatttttccattgaattacattgatgtctataaaaatcaattggtcatgtatgtgtgaatctactggtagacactgtattgttttgttatcaatttacctatatttacaccaataccacattgtcttgattactataaatttatagtaagcattgaaatcaggtagtttcagttttttaaaaccgttcttgtttttcaaaattattctggctactcttggtaattttcatttccatatagtttttaaaatcagctctctaattaaaaaaaaagcctgctcagattttatttggactgtgttgaatctatagaacagcttagggaggaattatattttaataatattcactcttccaatcatgaactattatatctttcaatttaattaacttttat

SEQ ID NO: 774529 - DNA, 629 bp, Homo sapiens
gaatatatgtctgagttcactacaatggcttgacagtaacgtgaatagtaaacattttaaatataaagtttgttttaattaaatggcttattaaaaatattttctgtattttcaaagtccctagagaagaaacaaaaagggttcagagggtttcattactcttttattcatgataggcaaaaattaaatagttctctttgagaagcttatttgtgtcttattttattacagccttcctggaaaattttgtcttccaattccaattaatttgaagcaatctaggcataaatttattgtgagcagaagtcatagattcaactaattatatcatatatttcaaatattagaattatgtgaaaaatacattcatgtaagggaagtcatttaatttctaatgtgtagaccaaaaggcaaactaattasattcagtctgataaacctgaaatatagctgttttgtagtataaatgagtaagttttctgtatttcttgctgagagtatatcattttttatagttgtttattagagttcataccaattgaaatagttgaaacttcacttattttccttaagtccactcttcataaatattagagttagtttccatcaaatatattcattactaaaaa

SEQ ID NO: 774530 - DNA, 646 bp, Homo sapiens
accataaatgtcctgctcacccacaagtatatcagtgtcagactgccagctacattgccctcaatccactgacaagggcatgtttgagccatatttaaatttgtaattgctttcttcattactgatttcttagagttctcagcatcatgccagattggtgactagcatgtgactaaatgcttgacccttgtctgagttatgcaaactttctcattcctctgactttgcttctgattcatccattcaccaaatctttattattagccacaaatgttttaggcactatgttggcaaatgaatttgtagacattctccatggctttayagaatgaatagtttggggatcattattcagttcctatagcttatctcctctgtcatcctccttagtggcatatcttacagcacttatcactaccttgaaaacaatacattttccagtagatatttatacaattaaggaaactaaaataagaggttcaaagagcattaagagcatagagactaaagttactggaagaaagctctaaattacttttctggagctagcgttcacctcttctttcttatcattctctgaggcttgggaactgctatggcaacaagaaaattcccaaagggaaggtcatctgttccatattagcaa

SEQ ID NO: 774531 - DNA, 572 bp, Homo sapiens
aaagatggttggatagaattttaaacatcttactcataattgaaactgaaattacattttcaacacatcagagtcacaaagattaaaacactctaaacttcattttggcacaaacgtgggaaaaacagccactctcatacgctgttgatggaggcagaaattaggaaaaatacttttataaggagaaatatttggagttgtcaaatatttaaaaggtcatatcattgactcagaattacatttctatgtctgtagacagatagcaagcatgcagctatgtattagaatgttagataacattaagccctcaagggtaaaagcaaggtttggggtagaaaatgactaactgctatttttttattagatgattaggaacatcctgtctgatgcrctgacatttgggcagtaagccaaataatgaggagaagtgagccatgctaatacctagaaggacggctttccaggagaagggaacactaagggtaaaagcctgaggcagcacaaaggagaccttgcagctggagcatttcaaggtgtgtatctgtgtgttagtgagagttctccagagaaag

SEQ ID NO: 774532 - DNA, 616 bp, Homo sapiens
attttagatggtcatgtaattacattgcataagaaatacctgagctggatcataatcagaggctgtagtattagaagtagaaaatataataattatctgtagagtttaaatttggtcttatgagaaggtgaaagattaccatgcaaaatcttatttagccctaggttttgataattatcttattaattaacccagctctttaatataagtgtaaatatctgagtaacatgtactagcctcaagttactgagaacagtgagaaggattttggaaatggcactgcactttcgttgatcctgaggccctctcttataccaacagctagttgtaaagcattcactgacccaagaggraatcatcacaacagaaccagggggaaacaggcattaaattcttactgagatataaaaagtaaggttttggaagagtgcatgatctagttcttatttcattttgttttgttttccaacttcagaatagtttttaaaataaaaagaaactttttgggtcgcaaaaaaaaaaaaaaaaaaagaggaagataattccgtatggagttagatactgccggtggtctgtgagatgaccaaggcccagctccctaactcagtagtttcat

SEQ ID NO: 774533 - DNA, 637 bp, Homo sapiens
aaggaacaagagggatggggaatgtaaaaatccagatcaatattctaattctggacacattggaatcagctagcaactctttatcagcttggttccatcagttgcccagttcatgagaaaccttcttaaacagtttacttgggataattttacttattttgctttaatgttgcrgaattatattgctattgtactttttatataggagtgctggataagcttactcaatgttttcttttttttttcttttttttttttcatggagtctcactctgtcgcccaggctggagtacagtggcagaatctcggctcactgcaagctccacctcctgggttcacaccatcctcctgcctcagcctctggagtagctgggactacagacacctgccaccacgcccggctaattttttgtatttttagtagagacagggtttcaccgtgttagccaggatggtctcgatctcctgaccttgtgatccacccacctcagcctcccaaagtgctgggattacaggcatgagccactgtgcctgacctcagtttccttaaattgaagagttattaatcttccagattcataactccattcataacagttggagttatgaatggcccttatcatactactgatacttt

SEQ ID NO: 774534 - DNA, 637 bp, Homo sapiens
aaggaacaagagggatggggaatgtaaaaatccagatcaatattctaattctggacacattggaatcagctagcaactctttatcagcttggttccatcagttgcccagttcatgagaaaccttcttaaacagtttacttgggataattttacttattttgctttaatgttgcagaattatattgctattgtactttttatataggagtgctggataagcttactcaatgttttcttttttttttcttttttttttttcatggagtctcactctgtcgcccaggctggagtacagtggcagaatctcggctcactgcaagctccacctcctgggttcacaccatcctcctgcctcagcctctggagtagctgggactacagacacctgccaccacgccyggctaattttttgtatttttagtagagacagggtttcaccgtgttagccaggatggtctcgatctcctgaccttgtgatccacccacctcagcctcccaaagtgctgggattacaggcatgagccactgtgcctgacctcagtttccttaaattgaagagttattaatcttccagattcataactccattcataacagttggagttatgaatggcccttatcatactactgatacttt

SEQ ID NO: 774535 - DNA, 555 bp, Homo sapiens
agagtgcatgtaattctaggctttgtgtggaagagatgaccaaggtcctgggtctttgacgatggtgggaatcatagaattcaaacaggaaaggggaaaatgatgtgtttttaccatccccattttgggagtgtttctcaaaaaaaaaagcctaaggaaaataaggtgctacatggaagcagggtgaatctgtttatgtgggcaagtgtaattgtgtgagggatggtggggagatgaaagccatggtgtgaataatttagtggttcttaccagaggcagataactattgatgataccattaattgtaataacattaaagtggactgaagaaacaccattgatacattgccmttctccgtattctgcgtgcattatttattatttaacttcagaaagaggttgtatacctgggtattttcatgcaatctgtaaaatgaaagagcaccacaggtttactgatgtaataataattataagactttgccatgatttacatctattttactatttattatatcattggctttcttttaaaaatgaatttttatcaaagtc

SEQ ID NO: 774536 - DNA, 446 bp, Homo sapiens
ttcgtaaacagatgatgtaaatttacagtgttgataaatacagcacaatactgtaaatggattttctcttccttatgattttttaataacatttcttttctctagctagcctcattgtaaaaacacagtatataatacatgtatcatataaaatatgtgttaattgactatttgtgttatcagtaagccttctggttaatgtaggctatcastagttaagtttcgaggtagtcaaatgttatatatagattttttttactgcacaagggtcagcacttctatctcctgcattgttcaaggctcaactgtatctcaaagagatagagaaagaatttgtaactacacatttttctagggtaaatgctctaagaaaaggccagggcctgtctaaagtttgatgcagctgagagaaacaacaaggttctcttggtcagttgctattatca

SEQ ID NO: 774537 - DNA, 446 bp, Homo sapiens
ttcgtaaacagatgatgtaaatttacagtgttgataaatacagcacaatactgtaaatggattttctcttccttatgattttttaataacatttcttttctctagctagcctcattgtaaaaacacagtatataatacatgtatcatataaaatatgtgttaattgactatttgtgttatcagtaagccttctggttaatgtaggctatcagtwgttaagtttcgaggtagtcaaatgttatatatagattttttttactgcacaagggtcagcacttctatctcctgcattgttcaaggctcaactgtatctcaaagagatagagaaagaatttgtaactacacatttttctagggtaaatgctctaagaaaaggccagggcctgtctaaagtttgatgcagctgagagaaacaacaaggttctcttggtcagttgctattatca

SEQ ID NO: 774538 - DNA, 608 bp, Homo sapiens
ctgttctattttattaaaatcttaacatattccaacaaggtattcatttatttattctacaacattctagatgcttggggtggaaaggtaagtgagacatcatcactgcctctatgattctggcatcttactcagcgagaccaacaagaacataaataagtatgatctaatgtggaaagttttatattcaaagtgctttgagaaatacagtgtggtaagtgctgtatgtaaacttaccccacaacttgatccttttcccctaatttcttctgtacagatttataagccaaaaactgatttattggacccactgcactcagagaatgctttatgaataaattcttgtcaatgaaatatatgcagacatctgctgtagctgcctcttccctttcctccttcctcctacctgaaatgtggatgtgatgtctgactttgggtcatytgagttgcggctggaaggataaagtccacatgccaagaatgcagaacatgtgttgatttctcatgtcaatactttactacccttgaagctcttgttgtataagatataaagacctttcacttgtttaagccactgttgcagagtgtcctattacacacacagccga

SEQ ID NO: 774539 - DNA, 546 bp, Homo sapiens
ccatcagagaaatacatatcaaaacaacagtaaaatactatctttccccagttagaatgattattattaaaaagacaaaaaataacagttagtgagaatgtggagaaaagaaaactctaatacactgttggtaggaatgtaaattattgtacagccattatggaaaacaatgtggatatttctcaaaaaattaaaaatagagctaccatacaatccagcaattccactactcagtatttatccaaaggaaagaaaatcagggtatcaaagaaatacctgtgtcccatgtttattgcagcactattcacaatagcaaagatgwagaatcaacccaagggtctattaatgaataaatagataaagcaaatgtgctatacctacgatggaatattactcaaccataaaaataaggaggtcctgtcatttacagctacatagatgaaactgtaaggtcattatgttaagcgaaataatccaggcaccaaaagaaaaatattgcatattctctttcatagatgggagttaaaaccaactcctgaacgtaga

SEQ ID NO: 774540 - DNA, 615 bp, Homo sapiens
ggtatcaaggtgatgctggcctcatagaaaaagttagaaaagagttcctcctctcaatttttaaaaatagatttattaggagtggtaccgacactcctttacacatctggtagaattcggcagtgaattcacctggtcctgggctatcttggttggcaggcttcttaactgatgtgattttggaacttgttactggcctgttcagggattcaatttcttcttgattcagttttgrgaacttgcatgtgttcagaaatgtatacatttcttctagattttctagtttgtgtgcatatggttgttcataatagtctctgaatttttttttttgtatttatctggggtcagtggaaatgtcccctttgtcttttctaattgtgtttatttgaatcctctctgcttttttctatattagtctagtattggtctgtctatttaaactttttttcaaaaaaaaaaaacaactcctggatttgttgatcttttgtatggttttcctcacctcaatttccttcagttcagatctgattttgactatttcttgtcttctgctagctttggtttgctcttgtttctataattcctctagttgtaatgttagattattaatttaag

SEQ ID NO: 774541 - DNA, 621 bp, Homo sapiens
atacatgatactctatggaaaagattgtcaatactctggaagaaaatcctgatagaaagaacatcataaaagtttggaaagatgccattaaaagttaaaagatgccattaaaagatgccatcataaaagtttggaaagatacccattaaagatgccattgttgttacagaaaaagctgagaaggccatcaagcctaacgcaataagttcctgctggatmaaactgtgtgcaaatgatgtgcatgacttcactgaatttacaccaaagccaatcaaagaaatcataaaagagattttgaatgtggcaaaaaaaaggtgggagctgaagggtttcaagatatagatactggagaaattcaagaactaatagacaccacaccagagaaattaacagaagatgacttgctggaaatgagcacatatgcactagtgtcaggtgatggggaagaagatgtgaaaacagttccagaaaacaattgacattaaagaatctgccagaaaagttctaattattcaaggctacttttgacttattttacaacatggacccttctatgatgcaagcactgaatctaaagcaaatattggaaaaatgattggtactgtataaaaacattttaaa

SEQ ID NO: 774542 - DNA, 528 bp, Homo sapiens
caaccagttaatttgtttcaggacaagaatttaccatataatactctttttatataaattccgccccccctttttttccttttttttttcgaagatgataaccattcttttccaaagcgaaccttttttgtgtcttgtggactaggccacaagaatataagttactatatacatgttacactgttaacttttagcaaactttagttgaaaacctttaaaaaaaatttwaaaaaaatgcatgttgtgcacatgtaccctaaaacttaaagtataataataataataataaaaagaaaaccttctaagtttgggattttaattatcctttgctattaataagaccttgttttgtctaaattagaattggtatagatggcttttttttcttaactttgtatctctctctctttctctctttctttctctctttgactttgtctctctctttgactttccttttgcctctgcctcttcctctctctctgtgtgtgtgtgtgtgtgtgtctctctctctctctctctctctat

SEQ ID NO: 774543 - DNA, 528 bp, Homo sapiens
caaccagttaatttgtttcaggacaagaatttaccatataatactctttttatataaattccgccccccctttttttccttttttttttcgaagatgataaccattcttttccaaagcgaaccttttttgtgtcttgtggactaggccacaagaatataagttactatatacatgttacactgttaacttttagcaaactttagttgaaaacctttaaaaaaaattttaaaaaaatgcatgttgtgcacatgtaccctaaaacttaaagtataataataataataataaaaagaaaaccttstaagtttgggattttaattatcctttgctattaataagaccttgttttgtctaaattagaattggtatagatggcttttttttcttaactttgtatctctctctctttctctctttctttctctctttgactttgtctctctctttgactttccttttgcctctgcctcttcctctctctctgtgtgtgtgtgtgtgtgtgtctctctctctctctctctctctat

SEQ ID NO: 774544 - DNA, 510 bp, Homo sapiens
aaaatcaatgtgtcggcaatgctggttgcctctcaggggctctgagaaagaatctgttccatgttttcctcctagctctggtggtgaccagcaatccttgggttccttagcatgagacagtgtaacagcaatctctgtctccatctttacagggtattcttccctatgtctcctctgtctctgtcctcytttctcatcaggatgccagttatactgggtttaaggtccgcttaattcaatatgacctcatcttaaccaattatatctttagaggccctatttccaaaaaaggtcacatccatagatactgggggttggggcttcaacatttctttttaggtacacaattcaatccacaacagtttattctctcttccaccctaatatttcaacattagaacatagttcacccatgttttctgccactttataacaacgatcacctttcctccagtgtcgaaaacatgtccattatttccttttaaaggctcaccagaagcacctttaaca

SEQ ID NO: 774545 - DNA, 646 bp, Homo sapiens
gactgaggtttcctaattttactgatgcatagctttaacttaaacaaggattttctaaaggttcatttctacattttgaaatatttgttgagtatcttttatattccaggtactgggttcaacactaggaatataatagtaaagaaaacagactctatgattaccracctcatggagaaaacatgctagtgatgaaaggcagatcatgatcaaacaaaagaacaatataaataaatatacttgagtgctgtgaggaaaactctaggttactgatgggaacacccttcttagagaaaatttgtttttcaagggtatggaaaaggttccctgatgaagtgacatttgagttgatatctgaagggagagtaagagttaattaaggcaaagctatgagcccccagcaaaaggaacagaatgtgcaaaggcccagatgcaggaaggagcatggtgctttcaaaaaatgggaaggagacggggcgcagtggctcatgcctgtaatcccagcactttgggaggccgaggtgggtggatcatttgaggtcaggagttcaagaccagcctgaccaacatggtgaaatcctgtctctactaaaaatatatacaaattagccgggtgtggtggtgcacgcctgtactcccagctact

SEQ ID NO: 774546 - DNA, 641 bp, Homo sapiens
aaaggaagatagcttataattgtgttatttactggcaggcagaattgcatttccgcacatttttattctcttgtgaaaaatgtttttggtttcttgtttgtttgttttgatctaatcatggttggagagtcctttgtgtccagaaatacaactgactcttgtcttttatgtaaaagaacattgtttaactgggggccctgccaagttctggccccagttagaagccctaaccctgtggaaagatatattccagaaaactgagccaaatcagaatacctcaagggactgtaaaaaggtaaaacaattgaaggagtttcacatggtatgcattaagaataagtgatcatggctgggtgcagtggctcacacttgtaatctcagtactttgggaggctgaggcgggcrgatcagttgaggtcaggagttcgagaccagcctggccaacgtggtgaaaccctgtctctactaaaaatacaaatattggccaggtgtcatggcacgcatctgtaatcccagctacttgggaggctgagacacaagaatcacttgaacctgagagacagagcttgcggtgagccaagatggtgccactgcactccagcctgagcgatagagtgagactgaaaaaaaaaaaagtgaat

SEQ ID NO: 774547 - DNA, 467 bp, Homo sapiens
atgcagagatgtatagaaattctagtttcttacacattttagaaaagaagcctggtaccagatgtctgtttcagataatagaaaagtctaattacttytgaattccacagctaaggagttttgcctccgggtggtctgcttgatggccaccaggggatctttgctgccctcaaagatgaaatgtgtccttacgctggcctgaatgccattcccactaggacacatcacatgggctatggtgtccaaacctgttttttcctgtccggaaagggttcatccaggccttcctgcatctcagcctctgttctttcagagttttctgttttgcttgctccagaaataagctagctagtccactgggctcaatgaagaatgaagcctaaagttgggggtgattgtatcctgatgacattgtttgagctcctggatccagctatgcctgaagccaccttacgctgaacttttca

SEQ ID NO: 774548 - DNA, 637 bp, Homo sapiens
gtttcttacacattttagaaaagaagcctggtaccagatgtctgtttcagataatagaaaagtctaattacttttgaattccacagctaaggagttttgcctccgggtggtctgcttgatggccaccaggggatctttgctgccctcaaagatgaaatgtgtccttacgctggcctgaatgccattcccactaggacacatcacatgggctatggtgtccaaacctgttttttcctgtccggaaagggttcatccaggccttcctgcatctcagcctctgttctttcagagttttctgttttgcttgctccagaaataagctagctagtccactgggctcaatgaagaatgaagcctaaagttgggggtgattgtatcctgatgacattgtttgagctcctggatccagctatgcctgaagccaccttacgctgaacttttcagttaggcaggccaagaaattttcattttttcttaagcyggtttgagttgagttacatagaactaaagcatttgggataccctactatgtatgaggctccatactataaacctttgctgcatcaattctatagagtagaattacttttgttaatagatgagaaaactgagacacaaatgacttaagcaacttgcc

SEQ ID NO: 774549 - DNA, 576 bp, Homo sapiens
tttttttttcaaacacccttgattttttttttaatctttaaatgtgtacagtaaccagccaggcatggtggcatgtgcctgtggtcccagctactctggaggccgagacaggaggatgacatgagcccagaagttcgaatccagcctgggaaacatctccagacctcatctccaactctaagaaaaagaaaagaaaaatgaagaattgttgcttgcatcccaaataaaataygaggtcttgaaactcgctgtgtcttctctctactcttcatttcctgcctttaaggggacctggaaacaaacatgaatggcagagaaccttggtggtagggacacagtggagagtgagtgttggggataagacagagaggagatgtgtgtaactggatggccccagagactgtgaggcccttaacagaagtctgccaggctgagggagcaggttggatggcacaggttatatatccagactgggacaggtttgagacacatgtaagtctaaatgtctaacagaaaactggaagagctagaatggaggtttcatgagggctggggttgtgtctgtctcatctctat

SEQ ID NO: 774550 - DNA, 587 bp, Homo sapiens
ccttctcctccctgttgacccagttgctgaggattgaagggtatcctagcactctagacagttaggcccaagtggagtttgaggctagagctgggttgggggcacagagcaggcccctgggaggaccagcacatgactggtagaacaagctggaggcccagtttctcgaaaggaatctgcattgggtgaagtccctgttgtgmcacatccctgttgactccaacactgtgtccaagaaactgaagaagagacctaaaacgtgcaaaggagacagagacatagagtttattagagagttacagacagggcagtccaggaacagcgggctggacaggaaaaccactgccgtttgtaaaaagcattcagtttatttagccatgaaactgcctttgcaaaattataactaaggaaattctaacagtgaaagaaatcagacctaaccaactccattttgcttataacctttaagctgtccttgttcattcctgggcataggctgaacaaactttgggaaggaactccgttcatggtttgactctgaaacaaaattgataacagccctttcccaaaaaggcctccttgcctgg

SEQ ID NO: 774551 - DNA, 558 bp, Homo sapiens
ttacatttattctgtttctgaggatgtttcactgagatattatcgattgtattattaagggcctcaggaaatatctgggcctagatttttcttaggaacatagaaaatgatcaaggttattaaacttattcattacaaaaggcatgttaggacattcaaatgatggaacatcaaatttagaagggacttcatattcctgctctgtatgctttttataagtatcactcctcatgtgggggccatattcatcaaccattcaaggtgagtctgatrttgaaccaaatgagctagacatgtgcaattcagtttgtagagggcatctagtttagattaggcttggggttgcaggaactagagtcaagagatttgtgtttgactaacagttcagcctctgggaatatttgtgacttgggcaagttactcaaccttcaatactttcatctttaaagtaggttaatgatgatatttaaaattatattattgtagtagagtatatgcacatgaagtgctagacatttaaaaattatattctcaaatttttcagtgctaaaataattg

SEQ ID NO: 774552 - DNA, 616 bp, Homo sapiens
cagggtaaatggggtatccttcaccttaagtgtttatcctttggatacaaacaatccaatccaattatattatttatttttaaataaggtctctgttatttaaaatgtacaattaaattactattgactatagtcaccctgttgtgctattaaacactagttcttactcattctttctattttttttacccattaaccatccccactttcccactccccaaactcccactatccttcccagcctctattaaccatccttctactctctatctctatgagttcaattkttttaatttttagctctcacaaattaatgagaatatccaaagtctgtgtctctgttcctggattatctcacttaatataataatctccagttccatccatgttgttgcgaacaacagaatctcattctttttagggctgaatagcaatacattgtgtaaatgtaccacattttctttattcatttagtttgttgatggatacttgggttgcttcaaaatcttggatattgtgagcagtgctccaataaacatgagaatgcagatacctcttcaatatattgatgtattagtttgttttcacactactgataaagacatacctgagactg

SEQ ID NO: 774553 - DNA, 655 bp, Homo sapiens
aaaggagacagtaccaatcagcctgatgtattcagagtctgcaagaggtgtaaagtgtgtggaccccctgagatgcaagaaaagagatgtagaggcagaagtgacttagacctgtgcataaaatatgggaattcttcaagtggtattgctttctggaacttgcaattgtctggaatgcttgctaggtagtcattgctgactacattagctgtctcccaggaaactacagattacatgtttgcctctttaaatcatatgtcagtttgtatgaattagagaaacgttatgtctagctgtataaaactcgaccttaatcataaatagcatatagttcattttgcaatattatcattgcattgtaaaaataatacatgatttggaytcaatacaaaggataaagagaaaaataataatccacaatccgattatctagaaataatgactatcactatttcctgattatatgatacacatttgttgaaaaattgtcctcctgacaaactaatcctttaaaactcattgactgtatttcttctgtgaaatctcgaatactccacagtgataggtctgcttctctattaagatatacctatattatctattcacactgattattgtgtttatcattcaatattctagctattttcttttcttt

SEQ ID NO: 774554 - DNA, 582 bp, Homo sapiens
atctgtgagtcagttaaacctcttttctttataaattacccactctcagttctttatagcagtgtgaaaatggattaatacatcctcctctcccccaaattttctttatgcactatatttttatgctaaattaacaagacatcaaaatgggaccttttctataggcatgccatgtgaaataatcacatcatggagaatgggtcccctttatgttatgaacattccaattatactcttttagttacttaaaaatgtacaattaagttattattgactatagttaccagttgctatcaaacaataggtcttcattctttctaacttttttttgtawcaaagcatctcatgtgtcccataaatatatacaactactatatgtaccaacaaaaataaaaaataaaaaataaaaaaacaaaaaatgagacattttctgtcattatttgctaaaacctcaagaaaataagtgaaataggtggcaaatactcccacattccaaagtgaggtacaaatctacctgaatagagcttacctagcaggcaatcaagaactagtttttcaacttttagttcacctctagtctca

SEQ ID NO: 774555 - DNA, 582 bp, Homo sapiens
atctgtgagtcagttaaacctcttttctttataaattacccactctcagttctttatagcagtgtgaaaatggattaatacatcctcctctcccccaaattttctttatgcactatatttttatgctaaattaacaagacatcaaaatgggaccttttctataggcatgccatgtgaaataatcacatcatggagaatgggtcccctttatgttatgaacattccaattatactcttttagttacttaaaaatgtacaattaagttattattgactatagttaccagttgctatcaaacaataggtcttcattctttctaacttttttttgtatcaaagcatytcatgtgtcccataaatatatacaactactatatgtaccaacaaaaataaaaaataaaaaataaaaaaacaaaaaatgagacattttctgtcattatttgctaaaacctcaagaaaataagtgaaataggtggcaaatactcccacattccaaagtgaggtacaaatctacctgaatagagcttacctagcaggcaatcaagaactagtttttcaacttttagttcacctctagtctca

SEQ ID NO: 774556 - DNA, 643 bp, Homo sapiens
tggagttatacattttatgtttaagcccatgttccattttaagttaattattatataacatatgagacttaggttacagttattttatcctctccatgggtatctaattatacctttgtaaaaaatcagttgggcatatgtatgagggtctatttctggtttctgtattctgttccattgattcatgtttctgtccttctgccagtaccacacagtgcaaatactaatactttatactgtcttgaaattcaatagacttacttctttactttattcttccttttcaaaattgttttagctaatatarttcctttatcatttcacataacttttagcataatcttgcctatatttataaaaaatgctggaactttgataaaattgcattaaacctatttaacctatatatcaatttggggaagcttgacataattactgtgctgactctcaaatgaggtttttctctccatttactagatctttaatttttaaaatcagtgttgtgtagttttaacatacaagacttatatatattttgtaagattgacaccatagaatttcatttttgagtgattataaatggcattgcatttaaaattttaaatatctgtgttcattagtagtgtataaaaatataattgat

SEQ ID NO: 774557 - DNA, 643 bp, Homo sapiens
tggagttatacattttatgtttaagcccatgttccattttaagttaattattatataacatatgagacttaggttacagttattttatcctctccatgggtatctaattatacctttgtaaaaaatcagttgggcatatgtatgagggtctatttctggtttctgtattctgttccattgattcatgtttctgtccttctgccagtaccacacagtgcaaatactaatactttatactgtcttgaaattcaatagacttacttctttactttattcttccttttcaaaattgttttagctaatataattcctttatcatttcacataacttttagcataatcttgcctatatttataaaaaatgctggaactttgataaaattgcattaaacctatttaacctatatatcaatttgkggaagcttgacataattactgtgctgactctcaaatgaggtttttctctccatttactagatctttaatttttaaaatcagtgttgtgtagttttaacatacaagacttatatatattttgtaagattgacaccatagaatttcatttttgagtgattataaatggcattgcatttaaaattttaaatatctgtgttcattagtagtgtataaaaatataattgat

SEQ ID NO: 774558 - DNA, 578 bp, Homo sapiens
tccctggtgaccactgccttgctttctggcatgaggtaagtacaaagtaccttgtactttgtctgctccagctcttgaaagagccccaaaagccctagtccttttaatggcaggaagcatttagaaaccaacatctgaatgttaggtgtgattgctgctgctagggtgtcactgttccgaggctctctcagtggacagtgtgtgtgtggggcagggggtgggggggsaaggtgagtgtacacacattttacgtacatattcatgtctctctttatatattgaaaaccatgagctcacaccaatacctccaattccaattcaacatcccaggattcaatataatggaattatttttttctttactatttggtagaaattgctttaaagctatctgagcctagattttctctgtgtgaagatgttaaacaaatcaatttctttaatggtcctacgacattcaggttttctatttcttcttgagtcagttttaataagttatattttctaggaattttttcatttatgttttcaaacttcaaatttattggcattaatttgttcataatagctcctcttta

SEQ ID NO: 774559 - DNA, 524 bp, Homo sapiens
aagagtcacctttgtaattctactccacacattattttttactcagagtcaacagatataaagcataataaagcaacccaagcccggactcccaattgctggctgggaatttaaacctttggctgctaaatacctccgaagtgcaaattacagtggtttcctgaccttgaagaggcttgttcaatgraaggagaaagtcaagaaaaatcatacaatggtgggactgagaatgtcagagagagaaacggagaaagagcaaaaggaagtcaacctagcagaagaaactaatttacaaaataaaccttattcagtacattttctgtaaattaaaaaaaaaatccatgctctaaacagttatttaaaatatataaactagctaatttacctgtgaatacttcaacaaaaatgtgctttaaattatttaatatacacatttattaaggcactcagatattttgaatacaccccatgagtgatctttgaatggaaatttaaaatttacaaaacactttcacaagcatcat

SEQ ID NO: 774560 - DNA, 532 bp, Homo sapiens
tcctgtgtcctacccatgactagggaggaaggaaatgttccttctgctgtgtaaatcacacagcgtcagatacacgaaaagacaaacaggatggatctttcttttcccttcatacacatctgcaatgcaatgaagtggtgaacttccacacacrtgggatgaactaggagctgccacatgaaggaaaatccattcataaagtacttggaggatcatctggacaaaagatgttatatgaatacctgtgatcattaccaattacatattccattggtatgaatcatcagaatatatagcatgaataagttcagaagataatatctaggaaattaacttgcttcagcttttcctaatttgaccttagctatttttaggattttatcagtttgttttttgtatgaattaaatacaagagtaacatttgttttaaatcccttaaattattcttttgggactaaaaactttattttcctatggtaaatataagaaaggcagttacaggcatgtaaaagtcagtcactaatatgtaaat

SEQ ID NO: 774561 - DNA, 577 bp, Homo sapiens
agcccaggggtccaagaccagcctgggcaacttggcaaaaccctgtctctgcaaacaaagcaaaacaaaattaaccaggtgtggtggcacacgtgtagtgcccagctacttgggagagtgaagtgggaggcttgctggagcccaggaggcagaggttgcagtgagccgagatcatgtcgctgtattccagcytaagtgacagagcaacactctgcctcaaaaaaagggggatatggttaaataaattatggtacaactcccaaaatatttcacagctattatacaagatgcacttgaaaatatcttaatgtaaaaatgtttatgatatttgaggcaaaaagaatgataaaagttagtatttcttgggtgctttccacatcccaggactgttttattctctttacatgtgttttctcattcatttcttaaaagaacctcatgaaataggtactattattaatattactattattaatatcctcactttatatatgatgaagtggaaacaagatggttatcttacccagggttacaatctaagaagttccattccaggcttgatgctgttaaaaatttt

SEQ ID NO: 774562 - DNA, 577 bp, Homo sapiens
agcccaggggtccaagaccagcctgggcaacttggcaaaaccctgtctctgcaaacaaagcaaaacaaaattaaccaggtgtggtggcacacgtgtagtgcccagctacttgggagagtgaagtgggaggcttgctggagcccaggaggcagaggttgcagtgagccgagatcatgtcgctgtattccagcctaagtgacagagcaacactctgcctcaaaaaaagggggatatggttaaataaattatggtacaactcccaaaatatttcacagctattatacaagatgcacttgaaaatatcttaatgtaaaaatgtttaygatatttgaggcaaaaagaatgataaaagttagtatttcttgggtgctttccacatcccaggactgttttattctctttacatgtgttttctcattcatttcttaaaagaacctcatgaaataggtactattattaatattactattattaatatcctcactttatatatgatgaagtggaaacaagatggttatcttacccagggttacaatctaagaagttccattccaggcttgatgctgttaaaaatttt

SEQ ID NO: 774563 - DNA, 546 bp, Homo sapiens
agacaggctcatcagtgcccaaggaaaccaagaagggccaccggagtgtcaaggctctccagggaaaatgtgggtttctacagcatgggagactccagagactttaacacgcaccaactgaaatcaaggctgctcggtgcatgtgttggtttcatggcatggatatttatacaagaaagataaaccctctaggaagtgattaagagaaaaatcaaaagaaagactgaaaagcctgggcctggagtgacgcccacctacccttagatacctcccctgtacctaatggacttgatattctttgcaaataggcataatcaytactgttttgcaatttcgtgaataatctacccttggagggaatgaagtttcttatcctattctgccagcctcctcagccaccctccctctcccccagcttataatctaaggactccacctctccccctcacacactattacagagtttgtttgaggagtgtacaagtgccttctagaaagaggcagactgggtattcgtttactctagtgctatcatccctccccatt

SEQ ID NO: 774564 - DNA, 521 bp, Homo sapiens
actccagctgacaccacgaaaaagcagaaagaccacccggccaacctacagaaacataagaaatcataagtcattcttgtttgaaccccccaagttttggggtggagtattttgaagcaatacataatgggaaaagcccctgaagcctgagttttcttggattcatggtgattccccctgtaggtatagagtctgggtaggaaggcagtggctcttttacccacagccctgtgaagaaggaccaggcactggtgctatgtgttgactgctttccaaactcttccccactaccagctctggtctgtgccaggaaatgtagaccccaccaactctatcaccttctccctcmctggctatttctagttgaacttggcaaatgcctgaacaaagaaagtggtcctcttccccattccgtcccttctccagagctgcacctgtcagtgtttaagccttccaagctagagatccggcaggcggaccttcctccatggctccagccttcccctcagctccaaaacatt

SEQ ID NO: 774565 - DNA, 543 bp, Homo sapiens
catccagggctggcatcccgctattcgtctgcttcctaagagggatggcaggaaaaagaatctttgagagcaattttgagcaagactaaatgagagagaaatgagcagataaaggagaaagagaagctggagaagaatgtggttagaaaggaaaagaaggaaaggaagaaggtgacaggctgccagggtgatgggagatgttcaccttgaccatgagataatccagtgtcttaggaaacttgctccaaagtccagtggatccaaaaggcggaattgtatggagttcagttatttcacatccctgcttattcctgaccagaaaaactcaatctgggaatcaatttctgccaggctccamagggttcataagaggtgatgctaggtggctgtaggtcagggagctgagagacatccccattgaagagcatcctcactgctgggaaaggagatgaattgaaagttggccctgggtaacctgagatggagaagactgagctgagtgaccaagcagcacaatgaacctacattcttgtacaacgtggt

SEQ ID NO: 774566 - DNA, 610 bp, Homo sapiens
aaaatgtggagcgggccatattagtacccatatttgaccagacaaagtccaagctgctttatgtcacaacgaaaggcttaatatatgtgatgctgggctttctctctagcctcattgcctgcccttgctctttaaggaataacaatgtcatgccacttgtaattaccccaaacaatcaaggccaaatgttttctagctgtctgctcagagtgttccttctgcctgaaacatctctcttcctctttcctccaccatctcattgactacatcatctctgtagtctgttctcccagttggctgggcccggttggttatagatatgaggaagtaacttttgcaaaccaagcccaaccttttaagcagacagagtagatatctgcccacatggtttgaatggtggggcttgaggaagctgataactaattatcttttattatttaaaattatttcattatagggttattcctctrattttctttgcatttttgttcttggagaggtttctatatatttttctgagaagagtttaatcccctaaacctttgtgagctcccacacatgagaagggggccatgacaggtacagagggtgtacctgtccctctcggcaa

SEQ ID NO: 774567 - DNA, 557 bp, Homo sapiens
ctctgaggaactgctttcacttctaaagcctcttctgttcaaggtagtaccgggcaggacttctaatcacaggcaattgatattctactgagcatctttggaaaataatctgcaaacaagaggctgcaggctataaaagtctctgtttctcactccctcttccccctctctctttttcagaacaaggcttacagcttaataaaaatacaacccaagcgaaagcaggaaaccttagcactttgcccaacaatattatccttttaagagttttattaatcggtttaaagttgtrccgcatttggctaagaggtgcaaggtgccttcccctgctgacaagactgtccttgcatttcaggagttggcacgggtggctcaattaacagaatggcggggaaaagagggtcagccttggaaggctcgagactcacactgcgtggatgatgagtcgagcagcagtttggctctccttctgcatgccccttgcatctagcacacgtgcacacacacacagacacacacacacacatgcacatcgagacacacacacacacatgcac

SEQ ID NO: 774568 - DNA, 624 bp, Homo sapiens
atgtgtgtgtgtatgcatgtatatatacatacactttgcctggaaaaaaatgcctgagatcaacaagtaaacatttctatgctacgtggagttacttgcaaactgtctcatggctccattcagaaattagctaggctgcatcccacggtgttgagattcaacgtaaacatttatcaagcatccattgtaccaggctccctgttgtacaggtgcaggtgtgctctctcgctcaatcctcacaacagtgccattaggcaagaactattgacccatttcacagtgaaggcaactgagactcagagaagccaagagcccaaggagtgagttagcacataaatgacacagtcagaatatgagcccatgtctttggactcccagtctgacccccactttactgcagcgcaatagaaaagacagtcaccctaaattgaggcacaggttaagtatttctctgcaccccagctggggatggctgattgggcaggtgyaggtccacagtggtactcacagtaggacaggtcaggtgtgtgtttcaggtgggctaatcaccatagatgggagcgtgcatctccaatgtccgcttggattgtcagctttctttggaataattaagagaaggtaaag

SEQ ID NO: 774569 - DNA, 624 bp, Homo sapiens
atgtgtgtgtgtatgcatgtatatatacatacactttgcctggaaaaaaatgcctgagatcaacaagtaaacatttctatgctacgtggagttacttgcaaactgtctcatggctccattcagaaattagctaggctgcatcccacggtgttgagattcaacgtaaacatttatcaagcatccattgtaccaggctccctgttgtacaggtgcaggtgtgctctctcgctcaatcctcacaacagtgccattaggcaagaactattgacccatttcacagtgaaggcaactgagactcagagaagccaagagcccaaggagtgagttagcacataaatgacacagtcagaatatgagcccatgtctttggactcccagtctgacccccactttactgcagcgcaatagaaaagacagtcaccctaaattgaggcacaggttaagtatttctctgcaccccagctggggatggctgattgggcaggtgcrggtccacagtggtactcacagtaggacaggtcaggtgtgtgtttcaggtgggctaatcaccatagatgggagcgtgcatctccaatgtccgcttggattgtcagctttctttggaataattaagagaaggtaaag

SEQ ID NO: 774570 - DNA, 590 bp, Homo sapiens
cctatctagtccgagcaatgacaagtcagcctggcaacctcttacaagtctcacccagccagtgcatcaaatctggaggaactttgcccacactgtgtctgatgtacctatgtgtaacccccctggtctcccagagctgacyagctattcttgtcgtatgtgctggttctaaatggctaaggctcctgtcctcattcccttgggtctccttattctgaacccaacctgtttggctgatgccctcattccctacaaaacagtttttattcccccacccctgggggctggattttatattctggacccttctccccttacttcatctctagttctataaccaacagcttggtgacatctatgatcacagttctcttctgcattcactgcacatgaccaccacctggatattcttatcaccatgcctcttccatttcccaaattagtttcctggcatactcttacctggatggattacactgagatttgctctatttcctggatataggccattgaactctgttctgccttagttggggatagagaaggaggaaaaagcctcattattgaatttgcttcccaagacccatcct

SEQ ID NO: 774571 - DNA, 590 bp, Homo sapiens
cctatctagtccgagcaatgacaagtcagcctggcaacctcttacaagtctcacccagccagtgcatcaaatctggaggaactttgcccacactgtgtctgatgtacctatgtgtaacccccctggtctcccagagctgaccagctattctygtcgtatgtgctggttctaaatggctaaggctcctgtcctcattcccttgggtctccttattctgaacccaacctgtttggctgatgccctcattccctacaaaacagtttttattcccccacccctgggggctggattttatattctggacccttctccccttacttcatctctagttctataaccaacagcttggtgacatctatgatcacagttctcttctgcattcactgcacatgaccaccacctggatattcttatcaccatgcctcttccatttcccaaattagtttcctggcatactcttacctggatggattacactgagatttgctctatttcctggatataggccattgaactctgttctgccttagttggggatagagaaggaggaaaaagcctcattattgaatttgcttcccaagacccatcct

SEQ ID NO: 774572 - DNA, 515 bp, Homo sapiens; identical to SEQ ID NO: 758312

SEQ ID NO: 774573 - DNA, 577 bp, Homo sapiens
ttactatcatgtatattcctgagcgaggttaggaaatttttaaaaaatgctttcctgggaagaaaagttgaagagttaatgaatattcattttctgtgttcatctgtttcttttcacgtgacttttatttgggccataactttatgctggaaagtttacacttcaattgtctcactgaatatatacagcaatactatgactaatatagttactttcatttcagttttacagctgaggaaacaaggactttggaaatcaagcaacttgtctaaatttggattcaaactcaatttgtttctgtaacccatactccatttatcacatacccccttggaaatttaaagagaggattttttttttaatgatatgtgacttcaattactaaccttaaagtatgagcaacgggcataagcaaakatttttccatcttgcattttcaaaacaatatattgaatcagattaggtactaaaatatactcaatcactgtatcaaattgcagcacttctaagaaaacgaattttagccagtgcaaatatacttagcaagcacatagtaggtactaaataaatgtttact

SEQ ID NO: 774574 - DNA, 540 bp, Homo sapiens
tgtcttcaatgttatacgcagaccaaagtatccccaaactgcttcttcaccatctccaaactaatttacctctctgctcatctttaacaagtcttggctcttcttaggagtcacacagacacaggggtgaatatcattactggctccaaatgttcatccctggctgtagtatccataccttttttttcatatgactttgaaattcctcccctaaagatacagtctatttccctgcttcctaactttgagcttagccatgtgactcactttggccaacataatgagayagaagtaacgacatgcccctaccaagcctagaatgaaccagacttagtgtttctgcccatcctcctgggtttgccttgcccccttagccctgggaagagcacacccaagctagctgccccaggtcagaattggagaagaggtacggcgcagagtccattcacagcctcacaatgagaggccgagatgcctagctgagcacaggtgaaatcagccaaccctcaggtgacatgcagattatgtctgcaagtgata

SEQ ID NO: 774575 - DNA, 638 bp, Homo sapiens
tatgatctgtcagcataagaaaagttctaatatatggactacttttttttcaattactttatccaaaagttttggcaataaactcatttcaaaagctgctgtataataaatattaaaacttacgacattaatacacatgaaactatttttcttctacttttcatgaaaccacctatcccaaaatctacagaaaatacttttatgatttataataagtcactttgcaaagactaagaaatgttacagcagaaaccaaagtaatttcctacaaggaaaaatatttactcccctatgacacccaaaaatcccatttttaaataaattacctctactcatatccccaataattttttttaaaatacattcwtggaaataattagtccttgttctctgaaaacctagatgtattatttaatgctagaaatccatgagaaatttactaaaaatttacttaacatacaaaaaggagaaacattcatgctcactaaaactatacattttataataattatatttctattataagtacttatcctatttttatgttaggaagaaaaaaataaagttgaaaatacaaatcattttacctatgtatttttgggtttttttttcccataacctttcagaaagcacataaa

SEQ ID NO: 774576 - DNA, 520 bp, Homo sapiens
gactcatcaaaagactaaattatgttcaatactattttagcattaattaaacatattttgctatattgaaactcttttggaagatttataacttatttcaaagaaacatctttaaacaaatatttaagttagcgacagcatggctgaaccagtctggataaagaatactgtattatattttctcagatcccagtaagtaacctgaagatatcaagcaactacttaccactaagagattgttgccatgctaaagcagaacaaagtaaggctaagctttttccacttcctgtgggactctccaacaaacaatgttgcttgctgtttaatcctctgagaatctatgaacacagaaaccmatgaaaataataaacatattaactttataaaggtctctctccatctgaagtttaaatagaacagcaaggaaaagtgagattgcactccagggaacacaacaatagcagaaggaactcatatttagttaaatccaaactgtattcctttacacctctccctaaga

SEQ ID NO: 774577 - DNA, 519 bp, Homo sapiens
tctgagacaaaacttccagaggagcaatcaggaagcaacatttgctgttcagcaatattcactgttctgcagcctctgctgctgatacccaggcaaacgaggtctggagtggccagcaaactctaacagacctacagctgacgatcctgactgttagaaagaaaacagcaaacagaaaggacatccacaccaaaaccccatctgtacgtcaccatcatcaaagaccaaaggtagataaaaccacaaagatggggaaaagacagaaaagagaaacttaaaattytaaaaaccagagtgcctctcctcctccaaaggaatgcagctcctcaccagcaatggaacaaagctggatggagaatgactttgatgagctgagagaagaaggcttcagactatcaaacttctccaagctaaaggaggagttcgaacccgtcgcaaagaagttaaaaaccttgaaaaaagattagatgaatggctaactagaataaccaatgcagagaagtccttaaaggacctgat

SEQ ID NO: 774578 - DNA, 519 bp, Homo sapiens
tctgagacaaaacttccagaggagcaatcaggaagcaacatttgctgttcagcaatattcactgttctgcagcctctgctgctgatacccaggcaaacgaggtctggagtggccagcaaactctaacagacctacagctgacgatcctgactgttagaaagaaaacagcaaacagaaaggacatccacaccaaaaccccatctgtacgtcaccatcatcaaagaccaaaggtagataaaaccacaaagatggggaaaagacagaaaagagaaacttaaaattttaaaaaccagagtgcctctcctcctccaaaggaatgcagctcctcaccrgcaatggaacaaagctggatggagaatgactttgatgagctgagagaagaaggcttcagactatcaaacttctccaagctaaaggaggagttcgaacccgtcgcaaagaagttaaaaaccttgaaaaaagattagatgaatggctaactagaataaccaatgcagagaagtccttaaaggacctgat

SEQ ID NO: 774579 - DNA, 627 bp, Homo sapiens
tgggaagactgtttgagcccaggagttcaagaccagcctgggcaacatagggagactctgtctctacaaataaagaaaattagccaggcatggtggcacacatatgtggtcccagctacttggaaggctaaagtgggaggattgcctgagcctgggaggttggggctgcagtgagctgtgattgcagcatgtactgtgcagagggagactctgtcaaaagaagagagagagagagagagagagagaaaagaaagraaagaaagaaagaaagaaagaaagaaagaaagaaagaaagaaagaaagaaagaaagaaagaaagaaagaaaaagaaagaagaaaaaaagaaagaaaattctacatccctgagagcctaacatgtctaaatgtttcttgtatactcattgccattgttttctgatgttggttagaaccttgcacaaaaacgatcactttgaaataatttaacaaactctagtaataatatatatgtcaaatacacttttaataaatcattgcaaataggaaacaatcttttaaaacttgtttcggtgataatttaaccaccagttggaagggtttaatatgaagcagtcaaaattaacataagaacatagtaaaattaataga

SEQ ID NO: 774580 - DNA, 627 bp, Homo sapiens
tgggaagactgtttgagcccaggagttcaagaccagcctgggcaacatagggagactctgtctctacaaataaagaaaattagccaggcatggtggcacacatatgtggtcccagctacttggaaggctaaagtgggaggattgcctgagcctgggaggttggggctgcagtgagctgtgattgcagcatgtactgtgcagagggagactctgtcaaaagaagagagagagagagagagagagagaaaagaaagaaaagaaagaaagaaagaaagaaagaaagaaagaaagaaagaaagaaagaaagaaagaaagaaagaaagaaaaagaaagaagaaaaaaagaaagaaaattctacatccctgagagcctaacatgtctaaatgtttcttgtatactcattgccwttgttttctgatgttggttagaaccttgcacaaaaacgatcactttgaaataatttaacaaactctagtaataatatatatgtcaaatacacttttaataaatcattgcaaataggaaacaatcttttaaaacttgtttcggtgataatttaaccaccagttggaagggtttaatatgaagcagtcaaaattaacataagaacatagtaaaattaataga

SEQ ID NO: 774581 - DNA, 648 bp, Homo sapiens
ttcccttctagcttctccttctcattttcatcctgacacacttataccattgcctatgagggtatgcacacagatgcctaggctaggtgccagctacacacacagtttttctcagtgaagcccagcatgacacctgctgcataagatctaattaattagcygacataaaagaaaaacctatttttcttttgattcttaattttagcatgtgtggagttcagtgcttcttagaaaaactttctctcagaagactactcattttaatacacagcatatgtatgttccagttacgttatctacagcaaggtatattagcaaaaagtaatagctgctctggattctgaattttgatcacttgaatacttaaaatgagtcagaattcaattttggaaaattgctgatagcaaaatgttaatgaaaaatattacatcaatcacagacttccagaaatgttgtattaaagtttcccaaaggctttcatgtacagattatttaaataatacagtctttattaatgatctctttgtaattctgaatatagcactaatttattcagttgccttaccgattcaaacaagaccataaacagcatgaaaacataaaatgttgtgtcctgatctgacacaattgctttaataatgatgagaa

SEQ ID NO: 774582 - DNA, 647 bp, Homo sapiens
gaatttaactgatctcaacacattctctatcaacaatctacgaacaatatgctcatatgctagactttgtcagacattatgtaatgcatcaataaataatgccttttactttctgttcactttaagcatatctgtattagttaccattcacatttccttttttattatctcatttctgtctttcccattatgaaaaggctttctaataccattttgattctcagtatttccaaggactaatcctcatgcatcatagaactggctggaggacagatctctgaaattcctatttatgaggctcaaatcttataacagcttcaaagtttcctggattgatttctacaaataagtcctttattaaagattttttgtgattcaaaatagacatgatgaaaaaaagatcctcggcactagtcacatacctgtttataatttatatatatatatatatayacacacacacacacacatatatatatatactgaaaatatacatatatgttcttatatgaaatccaatttcccttcagtgggaaattataaaaatattcaagtatatttaatcaaatagctaaacaattctcatttaaatactatttgatggcaaattgcagattatgttatccaatttgttatagtaacattaa

SEQ ID NO: 774583 - DNA, 634 bp, Homo sapiens
ttagttatatgctcaccatttcctctggagcatctcttagagaaagaggaatcatgaatagtatcagtaagttaaaaaagacattcacttgccagagtcaagtcaagtatctcttttactatactatagtcagagctctccagagaaatagaactaggggcagatacatatacatatatatatatayatataagcacatatatacacacatataagcatatatatatatatatatacacacacacatacataagtatataaagactcattataaggtattggcttaaatgattttagaggatgcaaaggcccatgatctgtcatctgcaagttggagacccaggaaagccagaggtgtagttcaaaagcttaagagccagagagccaataatgttgcagtctgggtttgaaggcctaaaaaccaggagcactgaggacagaagaagttcaatgttcagctcaagcggccaggcagttaactggaccttcttccaccttctcattctattcatgcccttaatggatcgcatgatgcccaacaacactggggagggtaatctgcttaactcagtctaccaattgaaatgctaatcttatccagaaacaccatcatagccacacccagaaataatgt

SEQ ID NO: 774584 - DNA, 634 bp, Homo sapiens
ttagttatatgctcaccatttcctctggagcatctcttagagaaagaggaatcatgaatagtatcagtaagttaaaaaagacattcacttgccagagtcaagtcaagtatctcttttactatactatagtcagagctctccagagaaatagaactaggggcagatacatatacatatatatatatatatataagcacatatatacacacatataagcatatatatatatatatatacacacacacatacataagtatataaagactcattataaggtattggcttaaatgattttagaggatgcaaaggcccatgatctgtcatctgcaagttggagacccaggaaagccagaggtgtagttcaaaagcttaagagccagagagccaataatgtygcagtctgggtttgaaggcctaaaaaccaggagcactgaggacagaagaagttcaatgttcagctcaagcggccaggcagttaactggaccttcttccaccttctcattctattcatgcccttaatggatcgcatgatgcccaacaacactggggagggtaatctgcttaactcagtctaccaattgaaatgctaatcttatccagaaacaccatcatagccacacccagaaataatgt

SEQ ID NO: 774585 - DNA, 594 bp, Homo sapiens
caagctgctacaacaatattcaattcattttgtttggaaagaataacttccaattgtgttgacactgaccaatgactgggtaaacgtgtggatagcattatacttccttttagacactgttacatgaccacagtggttacgatatcttagatttactgttcatttcatgcctagtgtcatgtagaccattcgacttatgacattcatggatatatacacatatatttttggcaagtggaaagaatgacaaaggagacagttgtgtggcttcctttcacatgttaacatgacttcccaattctatttttttcttaaatggcaaatctctgaatgatctctctcttaagaatgatgcctcagacctaaaataagttttgacgacccatagccttcaggatgaagtcaatttgttaggaatctgctctttaatamgggatgtctagtgggtccatgcacaataaggagatgattataattagctattaaattattagtggtggacagttttcacggaaagaagtcataaggtatttagaacctgaaggaaatatgaattgatacaaaggagaaaggaaagaagcaaggaaggaagga

SEQ ID NO: 774586 - DNA, 602 bp, Homo sapiens
  misc_feature 291: n = A,T,C or G
aatccgcccgctctgggggactagggaggaagaagtagaggaatggcttccgggcttcctctggtcaaagggccttgctctcattattacccttgtctggaatgttctctcttcctccatctttctcctctttcttaactccagcccaagggtcactttatgagggaaactctcccacatttcccagtctcggcctccttggtttatgatctccargaacctgttcctttccttcagagcatttatctcaatttgtaattacatactcattattatgattattttatttangactgcgttcccacaagcctgtaaacttcatgagagcagaaatggtgtcttttgatatttgtcacagtatctccagtattctgtgcagtgccttacttgtaatactcatttaattaataaataaatgaaagaattatttaaaggaatagccggtgatgctaaggacaatttccactagagacattttttataaaagtaggagagcagattcaagaatagcttattagaattaccactgtctatgtcaggtagcattctaggacaaagtacctcatacattttttttcaattgctatttatagtttttactt

SEQ ID NO: 774587 - DNA, 602 bp, Homo sapiens
  misc_feature 291: n = A,T,C or G
aatccgcccgctctgggggactagggaggaagaagtagaggaatggcttccgggcttcctctggtcaaagggccttgctctcattattacccttgtctggaatgttctctcttcctccatctttctcctctttcttaactccagcccaagggtcactttatgagggaaactctcccacatttcccagtctcggcctccttggtttatgatctccaasaacctgttcctttccttcagagcatttatctcaatttgtaattacatactcattattatgattattttatttangactgcgttcccacaagcctgtaaacttcatgagagcagaaatggtgtcttttgatatttgtcacagtatctccagtattctgtgcagtgccttacttgtaatactcatttaattaataaataaatgaaagaattatttaaaggaatagccggtgatgctaaggacaatttccactagagacattttttataaaagtaggagagcagattcaagaatagcttattagaattaccactgtctatgtcaggtagcattctaggacaaagtacctcatacattttttttcaattgctatttatagtttttactt

SEQ ID NO: 774588 - DNA, 611 bp, Homo sapiens
ctgtctgctcaggctctccttgggcacggaggacccatgagttctctccgggcagcccaaaccctcctggtccgaaaacgtctggaatcttccaacaggcattcttcgcttcctgcactttccgggggctggcaggggaccaggcaccatttctcctgacaaatccaacttctgagaagaggccgagtcctcggtatccatggagtctgagatatagagaggatggggcgcacgtcaggccaaattctctgggtgcagtgttcagcactgtaacttttaaaaggcatgtgtgtgcccatgtatatacacacatggacacacacrcacacttacatatgtacacgcacacctatccacgtgcatacatacatccatacacctgcacaaagacacacgcagagggagggtgccgagggaagaaaggggcatactggggcacacgtgctaacacgcaaactctgggggagtctggatgaagcagacacggaccgcccagcttcgcgtgttcaccccatgatgaccgacgtgcagtacgcttcaacaacgcattccaaacaacgtctaagcacacgcccatctctgaagacaggtgaagtgacagactctgatgg

SEQ ID NO: 774589 - DNA, 611 bp, Homo sapiens
ctgtctgctcaggctctccttgggcacggaggacccatgagttctctccgggcagcccaaaccctcctggtccgaaaacgtctggaatcttccaacaggcattcttcgcttcctgcactttccgggggctggcaggggaccaggcaccatttctcctgacaaatccaacttctgagaagaggccgagtcctcggtatccatggagtctgagatatagagaggatggggcgcacgtcaggccaaattctctgggtgcagtgttcagcactgtaacttttaaaaggcatgtgtgtgcccatgtatatacacacatggacacacacacacacttacatatgtacacgcacacctatccacgtgcatacatacatccatacacctgcacaaagrcacacgcagagggagggtgccgagggaagaaaggggcatactggggcacacgtgctaacacgcaaactctgggggagtctggatgaagcagacacggaccgcccagcttcgcgtgttcaccccatgatgaccgacgtgcagtacgcttcaacaacgcattccaaacaacgtctaagcacacgcccatctctgaagacaggtgaagtgacagactctgatgg

SEQ ID NO: 774590 - DNA, 536 bp, Homo sapiens
aagcatccaacctctgagactcagccgctgagccagcccacagagggtcaggagctctgcccgccagcagccacctgcccctccaggctccaggcagccactgcccccactcctggggaagcccagtgatcccagtcacagctccctgactccggggagcagcattcaccccgagtctgctctgaggccagacatcccctcataggccacctcccatgccgaaaccctacacacccacggggctgagaggagccagggctgccactcaggcctcggcaccgagaagtccrgcaatgcccggacccctgctccctgggggcccagatggcacgttcaggctcccatatcagggctgcttctgagaagggcggggtcttgaagcacaaccccctccactccccatggcccgctccccacagaacccacccaggggctcagggccgcagacccccgtaagtcaggtccctcggcccgtgagcccagcgcactcacttgatcttgctgaagacgatgtccacgtcagtgacggtcacgtt

SEQ ID NO: 774591 - DNA, 536 bp, Homo sapiens
aagcatccaacctctgagactcagccgctgagccagcccacagagggtcaggagctctgcccgccagcagccacctgcccctccaggctccaggcagccactgcccccactcctggggaagcccagtgatcccagtcacagctccctgactccggggagcagcattcaccccgagtctgctctgaggccagacatcccctcataggccacctcccatgccgaaaccctacacacccacggggctgagaggagccagggctgccactcaggcctcggcaccgagaagtccagcaatgcccggacccctgctccctgggggcccagatggcacgttcaggctcccatrtcagggctgcttctgagaagggcggggtcttgaagcacaaccccctccactccccatggcccgctccccacagaacccacccaggggctcagggccgcagacccccgtaagtcaggtccctcggcccgtgagcccagcgcactcacttgatcttgctgaagacgatgtccacgtcagtgacggtcacgtt

SEQ ID NO: 774592 - DNA, 522 bp, Homo sapiens
ttcttcaccacatctgggacttaggaagccaaggacatgaggagtagcctttccagactctaccatagagaaagtattgccagaaactagagaataaaataaatatgaaagaagctggtgacaataacgaaatgagtcatgcatatatgcatgttaaataatttaatcttttctttacacccttttgttaaaagaattcgaagtgctatttttaccartctttatagtttagcccacaaattaataataagtagacagattaacggctcatgagagaagagccttttttcctacatggtgttgggctgaacagattggactttccccacattctggggagcacaatgctacgtggggagcatgatgttctttgtaaaggaaatctttatgtgaggttctagcatgttgctgttgatactagtaatgactagaaattcgagtgtagaaagatgtgtatttatgatagaaagccacagggtggacttgggcagaaatagcccctgaatccatgaaaacagatga

SEQ ID NO: 774593 - DNA, 522 bp, Homo sapiens
ttcttcaccacatctgggacttaggaagccaaggacatgaggagtagcctttccagactctaccatagagaaagtattgccagaaactagagaataaaataaatatgaaagaagctggtgacaataacgaaatgagtcatgcatatatgcatgttaaataatttaatcttttctttacacccttttgttaaaagaattcgaagtgctatttttaccagtctttatagtttagcccacaaattaataataagtagacagattaacggctcatgagagaagagccttttwtcctacatggtgttgggctgaacagattggactttccccacattctggggagcacaatgctacgtggggagcatgatgttctttgtaaaggaaatctttatgtgaggttctagcatgttgctgttgatactagtaatgactagaaattcgagtgtagaaagatgtgtatttatgatagaaagccacagggtggacttgggcagaaatagcccctgaatccatgaaaacagatga

SEQ ID NO: 774594 - DNA, 522 bp, Homo sapiens
ttcttcaccacatctgggacttaggaagccaaggacatgaggagtagcctttccagactctaccatagagaaagtattgccagaaactagagaataaaataaatatgaaagaagctggtgacaataacgaaatgagtcatgcatatatgcatgttaaataatttaatcttttctttacacccttttgttaaaagaattcgaagtgctatttttaccagtctttatagtttagcccacaaattaataataagtagacagattaacggctcatgagagaagagccttttttcctacatggtgttgggctgaacagattggactttccccacattytggggagcacaatgctacgtggggagcatgatgttctttgtaaaggaaatctttatgtgaggttctagcatgttgctgttgatactagtaatgactagaaattcgagtgtagaaagatgtgtatttatgatagaaagccacagggtggacttgggcagaaatagcccctgaatccatgaaaacagatga

SEQ ID NO: 774595 - DNA, 618 bp, Homo sapiens
gggctagagtgttgagggaattcctctttgtagtagggacagaaacagagcccaggatattttggccaatcttgttctagctcagaatgctacatttccagaacattctacagttattcctgaaaactactagcaagaaagggaaggagactgggttgattcatgactaaatggaaacttttctgcaaataccaaagtgaaatcataactcggtatttttgagactgggttatttcacttagtgtagtgtcctctagttttatccatgttgtagcgtgtgtcagaatttccctcagtaatgtgcttttgtatgtatataccacatatggattaccaattccttcctttgtgaacatttgagttgcttctaccttttggctaytatgaacaattcggttctgaatgtgggtatacaaatacgtcctcaagttaatatcttcaattacttgggtatgtgtccaaaagtgtaattgctgagttatatagtatttctatttttatttctttgaggaattgccatcttgtttcccacagcaggtgggccatttacatcaccaagacagtgtccacaggagttccagttccctaaattctcaccaagactggtcattttctgtt

SEQ ID NO: 774596 - DNA, 621 bp, Homo sapiens
atctctgtatcctggcatctagaacaatgactgcatagaaggagctcagacttttgaggatatgaaatgatcaaactcatctctgtatcccggcatctagaacgatgactttacagaaggagtacggacttctgaggatatgaaatgatctaacgcatctctgtatcccggtatctagaacaatgactttacagaaggggcacggacttctgagaatatgaaatgatctaacgcatctctgtatcccgacatctagaaaaatgactgcacagaacgggcatggacttctgagaatatgaaatgatctaactcatctctgtatcccggcatctagaacaatgagtttacaggaggagcatagacttctgagaatatgaaatgatcgaactcatctctgtatcctggcatctagaacatgactttacagaaggagcayggacttctgagaatatgaaataatctaactcatctctgtatcccggcatctagaacaatgactgcatagaaggagctcagacttttgaggatatgaaataatcaaactcatctctgtatcccagcatccagaacaatgactttacagaaggggcacggacttctgaggatatgaaatgatcaaac

SEQ ID NO: 774597 - DNA, 606 bp, Homo sapiens
ctattacgagaagaccgtgatcttcaggaagagtctctttcggaatctgtccaaccccggtgatcttgtgattctggatgagcgatttaacctcctaaatctgataacgcccagggtaggccctgaccccgtgacacctcaccagggaggaagagctgacagggaaagggcacatgctctctgcagcccacagagctcgactcttcccaggaaacctgtaaatctggaaaaaatrttttagatctccatgttacagatgagaagatggaagctggccacagccagagttggaatcccacccaaggtctcctcactcccctcaagctgcctttacactaaacagtgatgcccacaaaactcggagactgtttactcattgtgctcctaaaccaagtccatggcactggaaaggaagaagtcagctcttccgaaagtcagaaaataaaccagaccggggattccatgagcagctagagcaggtctgagcaggagcgagactggctcaggccaagagcgtctgagctttggggagatgtggactcctaggatgtggggtccatcctctgggttcaacctcttccaggcaagagaccaccagtgagcagg

SEQ ID NO: 774598 - DNA, 627 bp, Homo sapiens
ttcgtgccgccacgcgcgcctgcggcctgtgcgcccgagcccggcatccccggagagacccgcgggccctgcttcctggccggagacggccgcgccagcgaggtcccctccctgacggcactgcacacgctgtggctgcgcgagcacaaccgcctggccgcggcgctcaaggccctcaatgcgcactggagcgcggacgccgtgtaccaggaggcgcgcaaggtcgtgggcgctctgcaccaggtgcgcggggtggtcctgggcgccctgggtggctgcgggcaaagcggggggcgcctcgtgtgggtgcgcagcatcgtggcttctctctcccaggtacttgcacagccatcatgggygcccacatgggtgagctccaggtcgtggggccctgtgtgggtgcgcagtcctgctgggcgccctgcatgggcgtgtggagggtcatcgtgagctcctgtgcaggggccgaagggtaactccggagctggcggccctccggggcccctctgtcccacctgcttaccctccagccggctggtgattatcccaccaagacccaacaaccacagccccacaacagtggcagccagaccacccaggtttcccggtgcgcacagccaagctacg

SEQ ID NO: 774599 - DNA, 630 bp, Homo sapiens
tgtgaggattctgaactaacaagttagagtctatttgaaacctttcttcattttatgactttcttaagtatcacatgagagggtcttgaatggagagtcaagttggccttttattaattgtgtgatggagaaaagcacttatgcacctggaaatgcggtccctgactctaggggtctcacaggttgttaggaagaaggatgggctgtttgatawgcgagtcaccgtgtgtgtctgttgcaccaggccctgtggcggcctgggcatcgtgtctgcagtcctagccgggagcctgcagggaggtgcgcgtcagtcctgttctaaaggaggcactggagccttgtccgaggaggcacaggggctgtgtgtggcaccggctgcccccgggcaccatgcgcccctgccgctttctggccttcactgcactggggtccaggccccaaaggtcagagcagagggtctgggaagcctccatgcgctgggtgttaacccttagttcctgggtggcgaggggacctggagcttcctggaacaggggctggcagcagcaggccctcacacttctccggcaagcacggcagacgggctcactgtcctaacacgcatccacacagcaaacacagcagacgagc

SEQ ID NO: 774600 - DNA, 592 bp, Homo sapiens
acaccaaagatggctgggcattgacaaaccatggatgtgtgtggcagcattcatatattttttctttcttctccttgcttcgccctacagcacaggtgtaagaatagaaaaggcagatcacttggctcatcttgaattctgtagaatgtgcacaacgaatggacaataggttaaggaaattaaagtwaagatattacagagagaatgactgaagtaatgaactatggaatctaagcaacacataaagagaaataaagcctgaatgagacccaatagcccaaaagaaatgaagatgacaaggtcattgtgacattaaatagatacatggtatattggtaccaagtggatgaaaacttgaatgataaaagactgtggttagagagtgggatattggagtttaaatttcataggtagaatagatgtagggaagtcaagatatgagtttaggaaatgagtgactgaagtaaagaagacattgagccctccttcataatacctcaattgttttttatttatttatttatttatttatttattttcatttatttttgagatggagtctcactgtcacccaggctggagtgcagtggta

SEQ ID NO: 774601 - DNA, 632 bp, Homo sapiens
tgccttctcagctgagctcctgacttctatcgccactgccacttggatgtccagtagtcatttcaaacttaacttggtcaaaacagaactacttatttccctactcccccatttccgtgtcttgtttaagtttaaatgtgcctattttaaaaaaaggtggcctggcgtggtggctcacgcctgtaatcccagcactttgggaggccgaggcgggctgatcaccaccaggtcaggagatcgagaccatcctggctaacayggtgaaaccccgtctccactaaaaatacaaaaaattagccgggcgtggtggtgggcgcctgtagtcccagccactcgggaggctgaggcaggagaatggcgtgaacccgggaggcagagcttgcagtgagccgagatagcgccaccgcactccggcctgggcaaaagagcgacactccgtctcaaaaaaaaaaaaaaaaaaaaagaaagaaagaaagaaaagaaaaggcacatcattcacctacttgcttcggcaacacgactatgcatcatccttgattaaatctctatcatctactcttttcatcattactaggtgatagtcttgccttctgcattacgttaaaaatagacacaaatgataactaatcaat

SEQ ID NO: 774602 - DNA, 632 bp, Homo sapiens
tgccttctcagctgagctcctgacttctatcgccactgccacttggatgtccagtagtcatttcaaacttaacttggtcaaaacagaactacttatttccctactcccccatttccgtgtcttgtttaagtttaaatgtgcctattttaaaaaaaggtggcctggcgtggtggctcacgcctgtaatcccagcactttgggaggccgaggcgggctgatcaccaccaggtcaggagatcgagaccatcctggctaacacggtgaaaccccgtctccactaaaaatacaaaaaattagccgggcgtggtggtgggcgcctgtagtcccagccactcsggaggctgaggcaggagaatggcgtgaacccgggaggcagagcttgcagtgagccgagatagcgccaccgcactccggcctgggcaaaagagcgacactccgtctcaaaaaaaaaaaaaaaaaaaaagaaagaaagaaagaaaagaaaaggcacatcattcacctacttgcttcggcaacacgactatgcatcatccttgattaaatctctatcatctactcttttcatcattactaggtgatagtcttgccttctgcattacgttaaaaatagacacaaatgataactaatcaat

SEQ ID NO: 774603 - DNA, 618 bp, Homo sapiens
tctcataagaagtcgttatgatcaatgtcatcttaaaatgtggcactcaaaatcaagcacaattttccaaagactatcagatgtaaggagaacatggtaaaatagctaacctttatttcttatgagttgaaattgactcaggtgagccaagaaaacaccctgacgtcactctgagtgtagccccctttcttctcttcattcccttcaaatatacttgggcctgaacaaaaattttgttattgatgacaaggagaattctatggctaataatgattatgatgattgtcttaggccattcttgcattgctataaagaaatacctgagactgggcaatttataaataaaagagatttaattggctcacatttctgtctgcaggccagacaggaagcatggcaaaagcttcttctgcttggcttctggggaggcctcagggagcttttactcatggcggaaggtgaagcagaagtttgcatgtcacrtgatgagatcagtagcaagagacagatgttggcggtggcaggtgccacacacttttaaacaaccagatctctttagaactcaagatcgtgaggacaacaccaagacatgagggatcacctccatgacccaaacac

SEQ ID NO: 774604 - DNA, 605 bp, Homo sapiens
tttttttttttttgagacagagtctcactctatcatgaggctggaacgcggtaaaacgatctcggctcactgcaacctctgcctcccggattcaagcgattcttttgcctcagcctcccaagtagctgggaatacaggtgcatgccaccactcctggctaattttttttgtatttttagtaaagacagggtttcacaatgttagccagcatggtcccgatctcctgacctcgtgatccacctgtctcagcctcccaaagtgctgggattacagacatgagccactgctcctggccattttttctatctttatctacactcttccctctatttgtaaaggttttttcccaccccaataatcttgcctcaaaacaatatccaaaatgaaaaatatcataaattctggccacagtgggcccttctgcctctctggccacagtctgtccaagtatrcccacagctgctgtctttgttctaggcttatggaatggtctagaccctgtagacacttgtgacatgggccctaaactcacttttacattctatttttaaactgaacttagcacaaggcagggcacaaatatacagtgaaggatagatagatag

SEQ ID NO: 774605 - DNA, 624 bp, Homo sapiens
tacacttaatgtatgtaaaagagtaaaagagaaaataagcatcagcatagtaaaaggagatggagccaagacaggttaaaatccactaacgcatgccaagaatcttatactcttattagaagttggccacaaacttggctgtaagtccattcaaagaggaaaacattagtagttattcaatcasagtttccataaaataaaaacaatccagttacttgggagtagtcttagcaaatggcataatgtagtcttcaacaatatccttactgccaaggccgagaggggatttttatggagctgtttcttttaaagtctgcctatataagccgagggtattgtgccaaactgcaagtcaggaaaagcaattctaccagggccctggggagatacattcttggtacatagctcttcatctggcttaagctaggagtcgaattcagagactgtagacaaaaggatggtttgcatattcttcaggaaaatctccatgctggctctctttacaatatctatagatctatacctactatattaagtagcagagttctggctccagcaatgtggttatttgaactaaactggactccatcccttctagaaacatttaaagtatcacagaaaatt

SEQ ID NO: 774606 - DNA, 624 bp, Homo sapiens
tacacttaatgtatgtaaaagagtaaaagagaaaataagcatcagcatagtaaaaggagatggagccaagacaggttaaaatccactaacgcatgccaagaatcttatactcttattagaagttggccacaaacttggctgtaagtccattcaaagaggaaaacattagtagttattcaatcacagtttccataaaataaaaacaatccagttacttgggagtagtcttagcaaatggcataatgtagtcttcaacaatatccttactgccaaggccgagaggggatttttatggagctgtttcttttaaagtctgcctatataagccgagggtattgtgccaaactgcaagtcaggaaaagcaattctaccagggccctggggagatacattcttggtacatagctcttcatctggcttaagctaggagtsgaattcagagactgtagacaaaaggatggtttgcatattcttcaggaaaatctccatgctggctctctttacaatatctatagatctatacctactatattaagtagcagagttctggctccagcaatgtggttatttgaactaaactggactccatcccttctagaaacatttaaagtatcacagaaaatt

SEQ ID NO: 774607 - DNA, 594 bp, Homo sapiens
atgccaagtttcctgaaaaaaaccttatcatgaagggatgttgaatttttatcaaaagctttttcctcacctatggagaggatcatatagtttttgtttttaattctgtttatgtgttgaatcacatttattgattttgaaccaaagttgcatctgaggaataaagcctgactytttgatgtgctgctggatttggtttagtagcattttgttgaggacttgcatctttgttcatcagagatagtaacacgcagttttcttttttgtgtctttgccaggttttggcatcagagtgatgctggcttcatagaatgagatggaagttttcaactgtttgctttgtagttcctattgcatggttgctttataggatctgtgggctacgtacttaagggtgtttttgtggtaacaggtatcattctttcatttctatgtttagacctcccttaaggatgtcttgtaaggttggtctagtggtaacaaatttccttagcgcttgcttcagtggaaaaaattatttgtcctttgcttatgaagcttggtttggtgggatgtgagactcttgcttggaatttcttttctttatgaatgctg

SEQ ID NO: 774608 - DNA, 622 bp, Homo sapiens
gcatgctcacatttttcaaatgaaggaactgagaagggtttgtcagcagattgtaagcctgaagctgccagtgtttggtccacagtaaaccacatgtggagagcttaaaaaaattgccctcaaatctggcaagaaaatgacagtaataaattaaattattactgtgatacacatgtttctttcattacaattagatatattacacatatcccaattttgcagaagtttatcatctatcagtatttatttatttttttttgcataagtttccaaggaatcytaatgatggggactgtctcttttaaaattaaattgtgtaaataactcccagagccatgctggtaagaaacaaaacaaaacaaaaagaactagaaacatgaacaaacattggatttctgctgtaaagaggatgcaaagcaggcctgcctgctgcacctccccagagctaatccttgagccaaaagagcttcctggtgaagcctcgcactctctgtaacagggcgtggggggaccaagacatgcgggctccagattagaccatctttacctagttatgggatttcagtcatgtcttttaaattctttgagctgcagttttcacatatgtaaagtgaaagtattt

SEQ ID NO: 774609 - DNA, 592 bp, Homo sapiens
aaaattccaataacttgtttcacagtaatagaaaatacaagcttaaaatttatgtgaaattacaacagactttgaatagctaaagcaatcttgaggaagaagaaagctaaggatattatagtttctgatcttttttttttttttgagatggagtctcactctgtcacccaggttggagtgcaatggtacgatctcagctcactgcaacctctgcctcccaggttcaagtgattytcctacatcagtctcctgagtagctgggattacaggtgctcgccaccatgcccggctaatttttatatttttagtagagacgagatttcaccatgttggtcaggctggtctcgaactcctgacctcatgatccacccacctcggcctcccaaagtactgggattacaggtgtgtgagccaccgcacccgcccctatagtttctgattttaaattatattcaatactatagtaataaaaaaaagacagcatgtgcataaaaatgaacacgaaaacctacagaacaaagtagagagcctagaaaaaaaaaacctatgcctataaaatcaattaatcttgaacaaggatattgaaaatgca

SEQ ID NO: 774610 - DNA, 566 bp, Homo sapiens
gcccagactggagtgcagtggcatgatttcggctcactgcaagctgtgcctcgtgggttcacgccattctcctgcatgagcctcccaagtaggtgggactacaggcgctcgccagcatgcctggttaattttttgtattttttgtagagacagggtttcaccgttttagtcaggatggcctcgatctcctgcacctcaggtgatccaccggtctcagcctcccaaartgctgggattacaggcatgagccaccatgcccagccaatattctgttatttaaaaaaaattattgaattactcaatatagaaatctaaagaaagtaaaaaaaaattaaaaattgtttatcctcctgctcagaaataattcagttaacgtatggtgtatagtctcccagtcatttatctatgcacatgtatatgtttttctcctatcaaatgatatctaggttgtttccattaatatttttaaaatgctgacctggtaccagcagcatgatgggctgagttaatacagtctccttcccaaatcacaatactcatagatacactaagtgtaaaagaaaaca

SEQ ID NO: 774611 - DNA, 606 bp, Homo sapiens
tcacacacacacacacaaaatgatgttctacagttagagaagaacaagaaagtggagagagaccctctctataacataggttgtaaggactaccgaaagctaactgtggaacaggatcattggcatatgctctccagagtctaaggccccacacaaggcacatcatatagcagtctactgctggagaaatctgagttacattgttcactgaatgtttcagacaccgcagcaaaaagcaacctttgttcctgcccacactaatcgcatgacacaaacaaaaatgaaacagaaatataaaacaatctcgacataaataattatctcatgatctactgtttttctacatcagatgatttrcattttttagaaattgggagacacataaaagcaagttagaaatttgagttatgagttataatattttcaaaggataaaaagtcaacagaatcaaattcagagataattcagatgttggaactaaatgaaagtaatttaaaataataatgatcaaaatgtgaaaggatctagttaaaaaaagacaacatgtatggaaaaatgaggaatttcagcaaagatgggaacagtaaaaggcaaaatctagaaata

SEQ ID NO: 774612 - DNA, 610 bp, Homo sapiens
cctggcgacagaataagactctgtctcaaaaagaagaaaagccatccagaagaatggctccttatccctagacaacctaccacttcctggtctcttaactgcttctgataaaaaaataaaatacagtttgcactaagcttttagtcaaaacacaacatcatcggtggagaccgaaagcctgctgctgttggtggttgctgatgtttaacagttgatacaggttttctggtgatgctactgtgctgcttagttaccctgaacacattattttttcactgcactcatggtatctcatactttttactgttaagtacttgcgtgtgaacaagcataagaaaatgattgctttttagtagcacataaattcagagtcaggaatgatggtgatgccaaacagcatagaytatttacatgggtggctgagattgtgacacttttgctttctgatagtacaatgtatacaaacttggtttatgcacaaaagtatgtaaaatattggataaaattaccttcaggctatgtgtgcagatgtatataatcataaatgaatttcgtgtttagacttggatcccatctccaagatatctcattaagtgtatgcatgtattcc

SEQ ID NO: 774613 - DNA, 645 bp, Homo sapiens
tatgctcctgccatgcctggcagtggttctgctcctcctctgccatgtttaatgtgtagaacaatgacaagaccagatactatgcaggtgtccctcagggccaggaacaggtgcaggtctctgctgttcacagagcccacagagctccacttccctctcccaagcctcagcctccccttaacartagagtctatgagaaagcctgtcacatccatgtctctcagatgccctctcctccacctccaagacacatctcctaacatatctcctcaacgggctccagcttttagagaccagacccagaaagaaagtgtcttgcaggcaactttgactttccttattgccacaaatttctccagaggcaaagtagtatagcactcagtacctgctctatggcaaaggggaaaatgaagaagaaaaacaaattgaaagtaaaaatttaaaaatccaataaaatcaaatatttgaagtcttcagtcacagtaatgtattggtatagatgttcataagggagactcatctagagtttccttaaatgtaccatctttgtatagtctgggtagcattgctataacagcttttaaaaaaaatttagaagcatccctactatctctggacttagtaatttaaatagaactggaatta

SEQ ID NO: 774614 - DNA, 632 bp, Homo sapiens
acaagtgcctatatgttcattgggtttgagtgtgtgtatttgtatacactggggtttaggaggtagagttggaagggatcttaaaaatagacctaaaaaacaaacaccttaaatgcatagatgacatctattgcttcctctctgtcaggttaaatttgacctcattgaaatttctacccaaccttgcaaaaaaataccaggatgcataaaccaggaagtatgtctgcattcaaacattgcttctgagccatttcttggtatccttattgtcaggtctatcctgcttttcttcactatgttaactgaacttactatttctgtctacttttaggctctgactttgacctttcctgtgtgtgaatttaatttctccctcttagcagtaaagcaatgcatagattacttttaatgacccaccctttcctttcatttgcattagccctatgatattctatatcttcttactttcctagrgtagtagaagtcttggcttgttttgccagacagagcaaaagtgtcctgggatccacctaaatctcgtaaaatatttccttacacagaacgcaaaattgcttagtactctctacaaataccctcatccccccaccccaacacacatccttttcatttta

SEQ ID NO: 774615 - DNA, 563 bp, Homo sapiens
acaaaaggtgctttttcttagttccttaccgtaagaacctgatgggatccctagaggtgagagtcatcaaagtgtgcgggattccctaagaatgtgatccccaggagtttcttactctcaagctagtccacactcagcattcagtcagatcttcatcggaattaccatttaagtgtccctaccagtttatggtttcagtgacttctgctgcagttaaacggatcttagctgcttttctctatartcgcctgcctttctagatttgggagtagcagttagttttatgtcctaatttatctgatgagcccaagaaatattgttgattttcagtttgttcaaatttttcttattttaaggaataaataagcttggaaggagtaatgccttccaagctttttagcttttagagaagaaaccagaaatcccccagcctggccaatatggtgaaaccccatctctactaaaaatagaaaaattagccaggcatggtggcctatgcccgtaatcctagctattcgggaggctgaggcaggagaattacttgaaccagggaggcagaggtt

SEQ ID NO: 774616 - DNA, 604 bp, Homo sapiens
acatttgttagttttctgcctcaataatctgtctaatactgtcagtgagatgttaaagtctcacactatctttgtgtggttatctaaatctcttagtaggtctctaagaacttgctttatgaatctggttgctcctgtgtttggtttgtatacatttaggattagttaggtcttcttgttgatgtgaccctttaccataatgaaatgcccttctttgtcttttttcatctttcttgttttaaaatctgttttgtctgaaactataactgcaatctttttctatcttcttttttctatattcttgctagatttttctccatccttttactttgatcctatgggcatcactgcatgtgagatgkctcccttgaagacagcataccattaggtcttgcttcttcatgcagcttgctgctctgtgccttttaattggggcatttagcttatttacattcaaagttagtattgatatgtgaagatttgatcctgtcataatgttgctagcaggttattatgcagacttctttgtgtggctgctttacagtgtcaaagatccatgcatttaagtatgtttttgtaatggccactaagagtctttcctttc

SEQ ID NO: 774617 - DNA, 509 bp, Homo sapiens; identical to SEQ ID NO: 773593

SEQ ID NO: 774618 - DNA, 562 bp, Homo sapiens
ctggtttagatctctttgtttccttggtgatttcccttttttttgagattagttattgctatgaactgaattgtgtccctcaaaattcytacatcgaagccctaaccctcaatttgatggtgtttggagatggggcctttgagaagtaattaagtttttatgaggtcatgatggtcaagccttcatgatgagatcagggtttttataagaagggacagcagagagcttgcttctctgtctctctctcccctctccccacttccatcccttccatgtgagaacatagtgagcaagtgacagtttgcaagccaggaagtgaggcctcaccagggaactgcataggctagtatctttatcttggacttctcagactccagaactgtgaggaataaatttctgtcatttaagctatagagtctatggtattttgttatggcagcccaagcagaataagacagattttggtagcaaggagtgcagtgctgctacaatacctatctaaagatgtggaagtggctttgaaactgggtaataggtagaggctagaagagttttgagatgc

SEQ ID NO: 774619 - DNA, 633 bp, Homo sapiens
cagcatctggggttaccaggagctgaatgggcaaggaagagtcctctcctggaggcttcagagggagcatggcattgccgccatcttgattttggacttctaacctcaaaaaatgtaaaataataaaattctgctattataagccagtctgtggtatgttgttacagtagccctaggaaacaaatacaggtgtgaaataactgaagctctcctctattgctggtgatattttaaaataagcatttcttgttaagttaaacatacactcactagatggtgcagcaattctgcttgggtatttattcaaggagaatgagaacacttgtccaccagaagacttgtataagaatgttcatgaygacttcagtaataataatcatgaactggagataagcaaaatgtcttaccaacaggagaatgactagaaaataataccgtattcataatattgaattctactcagacataaaaagaatgaactactcgtaaatgcaacaatatatatgaatctcaaaaacattatgttgagtaaacaaagccagacacaatagtgaacatattgtataattctgtttagctgactattagggctagcaaaactatcctattatgacagaaatcagaatagtggtc

SEQ ID NO: 774620 - DNA, 584 bp, Homo sapiens
gcttctggtgaggcctcaggaaacctaaaatcattgtgaaaggcaaagggagaagtaggcacatctcccacggccacagcaggagaaaaagagaaagagcaggaggtgctacacacttttaaacaaccagatctcacaaaaactcactcactcactatcacaagaacagccccaagggcatggtactaattcattcatgggaactccaccattatgattcccaccaggcccctcccaccaggccccacctccaacactggggattacaatttgacatgagatatggtagggacasagatgcaaaccatgtcattttgctgatggcccctccaaatctcttgttcttctcatattgcaaaatacaatcatgccttcccagcagtccccccaaatcttaactaattccagcattaactcaaaagtccaaagttcaaagtctcatctgagacaaggctaatcccttctacctatgagcctgtaaaataaaaaagaagttagttacctacaagatacaataagcgtattagcattgggtaagtacttctgctccaaaaaggagaaatcaaccaaaacaaaggggatcc

SEQ ID NO: 774621 - DNA, 576 bp, Homo sapiens
gcttctggtgaggcctcaggaaacctaaaatcattgtgaaaggcaaagggagaagtaggcacatctcccacggccacagcaggagaaaaagagaaagagcaggaggtgctacacacttttaaacaaccagatctcacaaaaactcactcactcactatcacaagaacagccccaagggcatggtactaattcattcatgggaactccaccattatgattcccaccaggcccctcccaccaggccccacctccaacactggggattacaatttgacatgagatatggtagggacacagatgcaaaccatgtcattttgctgatggcccctccaaatctcttgytcttctcatattgcaaaatacaatcatgccttcccagcagtccccccaaatcttaactaattccagcattaactcaaaagtccaaagttcaaagtctcatctgagacaaggctaatcccttctacctatgagcctgtaaaataaaaaagaagttagttacctacaagatacaataagcgtattagcattgggtaagtacttctgctccaaaaaggagaaatcaaccaaaacaaa

SEQ ID NO: 774622 - DNA, 572 bp, Homo sapiens
ttttttcattttagtcaatatttttattttttgaattgtgctatttggcataatggtgaaattttgaatttctttaaaactgtttggaaaataatttttttccattatttcattggcaagcttctctgaattacagaccaaataattattgtatttgataattttctttttgcctccttttgctttscattagtggtatgtgtacttgtattattctcccatcatagattttgtgcctccagaagcccaatattattttcttggtttgtctttgtatcccttctagtaccttgtaagtgtgtattaatgcttgttataatcaattgaataaaaccactttatcccctgtaaattcaaactatagtaccacaatttgtaagcctaatgcttaaaccatagcttgcaggtttaagcaatacatattatatatatacacacacataaatatgatatacatatatattatccttaggatttgaattgaatggatgctaacctggtactattttatacatttttgaattttcaaatattctaaaattaatatggatgagtttttataatttgaaaga

SEQ ID NO: 774623 - DNA, 617 bp, Homo sapiens
ggtatcaagtttcaaattcagcctatgggtggagagtggtagcaaagatcaatttccttgatatctaaaagcttaaacataacagcagttgcaattatttaaacaatattctgttaaaaaaatgcttttcttcttattaaaataactttaatacaactaattccatcacaataataattctaatattaaatttggcattgtattaataacagatagatggaaaatrtagaaaaagccaaagtagaaaattagaatgacctattttgtaattctaagagattttataattttgattgcatttttcctattattttatgttcatgtatatttaaaacactgagatcacagtgtgcatattgttttatactagcacacaatcccttaaattttttatatttctccctagtctttttctatacctattaggtgtcatcgtatttgtttgtatttctggccaattttttcactaattattattttgtaaacattcttattgtttttacaaaatcataatgactgattttaatcgctatctgatatcctactatatataggaaatatgtatatatcctactatatataaatatctgttaaatgtatttgggtgatttaaagct

SEQ ID NO: 774624 - DNA, 623 bp, Homo sapiens
gtccccaaattggcaagaagtatatggcaccaatgattagtcaaatgcaaccaaaaaattggtctctgtgttttcttttgtatacctgttagagactcctcattttcctatttgatataaagtaagttcaaatttctgttgatagtttaatattatagattctcattgtactaacaaaagaaaattttcatttatttggaattcaaatgattttcaacattctgaacacaagacaaactaaaaataaattttgcttattttgtgtgttcctatactatatgtatgtatctgtcaggagttcagtacgtacgagaaatatggagaaaggtttctctctttctctgtccaggaaagtcaaagtgatttagaattgaatgtaaagcaaagttcaaaattgatttstgaattgctctcaaaggacaattattaactatgttaaaaataatacatattaacatttaaaaaagacaataaaattataaaaagcatataaaattatatataaaagtatataatagtaagaggctatttggtgttggagaacagttgggaatagttttgtcttttgcagtaagtgaatatcatggttggactaataattattatgtcatgaaaaaaaacct

SEQ ID NO: 774625 - DNA, 472 bp, Homo sapiens
ggctctaaaactacctgtgtgaccttggcctcatcacctaacccccatatgcttcagtttttaagctctaaatggtattattaataataatgcctatcttatatggctatggagattaaatgagttgatatatattatactaattttctattaacatgtaacaaattcccataaacttaacaacttaaaamcacatttattaatcagcttatattactgtaggttagaagtcctgcataggcactttgggaggccaaggcaggaggtttgcttgagctcaggagttcaagatgcgcctgggcaacatagtgagaccccatccctactaaaaatcaaaaaaattagtcaggcatggtggtacatgcctatagtcctagctacttggaggctgaggcaggaggatcacttgaacccatggggctgaggctgcactgagtcatggtcatgccactgcactccagcctgggtgaga

SEQ ID NO: 774626 - DNA, 544 bp, Homo sapiens
gtgtggtgctctgccttcccttgctacttccgctgtatctgctatctccaagaacagtatgtagcatttccacagactaaataccagttttcttccagggaggggaaggctaattgtctgaggggtgggaacttcwacaaactttccatcagtcctatttttagcttcattcccacacttgctgtctttagaaatcttctgttccttcattcctgagtctttctgggattctgcagtttggcttccttcttaccgtctcccttccatgttggattaggtttcagtgttctctgttttgctaaatcagatcccatctgttcattcactttccggcttccaaaatgtgtttgacatcttttgtttgctattatgttctctcctgttctctttatccttgtggtttatttcctttgattcctttaccaccagcaatgttttaggaggagagataaacatgcgtgctcaatctgctgtacaaaattggaagctgaatgtaccacagcttacccaactgattccctgctaatggaaacatattccaatg

SEQ ID NO: 774627 - DNA, 544 bp, Homo sapiens
gtgtggtgctctgccttcccttgctacttccgctgtatctgctatctccaagaacagtatgtagcatttccacagactaaataccagttttcttccagggaggggaaggctaattgtctgaggggtgggaacttctacaaactttccatcagtcctatttttagcttcattcccacacttgctgtctttagaaatcttctgttccttcattcctgagtctttctgggattctscagtttggcttccttcttaccgtctcccttccatgttggattaggtttcagtgttctctgttttgctaaatcagatcccatctgttcattcactttccggcttccaaaatgtgtttgacatcttttgtttgctattatgttctctcctgttctctttatccttgtggtttatttcctttgattcctttaccaccagcaatgttttaggaggagagataaacatgcgtgctcaatctgctgtacaaaattggaagctgaatgtaccacagcttacccaactgattccctgctaatggaaacatattccaatg

SEQ ID NO: 774628 - DNA, 529 bp, Homo sapiens
ctccgttggctgacttcacctagctcactccacgtagcgccacagccagactcccccttcccttcttgcggtttccacatgacaactgatcagccttccctcctgataagtgaccactgcccacagactggttctggccagtccatggaggctgcacacagggtgcctctatgtcctttgtttcaccttttgayatagaaaggctaattttgctgtattttaatgttaagtctccaccacagagtgaacacagaatgcatgtgacatacatgtttacataccactattgtgtgactgcccctcatgaatattcatagccccccataacctgttaactatgtgtgtctagccaatccaccaaccataaaacttctgtaataccctcccttcctccaagagcctgcttttggttgctgtggtaggctctgcttcccaggctgcaggttgcaggagaggaggctgcagtggctcacgcctgtaatctcagcacttcgatgggacgaggcaggcagatcacctgaacccagga

SEQ ID NO: 774629 - DNA, 530 bp, Homo sapiens
aagtaagagactgttcactacagtagctatacaggagcatatagtaggtacaaaaaaatgcttaactaagttattacatataccagttactagatcaaatagtaacatgattagaaaattagtaaatatatagcttaatcatcactaaaagtacacacatatttcttttcttggagtatcaaaaggaaaacagacccagtgtcttcatctttccaagtcaattttcccttatgctatgcagacaacacaaaagagttaaatgsagtgaggaagactggcaaaatgaaaataagagggagaactataaatccaagaaatgccatgtttcttgaacatttaaactaattttcacttctttgcagtatttagttgattctttattttgaacttccaccgaaattctttacagacaaatatctgtatactaaatatctgtgtctacgttctttcctttttaatgatttttcctaagttgtacacaaatgctatgtccaatccctgaactattaaaagcctctataaatgacagc

SEQ ID NO: 774630 - DNA, 530 bp, Homo sapiens
aagtaagagactgttcactacagtagctatacaggagcatatagtaggtacaaaaaaatgcttaactaagttattacatataccagttactagatcaaatagtaacatgattagaaaattagtaaatatatagcttaatcatcactaaaagtacacacatatttcttttcttggagtatcaaaaggaaaacagacccagtgtcttcatctttccaagtcaattttcccttatgctatgcagacaacacaaaagagttaaatggagtgaggaagactggcaaaatgaaaataagagggagaactatmaatccaagaaatgccatgtttcttgaacatttaaactaattttcacttctttgcagtatttagttgattctttattttgaacttccaccgaaattctttacagacaaatatctgtatactaaatatctgtgtctacgttctttcctttttaatgatttttcctaagttgtacacaaatgctatgtccaatccctgaactattaaaagcctctataaatgacagc

SEQ ID NO: 774631 - DNA, 520 bp, Homo sapiens
tagccttgtagtatggtttgaagtcaggtagcaggatgcctccagctttattcttttgggttaggattgtcttggctatgcaggctcttttatggttccatatgcaatttaaagtagttttttccaattctgtgaagaaagtcagtggtagcttgatggggatagcattgactctataaattactttgggctgtatggccattttcacgatattgatycttcctatccatgagcatggaatgttctttcatttgtttgtgtcctcttttatttcattgagcagtttgtagttctccttgaagaggtccttcacaccccttgttagttggattcctaggtattttattctctttgtagcaattgtgaatgggagttcactcacgaattggctctctgtctgttatcggtgtataggaatgcttgtgatttttgcacactgattttgtatcctgagactttgctgaagttgcttatcagcttaaggagatttggggctgagatgatggggttttctaaatat

SEQ ID NO: 774632 - DNA, 619 bp, Homo sapiens
caagaggaaggtgattgaatcatggggacagatttccccctccatgctgtcctcatgatagtgagtgagtgctcacaatatttggttgtttaaaagtttgtgatggctgggcacagtggctcacgcctgtaatcccagcactttgagaggccgaggcaggcggatcataagttcaggagttcgagaccagcctgaccaacatggtgaaaccccgtctctactaaaaatacaaaaaattagctgggtgtggtggcgcacacctgtaatcccagctacacaggaggctgaggcaggagaatcgcttgaacctgggaggcagaggttgcagtgagccgagatcatgccactgcayagcagcctgggtgacagagcaagactccatctcaaaataaataaataaataaacaaaagtttgtggcaccttcccctacctcttcctcctgctattgccatataagacacgcctactttgccttcaccttcagccatgaatgcaagtttcctgaggcttccccagccatgcttcctgtacagcctgcaaaatcatgagacaattaaacctcttttctgtataaattattcactttcaggtatttatttataacaatccaagaatgga

SEQ ID NO: 774633 - DNA, 558 bp, Homo sapiens
tggctcattgcaacttctgcctcccaggttcaagtgattctcctgcctcagcttcccaagtagctgggcctacagatgtccatcaccacacccagctaatttttgtatttttagtagagtcggggttttgccatgttggccagacagggtttaaactcttgacctccagtgattcacctgccttgacctcccaaagtgctgggattagaggtgtgagccaccatgaccggccctctgccrtttacttttacacctaccacaacacaggagttgctttctataacctctgtgtccttcttgtcccactgtctctttctcagtgatgaactcttaatgtcctcacacataaccactgctctgtgtagctgaagaggccccagaggagcctgaggagagactcacattttggccatacgttgaacctagggtgaaatttgaagtgagagttttcagcagccatgttttcacagaacagctgaccctagcagggggtagtaggtttgaattttgctgttagtttctttattgctagattagggggaaaaaaaataaaacaaa

SEQ ID NO: 774634 - DNA, 574 bp, Homo sapiens
ttacaagggatgtgaaggacctcttcaaggagaactacaaaccactgctcaatgaaataaaagaggatacaaacaatggaagaacattccatgctcatgggtaggaagactcaatatcatgaaaatggccatactgcccaaggtaatttatagattcaacgccatccccatcaagctaccaatgrctttcttcacagaattggaaaaaaccactttaaagttcatatggagccaaaaaagagcccacattgccaagtcaatcctaagccaaaagaacaaagctggagccatcatgctacctgacttcaaactatgctacaaggctacagtaaccaaaacagcatggtactggtaccaaaacagagatatagaccaatggaacagaacagagccctcagaaataatgccacatatctacaactatctgatctttgacaaacctgacaaaaacaagaaatgggaaaaggattccctatttaatgaatggtgctgggaaaactggctagccatatgcagaaggctgaaactggatcccttccttatgcctaatacaaaaattaattcaagatggatt

SEQ ID NO: 774635 - DNA, 529 bp, Homo sapiens
actaagctgcccagcttgaagagtctgaactcaagagctttgatcctgcaagaagagtccattcccttgttcttcagtgggaaaaccctgtcacctgagttcatttaaaactgatgcaaatccagagagcaaagccacgctgcattcagaacatgtcttaagacaataggttcaaggaaacagcgttgttactgagcaaattccctttgcaaatttccaggcccttccgtgccaaagcaaggtaatccagtttaatgcgagttgcctttttgggagagaaaaataaaaggcaaaatatttaaggattcctttattctgcttttagcttctgagcccagcaattaattcktatgtgctaaaggacttctgtgtttatgaggcattattatttaatgtaggcctattttaaattgtaatttttttcattaagttgcctcttttcacttattaagaccagttttataacctagcatagactgtattccttgagtaataactatttttcttttaaaatattccttaataaccc

SEQ ID NO: 774636 - DNA, 624 bp, Homo sapiens
acctcctaaaggccccacctcttaatactgttgcacggaggattaagtttcaacaagacttttggaggggacacaaactttcaaaccatggtatattctaaatttgtgtcttagttcatcctttctctttcacaaactccaggatgacataatttatttcctccaaaatttctgtcacaccagcatcaccttccagtgacttcttcttcttagaattatgatagaggagctgttaatcttcttttatagcatagcaattgagaccatgggaaaatctgggttcaagtccaacaccaccrcttactctctgggttggctgtaggcaaattgttatgaagactgaaatagtgcacaccaagtgctttaggaatgtgcttggtatatttttagtcctcaataattgctagtggttaccataatcattatcagcatcaatatcatgattctgagataagaaattattgtcaagctaagtcaagaatgaatagattcactaaacaagtatctggactgtcgacattcccctaactataatattgtaactctgtaaaaatatttctaatctatactcagaaaatatccttcacaccttctgttcctgagagcttcaatgtctttttatac

SEQ ID NO: 774637 - DNA, 623 bp, Homo sapiens
ctcctaggctgcaaacctgtacagcatgttactgtactgaatagtgtaggcaattgtaacacagtgataagtatttgtgtatctaaacatatctaaacatagaaaaggtacagtaaaaatacagtataaaagataaaaaatggtacacttgtataggacatttaccatgaatgaagcctgcggaactggaaattgctcttgatgaatcagtttgtgagtagtaaatgaatatgaaggcctaggacattaccatatactactgtagactttataaacatcctacatttagtctacactaaggttaaatttttttgtttcttcactgttaaattaaccttagcttactctttttgctgtataaacttatttaaaaaatgtttttgactcttttgtaataatatttcacttaaacacacattgcacaggtgtacaaaagtatttcctttcattrcattcttattctataagtttttttctattttgaatttttgttctttaaactttctttgttaagaactaagatacaaactcacacattagcgtaggcctacacagggtgaggaacattagtatcactgtcttccatctccacatcttgtcccactggaaggtcttcaggggca

SEQ ID NO: 774638 - DNA, 649 bp, Homo sapiens
tcaggattcctcctgctgagaatgttcctgcccaagttgtaaaccccacaagatatagggtcatcccagacccacacgggcaggtgcagaaaacacagctgcccacagcagactcaacataactcacacgtgtgtgctcatctttayccacaaagatggaagagtttgctatgtgggcaggtcacccccggcccttctgatcctgagtgagtgcccctggcacactgaggattcatcctgcccaaatttgtcagtcatcctccacagattccctgcacgctgctgcagtttaccatcgtgaacacatttccccggctgctgcttcaaggacaaagacagagcacttatattcgtatcacagcagaagagctcacgtttatggaaaaaagataaaaagacaaacactccaggcaaatgacccctggcatttttgaagctggatcatcccagacaagatccatgaaaacagaggaaatgcagaaggaaggtcactaagcttagctgggaagagggggaacgaacggttcagttcactgcagcaacagagcagctcattcaacgtaagcacttaccataaaaatagaaagagtcaacagaaggagaagggatccttcctcagtgccttggtgtcttcggcagaaagaaatcc

SEQ ID NO: 774639 - DNA, 649 bp, Homo sapiens
tcaggattcctcctgctgagaatgttcctgcccaagttgtaaaccccacaagatatagggtcatcccagacccacacgggcaggtgcagaaaacacagctgcccacagcagactcaacataactcacacgtgtgtgctcatctttatccasaaagatggaagagtttgctatgtgggcaggtcacccccggcccttctgatcctgagtgagtgcccctggcacactgaggattcatcctgcccaaatttgtcagtcatcctccacagattccctgcacgctgctgcagtttaccatcgtgaacacatttccccggctgctgcttcaaggacaaagacagagcacttatattcgtatcacagcagaagagctcacgtttatggaaaaaagataaaaagacaaacactccaggcaaatgacccctggcatttttgaagctggatcatcccagacaagatccatgaaaacagaggaaatgcagaaggaaggtcactaagcttagctgggaagagggggaacgaacggttcagttcactgcagcaacagagcagctcattcaacgtaagcacttaccataaaaatagaaagagtcaacagaaggagaagggatccttcctcagtgccttggtgtcttcggcagaaagaaatcc

SEQ ID NO: 774640 - DNA, 654 bp, Homo sapiens
caccttgctccagcatcttaagtgattccccgctgtcttagcatggagactacatccagtgtagcatataagtgagttttcttcaggaattccctaaaaatgtaaaaatttcatacaaaagtatgttgtgaagatcgttgctttcagtctcaacaaccagtcactcgcacgcatcttaaacatgcttgaaacaggacatcttttcctttcatgaatgagccttgttctttcatacctgaaccttcaccatggggggcgtgctcttctcctccatctctgcctatgagaaatctacccagmaatgaggcttagtgacaatacccaccactctctttgtgaagccttccctggtagcctttccctgaaccgtgtaagtcagaggtcagcaaactacagcccacaggccaaatccagcctattgcttagttttataagttttattagaactcagtcacactcattcgtttatgtattgtctgtggctgtttttgggtctacagtagcagagttgagtagctgcaacagagaccatatggcccacaaagcccaaaataaattatgctctggctctttacagaaaaaaacatgctgacccctttctcccctcagagattacatagtctaccttgtgcatctttgacatctccttctgtt

SEQ ID NO: 774641 - DNA, 654 bp, Homo sapiens
caccttgctccagcatcttaagtgattccccgctgtcttagcatggagactacatccagtgtagcatataagtgagttttcttcaggaattccctaaaaatgtaaaaatttcatacaaaagtatgttgtgaagatcgttgctttcagtctcaacaaccagtcactcgcacgcatcttaaacatgcttgaaacaggacatcttttcctttcatgaatgagccttgttctttcatacctgaaccttcaccatggggggcgtgctcttctcctccatctctgcctatgagaaatctacccagaaatgaggcttagtgacaatacccaccactctctttgtgaagccttccctggtagcctttccctgaaccgtgtaagtcagaggtcagcaaactacagcccacaggccaaatccagcctattgcttagttttataagttttattagaactcagtcacactcattcgtttatgtattgtctgtggctgyttttgggtctacagtagcagagttgagtagctgcaacagagaccatatggcccacaaagcccaaaataaattatgctctggctctttacagaaaaaaacatgctgacccctttctcccctcagagattacatagtctaccttgtgcatctttgacatctccttctgtt

SEQ ID NO: 774642 - DNA, 610 bp, Homo sapiens
tctccaagtacaagtttctgtatccacagctaatttcaacacctaccactctatcccagcttgctctgtccaaacctggtaaagttcttaattttctgacccctcttttctatccaaatgaaaacagattccgaaacttttgtaataggggactgagggatctggagactgcaagactgaaggaccacagatgtgctggaatcaccgctggcgtcgggcttcaagagaagcacaaggctcatgcmtagtctccagaggtttttatgttttctgcctggctttcttctgagcctcctgtctcctatgctgctgtgacccttcaatttggctgtagcctttaccaccacctctggctttggttccatctttttttctaaaattacgttgatgcaagaagttttaaaggatggttttcacagactttttaagaaaagggaaattcgttgaaagcattaaagatttacctgcctgcagactcttaacaacacttaggagtacactatttctagagccatatgagttagcttcccaataagagggaaatatcccagaggcaaggatggcttcagacaatttaaacacagcgtctctacttatttgcttacggaat

SEQ ID NO: 774643 - DNA, 640 bp, Homo sapiens
ccccaagtcctggtgttatactcctttttcgccctccattcaagaggtgattttatttatttatttacttatttattcactgaggcagagtctcactcagtctgtcaccgaggctagagtgcagtggcatgatctccattcattgctatctttgcctcctyggttcaagtgattatcctgcctcagcctccataaaaaatctgtaaccaggctattgataaataacttcttttagggataaaaacctcagaaagttcaagatttctggattaatgattgacaatgttcttagtggtctctctgatttatttcaattgtaagtaattcttggtgatattctaacataaattctgacagatgaagataataaatgaattaagtatctctaggagaatcaatacaataagattatcttggttaaatggttgagaaaacatggtaaatagacacaaaaactttttcatcttccaaaatcagagtcaaatactaaatgatcataaagtagctaatactgtctttctgcaaagtgaatctgagctaaattaaaagaatgtcaggaataaatttttccttgaaaactaggaacaaataatgtaattaaattatgaggcattgactgctgcatagagttctagcatca

SEQ ID NO: 774644 - DNA, 623 bp, Homo sapiens
ggtcagttacctctctaaccactcactgctgcatcaagcaagaaaataaccaagaatctcagtcacaggagagctgttgtgtatagatgtctgtttgtggcagggggtcaaggtattcatgctgcagaagacaagctggaatctccctccacccccatttcgacccaaycaagggctctgattcctttcataaacctgcctctagtcttccccacctttctctgttcctatcccctctctaattgctggatgaggctgtgctgctgcagccgactgtctggcccctgagcattacatccccatactccaggcctttattcatcaccaaaacagcatggtactggtacaaaaataggcacatagaccagtggaacagaatagagaacccagaaatgaacccaaatacttaacaaccaactgatctttgacaaagcaaacaaaaacataaagtggggagaggacaccctattcaacaaatggtgctgggataattggcaagccacatgtaggagaatgaaactggactttgtggcatagacaaactttcttattgttattcaatgaaacactcacgtaggacctactgggaaggtattttgcagatgtaacgaaaggtcctgctc

SEQ ID NO: 774645 - DNA, 601 bp, Homo sapiens
ctagtttttaagaataagaaacatttctaaataatgatcttgataacagcatagcatttagggcacataatgtgctaattttgctttgaaaattggattgaaagaagttggtcttacatttggctctcagtatgtaagttttcaaaacatctttaatatctgtggttagcgttttgtctgtcttgtagataatattaatcatctctatactttattagaagttacaagcaaaagtgtccttgtgactttacgtttcctggtaaattaactgcttgatagaacaatttttgcttatctacacatgcctatgcatgttttctttctttctttctttctttttatttatttatttatttatttatttatttatttattttgcagtrgatattactctgcctcataatgaagccaacagtcatatcttccgacgtggagatttgagaagcatttgtattggatgtgaccgtcaaaatgcgccccatatcactgcaacacctacaagttttcttgcatggggtgctcagactttcacctctggcaaatattactgggaggtccatgtgggggactcttggaattgggcctttggtgtctgtaataa

SEQ ID NO: 774646 - DNA, 594 bp, Homo sapiens
ctcagtgctttgaatgcatgaagacaacatggcagagaaacctgaaaactaacattcatttgaagcagatggcttcccttgccagaaaagccagtctctggctattcctgagctctgaggagcaaatgtgtggcactcacagggagacaaagaagatrttctgtgaagtggacaggagcctgctctgtttgctgtgctccagctctcaggagcaccggtatcacagacaccgtcccattgagtgggctgctgaggaacaccgggtaagtgatgcctctgaagatctatttctataaatgacacatgaaattcctgtgggtctattttcttggagattgggtaaagccaaacctgagtccctttaagcagctcacttttgggctttcttagcttcaaacctctgagatttgacgaagaagaagggaaatagaagaaatgccatttcctagggacttacttgtctctcattctcagcccgctccctatgaaacggtctgcatgttactttattgttttcactggtgattcaatttatggctcttttgcaggagaagcttttaaagaaaatgcagtctttatgggaaaaagcttgtg

SEQ ID NO: 774647 - DNA, 553 bp, Homo sapiens
agccactggaaggttagttctgtactactctaccttctaccttctccaggaacttatggtgggcaaatgggtgactcttaaaataggaacttgttatcaaactctaatgtttctgggagtcaataaaaaaaaaaaaagaaaacactgagaaaaagtgacctcatttcttatatagaayagtatgactgttagaaaggatttctaagaaaactactgaagtcacccaaagcatgctggtttgttttcatacaaacctgtagctatacaccaacagataccagaaactgggccatctcacagcattctatatgtgctggttggataaatgctgggcacaagattcatttggcagtcatggaaagctcaagtgaaccttctgagcctgggtcagcattaatctgaatgctggtggacaagtagtatttggaattgtatggaaaatttgaggcagaaagagtgacaggggaaatctagggcaaccatgaaattaagaatctcaactaattaatattgaatactacataacatatgatgagaaaagtggtgagaaata

SEQ ID NO: 774648 - DNA, 545 bp, Homo sapiens
aatagaatactgcagataccatgacaaagtggttaaggtgtgtcttatggagcagaaatggcagaaaataccacagtgaagagatttacaattggattgttagttccggcttttatcctgtcaatgttgtggcttctaaacacatcagtaatctcctttgatccatgtgctaattaacaaccaacactctgccccctctcccagattctttccatcgctttaaacctaatctaattctaatccagctggtcactgtaacacatgtaatcacctaataattttaaaaatatttttgatgaataaatgaaaaattagctaggtgcaatggcataaacctctagtcttttttactttgaaagctgaagtgggaggattacttgagccctggaattcaaggctrtggtgagctaagattgtgccactgcattccagagggtgaaactttctttggtataaataaataaatgtgcacttagaggaatgcttgtgccttgggaagaaactcaggaaacagtattaatcaattttagttaatttctagcata

SEQ ID NO: 774649 - DNA, 547 bp, Homo sapiens
cctggaaatattttctttctcttcatctaacaatattatacttatccatgtgttttatttatgaacctatactttgaggtaatcttatttgacctcctatgctgtgcttatctttgtaaatctcatcttacatacaaaatgctcatgcattattagagtgctgttctacagtgaaatttacaaggggatcaggacaatgctggatcaattaaatattcaaatrgacataactgaatactgacccctacctcaaaccatacacagtgcatttccacatggattcatgttctgaaggtgaagggaacacaataaaatattttcacacagaaagatttcctaaccaggacaaaaaagtaacaattaagaagaaaaatttagttagtttgtatcaaaaatgatgacttctgtgtttcaaaatacaccatccaagaattaaaatgcaaaccaagagtggagaaacatatttatcccaacatatatgcaataaaatacaatacatgtgattaatgaatgtaataaacaaaagaaaatgaacccaatataaact

SEQ ID NO: 774650 - DNA, 547 bp, Homo sapiens
cctggaaatattttctttctcttcatctaacaatattatacttatccatgtgttttatttatgaacctatactttgaggtaatcttatttgacctcctatgctgtgcttatctttgtaaatctcatcttacatacaaaatgctcatgcattattagagtgctgttctacagtgaaatttacaaggggatcaggacaatgctggatcaattaaatattcaaatagacataactgaatactgacccctacctcaaaccatacacagtgcatttccacatggattcatgttctgaaggtgaagggaacacaataaaatattytcacacagaaagatttcctaaccaggacaaaaaagtaacaattaagaagaaaaatttagttagtttgtatcaaaaatgatgacttctgtgtttcaaaatacaccatccaagaattaaaatgcaaaccaagagtggagaaacatatttatcccaacatatatgcaataaaatacaatacatgtgattaatgaatgtaataaacaaaagaaaatgaacccaatataaact

SEQ ID NO: 774651 - DNA, 621 bp, Homo sapiens
tgaaagatgccagatgagcactttcatttccagccctttgtttagacaagacaaatccgattcagcttacttttgttgagtgacactaagttgccttttggaaacttttgcagtcttaattatctgcaatcaaataatgccaccttttcagaaacactggccagaggacacacaaacgtgtgatcaacactcacatggggaccattcagattcctttgtaggagtcccttgccattcttccttagaggaaaatgcytgaatactctgaatgcaaaagatagctcagagtttgccatatttcctcttataatggtgattacattccacttcgttgttgtgtttacctaagcttaaaaatgtgctaaatgaattaaaatcatctgagatacttaccatccaaatgacttggagtcctgtaagtcaaatccaatatgattaatcaattaattattagtaaagactctttgtgggtagatgggtttttaatttttttttctctagctttcaaggacattaagtaacttacatcaggttctaattgaaatgttagccagttgatcatacaggtaaaacaggttaattatcagatagtagctgaataactacctagcaattgccatc

SEQ ID NO: 774652 - DNA, 608 bp, Homo sapiens
attccacttactgctgctgtggtttagattgtatttctgttacttagagttgtagagagtcctaagcaatagcatgtttcatcagggaaaaccctaccagatccagtaacccctaaaatcctaatggttcttatggaaaagtaaatcaaacacacaaattagaaatgcaatgtcttctctcacagtgtaagaagcacatttagtgattttcaaaagtcctcttagtttctgcagcaaatgtttaatggactttttaatctacttcttattgtaacatagccatatgtagctccagggtagactgcctcacacgtcaggtattatgttaccaacatcatgttacaggggaatactgtgtgacttcttttcttgtattagagagtctactcaaaatactggccttatgatgattccattgtgaatccatggcatcayattgctattctgatctagtggtgtaataacagggtaaaatagtgccacatagaaagggtaagctccaagcatggagtgtgtggtagccaatatgacactacactaaacttggaaaaactattggatttaggcctgtgtgagttgctaaagaaagagacaaatattctgaatat

SEQ ID NO: 774653 - DNA, 624 bp, Homo sapiens
ttttttcttgcaccagaaactgttcttatcaatttacatatattaaccagttcaaacttcacaagtctaatcggataggttttattattataattgtcctcactttaaaggtgacacatgtacatgggcaaagagaagtaaagtcagttgttcatattttcttctctagtaaatattggagctggaactggaacccagaccgtctatttcctgagcctagacatttattgactacacaacacagcaaaatgtaattgttgctccaccattttacccatgtgccctttttgcaatactaagtagattcgcacaatatgttataagtgaaatataaaattacataatgcagattgtgtctccctctcaatacttttttgcaacaaaatgatcaatattaggggcagtagggatatgtgagtctacattataataggactattaarcaggaaaattataaaattgataaaaataagcattgtgattttaataaagtttttaaaaaaataatgggaattatgaaactaaccaaacaccggagtacagaaagttcgagacaataaaaatataggaactaaaaaataaatattaaaatacaaagaattaaatgtgtcatgtacatgtttt

SEQ ID NO: 774654 - DNA, 627 bp, Homo sapiens
gtattcaaataggaaaagaggatgtcaaattgtctctgtttgcaaatgacatgattctgtattaagaaaattccatgctgtcagccccaaaactccttaagatgataagcaacttcagcaaagtctcaggacacaaaatcaatgtgcaaaaatcacaagcattcctgtacaccaacaatacacaatcagagagccaaatcatgaatgaatttacattcataattgctacaaagagaataaaatacctacraatacagctaacaagggatgtaaaggacctcttcaaggagaactacaaaccactgctcaaggaaataagagacaacgcaaacaaatggaaaaacattccatcttcatgaataggaagaagcaatatcatgaaaatggccataatgcccaaagtaatttatagattcaatgctactctcattaaattaccattgacattcttcacataattagaaaaaaactactttaaatttcatatggaaccaaaaaagagcccgtatagccaagaaaatcctaagcaaaaaagaacaaagctggaggcatcacactacctgatgtcaaactatactacaaggctacagtaaccaaaacagcatggtactggtaccaaaacacaca

SEQ ID NO: 774655 - DNA, 642 bp, Homo sapiens
acaaacacacacacacacacacacacacacacacacacacacaagttcaaggagagaataatcaactgtgtcaaatactgctgatgggcaagtaatacaattaaaaatgagccattgcatttagccaagtagagaccattggcgatcttgacaagcgrtgtttcattggagtggtagagatacagtctgattgaagtggttgtaaaagagacgagaaaaatagaaaaagcaaatgtaacaagctgttttaatgaggtttgctttaaaaaggaggaaagaagaaaggcagtagttggagagatatgtgaagttcaataaggcttttattgtatttgttttattattttccatattggaaatataaagcatatttatattactagagaaatgatatactttatgaaattatcaggagatgttgataatgtaggatagagtggagaattgctgaaagcatattctttaagaggccagaaatgatagttcctctatggtaaaaagaaggacagcacagaattagaatgcaggcgcaaatatagtaaacaattagaccgtgggaatacacagccattttcacgtaattgtgtttattttctagtgagagagtgaacacgatcatcagcagaaaatgaagatagaggt

SEQ ID NO: 774656 - DNA, 642 bp, Homo sapiens
acaaacacacacacacacacacacacacacacacacacacacaagttcaaggagagaataatcaactgtgtcaaatactgctgatgggcaagtaatacaattaaaaatgagccattgcatttagccaagtagagaccattggcgatcttgacaagcgatgtttcattggagtggtagagatacagtctgattgaagtgkttgtaaaagagacgagaaaaatagaaaaagcaaatgtaacaagctgttttaatgaggtttgctttaaaaaggaggaaagaagaaaggcagtagttggagagatatgtgaagttcaataaggcttttattgtatttgttttattattttccatattggaaatataaagcatatttatattactagagaaatgatatactttatgaaattatcaggagatgttgataatgtaggatagagtggagaattgctgaaagcatattctttaagaggccagaaatgatagttcctctatggtaaaaagaaggacagcacagaattagaatgcaggcgcaaatatagtaaacaattagaccgtgggaatacacagccattttcacgtaattgtgtttattttctagtgagagagtgaacacgatcatcagcagaaaatgaagatagaggt

SEQ ID NO: 774657 - DNA, 642 bp, Homo sapiens
acaaacacacacacacacacacacacacacacacacacacacaagttcaaggagagaataatcaactgtgtcaaatactgctgatgggcaagtaatacaattaaaaatgagccattgcatttagccaagtagagaccattggcgatcttgacaagcgatgtttcattggagtggtagagatacagtctgattgaagtggttgtaaaagagacgagaaaaatagaaaaagcaaatgtaacaagctgttttaatgaggtttgctttaaaaaggaggaaaraagaaaggcagtagttggagagatatgtgaagttcaataaggcttttattgtatttgttttattattttccatattggaaatataaagcatatttatattactagagaaatgatatactttatgaaattatcaggagatgttgataatgtaggatagagtggagaattgctgaaagcatattctttaagaggccagaaatgatagttcctctatggtaaaaagaaggacagcacagaattagaatgcaggcgcaaatatagtaaacaattagaccgtgggaatacacagccattttcacgtaattgtgtttattttctagtgagagagtgaacacgatcatcagcagaaaatgaagatagaggt

SEQ ID NO: 774658 - DNA, 514 bp, Homo sapiens
aaatatttatttgtgttagtcactatgttaaattttgtgtgagtatgtgaattgtaggatgggtttttaaaatccttaatcctcttgggtgaagtgcttactctcccctcctgcagttctgatttattccaaatttggagagcagaaaaatggtaaattggagataagagactgaggttccttagaataatgcatcagcactatgcagtcagatgaaggagtttcatctggctctgggcagagagaagcagtttccctttgtcccttctttctgcaaaggagacactggttgagaygagtgagaagtggaactagggcgaagagggcaagtgagtaagagaactgtgagagaaagaaagaaagggagaaggagacaaagaggagagcctgacagccctttgagctgggctcaatagggactggcagtgcctctaggaaaacaaaaagggctccttttaccatcttcggaagctggatttacctctgatcttctcttggtaaaatttacttttgg

SEQ ID NO: 774659 - DNA, 622 bp, Homo sapiens
tagcacgttgaggctaaaggcatttatgcaattactaagtctactgtatatgtgagcaaacatgagggtagaataagaatagagctattatgttactgtaccattattctagtggtctgcctttaatacccagagacatctttggagaatgtcaaaatgttccctttattataacatttttttctttctttttcttctgattaataaggtgggttgataatataaatttttaaatttttatttttattttttggagacagagtctcactttgtcaccccggctgaagtgcagtggcacaatctcagctcactgcagtcttgacctcccaggctcaagccatcctcctgccttagccccacaagtagctgggactataggcgtgtgccaccatgcctagataatttttgtattttttgtagagacaggtttttgccatgytgcccaggctggtctcgaactcctgagctcaagtaattcgcccaccttggcgtcccagagggctgggattacaggcatgagccccacgccgggcctataacttttttaaattgttatatctagttctttgctagagaaattttattttgataaatgagttaataattataatttaattataat

SEQ ID NO: 774660 - DNA, 646 bp, Homo sapiens
gcagcgggccagctgcatgtctctgggcataattgtcatgtcacgtgcctggcatggatggcacacaggttggtgtcttcaaagaggcgcaccaggtaggccttgctgggctcctgcagggcgctagtggttgcgctctggaagcgcaggtccgggctgatggcctgggtgatcttcgcaccaggcgctggaagtgcasgttgcgcaggagcagctgagtggacttctggtactttctgattttgcagagtgccagggtgccagacctgtagccgtggggcttcttgatccctcctgtaggcggcgccctcttgctggcagctttggtggccaggggcttcctgggggcctccgaggtggtggctttgcaggtgttctgcttgatgtccactgtggtgcagggccgcggcctctcccctgtccttgggctgagcctggccagctgcaggcagctctggcgtcagggagcgagggcggtgggtttgtggacaggactcagagagcctgtgagttgagatctgtgcagaagacgcaaccccactcttagcccctttcaatccagccctagacttacctgctcacaggtctgcgggtcaggctgctcgttcgccctgtggggtcctgggcttccgaggtctacacaccg

SEQ ID NO: 774661 - DNA, 646 bp, Homo sapiens
gcagcgggccagctgcatgtctctgggcataattgtcatgtcacgtgcctggcatggatggcacacaggttggtgtcttcaaagaggcgcaccaggtaggccttgctgggctcctgcagggcgctagtggttgcgctctggaagcgcaggtccgggctgatggcctgggtgatcttcgcaccaggcgctggaagtgcacsttgcgcaggagcagctgagtggacttctggtactttctgattttgcagagtgccagggtgccagacctgtagccgtggggcttcttgatccctcctgtaggcggcgccctcttgctggcagctttggtggccaggggcttcctgggggcctccgaggtggtggctttgcaggtgttctgcttgatgtccactgtggtgcagggccgcggcctctcccctgtccttgggctgagcctggccagctgcaggcagctctggcgtcagggagcgagggcggtgggtttgtggacaggactcagagagcctgtgagttgagatctgtgcagaagacgcaaccccactcttagcccctttcaatccagccctagacttacctgctcacaggtctgcgggtcaggctgctcgttcgccctgtggggtcctgggcttccgaggtctacacaccg

SEQ ID NO: 774662 - DNA, 598 bp, Homo sapiens
cagaaacagtcatctacttataatttattgggagtttcaaaacgtcaggggtaattgttgcacaatattatgttgaatattataaaatgttcctttagaaactaggacataatcttatgatatgttgcctcctttgcttcatagatattatgtttagtattaatgtcgaaccattcttgcattcttaaaatgaatctcatttgtcatcaaggagtatttcttcttaatattattactattattattattattattactactactaagggacaaggtcttgctatgttgcccaggakagtctcaaacacctggactcaagtaattctcttctctcagcctcccgtgtagctgggaccacaggtacccaccaccatgcctggtagctttttattattcttagtatatactctcaattctatttgttaaaattttattaagaactttcccttgatacttacaagtgagattgacccataaggttgtcttggcttttgtgtattatattttcattggtaatagctttacaaaaatacttaggaactttttcttttttctttgtagtgtagaacagtttaaatagtattggaaatgcctgttc

SEQ ID NO: 774663 - DNA, 598 bp, Homo sapiens
cagaaacagtcatctacttataatttattgggagtttcaaaacgtcaggggtaattgttgcacaatattatgttgaatattataaaatgttcctttagaaactaggacataatcttatgatatgttgcctcctttgcttcatagatattatgtttagtattaatgtcgaaccattcttgcattcttaaaatgaatctcatttgtcatcaaggagtatttcttcttaatattattactattattattattattattactactactaagggacaaggtcttgctatgttgcccaggagagtctcaaacacctggactcaagtaattctcttctctcagcctcccgtgtagctgggaccacaggtacccaccaccatgcctgrtagctttttattattcttagtatatactctcaattctatttgttaaaattttattaagaactttcccttgatacttacaagtgagattgacccataaggttgtcttggcttttgtgtattatattttcattggtaatagctttacaaaaatacttaggaactttttcttttttctttgtagtgtagaacagtttaaatagtattggaaatgcctgttc

SEQ ID NO: 774664 - DNA, 624 bp, Homo sapiens
ttctttaaatgtattatattcttttttatctcattttatttcccttagcatcactgagacatcattttggaaaatcattaaaccatgtcagctgtattaagagaaaagcaaccttggtttatgtcttgttcatgagtccaggagggctagggaaaatgggggcctctcaaaggctcaaggctgtgagatgaattagtgattccagccagtgcagtgaataagaacagcaaatatcaaagactcaaactcatagtatgcatgtcctcatagtagcctagaccagagttcatttccatytgaaggaggtggctaggaatggtgtgcttcgtgtttttatttgtttgttcgttttgtattttatgtggatttatattactatatgcaggaagagaaatatgacataataaaacttatatatctgaaaaagacattgaacaatattctttactaggccagagttttgagaaatgacatatgaaaaaggcaagaactcactgcagtgtatgaattaacctggacagtaaaatgaaagacaacatgaaccagaaacaaaagaacaatttgaaatcacaaacaagaacgatagaaagggaaagcaaataaaagtaaaaccaagaaactgcc

SEQ ID NO: 774665 - DNA, 511 bp, Homo sapiens
acatattctgagtatttaaaatttcaaaaaggcttagaatatttttaaaaaagtataatatactatgccactaagggaaccaccaccaattcttgaaaaagaagacatctacaaaaccacaaagtattagcagtagaaaataataaaagaagtaaacaaaatattacactaattggatgtttaaaaaaattctcaattaactrtgatgtcaaagagatagttatgtacacaaaaaaatatattaaaacccttggaagtatactaaactcagagcatcaaaaattacgacatttatccaactgatactaagaggaaaatcattagactttattcaaattaataaatttgatgaaatatttaatttatatgtgtatataatttataatatataaatagtaaatagtttataaacagctttttaaaataagatacaaagtgcagcttaattagaaataagattatatattttacatatttgtacagattagtatatgtgaattatatataaata

SEQ ID NO: 774666 - DNA, 601 bp, Homo sapiens
ttctgagttacttcacttaaaataagcagctccaattccatccaggttgctgcaaatgtcattatttcattcctttttaaggctgagtagtattccattttttatatataaatatatatatataccattcattatatatatgcattccattatatatataatatataatagtagtatttgcattccattatatataataatatgtaatagtattattccatttcatatatattatatatataaaatayatatataacaattttttttattattatactttaagttctaggatacatgtgcacaacgtgcaggtttgttatataggtatacatgagccatgttggtttgctgcacccatcaagtggacatttacattaggtatatctcctaatgctatccctccccagccccccaccccacaacaggccctggtgtgtgatgttacccgccctgtgttcatgtgttctcattgttcaactcccacctatgagtgagaacatgtggtgtttggttttctgtccttgtgatagtttgctgagaatgatggtttctagcttcatccatgtccctgcaaaggacaagaactcatccttttttatgg

SEQ ID NO: 774667 - DNA, 570 bp, Homo sapiens
tcaaggaccagatggttgtagatgtgtggtgttatttctgaggcctctgttttgttccattggtctatatatctatatatctgttttggtaccagtaccatgctgttttggttactgtaggcttgtagtatagtttgaagtcaggtggcgtgatgcctccagcttttttctttttgtttaggattgtcttggttatgcaggctgttttttggttccatataaactttaaagtagttttttccaattctgtgaartaagtctttggtagcttgatggggatggcattgaatctataaattaccttgggcagtatggccattttcacgatattgattcttcctatccatgagcatggaatgttcttccatttgtttgtgtccttctttatatgttaattattttcgttattccatctcaaaaaaaatatttagagatatggggtcaagcacccggaaagcccccaaacagaaactattaaaagtgaatgtatctagggagtgggaactggagtaggaaatgtgggcacatgacttacgtttagcataagccttcttagaggttgtccttttg

SEQ ID NO: 774668 - DNA, 570 bp, Homo sapiens
tcaaggaccagatggttgtagatgtgtggtgttatttctgaggcctctgttttgttccattggtctatatatctatatatctgttttggtaccagtaccatgctgttttggttactgtaggcttgtagtatagtttgaagtcaggtggcgtgatgcctccagcttttttctttttgtttaggattgtcttggttatgcaggctgttttttggttccatataaactttaaagtagttttttccaattctgtgaagwaagtctttggtagcttgatggggatggcattgaatctataaattaccttgggcagtatggccattttcacgatattgattcttcctatccatgagcatggaatgttcttccatttgtttgtgtccttctttatatgttaattattttcgttattccatctcaaaaaaaatatttagagatatggggtcaagcacccggaaagcccccaaacagaaactattaaaagtgaatgtatctagggagtgggaactggagtaggaaatgtgggcacatgacttacgtttagcataagccttcttagaggttgtccttttg

SEQ ID NO: 774669 - DNA, 570 bp, Homo sapiens
tcaaggaccagatggttgtagatgtgtggtgttatttctgaggcctctgttttgttccattggtctatatatctatatatctgttttggtaccagtaccatgctgttttggttactgtaggcttgtagtatagtttgaagtcaggtggcgtgatgcctccagcttttttctttttgtttaggattgtcttggttatgcaggctgttttttggttccatataaactttaaagtagttttttccaattctgtgaagtaagtcwttggtagcttgatggggatggcattgaatctataaattaccttgggcagtatggccattttcacgatattgattcttcctatccatgagcatggaatgttcttccatttgtttgtgtccttctttatatgttaattattttcgttattccatctcaaaaaaaatatttagagatatggggtcaagcacccggaaagcccccaaacagaaactattaaaagtgaatgtatctagggagtgggaactggagtaggaaatgtgggcacatgacttacgtttagcataagccttcttagaggttgtccttttg

SEQ ID NO: 774670 - DNA, 634 bp, Homo sapiens
attcttcctatccatgagcatggaatgttcttccatttgtttgtgtccttctttatatgttaattattttcgttattccatctcaaaaaaaatatttagagatatggggtcaagcacccggaaagcccccaaacagaaactattaaaagtgaatgtatctagggagtgggaactggagtaggaaatgtgggcacatgacttaygtttagcataagccttcttagaggttgtccttttgtcattttgataaaacatatttgaaaagaaagtgtatgcagcaagagaatgtgagcatttggacaagagttttagtagcattattcttgagtaacagagtaaaaataaattaataaattccttttaattctgtagctaagaaatccactgacttccccaattcattcatgcgttttctttggttaccatcaaattaaaatagaatcttatgttaatcatgttatatactgttgtgctttccaataaatactgggtgccatagaatatttccaagctagaaattcccttgcctgggattttgagcccaggtcttctcacctggcctctttccttcctcatctccatattaagcacacatcatcatccttatttgatgcaactcatattctgataatcc

SEQ ID NO: 774671 - DNA, 502 bp, Homo sapiens
caataaatactgggtgccatagaatatttccaagctagaaattcccttgcctgggattttgagcccaggtcttctcacctggcctctttccttcctcatctccatattaagcacacatcatcatccttatttgatgcaactcatattctgataatccaatattaattggcactaggtgtttatcatactctcttttgtgtggattctttgctaggtggcattccaccactactgcaattcsaagcactttgagatgagatcttaaaggacccaacatcaatagtcttttaatatagtggttttgccaaaagcttttgcaacctgtttaaagtgaaaaattttctacaatttcactaattacctgagtttaatttagcaacttattcaaagaatgatgcccagatcgtactccagaaggggagtataaattattgacagatcacagaatatcattatgtacatatatgtagtttgtagcttcctagttactaattatacttta

SEQ ID NO: 774672 - DNA, 531 bp, Homo sapiens
tcctgccagtgatttaaagctatcaagaatacataggtataaagacactggcattactacagctaggcctgaccatacgagaggtggacgcagagatgggctcattaatatccatgagcatagtgaggccttgaaaaatataggtgaggtggcagtgcctaactgccagaaatcagggggatgaaagtgatagatattagcaaggttagaggaacaatccccagagagttatgaaggggatttataggctataccatcccttgggcaaaagccatggtcggccaacaagggcactgcttagcatctacaatgaaaaggcttgattaaaagtcacagtcccttcctcagattctagatytaaattttcagtttgaaacccatagtctgaagaggtgaccagatgcccaggaggaaggaccctgcaacattttagcaagtatatattttaatgatcctcccagcctttccccaaagggacctagggacattgtttaccctcgtgactgtacattgagaaaagaggactattta

SEQ ID NO: 774673 - DNA, 637 bp, Homo sapiens
caaggagggcataacctattcatgaggcatctaccttaatgaaccaaatacctcccattgggccccacgttcaatattttggattaaatttcaacgtgaagtctggatggaacaaatgtccaaaccacagcaaggactatatgcatttggctgttttgttttgttttgcttactgtttattgtctgtttactgcaatagaatataagcttcatgacagtaggtatcttagcatgtttaccaatgtatcctaagattctacaagattacttcacacaaaattattgcactatatatattttaaatgtaaaagttaatgcaaacaaacaaaaaagtaaaataaacaagcatatatgtagcactcagcctaaaaaataaaaaactcaacacagttgagctgaagtatccaatacggtatacacattctttattgaatcttcatcttttcycctgcagaaggaaagactattttgaatttttaaattattattgtacagttacttacatgtttattataaatgactttcttccaaagcaattaatatgcattactttcatatcttaaaactttatatgatgcttgctttttgtacttaacattttgtttgtgaaattcatccttatggataatatattttc

SEQ ID NO: 774674 - DNA, 522 bp, Homo sapiens
taaaaacgattaaaaaaggtaaaatcctttccccaaggaaattacatttacaatattttttctgtttgttaattatacacatatttctctttaccttattaacctctccaacatcacttcccttgaaacaaggcagcttgtctttgggggattcatttgattctagaaagctgactctatttccaggaatatataacagaagccaatcagtgcattaaatctctcaagaatagtgtttcatgggtagcatgtaacctaaattggtttaatcagaataactctcagaatttcatgataattctggaacaaagatactttctcatccttgaaaacatgaataagggataatgtaagcttaagaactggtgactaaccrttgtggagaaagaaggaaagaagctttgaagaaaattaacttcttgacaagcggagtggaaaactaaataaaaaaaaatcgtttggtaacatgtttgagttatcctggatcatgtcttatttgatttatgtgatgccaacccaacc

SEQ ID NO: 774675 - DNA, 653 bp, Homo sapiens
caagggaggagaaactcaaatcccggaaccaagccaatgtattaaaatcccaagccaaaggttggacggggcacttggatctctcaaggaacccacttgaccctcttccaagtgtgctttgcttcctttcactcaggctctaaaactttttaataaactctcacttttgctctaaaacttgcctcagtctctccctctgccttaaacatacttctgcccctcagccaaattctktcctccagagaggcaaggatcactttcgctgcagattcgcgttggtaacaatagtacttgaaagcatggttctgcatgtccaagcaaattttctgagagccggtcttgtaaatctgcttcatcacccttttctggctccgtctctgttctggcagggtgagtctttaaatcccttttggaatcctctggtggaattgctggttattttaattaatgttgtacatctgtatttttgcttcatacctcatcaaacttatgatgctcaaagcaggcaattccaagcaaattcactcttcaaagatagctgcctaattttgtgtggtgtttttcagtttgttgtttaaagagttccaggtttgtaaagtaagggaaaaataagcaagtgggaaactcatgtattttattccctgctggatccc

SEQ ID NO: 774676 - DNA, 582 bp, Homo sapiens
aaaccattggagattattttataagtagttcttaaactagattcaaaaagcactaaacatatgtgaaaaaattcatcagacttcatcaatactcaaaattgtggcttagcaaaagacattgctaagtaaatgaaaaggcaggttaagtcaggctgagactgactaagaactcagatctatactatataaaggactttaacaaattaatcagcaagcacataaacaagctggtcaaatgcttgagctgacacttcatccaaatgtcacaagagaaacgtcaattaaaaccatgagacaccattacaacccatgaattgcaaacttttytaaagttctattttgtttttaattgacatagaagtatacatttttgggggacggtgtgatgtttccatatatgtatgcattgtgtaataatcaaatcgggtaattagcatatacataatatcaaacctttattatttctttgagaacattcaaaatcttctctttgggttatttgaaatatgcaatacattatttttacctatagtcacctcatagagcaataaaacaccagaacttactctttgtatgtaactg

SEQ ID NO: 774677 - DNA, 582 bp, Homo sapiens
aaaccattggagattattttataagtagttcttaaactagattcaaaaagcactaaacatatgtgaaaaaattcatcagacttcatcaatactcaaaattgtggcttagcaaaagacattgctaagtaaatgaaaaggcaggttaagtcaggctgagactgactaagaactcagatctatactatataaaggactttaacaaattaatcagcaagcacataaacaagctggtcaaatgcttgagctgacacttcatccaaatgtcacaagagaaacgtcaattaaaaccatgagacaccattacaacccatgaattgcaaacttttttaaagttctattttgtttttaattgacataraagtatacatttttgggggacggtgtgatgtttccatatatgtatgcattgtgtaataatcaaatcgggtaattagcatatacataatatcaaacctttattatttctttgagaacattcaaaatcttctctttgggttatttgaaatatgcaatacattatttttacctatagtcacctcatagagcaataaaacaccagaacttactctttgtatgtaactg

SEQ ID NO: 774678 - DNA, 653 bp, Homo sapiens
aaattgccaacacaggacttttttgtagccatacacttgttttgttttacatgaatatgcatgagagtttatttttatattttcacatgaaaatatttatattgtgataatagtttgcctctgcacttgaaatatgagactagttatatattgataaaatattgtctttttaactctcgtggatacatatattatttcttgaactgatgaaaaatttactgttgctaagcttaaacataaaaattcttatataattatatttgaacaggtatatggtgcataattggaaatggagcatgatggggagaagtatgaaccagagacttttggaagaagtctgaattctgtgtgctttatatacatttctcaygaagtaggtccacagttgtaaagaatttattccattgcatacatttattcaccattaacactacttcaaaacaaccctttatgcataaacacatatatgagaacaagataaacttgtttaaatttctactaaggattgtttagaaaatatccaaatgaaccgagcttaaaccatgctgaatattcatacatctctaatttttttaaatgttgctaaaaattaaaaataaggtttgcgtctagtaaggtgacatatctagagtttacaagatcatgtttaatac

SEQ ID NO: 774679 - DNA, 617 bp, Homo sapiens
ccggtgatataacttgtctttggaaaaacctgaagattccaccccaaaaacttttaggctgataaaaaaaaaattcagcaaagttgcaggatacaaaatcaacatacaaaaatcactagcatttttatattccaacagtgaacaatctgtaagagaaataaagagtaatcccatttacaatagccactcatgaaattaaatacttaaaaaagtgaaagatctctacaactaaaactatgaaatattgaaaaagaaattgaagaggacacagaaatatggagagatattcaattttcatagattggaagaatcaatattgttaaaatatttatrctatgcaaagaactctacagactcaatgcaatccctatcaacataccaatgacattctttacagaaatagaaaaaataatcctaaaatttatatggaactacaaaagagccagaatagccaaagctatcctaaacaaaaagaacaaaactggaagaatcatattacattatttcaaattatgctacaaggttatatagtaaccaaaagagcattgtactggcatcaaaacagacacatagcccaatggaaaagaatagagaacctataaacaaatctatacacc

SEQ ID NO: 774680 - DNA, 616 bp, Homo sapiens
tggtgaggctgctttgtgggggctcaaggagtctgcacattcttcaaaacatgtagctttctctagtgtgtaccccaactgtgctgacttccttaaaccttggatttgcccaatggcgttaggatgcctggcccatcctccagcctgggccaactattggcattgatcagtgtagcagtggtgcacaaatcctgttgctctctaagttcagaatcctgtttaaagctctsctgtgtggctgcagccagcagcagagtctgcccctggaatgcctgttcctctccttcctggcagccaggctccatttagtttaaggattttgtgccaggaatgttatctgagctgtcaccatcatgctttgtcaccctcaagtgaatgacaggaaatggatcggcgagctctgtcagtttccttgctgctggcatcactcaggttcaaccatgagcatcgcactgtgagtcactgaggaggtggacagaagccactcaaacgtctctgccagacttcaaaagagctttaggagatagaagagtcctatcgatcggtgcctgttcttctgtcttgattgttactttgagccatgcagctgtgttaccatgggtgcctgccactcttc

SEQ ID NO: 774681 - DNA, 680 bp, Homo sapiens
tgagcatcagtttcttctataaaatggggacaatgatattctttcacagggtgctatgagggtcaaatgaaataacaattgtaagcagttagcacagcacctgcttcatactcatgtacatccttgctttgcctttttctagtttgattctgggcattttagcctctctctgtccggtcttcccatctgtgaaatggggagagtaacagcamcggcctcactggagtgttgaaaggacaaaatgagttagcataagaaaagcacttagaacaaggcctggcatgtggaaaaatgtgaagtaagtgtctgctactcctcttcatttaatcaatatttgttaagttcttgctatgtgccatgcataatgataggagctggaatggtccatgttattaaccagtctgctttccacagactcctagctggtcaggaagttctgccctgcctggccatgccccatccacacacacattgacgaggagcccaccccagccaaggttctgtttggctcccgtctggggctcctcagtctccatcgcctcattcccaagtgcaggaaactgattccaaggatagtgctttctatacattgcagaaatagtgctggaataagggcatctctgagaagatccgttcagctgtcagagagcactcagggatgcctcccactggtgtgcaga

SEQ ID NO: 774682 - DNA, 562 bp, Homo sapiens
gattttcttctttcacagcctgctttaagagtaccaatgcacaggattctgcttagtcattttatcctttttattccccagcagaagttgaagaaatttttaaaaggtgtgtatttatttctttgtatgttaataccccaactcatttcaggaagaatttgaagtagagaaaaagctgtgtatggacacagtgttgatactgtcatcttccgatcccgattctgtatataggacctgcccactctccttaagtacggacattcctcctattccctccctaacttctgggaaggatctatagtttctttcccccagggtaataggggtcaaaattttactaaaatgatgaaatacttacagtgsaatttgcattgaaaggaagaaagtgatatctatatatctatatatttacatctacatctgtatctaaagtttcttggtggggggagggactttgaattgctcctaaaaccacaccaccaaggtggctgaacgttccttgtaacatgcctcaccatcctacttgtgaactgagccaataaacttcaaaaagaggtgtatc

SEQ ID NO: 774683 - DNA, 445 bp, Homo sapiens
cccccaagaagaggaagcatatttgtagctctgcttatttccttcaaatagattcctggaagtagaattaatgaatgaagggatattaacttttcaaaggcttggcagaggctgccaagttgtttaccaaaaagggtgcgtagtcctttttaactagacgaccacatttagattttatgaagatcaatatttggctagatctaggggccacgactcttacagttctgtcttaccctagtatagacactttcctctttttcagaaagtyatttgaccgtgtacttatggctaaagtaaatcctgcttctcattcttgcatttataacctttactgagccagtctcacattcatcatggtggtgggcatgcgatgtattcatcagggttcatccccggctgccagctctcctccactctacactccccttggtgacttcctctactc

SEQ ID NO: 774684 - DNA, 608 bp, Homo sapiens
aaatttaaaataattcctacaacatggaaaacaatttggggtgctatagtaggcaatcttcttaaagatggcttttaaaaaagcaatgcagggctgggcatcatggcttatacctgtaatcccagtactttgggaggccrggatgggaggatcacttgaggccagaaaaggcatttgagaccagcctgggtaacatagcatgaccccatctctataaaaaaaatcttaaaaaaattagctgggtgtggtggtgcacacccgtaatcctagctgcttgggaggctgagcagggaggatggcttgagctcagggtttgaagctgtagtgagctatgactgcaccactgcactctagcttgggcaacacagtgagaccctgtcccttaaaaacaaacaaacaaaaaacaaagcaatgcaggaattctacacacaaatgaacaccaatgaaccactgtgacataaatgaatctcacagacacagtgctgagcaaaagacaccatttatacaaacaggcgaagccaccctttggtgttagaagttagagaggcttcccttggaaggggagtggggaattgtgggcgtggctacaggaagggttcaggctgttg

SEQ ID NO: 774685 - DNA, 625 bp, Homo sapiens
taaatatgttatgcccatgggcggacaaaaagtgtccaatggatagttacaccagtggaactggaaatctagaacaccaaactgagagtagttgaaaccttggattttaaacagggtcacagagggagaaaacacaatgaaaacagtggcagagtaaccaaagaaaaggctagaagagaagcaggggcctcaagacagacaaaaaaattttttttttttttttaaaaagacaaagtcttgctcttgtcccccaggtgggagtgcaatggcgggatatcagctcactgcaaactccgcctcccaggttcaagcgattctcttgcctcagcctcccaactagctgggattacaggcrcctgccaccatgcctggctaatttttgtatttttagtagagatggggtttcaccatgttggccaggctgacctggaactcatgacctcaggtgatctgcccgcctcagcctcccaaagtgctgggattacaggcgtgagccaccacacctggccaagacacaccaatatttaaagggataaagaagaggagtattttgagtggcaactatctggggccagtgtcatgcaggcagtaaaaagaatttaccaagacagttgtaggtaaagaa

SEQ ID NO: 774686 - DNA, 666 bp, Homo sapiens
aagcaatcctaagcaaaaagaacaaagctggaggtatcacattacctgacttcaaattatactacaaggttatagtaagcaaaacagcatagtactggtataaaaaccatatagatccatggaacagaatacagagcccagaaataaatccacatacctacaaccaattgatctttgataaaacacacagttgggaaaaaaacatcctattcaagaaatgatgctggaaaaattgacaagccatatgcagaagaatgaaactggacttgtatttctcatcatacactaaaaattaactcaagattaaataaagayttaaatgtaagaccctaaactataaaaatcctagaagaaaccctgtaaacactcctcaggtcattggcctaggcaaataatttataactacaacatcaaaaagcaaatgcaacaaaaacaaaaatagacaaatgggactatattaaattaaaaagcttctgcagagtaaaaacaataatcaacagagtcaacagacaacctatagagtgggagaaaatatttccaaactgtgcatgtatcaaaggactaatattgagaatcgtcaaggaactcaaccatatcaacaagaaaaacacaatcccattaaaaagtgggtaaaggacatgaacagatatttctcaaaggaagatg

SEQ ID NO: 774687 - DNA, 580 bp, Homo sapiens
cttccaaggaatgtttggttatgggaaataaatgccaattcacaagttgtaactaaatgggaaaatcagtgccttgaatatagatgaaattaataaacgcttcacaaggaagctgcaggagcaatatctgtatcaaagctcccactacctaactggttacagtccagcttctaagactccaggctaataagcccagccttgactcctactagatcctatatatgctaagcactgtttgcctccctttgtgcaaccaagagattcctgcaaagcctgtgtgtgtagatagcaaatggtcatctgcacagcctggcagctacagacatgytgcatttcttgtatataatgcccctcatcagaatttagcaagaagagactctgaaacagtcacatgaccatcctgaaccaatcactgtagccaagggatggcatacattgattggccacacttgtgtcatgtgacacccccaccctgcctccaaatggagggtattcgaatttagagtgggcagaggtggattcccagtgaaaattccatgttatttttgaatctcaggagaggatacaagttagggaagaa

SEQ ID NO: 774688 - DNA, 639 bp, Homo sapiens
tgaccattccgggctgattgctgcagaagttgtggtttggcttcctgtgcaaagctagagggtcagagttctatccttttctaggctaaaccacatattttgtatattcgtatattcagttcctcaaagcagtccccactgataatggctcgaatttgtaagcatggaggggagtggtgcgagagctgttcagtagctctaccatatcacaaaagtggtttccaaggttgtgattttcttggctctcatctcttgggtataagtggctgtgttcgagaccagcctggccaacattctccttrtgagaatccaatgcctgatgatctgtcactgtctcccatcaccccagattggaccatctagttacaggaaactaagctcaaggctcccactgattacacattatggtaagttgtataattatttcactatatattacaatgtagtaataatagaaatgaagtacacaatgacatgtaatgcgctcccaatcatcctgaaaccatctccatggcccctgccccaccaaacgtggaaagattgtcttccatgaaagtggtccctggtgccaaaaaggttggggactgctgctctactacatagattttctcccacctctgccacccccgagacagtaag

SEQ ID NO: 774689 - DNA, 639 bp, Homo sapiens
tgaccattccgggctgattgctgcagaagttgtggtttggcttcctgtgcaaagctagagggtcagagttctatccttttctaggctaaaccacatattttgtatattcgtatattcagttcctcaaagcagtccccactgataatggctcgaatttgtaagcatggaggggagtggtgcgagagctgttcagtagctctaccatatcacaaaagtggtttccaaggttgtgattttcttggctctcatctcttgggtataagtggctgtgttcgagaccagcctggccaacattctccttgtgagaatccaatgcctgatgatctgtcactgtctcccatcaccccagattrgaccatctagttacaggaaactaagctcaaggctcccactgattacacattatggtaagttgtataattatttcactatatattacaatgtagtaataatagaaatgaagtacacaatgacatgtaatgcgctcccaatcatcctgaaaccatctccatggcccctgccccaccaaacgtggaaagattgtcttccatgaaagtggtccctggtgccaaaaaggttggggactgctgctctactacatagattttctcccacctctgccacccccgagacagtaag

SEQ ID NO: 774690 - DNA, 579 bp, Homo sapiens
ttcttctgcctgcttttattctagccatgctggcagctgactagatggtacccagccacattgagtgtaggtctgcctttcccagtccactgactcaaatgttaatctcctttggcgtcaccctcacagacacacccaagaacaatatttcacatctttcaatccaatcaagttgacactcgatgttaaccatcacaaaaccaatatggcaaatacatacaatggaatattatttaacaataaaaagaaatgaagtactgacacatggatgaaccctgaaaaccttatgctaagtgaaagatgccagacacaaaagaccatgcactggatgactgcrtttatatggaacatccagactaggcaaatcgatagagacagaaagctgaataatggaagctaggtgcttgaggaattgggaggaaatgagaatggctgctctggggcagggagtttctttgagggtgatgaaagtgttctaaaactagataatggtgatgttgcaattctgagtatactaaaaaaacactgaattatgcactgcaacagggtggtcatgatggtaactgatatctcaacaag

SEQ ID NO: 774691 - DNA, 610 bp, Homo sapiens
caacaaatgtgatttttaaaataaaaatatgttcattaacttttatcaataacatcaaacaacacatttgtttcacgaaacacaaagtcacaactgagcaatgagcagagaggatgttgcctagctctggccctcaggtgattttcttctctccgtttcccgagagctgattgatgtcacaattccaagatgacttgtaagtgcaggacagaaatgaaccacgcgcatctcatcatcacactccctaagtgatgaacgttccagrggctgtttcttgccaggaaaagctccagtgtctggtttcaggcacctggtcacctcctcctaacctctcctcctcttgagccatatttcacagttacagtttcccagccagcctcccctgtaagtggctccattcactgctacttggagttaagttcagcagcttagattttcattcttggaggaggtgattttaagcctagaaggcgtgcatgaagacgattacctcctctaattcagtccagagaacagcatctcacctgtggctcttgctggaccccagggcttggtgtcgtacaattacaatggtgattgggcctgagaaacggaggcggcatctgggaaa

SEQ ID NO: 774692 - DNA, 610 bp, Homo sapiens
caacaaatgtgatttttaaaataaaaatatgttcattaacttttatcaataacatcaaacaacacatttgtttcacgaaacacaaagtcacaactgagcaatgagcagagaggatgttgcctagctctggccctcaggtgattttcttctctccgtttcccgagagctgattgatgtcacaattccaagatgacttgtaagtgcaggacagaaatgaaccacgcgcatctcatcatcacactccctaagtgatgaacgttccaggggctgtttcttgccaggaaaagctccagtgtctggtttcaggcacctggtcacctcctcctaacctctcctcctctygagccatatttcacagttacagtttcccagccagcctcccctgtaagtggctccattcactgctacttggagttaagttcagcagcttagattttcattcttggaggaggtgattttaagcctagaaggcgtgcatgaagacgattacctcctctaattcagtccagagaacagcatctcacctgtggctcttgctggaccccagggcttggtgtcgtacaattacaatggtgattgggcctgagaaacggaggcggcatctgggaaa

SEQ ID NO: 774693 - DNA, 514 bp, Homo sapiens
tgcctgtaatcacagcttctcaggaggctgagggaggagaatcccttcaacccaggaggaggttgcagtgagcttagattctgccattgccctccagcctgggcgacagagcgagactccctttcaaaaaaaaaaaaaaaaaaaaaaagaattwccagtagattttataattacttttgtccctgttttatacatttcatttcttctttccgtgtttttttttttacttcttctttccatggtttttttttttttcttcctgaagaatgtcctttagtaattcttgcagggagtatctattgccagtgaacactccttagttgcatgtatggagggttctttgtcttatcatcactgatgaaacttagtttagctgggggcagaaaattttagactgttagttactacttctcagcatttttgaatattctggctgctgttgtagttgatgagatatatgctgccagtttaagcatcagttgccaatagataatttatcttttgtcttaggagg

SEQ ID NO: 774694 - DNA, 502 bp, Homo sapiens
ggttcaatggagttacagttccacatggcaggggaggcctcacaatcatggtggaaggcaaggaggagcaagtcacttcttacatggatggtggcaggcaaagagagtttgtgcagcaaaactcccttttttaaarccatcagatttcgtgagacttattcactatcacgagaacagcatgggaaagaccctcccccatgattcaattacctcccaccaggttcctcccaccacacaggaattgtgggatttacaattcaagatgatatttgggtggggacacagccaaaccggaagtagagagaaaacacactcaaagtagagggaagagctgtcattggatatcatggctgtgatcccccaagttgtgtccacagtgctgggcagtggacagatcttttggtatggttcccctaaactagtaagagactatgggagcagggatgttacgtgtctcttcctgaagttttaaattagccgtcatggagaaacctcaacatgg

SEQ ID NO: 774695 - DNA, 641 bp, Homo sapiens
aatgaaaaaaaaaaaaaaggctggcaatccaaaattctatacctacttagaatatccttaaaaagatatgagaagtaaaaaccttctcaggcagacagagactgaggaaattcattgccagtaaacctactctaccataaatactaaaggtagatctttaggccgggtgcggtggctcacgcctgtaatcccagcactttgggaggccaagatgggcagatcacaacgtcaggagatcaagaccttcctggccaacatggtgaaaccctgtctctactaaaaatmcaaaaaaaaaaaaaaaaaaaattagctgggcatggtggcgggtgcctgtagtcccagctacttgggaggctgaggcaggagaatggtgtgaacccaggaggtggagcttgcagtgagcagagatcgcatcactgcactccagcctgggtgacagagcgagactctgtctcaaaaaaataaataaataaataaaaaataaaggtagatctttagggagaaggaatatgataaaggtcaaaaaagcaccaaaataaaataaataaaagcaaagtaaaacattttttctttatttatatttcctctaaaagataactgttaaaagcaaacatggtaacaatagaatatgtgtttataac

SEQ ID NO: 774696 - DNA, 641 bp, Homo sapiens
aatgaaaaaaaaaaaaaaggctggcaatccaaaattctatacctacttagaatatccttaaaaagatatgagaagtaaaaaccttctcaggcagacagagactgaggaaattcattgccagtaaacctactctaccataaatactaaaggtagatctttaggccgggtgcggtggctcacgcctgtaatcccagcactttgggaggccaagatgggcagatcacaacgtcaggagatcaagaccttcctggccaacatggtgaaaccctgtctctactaaaaatacaaaaaaaaaaaaaaaaaaaattagctgggcatggtggcgggtgcctrtagtcccagctacttgggaggctgaggcaggagaatggtgtgaacccaggaggtggagcttgcagtgagcagagatcgcatcactgcactccagcctgggtgacagagcgagactctgtctcaaaaaaataaataaataaataaaaaataaaggtagatctttagggagaaggaatatgataaaggtcaaaaaagcaccaaaataaaataaataaaagcaaagtaaaacattttttctttatttatatttcctctaaaagataactgttaaaagcaaacatggtaacaatagaatatgtgtttataac

SEQ ID NO: 774697 - DNA, 603 bp, Homo sapiens
tcatcagcaaacagtgacaattttaagtttttcctttcctatttgaatgccttttacttctttctcttacataattgctccacaaggacatccagtactacattaaatagaaatgatgagagtgggcatcctggtcttgttcctgatcttagagaaaaagttttccatttttcaccattgtgtgtaatgtttgctgtgggcttttcatatatggcctttattatgttgatatacatttcttctatactaatttattagtgaaagsatgttgaattttatcagatgccttttctgcatctaatgtggtgatcatatagtatttgtccttcattctgttaatatggtgttctccatttatagatttgcatgtgttgaatcatctttgtatccctgggataaattccacttgatcatggtgaatgatccttttaatgtgctgttgaatttggcttattcgtattttgttgaggatttttgcatctatgttcatcagggatattggcctgtaattttcttttctcataatgttcttgtctggctttggtatcaaggtaatgctaacctcataaaaagagttcaaaagtattacatcctcttcgattt

SEQ ID NO: 774698 - DNA, 607 bp, Homo sapiens
taaaatttttttgtagagaaagggtctctgttgcccaggcaagtctcgaaatcctggcttcaagggatcctcctgcacttcgcctcccaaagtgatgggattacaggcgtgagccactgcactcagccagaaatttattaatgagaagactgggggtgtttatggaacctcggttggtggaagagttgaattatccttgtatttggtactctagaggtttttacactttggtgcagtgtaccagggtaagattaagaatgggtaaaagtgtgccttttgtaaagagatctttttttaatttaatttwatttttatttcctataggtctttggagaacaggtggtgtttgattacatgaataagttcattactggtgatttctgagattttggtgcatccatcacccaagcagtttacactgtacccaatgtgtagccttttgtccctcaccccgtcctaccctttcccccctgactccccagaatccattgtatcattcttttatgcctttgcatccttatagcttagctcccacttagaagtgagaacatagaatgtttagttttccattcatgagttacttcacttaggataacaggagaccttt

SEQ ID NO: 774699 - DNA, 643 bp, Homo sapiens
cactctccagtgtccgcgtacctcattcctcttggtcatgggacaagagcgaatggcaggtgcaaaaagagctgtaacatatgctcatgctcgccgagctataggagtgaaaaaaccattgtgtgccaacatgcccccatttgctgagctgcaggcagcaggacccaatgagttgtgacacgctcccattcactgaagctgcagacagcagaaatgaacgacagtgtaacactttctggaggctcagrcctcaggactccccaagcaaaagctgtaacacaccttggggctctgtggttgctggcatctccaagttattgggcactgccacatccccctcatccagacaccagcatccaaggtagaagttggtcacggcacccctggaccagctgcgggctgaccacagagccaaggcaagcgcaggatccagaccagtagcacagcctgagcgcagtctgctgggccaagtgggcagagtaagcccagtgggcccaagcaaagcctgggcagaggtgccactagccgtggagatttctggctggcaaagtggcactgaaagaattctgtgtcatcagtagtcaaataagctactcttattctaaaaaaactcagtcaaaaaaaaattctaagcacatgtata

SEQ ID NO: 774700 - DNA, 610 bp, Homo sapiens
atttttgttgggaatcagggcaatgccagatatcctttgtaaaattttaacacagtcaactgttcctttattgctcagcatgccatccaggctccattccagggcatgcccttccacagtttagggttgctttgaatatttctacaggatttttcagacattagcctgtcaatcaaatatgcagtaagttctcataaaatttctcacttccccacaccctgaaagctataatgagcaaacagagtagattytaatgatgtgaacaagatagcatacaacctttgaacttagatatttgtttgatacctggttctgtcactaactagctggatgaccttggaaatatcatttgtcttctctaaatttcaggtaccttgtcattaaaatgggaatcatgatggttgcctcataggttagagtaggattagttgagataattaatggaaaacaaataataggtggtaaagaaaactggccctcagcccatgtttgtagttactatggctgatatttttgttgttcttagtactactatgtctattgggagtgccagaggatgatggcccaaaaagcctaacgaagacatttaggattggtattagtgttcagt

SEQ ID NO: 774701 - DNA, 569 bp, Homo sapiens
tctaagtgctcagtaaagccaggtgcactggtttgagcctgtaattgagctcctggtctcgaactcctgacctcaagtgatcctcccacctcaccctcccaaagtgttgggaatacaggcatgagccactacgtctgaccgatatatcagatttaatatgtccaacttggagctattgattttatcaactgaacctattccttccctcaaactctcccagcatagtaaatagtaccacctggttgttcaaaacaaaaacctagaattggtcctctttataaaaatccaaagattggttctacctccaaagtatatcttgaatcctccccctctaccactrcatcctaatcttctccatctctatgtctcacgtaaagtcctgcaaccactaatatttcggtcttctgatccattcttcacatggcagctagagtgttatttgtttatttatctatttattttttctttttgagatggagtctcactctgtcacctaggctggagtgcaatagagcgatctcagctcactcaaaaaaaaaaaatcaaataatgtaatttgtttcccctat

SEQ ID NO: 774702 - DNA, 535 bp, Homo sapiens
aaactaaaattagctgggcatagtgttgcacatctgcagtcccagctacttgtggggctgaggtgggaggacagcttaaaccagggaggtagaggctgcactgacccatgatcacaccactgtactccagcctggacaacaaagtgagaccctgtctcaaaaaatgaataaataaataaataaggataaacagaattcctatataacccagcaaatccatttytaggtacatacctgtactagtctgtttagtcttgctgtaacagaatacctgaggttgagtaacttataaagaaaagaggtttatgtagctcacaattctggtggctgggaagtccaaaagcatggcactggtgtctgcttagcttttggtgagggctatgtgctgcaccacagcatggaaaagcaaaaaggcaagggggcaaagagacttacaaaaggtagaaccttgcttgtaacaactcattagggcagtgtccccactatccaaacacctcccactagggcccacctcctaatactgccatattgggaa

SEQ ID NO: 774703 - DNA, 555 bp, Homo sapiens
tagttttgagagatatttttgcaggattttgaattctagattgacattttcctttactttcagtactttaaagatgttgctcctataccttctggattgcattgttaccaatggaaggtgttcaggttcttggcgtcttgaacaaagaattggacaaaacacacaaacaaagcgggaaaagaatgaagcaaaaaaaaagcagagattattgacaatgaaagtaaacttcacagtgtgggagctggttggagcataggggctcaagggtgccattacagaattttctggggtttaaatcctctttagaggtttcccattggttacttggtgtacaccctttgtaaatgaagtagtggcccccartgagaggctgaagttaagttacaaaagttataccctatgcaaacctctggttgtggaaagcaaccaatcaaaggctaaagtgaagttacaaagttatacttctgtgcaaacaaagacttagccaggaatcagtctgaatagttgcctggtaagttgcagaaagcaaccaatcaaaggctaaagtgaagttac

SEQ ID NO: 774704 - DNA, 599 bp, Homo sapiens
catttgacgcctttaaaactacctttttgctgttgggaggagtcgggggcgagccttagcagctgcaccgccatccccatgctggttggtgctgccctgcctctcgtgccgggtgttgcttcagcccagagccagagggctgggtcccgggtcctccacaggtgaccccggtggacacacgcgttcccatcctggcctccgtctctgcttttccacttctacctgcgtgtgggtttgccgccttgtcatcrgttgtgtgagtgtcgcagacctttccagagctccggttcactctttccaaacaggcctccctgtcggtggcactgcactcctagaaccttcagtttctacgatggtttgtttggtccttttgaaccaccccaaagaactcaacatggcaaagcaaatggtaaaagcttcccgactgttctactttgggtccgcgcgaagcccactcacgtgtgatttgtgttgcccctctcggtggtcccaggcgatccagccatgccccctgcccctctgcccagatgcttcaggggcccggcttttcaggcttgccctcaccagcggccgtcagccgacactcagggatgtagcta

SEQ ID NO: 774705 - DNA, 493 bp, Homo sapiens
ggaccattctaaacagcacagtcaccaacacaaagcacagacatgtgaaaaacatggcactaaatagaccatgaaaagaccatttgttgacagtacgaggctgaaacgagaaggcgcgttgttgcctggtttgacctcagctgggaacatgcacgttcgatgactcaatttttttgttgtcgttgttgctctgcaaacatctgtgaatgaccagggaggtgccacgagtattgatttttggggttacaaatacattttagcaagtaggtgaattcacaaatacagaatccaggaataatgagaatcagccatastcgaaagactagaattggagtctgtctcagtttccatatttataaaatgggtataaatatgacacacactggaagtttgtgaatatcaatatggaaaggttaaatgagtaaagctttcattgtattgccagacctttgagtcctcgataggtgatagtggtgttagtagtaattattaa

SEQ ID NO: 774706 - DNA, 527 bp, Homo sapiens
gggagaaaaagtcactgggagctatttcttccagctcactgaactacaaaagctgcaacattttggggtcattcatcaagaattgtcagaagggtaagtaagtgctgacccaagacttggatagcatgactgcagagaacataattgctgaggaggactttgtcaattccccatcacactcacttgttgagaatgttggcttttttccaatccagtttattttcatgaaggtctaaccataacatgggattggaaggaggtcctggggcagttgagggtctctggctgaggctgcacattggtcttatccaaaggccacttgactgackccagtccccaacagcccattagggtgtcagcactaggacctccagcattttctgtctcatttacttttttctttcgtggctgtcatggctcatatatgccaaggccagctctgtcatggagaccctaacccagcgacactagaggaattaaagacacacacacagaaatatagagtgtagagtgggaaatcaggggtc

SEQ ID NO: 774707 - DNA, 633 bp, Homo sapiens
atctacagtccagtgaagaacttgtctctccctaaacccagccacctttcacccagagaaagctggagagcttgaacatgattgcaaacagagagtagtgcaaaccagtgtggccagagaagacctaaaagaaacccacttagagaacccagactagactccctttatgaatggaagttcatttgtattagtttggtgcaaaagtaattgtgttttttgccatactttcaagagaacaaggggtccataaagcagggtttccagtaatgctcctgaatgacactactaaaggcatgcctctcttcttgagcacaagtgctcaactatctgagctaactgccctcatgagggcacttgaattaagtaaagggraagcagttaacatttatactgattctaagtatgctttcctattcctccatgtccatgccaatatctggagagtaacttcctcacagctaatgggtctcccattaaataccttcaggaaattaacagactattatccttggttttccttcccctggaggtggcagtaatgcattgtaagggccaccaaaaggggacagataaaatagctgagggaaataagttagcaaaacaagcagctaaataggctgtgataggatccca

SEQ ID NO: 774708 - DNA, 484 bp, Homo sapiens
agttgtcaaaatagatttaacaaaatatttaattcagagataaaaaaaagaaagtatgtgtaatatctatatttaatgagttattaatttctggatatttataatacagagagctcataacttgatctgtcactaagaatatccatactggtaataggtttacaaaagacctctaatattttytaaagaatgcactttatattttttgcattggcaatgatgtcttaaaaaaatcacatttattaattttgaattctatttacagataataaagtttgaagttattcatcttaacatagaaccttcatttattttatataacatggtgacattggcaattgagcaattgttactacttttgtatgttttacatttcataactatatcagaaaaatctaattgtagaatttgatctcctttctttcctaccttctaacactctatgattttcaattatttctcaaatttgcatacattgacattt

SEQ ID NO: 774709 - DNA, 598 bp, Homo sapiens
agttagtaacccattgattgtagctaatattatttttataaatgttgaattttaatacataacaaggcaccagaatataatgaatgcttaataattgtttgcaaaatgaattcacatgcctactttcttacagtaataatggtcaggtttacgtacctatatattctacattaataaatatatatttagttgaaaaatcaaagcttttgtggattatattctttaaaacttaaaagcactgaagtatatttatctagcrccctctatggtaaactatatttatatcctgaattagtgcatatttatctatgaaagaatatatagagttgagatagctatttttcaaaatcatttaaggaaagcatatagtactactttaatgtaaattgcattgtctgtgagacagtgccatattttaaattaggccacacaagagcaagattgtaccttctttaattaaaaaataacaaaattaattaatcttaataatgagtaattttagtggtattatataatattttacataacagttaaataactcagtctgaataaaatctatgtgattagacaaaaggattgaaaatatataatacataaa

SEQ ID NO: 774710 - DNA, 579 bp, Homo sapiens
atccctggtgaccactgccttgctttctggcatgaggtaagtacaaagtaccttgtactttgtctgctccagctcttgaaagagccccaaaagccctagtccttttaatggcaggaagcatttagaaaccaacatctgaatgttaggtgtgattgctgctgctagggtgtcactgttccgaggctctctcagtggacagtgtgtgtgtggggcagggggtgggggggsaaggtgagtgtacacacattttacgtacatattcatgtctctctttatatattgaaaaccatgagctcacaccaatacctccaattccaattcaacatcccaggattcaatataatggaattatttttttctttactatttggtagaaattgctttaaagctatctgagcctagattttctctgtgtgaagatgttaaacaaatcaatttctttaatggtcctacgacattcaagttttctatttcttcttgagtcagttttaataagttatattttctaggaattttttcatttatgttttcaaacttcaaatttattggcattaatttgttcataatagctcctcttta

SEQ ID NO: 774711 - DNA, 492 bp, Homo sapiens
acaaagtgggggggaccgggaccttttgaatggggatcccagcaacagcaagcctttcatgagttaaaggaaaaacttatgtcagccccagccctggggctatccgatctgacaaagccttttacattgtatgtgtcagagagagaaaagatggcagttggagttttaacccaaactgtggggccctggcygaggccggtggcctatctctctaaacaactagacggggttgctaaaggatggcccccatgtttgagggccttggcaccaactgccctgctagtacaagaagcagataagctgactcttgggcaaaacctgaacataaaggccccccatgctgtggtgactttaacgaatactaaaggacatcattagctagcgaatgctagactcactaagtaccaaagtttgctctgtgaaaatccccgtataaccactgaagtttgtaacaccctgaaccccactaccttgctcccggtatcagagagc

SEQ ID NO: 774712 - DNA, 642 bp, Homo sapiens
agcaaattaaaacaatctttctgttctatagttattatgaatatatgggaatgttaaaagaaacttgtttgtataatgccactcagtacaaggtatgtagcctgggaaatgacccacctgatgtgtgttataacccatctgagccccctgcaaccaccatttttgaaacaagattaagaactrgccttttcctaggtgacacaagtaaaataataactagaacagaagaaaaaggaatccccaaacaaataattttaagatttgatgcttgtgcagccattaatagtaacaaactaggaacagaatgtggttctcttaactgggaaaggagctacagagtagaaaataaatatgtttgtcatgagtcaggggattgtgaaaattgtgccttttggccatgtgttatttgggctacttggaaaaagaacaaaaaagacccggttcatcttcagaagggggaagccaacccttcctgtgctgccggtcactgtaacccactagaactaataattaccaatcccctagatccccattagaaaaagggagaacgtgtaaccctggggatcgatgggacggggttaaacccccaagttgccattttaattagaggggaggtccacaagcgctctcccaagccagtat

SEQ ID NO: 774713 - DNA, 642 bp, Homo sapiens
agcaaattaaaacaatctttctgttctatagttattatgaatatatgggaatgttaaaagaaacttgtttgtataatgccactcagtacaaggtatgtagcctgggaaatgacccacctgatgtgtgttataacccatctgagccccctgcaaccaccatttttgaaacaagattaagaactagccttttcctaggtgacacaagtaaaataataactagaacagwagaaaaaggaatccccaaacaaataattttaagatttgatgcttgtgcagccattaatagtaacaaactaggaacagaatgtggttctcttaactgggaaaggagctacagagtagaaaataaatatgtttgtcatgagtcaggggattgtgaaaattgtgccttttggccatgtgttatttgggctacttggaaaaagaacaaaaaagacccggttcatcttcagaagggggaagccaacccttcctgtgctgccggtcactgtaacccactagaactaataattaccaatcccctagatccccattagaaaaagggagaacgtgtaaccctggggatcgatgggacggggttaaacccccaagttgccattttaattagaggggaggtccacaagcgctctcccaagccagtat

SEQ ID NO: 774714 - DNA, 642 bp, Homo sapiens
agcaaattaaaacaatctttctgttctatagttattatgaatatatgggaatgttaaaagaaacttgtttgtataatgccactcagtacaaggtatgtagcctgggaaatgacccacctgatgtgtgttataacccatctgagccccctgcaaccaccatttttgaaacaagattaagaactagccttttcctaggtgacacaagtaaaataataactagaacagaagaaaaaggaatccccaaacaaataattttaagatttgatgctygtgcagccattaatagtaacaaactaggaacagaatgtggttctcttaactgggaaaggagctacagagtagaaaataaatatgtttgtcatgagtcaggggattgtgaaaattgtgccttttggccatgtgttatttgggctacttggaaaaagaacaaaaaagacccggttcatcttcagaagggggaagccaacccttcctgtgctgccggtcactgtaacccactagaactaataattaccaatcccctagatccccattagaaaaagggagaacgtgtaaccctggggatcgatgggacggggttaaacccccaagttgccattttaattagaggggaggtccacaagcgctctcccaagccagtat

SEQ ID NO: 774715 - DNA, 642 bp, Homo sapiens
agcaaattaaaacaatctttctgttctatagttattatgaatatatgggaatgttaaaagaaacttgtttgtataatgccactcagtacaaggtatgtagcctgggaaatgacccacctgatgtgtgttataacccatctgagccccctgcaaccaccatttttgaaacaagattaagaactagccttttcctaggtgacacaagtaaaataataactagaacagaagaaaaaggaatccccaaacaaataattttaagatttgatgcttgtgcagccattaatagtaacaaactaggaacagaatgtggttctcttaactgggaaaggagctacagagtagaaaataaatatgtttgtcatgagtcaggggattgtgaaaattgtgccttttggccatgtgttatttgggctacttggaaaaagaacaaaaaagaccckgttcatcttcagaagggggaagccaacccttcctgtgctgccggtcactgtaacccactagaactaataattaccaatcccctagatccccattagaaaaagggagaacgtgtaaccctggggatcgatgggacggggttaaacccccaagttgccattttaattagaggggaggtccacaagcgctctcccaagccagtat

SEQ ID NO: 774716 - DNA, 634 bp, Homo sapiens
tcttatcgcagcattatgacaggcttcaaacagagcactgtttaatgacttttttaaatgagtctctccatttaaaaaattattcttgaacccaaccgtcaggaattttctctgattcttcacctcaccaacttccagcctctctccatctttctggcccttctgtctacctccttaccttttccttccttcygtttcaggaaaacacacacaatactgccccaaatatcttaccttatcttatacaggacaggttggccactattattttgtgccttgagagactcctttccttaaatcattgtcgttgaaatctatactctgactgatttgtcaagagagtttctgtaaaaacatttcccttcttaaaagaattctggtgcctagttgctaaaataaggactattttttcatcctattctaaaaagtaaggcgaagagcctgagagtctgctcacgggatcctaatcctagggtagctgggaagctgggaatggggtgacatcaagacaatggatggctgacaattgtcctagagatatagcaccccaagatgaaagtcacccacctgctctggctgtcataagaggtttcttttctgcccatttttcttctttattttctcaaattagtta

SEQ ID NO: 774717 - DNA, 568 bp, Homo sapiens
acctccctggtttagatctctttgtttccttggtgatttcccttttttttgagattagttattgctatgaactgaattgtgtccctcaaaattcytacatcgaagccctaaccctcaatttgatggtgtttggagatggggcctttgagaagtaattaagtttttatgaggtcatgatggtcaagccttcatgatgagatcagggtttttataagaagggacagcagagagcttgcttctctgtctctctctcccctctccccacttccatcccttccatgtgagaacatagtgagcaagtgacagtttgcaagccaggaagtgaggcctcaccagggaactgcataggctagtatctttatcttggacttctcagactccagaactgtgaggaataaatttctgtcatttaagctatagagtctatggtattttgttatggcagcccaagcagaataagacagattttggtagcaaggagtgcagtgctgctacaatacctatctaaagatgtggaagtggctttgaaactgggtaataggtagaggctagaagagttttgagatgc

SEQ ID NO: 774718 - DNA, 637 bp, Homo sapiens
cagcatctggggttaccaggagctgaatgggcaaggaagagtcctctcctggaggcttcagagggagcatggcattgccgccatcttgattttggacttctaacctcaaaaaatgtaaaataataaaattctgctattataagccagtctgtggtatgttgttacagtagccctaggaaacaaatacaggtgtgaaataactgaagctctcctctattgctggtgatattttaaaataagcatttcttgttaagttaaacatacactcactagatggtgcagcaattctgcttgggtatttattcaaggagaatgagaacacttgtccaccagaagacttgtataagaatgttcatgaygacttcagtaataataatcatgaactggagataagcaaaatgtcttaccaacaggagaatgactagaaaataataccgtattcataatattgaattctactcagacataaaaagaatgaactactcgtaaatgcaacaatatatatgaatctcaaaaacattatgttgagtaaacaaagccagacacaatagtgaacatattgtataattctgtttagctgactattagggctagcaaaactatcctattatgacagaaatcagaatagtggtctcct

SEQ ID NO: 774719 - DNA, 554 bp, Homo sapiens
ggaaatgtggggttggatcccccacacagagtccccactggggcactgcctagtggaattgtgagaagaaggccactgtcctccagacctcagaatggtagatccaccaacagcttgctccgtgcacctagaaaacccacagacactcaatggcaggccatgaaagcagccagtaggggaggctgtaccttgcaaagccacaagggtggacctgcccaagaccatgggaacccaccttttgcattagtgtgacctaggtatgagacayggagtcaaaagaggtcactttggagatttaagttttgaccaccttcctggattttggacttgcatggagcctgtagccccttcattttggccaatttctcccatttggaatgtgtatatctacccaatgccggtaccctcattgtatctagaaagtaactaactttcttttgattttacaggctcataggcagaagtgacttgccctgtctcagatgagtctttggactgtggacttttgagttaatgctggaataagttaagactgagtgactgttggaaaggca

SEQ ID NO: 774720 - DNA, 534 bp, Homo sapiens
aaggtctgatctccttgcttgctgtagtctccatctgcttctcatcctcacgtccatagagaaaacaacattgaacatgagatgatattgttgaatctggtagatgggtaagacatggggattcattactattctttctrcttttgtatatgttcaaatttttccaaattaaaaaaaaaagaaaagaaaaagaaaaatactttctggaggtagctgggtcctagctgaacttgactttgagttccccaggagcaagagtttaggtgaaggcatcacaacctgagggaccagcatttacaaggccctgaaagttaccttagaactttgtaggagctcatacacttgatggggcactaactaaacagcattttatggttccctcattagacctagccatgccagcgtgcaccattaattccatgtcaacttcatcaaagtgattatttccattcatccaaccaaaggctacaaaaactgtattttgatgcatggtttaaagactgaaagtttttacttagtgccactgacctcttg

SEQ ID NO: 774721 - DNA, 534 bp, Homo sapiens
aaggtctgatctccttgcttgctgtagtctccatctgcttctcatcctcacgtccatagagaaaacaacattgaacatgagatgatattgttgaatctggtagatgggtaagacatggggattcattactattctttctacttttgtatatgttcaaatttttccaaattaaaaaaaaaagaaaagaaaaagaaaaatactttctggaggtagctgggtcctagctgaacttgactttgagttccccaggagcaagagtttaggtgaaggcatcacaacctgagggaccagcatttacaaggccctgaaagttaccytagaactttgtaggagctcatacacttgatggggcactaactaaacagcattttatggttccctcattagacctagccatgccagcgtgcaccattaattccatgtcaacttcatcaaagtgattatttccattcatccaaccaaaggctacaaaaactgtattttgatgcatggtttaaagactgaaagtttttacttagtgccactgacctcttg

SEQ ID NO: 774722 - DNA, 534 bp, Homo sapiens
aaggtctgatctccttgcttgctgtagtctccatctgcttctcatcctcacgtccatagagaaaacaacattgaacatgagatgatattgttgaatctggtagatgggtaagacatggggattcattactattctttctacttttgtatatgttcaaatttttccaaattaaaaaaaaaagaaaagaaaaagaaaaatactttctggaggtagctgggtcctagctgaacttgactttgagttccccaggagcaagagtttaggtgaaggcatcacaacctgagggaccagcatttacaaggccctgaaagttaccttagaactttgtaggagctcatacacttgatggggcactaactaaacagcattttatggttccctcwttagacctagccatgccagcgtgcaccattaattccatgtcaacttcatcaaagtgattatttccattcatccaaccaaaggctacaaaaactgtattttgatgcatggtttaaagactgaaagtttttacttagtgccactgacctcttg

SEQ ID NO: 774723 - DNA, 426 bp, Homo sapiens
accaggccttagtagagactgaaccatgagccagcaagtcaccatgggacctgagttgaccacaaggaattgagtgttagctggcctatcaagctataaatggaggcgtgcacagcaatactccattatccaatggaartggtgtatacgtgatggggtctgagcaggtcgtgaaggcacaagtaatttacatgaagtgtcccaaatgccatggtcgccagttctgctacactgctttctcttttccattttggacttatgacctcatggggggtcccctacaatcagttgacagagaaagagaaggcttggaacaggtttaccgatggttctgcatcatgtgcaggcaccactgaatgtggacagctgcagcaccacagctctttcctggggcatcctgaaggacagtggtagatggaaatcctt

SEQ ID NO: 774724 - DNA, 426 bp, Homo sapiens
accaggccttagtagagactgaaccatgagccagcaagtcaccatgggacctgagttgaccacaaggaattgagtgttagctggcctatcaagctataaatggaggcgtgcacagcaatactccattatccaatggaagtggtgtatacrtgatggggtctgagcaggtcgtgaaggcacaagtaatttacatgaagtgtcccaaatgccatggtcgccagttctgctacactgctttctcttttccattttggacttatgacctcatggggggtcccctacaatcagttgacagagaaagagaaggcttggaacaggtttaccgatggttctgcatcatgtgcaggcaccactgaatgtggacagctgcagcaccacagctctttcctggggcatcctgaaggacagtggtagatggaaatcctt

SEQ ID NO: 774725 - DNA, 596 bp, Homo sapiens
aaccaaatgcaatgtgtcaatcaattataaagacatttttgagatgatttgggaaatctaagtatggagagggtattagatgatattattgttcattaagtacaaaatagtgttttgcttatatatgaaatgtccttacttaagcataaaacaacctgatatagaagtttttytttaaaacacactatagcaggccagggatggtaactcacatctgtaatcccagagcttgggaggccgaggtgggaggatcacttgaggcctgaagtttcagattacagtgatctacgatcggccactgcactccagcttgggcaacagaatgagaccctaattctaaattaattaattaagttaaattaagtactactgcaaaattttaaaaactaataaatatgcaaataagacataactgggatatgtggcataacaaaaaaataaatatttggtctttgttcctcccacctctgtttctggcacagagctcctaaatttgcttggaatttcctgagtgataggggactatcttttgttattcataacaagtccctttcaacctcacctaagtttatctgatgaagtgacttatggggtgc

SEQ ID NO: 774726 - DNA, 513 bp, Homo sapiens
tctgcctctcattagcacaggctgtgctggagaaagatgggggccttgttcctgggtggctccgaggccaaagggcccaagtcccagggggcaggacccagccacaggctgcagaaagaccttccagggactcagaggtgggcaaccgccctggggccccaggaggctcagcccagcctgggtggggcttccgtacatgggtgggagggagtggaggggtcagatgtctgggagcgtaggaaccttcagacccggcctcagatgaaagcccacagctctgcctgctgcycgtgagagcccctgcaggtcccctcctcgctaggtatccatcagccgtgagcaaggaggaggtgggggtatagaaagcccgagagcaggctgcggggggcggggggagggctgcgcagtgcagcatgtattcgcccattctcgcgccactataaagaatcacctgagactgtgtacttgatacagaaaagaggctgaattggctcacggttcttcaggctgcag

SEQ ID NO: 774727 - DNA, 513 bp, Homo sapiens
tctgcctctcattagcacaggctgtgctggagaaagatgggggccttgttcctgggtggctccgaggccaaagggcccaagtcccagggggcaggacccagccacaggctgcagaaagaccttccagggactcagaggtgggcaaccgccctggggccccaggaggctcagcccagcctgggtggggcttccgtacatgggtgggagggagtggaggggtcagatgtctgggagcgtaggaaccttcagacccggcctcagatgaaagcccacagctctgcctgctgcccgtgagagcccctgcagktcccctcctcgctaggtatccatcagccgtgagcaaggaggaggtgggggtatagaaagcccgagagcaggctgcggggggcggggggagggctgcgcagtgcagcatgtattcgcccattctcgcgccactataaagaatcacctgagactgtgtacttgatacagaaaagaggctgaattggctcacggttcttcaggctgcag

SEQ ID NO: 774728 - DNA, 622 bp, Homo sapiens
ggcccctttgccattttttaattgagctgcttgtcttttcgttgtcaagttgcaattgttctttgtgtaatataaccccctttatatatgccagatacaagtctcttatagacaagtgatttgcaaatatgttctcccattttgcagattgttttttggttttcttgatggtgtcctttgaagcacaaaatttgttgattttgaggaattcagtttatctatctttttcttttgtttctgtgctttttgggtcatatctaagtaaaccaagctcaaaaagattcaccccakgtcttctcagtgatttatagtttgaatttctacatctaggtctttaacccactttaaactaattgttctatgtggtatgaggcacctgtctcttcctagagaccactgcactccacctgtccctgagaatgactcctgactccactgcatacgagtccctctcccccaccttctacctggaaaactcctattcatcccatcaagacccagccctgggttgctcctgggtggcttttttcactctccttggcagctttaactgctgcctgggatgtgggctcagggccagtgccctggagggcccctgtcatagcccttctcaccagcactg

SEQ ID NO: 774729 - DNA, 558 bp, Homo sapiens
agtgggtaactgaatcatgggggcagttatacccatgctgctgttctcaggatattgagttctcaagagatctgatggttttataagtggtttttccctctttgcttagcacttctccttcctgccatcctgtgaagaagggcatgcttgcttccccttccaccatgatggtaagtttcctgaggcctcccccgccatgtgaaactgtgagtcaattaaacctctttcctttataaattacccagtcttgggcagttctttatggcagcatgagaatgaactaacacactggcttaggtactcttgctgtccagaaagctgtgggaccaacatatcagtgcacctgtagcccatttgtggtaaaccattacatcttggcctgtartttggggagctgtgaccttgctactcaaaatgtgggctgattagttttactaggactcctgggagctagttaaaaattccacatcatgggctctaactcagacctactaaatcacaatcagtattttgacaagatccctcggtaattcgcatgtacactaaagtttaagaggt

SEQ ID NO: 774730 - DNA, 594 bp, Homo sapiens
gactgagagggggaaaagaccgaaaaagtcatgattgaaatttgaagtgaactgaacagtgcaaacataaaacatggatgaagtcttaggaaagagaagtcatatgaggttgatgttaagactgatcttgcattgaccaaaaggtcgtgaacattaagaaaaattatcttagcactacttgcccctgcattaaagatgtttagtttataaaaacayagtaatgtaaacgcttttttgccttcaaattttaatgccaacctatggacaataaccggttactggtacagggcttattgaaaacattaatacccttgacaaagtaaaagttaaaatagttaacataatatgtataggtgacaaaagtagaagggtgggtgggtgtgtgctaatgctaataccacacattacaaagacttagaaggcatgtggaaagttaatggaccaaacatcaaaacttgaatcattttccagtaaaacatggcggcaaaccaagaaagaagaagacacgggatccaggaaaaagatctaagagaaaattcaatggatctaatgcagaagtacaaagattgaaagttacaaaagtagtttatagac

SEQ ID NO: 774731 - DNA, 636 bp, Homo sapiens
ctaacttttagaatttgtaggaaaactacattgttaaattgttcaagaaaatatgaggagtggacttcaagaggattttaaaaaaatatagtagtcttcttttatagttcttcatcttgtgtttcttctagcttgggcaatggaataaakgttctgtagattactatggaactaaacctaattaatgttgtcccaaataagggcaatcctatgaaatgccctctaattttagtgtatcctcttgattgtttctttaaaaagatagatttgaaaggaaaatacgatattgatatgcaagttggggaaatagatacatctgacttttgatatttatctaaagcaaatattgttactaaattgagatacttcatgaactctcacttttaaaaatgttttatgcaacttcatatatgtgatttagctatctgtctagtaggaacagtacaaaagtataagaaaagaattgttcatagaggtttagagcttggcctctgaaatcaaatactatttgattagagtatttgtgacttgcagcacctctgcttagagttttgtgacttggagcaatttgtgaggccctggaacctgggtttcttcctctgttaaatggtagtgatgataatagtgcctgcctca

SEQ ID NO: 774732 - DNA, 625 bp, Homo sapiens
tttacagaggcagaagtagaatagaggttaccggtgctgaagggaggacgcgtgggaagttgcgtttaatgggtacagagtttcagttgcggaagatgaaaatgttctggagaaggatggtggtgatggctgcacaatactgtgactgtacttaatgccactgagctgtacacataaaagtggtttaaacttgggcaacatagtgaaaaaaaaaaatctttaaaaaaattagccagatgtggtggtgtgcacctgaagtcccagctactagggaggctgaggccggagaactgcttcggcctgggagtttgagactgcagtgagctatcactgtgccacygtactccagcctgggtgacacagcgagaccctgtctcaaaagaaaaaaagatttaaatggtaaattttatgttatgtatgttttaccacagtaaaagatgcatataaaaaactgatagaactggatacctaaaaagagtgaattttactgcatgtaaattatacctcgaggagcttgactttaaaacaacctctatcttcagggaaaagttataattcattctttctttattctattccactaggcttgtctgcttgaggggagtggggagagacagcgagagac

SEQ ID NO: 774733 - DNA, 480 bp, Homo sapiens
ccctcccttacaacatgtgatggacagagttttatgtccctgcgaattcgtacagcaaaatcctcaccgtgaaggcgggggtgttgggaggcggggcctttggaaggtggttaagtcatgacggtggagctctcatgagtggcattattgcccttaggaaatgaaccccagaaaggcctgtttttccttccaccgtgtgaaggtacaataagatggttgtctatgaggactcagaccctcactggcctctgagcctgtggcaccttgatcttggacttcccagcctccagaactgcaagaaataaacatttataagccacccagtctatggtattttgttacygcagccccagtggcctaaggcatgcagaatttggccatccaatattaatggagagactgtcaggttatttgtagcctgtgggaggcaggacctgagagtgatttgaaggaaggagagagagagtttgctgatactgg

SEQ ID NO: 774734 - DNA, 691 bp, Homo sapiens
catgaatgcatggatgaaaaaaaacctcaagaaaatgagcagcagcagcaagctggaaataatctacttagctgcactttacaaatgcctcctaaaaaaatcaagcttgacttcaatggaatttctagaaacaattcaatggaatttctagaaatagtaattctatgaggtatcaaattattaagaaaaatacctaaattacaaaggattcatgtgcattggccattctaaatctttttcccttttagtgttgaagctcaaggcactgtcaaaaaaaaaaaaaaaaaacaaaaaaccttggaacttgacaaaatgagttcagaaatacaaggaaaaaaggcaattaagagtaggaacttgaaagctcaaagaagaggggaaggaaggttgacaaaagacactcaatgatcccagaggtacygccctaacctctaagcattgcatctatcctaattttttaaagtttcgttttaattcccgaaattccatgaattaggcctagaaattagcaaataccctttgtgaagaacgtaaattttcagaagagacagggggttagcaatcaataacttcttagtaagaaataatgtgaatatttttctttcctcctatatcctgagatcagctactctgagtttttcatagaaagtaaacactaatttgggaacttgaagcacttattgggggaaag

SEQ ID NO: 774735 - DNA, 472 bp, Homo sapiens
ccttgttactgtatttgtgtctctttttctggttacattgttttcttttgctcatttcaagcattttgattataatgtggcttgtgcagttgtcttcatgtttcttgtgcatgggtttcttgaaattattggatatgtgtgtgggtttatagttcttatcaaatttggaaaagtttttcagccattattcaaacatttttttctgccctcttccccagggactccagttatacatacattaagccacttgaagygattgcacagatcactgacgctcttcatttttttgtctttttctcactgtttcattttgcttatattgatatatttttaagttcattgatcttttgccccaagtgtctaatttgcctttaatgtgatccaatgtatttttcacctcaaacattatcgttttaatttctagaattttaagtctttttaaaagatatctttcatacctctacttaacatg

SEQ ID NO: 774736 - DNA, 562 bp, Homo sapiens
ccgtgcctcctggtgtgagatggaaaacattactggctatatttggatccattatccattactaagttctggggtttgtaaataattacggtgtcaatggatgctttgtaatcatcatttacctatcaggtgaagagtcaaaatggggaatattgcctcattttcttatgggaacacatgcctcttccattaactaggcatttctctgtccaggaagagtagcctccagggccactgaggttattctgtacgtaaaagttaaagcaaaaaccaaagtaaaaaaaaaaaaaaaaraaaagaaaatgcaataatctgagatgtagaaacaagatggtttgaggtttcctattagtatgaagcaaaatgacttatttaagatcagctttaaaaaaaatagaattttggaagataaaactgggagaagggaaaatataacattttaaaagtgacaatttcacaatttgaaaaactattaaaatgatatattctttaagaaataaaagcatgttgttgagatgttttaaactgatgaaaacatagggaagaagttacccaggacttc

SEQ ID NO: 774737 - DNA, 531 bp, Homo sapiens
ctcaggcctgtaatcccagcactttgggaggcctaggctggtggatcacgaggtcaggagatcgacaccatcctggctaacacggtgaaacaccgtctctactaaaaatacagaaaatgaagcagtagtggtggcgggcgcctgtagtcccagctactcgggaggctgaggcaggagaacggcgtgaacccgggaggcggagcttgcagtgagccgagacsgcgccactgcactccagcctgggcgacagagcgagactccgcctcaaaaaaaaaaaattattatgcaaagcagttttattgtaagggcctaagaatacgaagtgaaaaaccactaagcttgaacaagacctcattaatctactccctaacaaaaggcagtcttctgtcccaaggctgaagtgtgcaaccatggcctttattcttgagctcctgcttcatttgcacaaaagcctttgcacaaaatacacatggatgtacatatatattgtgtatatgtaaatatatgtaagtaagcacatatatacaatgt

SEQ ID NO: 774738 - DNA, 531 bp, Homo sapiens
ctcaggcctgtaatcccagcactttgggaggcctaggctggtggatcacgaggtcaggagatcgacaccatcctggctaacacggtgaaacaccgtctctactaaaaatacagaaaatgaagcagtagtggtggcgggcgcctgtagtcccagctactcgggaggctgaggcaggagaacggcgtgaacccgggaggcggagcttgcagtgagccgagaccgcgccactgcactccagcctgggcgacagagcgagactccgcctcaaaaaaaaaaaattattatgcaaagcagttttattgtaagggcctaagaatrcgaagtgaaaaaccactaagcttgaacaagacctcattaatctactccctaacaaaaggcagtcttctgtcccaaggctgaagtgtgcaaccatggcctttattcttgagctcctgcttcatttgcacaaaagcctttgcacaaaatacacatggatgtacatatatattgtgtatatgtaaatatatgtaagtaagcacatatatacaatgt

SEQ ID NO: 774739 - DNA, 531 bp, Homo sapiens
ctcaggcctgtaatcccagcactttgggaggcctaggctggtggatcacgaggtcaggagatcgacaccatcctggctaacacggtgaaacaccgtctctactaaaaatacagaaaatgaagcagtagtggtggcgggcgcctgtagtcccagctactcgggaggctgaggcaggagaacggcgtgaacccgggaggcggagcttgcagtgagccgagaccgcgccactgcactccagcctgggcgacagagcgagactccgcctcaaaaaaaaaaaattattatgcaaagcagttttattgtaagggcctaagaatacraagtgaaaaaccactaagcttgaacaagacctcattaatctactccctaacaaaaggcagtcttctgtcccaaggctgaagtgtgcaaccatggcctttattcttgagctcctgcttcatttgcacaaaagcctttgcacaaaatacacatggatgtacatatatattgtgtatatgtaaatatatgtaagtaagcacatatatacaatgt

SEQ ID NO: 774740 - DNA, 531 bp, Homo sapiens
ctcaggcctgtaatcccagcactttgggaggcctaggctggtggatcacgaggtcaggagatcgacaccatcctggctaacacggtgaaacaccgtctctactaaaaatacagaaaatgaagcagtagtggtggcgggcgcctgtagtcccagctactcgggaggctgaggcaggagaacggcgtgaacccgggaggcggagcttgcagtgagccgagaccgcgccactgcactccagcctgggcgacagagcgagactccgcctcaaaaaaaaaaaattattatgcaaagcagttttattgtaagggcctaagaatacgaagtgaaaaaccactaagcttgaacaagacctcawtaatctactccctaacaaaaggcagtcttctgtcccaaggctgaagtgtgcaaccatggcctttattcttgagctcctgcttcatttgcacaaaagcctttgcacaaaatacacatggatgtacatatatattgtgtatatgtaaatatatgtaagtaagcacatatatacaatgt

SEQ ID NO: 774741 - DNA, 543 bp, Homo sapiens
gacctggacactaaaacagtattgtatgcattggcaaaatgcataaaatacattatgtctgtggatataatgcattggcataatatatgttttaaaaagtgggggcaagcgtgaacatgttcaggagatatgtgaaaaatataaaaagaaccaaatctaacttttagagatacaataaacaatgtctgagattttaaaattccactgaatcttattaaagccctattagaccaggtgtggtagttcatgactgtaataccagcacattgggaggctgaggcaggaggattgcttgagggcaagaatttgagcaccctaggcaacayagtgagacctgcctctacaaaaaataaaatataaaatataaagaataaaagcatagtagacactacagaataagaaatacttaaaattaaggacatataaaaagaaattaatagaaaatatctaaaataaagcaaagggagaaaaaacactcatactttttcagtgggctacaggacagcttagagtgacaaaataaaaattactgaagttctcaaa

SEQ ID NO: 774742 - DNA, 632 bp, Homo sapiens
aatgacttgttctatctggagtattttcgtattttgcatgaaagaaagatggtcaaaatatgtatcagacctcaaatcaaattaaagcccagaagatttcattgccattctgctttttgtttcatacataaatttacataaaattgagttacttaagatttcatatctgtttcaattttcttcccattttagacattctaaaatgaaaagcgatttaatagaacactgcattaattgttttaggagagttacacaatcaactcagctattttctaatttaacttcgggagacactattgttcttttgcatattctccctagttataatttgtaaattattcacattcatagccactaaaagaaacatkaacagaaagagtgttatcaacaggcagtaaaatgacaactgggaggcctggactttcctttaatattttaaatgatcatttgaccttcatgaagggaatttatcttgcatagtatcattccataagaattaataattatatacactgaagacttttgagtgaggtgtctgtcagttactttcttttgacacaagtaagcattaagagtattcctattgttgggaccaataaagtactagtacttttactaatatagtaaccatt

SEQ ID NO: 774743 - DNA, 632 bp, Homo sapiens
aatgacttgttctatctggagtattttcgtattttgcatgaaagaaagatggtcaaaatatgtatcagacctcaaatcaaattaaagcccagaagatttcattgccattctgctttttgtttcatacataaatttacataaaattgagttacttaagatttcatatctgtttcaattttcttcccattttagacattctaaaatgaaaagcgatttaatagaacactgcattaattgttttaggagagttacacaatcaactcagctattttctaatttaacttcgggagacactattgttcttttgcatattctccctagttataatttgtaaattattcacattcatagccactaaaagaaacattaacagaaagagtgttatcaacaggcagtaaaatgacaactgggaggcctggactttcctttaatattttaaatgatcatttgaccttcatgaagggaatttatcttgcatagwatcattccataagaattaataattatatacactgaagacttttgagtgaggtgtctgtcagttactttcttttgacacaagtaagcattaagagtattcctattgttgggaccaataaagtactagtacttttactaatatagtaaccatt

SEQ ID NO: 774744 - DNA, 623 bp, Homo sapiens
caactaaaattaaaacattcactagagaggtttaacaaaagatgtgaaaacaagaaagaatgagcaaacttgatggtaagttatttgagatcatctagtctgaggacaaaggttaaaaacaacagcaaacataacaacaaaaaagaataatatatggaggtttagagggctgtggaaaactatcaagcataayggtatatgtataatgaaagtcctagaaagagagaagaaaaacaaaaggttaaaaatatttgaaaagtagtgctcaaaaaattccaaaatttaatgaaagacaggaagctatgcatccaagaaactcagcaaactcctagcagtataaacccaaagatacccacttcaagaaacattatagtcaaaaattgtcaaaagccaaagacagagaatcttgaaatgccaggagagaattgactcttaatgtacaatggatcctcaaatgattaatggctaatttctcaatgaaaatattaaggccaaaaataagtggaataatgtataaatgctgaaagaaaaaaaactatgaactgagaattcttatatctggcaaaactaaaattcaaaaatgaaggagaaattaagacattcccagataaagaataaatgag

SEQ ID NO: 774745 - DNA, 455 bp, Homo sapiens
gcatatacatcttctttgagccaggaatcccctagtagatttagacccaaaagaaataagcacatttgtaccaagagacatgtatgagaatactcaaagagaagctatattcttcatagccaaaatctggaaaccacttatgggtccattaggagtagaattggtaaataaagtctgggctattcatacaatagaatactatgcgatactgaaactaaatgaamtcatctattggcaacatgatggcaggtaaacctggggactctgaaggctcacttacttccctcttttggtaacttagcagagagttggcttactcagactaagaaatctggagaccgggaagttgatttcaatatacctgccatttaagactgttcccttaaatgggcccttggtgtgcagactttgccacaagagctgcttagttcctggtattgttcctggccttagga

SEQ ID NO: 774746 - DNA, 537 bp, Homo sapiens
caacaggccaatctgtgttaccagcaagtctactgatacttaccagggacttgctacagagacctggtgcttgactctggaagaaaatcagcatcagcaatgtcttcagtgcctatggaggatgaattgtatgtgtacaccttaatagataatctccacatccctgtgacacactgcaacctccagggaccttagcaatgccgatgttctacccaggttttgcaggatggctgcctggtcctcagagtttgcttacataggaggtgaactcaactcagcacgcacagttatgtggggcgagcatcttatgggatgcaggctacacaagtctttttttcyaccagccaaccagttaaacactgacaatacttgattgaacatttcctttctcaaagttcttccatttctttcttttttttttaaatgagtctgttattgaaaatcgaattagtttgtctttgtatttagagctagtttgggggcttggggcttgggaaattctcaaagaagaaaagaaactcatttatgaatacctat

SEQ ID NO: 774747 - DNA, 587 bp, Homo sapiens
gtccttttataattaatattttgcttatgggggtgatatcttgaaaccatgtgaatatcctgttctccaaccgtctctcacataatggtttagtatccattgataatcctcatcagaatcaattattattatatggtgattttctgttcctattactctttctatattcgttggcattcttctataaaaaaagagctttctcttttctycactttcttccaccatattctttttttgaaatatatacaatttttatttgtcaattatacctcaataaaactgataggggaaaatgatacagaggacaggaatggagtcaggaaaatcatgtgggtgggaaagatgatttaaaaaaaatttttttttattatactttaagttctagggtacatgtgcaccatatcctttaaagcacattctcacgcaggactaataggaattccatctcggtcatcattggggcaccttcaccatctcctcacctgtcagagactcaccaaggttctaagggactctcatagtggtgggactctacctggtcaccactgcagtgcccaacatctcagccagatgatctattcttttct

SEQ ID NO: 774748 - DNA, 540 bp, Homo sapiens
gaacgcacaggttagttccataggtatacttatgccatggtggtttgttgcacctatcaacccatcatctaggttttaagccctgcatctttgtctactttttaatgagattgtttgttttttgcttgttgatttgtttcttatagattctgtatactaaacctttgttggatgcatagtttgcaaatattttctcctattctgtaggttgtcttactctgttgacagtgtcttttgctgtgccgaagctctttaatttaattggcctcatttgtcaatttttgtttttgttgcaattgcttttagcatctttgtcatgaaatatttgccaaagcctatgttgagaatggtrtttcttagtttatcttccaggacttttatagttttacatttaagttgttaatccatcttaaattaatttttgttatgatgtaaggaaggggtccagtttcaatcttctacgtatggccagtcagtatttccaatacctttttttttttttaaataaggagtcctttttccattgcttgtttttgctga

SEQ ID NO: 774749 - DNA, 614 bp, Homo sapiens
gaaagatgcaatgaattttttaaaaacttctccctactgtataaaatagtattatattttataatactaaatagagtattaaatcacaaaaagaaaaccatgtcattgcagtaacacactgattataactgatgagaaacaaataattttatatacttctatatttttatagaagtattggtaattgtcttatctttatcaaataatattcttagtgtaataatataagaagtataatgaaaatatttactagaagacaccttatatggggtaccttttaattttaattaaaaattaatctgctgtgagattatatctcaagraagtatgagtatacttatatacttatatagatacagaaaagtgcacagattatccacctatagcttgataacgtttacaactatacacgcctatgtatccacagattaggatttaagcacagagacatgaggatttttaaaagacctatagtggacacacattttacatggtttgacttcttattaatgcagttattaaataaaaatgaatgatgtaaatattatacatagtattttatcaggtaccataagatatatgaataactacgcaaagttataatgtaaagaatt

SEQ ID NO: 774750 - DNA, 647 bp, Homo sapiens
aactgaattctctaaaaaacagttttaaggtagaaattattatattatgattataacatgtaagcttattgtatttaaaaaaactaatgtggagatataatgcttaataaaggaaaatgttcagtagagaatgtttgaagtttttgacatgatttaatatatgtgaactcttaatatctttgcaattattaaaccattttgatcccaagtaaagatgtgattgagactgccagacttacttcattgtctttatctttagtatattcattgctgtttacacttctttctaagaaaaaatgtaatatgttttttaatgccagatamaaaacaaaaatgaaagtcagaagcctaaaagaacaaagtttttagattattatgatgagtcctataatttaacaatattatcaatgaagatcttgatactgcacatcagcaaaaaattatcattgaatcctatgaatctgatagagtactttggaatttacttttcatcaaaatgcagacatgtaaaaaattcatcatttaactataaattaaaataggttatggatggagatttgaaaatgaattttgaaaatactaaataattatggcatccacctgtaatcccaggctccatgggttaattttgtataaaagttaaaaat

SEQ ID NO: 774751 - DNA, 650 bp, Homo sapiens
aaatgaaattgttaggaaaaaatataaattttagaaaaatatggcataatcttggatttccaatgtacttgaaagacattatttgggaccatccttgcagaatagatcttaccattttcatttaacagataatcaatagcagaaagagaggagcaagcctaataccaaactagagcgtttatggagttgtgtctcttaaagatcagttattcataaactcacaarataaaacacattaacaacacaataaacattgtaggaatcaactgacaagagagttggacagttctgctggtggttgaatactttttaagggctagtattatagtattttaaaaacatatttgctgaccctagtcttttaaaaatcacattgttactttcatttttattcttgttctttccacatactatttgtgggatttgtttgcaaaagaaaacttggctttactatgctcatttgaaataatttatattttatgcaaagcaggatattaaacacaaccaaaatttaaattcatgcatattttcttggtcttttagagaaggctactgcaatcttagatctggtctaaatagccagaaataattgtaaaagcagattttgatattgatttgtcatttaaactgcacttaaaaattttgcttct

SEQ ID NO: 774752 - DNA, 612 bp, Homo sapiens
gtgactttcgagaaggagagagggaagaaaagatctgaccgggagccatgagcctgggctctgctcccagctctgctacccactagctccggcccagggagcggctgacctgcctgcctcgctgcctcgcccggaggatgagggcctgaccagggagcccgtgtgggaggctgcttggtgaaattcagcgtgtggctctgggrctctgggcgcgtggctctctctctaggatccgtttcaccatctgtgaaatgggcttatgatcatgcctccctcacagcgtcctcgtagagcggctgacacaaagcaggggtcagtcggaggcagctgctgtggccccgccacaacatccaacatgaactctcaactggaagtgaatcatcacctcgctctcagcacagccacagaacacagtcttgatctccgcggatacaggttgagtatctcttctctaaaatgcctgggaccggaagtgttttgggtttccgatattttcaggttttggaatatttgcatatacataatgagatatcaggggatgggacccaagtctaagagtaaactccatgtatgtttcatatacctcttacacacacagcctgaagcgaattt

SEQ ID NO: 774753 - DNA, 612 bp, Homo sapiens
gtgactttcgagaaggagagagggaagaaaagatctgaccgggagccatgagcctgggctctgctcccagctctgctacccactagctccggcccagggagcggctgacctgcctgcctcgctgcctcgcccggaggatgagggcctgaccagggagcccgtgtgggaggctgcttggtgaaattcagcgtgtggctctggggctcygggcgcgtggctctctctctaggatccgtttcaccatctgtgaaatgggcttatgatcatgcctccctcacagcgtcctcgtagagcggctgacacaaagcaggggtcagtcggaggcagctgctgtggccccgccacaacatccaacatgaactctcaactggaagtgaatcatcacctcgctctcagcacagccacagaacacagtcttgatctccgcggatacaggttgagtatctcttctctaaaatgcctgggaccggaagtgttttgggtttccgatattttcaggttttggaatatttgcatatacataatgagatatcaggggatgggacccaagtctaagagtaaactccatgtatgtttcatatacctcttacacacacagcctgaagcgaattt

SEQ ID NO: 774754 - DNA, 612 bp, Homo sapiens
gtgactttcgagaaggagagagggaagaaaagatctgaccgggagccatgagcctgggctctgctcccagctctgctacccactagctccggcccagggagcggctgacctgcctgcctcgctgcctcgcccggaggatgagggcctgaccagggagcccgtgtgggaggctgcttggtgaaattcagcgtgtggctctggggctctgggcgcgtggckctctctctaggatccgtttcaccatctgtgaaatgggcttatgatcatgcctccctcacagcgtcctcgtagagcggctgacacaaagcaggggtcagtcggaggcagctgctgtggccccgccacaacatccaacatgaactctcaactggaagtgaatcatcacctcgctctcagcacagccacagaacacagtcttgatctccgcggatacaggttgagtatctcttctctaaaatgcctgggaccggaagtgttttgggtttccgatattttcaggttttggaatatttgcatatacataatgagatatcaggggatgggacccaagtctaagagtaaactccatgtatgtttcatatacctcttacacacacagcctgaagcgaattt

SEQ ID NO: 774755 - DNA, 622 bp, Homo sapiens
gagggcagggccctgtctgcctccgcctctgggttgaagcctggcagtaaactggcactcctggtgcccgcaggcaggggaggcagcgcctggccccgctctgccctccacgctcagcgcctctggtcctcggcccagcccttgctggacatgcagcctctaccaggattgctgcttcccttctsggcctctctgggtccagcgtggcgtggacaacagttcggcaatgcctgctccatcagcctcctccctggcctcagccaatgctgactgtgccaggagcccacatagcccgtgcctgcccccccttctggtttccaagtgctcacagcctccaccccacaatctctgattggctcctgcaggcttccgtcaggtatcccccaaggctccgcgtccccatcacctccgtgttttattgttcaatgtcttagatcttgtttgtgctaccccctctcgctccacccctcctttgcccagagaatgatcctccttcccttcaaagcccagctccttcgtgcctcttccaccaggccttcctggccttcacttcctagcccactgctgacagaaggagtcactctcgctccttcctgcatctccctgaggccgcacgctgtcg

SEQ ID NO: 774756 - DNA, 569 bp, Homo sapiens
ttgtgtgtttcttttgacaggcattacgagattggacgaccaaatatttctgaacaggaaccccggcgtcccctctgtggtgaaattccaccccttcacgccgtgcatcgctgtagccgacaaggacagcatctggtatgcaccgcgctggtcaggcctcccttccggctgaccgacagccccagcgatgccctgttctcccccgatcaccactcctcttccttgaaaagcagatacaaggcactcaccccgaggcccttagcactgtttcctgagaaacggccctactcaccttctcctctttgaccgagccccacccacacctgccccgggcctggccctgtccttgtcactgaaggacagtccagagtcctgcctgcaggtcagaggsgagtggcagggactccccagtcacacttgtaatagaggcgtacacaggggggccggcttgctgccctgcccgcagaagcaagcatgtgatagacaagcagtaagaagatgctaggtgccccaggagagaagtgagtttaactcacagcaaatatcgcccttagagatggagagagtac

SEQ ID NO: 774757 - DNA, 609 bp, Homo sapiens
ttccattttcaccagcaatgcgggaaggtttcgatttgtccacatcttcaccaacccttctgactttctggttttctttttttttttttttaattgtcaaatgatcctttattgaaatattttcctttgtgcttcttaactagctgggcattccccggcaccattgttgatgtcatctatgatgtcatgaggatggaggccatcagcattgcagcccagagactgggcagtccccaggatctttttaatgkttccagagagttctctggctaaagatcagtgccacatctgtggagcaatgttgacaatctcatcaaaagtgatatttccactgtgtttgatgtttttctgtttctttctgtctcctggcagttccttgagggcgttgatgatcagggcagaggcagaaggcaccacctcaatctgggcctgtctgttctgaatggtcagtttcgctgtaatcctcagaccaccagtcaccggttgccttggcaatgtcatcaccagccttttttggagacagacccagggggccggtctcgggggccagtgcagacgtggcaccgactttgcccccgctgcacctcaggtgtacgactttgctcttgt

SEQ ID NO: 774758 - DNA, 609 bp, Homo sapiens
ttccattttcaccagcaatgcgggaaggtttcgatttgtccacatcttcaccaacccttctgactttctggttttctttttttttttttttaattgtcaaatgatcctttattgaaatattttcctttgtgcttcttaactagctgggcattccccggcaccattgttgatgtcatctatgatgtcatgaggatggaggccatcagcattgcagcccagagactgggcagtccccaggatctttttaatgtttccagagagttctctggctaaagatcagtgccacatctgtggagcaatgttgacaatctcatcaaaagtgatatttccactgtgtttgatgtttttctgtttctttctgtctcctggcagttccttgagggcgttgatgatcagggcagaggcagaaggcaccacctcartctgggcctgtctgttctgaatggtcagtttcgctgtaatcctcagaccaccagtcaccggttgccttggcaatgtcatcaccagccttttttggagacagacccagggggccggtctcgggggccagtgcagacgtggcaccgactttgcccccgctgcacctcaggtgtacgactttgctcttgt

SEQ ID NO: 774759 - DNA, 553 bp, Homo sapiens
gctgctcaaacaatgccggaagtctcaaacaaagatttccaaattcaagaaaaatttcgacctccacagtggagaccagtttacccaacatcagggttttctagtcaggctgctggccaggacggggatgacggagaagcccctttcattagctgtgtgggtggtggagggcaggcatcatgaaggattcccaccatttaaaagaaacccaggcctggaggcgaacacacggcacaaggacagcagagactcgtctcagcccctcctccttctccccagtctgctctcgcttcagaacaagcatgtccactgtgcgcaggaggaatggccaggctgcctgccctccgacctccgagcagrggagtgaggaaaagcaaaggtgcccaccctctaacaacctacgacagagcttggccccacggaggaatgtgagggtggggcacacctcccaaagagaagacatttccttatgaaatgcaagcaaacaatccaggaactcattttaccaggttgctcatctcagccctcaagcgccagcgcgaacaggggtggc

SEQ ID NO: 774760 - DNA, 542 bp, Homo sapiens
gctggggaggccagcacggctgagagaagtgaaggccgacacccggatcccacccagcctgtccctgtcggccgcagcccctggacacctgagcctctgagagtgtcgagtcggttgtgctgacaagtgcgcagccctctcaacgcggttgcgggctcctggtgaggggcgtggccatggggacgtgtcctcgtgcagcccctcctccgagcgctgccccctcaggaccaagtagcatcaaccaatgtcgaaagcccgtctttgtccctgtagctgtcagacgtgaccgggaggagatgcatagycggggcaggggccggtgggggcaagggaccagccaggctcagccagcggtttcggagagaccagatgtgagcatctcccaacaccagagggagagggcagttccttggctgagagagcgagcactggagcagggccagggtcctttgcagaacgggctccagacagcagtagaagggctccagctccaaaaccaggaacgtttggtgtatgcgatggaaagcagagagcgggacagg

SEQ ID NO: 774761 - DNA, 584 bp, Homo sapiens
ggcgtggccatggggacgtgtcctcgtgcagcccctcctccgagcgctgccccctcaggaccaagtagcatcaaccaatgtcgaaagcccgtctttgtccctgtagctgtcagacgtgaccgggaggagatgcatagtcggggcaggggccggtgggggcaagggaccagccaggctcagccagcggtttcggagagaccagatgtgagcatctcccaacaccagagggagagggcagttccttggctgagagagcgagcactggagcagggccagggtcctttgcagaacgggctccagacagcagtagaagggctccagctccaaaaccaggaacgtttggtgtatgcgatggaaagcagagagcgggacaggcaggtgggtggaggtgaggcygtcgtccaccagggcaatcagctggggcttgaagagcgcctgagggtcacgcaggaggggctggtgaggccagggggcgcggatgtggttcccggaaggctcagagggcctgcatgctttccccacacccaggccgacctccctgcctgtctgctggaggatgcagagggccgtttcctccattctaa

SEQ ID NO: 774762 - DNA, 441 bp, Homo sapiens
tcccctggggtctctcccacaccaacccaggggttccctgcttggggctgctcctttgatgcctgcccagagagctgtgaatgtctctgagacactgttgcctaggctgtgtctaagctgaggcttggagcgctctgaaagtgaggactacattctttcttcatcttgctgttacgatgcttagcgtgaaagtcgaatacagaacagatgccgygtacatatttgatggcatgaaacgttgaatacagaacaggtgccgcatacatacgatgagccaatgggtgaatccccactgaatgattgtcaaactgtatgtaaacaaaatgttaaatgaaaaactacggtttccaagaaataggacaaactcactaaaagtactcaaatgatgataaaaaagaaaacaagataatacaaatcatcccaaattccatcatctaagaa

SEQ ID NO: 774763 - DNA, 631 bp, Homo sapiens
ccgagtcaaaactgtatgattttaaaaatttatatcatctcagattaaattcagttaaagaaggacacgcacttaaatttaaatgactactatgaaaatgacggtgtagagaagcttgggctggttcacttacttactgcaaataattaattacttacaaaggttccatgccaaggtcaggggaggtgaactgagcaatttcttttttgaaataattcttttgaaaatccaggtcagtgcataatggctaggttgctagtaagagggaagctatatatgtctatctcagaccagtggttctccacagtgggggctggagtaacaggagagttactgaaagcaatctgagcaggtgcaaaagcgtgatgagttcatccagcttctcaatgaacgctgcattgaaaccttacacataaagcacacacacaygtcggtcattgtaaaaatacaactctttggggaaagaaaacaattcgaagtgaagatcaggaaataatgcaccaggtgataacttttcgtgaaaccagtgaaaatactttttcttaagctaatattgctctgaaccaaggaaacgtgcattcctgtgatattctcgtccagcctctctttatttaaaatgatgtacaattca

SEQ ID NO: 774764 - DNA, 599 bp, Homo sapiens
gttagggaggcttggtgtggggagctcctcagggagaacctgcctaggacagcctcgaaggtcatcagcagagacagagggagcagtgtgcgctgcgggaacggcactgcagatagattgcttaagcctggctgtggcataatgatatttactctggtcccacagaatctggaggaatgcgaactctgtttaccgagagcctctctccaaacagaaacccagtgcccctgcacattcctttggctcctccagtctaattgtcccacaggacaccgtaataactagttggaaggcaaacagtgttaactgatgtgatgtgctgctgtccagggcactgtggccaggccgccgctccacctatccccagccactcaaactgcaggtctgcctggtgcggaagctgcaactgtccttgtctaagaccaggtgagccyatgcaacctttcagaccccatgaagggtgacagtgactcctgccagccctcgggagggaaaggcgagaagctgcttctagagaggcaaagtgcagggactaaatctaatctcactccccgaaaggacaggctgccatgccctgtagcccaggaagcttctctctg

SEQ ID NO: 774765 - DNA, 528 bp, Homo sapiens
gcaacattttcactatgcttttagggttttttccagctgggtctgagaattccattgacgtaagatagatcaagaggagaaaagtatgcaaattatttaaatccaagttttctgtggtatgggaggaaaggaagactccaaaacrcagttagagttgaacacttaagtactgagttgcagaaagcgtaagttgtagaaaagtaatctgtgtaagaggctggaaggtgagagctgttctaaaagggtctgagcagacaggattctttccgcctccacttcccatcctagtgatgagaatgatcgtttcattctggtatcagaagagcatcattcacctgggaattgcatctcctgcttcccaggaacagcatgaggctcagagagagagtcctgcatctgctgcccttcaagtgcctctgactcaaaattgtcaattgcaggatggcatattttggggtggcatgttctgatctcctttgcgtgcactatgtggtctgagcgtgtggcttctttcactcagcctagggt

SEQ ID NO: 774766 - DNA, 528 bp, Homo sapiens
gcaacattttcactatgcttttagggttttttccagctgggtctgagaattccattgacgtaagatagatcaagaggagaaaagtatgcaaattatttaaatccaagttttctgtggtatgggaggaaaggaagactccaaaacacagttagagttgaacacttaagtaytgagttgcagaaagcgtaagttgtagaaaagtaatctgtgtaagaggctggaaggtgagagctgttctaaaagggtctgagcagacaggattctttccgcctccacttcccatcctagtgatgagaatgatcgtttcattctggtatcagaagagcatcattcacctgggaattgcatctcctgcttcccaggaacagcatgaggctcagagagagagtcctgcatctgctgcccttcaagtgcctctgactcaaaattgtcaattgcaggatggcatattttggggtggcatgttctgatctcctttgcgtgcactatgtggtctgagcgtgtggcttctttcactcagcctagggt

SEQ ID NO: 774767 - DNA, 528 bp, Homo sapiens
gcaacattttcactatgcttttagggttttttccagctgggtctgagaattccattgacgtaagatagatcaagaggagaaaagtatgcaaattatttaaatccaagttttctgtggtatgggaggaaaggaagactccaaaacacagttagagttgaacacttaagtactgagttgcagaaagcgtaagttgtagaaaagtaatctgtgtaagaggctggaaggtgagagctgttctaaaagggtctgagcrgacaggattctttccgcctccacttcccatcctagtgatgagaatgatcgtttcattctggtatcagaagagcatcattcacctgggaattgcatctcctgcttcccaggaacagcatgaggctcagagagagagtcctgcatctgctgcccttcaagtgcctctgactcaaaattgtcaattgcaggatggcatattttggggtggcatgttctgatctcctttgcgtgcactatgtggtctgagcgtgtggcttctttcactcagcctagggt

SEQ ID NO: 774768 - DNA, 545 bp, Homo sapiens
aaatcagattgtccttagaattatatctgtcttttcttgttcataatttttatttttacacattcaaaactaagacaacatgctattaataccccaggatctgggagaaataacaaaaatatagccatgcaatatttgattatcttgactgcattatccctaagttgttttttgctaacaccataacctctaaatctggaaagttgtacaggcaccccaactgggctgttatttactgccctctcttacctctaaactattataatagccacaataaaataggctttgctagaactaacacatatgccaaaagggtttgggcttatgaaattcacatattgttctccatttgctcaatataggactttcaaattgggagaactaacatgtttaatagttttwctgtttcatatcaccacagtatataagaaaaatattggatgaacaaaatgcaattttatcattttagaagaaattacacattcaataaatatgactggataatttctgtggcttcaggcaaaaagtatgtacacaacatgaat

SEQ ID NO: 774769 - DNA, 630 bp, Homo sapiens
aaatattttctcccattctgtagactgattgtttactttgtggatagtttattttgctgtgcagaagctttttagtttaggtcctatttatcaatttttgtttttgatgcaattacctttggcatctttgtcatgaaatatttgcctggttttattcaaaatggaatttcctaggttatcttccagggttgttatagtttcaggtttcatagttaagtcttyaatctattgtgagttaattttttgtatatggtgtaagaacggagtttagtttcaatcttctgcatatggctaaccaattattctagcaccacttattgaatagggagtccttttcccattgcttgtttttgttgactttgacaaagattagaaggttgtatgtgtgtggcattatttctggactctgttctgttccattggtctatgtgttggtttttgtaccagttccatgctgtttcagttactgtaaccttgtagcatagtttgaaatcaggtaatgtgatgcctccagctctgtcctttttgcttagtattgccttagctattcaagctctttttttggatccatataaaatttacaatcatttttttctaattctgtgaagaatgttgttgttagtttgatag

SEQ ID NO: 774770 - DNA, 615 bp, Homo sapiens
gcattaaacatccttcaagatgaagtctgtcgcccattttgcttgttcatcagaattcagtcaaactgaatgaagtagttatttagaattaacacttggggatgttcataattgttccccacttatgtgacagttgggatattgtgcggtgctcatctccaggcccctccctgtgttccaggagacagggtcactgtcaccagcagagccagtcacggaaataacagtgtcctagcctagctccacrggaaataagggctgacgctgatctcctgctggctcccactgccccctggacacgatgcccgcctgggtcaagggggtgagtctggacagacgtcactctggccatcaacagcctaactaccttcatgacctcccattgtgaacagagtcccagaagttgcttgagccatgaaagttggacagagaaatcccacatcactgcagtcagaggggggctgtgaaaagaccgtggggggggggtttcatactatgatcatgcagcactgagccatggctgccactctgtctgacgggagcccccgggggaagatccactcacactgtgctctagaggtcgtttttgtcaccatcttggttctagctggtttg

SEQ ID NO: 774771 - DNA, 615 bp, Homo sapiens
gctgtcctcacatcttctattcttgcagtggactgcaactgtgtgagcaagaatgtctgggagattgcctcagacctaagagtaaagagctgtgtctctctggcaagagcccaattttctttttactttgattttgtcttctattggatgagaatttaaataattctcatagattagatcaaagtagcggctttttcatgtacacttattatttattgaagctaaaattccaagcaaaataaaaacttattccaaaagtgaagaaaagttttcacctgtgaattgccactactcttcagcttgggaaacacagcaaatccttgtctccaaattaaaagaaaaaaggaaaataaaacatttaaataaaacaatataaatttttttctaaaattagttaactaagcctgtcatacctttcgttttatgaccatcactcagaaattgctattattaaaatttrcctgagttttaagcataagagctgtaatgtggcttgctacacctgtttattaaatagatagaaatatactgacattcaattttataggcatacataattcaatatagggctacatacatatgtagctatatacagatatgcattcatatatacat

SEQ ID NO: 774772 - DNA, 655 bp, Homo sapiens
atgaataaggcctccctcactgaggatccttaattttttaaaataatgaagcctctgccataaagtcagtgtcctggctgccagccaccaggcagaacctactagacttctccaaaatagatactggggcctccttcctcaaccatggtcaaggcctaagcttccttctcaaaggcaggcagtcctaggctttagggcaagaagtgcttcctacaygcaaggtgctctggggaagggctgcgtgtggcggccatgtgtgcaggtcttcaggatttcagctgagccaccttttcttgcagtttaagaagaaaacagccagccattccctccttgtaataaatgcctccgcatatttgaagacagagttaggtcattcttgagctttctcatctccaaacaaaacaactgtggcccctgtaaccttaccttggcaaattataaggcccatatgcagagaaaaagcaaaacaaaaccatctgatggggaaggcctcctatctctgaccaagtgtctgttttgaaatgcggtctgcactcgagtctttaattacatgtaaattcagtagcttcaagcgtctgagccagtgggggaccaggtgctgctcatcaggccccttggatgtgttcaggctgcaatgctgggtgacagcgcttgg

SEQ ID NO: 774773 - DNA, 532 bp, Homo sapiens
agtaaccaatggaatcctctagagggtatttaaaccccaaaaaattctgtaatggggcccttgagcccctatactcaggccctctcccacactgtggagtgtactttcattttcaataaatcccttccttgctttgtttgtgcattttgtccaattctttgctcaaaatgccaagaacctggccaccatgcactggtaacagaagcaacgtgcatgaaacctcactgtctttagtgatgtacttgttagatgtagaataaatattgaagaatttgatttgacatcagggtgatcacagctttgagtcattgattaaaaacaggttgtcacaccagactagctgctaacttgatctgagtgtagkctgaataactcatatttcaccaaacttctgaggagctggtgaattctaaaatcaggatcttaacagatttttgacatttggctaacttcaatgtcatcgggctgaggttctcctggtaatctggtctctaccagctttttgggtaagtactccaagatgaagaatttg

SEQ ID NO: 774774 - DNA, 572 bp, Homo sapiens
caagctccttctgggagcttgattcaatgcataatcaagctccttccgggaagaatgggtaggcttggatttattactgggttgaacccgacataagactggtagtgtcaaactatggttccatctgccagatgaattrtactttgtaagccacattagcccccatgatgccagtatttaaatacaaagctagaaatgattaatagggtgagaaaagcatgttgaaagctcagataggctgaaagctaggcaacttacatcaaacagtaaactaagctgtgaatgcaaaaaaaaaaaagttcttaaaggaaattaaacagactactccagtgaatgcacaaatgataagtacaatggtattattgctgatgtgaagacagttttagtggtctggatagaaaatcaaatgagccacaacatttcgctaagccaaagctgaatccagagctaagccctaacattctttaattctatgaagtctgacacaggtgaggaggctgcagaagacaagtttaaagctagcagaggttggttcatgaggtttaagaaaagaatcttcataacataaaagt

SEQ ID NO: 774775 - DNA, 518 bp, Homo sapiens
tagagaattgaattatagaaagaaaatttttgcatcccaatggcataaagctagaaatccgtaacagaagaaatcttgaaaaatacataaaatagcaaaatttaacatattcataaatggcccatgagttacagaaaaaatttaaaaacatattttaagacacacaaaaatgaaaacacaacataccaaaacttayagaatgtagttaaatcaatcattatacctcaatgaactagatgagaaacaaagccaagaattagcagaaataagaaaatagcaaagattaaagtggaaataaataaaatagatatgagaaacccaatggaaagaattaatactgaacttctttttaaggcgataaacaaaatcaaccaatccgtatctagactaactagaaaaaggactattccaacaaataagatcagaaatgaaataggagaaattacaacttttaactctaaaatacaaaggattacaattgttcatataatgaacatttgtatgccaacaatttggat

SEQ ID NO: 774776 - DNA, 583 bp, Homo sapiens
agaatgaagaaaagaaaggcaaaacgacagcccacctgggagtaccacagagccagggggagctctctcacccagggaagcagtgagtgaatgtgtgaccctggaaacccatgctttttccatggatctttgcaatccttgggtcgrgagttctcatgaacccactttaccagggccttcagtctgacagagctacgtggaatcttggcacagcagccactcaggcacacatggagacctgggagccttaagtacctgggctttcctgcaaaagtagctgcaactgtggcaaagtgggaggtgagaccctcatacatatccctagggaagaggctgaattcagggagctgagcagcaacagcctgcaggccccacttccacagcacctcacaggataagagccactggcttggaattccagccagccaccagcaacagtgttgagcctccctgagacagagctcctgagagaaggggtaggccaccatctttgctgtttgggcaacttagctgctccagccttcgggatttggagagtctcagcggaccagggacagagggatccattagcacagcacagtgc

SEQ ID NO: 774777 - DNA, 583 bp, Homo sapiens
agaatgaagaaaagaaaggcaaaacgacagcccacctgggagtaccacagagccagggggagctctctcacccagggaagcagtgagtgaatgtgtgaccctggaaacccatgctttttccatggatctttgcaatccttgggtcgagagttctcatgaacccactttaccagggccttcagtctgacagagctacgtggaatcttggcacagcagccactcaggcacacatggagacctgggagccttargtacctgggctttcctgcaaaagtagctgcaactgtggcaaagtgggaggtgagaccctcatacatatccctagggaagaggctgaattcagggagctgagcagcaacagcctgcaggccccacttccacagcacctcacaggataagagccactggcttggaattccagccagccaccagcaacagtgttgagcctccctgagacagagctcctgagagaaggggtaggccaccatctttgctgtttgggcaacttagctgctccagccttcgggatttggagagtctcagcggaccagggacagagggatccattagcacagcacagtgc

SEQ ID NO: 774778 - DNA, 583 bp, Homo sapiens
agaatgaagaaaagaaaggcaaaacgacagcccacctgggagtaccacagagccagggggagctctctcacccagggaagcagtgagtgaatgtgtgaccctggaaacccatgctttttccatggatctttgcaatccttgggtcgagagttctcatgaacccactttaccagggccttcagtctgacagagctacgtggaatcttggcacagcagccactcaggcacacatggagacctgggagccttaagtacctgggctttcctgcaaaagtagctgcaactgtggcaaagtgggaggtgagaccctcatacatatccctagggaagaggctgaattcagggagctgagcagcaacagcctgcaggccccacttccacagcacctcacaggataagagccactggcttggaattccagccagccaccagcaacastgttgagcctccctgagacagagctcctgagagaaggggtaggccaccatctttgctgtttgggcaacttagctgctccagccttcgggatttggagagtctcagcggaccagggacagagggatccattagcacagcacagtgc

SEQ ID NO: 774779 - DNA, 633 bp, Homo sapiens
ttttccatgtatcagttaatggatatttggtttttttctagtttttgtctctttgagtatcactgctacgggcattcatacacttttttgtgtagacaaacgttttcatttgggggtgtataatcctataagtggaattgctggattatatggcaattgcatgttttaccatttgagaaactgccagaccgtttcccaaagtggccgtaacattagcctgtgtaataagaagaaagaatctcttagtgaatgagtattgagaacagctgaaatatttgagggtgtaaaaaataaatctgaggtagctcagagacgctcattcattactcttttaatttttcccgctcttcataaatgagggtctccaatttctgccttgtagatgccaactcactcccagagttattgagaggacggtacaggctgagaaccacacggggaagttgggtcacagaaggaggaatttgctcaagacacaagctaggaaaaacaaawcaaaattaaaatggggagctgaataaggaaaaatgagaacttcctgtgggaggaacaagaaattgagaaggaatgccttgtctttatgctgtgtgcctatctttaggtttctgggctcctaaacttctggacaagaac

SEQ ID NO: 774780 - DNA, 613 bp, Homo sapiens
atttctggttattttatttgcctgagtctactttatctaatattaatatagctaatcctgctttcttttgattaatgcttacatgatagatgattttcatccttttacttccagcctatctatctcctcatacttgaagtgagtttcttgtagacagcacatagttttgggtcatatgttttaaatccactcggccaatttctgacttttaattggtgtatttaaaccatttacatttaaagtgattattgatatgttatggcttaggcctgccacctaattttgttctttcctgcttgttcctctgttttttgtttctcttttyttttttcttgtgttcccttggatttctcaaacagttcttagaattccattttgatttatctatagttattttgagggtatctctgtatatagcttttttaggggttgctctgggtcttacattatatatacataactaatcacagtctactggtgtcaacatttgagtaaagcatagaaatcttggctccctttgtgaccctttactttccttcatttataatataattgtcttaaatatttccactgtatacatttagaatcacatcagactatatcatgatttctg

SEQ ID NO: 774781 - DNA, 636 bp, Homo sapiens
attgatgggtttgcagaaatgatttcccatttgccttggatccctcccttgctgagagagcttccagggccagatccttgactgagtgaaaaaacataggtgggaactgtgtctcggctgtgtgacattgagtggtcctctgcccgtagggttcctcattcctaaaatgggcataattgacttgttgcacgcagtaaatgagacaatacctgtaaatcacacaagcccgacatttggaaagagttgaagaaagttaagtatgactatttcttgctaataagtgtcattattcacaaytataataatttttccttttcctttttatttttttagagacaaggtctcagtctgtcacccaggctgcagtgcagtggcacaatcaaggctcactgcagcttcaacccaggctcaagagattcttctgtctcagcctcccgagtagctgggactacagacatgcaccaccatgcccagctaattttttattttcattttttattaagacacagggtctcactctgtctcccaggctagagtgaaatggcacaatcatgactcactgcagccttgaactcctgggctcaagcgatcctcccacttcagcctcccaagtagctggaactacaagcatgcacc

SEQ ID NO: 774782 - DNA, 607 bp, Homo sapiens
gtcttatttttgaattctctacattgttccatttgtctatgtgtttgtttttgtaccagtatcatgctgttttgattactgtaggcttgtagtatagtttgaaattggatagagtgatgcttccagttttgtctttgtgcttaggattgtcttaaatatctgagctcttttctggttccatatgacttttaaaatagtttttttcaaattctgtgaagaatggtattttaatgtgaatggcatggaatctatacattacttkgggcaatgtggccattttcatgatattgatttttcttatatatgaacattcaatatttctccatttgtttctgtcctctctggattctttgagcactggtttgtagttccccttgaagaagttcttcacttcccttgttagctgtattcttaggtattttattctttttgtagcaattgtgaatgggagttcatttatgatttggctctttgcctccctgtggttggtgtataggaatgctactgatatttccaccttaattttatatcctgagactttgctgaagttgcttatcagcttaagaagcttttgggctgagatgatagagttttcaagatatgagat

SEQ ID NO: 774783 - DNA, 605 bp, Homo sapiens
tttgagaactggagagagaaaaatgacttaccccatcaattttacatataaactcaatggttcagttattgggtaaatccatctcaataaccaaggttatcaactctgcacttatcagaaacattgaattaatttctttactagcacagaaagaccttcactaaacaagctgataagaaattttgagcctaattctgtcacaatattagctggcaatgattccatggggactgtattaaatatttattatratataatggcaacatggaattaattattttacgtattggtgtaaaggattatatccctctgggtcaaaataatatacaactaaaagctggcctgaaaaagaacaaaattgttttaattaacacttctcacatcttcttgcagaaatatatattttaatatctttggcaaatatctgctaaaggaacagcctaaatggaaaaaaaagctttttgtatttgtttgaatctatccatttgagagaagtcaactttgcatagttatgagtataaagaagggttctcttgttctgatatgaaatagatttgaccctaatattgtacagtaaagagaggtgatatggttttgttctgcgt

SEQ ID NO: 774784 - DNA, 632 bp, Homo sapiens
aataagaaaaattactgtcattgagcatttttccaccattatgttatttaaatgttaccacaattttatgaaaaaaaattattttatttccaaacagaagcatctcatgctttggaccttttcctgaaaaaagtctaattcaaaacggattgtgtatatgggttcgtgtgtgtatgtatcctgtaccaggtacagtcacagtccctgatgtcccagaccttacaatttcaaatgaagcctcagttgttcaatttccactactgagcaatcaatttgcctgaagaaggtaatggctactggtggratgtattgttgtctcacctgctggtggttacatttaaacatggacttctcaagggacagcttctatccctccccctcccccaaaaaatatcttatagcaaaaacatgttaatgtcagtgggtgagagatttgctaactcgggagtccttagcagaatattaaaccctaaagtctctgcagaattgattccagacacttgacactattgggcagttcatgttcagtttctttcttcttcttcttcctcattgttggtagaagttccagagaatacagtttttctcaaatcctaatgtgctcgtgaatcacctgggatcctgctaacatg

SEQ ID NO: 774785 - DNA, 609 bp, Homo sapiens
tatactgaagaagaagagtctaaaacaatgattcttcacttatgatgtacattatgaaggcacttgcaggtgcatactatatgacatctagattttgttcatctgcaatcaagtaattatgagattcattttttgtaaatttcattatttttaacactgcattataaatcttgacagaaacctttgtgatctgtatttttttcaccagcagaattggtctttttagtggaaattttgtcaaaatggacaataatttaagaaaatgtgaaaacgaatgatcccaaggacccacatttaaacaaagaaaatgtctcatgctatagctaacacagtgttatattctgttctttgataaaacatcaattggtaaataagtatgacattaaaaaattgaatggatatcaatattcaatactcaagtagtcaccagtrtctattgttctcagctctgtgtccatgtgtacccaatctttcctcctgattataagtgagaacatgtggtatttgatttgctgtttctgcattaatttgcttaggataatgacctccagctgtatccatgttgttgcaaaaaaacattatttcatccgttttatggctgtgtagtat

SEQ ID NO: 774786 - DNA, 648 bp, Homo sapiens
taacctcccattgtgtcagagaatcttcctctgtttgggtaatatgtcactctcctttttgcttgttgctggttgactgagtcatgtctctttctactgaggcaaggggaagggagcgggagtcggtgcacgctgaggacaataggggatgctgacagtgaatgcttgggctgacagctttgggctgtgtcaggtggaaacggggacatgctgggctggccctgagcgaatcgtgaagaaggcatagtgggggtgtgcccatctccaacgttcctgtcattcattccaggagccgccaaaccaaatatcaaatacgttccacagaaccaagatgtgcgtaggttatcctaagctcaaatgagtttgggaaagcacatttaagcaattatatatatcaatcataggatttctcagagcccttaataggctcacttgttctaraactctccaagagggagacagagtgggcaacctttcccaaacctgcatccctttatttcccttccatgtcaccccctccttcccaccaccttccagcaaaataggatcccttcacccccactgcaaggatgtaggacttgtttcagtgggggtgctgcagtgagctcgtatcagctcatgacagctgatcgttaaatagcgggaatg

SEQ ID NO: 774787 - DNA, 668 bp, Homo sapiens
ctcgttagtatttctgcaaacccaaggatttggtactcctggcaaagcagggctatttggaggtgtttttattggttttccccaaaaaactgaaaataaattcttttggccaagttgatctctggatggaacacagggagctgcacatatgtggcaggatcagagcaggtgagggctgcctaccaggaactgagctgttgccatggaaaagccatctcccaggctgtgtaccggagtcctctccctccccatccccaggctgtcacactgcagcagactagctggagcttgtcttaagccacaggagggaccagtcctgcagtccaaggccagcagagtggtgggcactgccagcatcgtggcacctggggagaggaactggaaccaattatcgatttctgccacyggacagttagactcctgagtgcaacgtcagcctgaccaggagccctcttcctagtcaactgggaccagcactgtagtcactcctaataaggtctcaggtcccaatggggactggtggaggtggggaaggggacatagagctattggcactagaaatctccaccagtgcctgcagagcctgctgctttctctcgtggttcctcaacctcagcactattggcatttggagccaggtcactctctgttgcaggggccatcctgcg

SEQ ID NO: 774788 - DNA, 625 bp, Homo sapiens
ctgcctgtgtacccatcttctcccctctgagcctctgcccaaggataggatcccttcactcccgcttctgtggtttgggaaggatcactccacctgtgcaagccatgtcttctaacctgcaacatgggaagtgataaaaccttgctttcaggtttcagggtggctgtgggtatgaaatgacatcatggtagcaactagccaatccagcaactagctgggcctgctcatttctggctcctttttctacctgcatccagtgagaggccactctctgcccccagctscactcctccaggaagccttatgacaactccctgcttggagtaactaaaccagcaaacctctggcaccagctcacacatcaccctcagctgctgtccaactctctgtcgagataattgtgtttctcagatacactttgaattactaaacagcagcaacgctgcggtacaaaaattgtctgtgatacttgagggagggatgaatgatgtcagcgagcagacacttggtcgacctaaaactgtattttagtcttgttcctcccttccttgtccactgagagaggaaggaaaggttggcacacctgcattgagctgtccaaatccagctctacctcacaccagca

SEQ ID NO: 774789 - DNA, 625 bp, Homo sapiens
ctgcctgtgtacccatcttctcccctctgagcctctgcccaaggataggatcccttcactcccgcttctgtggtttgggaaggatcactccacctgtgcaagccatgtcttctaacctgcaacatgggaagtgataaaaccttgctttcaggtttcagggtggctgtgggtatgaaatgacatcatggtagcaactagccaatccagcaactagctgggcctgctcatttctggctcctttttctacctgcatccagtgagaggccactctctgcccccagctgcactcctccaggaagccttatgacaactccctgcttggagtaactaaacmagcaaacctctggcaccagctcacacatcaccctcagctgctgtccaactctctgtcgagataattgtgtttctcagatacactttgaattactaaacagcagcaacgctgcggtacaaaaattgtctgtgatacttgagggagggatgaatgatgtcagcgagcagacacttggtcgacctaaaactgtattttagtcttgttcctcccttccttgtccactgagagaggaaggaaaggttggcacacctgcattgagctgtccaaatccagctctacctcacaccagca

SEQ ID NO: 774790 - DNA, 414 bp, Homo sapiens
ctgcatccaagtgttctcattgttcaattcccacctatgagaatatgcagtgtttactttttgttggtttttaaaggcaatgaagtagcattgcattacatttcttcccctaataacaaacacaagcatttaattaaccccagactaattcattacaaacactaaacccagacattcatcttcggctttcttttctctrtctttgctctttcccacaaccattccccctgaccactcttctatctgcttataggtgtcatatatttcttcccacaacattagagataaggctcaatttgaaaacagacacaaaatatataatgggtcaaacacaatcattgcttttctggtttctagacagatagatagcagctctccacccatgactcaggatccaggctccttcacctcttg

SEQ ID NO: 774791 - DNA, 474 bp, Homo sapiens
agacattctaatttccactcacacaagcacagtatatatgcaagagtccattttctctacgcttgacaacatcaggtatatttcagtcttgaaccattttttttttaagtaaaatcacttttgagaaattagtatttgttatttggtgtakgacatatatccaagtgctggccacaagacaaaggcagaaattatgaagctaggtgtatcttttcttttctgcccaaatgtccagtttaaaatatagtttattggatagtctatacactgcctgcttccagtccagttcaaaaggcttgaaggtctttaggtctgaagagaccttttatagctaatgtgttcctaagaaaatctgtctaatcagttataattccttaaaaggaactccactgtgggaatgcagtgtgacacataaaagtgagcatgttcaaaatctatttgccttcaagtttcacattactttccacgctttaa

SEQ ID NO: 774792 - DNA, 628 bp, Homo sapiens
cacactcttcagcttatagctgattctaagaaggattaaaataagagttggaatagaataacagggctatctggttttgagtctaaaggagcttattttacaactctgtcctgtacataactgataataatgcaaaataattgttctagaaatgcaaattatgtcttatycaggaggttctcttgactttctccctgcagtgtggaagaagcaagttttggctccatttgcatatttatttcaatattcctggtccataagagtatcttttctttggattctcctttgggtcagttataacatgtgccttatttcctcagagggaaataaaactttcacatgagctcatttggtatctgttttgagagtcattatactttttttaaaattattctttaacaagggccaaaaataggtatctttgattcccatctacgagaggtctacccctttcttgaaagtgcacattctaattaaggagatgttcaatgttgaaagtaatttttttgagatgtcccaaccctcttttcccttttgctctcattcaaacagttaagaccctatctcattgcctcaggggaggcaggggcaaaactaacaaaatacaacgaaggagtttgtaaatctt

SEQ ID NO: 774793 - DNA, 619 bp, Homo sapiens
gccctctttctgtctgtggtaagagattgctttgggatctgacagtcctgaggacagtgagagcacctgttgtttgctctttgaagcaatcaaagagccatctctttgaagaagctctcctgccaggaagagggagtgtcccaggccagtgarctcaggcaagagcctccttgtcctaaccctctctgcattcaggaatctagcatgagggccgagtactaggctgttcctcacaacaaccttgcaaggcaggtgtcaccctcattttgcagatgagcaaactgagccttgggtcttttaagcaatggagcttggacttgaccccaggttcaccacaagtccagtggtcatccctttctattctaggaggtaccctagcctgatagaaaatgaagaatagctaagccaggggcagaatctgctcagcttgctacaaggtaagagatgttccagcgtttctagaaaagctgaggaacaaagctgcatctcttgcttttctgcagtcatttctagaaaacctcatggcgtagggactctggtatcctggacagtaaatttcttatgtagaaaagatttcggggcttttaaaaaaaaacttatgttaaaatttgtctttaaa

SEQ ID NO: 774794 - DNA, 560 bp, Homo sapiens
ataattattaaaatttaccatttaccatgtggaaagcaggagagtatactggttaatggtacgaagtttggagccagacttcccagtacaaatcccagctctgccatttactagctttataacttggaattacttcatctttttgtcccttagcttcctcatctatgaaatccgtaataagagtactacctcatagtgttattttgcaaataaatatatgtgaagttcttaaaacagtgcctggcacataataagagctatgtaagggttagttactgttgccatgacgatgatgatgacgacratgatgattattgcaatcctctgagcttccgaaatgaactaacactatgccgaacattttgcttaccttaccttttttcatcatctctaaataacagtggttaagagagagaaatcaaacagagtgactttgaatgtatgccttgccacttgctagctaggtcaccctggacgagtcatttaacatttccaagctggggtttcctcagagccctgtcagacaatccatgtaatccatttagtgtagcacctggtgt

SEQ ID NO: 774795 - DNA, 509 bp, Homo sapiens
aaactccccatccatgtgggagcaccaaagctgctccatgaaacagtctgaaaaccagtcttccaaaaatcctcatcatagtcattattccaatgctttaattccctggacattcatcccatgcatccagtttttctctccttgcttytctatttaactaacccttgccttgtgtgtgtgccttttgtaaaaggggcatgcaggttgcacagctggctctcagtctctaagccacaccccccaggaactctctgctgttaacgacagttcattctggtttctctcctatttaaaacttgtagtttggtgtcaccctctcttcttcagcatcccattttgatcccaactccacccctcagggtttgttcttggcctcctccaaaacctttcttttgacttcttttgatgtttttcagtctcagactcatgacttgaccctggcttgtagtttcatcttgtgcacaccctgaagctctctgatccatcctgcgtttcctggcaccctgctc

SEQ ID NO: 774796 - DNA, 617 bp, Homo sapiens
  misc_feature 272: n = A,T,C or G
ccccatctctcaatatcatcacattgaccattaagttccaacacctacattttggaggagacataattcagcccataacagagaggttatctttgggctgtgccttgatagcagagttgatgggcagaacagggaattattcttcatgccaagcctagcagagcaaagacccagaaatatccaattcctccctccttcagggaacaacaagaggtttgcacaggtggaaaacaggaaagggktccagaaagaagtacctcatgccttatcanaagccgtgtgctttcctggtggctatggaagggaaggtggagcggggtaagaactcaggctctgaagctcctcatgtgaagggctgttatatagataacagaagacaagtttagtagatacatagtgtttggggtaaatacttataatcacatgtggttttttcctatttctcattttatgtgcttttgtatgtcctttggtgactatatatatatatatatatttttaatgaaaaaataagctttaaaaggtggtcacgagaaggcagatgcgggagaggtcagagggtgagaagattcccactgtgtctaatcatggcgtattgaccatgcttagcgctcagt

SEQ ID NO: 774797 - DNA, 617 bp, Homo sapiens
  misc_feature 272: n = A,T,C or G
ccccatctctcaatatcatcacattgaccattaagttccaacacctacattttggaggagacataattcagcccataacagagaggttatctttgggctgtgccttgatagcagagttgatgggcagaacagggaattattcttcatgccaagcctagcagagcaaagacccagaaatatccaattcctccctccttcagggaacaacaagaggtttgcacaggtggaaaacaggaaaggggtccagaaagaagtacctcatgccttatcanaagccgtgtgctttcctggtggctatggaagggaaggtggagcggggtaagaactcaggctctgaagctcctcatgtgaagggctgttatatagataacagaagacaagtttagtagatacatagtgtttggggtaaatacttataatcacatgtggttttttcctatttctcattttatgtgcttttgyatgtcctttggtgactatatatatatatatatatttttaatgaaaaaataagctttaaaaggtggtcacgagaaggcagatgcgggagaggtcagagggtgagaagattcccactgtgtctaatcatggcgtattgaccatgcttagcgctcagt

SEQ ID NO: 774798 - DNA, 555 bp, Homo sapiens
atggccccagaaaagaaatagaaaatataagcaaagaactatatgaaagctttagaaatgaaaaatgttgtaattgaagtgacaagctgagtggatgtactcaacagcagaatggagggaacagagggaagaactggtgagctgcaatagagaacaactggaaattactcaatgtgaataacaggaagaaaatagtctgaaaaaacaaacgaggtctcagctgcatgaaatagwataacaaaagaaagaacatatctattatctgagtcatagaaaaataatagaaagaggatagggttaaaaaaaggtatttttaaaaatggctaaaaatttctaaagttgagaagagacataagcctatcagttaaaaaagatgagcaaactccaattcagataaactctaaacccaaagaaatttattacaagacacatcataattaaacttccggaaagtaaagacagaaataaattataaaagttacaaaaaaaaaaaaaagccagagggtctacagggaaaaataagttgaaaaacaagagatttctcatcaaaatcta

SEQ ID NO: 774799 - DNA, 555 bp, Homo sapiens
atggccccagaaaagaaatagaaaatataagcaaagaactatatgaaagctttagaaatgaaaaatgttgtaattgaagtgacaagctgagtggatgtactcaacagcagaatggagggaacagagggaagaactggtgagctgcaatagagaacaactggaaattactcaatgtgaataacaggaagaaaatagtctgaaaaaacaaacgaggtctcagctgcatgaaatagaataacaaaagaaagaacatatctattatctgagtcatagaaaaataatagaaagaggatagggttaaaaaaaggtatttttaaaaatgkctaaaaatttctaaagttgagaagagacataagcctatcagttaaaaaagatgagcaaactccaattcagataaactctaaacccaaagaaatttattacaagacacatcataattaaacttccggaaagtaaagacagaaataaattataaaagttacaaaaaaaaaaaaaagccagagggtctacagggaaaaataagttgaaaaacaagagatttctcatcaaaatcta

SEQ ID NO: 774800 - DNA, 620 bp, Homo sapiens
aatgattttcataaaatatcattttatttaatgcaatagactagatacacaatttaacttcaaaacctctccaacaattgactgtataagacaatgtgaataaatatatattaaagcatatgattaaaaaaaatgcctgatagcatttacatttgacggtatatatttgaggccatagaaataaagtgataaacacttttataaaggagaaatatttgaacaaaatatacagatatatctctctaggaatatggtcaacagagaacaaaggaaaaatgtctttgtcttaaatcacttatttttgagagcttgaagcatcccaggtctgcgttggtctaatgaaagagtgccatctattggatgaccttgaaaaagtacttaaatttcataaaggttatatggaaaatamaccagtggagaacagttattttggaaaaatttataattgtatcagtcttagtctatgtgagtgtatagttacctgaatcttatgctaagaaaagaagaagaatctgcacatcaatgttgttattttgtggtacatttatgcagcaatagaagtctcaaaactcagaaaattgtctgattaagacatatagttttttaattcaaatgtttta

SEQ ID NO: 774801 - DNA, 556 bp, Homo sapiens
aagggtggggggaaactgactcccatcccttcacatccaatactcaactattcattcatgggtttctgtgcctctacccacacctgtgccaggaatgctcgctgagtgctccctgtcattacaacttgctgataatgctgcaccctcattcaacatccagcctggctcctattatgcagtcagagaaatgatccctgaggaggagtctgtcatgtacatctgtgctgctgcaacacgtcactcacagtgggctgtttatgggggtcrtgaagggtacagatgctggactgctgggctcccactctgattcaccacctgctagctcgcgtagccataggcaagcaatttcatcctccaggacttctgcttcctccatgattaattgaggataatggtggtctactttacaacccatgtaacatactgatagtagctagtttgtagcacctaataaattttaacgaagattatcggtgtttcttgtatgcattcatttgacatttgtagtttgcctactatgtgcagaagccattgagatccttcaacctcaggaaca

SEQ ID NO: 774802 - DNA, 556 bp, Homo sapiens
aagggtggggggaaactgactcccatcccttcacatccaatactcaactattcattcatgggtttctgtgcctctacccacacctgtgccaggaatgctcgctgagtgctccctgtcattacaacttgctgataatgctgcaccctcattcaacatccagcctggctcctattatgcagtcagagaaatgatccctgaggaggagtctgtcatgtacatctgtgctgctgcaacacgtcactcacagtgggctgtttatgggggtcgtgaagggtacagatgctggactgctgggctcccactctgattcaccacctgctagctcgygtagccataggcaagcaatttcatcctccaggacttctgcttcctccatgattaattgaggataatggtggtctactttacaacccatgtaacatactgatagtagctagtttgtagcacctaataaattttaacgaagattatcggtgtttcttgtatgcattcatttgacatttgtagtttgcctactatgtgcagaagccattgagatccttcaacctcaggaaca

SEQ ID NO: 774803 - DNA, 533 bp, Homo sapiens
ggagtctatggtcagtaaggaagaaaggaatcaaatggtttatcacaaaacaatgaaagaggtgttggaattgaagctatataaaggattgtgtgaacatattggaaggaacaaattttcttatggataggtttgacagttttcacaaaggagagaacatttgattttggtctttaaggatgagtaagtgtttgttaggcagatacatttgcaaagggtatgtatgccttgcaatgaataaagaacacaggcaaaaaagcacagagtaataatgggctttagtggcttgtggccagatcaaaaattgtgtgtgtgtgtctgtgtatgtgttaagggagtgggtgaagagttrggtcttgagtcttgggtggggagggaagaaaactagattagattgttggaaccaggttatgaatggtcatacataataaatgccaagccaaaaaatttacatgggatcctgtagacaatggagagacactgaagttctgctcagatgccagtctgtacatcggcatcgtttaataagctca

SEQ ID NO: 774804 - DNA, 563 bp, Homo sapiens
tctctcacatcacagccagggctgcctttaggagcgccccatgtttgccttctgccatccccaccttccagcgctcctcgcccctgaccagtgccctctgacacctctttccatctcccctctcttcggaaacaacggagttctctggaaaaataaaatgtaaaatcagactcactctcagtcacacgaaktggggtcactgtgtccaatttccaaagggaaatgttagcttcatgctgcagtgagactggaaatgccattcctttctgaaaaagtgggtcaggcaccagaacatgttacagggactggggtctttacagggcgcccctggaatccctgagggcagggccacagctggctctcgcatgcgtgcccaccctgtgctgccggcccagcccacgggctccatcctccaacccaggccaaggcagaaaaccagatgcctttcctatgtctccagcgtgtcccatcttgctaggatttttcacatttttctgtggaagccctttatggtctgtgaccctggccactgctgagccaaaaagacaacagatttatggcag

SEQ ID NO: 774805 - DNA, 563 bp, Homo sapiens
tctctcacatcacagccagggctgcctttaggagcgccccatgtttgccttctgccatccccaccttccagcgctcctcgcccctgaccagtgccctctgacacctctttccatctcccctctcttcggaaacaacggagttctctggaaaaataaaatgtaaaatcagactcactctcagtcacacgaattggggtcactgtgkccaatttccaaagggaaatgttagcttcatgctgcagtgagactggaaatgccattcctttctgaaaaagtgggtcaggcaccagaacatgttacagggactggggtctttacagggcgcccctggaatccctgagggcagggccacagctggctctcgcatgcgtgcccaccctgtgctgccggcccagcccacgggctccatcctccaacccaggccaaggcagaaaaccagatgcctttcctatgtctccagcgtgtcccatcttgctaggatttttcacatttttctgtggaagccctttatggtctgtgaccctggccactgctgagccaaaaagacaacagatttatggcag

SEQ ID NO: 774806 - DNA, 504 bp, Homo sapiens
catgttgctgctgttttaaataaactttggatccctagactttcatgactgctaaatttaaccgtctcaacatgtctttgtggagtcacttcttaatgttcttgaggttttggaaatagttcaaagaatccttgacctcagcttctcatgcttaagtgcatgagaataagttctactttggctagctcatcttgctctgtagatagccaccaatgcatgggtggagatgtggaggtggagaaactgggtgggtttggaatcgcctcactgtgggattytgggccaccttgagcaccttcatcacaaagtgctggccgaggatctgggaggctgcctgcaggtgtggctcccccagctccctggctccgttttttcctttgcaacatgggagtagaaacaacaccccgacttcctttcagcattgctgtgaaggttgcataattggacaaggtgtgtgaaagcaccctgggagtttcaaggtgccatacagtttgttttgtttgt

SEQ ID NO: 774807 - DNA, 616 bp, Homo sapiens
agttacgcctggtttgttaattaaaggagcaaggtcccctaatgctaatgctgatccctgcaggggacgttggttcttctcaaattcacctcctttgggggatgatttcaattgggcccacacttcctgcgcctgggcattgggctgtgtgctggttggtgaggtggagatgaacagcyagctcctttaagagacatgcatcagtccttctctgttttccagaacacagacacctatgcaaaaacctgggataatcgcaggtaatatttattgagtgccaactatgcggcaggcactgttctaagcatttgattcacatcagctaatttaatgattctaataacctcatgaggtctgtattattgttattcttatattcctgctttaatgatggcaaacgtatgtataaacagtggtgagctgtccgtgttaacaattgctctctggaaaaatataaaaaaaccagctctgagcattgcagcatttgccactttctgtggtgtccacactcctaccacactcgagtaccagcttcccatgggaggtccctgaacacagagctgggggcagtcacgacttcagtgcacaagcaggatccctgacgccaatgggtgac

SEQ ID NO: 774808 - DNA, 616 bp, Homo sapiens
agttacgcctggtttgttaattaaaggagcaaggtcccctaatgctaatgctgatccctgcaggggacgttggttcttctcaaattcacctcctttgggggatgatttcaattgggcccacacttcctgcgcctgggcattgggctgtgtgctggttggtgaggtggagatgaacagctagctcctttaagagacatgcatcagtccttctctgttttccagaacacagacacctatgcaaaaacctgggataatcgcrggtaatatttattgagtgccaactatgcggcaggcactgttctaagcatttgattcacatcagctaatttaatgattctaataacctcatgaggtctgtattattgttattcttatattcctgctttaatgatggcaaacgtatgtataaacagtggtgagctgtccgtgttaacaattgctctctggaaaaatataaaaaaaccagctctgagcattgcagcatttgccactttctgtggtgtccacactcctaccacactcgagtaccagcttcccatgggaggtccctgaacacagagctgggggcagtcacgacttcagtgcacaagcaggatccctgacgccaatgggtgac

SEQ ID NO: 774809 - DNA, 573 bp, Homo sapiens
tttcctggctctttaaaatcatccacctaccatccaggtctaaggagaaacagctagttatgggacacaagttcagattttgcctcagaaatatgcaaggggtcaggcaaatcatgaaaattattattgtgtgagtgtccaaaaacagaggtggctatgccgtatggactaacattrattaggcaccgacagtttgctaggagttttttaaaaagctctgtgggccgggtgcggtggctcatgcctgtaaccccagcactttgggaggctgaggcaggtggatcacttgaagtcaggagttcgagaccagcctggccaacatggtgaaatcctatttctattaaaaatataaaaatctgccaggcgtggtggcaggcgcctgtaatcccagctactcgggaggctgaggcaggagatttgcttgaaccccggaaacagaggttgcagtgagctgagatcactccactgcactccagcctgggcaacagagagagactccatctcaaaaactaataataataaataaaataaaataaaataaaaagttctctgtgttcgttttgattcaaccat

SEQ ID NO: 774810 - DNA, 619 bp, Homo sapiens
ggcttcccaccctgaaagtatatgtgtgtgtgtgattaattaatggattgattatataatttcctggcaactgaagagctagtgtgtggaatgctcacattcctttctgatggaaaggagtaagaggagtttcattaattaatgaattggtgcagaaggaaccaaaggcgcacaaccttagtcacctttgacctctctctccccacatccatgagtcacagaccttgctgaccctgccttttgcaggccactcccgccccactgcactgcccccaggcaagccagcttgagtcaaatggcactcccttgctccagaacatttcatctctccctattgcttacagggtgaaaggcaaactcttcatcttcgctttctagacccccgatgattggcctgtttttccagcctcaactcctatctttcccttccacgaaccccacactccagccaaaggattctctgcagcacagtytcccagcttcgtggtgctgtggcttcagcttggaataatgtcctctcctgcatatcaacctctcaaatcccaacatccttcaaggcccatgggaaggcttcattcagcttgcaccacacctctgccccacagcacatgcctcactt

SEQ ID NO: 774811 - DNA, 649 bp, Homo sapiens
cagattcaccccttcattcaccgttggggaaactgagtcccagagaacaagtgcatccccctaaggtcacacagctgcagggacatggcagtcccaggcattcagggcccctcagcaggccacaccctggaggctggagtggrgagaggaagtaaatttgaatcccttttgtaggaggcaggcttagcatgggaggcttcccagtgagcaggccccagcctagcctgcccaggcgagcctttcctcatgcaggggtggggtggggggtgcttatgaagtgaaatggacaagaacttcaatggttgacaaggtttcaatggtttctttctgaaaaggtgtcaagatttacttttgagcagaagttggagcgtgcttattcattcattctgcaaacattcattgagcacctactgtgtgccaccgtggcaggcccacctgtcagctggcaccgaatatctgagctgggatgcatctgaaggaccatctgctgcaggtcacttggccctgtttgctcagcagcttcaagcagtccctccccactcccctgtccacacacacctattgtcctctgaccacctttacctgtgagcaccttctctcctcttctaggcagcccctcccgcaaggaggctgcagggccattcccaga

SEQ ID NO: 774812 - DNA, 649 bp, Homo sapiens
cagattcaccccttcattcaccgttggggaaactgagtcccagagaacaagtgcatccccctaaggtcacacagctgcagggacatggcagtcccaggcattcagggcccctcagcaggccacaccctggaggctggagtggagagaggaagtaaatttgaatcccttttgtaggaggcaggcttagcatgggaggcttcccagtgagcaggccccagcctagcctgcccaggcgagcctttcctcatgcaggggtggggtggggggtgcttatgaagtgaaatggacaagaacttcaatggttgacaaggtttcaatggtttctttctgaaaaggtgtcaagatttacttttgagcagaagttggagcrtgcttattcattcattctgcaaacattcattgagcacctactgtgtgccaccgtggcaggcccacctgtcagctggcaccgaatatctgagctgggatgcatctgaaggaccatctgctgcaggtcacttggccctgtttgctcagcagcttcaagcagtccctccccactcccctgtccacacacacctattgtcctctgaccacctttacctgtgagcaccttctctcctcttctaggcagcccctcccgcaaggaggctgcagggccattcccaga

SEQ ID NO: 774813 - DNA, 686 bp, Homo sapiens
tcggctcacactatcggcctggatcccacgtctaccaagggagactgcgtggggtggtgacgggtgtgtaagcacgcgtgaggtccggccactgcacagtcagacacgccggctgctgcagtggggcaggcagctccgggtgccagcatgggccccagctctctgcgaggctacagctggaccaggcgcactgcaagcagcttccacagctggcactggggaacacagtggctctcagaagcttggagatgccagaaaccacagggacccaaagagggcatcacagccctggcttgggagactccccggtctgggctccccaaagggctgcagctcttccttccttctcttcccctgcaaygtggccagcaaggggcatgtctcagcactgtttgtgttatagctcttttagccttattcagtgggtcccaagttcttgtcctccactcaggaagaatgaggtacggaaacaagagggtgagcaagacgaagaggagctttattgagtgacaatagctcagaggaggccctggagagggcagttcctcactacagctggtcatccgacgtctgctcagctctggctgagcctggggcttctgtcagcctcagagagggggaagttcatgctgactggtccatgggcggccatgggcaggcccagaaaaggcaacacaagttcgcac

SEQ ID NO: 774814 - DNA, 686 bp, Homo sapiens
tcggctcacactatcggcctggatcccacgtctaccaagggagactgcgtggggtggtgacgggtgtgtaagcacgcgtgaggtccggccactgcacagtcagacacgccggctgctgcagtggggcaggcagctccgggtgccagcatgggccccagctctctgcgaggctacagctggaccaggcgcactgcaagcagcttccacagctggcactggggaacacagtggctctcagaagcttggagatgccagaaaccacagggacccaaagagggcatcacagccctggcttgggagactccccggtctgggctccccaaagggctgcagctcttccttccttctcttcccctgcaacgtggccagcaaggggcatgtctcagcactgtttgtgttatagctcttttagccttattcagtgggtcccaagttcttgtcctccactcaggaagaatgaggtacggaaacaagagggtgagcaagaygaagaggagctttattgagtgacaatagctcagaggaggccctggagagggcagttcctcactacagctggtcatccgacgtctgctcagctctggctgagcctggggcttctgtcagcctcagagagggggaagttcatgctgactggtccatgggcggccatgggcaggcccagaaaaggcaacacaagttcgcac

SEQ ID NO: 774815 - DNA, 405 bp, Homo sapiens
tcagagtgagacctgctctcgtatctgtaaacactgtgttcaaggagagagacactcctttgaaacactggaatgcggacagacgtgcaggctccgagttaagcccgctcccaccagctactctccgataaagatacgctgtttgagcagcacagaggaggttcgttgaaaccgctgttgccrtagatgatgcctgtgacgcgccgccgcccttccactgtttcgccccgaacatctgcttaaatctaagtgattggactcaatagtgtggagaccagagctctaagccttttgcagcctccacattttgcaactggccccctggctcccaccttcactcttaacctgtctcttctcaatcctttgtcgccaccagacttcgggtaccctacgggtggtgttgag

SEQ ID NO: 774816 - DNA, 622 bp, Homo sapiens
acctgctagaccgcctccttcctaacctccatcttcatgggctgcctttggggttgtggtcagaaaattctcttggtctggtgtttctaaggcagtggctgttcccaagaagtgtcattgatgggatgtcccttactgtattccrgaatgcttgcgttcctctcagaccctcttttctctgcccctcattttccactctgtaactttctgcggtgtcttaggtcttaacatccatcgctggtaactcactaagtccatctgaccgtggaaaggaaaagctcacagtgtgaaaggcgacgatgaggctgctcccacctacgagggccctgcagtagcagactcggaaggatcagccggaaaatgcgacagcctgctcgaggtcccctcacctgctgagctgcaagacagacgcctgctgcaaacacctcatcttccgttagatcagccagcttacctggagcctgcaaaacctgaacttggggctcctggcctctattccattttttccatttctgtgagggttaagaggttctctgaaaaagcctgggaaattttatagtacaactgaacagggtgtgcactactttgtggaggctaaaagcttaacttgaaatgcattttt

SEQ ID NO: 774817 - DNA, 622 bp, Homo sapiens
acctgctagaccgcctccttcctaacctccatcttcatgggctgcctttggggttgtggtcagaaaattctcttggtctggtgtttctaaggcagtggctgttcccaagaagtgtcattgatgggatgtcccttactgtattccggaatgcttgcrttcctctcagaccctcttttctctgcccctcattttccactctgtaactttctgcggtgtcttaggtcttaacatccatcgctggtaactcactaagtccatctgaccgtggaaaggaaaagctcacagtgtgaaaggcgacgatgaggctgctcccacctacgagggccctgcagtagcagactcggaaggatcagccggaaaatgcgacagcctgctcgaggtcccctcacctgctgagctgcaagacagacgcctgctgcaaacacctcatcttccgttagatcagccagcttacctggagcctgcaaaacctgaacttggggctcctggcctctattccattttttccatttctgtgagggttaagaggttctctgaaaaagcctgggaaattttatagtacaactgaacagggtgtgcactactttgtggaggctaaaagcttaacttgaaatgcattttt

SEQ ID NO: 774818 - DNA, 622 bp, Homo sapiens
acctgctagaccgcctccttcctaacctccatcttcatgggctgcctttggggttgtggtcagaaaattctcttggtctggtgtttctaaggcagtggctgttcccaagaagtgtcattgatgggatgtcccttactgtattccggaatgcttgcgttcctctcagaccctcttttctctgcccctcattttccactctgtaactttctgcggtgtcttaggtcttaacatccatcgctggtaactcactaagtccatctgaccgtggaaaggaaaagctcacagtgtgaaaggcgacgatgaggctgctcccacctacgagggccctgcagtagcagactcggaaggatcagccggaaaatgcgasagcctgctcgaggtcccctcacctgctgagctgcaagacagacgcctgctgcaaacacctcatcttccgttagatcagccagcttacctggagcctgcaaaacctgaacttggggctcctggcctctattccattttttccatttctgtgagggttaagaggttctctgaaaaagcctgggaaattttatagtacaactgaacagggtgtgcactactttgtggaggctaaaagcttaacttgaaatgcattttt

SEQ ID NO: 774819 - DNA, 621 bp, Homo sapiens
tgaacccgggaagcggagcttgcagtgagccgagattgcgccactgcagtccgcagtccagcctgggcgacagagcgagactccgtctcaaaaaaaaaaaaaaaaaaaaaaagaattatgtctattcctgtatttgtttttgtttgtatgacaaagattaatggcaaaacttaaccaagtgtttttgggtggacattaaaaagagagggttcccagcgaatggaaagtgtatttatttctcatcttttatattttagaatcttggactttaatatcatttgtaatcagaaaaatagcataaacttacaaaatttaaaaatcactaaaatgtattaaaagctgacagcccgtatgtaattactccactggccatcaaattgtagaggcctttggaataccagcatttgcattttacttttaratactaaagagtgatatgtcacctcatatcttagcgaccactttgtggggttgtaatacactctgtattacacaatacaccagaataaggaagcttactctggtgtattgtggtgttgagagcaaacaagagtggggagagtatcacgaaggagttcaggcaggtttaacaagacctggcaggtccccaaaactaatcag

SEQ ID NO: 774820 - DNA, 596 bp, Homo sapiens
aaatagtacagaccataatctacaacttaagctgaagggatgagggaaggagagggcaggagcccttgggcaactaagggaaattaagtgtaggtggataatagaaatccacagataattttagctgtaactcttagcctgaagttttcatatattaggacaattaaatgtcatgtcacccaccagaatgctgaaatgyggcttttcctaaatagtggattcagtagatctgctaagcactggagatgtattggtgagtaaaaaagaccaaaatcatcttgccctatggaagagaacaaatacatagtattaatttttcctctgtaagtgccatggggaacagtaaaaccaatgagggaaattgagggatgtggggctgtgtcagtgcccatggaggagcccacatgggtattttccctttttttttttttttgagacagggtctttgtcgcccaggctggagtgcagtggcacaatcttgactctctgcaaccgccgcctcctgagctgaagcaatcctcctgcctcagcctcctgagtagctgggactacaggcatgcgccaccacacccagctaatttttgcatttttgtaga

SEQ ID NO: 774821 - DNA, 610 bp, Homo sapiens
acactaattagaacagactgtaacaatggaggagaagtagaatggacgcactatgctccatatataaatccatatagtaattaaaatatagtcatagctctcaagaatgacagctcttggccaagaagattcctgggctgaaatattaggattgctagattcagatgggatmttaaacaaatttcttgaggtaaatagtatccatctttgtgcctaaaccacatgatattttctcatagtccttgcctttggaaaggtttattgattcatagaacctttttaaacaaatgaggcaatgcagtctaaggaaaaaggaagatgggttcccaccaaccaaaagaagaccttctcccgctcttgctccacagcatggcatgaagtagatgtgtttttctcctactagctgaaaaagtgccaaactagaagtcctaaaaccttgatttccattatagctctaccacattctggctcatgaaccttgggaaagacaaggagtttccttataaataggggtaataatacacacaccacaaggttgctgtggagattaaatgaggtattatgtatgaagcccttgacacactattaagtgactctatgtgtgaagagg

SEQ ID NO: 774822 - DNA, 639 bp, Homo sapiens
ctcacacacacacaataataataataataaaatagagtcaatcaatgatgtagattggtagattttcatttattcatacagaagatgttcatggtacagcggactaatgctacagtgcctaccaagaccagatgcttctttgcttgagaactgcagtatgttattctcaattcctaatacaaatggagtcaaagagattctcccttctgagaatatggaattggggtaagaggtgctagtttatctgaaatagttacaagagcgaactgtgagaaagccaaaacgatgagagtagtgacaagcaaaggtgcaaaaagaagcagacatgagkttcagtggccccagagaaagatagaagaacgtaatggaagacagtggttttcccagcatctcttcttcttgatgccggtatttcttgatgcccagctgttctctcatccttgggttttctgaaagatctcctattctttatttcaaatatcctttactccgttagctaatctttcctttggagttgaaagattacatgaaaaataatgcttaacagtttacggacccccaaaaatgtcagagaaagagagagaatgagtaagcttgggcaggagatatacaaacctgctactagtgattatctgtaga

SEQ ID NO: 774823 - DNA, 491 bp, Homo sapiens
aagcttagaatttatttccttaggaccaaaattttatgacttactcagctccaatatgtccttgaaggtgaagattgcaaagtagaccatcacccctaatagcaagtcacttatttgttttatcgatatagctgactgtctaaagcagacctaatttacaggcagaccmaagattactgtgcatttttcagaatgctgcccacagactatagtcacaaaatattaagtattgagtctaacttgctcccccctattcaagaaagtattcactaggtctttctcacatacaaagactagaggtccaacttcagagctatacctgaagaggtattcatactatgaaacggagcaaaagtgatttcacctgtctcatagattttttttcccctgtgaaaatgtagttctccctcttgaaaaactaagtctgaactttcaaaataatttattgtgatcaggcaaaccatggcacgtaaacacttcaattccataaa

SEQ ID NO: 774824 - DNA, 491 bp, Homo sapiens
aagcttagaatttatttccttaggaccaaaattttatgacttactcagctccaatatgtccttgaaggtgaagattgcaaagtagaccatcacccctaatagcaagtcacttatttgttttatcgatatagctgactgtctaaagcagacctaatttacaggcagacccaagattactgtgcatttttcagaatgctgcccacagactatagtcacaaaatattaagtatkgagtctaacttgctcccccctattcaagaaagtattcactaggtctttctcacatacaaagactagaggtccaacttcagagctatacctgaagaggtattcatactatgaaacggagcaaaagtgatttcacctgtctcatagattttttttcccctgtgaaaatgtagttctccctcttgaaaaactaagtctgaactttcaaaataatttattgtgatcaggcaaaccatggcacgtaaacacttcaattccataaa

SEQ ID NO: 774825 - DNA, 470 bp, Homo sapiens
ggacatctcttgaattgagaaagtatgaaaagggacttaataaatccttatcttgttcctttcttgaatgacctattctcttgtgtcccccatattgatcatgttttggagccttaaactcatcttaaaatagtcttttttcctcatcttccatacccaggtgatctctcagtrcttccaatcctatctccatatagccgtttcctcttttttgttcctgttgtcatgacactggtccacaatctctcttttaaggtttttaactagatgcctcattggtgtctcttgtctccagtccattctctatgttgccatcattactctttctaaaagcttaggtctgtctacaccattttcctacacacaaatctgctttcttctcagattgctaataaaataagattaaaatatgttttaaaaattgtaaaaccctccttagttcatggattagcattatcatattttggatc

SEQ ID NO: 774826 - DNA, 583 bp, Homo sapiens
aacatataaggagctcaaacaactcaacaacaagaaaacaaaaaactcaataaaaaaatgggcaagggacctgaatagatatttctcaaaagaaaatatacaaatgatgaacagaaatatgaaaaaatggttaacatcgcaaatcattagggaaatgcaaattaaaaccacaatgaaatatcatctcacagctgtcagaatggctattataaaaagatgaaagatagctagtgttgatgaggatgtggaggaaagggaactctagtacgctattggtgggaatgtaaattagtacagccactatggaaaactgtggcatttccacaaaaaactaaaaatagaactaccagaggatccagcaatctcacttctggatattgatccaaaagatttgaaatctgtttgtygaacagatgtctgcactctcatgttcaaggcagcactatccacaatagccaagttatggactcaacaaagttgtccatcaacaaatgagcaaataaagaataggtagcgtatctaaacaatgaaatattaaccagccttaaaaaggaaagaaattttgtcactttcaacaacatag

SEQ ID NO: 774827 - DNA, 612 bp, Homo sapiens
ctggtttttgaacatgccaaggctaactgctcttctctgtcaaagtcattgtacatgctattccctctgcttagaaatatctccctgtaaacatctgtgagcctcagtccctcacttctttcactgctctgaagaaatgccttcttattagacaggactcccagagccatgctgccatcctatgcaagtgactagcatagaaacagagccacactccctccttcctgttctcccataaacttttcacttgttcccttgtatcttacctcttacagccagatattttaaattcatttctctaaggtctccaaaagtatgtaaattcctttaaaagaaakggctttgttctgaatcctgctctatgtctaaaacacagatgagtacctgacatactatagttttttttgctttacaaatatttgttctatgaatgaacaaagaaatgaatgaataaatttacaagtgtcaaaagttaccaaatttatcagaaattcttgctaattatttttttttcctatgaatctaacctgttttccccttccgtgaatctaaccctgaagaaagacaagcttggtgccttcatcattatcttctctttatagcaatcactgc

SEQ ID NO: 774828 - DNA, 612 bp, Homo sapiens
ctggtttttgaacatgccaaggctaactgctcttctctgtcaaagtcattgtacatgctattccctctgcttagaaatatctccctgtaaacatctgtgagcctcagtccctcacttctttcactgctctgaagaaatgccttcttattagacaggactcccagagccatgctgccatcctatgcaagtgactagcatagaaacagagccacactccctccttcctgttctcccataaacttttcacttgttcccttgtatcttacctcttacagccagatattttaaattcatttctctaaggtctccaaaagtatgtaaattcctttaaaagaaagggctttkttctgaatcctgctctatgtctaaaacacagatgagtacctgacatactatagttttttttgctttacaaatatttgttctatgaatgaacaaagaaatgaatgaataaatttacaagtgtcaaaagttaccaaatttatcagaaattcttgctaattatttttttttcctatgaatctaacctgttttccccttccgtgaatctaaccctgaagaaagacaagcttggtgccttcatcattatcttctctttatagcaatcactgc

SEQ ID NO: 774829 - DNA, 637 bp, Homo sapiens
ttctaaaagccatgtatatttttactatttttagaaagttttcataggcagtcgagttttcaatttgtttactattagagtttattggttttaaacaatggtgtgctgataatctggttctaaaaaaaaaaatgagcccttggccagctgtggtggctcacacctgtagtctcagcacgtcgggaggccgagacaggtggatcacgaggtcaggagttcaagaccagcctagcaagatggtgaaaccctgtctctactaaaaatacgaaaattagctgggcgtggtggcaggtgcctgtaatcccagctactcaggaagctgaggcagagaattgcttgaacctgggaggtggaggttgcagtgagtcaagtttgcactactgcactccagcctgggcaacagagcaagactccttgtcaaaaaaaaaaaaaaaaaaaaaaaaaagcccttatttgaagcatttgcaaatttcagtcatctaaatacwcccatcatggacaatttcaagctatcaatttcatgtcactgaatcaaaaattgggaaaatgtgtgcacaatagtttcttatgagctggtacaagccagctccagcacactcctagctctaggtcaattcaatgttatccaattattgga

SEQ ID NO: 774830 - DNA, 627 bp, Homo sapiens
tattttcctctggatagatgcccagtagtggaattgctggatcaaatgaaagttctactttcagttctaatttaaggaatctccacactgttttccatagtggctgtactagtctacattcctaccagtagtgtaaaagtgttccctgatcaccacatccacaccaaaatctactcttttaaaaaaaaatcttgattatggccattcttgcaggagtaaagtagtattgcattgtggctttgatttgtatttccctgatcattagtgatgttgagcatgttttcataggtttgttggccatttgcatttcttcttttgaggcttgtctattaaggtccttagccmactttttgatgcgagtgttttttttctcactgatttttttttagttcattgtaaatactggataaacatacatgtgcatgtgtctttaatatttctcccttcacttcttataccatttttatttccttgcattgggttttgccttcctcttgaggctccctagttagcttaataactaaactcctgaattctttttgaggtaaaacagggatttcttcttggtttggatccattgctggtgagctagtgtgattttggggggggcattgaagagccttgttt

SEQ ID NO: 774831 - DNA, 515 bp, Homo sapiens
aaacacatttttgcagagacaaggtcttactatgttgctgcccagactactctcaaacttctagactcaagacttcctcctgccttagacttccaaagcgagccaccactgtgcccagtctgcttttcttataatattcttctcaggccttagtgtcaggactatacttgcctcataaaataagttgaaaaatatttatttcttttctgctttctgaaaaatttsgtgaggattggttttattctaacataaattaaactgtgtagtcatctgtgcccaaagttttctttgaaagaacattttaaattattgtttgaatttcttcaatagatggattattcaattttccacattttttgtaccagtttcagcagacaaaagtgtgttctgaagaaatttgttcatttcatctgggttgttaaacatattggcagtaagttattcataatatcatcttatgattttagagtctgtagaatttttagtagtgtttgcctctgcatttttgatattag

SEQ ID NO: 774832 - DNA, 462 bp, Homo sapiens
aataagtcacattaaaacaaatgcaatcagtgcttacaactctgccttcctgatttctgtactgcagtgctctcttctctgctcgcagggcttttgtgttcttatggtggaaacgcccaggtgtggtcaggccccttctagcctctgccggcagtggcgtcccaggcccctcgcggtggccagcccgacactcgctgcagcctcgtcggcactgatcctgctcatggggggcggtagccatgagaccaggctttctgctgtttgaggagccccgcagctcctgtacctcaggcccgcaccctggscacttctgctgccgggagccccttcctccggatctcagagacccagcgtcatgcagagtttttttagcttaagcctcagttcctcagagaggcctttccagccagcttgactcgccagcccctgccctcatagtcctctgcgggccaggcccgtggt

SEQ ID NO: 774833 - DNA, 631 bp, Homo sapiens
tgagagcctgaacacttctggtcccaagcacgtcagaacgacagtcagcctgtgcatctcaatcattgaagctaaagctctttggagtccatgctaatttgcaggagtgtgaagggctccggagtttgagaaccgtggctctgcaggtgtgttccaaccctcttccttcggagacacaggagggccctgaatgtcagatgtgagggatgtggggcccgcagagacacaggaacttggctgtgaggaattcagggactagcaaagggggcgatgagaagaccctgaaatgcaccgtccaaagcacagtaccatcttgcgtggctggcgctgctgcayttcacctttcttcacgtggagggggtctcatcaaggcagcagaacagcttcttgaaacaaactcaagattgacagggtgccaagcaagaaaaactggaaactgacgtgtcccagccgcccacccacttccttctccattgggggataacaggggggtacaagtgaagggcctccgtcctgaggagaggggcacaggctgtttcctccagacacagacactcctcagtggtcaggaccgtcctctccatgcctgtctcaagctgcaggtgcctctcctgcccaggtgaggtgggag

SEQ ID NO: 774834 - DNA, 677 bp, Homo sapiens
tagcagcaaacttgatatttgaggaggcaattgtctgttagccagactttccttagaggacagtagtcttgttatattgcgtggagctaaacagttaagttattccccattgttaacccattggctgtagagctggacctccagtcttagtcaaaactcccagggctattttcttcctttccaatatacataaagattaaataccttccctatggaagggctgagaactggtgctttaagcaggcttgctttagctggtttaaggcttttgtgttttaggttccaagttagggagctgcttgagtgtcttttaagagttggtataaaggatgagctatttcaccataccctggtgcccacattttgcaaaattcagtaatgcccacattttgcaaaattcagtaatrcccaataattttcttaactcttaaaggaaacggggttaatcctttcctcacctggtactctggttccttctgtgctgtgtctgtcccacagaccttggccgatgggtgaaatgagtactcagacacaggtatgcagtgtaagagcagctaggtgactgcctggctccagtggccagacagcagtcccgagaagctggagctgtttgcttttattcagtgcaggcacaatgccgaaaacctggagccaacacaacctgcaggtaattaaca

SEQ ID NO: 774835 - DNA, 658 bp, Homo sapiens
atggggatgaagtaattctttaacataacattggtatgctaaagtacagtatacagagataagaatttacaatatagtgtgtgcatcagtaatttctaacagagccttaaaacagaaacacagtctttccataatctatgattagcaagatattaatcagyggtaacagttgcagcaaaagccggttacaaacaatcaatacaaacaggatgtgaagctagacaaccagttagaccagaaattctcagaagggagtattaaccctaaagaggcctagaagagccgtggcaagataagggcatttatagccctatcatcttatccatatgaacaggcacccctcatgcgtccatttataagctctccacaagggttgcattccagtcccagagctatgaacaccggcttttctgggataggaatcttggtgatgtgaaacctccctgactgcacatctattcataggctctctgcaggaggaagcacatcatgcgctgttggctcattctggcagcccagtctggcattgtctttacacaatcctgcatgcaattttgtatttacaataatcaggagcatttcatcttttattctatagcaatagtttcaaggggctctccctacagttgaagtcaaggaggagaaaagtcacgtctta

SEQ ID NO: 774836 - DNA, 623 bp, Homo sapiens
atgctaaagtacagtatacagagataagaatttacaatatagtgtgtgcatcagtaatttctaacagagccttaaaacagaaacacagtctttccataatctatgattagcaagatattaatcagtggtaacagttgcagcaaaagccggttacaaacaatcaatacaaacaggatgtgaagctagacaaccagttagaccagaaattctcagaagggagtattaaccctaaagaggcctagaagagccgtggcaagataagggcatttatagccctatcatcttatccatatgaacaggcacccctcatgcgtccatttataagctctccacaagggttgcattccaktcccagagctatgaacaccggcttttctgggataggaatcttggtgatgtgaaacctccctgactgcacatctattcataggctctctgcaggaggaagcacatcatgcgctgttggctcattctggcagcccagtctggcattgtctttacacaatcctgcatgcaattttgtatttacaataatcaggagcatttcatcttttattctatagcaatagtttcaaggggctctccctacagttgaagtcaaggaggagaaaagtcacgtctta

SEQ ID NO: 774837 - DNA, 596 bp, Homo sapiens
gatgcgaaggaatcagcagaagaattctggcaccatgaaaaaaaaacaatgctgtgacaccaccaaaggatcacaccagctctccagcaatggtcccaaccaaaatggaaacttagaaatgatcaatgaaaatgtgaagcatggcttgcaaggaagctcgacaagatccgagacaagactgaaaatcaacacgaagaaactttgaaagcaatccaggaaatgaagaaagagataaacatctttaaaaaatcaatcatagcttctgtaattgaaaacctcacttaaggaatttcaaartacaattaaatcattatcattaaactagaccaagcagcaaaaagaatttcagagcttggagactagtcttttgaattaaaatcgtctgacaaaaataaaaggaaaataatttttaaaaatcaacaaaatcttcaagaaatacaggattatgtaaagcaagcgaacttatgaattaccggcattcttgagagagaagaagaaaaggcaaataacctggaaacatatttaagggaataatctaaaaaaattttttttatcttgctagagaggtagacatccaaatacaagaaatccagaaa

SEQ ID NO: 774838 - DNA, 639 bp, Homo sapiens
acaattatctctgccagaaaaaaatagctaactctttcatgttacttacatatgccactcactcttctaaagcctctcatctaatcatcctagcatcattatgagaaaagttatgtgattttctttattttacaaataatgcaaactaaagaatagagtggttatgcaatgtgaccaaattcatataactggtaggggtagtgytgagatgcaaacctaggctaagtctgaagtccatgtgctttttaccatgtcaagatactcgctggaagaatttccccgtgaatttggcagtattcccctctaccactgacaatgtgtcatttactttagaaacctgtgttctgtcaacttcacctgtgatcttttgctgtgggttcctcccaccgagtctttctctcccctgtttaacattaaatttagaagctcttcacatattttattacatgtggtttcatgggcattgtccttgagcaggaggaatacagtgccctaagcttggaagggtctcatgcttggtctaatgctttgccatcactttccttgaagtcttaattttttttaataagaagtctcacattttcattttgcactgggtacaacaaattaggtaacttgtcctatatttttgtttcatgg

SEQ ID NO: 774839 - DNA, 565 bp, Homo sapiens
cctagtctagtttcaatacatatgtggccagttgattttatgtatttttttattggtaatacattatgtctgctcactcattttcaaatttgaactactgatataaatgaatttgtcagacatatggataattggccaccaaatacccaaaatcctagaaaagattcaatttatatataataccttcccattgaatggataatctgttagtaggtcaatctttatagactaataggaactcactattcccctagttagaatgtggtctttttatattaaaaggccaaacatattatctcttcataggcatatcttaaaatactgtttttaaatatatgatataaaatatacatattatatatatatatgcttatttttctcagtagtcccagaataagccagayattttgctactgaaaataagatgttatgtaaagttaatactaaaataaataaatttcttcacaaattgttcctaatttatctttgtattattatctctctaatggctataattgttgtcatctgtattcatgaatattacttgagttctaaacctccattt

SEQ ID NO: 774840 - DNA, 439 bp, Homo sapiens
ccatccagtccgccactttgctcagaagtggctcacacactcactcacccacaaacacacacacacacatgcacatatttggaaggcatattttggctttaagcatgcagagtctgattcctgattacctgatcatgtagaatggattaaactccttttyttttctttttcctttttttttttttttttttttttttgtagttgggcagtcactgttcatgataccccagagtgtatacaccactcaaactgtatcacattctaatccaacaccaatgaacatcacttagtaataaagagatgtttaatttcttggcttataaagttaaaaacattgaatctcctctggggatttccttgtcctgaggtggttggtgtgacaatgaaaattgctatttactgttgaaaggcacccctataatctggtgtggctccaaga

SEQ ID NO: 774841 - DNA, 654 bp, Homo sapiens
gattaatgaatcagtgggttatcccgggattggaactggtggctttataagaggaagagagatttgagaaagctcgcacagccccctcatcctgtggtgccctgtgccaccttaagatgctaagagtcctcaccagcaagaaggctctcaccagatgttccctcttgaccttgatttcccaagcctccagaattacatgaaatacgtttttcttctttatccattgcttagtttcaggtattctgtcataagtaacagaaaattgacaaagacagagtgtcacttggaaacattttttaaacttgaccccatgaagcaggcagagcccaggtggtaaactccttcattaaccactaaggtttctcaagaaagcctattaaaattcagtctttcgccaatagaagccacctaataaatgtcmattaaattaatgcatgactatattcgattcttttttcaaataaagggattgggcataacaatgtctaatatacttttgtgatctcaaatgctatctataaatgataaaagaaataatcttcctctaggatataaccaagattgtgtacaataatctgtgcttattctaaaattagtttctcaaagaggaagatagtgatgatttttgttttctgccctcagaactcttttctg

SEQ ID NO: 774842 - DNA, 599 bp, Homo sapiens
caaggaaaatgactttagcatctcaaaaaaccgatgctatgacctttgttattaatgggtctgcttttgctttgactagaccatatcctcctcttggtagtcattgctttgattgtgctttgtcttcaggatcattctggtaaagccatgtttcatctcttttgcaattcatcaaagaaatgcttcaggatcttgattccacttgcttaaaattttaattgaaagttctgcacttgtctgcagrtaatttgggtgcagtgattttggcactgttttagttgaaagtttgctaaactttaatttttcagtcagaattgtgttagctgaagtattggttatagctatggtgttggctattgcttgtgctgttaatcactggtcctctccagttagggcacaaacaagattattttctcccttgaaaattgatatgaatggtctgccactgtgggcttcaacattgtttcttcccttcttaaaatgagttatccatttgtgaactgctgatttattttgggcattgtctccataaagcatcaatgatttcaccattcttccactcaggcttcatcataaatttgatgtttgttcttggttca

SEQ ID NO: 774843 - DNA, 617 bp, Homo sapiens
tctcatatcctggcagtcattctgtgaggtatgttgccattaccattctcactttacagatagagaaattggtggctcactcctgtaatcccagcactttgggaggccgaggtgggtggattattagaggccagaagttggagatcagcctggccaacatggcaaaaccccatctctactaaaaatacaaaaaaattagctgggcatggtggcacacacctgtggtcccagctacttgggaggctgagacatgagaattgcttgaacccaagaggtggaggttgtagtgagccgaaatcrtgccactgcattccagcctgggtgacagagggagagtctgtctcagaaaaacaaacaaacaaacaaacaaacaaaaaaaaaaacaaagaaattgaggtttagtgagattgaacaatttgtccaatattgtacactagtaagtggtgaagttggtatttgagttcaagcactttgacttaactgtgctttaacagctgcacaaagatgaatttttcctttgtttttattcctgatagctgtatcatccaaggttatttgacttaactccaattacatttacacaaaatttattaactaaaggaaaaaatccctctact

SEQ ID NO: 774844 - DNA, 603 bp, Homo sapiens
ttattagcagccagtagttaaaaagtgggagacttcactgaaaacccagttttctagcttctcacaagaaataaaaaactctggtgacactgagcctatgctcctaggtggcagcggctggtgagagccaaggagcagtggcccgtgtggggcttctcatgtaccagccctggtgtggccacaggggcrtccgagggcatgattctgctatggggcttcatctgcccgcccccaattccgtgggtggctcccaccagacattaagatgttgttctgctttaagatgatccaacaaagctgccccaggcgctgaaggcaaatgcatttcatactcgaaggttccaccaggtcactcgagtgtgagcaccgagagcctgcccctcagggccctgtatgggcttagacttagtggtgatcaggacgcaggatttaaggggagcactgagtgcttgggaggaggggtcctcccagagctctgtctgcaggagatgatggctgctcggctcacctgcagggccacagtgaagtggctgcttttagtgtctcggacgatgctagtgttcatggctgactggataccccatcgccactgcaggtagccca

SEQ ID NO: 774845 - DNA, 538 bp, Homo sapiens
gattgaagagcacagatgtgtgcagcaacaggtttgtctggcgcaggggttattgctcgtattcccacttggcatcctagaattagtaaataacataagacaaacatcagcataattagcaacattctttaccaatctaaagtgacccccaggagtgggggtctatmcaggagagatgttctcacatatccttccatatggttgtttgttgggcatgtagatctatggtgtttagggactctagaattttaattttaagttgccttatgtctgctgttaaattatcaggtcaggttccccagaggtattgtttcacttcatcccaactatgtattgattgatccaaggtagagaggtggcacaatgtgcttatgctcccagtcacggtttaattgctgtcagaatgccagtgcatcttgccgctcccctacatattgtaaggagcgttgagggctttcaggcatgcaagaatcttttaatctacaccctgctgtaagagaagttcattagacacatttttggccaagttatctacaaa

SEQ ID NO: 774846 - DNA, 633 bp, Homo sapiens
cccaactatgtattgattgatccaaggtagagaggtggcacaatgtgcttatgctcccagtcacggtttaattgctgtcagaatgccagtgcatcttgccgctcccctacatattgtaaggagcgttgagggctttcaggcatgcaagaatcttttaatctacaccctgctgtaagagaagttcattagacacatttttggccaagttatctacaaaggtagctgtttgcactgattcagtaatagaggccacagcaacactagcagttgccaagatgattatggctgagattattaaggctataagtgtgcctatgaatcttttgggtcagacctgggatagggcatattctaaggtggcaaggacagaggaaccttgccaatcgcacgtcarattgactggtaggaatgcctctcagattgtctccttaataccatgacactagtaatatttatattagatatattgtaattagtgatacatgaggtgaaccaagcctgtccctgcacttgggtcacaaatgtggagttttggcatgtagtgaaaatattagttcccataaaaaaacatatggatgagtagtgtaaatcaggcactgatctgtgtgattatgaatagcggtcacagtataa

SEQ ID NO: 774847 - DNA, 559 bp, Homo sapiens
tgtgtttcagtccctaccagttgacatgctcatataagttacccaactgtggccgcctttcctctgattacctgcattgcttgctggcagtcgacattagcattttcataagccaactgcaacaataagatatcagtaacctgggtgtgaatagtttgtctcttaattgcctgggttaaccagttgataaattcaacaaatggctcctgtggccctttttgaacatttataaaagatccctgttgaactctgcttttgggaatttggtcccaagctctgagagcaaacaaagacacttgtgcataggcctagggatcaaaatttagttgttgttgcacattggcrtggggacccatcccctggagcatagcagctgttatgacttgcccggccacttgattctgtttggcttgttgttcgcataactcatcatattctgccctccagaggaggtattggctaggcttcaaagttgttttagctatcactgaccagtcccatggggtcatatggaagttgtctgccatggtttcaattatttctttggtaaatgggctag

SEQ ID NO: 774848 - DNA, 582 bp, Homo sapiens
tgcactgtgttccactcctgaataatccaaatggtgtagttggtcatggacatcccttctgtgccagccagtatttctctgcttgatggataatgagggagattctgagtgactggggtagataggagactcaaaacagcatctgctcaccaacaggtaacacattttcccaattggtataattgtcatggttcacaccatcagaacaggagcctcaactctatatcaacccaacctcccattcatccccaactcagtaaggtagtgaattacaacagagagaggcaaccatctaaaacattagtagctgtgaagagttctggggaggttttttgcaggatactgtagccttgttaggtgtgmggaaggcaaggagtgaatgaacataaattgctacccccaaggcgctctgtttttctgacatatactgtacctccctcaccctatcccctatgctgtaagttccttcccctggaggagtaaagttaagatacagattttctatttttacttacaggtacaaatcctgatgtagctgataaattccggaaagaaaattgaaccatttatagaaaaagaaga

SEQ ID NO: 774849 - DNA, 648 bp, Homo sapiens
ccagctaattatttttgtatttttcgtagagacagggctttgccatgttgcccagactggtcttgaactcctgggctcaagccatctgcccacctcagtctcccaaagtgctggaattatatttgtgagccaccatgcccagcctttataatttaatggytattcaagtggtaatttatctacctctgtaatttttttctctaagctatgtttcagtttggatacttttgttacctcctcatatcatcaatttgttgttttaaaatgaaattattgtagaccctggttagaatttgctaatcattattattaagtacaaaaagataccacatactttctctattgaccatttcttcttgcttatttctttacagagtgccaaaaagttgaatgagtatcaccatgaaaaaaattgaatgtgcattgccacacttatatttggatctagacaagagcctcagtaaatgaataagaagacaacataaagtataagaagcaggaactcaccgatcactcacattattctctaattaaaggttcatgcttaccacactcactgaaagtccaagaattcagcccatatttatgacatgcaagcttttattcctagctccaaaccaaacatccacaaagaaacataatacacca

SEQ ID NO: 774850 - DNA, 611 bp, Homo sapiens
ttgtcaattacttatttctcagtgaaattaatgatataggttttccatattttggaatccatgtgtttgtgttcttagaaattcaaccaacttctatatttacaaatatatttttaaaattgtatgtatcattatcttatatttagtatctcttctatattttctaaattttttccattatgatgccctttgctttattattaactattaataaaatgctttaatcattttaatttcaaacattctaccctccaattactggttttttatattttcaattttcttcctttggtattctatatccataaatcatccaaccctgtaacatcttcaatctgttgaatctgccaaattttcactgaatctcactacattaacataattatttattattttttytaatttattttccatactcaattattattaagtattttgtgtatcactactgtctcttttttactctcttttattcacttacgtaagtcaaacatcggttatttctactttttacttactattttttgtctctcacaaagttgaatgtggctgcacaaagacacacaattttgctggttatttgcatactaaatttctgctcagacacttta

SEQ ID NO: 774851 - DNA, 602 bp, Homo sapiens
acacacacacacacacacacacacacacacacacacagtcaagagactcctagattagagacagacttttaatggctaatagaaaagcttgcattagtctcttcatgcctagattccgcatgagacaacaccatgaatgcaggtatcagcagtgtgtacattgatgtttgtagcataaaaaaggaattgcaaaattaggaatcgcagaatttatgtaggtcagctgacaaatctactacttccgtctgaagagaaagagaacaacccttaatctgaatgtaaagaaaccttcccaaggtagggaactagtctccaggtttggaaaccctagaatataaacaawtggcttcagggaattaggaagtgactattaattagaagcagatttcttttgggagtgacacaaatgttctaaaattgaaatttggttatgattatgtagctctgtgataacactaaaaccattgaattgtacactttaatatggtgcattaaattatctcaataaaattgttaaaagtaaaagctatgtcctccagtaggaatttctcaactcagggtcacagattactattggtgtggagtgaaatataacaaagaat

SEQ ID NO: 774852 - DNA, 593 bp, Homo sapiens
gtttcaatttatttgctgagaatttcaattttttattggtttctcgtgtgcttataattgttcattgaagcatttttatgacagctactttagaatctttgtcagataatctaacatctcatttctctcagtgttggtmtctactgatacctccctagctgaaaaagatatgagtgactcatttctgctccccatgcagcctcaactgacaccactgatatggggtgtgggccttcttacactgggctgtggtgaaatcctggttctccactctcctttgagactacactagcagagagcgggaggccttataactctgagttaggggtaaaaatccagactgaccaggtgatctttaaaggcaccatgtagtgatgggagatgcttgttactgcttggtggggatagaagtcctggctccctattcaactttctctgacaccacctgacaggtgattggggcacattcctgcaaggctaggctcccacttgaccttggctggtgtgggtagtggctgagccacagtttttcttgggtgtttggctggagtaggatggttattgcctgaaagttttctgtcttgctaggctga

SEQ ID NO: 774853 - DNA, 649 bp, Homo sapiens
ctcatgcatgcaatcccagcagtttaggagactgaggcaggtggatcacgtgaggtcaggaatttgagaccagcctggccaacatggtgaaacaccgtctctacaaaaatttaaaaattagccgggtatgatggcgggcacctgtaatcccagctactcgggaggctatggtgggagaattgctggagcccagaaggcagaggttgcagcgagccaagatcacgccattgcactccagcctgggtgacagaacaagactccatcttaaaaaaaaaaraaagaaagaaagaaagaaaaagataaagaaatagggaatagggacacctgtgtgtttttattgtaagtttgatggagaagtcgatagtagtggagaagtgtgattggacaaagagagtatgatctaattagttatatacaagggggaactcagcaaggcctgtttgttcagcttttcttctgcatccctgtgtcttcagagataaagacgttcctcccctccaggtaaagagtgggcacctctcacacaaggaccttatgccttgctccaggagaaagtcagcttggtttcatggcctgcttcaggaaaagaagggcaaggagaaggtgagagaggccttcctgcttctgccgttttctccaatgccaatct

SEQ ID NO: 774854 - DNA, 624 bp, Homo sapiens
tgggattggggtgctgaagggggatccaaaaaaaacagtcattgatttggaaggagatgctgttctccatctcagccagctgttaaagggacatggattgaactcccaggcagggaggggcattttgtttcccttggccacatcagcatgtttttacagttgagagagcaggasatgactctccagcctgtggcagagagaaagtgcccttggcccaactccgtggaagatgttccccaccccccttccaggagaagctcctgctggtggatgcacgaacccagctggtggcgacacaaggccagtgggcactctctgccttgctgaggcctcagcctcctggctgcgaaggccccgggttcccctctgcagccaagtctttacttccccttcaccctgaaaaacgtcttcacagactatcattcttggtctcttgactgcctttctccggtttcctttcacaatccctcagagatgggacatctctccagaggacgcctgggttgtgaggatctatggtcagaacattttggtcaatgacagattacatacaccacagtggctccctcagattataaaggagctgaataattcctatcaccaagtgacagtgctatgccatct

SEQ ID NO: 774855 - DNA, 599 bp, Homo sapiens
agaataaatatggatagcttcaaacataatatatgcattctttttaggaaagggagagatttttaaaataatatttctattagggaagttttgaataactcttctctgccgaaagttagacctatgtctgtttatatcctgaagttattgtcattcagtcgtggcacatgcaggtgaatttttttacttgatagtcttaacgtactttcatttgatgcaaactatagacagaaacattttacttttcatgacatttattgtgcattacagttttttaaatctgtctaaagagatcacatactgtaacttgggattgcttatttttgagaaacatttaagctgaagcttttaatacaaatatctcaaatttacttgagatctttattttggttaaactgttgacatagagttaatytttttattttataatttttaaataatacaatctttaactgcattgtttagggaggtacgacttgggagaaatggggtggaagaaatcagacagcatcctttctttaagaatgatcagtggcattgggataacataagagaaagtaagtcaataaacctaaatattttcattccatcacattctg

SEQ ID NO: 774856 - DNA, 578 bp, Homo sapiens
caccttggagccccagtccttgcagagactttcccagctgaatcttattatgtctacatgtccttatcaacctggtcaatcccaggagctcaagccacccagtccctttgccagatctcacccaacacagccttgtacatcctaacctggcttaggttctacccatgtcttccaatcctccaaacccttccactaggcacactggaaatcaacacagctcctattgcttcagtaactttcctgcatgcttttctcctcttctcacataactgaagcccattctctctgaggacttgccaccctgtcacgtggaggttattttatctcccmtatctcctaaaccagtgggtctggaggtgagatggggctgtcttgttcccattactacttccagaccaatctcctctctccttcagagtccttagctattgaggacctagacctgactcacttcctctccacaatatagactgtcacaatctgggtggcctcccagtgtcttagctcccttgactccctcacttatctcagccttcctctcccacagtcatatccccagaccctgtcattaccagaaa

SEQ ID NO: 774857 - DNA, 614 bp, Homo sapiens
aaggcctcagcccagagggactgtgctggtcccagaaacagcccacatagaaatggtttggacgattggctggccttgtaagggtggctggacgggggccagctggtaaaacatcgcggtggtgaggaaaggtgcctggagctaatgtgtatagataggagtatcattgtgccacsgggccaggcattccccacccagctgacctgattatggatggaggacaagatgctgctgctgccagcttccccagacccccagaccatgcagcacttcctggcctcagacagttcctcctctatgaagatttgtccaatcagagcagccacaggctgccccagcctctctgtattcacatcctggaccttcctggcctgacaccctcaattttatactgcatcttgtttgcttccataaatgtcatcctgtgtgtcagatcacatgtccccctttttttggtctcagaaaataagattgttatatttacattacttcattgagttttattttgtggaaggcagagggagagcgtaagtaatgagtttgttgtgtcttgctttccaacccattgtagatttcctattttttctttcctgttgtaaatgttaatcaatcaa

SEQ ID NO: 774858 - DNA, 613 bp, Homo sapiens
ggggtgtttttttttttttttcccttgagacagagtctcactctggcccaggctggagcgcaatggtgcgatcttagctcacggcaacctctgcctcctgggttcaagcgattctcctgcctcagcctcctgagtagctgggattacaggcacctgccaccacacccggctttttttttttttttttagacggagttttgttctcgttgcccaggctggagtgcaatggtgtgatcttggctcactgcaacctctgcctcctgggttcaagtgtttctcctgcctcagcctccctccggagtagctgggattacaggtgctcaccaccacacccagctaattttttgtatttttagtagagatggggtttcactgtgttggccaggctgrtctcgaactcctgacctcaggtgatccactcgcctcagcctcccaaagtgctgggtttatagtcgtgagccaccatgccctgccctaatttttgtatttttagtagagacgggcttcaccatgtcagtcagactggtctcgaactcttgacctcaggtgatccaccccgctcagcctctcaaagtgctgggattataggcatgagccgccgcgcctggccgag

SEQ ID NO: 774859 - DNA, 613 bp, Homo sapiens
ggggtgtttttttttttttttcccttgagacagagtctcactctggcccaggctggagcgcaatggtgcgatcttagctcacggcaacctctgcctcctgggttcaagcgattctcctgcctcagcctcctgagtagctgggattacaggcacctgccaccacacccggctttttttttttttttttagacggagttttgttctcgttgcccaggctggagtgcaatggtgtgatcttggctcactgcaacctctgcctcctgggttcaagtgtttctcctgcctcagcctccctccggagtagctgggattacaggtgctcaccaccacacccagctaattttttgtatttttagtagagatggggtttcactgtgttggccaggctggtctcgaactcctgacctcaggtgatscactcgcctcagcctcccaaagtgctgggtttatagtcgtgagccaccatgccctgccctaatttttgtatttttagtagagacgggcttcaccatgtcagtcagactggtctcgaactcttgacctcaggtgatccaccccgctcagcctctcaaagtgctgggattataggcatgagccgccgcgcctggccgag

SEQ ID NO: 774860 - DNA, 612 bp, Homo sapiens
tgggtgagaccaaccttgatcactgtaggatcccaagccctcagagtggggccaggcctctggggtaggccctcggtcatgggcccaagttgcaggaggactcacttgttataggacgcatctgattcttctgcaagggagattcgtgtccagaggagagccataacttgctagggctggagtcgattccccgtccacacccacctcctcttatatgtgtgtgattcttcagccactgktacatggaagcagagatgaaacattgcctctggtatgagaatacagtccttcttacactgctgcaaaagtatgaattggtaaactctggtgggggttaatttggcaatacatgacaaaagccttaaacaggcaatgctttcccccaacaactgcatttccaaaaatatattcacaggaaataatcaaacagcatttgaaagtgaatgtacaagggtgcttttgtattgttgattatcacagcatcagaacactgggaaagctctcgacatccaccaatagcgttggttagtaactgagggtataaccatgccttggagtagtagataaccattcagaatgatgctgtggtgccatatgtgttaacacggacgc

SEQ ID NO: 774861 - DNA, 578 bp, Homo sapiens
ttctctatgttgcccaggctggtctcaactcctggcttcaaacaatcttaatgcctcagcctcccaaaatgctaggattacaggcctgagccactgcacccagctggaatttgtaatctgaaactggcacttatgcaggtttgttttctgaatttatgatttacagtctgaaaattcttctgtaaataattccttttaaaatgcactttgacagtagtatccccaaggaaatagtattttgaaaacaatattggtgagctcaatttcaatccaggtgacagatatttcacaaaattatattccaagaaaaatatgtcaataatccattataaaataatacacacacatgaacagggtactatgaatgagaaacagcaacaaaaacagataataraaagttacctgcaaaaactataattatcagatataaaatataaaacaattatatatgttttaaaaaataacagagtttaaaaatttgcatttttttcttttataaataacctttttttttggctttttggtgtttatatacagggtataaatataaacctgtgacccaaagcgtttcactgtga

SEQ ID NO: 774862 - DNA, 553 bp, Homo sapiens
aagagttgaactttattagtgttcatggtgaggcattatagtaatttgtggtaggttcatagtatggtccccaatttcttgttcccatcttatcctggaaagggaatatatactttcattcacaattagataatttgctatagcctgttagtataagaagtataatccaaacacagcattgttagttctgrccacgtgatatagtttggccaatgtaacctgagccgaggtaatatgcaccacatccgagcacaatctttaagagagatagcacccagttctgccagctctcctgtccttttttgtcttccataagaatattatgtcacaaatggtggccagtcctttatcatgtgtctgacttaagaacacacatagcacaccaaacaaccatcacaggtgaagtgagcaagtaatacatgtcaatgaaaagtcagatattggttaaaatccactgtaatttttggactgtttattaccgcatcaaagctgactaatacagtgtttattaggaaaagtaaataactcaaacaagtcaaaaaagggaatatct

SEQ ID NO: 774863 - DNA, 603 bp, Homo sapiens
agaaaactagggaaagagatagctaagaagagttcttctggaaccagaataagctgcaaatcctagctgcaaagtctacccatgcaaagaggctcagatcagatggaggcacaatttatgctccatgatattatttaaaaatctgtagaccaataatctaacaactagtgtataataattagtaataataattagtaaactaatagctaagtgtgataccaacagaggcagataacttaaaagagagttcaaagatgcagtcaaatgaagccctactagagccatcatcactctctagtgaatgtgcccatgccygaggttcggctctctggtgaaggacaacagagaatacacactgcatgagaaatgctgaaatatagtccagtaagtcactaaggcaagcaaacaacaacacgaaaaaaaccctggagttaggaatggattgtatctacagataccgcattttaaaaaaagcaaaataaaaaaaactaaaatgtttggttttcaataaaatattatgaaacatcaaaaaaaaaaaaaaaaggaaaatgtgacctatacaaagaaataaatcatgaaagagaaatggcatttaggagtgtc

SEQ ID NO: 774864 - DNA, 625 bp, Homo sapiens
agattttaataattcagtatttcattgtgagagaaaaaaacttagataccaaaattaccaaacttctattatttaaggcagctagttgattgtgaccaaaagttagaattttcatatacgactgaaagctgcagagaaagttagagtgtgacagccacttcactgtggacgcatcaatgtaatttctgagctagaattataaaactacaagctatggttaaagaaayagtgatgtttgtaacaactaacatctaaattgtgattttcctttattaatttaattgattgtttatttctggtgcaatgcaagagttcctgaaatctttcagacccctgtggtttaatataagtctcaaaataataaaagcatcttgttgaagattagaaagcaaatgagacacttcaagactcaagataatttaagatgtgcaaattttaaagcgacttaaacacaattaccctctgcttactctaaaaaaattacctctttaattttttttactttatgataattgattttatagctaatttgtaaataatctttgccttgaaaaagttggccagcaaaaaggcctgagacctaacagaatttttaaatatcatgccacatttttcagttatgttc

SEQ ID NO: 774865 - DNA, 553 bp, Homo sapiens
agcttttgagagtctcataatacaggtgaatactatggagtttggggactgggctaccaaagagaaagggctcaggtagacacacagattctcaactgcgaccccagaaaggggtcacttgaaatatcttagtcctgggtagataaaggtgatctgccccaatttaaactgcttgtcagaagtcaatcatctttggargaatgtaatattatctggagtttctaatttttgtttttataaacaatgtccatcattaagtcaagcattaacaaataacagctccaaatcaacaatgtaaaggaaaataaagagataatgttgctgatatagaaatcaaaaggatggaaaatatagcaaactctgtgagagatacttaggacttcaggaaatttctaatataagcatgaacatttaagcaataactttgacacgctgctgaaggcaagagtatggaccactgtgagagtaataaaatcttgggatggcagtattggaaggggcttccataattgtgtggatcttacctcctggagactcagcaagttctcacaat

SEQ ID NO: 774866 - DNA, 645 bp, Homo sapiens
aaactttcagttacacctcttgacttctatccctccggatccggcagggtgtccactgtgctcctgatccagcgaggcgcccattgctgctcccaatcgggctaaaggcttgccattgttcctgcacagataagtgcccgggtttgtcctaatcaagctgaacactagtcaatgggttccatggttctcttccatgacccatggcttctaatagagctataacactcaccacatggcccaagattccattccttgggatctgtgaggccaagaaccccaggtcagagaacacgaagcttgccacaatcttggaagtggcccaccaccatctytgggagctgtgggagcaaggacccctggtaacattttggtgacccagatgggaactccaaagcagtaagtaatattggaccactttcgcttgctattctgtcttatccttccttagaattggagtaaaataccaggcacctgtcggccagttaaaaacgattagcatggccgccggacttaagactcaggtgtgaggctgcctggggaaaggctttctaacaacccttctgggttgggagcatttgtctgcctagaaccagcttccactttcaattttcctggggaagccaagggcctactagaggcagaaag

SEQ ID NO: 774867 - DNA, 618 bp, Homo sapiens
ctccatttattcaataaatatttattgaactacattgtattagtttctatatataaaggtgattatttcaaagacttctttaattaattaattaatttagagacaatgtgtcactctgttgtccaggctggagtgcagtggcacgaccttggctcactgcaacctgtgcctcccgggttcaagcaattcacctgtctcagcctcctgagtagctgggactacaggtgcgtaccaccatgcctggctaatggtttgtatttttagtagagatggggtttcaccatgttagacaagatgatctcaatctcctgacctcataatctgcctgcctcggcctcctaaagtgctggattacaggcatgagtcaccgcgtctggcctttaaatttcttacatttactacacagcccttctacattcttttgggcgggggkggggggggggggactagctccaaagagatttctctattgctctaataaatccattcttctagctaaaattggttatcttctgttgctcagtttctccaactctgcctcagtgctcctgtcaagaacgcctctgccatctcatctacaataatctatcacttaacaatggggatatgttctgaggc

SEQ ID NO: 774868 - DNA, 628 bp, Homo sapiens
attttaggaactaaaaggagttcaattttgttggagcagaatacaagaaagagagtggtgagagatgaaatcagagaacaccaaatagaggcctctctttggaagatttctaaatatttgttagaactttatcctcattgcrtttaaatagtagttattaatttttaatgcagataattttaaaagcaaataaagggatataatccaactatccaaataacttctgttgatattaaaacaaatgaacaaagctacatgtgaaaaataaaaattttcacataaggcagaaaagaataaagtaaaaatgaaagcttctatctgtcagcctaatcaaactccctatatttaactgtcatttaaagttttgttgagttccttccaaggtgggatataggaatatttatcaatctaattaattatctacctatctatcaatctttatttctgtgtattattctgctctatttctatacatcatggtatattttgaatattatttatatgaacacacagcattatctaattttctaacagctatgtattactcaattatgtggatatgccagtaattaagttattttttcttggtttcaaacctagtcttctaaaactccttatgatgcggtag

SEQ ID NO: 774869 - DNA, 608 bp, Homo sapiens
acaggagaggacatggatgaaggagtggcttgattcatgtcttcaggtgtatgagttagttgaagatcacttgttctccatgtttgaggatgtaaatgaaactagaggaagaacattattgaccatcagaagggaagctgatgtgtcttatgccctagagatcttcaaaacagactcccatttactcccttaagacatctgttattttaaatatctgaaggtagaagacaagwccaaatgattccgtgagattctaatattgtgattttgtggtactaaggatgtgtggcttataagtatacctatctttattgtagacatttttttctttcagaccaaagttttcaatatctctgaaaactcaatttcattctaaatcagtcgtcagtttcatatggtttctcagagccccttgcaagatgctgtgcttaataacttgcccattaaaattgaatcaaaccttgagacagacagtgctgctaagggagccacacgttgttcccacacatgctaaggaataatgggaaacagataatcattaacagatgtaccttcttcccaccttcatcgaaagcatctcaggacacaagagagcctctgatcattgt

SEQ ID NO: 774870 - DNA, 628 bp, Homo sapiens
ctcttcatctgtaaaatcaggatactgcaggcattcggtgcgatgcttgatgaatagtaagtcccaaataaatgttacctgtgatttcagtggtgatgatgttcaatttgaaactgtattctagatatccagagttcctaatactaaattaaagactttttttttttcttggtaactgggctttctgtgggtttgggagttgtttstttttctctatctcagtacttttgatgcataaggaaaagtcaaagcttaactagaagttttggcattgagaatgaccttgttcttgtgttgaagtgtctgaaaaataaaaataaaaactccccctataaaatcccagtcagttgctgctgctggtcctagggcaggctatctgtgtcgggatgccgagcattactgccactataatcactgaggcatctgccagagatctcatggctgaaaactaggtaggaaagtctgtattatatctaataatagctctggaaattttcctgaaatatttgctggcaactcccaggcttgacagacatagattactataactagagcaaggacatcatttctcctcttgctagtgagtatgctagagtactaatcaaaataataactagaaattacttgc

SEQ ID NO: 774871 - DNA, 592 bp, Homo sapiens
ctaaagagcccttgggccctgaataatcagcagtgacccaggtagtacttgccgtgggccttgggtgagactcagagatgggccttgggtgagactcaaagatgtgctggcttcaggtgtgatccattacattcccagctgtggtcgctatggagagacactcctgcttgagaaaaggagagggaagagtaaaggagactttgtcttggagcttaggtaccagctcggccacagttggtagaacaccaagagggctcttgggtcctcagttccagggtttggctctggaaaagcatttctggaccttccctgggccataggggagcccattgcccagaagggagaatcccaggcttggccgcattcaccatgagatcactgaagagctcttaagatttgagtgaacattggcagtagccagccgatacttgttgtggatataggacagtgrtggctacagggagagactcttctgcttatgcgaagggaaaggaagaatgggaaagatttttttcttgtggcttggctttcagctcagcctcatagcatagaacaccaagtagattcctaaggtttctgactcagatcctgg

SEQ ID NO: 774872 - DNA, 662 bp, Homo sapiens
cttattattaggagaaaatagaagttaaatgttcatagtacccttgatcttcttatgaacagaagacttgaaacaagcctgggcttggagggaattttttaaatcttctcttttttcctgtgcttctgggagtgatgtttaagttctgccatctgtaggacatgtgcattttaaaccttttacttagagcttcagctttttgggaaagtttttatttttgtttatggtacctaaacaacagaaattagcctccatctgagatagtctctgcattattaaaatgcagcttgttgtgcagtgttttaatgggctctttaaggtctttacatattaatgttatataccaagaactattaaaacattccaaataaaacagattcatcagttaagtgctctgttttactgtggtcatgaaygaaaaggacaaactagttatcgtcatggtcacttaaaaaattgtaatctattccaaagacagttttctcataaaaagccacttagtcacataattctggggaagtcctagagagtttattactctctcatttttattcatatgttttagaagccaaataaattaaaacaatttaacctattataggttattttatgaaatatttagagtaacttcttaatctgagacaagtatttcttctgccaac

SEQ ID NO: 774873 - DNA, 581 bp, Homo sapiens
gcaatttttcttgtatgctatggatggtgcaaaagatattttattagtgtaaatttgatacctccttatatcagcaaggcagcataacatagtggtaaaagtatggactctagagccaaactacgtgtgtttgaaccccagctctgacgcttgcctgctttaggatcttggggaagatattttgtctttctgtgccctgtttcctcatctagagaatgcaggtaatagcaagttcttcctttactgtgttaatttgaaaattgggtgaattaatatacataagtgtatagaacagtgttggtgcataataaatgttatgtaagtgttagacattgttatacaaatgagtaaagatgactaataaactctaggtgttagatggtttaaaaaataagttagtttatcctcagtttaggrtaagtgtttaaatagagtttattctcatattggtcttaagaaagctctagctaagacctctgccattccttctgtcctcttatatcaaatctgagtatcaattaatggcttcactgacatctgtgggctgaggatcctcacatacctgtaaatggaaatgtgta

SEQ ID NO: 774874 - DNA, 600 bp, Homo sapiens
aaaattttcaaggtagctcaatgcaagtcacaccaccatattaaaaaataaaggaagaatgaccaaaaccacattaaaataataataaagcataccttaaatctgcaaatgtgacagtattcaatgctgcactgagctcaccgtgttgttttttaatctcatacatttagttctctgttggagaaacrcataacactgggtgatcttacctttggggttgtaatacagaatcatgatgagatgatggacattttatgatgaattctcttgcttctaggagtttaatgctgagttagaatgttaatttaactcattctttttgtttaataagctcaaaatcccagctgagcccaaatgggagtgattttatcttatattcaacatcagcttgcagaactgaagcatgaaaggtttgattaatattatgatcagctgactattgattatctagctattttccttctgtcttctaattggtccaaattggctggactgctgctctttgaaatatgttcttctttgcatttcaagatgatgctattggattttcaccaagtcatacatacccttttcctattatgatcagctgcataattgctg

SEQ ID NO: 774875 - DNA, 611 bp, Homo sapiens
  misc_feature 596, 601, 602, 603, 604, 605, 606, 607, 608, 609, 610, 611: n = A,T,C or G
cagaaaatacatcatccagacagaaaatcaccaaaggaatgatgtttcttaacctgcagtatagaccaaataggcctaacagatatttataaaatatttcatagtaatgactacagaatacgcattcttctcctcagcacatatatcactctcaaggatagcttatgtgttaggttataatataagtcttaaaacattccaaaaaattgaactaatatcaataatcttttctgaccacaatggaataaaaaatctgattaaaaaataggcaaaaaaaatctcaatagacaattctccaaagaagctgtacaactsgcaaccaggtatatgaaaaggtgataaatatcattgacaatcagagaaatgcatatcaaaactacaatgagatatgatctttccccagttaaaatggctcttatctagaaggcaggcagtacaatttctggagaggatgtggagaaaagggacccttatacatgttagtgggaatgtaaattagtacatcccatatggagcacagtatggaggttacttaaaacactaaaaacagagctactttatgattcagccatctcactgctagatatgatctctanaggannnnnnnnnnn

SEQ ID NO: 774876 - DNA, 611 bp, Homo sapiens
  misc_feature 596, 601, 602, 603, 604, 605, 606, 607, 608, 609, 610, 611: n = A,T,C or G
cagaaaatacatcatccagacagaaaatcaccaaaggaatgatgtttcttaacctgcagtatagaccaaataggcctaacagatatttataaaatatttcatagtaatgactacagaatacgcattcttctcctcagcacatatatcactctcaaggatagcttatgtgttaggttataatataagtcttaaaacattccaaaaaattgaactaatatcaataatcttttctgaccacaatggaataaaaaatctgattaaaaaataggcaaaaaaaatctcaatagacaattctccaaagaagctgtacaactggcaaccaggtatatgaaaaggtgataaayatcattgacaatcagagaaatgcatatcaaaactacaatgagatatgatctttccccagttaaaatggctcttatctagaaggcaggcagtacaatttctggagaggatgtggagaaaagggacccttatacatgttagtgggaatgtaaattagtacatcccatatggagcacagtatggaggttacttaaaacactaaaaacagagctactttatgattcagccatctcactgctagatatgatctctanaggannnnnnnnnnn

SEQ ID NO: 774877 - DNA, 575 bp, Homo sapiens
ttaattatataatcaataacattttcacatggaaacacaaaacaaaaaatattatatttcagaatggtcttaggcttgattaattcactagtgcaaaccaaaacatctgatttctttcttttttttttttttttttttttgagatggaatctcgctctgttgcccaggctggagtgcagtggcacgatctcggctcaccacaagctctgcctcccaggttcacgtcattctcctgcctcagcctcctgaatagctgggactacaggcacccgccaccacgcctggctagtatttttgtatttttagtagagacggggtttcactatgttagtcaggatggactcgatttcctgacctccttatctgcccgcctcrgcctcccaaagtttacaggcttgttaacttacagggattacaggcgtgagccaccacacccagccctaatttcattcttaaacttcatgggagtcattaaattatagatttgtgagatctgtgctcttaaataggtggccatttacagaagaagagaaatcaaagaagacacttgatatagtctttcgtcttaccaaaac

SEQ ID NO: 774878 - DNA, 596 bp, Homo sapiens
aatgaggtacaaagtttcattaaaataattagtaacagaatagactctgaaaattctataaaatgtttagaaatgttttatgctttctcaagaactattcacaaatgtaaagcaaactgtctccaaaatgttaatggatgtcaacaatgtataaaacttatgaaaataattacagaaatgtttaggctgaaaactggtcttcttatgaaagtccaattctatgctaaacagtctcacaagtgctatctcatttaattatcycaattctgtaaagtagatattattaactttaccaatgaggaaactgaagcttaaagggattgtataacttggctacattttacacatttagtgaaagtatttagattcaaaatcttattctttgaatataaatgaaatgttttatatattatgattctaaataaacttaaatgaacctacagctattaggtttatgataaattattaagattgagagctatacatgtaaaaacattgttttcctcaaaaataaccttaatatcactgttttttgggtgtagaaattactgaattactggattaagtggtcataaatttgctagcaggacattaac

SEQ ID NO: 774879 - DNA, 620 bp, Homo sapiens
tatggaattgcattagtcagggttctctagagggacagtactaataggatagacgtatatataaaagggaacttactaaggagtattgactcacatgatcacaaggtgatgtcccacaataggccgtctgcaagctgaggagcaaggaagccagtctgagtcccaaaacctcaaaaatatggaagctaacagtgtagccctcagtctgtggccaaaggccagggggcccctggcaaaccactggtgtaggtcytagagtccaaaagttgaagaacttgcagtccgatgttcgagggcaggaagcatccggcatggaaggaagatggaagacagaagacttagctgccagtctaggccttccattttccttttcctcttttatcctagccacactggcagctgattagatgatacccacccagattgagggtgggtctgcctcttccagtccactgactcaaagttaatctcatttggcaacaccctcacagacatacccaggaacactactttgcatccttcaatccaatcaaattgacaatcaatattaaacatcacaggaatcgaggctcattctcatattatgttcacatagaagatgaaaagatagagaatcttcc

SEQ ID NO: 774880 - DNA, 605 bp, Homo sapiens
gatttaatatgctgaaccattcttgcatcatgggaataaacatcacttgatcatgatgtaggatcctgttaatgtgctgtttaattatgtttattacttgcatctatgatcacaaaaaaaatggtttgtatattttttttcttgtggccttgtctgcctttggtatcagtgtaatgctggcctcacaaaatgagtttggaagggtcacctyctattcaagtttttgaaaaagtttgaaaggattggaagtaattcttctttaaatatttggtagaatttaccaggaaagccatcaaatcctgtgcttttatttgatggaaatttttttattattgctttaaggcccattaatggtgtgttcattattggtctgttcaaattttttctttctttccaattcagtcttggtagtttggatgtttctaagaatttatctttttttctgagattatccaatttattgacatataattgaccatagtaatttactttgtgtttgtgtattaccagttggaatgtatcccagtttatatctactttttaaaattgtcttctttctctttttttagtctacttaaaagtttgtcaattttgtttatcttttc

SEQ ID NO: 774881 - DNA, 668 bp, Homo sapiens
agcaacccaaatgattcctagtcctgtgagaactgaaaaaaaattgcagcttacaactatccagtaatatctccttctctagtagcttttctatgtttagccttatggaattgtatgttacccattgtcatattgatattcaaagactccagcatccctttgactaactctatagctctttctctrtggcatttccttctctctgtatgctatccccaaattttagacatgttgacatctctagaatccaagaacattatctccaacatagaaagaccacttggtgcatgtgtatttttccaacttaaaatatggtttggaaattctctccagaaagaaatttgagggcatttttgggctcattttctgatgtatatcagtattaaaatgtctgtttcacagtgactgaaaagagctttcataaactttgccatgttttctagttgttttaggcagtaaagttctgtagcaattagttcttcatgtctggaaacaaaattatcctttaaaagtatgattatcgttccattcactctagatcttaacttctttgctgcttgaataactgacccttaaaaaatcatttttgtcctcctgcattttagtattcataatgttgaacgttaagttatgcaaagcaaaacttataaagacctatactgcataat

SEQ ID NO: 774882 - DNA, 589 bp, Homo sapiens
taaaatcaacctatttgttcatacaaattatgattatgattattattatatatctgtaaccaacccccaaattcttgttctatctctctgactgacttatacatatttttctgaattcatggtcttatcttgtttggttcctactgaaaaaaaccaataaaatactcccccgatacagtagatttgcctcaygaataatatcacacaaaggaataattacaacttgatataagaatgtatgcttgtttcatcaaaatgtaggcctactttcttattcattaattaggaagccagtgttcagataagttatttactctggatatactagctgacaatataaaaccagaatttgaacttgaagacaagatttttatttcctattactagcatatttttaaatgtaaaaacataatttaaaaagaagaggttccttaatgttgcacacataaaaattaagatcaactgttttctcatcatataatattccactgctctctgttcaaatgcctgttatgagtaaccaaagtaaatattattttattgtaatatttgtataataacatcctattattttcattccaatgacttt

SEQ ID NO: 774883 - DNA, 516 bp, Homo sapiens
ctcagtaacacggagttttttttcattatatataattttttttacaattatattttacataagtgaatcatttgttatatttatctatgtatttccattttcagtactcatgatttctttatccttttgaatagatccaaatttcctttagatataatttttcttacattagaagaacttcctttaacatttctcatagtgaaggtctcctggttatggcttctttcaactattaaacatataaaaacttaatttrttttttgttgcctatgagaaatatgctttgtttctctgtacctaatgtgtcttttgcttaaaaaggtctgcttttaagactttccctttatcactaatattaagcaatttaattatgatatgcctaggtgcagttttcttacaattctagtgcttgatgtcagtttaacgtttttatcaaattggttgatgccaacttctatttattcatgtatttttctgccccatgccctgcctcttttccagggaggctccaattac

SEQ ID NO: 774884 - DNA, 567 bp, Homo sapiens
agctctggaaagccaggagcaagttcttaaattccaatgtcctctggcgagggcatgtcctgctggtttcttatttaaacaataggtttgaggatcttggactcatttaacttattgataggggaaaatggatcagggaggatgcccaagctggcaagggcaatggtcaagaatctgtcattctggcccctctcaggcgcttgccttacctctcctctctgcactgtgtcccccacccagggggaggggcytagggcactatccaattaggggttctgagggcggggccgtgccaacagtccaatcaggcgtgctgtagggcagcaggcggggcgacgcgctaaagcccgtgggtttgggttttttttccctctcgccttggcccctcgggtcgctctcggcttctctgaaagtgctgagggtgtgtcagctcagggtgtgtcgcgatttgccctgctgtggccaggagagccatcaggaggatgctgggacaccctggagtccaggaaatggtgagtgtgccgggctggggtcccgacacgcgggaggaggggctggctgggaccg

SEQ ID NO: 774885 - DNA, 484 bp, Homo sapiens
gtgattctcctgcctcagcctcctgagtagctgggattacaggcacacaccaccatgcccagaaaatttttgtatgtttagtagagatggggtttcaccatgttgcccaggatggtatcgatctcctgacttcatgatccacccacctcrgcctcccaaagtgctgggattacaggcatgaccaccgtacccagcccataaactactcctgtcctaagtagaaagacttaaacagtgaacaactcaaaaataataaacataatttttcaagacatagtacaattagatataaatagaaacaactaaaagttaaaagggggtgaaccaagttgtagagtttttattttctttttgcttgtttatgcaaatggtgttatcagttcaaaacaatgagttaaaatatagtatttacaagcttcatggtaaccttaaaccgaaaaaacaatggatacacaaaaaataaaaagacactgaatcttatcac

SEQ ID NO: 774886 - DNA, 601 bp, Homo sapiens
ctgtcctgagaggttggcagtcatcctttcctctgctcctgctgaatggccctctactaaagctcagggtgttcctggggtctcataacagctctgtcttgtctctgcctcaggcctagtgatgtgctttgctccctgctgttggtggactgctcctcttgtgggtatatcacaggctccctgtaatgctattggttctgtattttaaataataatttctctcacttaactacacttttgagtgttacactcttccttcctgatctatgtccaaaacagaagtctcaataacatgcaaagatgcagtgtgttaagcaaaagtggaagataaygagaccatttcaggtagattcatatgctgcagtcctacaatggtgtatggttaacataggaaaatgaggccattggggtgacttagctcaggttgtgctaatgaaatgccatgggctgagcttctcaaacagcgacattattttttattttttaaacatttctccagcatgagatatctaaaatctagctgccaggcaatatgattcctggtaaagaccaagttcctggctgggatatagacaccttcttgctataccctcatatggaa

SEQ ID NO: 774887 - DNA, 612 bp, Homo sapiens
atagcatgggccatctgtgccttaaggacaagttcctgctgcagataactagccagagcccttccctttgtttcccgtaaggaaggcttttagttagtctataatctatagaaacaacgcttatcactggcttactgtcaataaatatgtgggtaaaactctgtttgtggctctcagctctgaaggctgtcagccccctgatttcccactccacactctaaatttctgtgtgtgtgtgtctttaattcctctagtgccgctgggttaggctctccaygactgagctggtctcggcaccaagggggtcagattgcttaaaggcaaggagttcaagaccagcctgggcaatgtggggagacctcatctctacaaaaaataaacaaaattaggtgggtatggtggcgcatgcctgtagtcccagctactcaggaaagtaggagaattgcttgagcctaggaggttgaggctgcagtgaaccacgattgtgccactgcactcaagtctgagtgaaagagtgacactatttcaaggaaaaaaaaaaaagacatatattagaccatctaagtcccaggagaaaaggctagggtataatttttctttacaaataagcat

SEQ ID NO: 774888 - DNA, 536 bp, Homo sapiens
caaatatttgccatcctgagatggtaaaatgccaaaagagctctttccagcagaaccattccagttaaccttgggacttgctgaccttgaggaacaggttaagatttgcagtttacaggccaggcgcgttggctcacgcctgtaatcccagcactttggggggccgaggcaggcagatcacctgaggtcgggagtttgagaccagcctgaccaacatggagaaaccctgtctctactaataatacaaaattagctgggtgtggtagcrcatgcctgtaatcccagctactagggaggctgaggcaggataattgcttgaacctgggagacagaggttgccgtgagcctagatcgcaccgttgcactccagcctgggcaataagagtgaaactccatctcaaaaaaaaaaaaaaaacagatttgcaatttacaataaagtgcattaaagtccacaatgatatgatgaattttcacatgattataaaatgtataaaaggttctcagcagaggtttcctccaaaagaacataaaatgcc

SEQ ID NO: 774889 - DNA, 536 bp, Homo sapiens
caaatatttgccatcctgagatggtaaaatgccaaaagagctctttccagcagaaccattccagttaaccttgggacttgctgaccttgaggaacaggttaagatttgcagtttacaggccaggcgcgttggctcacgcctgtaatcccagcactttggggggccgaggcaggcagatcacctgaggtcgggagtttgagaccagcctgaccaacatggagaaaccctgtctctactaataatacaaaattagctgggtgtggtagcgcatgcctgtaatcccagctactagggaggctgaggcaggataattgcttgaacctgggagacagaggttgccgtgagcctagatcgcaccrttgcactccagcctgggcaataagagtgaaactccatctcaaaaaaaaaaaaaaaacagatttgcaatttacaataaagtgcattaaagtccacaatgatatgatgaattttcacatgattataaaatgtataaaaggttctcagcagaggtttcctccaaaagaacataaaatgcc

SEQ ID NO: 774890 - DNA, 490 bp, Homo sapiens
  misc_feature 71: n = A,T,C or G
ttttaacctttttccaaagattatcaggaccatagctcctgtcaaagaaggtataaaaaaaagtcatcatnaatatgatagtaaaccatacgtgactgtgtggtgtatcaataggagagcgctcaaaagaatttctttttttttttttcttttttttttgagayggagtctcactctgtcggccaggctggagtgcaagtggcacagtctgggcttactgcaacctctgccttccaggttcaagctattctcctgcctcaccctcctgagtagctgggattacaggcacaggtcaccatgcctggttaatttttgtattttttatagagacggggttcctccatgttggccagggtggtctcgatctcctgacctcaggtggtctgccagcctcggcctcccaaagtgctgggattacaggcgtgacagccacacccagcccaaaagaatttcttctaggacgtgtgcttgcttcaggtgtattgattgc

SEQ ID NO: 774891 - DNA, 511 bp, Homo sapiens
gattagtggggaaacgagtgaatgatagggttgagaactcaagagtgaattttagcaagcagagatataacaggcactggcaacttttggcaattcttgctacattatttttggcataacacaatgcgatgcatatgcaattactgcattgwctttcctattcctagcaaaagaaaaccttgtaaattttagtgtcatgtttatcaagtgtcattatgaactagcagagtggttattgttatttttgtttttcttatttttattttggagagggtctcttaagcttgaacggtttcatgacacaagtgtaaaaaataactttagtcttgtgaatgttcttaaaagatcatattcactaccatgagctggaggaaatttgttttggtcaaacttacttaacattttgagtaaagtttgctaatcattgaatatgttataatacactttcaaatattctttatttctctgggacatttcaaagacaagggactttggtttggaattataattg

SEQ ID NO: 774892 - DNA, 608 bp, Homo sapiens
gaatagatattatgaccatggcattatgctaggttttgattatgtaaatgtgactcccctgatctcttcctttgagatgcttacagtttattggtagggacagaaacattagcaagcattttcagtacaatttgatgaatattataaaccactcgatatgggttcctggatatacttagttccacctagaagagggacaagcagactaataataaataaatacaaggaaacaaaaacggtgactagaatgaatcttgaaagagaagtggaatttggaaggacaaaatacagaaaacatgatctaagtaaagaaaaaagcaggaacaaaggcaggtcagtaatatatattaatggagagagcaaacaatttactcatatgcgagcttaaggaaggaggacatactgtcagaggaatataaagttatgttttayccaactctaatgtttttaataaggggcagctttcgtttcagttgagtttaaggaaattataaaaatgtaagagtataggtgaaagtaatttttgatcatttatgaccccaacatgaaaaaataatgtctattaacattttgaaatattttcagttttttgtgaggaagatgttcac

SEQ ID NO: 774893 - DNA, 579 bp, Homo sapiens
ataacaaaaaagaaaactataggccaatatccctaataaacagagatgcaaaaatcctcaacaaaatagtagtaaacagaattcaacaacacattaaaaagatcattcaccatgatcaacagggattcatcccagggatgcaaggatggttcaacatatagaaatcaataaatatcatgtcatacgacaaaatcaaggaccaaaacacatratttccatagatgctaaaaaagcattcaataaaattcaacatccttcatgataaaaaaaaaaaatacctcaacaaatcgggtatagtaggaacacacctcaacatgataaaggccatatatgacaagcctatagctaataccacactgaatgggaaaaaattgaaagcctttccactaagatctggaacaagacaaggattaccactttcaccacttttattcaacatagtactggaagtcctaaccagggcaattaggcaagagaaagaaataactggcaactaaaatggaaaggaagaagtcaaattattcttgtttgcagacaacatgattttatatttagaaaaacctaaaggttccaaccaaa

SEQ ID NO: 774894 - DNA, 553 bp, Homo sapiens
tttccctatcttttctgaccatgatacttttgaagaagcttgggtcaggtgtatactctcacttttgaaaaagcacacaaatctcatgttcagctttaaggatgtatgaaattttaaaagtcaataaaattccatgaccgcagtgaaaatagttctcgtattgtatgctcttcccatcatatatgactgtctaaagattgcgaactccttgcctgaggcatataaaccctctttcttacatggaaaacagctcctaggctgatctgagcttctgtttccayatccaataataaaggggtagtggggtggactacataatctacactctctgccttggctctaaaagtagatttcataaactaaatttcatggacttaaaaatagaatttttgctccttaattcttgatcaaatttctaccttaattttaagggaaacactattaaatcaatatcttttcaagtctaaaacctacactttttctgtctctgggcattcctctccccgtctctccacttcaccaggctcaagactgtgggaggacagcgggtgag

SEQ ID NO: 774895 - DNA, 601 bp, Homo sapiens
gcttgccaagcacacacccacctcagggcctttgctcctgctcctacctgtgcctggagccccatgatcagcttcctcagctccttcagatctctgctcaaacatcacttttgcagcaaggccttccctcacctgttagcatcctcattccaggtactccccattcccatgactcgagttagttttctccttgactctcccctacctaacacatgctaactgctgctcacctgcctgcttggttctggctccctacacagaacagtggttcattgctggatctgcaaagcagtgcctggcatgttgtagatgcttggcaaatatgtgctgaatgaacgcatgggattagattttattccctttgctttgacttargtctctgtatgaaggcagggccttctctatctcagtgaagccgtgtgtcatgtgaaataaacctgtgtgatgtgggtaagagtccacagctttcgcctgagctcataatgaaagggggctggtggcgatgagagtacatgggaaaatgcaatttttaaatgggcatataaaaattaggcttggaaatgcacaatctcatatttaaaaaagaagctaggactgaaat

SEQ ID NO: 774896 - DNA, 615 bp, Homo sapiens
atttgaaaaacaagacctttaagaataaaatgcacgccctgtaaaaagtgtctagcatttgtcatttccaattttcattaaatgctcattttcagcctaaagttagtcctaagataaaggaacatattgcataaaaatgagttcttagacaaatgttaggctcaagattaattaattaccctgatattaacacctgttccctcaattctgcaaaaaagagaacaggaaagataaaggaggttagagacagaaccttggcaaagatggaatttgacagatggttgaagaaaaaggaattaggagaagaggctgagaggaagcagtcagtgaggctgaggaagcctgggcagtgggagtcatgaggaatcacagttcaggaaggaggaagacgtggctatgtggtctaggagagagctgctggctgggmctatagatgacaagaaatcatttgtagtggtacaagtactgggtcacttatgcttggattctaattttgcctcctagtggctgtgtgaccttaaacaagttactttgcatcttaattctctgatcagtaaaatggtgacttactcattcaacatttattaagcatcctttgtaccagggactgtccta

SEQ ID NO: 774897 - DNA, 574 bp, Homo sapiens
aaaatacagtggttaatggtcaggctttgaagttgaacagaactaagtttgagttcctgctttaccatgtacaaaactcagtgactttgacaagtcttttaacttctttgagcttcaatttcttcatgaagatactagctagttccataggaaaggaatccatgtgtacagtattgatggagacttttggttgcagacaacagaatctgttctagctaaggagtttattaagcagaatagaaaatgcgcccaaattgaatcctggctggtcttccaggaacaactgccaaagctacactgcagacctsgaccaccaaaagagctactcctctgcctaaccaggaaactaaagaattaggacgctgccactacagttgctgactccaggaccatgctgcctcttacctaagttgtaccaggaaaatggatgcctcccaccctgcttctctatttaagtaacttagttacaaaccaaagtctcgcacaagatcaccagatgcattgaacctaaatcacatttggaaattaacagttagggggtctggaaaatgccacagcatttcagtctttgcca

SEQ ID NO: 774898 - DNA, 633 bp, Homo sapiens
atatgcctttctttacctacaactgtcttggtaaattctttttactgcctgcatgacactggccccagatagttgccactcaaaatactcctcttctttatccctttaaatattggtgtgtcttggccaggtgtggtggctcacgcctgtaatcccagcactttgggaggctgaggcgggcagatcacctgaggtcatgagttccaggtcagcctggccaacatggtgaaaccccatctctactaaaaatacaaaaattagccaggcatggtggcaggygcctgtaatcccagctagttgggaggctgaggcaagagaatcgcttgaacctgggaggcggagtttgcagtgagctgatatcccgccattgcactcccacctgggggacaagagcaagactttgtctttttaaaaaaaaaaaaaaaatttttttgtctgtcttgaggcccctgcttctcttctagccttttctttggttactctgccactgttttcattgtgttttctccctctgtgaccctgtttaaaatccaaggtttcaactactctcagtttggtgttctagatttccagttccactggtgtaactatccattggacactttttgtccgcccatgggcataacatattta

SEQ ID NO: 774899 - DNA, 602 bp, Homo sapiens
cagggtagtgtggagatgccaaaaggcaggcaagactcagccttgtcctgtgaagatcacacctacgcacaaggcgggagcctgagtttcagatgaacaggagggacagaagtgctccagaggtttagggcagtggttctcaaagtgtggtgctygggccagcagcatcagcacacacactggtcatggagttccacggcccttaaccagtggttctcagacttcagcatcagaatcacgtagagggcttgttgaaacagattgttgctctccaccttgagtttccgattgagtagcttttgaatggggcctgaagaacagcattctgaacaagttcccaggtgatgttgatgatgctggtctggagaccacactttgagaactactaatttagagtgaggagagactgctaagagcaaagccaagaggacttcatggagaagagtccttttggcttttccaggggaaacagaatctcatcaagtagagaggaagatgagtgccctggaaggtagaggatcagagtcagaaatgggaaatttggagggcatctggccctgggaagagggtgtttggcttacgagcatttgcagttgagatgg

SEQ ID NO: 774900 - DNA, 494 bp, Homo sapiens
tctattctgctatgtcaggatcagagccttaaggtggtgggtgtacctcctccatgtgttcttctcttttcccaccagacaaaaccaaaatgtggtggtgagccaacttcaattttgcagaaactgacttggaaagaaytgattacctgaaggaccgtgaggatcaaagttgtcccactgaccaggctgtaaactttggaactgataagtgagagagataaggtaaacttctttacctttaagccatttattgttagtatctttattatgtcagcctgtacttactctaattaatacataaagaagcacatgttaaacttcactgagtgatgccatactcctatccaaaacctttgaagcaatttacactcctaccggcattttatgacagctcttgttgctctgtattctacgaaccctagctattgtctgactttattatgtttacctatcagtgggtgagaagcattatctcagtattgttttcattatca

SEQ ID NO: 774901 - DNA, 638 bp, Homo sapiens
tttaaagttcaatgagtatcattgatctttatggctgtcacctatgagtgattgactgtctgtcctggaaaatgaagacaaatgctacttcctcagtcaattgaacagggggtaatttagagcgcactctcatggttgctaggacctgtggtgtaatgggttggcagtctctctgtcttggcttccacaaggcatctgggaatcaggttctcaattctgtcagaggccaggtaactgcaggagtagctgtgttaacatctgagcaggtgtgtcactcctaattgtagtgctttagcagagctgttgcctgaggtgagaaatgctggcatgcaccattggaggtggtggaaactccagagaaacaagttccatcccagtgggactggagtcagaacactggagaccccttgcctgccytgagctggacagcatttaatggtagtagattctgtattccagcccacgtgattgctactttcagccctgtggaggggttggtagtgaggaacacaggcatatgcacatgtgaacatgacatttactgatgtggatggtgcatccaggcatggtgccagtgcctttacttgcattgttttgaatcttgaccacaaccctgctcccccagttataggtaagga

SEQ ID NO: 774902 - DNA, 569 bp, Homo sapiens
cagatagagggctcagccccacaaaactacctccaattcagatacctggaaccctgactacaaaccaggattgccatgacctccctccttggggtcaattaatttgctaggatggctcaccagaactcagggaagcactttcccacatttgctggtttagtataaaggacattaaaaagaayacagatgaacagccaaatgaagtatatgtagagtgaggtatgtggaaaggtgtgcggcagtttcatgccctctccaggcatgacaccctccaggaacctccatatgtttagctatctagaagctccctgaacccagtctttctacatttttaatagaagcttcattacatagacatggttgattaaattgttggtcactgttgatcaacttaaccttcagcttctctcccctctttggaggttgggggtggggctgaaaagtcccaaccctctaatcatgcccatgtttttcctgtgatcacccccacatcttcaaactacttaggggctgctatccaccagtcatctcattagcatacaaaagacatccttatcacgctggagatt

SEQ ID NO: 774903 - DNA, 562 bp, Homo sapiens
aagagtttaagtgaaaatttaaataaaatagtcaaaaagccagcaataatctaaatggctagcaattccttcattcagcaagcattgaatacccacaaaggtccaggtcccatgctagatgctagggacataaatgcgagcaaaaccagacatggctgctgtcctcccagcccgcactctggtggtagttgattaaatgatagcacacccatattccggaatgttacactgccattatgaagaaagtttgtaaagaataactaataaaacaatctagtttcatgttctaatagcaagataaaaagcaggatgaaaagttgtattcatagtattatccrtatgatataaataacctgtaatccacaactcaaaaataacaattgtcaacagtgtagtccattatattcaattctttttttcctattctaaacacatctactacatatatataataaactattggaaaattctaaaaagtacttatagttgttatttctggattgtgggattgtgatattccatatatttcaaggtttctacaaaaagcaggtataaacaggaa

SEQ ID NO: 774904 - DNA, 545 bp, Homo sapiens
tctgggtctcccggtggcattgtcccctctcttccctgtccatgcacaattctgctccaattctctgccctgtccctaactcggcttccccccactgccatctcctttcctggccctaccctcttctgctcctctatctgcagatttacgagtatcggaatggccaccaggaggtggagagcccctttcaggggcgcctgcagtggaatggcagcaaggacctgcaggacgtgtccatcactgtgctcaacgtcactctgaacgactctggcctctacacctgcaatgtgtcccgggagtttgagtttgaggcgcatcggccctttgtgaagacgacgcggctgatccccctaagagtcacygaggagggtgaggctgaggcacagggtctctagggcgtcctgctctctgtggacagggaagggtaggacagcagttttccacgagtgaggcccttaaagagtgcaaaaacccatgtatttggaatggtgacatctaaaaatgtcaccattgacccatcttcttctggtggccagcttcctgta

SEQ ID NO: 774905 - DNA, 602 bp, Homo sapiens
tttagaagagctatttgtgcaatctgccctttcttttctcagagagaaaacctgccagactttgggcgtccatttagactccacctctgctgagaacaagggaggtaaatttaccttaaatgtcacagctcggttatattcagtatgaaatgcaccatccctgtcaaatgaggagaaaaatgtgttaactttaagaatggttgtgaagatacatacctttggtttcctgcagcatcttaataagattcagcttttgaacggagttcaggattttttttttaaagaaataattgtaaacacaggaagaaaaccattytgaaataaaattaatctaactaaaaattgctgttcgctgaaaataccaatgaaagcgtttggcacttacttggaaattggaaatgcccatgtgtacttactggtaatggaataattcaacctttttgtccttcgggctcaggtcaactttcatcttcttgcacaattttctactctctgcatcactggaagacacaaatgttgggaaccatttattacctgaagtcctcacaaaggtgttgacagcaaaatctgctggtgtcctaagaaataagtcaggtaacttg

SEQ ID NO: 774906 - DNA, 564 bp, Homo sapiens
tttctacaaaggttatatattgctttgagaataagacaaaaatacagttaaaagcttaaaaaaaaagatgacagcagaaaatcttgagtctgatggggacctgctgccagaaacagcccggctcctggaaggcagtgcagatacatgctggaggcaagatatggcaaagaaaacatcccatctcagacctgttgctaaggaaaatgggtcgatgagtcagggggtaggcaagggtagagccacgtggyccccaagaagccctgtagcacaggggagaggaagagcagggggtcctcaggatccccagaacctgcatgggtgtccacaggcctaggagagacgagctgctcaggaacacccctctctgggatgccccccttgctcccctgaacatccccatataaatgatgtctactcaggtagtgccacagcagcttgtccttcccctgctaatgcagacctgaagttactagagagggacaaaaaacagtgacaagaggagatgagtggccacacacactctgacttctctcatatggaacgccgcagaaaaacacaaacaaa

SEQ ID NO: 774907 - DNA, 602 bp, Homo sapiens
gaggaagagcagggggtcctcaggatccccagaacctgcatgggtgtccacaggcctaggagagacgagctgctcaggaacacccctctctgggatgccccccttgctcccctgaacatccccatataaatgatgtctactcaggtagtgccacagcagcttgtccttcccctgctaatgcagacctgaagttactagagagggacaaaaaacagtgacaagaggagatgagtggccacacacactctgacttctctcatatggaacgccgcagaaaaacacaaacaaaaaggtgccacgggtggcagcagccactgtcctcctgacacaccatttgcagagagcatctccgtcgcctgcagggtgggaaaaccgggcctggggctgcatgtgaggccccactgtgaggaccagagggaggtcaggcacgaagcctygctacaaacgggaagccaagtgctagcaagagaggcggctcctggccttgggtccaggcagcaccacagacacacccctctcagagccctctgctcacactcggcctgtcctgcccaggaggcccggcccagctcctgggggacagggctgtggggcaaacctgg

SEQ ID NO: 774908 - DNA, 572 bp, Homo sapiens
tttctaccttgtatcatttattgattcatttatccactcatttaacaaacacgactgccatctttccttggcctaggtatggtgaaggtacaaagaggactgagacacagtttcttctccgtagagcttctaatttagtaagagagaaaaacatccactgcatttatacagaggaaagctacattgattcaagttacaaatttatatgtacacagaggatagaaaacttactcagcctgggggattcagggaaggtttcactgaggaggtggatttagatttaggtttcaaagaatgcagaagagtaacatatgcatatgtaattatagcatataaaattgctataattacaacttttatgtacagaagtttatagtacacttacctacattcatcactatcactgttgtatgtaagtataccattatcrggaggctgaggcaggagaatggcatgaacccaggaggcggagcttgcagtgagccgagatcatgccactgcactccagcctgggtgacaaggcaagactccatctcaaaaaaaaaaaagtataccattatattattgcagtg

SEQ ID NO: 774909 - DNA, 561 bp, Homo sapiens
actatatgcccctcacaatttgacttggtttgagagagggtgggtggttaaaaaaaaaaaaaaggcataaatccatcaccagtaaaataggaataccactgaaagagtgagataaggagaatgtgcgtgggctgtgactggtgatggccacgggagaggcagatgtgctggctcgtcacgcccccgcttctggagccacaccarccgtgggtcagtcctcgggggacattagctctagggcagctccccccagaaaagccatgccctctccatagaagtggcaggaacgcaaacccagtggccctctgaggttggccatcgtaggtcgcatgtggcagcctcgctggaccaggctcatgattgggaaggaaggcgtctgtggcacaccaggcccctgcttggctgggaagccacctcagcatgtgccaggctcagaggacaccagcccagcgctgcccctgtgctggcattgagggttctgtgaatggctgcgcctgggcctgctccacacacagcaagaaccggactgaaggagccaggggtaggactgggtcttcatcc

SEQ ID NO: 774910 - DNA, 458 bp, Homo sapiens
aattgaggatcccacccaggggtggccagtgcagataccaggaaggccgcgctgccgcaagcctggagacagctgccccgaggatgcctgcccggctgcgtctccaccgaggcccaaggcacgctactcggcgtgaccataagcataagggatgggagaaacgggcattcgttggttaaagtgaagatatgtcacccagctcacacatcttagcactgccycacctttgaacgagcagggtgtggactagtgaggccctgctcctgcggtctcaggcacagtgctcagagctgggtctctagctggtcctgtgtgtggacgctgactcgaggaatctggttgccctagtccctgtgcagttgacgtgctttccccgaatgagcatcatggggccaaagcgcaagcaccctcctagcagggcagagcgctggcaccacgtggagctcacagaccaggca

SEQ ID NO: 774911 - DNA, 597 bp, Homo sapiens
aaagcacgatcacagaaaactgcctacgctcgttcccactctccagtattcttctgtttttcatctcagtgaagacggattagagaaacttattatatttaagaaatactcatttaagcttctaagcaggaggtttctaccaagaaaggcctaatctctctctttcatctctttctgcctactraatgtcttgtaattctgctgttgatgatgcacagacctccatgtatggggctaaggatgatcgtatgtcaagtagtagacactttcagcagaaaagcctgccctggtcaccctctggtgactgaccatgatccaaagaccatcaaagaccaaaatgtactctcattcaaagcatgaacaggagtgacggaagacaagaagcccacgacggaagacaagaagcccacggcttgttccactcgggccatgaagttaagaatgtgaacaagggtgacaggcatgattctgaggcccaaaatacacagagacaaagcaaactgaggcacagagttctgaagccccgtatctctctaatttctcatcttcccctttgccaccatttctggaatggtctccaagttcagtctctgtagg

SEQ ID NO: 774912 - DNA, 597 bp, Homo sapiens
aaagcacgatcacagaaaactgcctacgctcgttcccactctccagtattcttctgtttttcatctcagtgaagacggattagagaaacttattatatttaagaaatactcatttaagcttctaagcaggaggtttctaccaagaaaggcctaatctctctctttcatctctttctgcctactgaatgtcttgtaattctgctgttgatgatgcacagacctccatgtatggggctaaggatgatcgtatgtcaagtagtagacactttcagcagaaaagcctgccctggtcaccctctggtgactgaccatgatccaaagaccatcaaagaccaaaatgtactctcattcaaagcatgracaggagtgacggaagacaagaagcccacgacggaagacaagaagcccacggcttgttccactcgggccatgaagttaagaatgtgaacaagggtgacaggcatgattctgaggcccaaaatacacagagacaaagcaaactgaggcacagagttctgaagccccgtatctctctaatttctcatcttcccctttgccaccatttctggaatggtctccaagttcagtctctgtagg

SEQ ID NO: 774913 - DNA, 484 bp, Homo sapiens
ataccgtgaagcccctgatatggcatgatggggaggacacttctcctctggggtactttttccaaaaacctagaaccccattctaatcacaggaaaacacaagacaaccccaaattgggagatattctgtaacatatctggccagtactgttaaaaagtaccaaggtacaataaacaaggagggactgagaaactctcacaaatcttagtaagaaaactctcattaaggaggcatgagggccagatgcagtgtggtgtcttggatggggttccagggcagamcaatgatgccaccagggccacttacaccccagctcttcctaaacacagcatcgactgcagctgtgcacctgcaaatgctagggttggttccacagaatgcatttcaagcagacacgaggccatagttttgcttattggctttacgccaaaagttttgccttctgcctctgtagctgacgctcataagactgaaatttatttt

SEQ ID NO: 774914 - DNA, 556 bp, Homo sapiens
aatcctggtataagaattgaaaaggcagtcacgtgtggtggctcacacctgtaatcccagccctttgagaggctgaggtgagtggatcacctgaggtcagaagttggagaccagcctggctaacatggcaaaaccccatctctactaaaaatacaaaaattagctaggtgtggtggtgcacrcctggaatcccagctacttgggaggctgaggcaggagaatcgcttgaacctgggaggttgaggttgcagtgagccgagatcatgccattgcactccagcctgggcaacagagcaaaactcagtctcaagaaaaaaaaaattgaaaaggagggtctcaaatagatatatgtacatgttacaaatttatagtagccaaaaggtggaaataacccacatttccactgatggacgagtgaataaacaacatgtgacatatgtgtccaatggaatattactgacccttgaaaaggaaggaaactctgacacacgctactgcatggatgaaccttggggacattttgctaagtgaataagccagtcccaaagggcaaaca

SEQ ID NO: 774915 - DNA, 542 bp, Homo sapiens
aaaaagccctatagagagggaaggaagggtagatactggacattgattattaagctatcaagagaaaagttcatgaagggaacaagattgcatcaactctattctagcctcctcatagagaaatgcattgagccaatgtctacaatgtgttccaaggaaatacatgaaaaattcttgaaattaggcacaagagccaactgacaacttaatcatgataggtgtccccaaacagatgtggaatcacagaaaatttaagaggagttagtaaaactgaagtgattaggaagaggtctcttcaaagagaaaraagacttgaatcttccaaaaaaaacatgtaaaagcagagacacaggggtttgcatgtgagaaaagggagtattggggacagctaataagagaatagaagcttcaccttctgctccaaaaggttagagctgtgctctgtgtgacccatatatttcagaccaaatgtgatcaaatagcatgtagctatgcatgcttctagattaacaagccaccagtgtgtcctagaaaggtaggaa

SEQ ID NO: 774916 - DNA, 727 bp, Homo sapiens
ctgaaactgtgaaatttgtaaaagaaaataaagagggaaatttttcaacattgaccttggcaatgaatttttgggtatgacaataaaacacaatcaataaatacaagatacacaagtggaattattcaaactagaaatcttccacacagaaaaaaaatcaacataatgaaaaggtaagctataaaatgaaagaaaaatatttgcaaaccatatacccaataagcagttaatatccaaacaactcagaagaaaaaaaatctgattaaaaaattagcaaaagaactggctagacatttttccaaagacatacaaatagccaataggyatatgagaaggtgctcaacatcactaatcatcagggaaatgcaaataaaaactaccatgagatatcacctcacatctgttagaaaaactgtttatcatacacacacacacaaagacaaacattggtgaggatgaagagaaaagggaatccttgtacactgttggtgggaatgtaaatcggtgtggctactatgaaaaacatacagaaattcctaaaaaaatgaaaagtagaactaccatatgatccagtaattccactactgagtatatatccaaaggaattgaaatgaggatctcaaagtgatgtctgcatctccagcattattcacaatatccaagacatggaagcaatctaaatgtatactgatggacaactgaataaagaaaacatgatataagcatg

SEQ ID NO: 774917 - DNA, 727 bp, Homo sapiens
ctgaaactgtgaaatttgtaaaagaaaataaagagggaaatttttcaacattgaccttggcaatgaatttttgggtatgacaataaaacacaatcaataaatacaagatacacaagtggaattattcaaactagaaatcttccacacagaaaaaaaatcaacataatgaaaaggtaagctataaaatgaaagaaaaatatttgcaaaccatatacccaataagcagttaatatccaaacaactcagaagaaaaaaaatctgattaaaaaattagcaaaagaactggctagacatttttccaaagacatacaaatagccaataggcatatgagaaggtgctcaacatcaytaatcatcagggaaatgcaaataaaaactaccatgagatatcacctcacatctgttagaaaaactgtttatcatacacacacacacaaagacaaacattggtgaggatgaagagaaaagggaatccttgtacactgttggtgggaatgtaaatcggtgtggctactatgaaaaacatacagaaattcctaaaaaaatgaaaagtagaactaccatatgatccagtaattccactactgagtatatatccaaaggaattgaaatgaggatctcaaagtgatgtctgcatctccagcattattcacaatatccaagacatggaagcaatctaaatgtatactgatggacaactgaataaagaaaacatgatataagcatg

SEQ ID NO: 774918 - DNA, 564 bp, Homo sapiens
aaacatgagtttatgagccaatatcagggaaggcgattgggcataacagctagaattaattttctgttattcttgaagacatttaaaaggcagagcctattaccaaggaaaccaattccaactttgaagctctgcttgagcatttgctggaggcaaagcaatgtgctaaaatgttgcatagggtcttattgatccccacaatgactccatgaggcaaacattakcactcagttcccgctttctgcatcaccagtgtagagatgaggcacagggaagtaaagtgatttgcctaagctacctatgttgtacatgttatggagccagactgaaccaaagcagcctggcttcagggactgctctcaaccaccatgttcacagcctgcctagtggaaacatcagtgtgtacttgagatcaggagataaggcttagactctctgacttgcttcttaatagtttgtgcagcattggacaaggtgcttcagctttctgggtcttatttccttttgtataaaatgaagattgtatactatctacttcttagggcttaggtgacaatcaaatga

SEQ ID NO: 774919 - DNA, 562 bp, Homo sapiens
tgtacaatgtaagaaattattgaagacaacaaatgaaaagctacaacaagattgtttagacttcaaggggaaatagacgaggttataagctttctgagggcagcactgatgtgctgtgtcatgtctgagcttggcctggagtctgcaaagagtggtttggagggacacagcactgaatagatgaccacctgctagctgtgtacttgctcttttctcygtgcagcgctcttcacagctgagtctgctgatggacctcactgaagatccagtcctgcttcagcttctgatcaaacacctccaacttctgctcctctcccaggccctgaggcttgaggaaagtgaagtgtatgggctctgcattccaatataacagggcatcaatcctgatgccacaactttttctctcagcctccctgaacttctctttcttttactgtgaagtatatgtaacacattttaaagttttatggcaatgattaaacaagatgatgcatggaaagcctgcagtccagtgcctgtccatgagtgacagtagattttgctatggggttatgtatttaga

SEQ ID NO: 774920 - DNA, 619 bp, Homo sapiens
tcacttctatagttaattttaaaaattaaaaaatttaaggtttagtcaatgcctctgtaaaaatgagtctgatttttccagtttctacaaaaagaaaagtggctcaacaactcttcctaaaagagcagacagtctactaggaactaaggggacacagaaattaatgaggactgatttcayttcctttttcttccatctgttccaagacagttacattgttttgttactatcaaaagatagcaagtagaggccacatagcttggggaaaaaaaacattgaaaaataactgaattctaggtttagtcagctctgaaatgaaaaataagacctattcttactcaggtttaagtatctctgttttacaattaaagagttgaagagcaaatctccaaggtcctttccttttataaaattatttcatttcagtttgcctaaacatataaaaacatagtgaaccctaagctccaaaggatcctttcatgtctggtttattgtagctttccaatgtctggcccagtaccaggcatggaataggtgttcaatagaggtttgctgagtgactgagtgactgagtgagcatatgcaggaaacaaatattgaacaccattgtgcttcaggc

SEQ ID NO: 774921 - DNA, 594 bp, Homo sapiens
atttttttcctttcaaagttttggcataattccaaatttacagaaaagtttacaagaagagtacaaagaattcctgcacactctttacccaagttcctgaatgtcaatattttatcacattctctttatataattttctcatctattgaagagcaacggatgccttttatcctaatacttgatgatatttctaaaaagaaaggcattctcttacgtaactacagtacagtgatcaatatcagcagttaacattgatccaaaactgtattcaaatttcatcagttycctcaataatgtcctttatagcaaaagagaaagttcatgcattgagttatgtctctttagtctccattaatttggaacagttccacaattttttgtttcatggcatcaacacattgcatagcatggaccagttattttataaactctgaggaacattctactttgggttttccactcaccgtttctttataattagacccgggttatgtacttttaccaagaataccaaagaagtaatgtgttcttcctggtgcatcatatcaggaggcacatcctatcgatctgtctgattactgatgatgttaactt

SEQ ID NO: 774922 - DNA, 612 bp, Homo sapiens
gcatttagattaagggggataccattcattcagttctgagccactacaggccaggtactgaactaggcactatattagccaatctgccagaaggcacaaacattaaagaataattaccaaagatcacaatgagtattctggtaggaaatgaagcatgataattataaactcattttttctctacagtaaaaggaaacttctaatgcagatagttcaacagaaacttcattaaaaaaggttttggtgcagattttatgattcttggtgacgtggtaactatggcaaccatatactaaaacgtgacccaggatctatgaaaaatgttttcagtcagaacctcaatcacaacacataatgaaagagaggaaatgaaaactatgatttatatttaaaataataaaagggaagattaaaaactatattaaggctagcatttttataagattccaattcctgaccttctgtagscagttttcacatttgtgaaatgtcaactggatgaaacaaagtccaaatgatcaggaagtcaacatcctctacttatgatgggtagagacataacaggcaataagatattacgtagacccaataggaaccatacgaaatacattt

SEQ ID NO: 774923 - DNA, 690 bp, Homo sapiens
tcaacaggactttgaatattctcccatcagggatggggaatacagtttgtggcagtcaatgagatggctggtgctattgtttggctatggtttgaatatgtccccaccaaaattcatgctgaaatttgatccccaatgtggtggtggtggaaggtggggcctagagggargtgtttgggtcacagggggcagatccctcatgaatggcttgatgtcattcttgtggcattgagtgagttctcgctttggtgagactggattagtttccatgggaatggatcagttcccttgacagtgggttgttataaagccagaatacccctggggttcatgcctgtctgcttcccctttgaccttcaccatgttaagatgcaccacagaagcccttgccagaagccagggtcatgcccttgaacttccagcctccaaaactataaactaaagaaacctcttttctttataaattacccagtctcagttctgttatagcaacacaggatgaactaagatagctggttctattgggcagaggcatttctgggtgtataggaaggagggtttacggtaagaggtagaacaaaatatagaaaacaaggtttgagtttcatctcccactccccttccctgagtacttcgtgtggcagccatgtttgtgctgctggatccaagcccccaagatgcacctcagtg

SEQ ID NO: 774924 - DNA, 690 bp, Homo sapiens
tcaacaggactttgaatattctcccatcagggatggggaatacagtttgtggcagtcaatgagatggctggtgctattgtttggctatggtttgaatatgtccccaccaaaattcatgctgaaatttgatccccaatgtggtggtggtggaaggtggggcctagagggaagtgtttgggtcacagggggcagatccctcatgaatggcttgatgtcattcttgtggcattgagtgagttctcgctttggtgagactggattagtttccatgggaatggatcagttcccttgacagtgggttgttataaagccagaatrcccctggggttcatgcctgtctgcttcccctttgaccttcaccatgttaagatgcaccacagaagcccttgccagaagccagggtcatgcccttgaacttccagcctccaaaactataaactaaagaaacctcttttctttataaattacccagtctcagttctgttatagcaacacaggatgaactaagatagctggttctattgggcagaggcatttctgggtgtataggaaggagggtttacggtaagaggtagaacaaaatatagaaaacaaggtttgagtttcatctcccactccccttccctgagtacttcgtgtggcagccatgtttgtgctgctggatccaagcccccaagatgcacctcagtg

SEQ ID NO: 774925 - DNA, 618 bp, Homo sapiens
gtgccaacatgccaagagttaataggcaaagtcaggaagtgacatctgggatcaaatatgtctgaattggagatgaaagtcctgggggcgggtacccctcatcatggtgatggcagagaggttgcagctttgagaggactgccggtgggaggcagaagtctctgtttccatggactcctgggcggtaggcagcacgctacccaaaccttacacccgtagtagcacagacatcatcagcctcccctgagattctgctaaccagaccacttctgtcttcttagactatcctaggtcacctaagggccaccacactgtaaaagagaccacacgtggtcactttaactggcgatccttcccacaacgaggaccctaraggaagaaaaggcaaagaagtggtggttcagagtgtaaggtttgaagggagatgccacactgcttccagctgggtggcttcagacggggcacagaagctcttgaagcctcaggatccttgtttgcaacatgagagtattaatagtaccaatcttatggggttgttgttagaactaaacgtacacaaagatgtgcactgtgtttaaccatggtgaaatccaaaatttcatacttttattttatgca

SEQ ID NO: 774926 - DNA, 618 bp, Homo sapiens
gtgccaacatgccaagagttaataggcaaagtcaggaagtgacatctgggatcaaatatgtctgaattggagatgaaagtcctgggggcgggtacccctcatcatggtgatggcagagaggttgcagctttgagaggactgccggtgggaggcagaagtctctgtttccatggactcctgggcggtaggcagcacgctacccaaaccttacacccgtagtagcacagacatcatcagcctcccctgagattctgctaaccagaccacttctgtcttcttagactatcctaggtcacctaagggccaccacactgtaaaagagaccacacgtggtcactttaactggcgatccttcccacaacgaggaccctaaaggaagaaaaggcaaagaagtggtggttcagagtgtaaggtttgaagggagatgccacactgcttccagctgggtggcttcagacggggcacagaagctcttgragcctcaggatccttgtttgcaacatgagagtattaatagtaccaatcttatggggttgttgttagaactaaacgtacacaaagatgtgcactgtgtttaaccatggtgaaatccaaaatttcatacttttattttatgca

SEQ ID NO: 774927 - DNA, 618 bp, Homo sapiens
gcgatgcccctaaagctcttgcccctcagaaggctagatgaaagaggggcattggggagtgagtaacagagccgagaggactgctaacagcaccagggtttctgatgaaaatgcactcgccagagctgtgtttctttattcgaaatcacacggttttactcaacagggctcctagcccttctgtctctgctcctggtgcgtaagggcggtgtgtggggctctgcgcctgaaaccgctctctcggaaggtgggaagatgcccacgtatccattcctctccgcgtacagattcgctcccacacgcccgggcgggtgattccggagggccgcgcggggctgtgtgcgcgggcgggggcgggatgtgtctggagggggcagagcgccctctcccggccccggagggcccacgcggaccggctgagcgtcccaccagccggttctgcatccactacccagatctscgcgccctggtgggagcaccgcagccccgggtcggcccttcgaacgccgagcgtctacccgcggagaccagcgcaggaggcgggcccgcgcgcaaggaggcgggcgacagggtggagtcgccgcagctggcagccgcacggctctacctgttgcagcg

SEQ ID NO: 774928 - DNA, 544 bp, Homo sapiens
tatagacaatctacctgttaagggtttactgaattatgtcacttgattttttttttatcacatatatttccattagttggcttacaaaattccttccaaagggccaaggtatcaggcactataatataaggcaaaagagtcttgatgaggaagaaatcaaatttcttgaatgaggcgtttcataaagcacaagattcagcaggagcccttaacaagttacattagggtaaagcgaggtaatgctagagaaaaactgaaataagaaaaatggtggaaagatacttgtaagtttctgtgtacattasgggtagaagtcttgattgtatacaaagcatatctcagagatatgattccagacaacaacaataaagtgaatcatacaaaattttggttaatcagtgcacaaaagagttatatttacactattctgtaatctaagtttgcaatagtattatgtctaaaaaacaatatatataactttaagatattttattaccaaaaaatgctagcaattatctgagccatgagtgagttgtatacatcc

SEQ ID NO: 774929 - DNA, 586 bp, Homo sapiens
ttccaatgatggacatttaggttgattccattctttgcgaacgtgaacagtgagcataagtacatacgtgtctttatactagaatattttatattactttgggtatatactcaataatgaaactgctgagttgaacagtagctctgtttttagctctttgaggaatcaccacactgttttccgcaatggttgaaccaatttacactctyggcaaaagcatttccttttctctgcattcttgccagcatctgttttttttttttttttttttttgactttttaataatagccattctgatttgtgtgagatggtatcttactgtggttttgatttgcattctccagtgactagtgatattcagcttttcatatgcttgttggcagtgtatacgtcttttttgaaagtgtctgttcatgttctttgccacctttctaattttttttttttctggtaaagttgtttaagttccttatagatgctagatgttagatctttggcagatgcatagtttgcacatagtttctcccactctgtaggttttctgtttactctgttgacagtttttttgtggtgcagaaacttttt

SEQ ID NO: 774930 - DNA, 624 bp, Homo sapiens
atttttaatattctgtcagctaatagtttgattaagccttcctttaattttcttgaaagcaaggaattagaaatcattggcttcataggatttgcaacccaatcgttagagtaattcacgttctcagtttctgggaattgtatcaaaaaggctatgcaccaaaacctatcaaatgactattaattaccttctcattcctttacacaggggcacttgtttaaactgctattcacaaaacgtgttgggagatatccaaacataaatttcaatttacctttatcagcataatatttttgatgraatgcttttgtctgagtgccagctttaaacatattttcatccaaacattggaaaatgtccaccaaatatcctagatggtaaagctagttcttattgccaaaccaatgagtcaagattatttattttgaaatatgacacacattcagaaaattgcactaagcaaacttttacaagtcaacaaataatcaaaagccaacatccatgtaactatcactcttttttattattattattttattaatattatactttaagttttagggtacatgtgcacaacgtgcaggtttgttacatatgtatacatatgccatgttggtgtgctgc

SEQ ID NO: 774931 - DNA, 629 bp, Homo sapiens
aaacatgggagggccaaatgtgtgcttgatcctcatggagcatgaaataagacttaatctttgcccagaaggaaaatcttcctgaacaagtataatgattgatttttttttctttagcagttctttatctcttctccttttttaaggacagttagcacaactgaacaattacttgggaggtacaatacaaagctttgagcgtagctctttatacacttatcaaatgagtataatttgctataattcttcctcctgattatatacagtagctatttcattctctaaataatatcttatacttttttttagaagttggttaaattgcttaggaggagaatattaggctcagtttctttgaagggtaatatagtgggagtgactgtataattatctctascgggctttcacccaccatacaatgtcgtctactagatctattgctttcctgttgagaactccagttaatcctactagctagcacacaggagaatgaggcaggcaaattttatttttaactaaggactgagagcataagagaaggaaatactaagattgattaaatctggtgcatttgcaatttttattttaagccatttcagatatatgtgctacccaataggtacactaat

SEQ ID NO: 774932 - DNA, 598 bp, Homo sapiens
ctactgtgaatgggattgtgttcctgatttgggtctcagtttggacattattggtatatagaaaggcaactgatttttgtgcactgattttctgtctagaactttgctgaagttgtttatcagatcaaggagcttttaggcagagtctatggggttttctaggtatacmatgacatcatctgcaaacagaaatagtttgactttctctctttctatttggagctctagaatttccagtactatgttgaataggagtggtggaagtgggcatccttgtcttgttccagttctcaaggggagtgcttccagcttttcctgttcagtatgatgcaggctgagggtttgacatagatggttcttattattttgaagtatgttccttcaatttcaagttgttgagggtttttaacatgaagcgatgttgaattttaccaaaacccttttttgcatctgttgagatgaccatgtggttttttgtctttagttcttttatgtgatgaatcacattcattgatttgtgtatggtgaaccaattttgcaacctatggctaaagcctatttgattgggttgaattagctctttgatgtgctgctggat

SEQ ID NO: 774933 - DNA, 610 bp, Homo sapiens
ctttagaaactgtggtgccattataaacacactgataaggtttggctgtgtccccatccaaatctcatctttaattcccatgtgttgtgggaaggacttggtgggaggtaactgaatcatgggggcaggcctttcccgtgctgttctcatgatagtaaataagtctcgtgagatcccatggttttgaaaatgggagttttcctgcacaagctctcttctcttgtctgttgccatgtgagatgtgcttttcaccttctgccatgactgtgagacctccccagccatgtggaaccataagtccattgaaacttctttattttgtaaattgtccagtctcaggtatgtctttatcagcagcgtgaaaayggactaatatacacaacaaactatttcaagatagagttgaagcttctagaaataaaacgattgtttctacccttgcccgtctatcatgagttcatgctttcaaacatagtttaagtttctactgttttatgatatcttccccaaattcccaaaagccaggccatctctactctccaactcttctctgcctcattatcttatctcatatacagcatgagttacacaaaggagtatttgctgcttt

SEQ ID NO: 774934 - DNA, 634 bp, Homo sapiens
gaacatttccagttcctgtaatatatatgcttaaatgctctgaaaagccccctctgacctctccaggagaatattggagcaccttccgctaggcatccatacagccttgttcatagattcattatcatatttatcacatattcttgtcgttatggctttacacatctttttcttacagtagaagtcccttgtggtgtgagaaagggtataaactgtgttccccttgattgtaatctgcagtgtcctgcattcagtaggggcttaacaattgttggtttgatgaagtttacaataaataagtaaattttaataactgatacaaactagctcacaagtgactgtggatttcctcaatttgtaagctggactctgacaaacatcccaatatggaagagttaattgattgaatagatcaccagatggaataccagatagctaaacttttgtggaacgagaataratgcccctgaatttcattagtcttcaaatattggcccctatttccaatttttttaaaaatatcgttacttactcagctgccttccctagattccgtagactcccatatgtcttattaaattaaaggcaaaatcattaaggccaatataaactctgtatggaactagtgaaatgt

SEQ ID NO: 774935 - DNA, 606 bp, Homo sapiens
gtagttctattatagccttatcttacaataatgaccagaagaaaaacaaccaaattataccacatgaaagtagatacggcaagtggtaggctcctcctccccaaaaaaaaaaaaaaaaaaaaaaaaaaaagtcttccctgtaccccacagagtaattgctgcaaagtggaagaaaaaaaaaaaaaagcattgttccaaacgtaggttggctgctccaggccattatgatcacactaacgatgtttgactatttggtaagtagcactataaactctcaaggcytcatttcacacaccacttgtatttacttgacctacatttctgagttattggaataataaagaatgatattttataaggacatttttaggcttgaatagtaaacctcttagtaagaagagacaatgaatagaattaaacaaggtgacagataagaataaatattggaatggagagctttgtagttatcttcaggcaaacccatagcaaaaagactcactttagagttataacaatagtagaaacttgtctagtccctgagaaaatgatcatatttgattattttattagtatttaaaacactgtcatttagtcaaaacccatact

SEQ ID NO: 774936 - DNA, 598 bp, Homo sapiens
catggaagcttgcttcttcaaggatagcaggggaagcgtctgctgcagtttcttgtctcttcaattggctcatctaattaggtcagtcccaccaggataatctcctttttgattaactcagcgtcaactaattagaaaccttatttatatctgtaaaattttttcatctatgccacataatgtaatctaagcagggatgtgacagctcatcatagtcacaggtatcccagccactcaaagaagggggagctgatcatataaaccatgcacatcagagagtgagaatcttgggggctactttagaattctcagtgatactttattttataaagtaaaatttgcmtaagattaacaattttaaaatgtacaattcagtagcatttactaaattcacaatgttgtgcaataataacgtctatatagttaaaaaatattttcatcctcaaaagaaaatcccatgcccagtaagcagacactctccattacctctccctttggcctctgacaaacattaatctgctttacaggtctatggattcacctatcctgaatattccatataagcggaactatacagtacgtgaccttttgtgtctga

SEQ ID NO: 774937 - DNA, 635 bp, Homo sapiens
agtcacaggtatcccagccactcaaagaagggggagctgatcatataaaccatgcacatcagagagtgagaatcttgggggctactttagaattctcagtgatactttattttataaagtaaaatttgcataagattaacaattttaaaatgtacaattcagtagcatttactaaattcacaatgttgtgcaataataacgtctayatagttaaaaaatattttcatcctcaaaagaaaatcccatgcccagtaagcagacactctccattacctctccctttggcctctgacaaacattaatctgctttacaggtctatggattcacctatcctgaatattccatataagcggaactatacagtacgtgaccttttgtgtctgacgtaattcacttagcatgttttcaaggttcatccacactgtagcatgtacttgattttcattcatttttgtggcagaaacatactctgctgcatggatgcaccaccatttatttacctattaagcagttgatggatgttgtttccaccttttggcagttgggaatagtgctgctataaatattcccatacatgttttttggaatgcttgttttcttttggggatctacctaagagtggaattgccaagtc

SEQ ID NO: 774938 - DNA, 511 bp, Homo sapiens
acaggcatgcaccaccacacctggtgactttttaaaaattttgtagagacaggcagggcacagtggctgacgcctgtaatcccagcactttgggaggccgaggtggacggatcacgaggtcaggagatcgagaccatcctggctaacacggtaaaaacctgtctctactaaaaatacaaaaaattagcygggtgtggtggcaggcgcctgtagtcccagctactcgggaggctgaggcaggagaatggcgtgaacctgggaggcggagcttgcagtgagccaagatagcgccactgcattccagcctgggtgacagagcgagactctatctcaaaaaaaaaaaatttgtttgtagagccagggtctcactatgttgctctgtctggtcctgaattcctagcctcaagccatcctcccgtctctgtctcccaaggtgctaggattataggtgtgagccaccatgccctgcctccttttttggtttgttcatacatccatttgacaaatattt

SEQ ID NO: 774939 - DNA, 575 bp, Homo sapiens
tcagcggctcatgcctgtaatctcagcactttagcaggctgaggtgggatgactgcttgagtccaggagtttaagactagcccaggcaaaacagcaagacctcgtctctacaaaaataaaaaaattagccaggcatagtggcacatgcctgtagtcccagctactcaggaggcagagggaatgcttgagcccggaaggtmatgactgccgtgagccatgttggcacccgcactccagccttggcaaaagagagagacccagtcattaattaattaattgagttcaacaaggccacagaatacaagtatacaaatatcagttgtgtatctatatactagaaatgaacatatataggtataaattagaaatacaataccatttacaattactcaaaaaaaaatacttggagggaaatctaaaacatgcacagtacttgtatgtcgaaaactacaaaccactgataacagaaatcaaagctctgaataaacgaatagaaataaagatttcaattatccctaaattgatatacatgtttaaaacaaatcctattaaaagttttttttccaaatatagtc

SEQ ID NO: 774940 - DNA, 616 bp, Homo sapiens
ccatgagctatgtttagcttgtacctatttttgtaaactaaattttactggaaaacagccacactcactcatttatttaatacatattacctttgactgcttttgtctgcaacagcagagttgaatagttgcaacagatcatatggctctcaaagcagaaaatgtttactctctggacctttatagaaaacttcatcagcctggacaatatggtgaaacctcatctctacaaaaaaaaaaaaaaaaaaaaatcagccagatgtggtggtgcatgcctgtagttctagctactcgggaggctgagatgggaggatcacctgagccccagaggttagccatgatcacgccactgcactgcagcctgggtgacagagtgagaccctgtctcagaaaaaaagaaaagtttgctgactcattaattagcmgaatccctgttgattttatatttataaatgacctctcaatctcttgtgccagcacagagaagtccatgcatgccacagggctcatcttataatggatccagtagagtttcagactctttaaacagtagtcattttcagttgtccataggaagtccagggggcttctatgctgtagtcaccattgccattgt

SEQ ID NO: 774941 - DNA, 576 bp, Homo sapiens
gtacctcggtgtgtctgtaaagtgggttagtataactcacaggtgagcatatttcactatgtgttgtgaggactaagtgatttgatgccctgcggctgaaggtagtaagtgcgcattaaataatggcatccttcagctctgatagctgtgctgctgcatccaggagacatgtacaggcttcatggcagagtgcaatcctggagtgttctgctgcaactgctggcagagraaaggtttcaaaactctttcttaatgctagggtgagacctgtccactgataaggagtttctatttgggatgactaaaggtgccatctggaaagtaccaggcccctgggactgctccctggtctcccacctaggtgggattcctcagtgacagcactcaggggtatcaccggctcagggaggggccggaggtgagttcccttatctcctcttgcctccttcactgtaaaactggagctaataaggtttctctcctgtcagccatccagtggagataagtcacccagaatgtgactcccacatggggctcaaaaaggtgtttctaaatataaaactctgagggaaaaaa

SEQ ID NO: 774942 - DNA, 546 bp, Homo sapiens
ctggagtgcagtggagcaatcttagctcactgtaactttgaactcctgggctcaagcaatcctgctacctcagcctcctaagtaactggggctacaggtgtgcaccaccaaacctgggtaatttttttttttttttttgagacrgagtcttgctctgtcgcccaggctggagtgcagtagcgcgatctcggctcaccgcaacctccgcctcccgggttcaagcaattctcctgcctcagcctccagagtagctgggattacaggcatgcacaagcacgcctggctaattttgtatttttagtagagacggggtttctccatgttggtcaggctggtctcgaactcccgacctcaggtgatctgcccgcctctacctcccaaagtgctgggattgcagatgtgagccaccgcgcccggccaaacctggataattttgaaattttgttgttgttgttggttgtcacaacttgtaggtaacatcaagtgggtagaggccagggatgctgctaaacgtcctacgatgcacaggacggtgccacaacaaag

SEQ ID NO: 774943 - DNA, 546 bp, Homo sapiens
ctggagtgcagtggagcaatcttagctcactgtaactttgaactcctgggctcaagcaatcctgctacctcagcctcctaagtaactggggctacaggtgtgcaccaccaaacctgggtaatttttttttttttttttgagacggagtcttgctctgtcgcccaggctggagtgcagtagcgcgatctcggctcaccgcaacctccgcctcccgggttcaagcaattctcctgcctcagcctccagagtagctgggattacaggcatgcacaagcacgcctggctaattttgtatttttagtagagacggggtttctccatgttggtcaggctggtctcgaactcccgacctcaggtgatcygcccgcctctacctcccaaagtgctgggattgcagatgtgagccaccgcgcccggccaaacctggataattttgaaattttgttgttgttgttggttgtcacaacttgtaggtaacatcaagtgggtagaggccagggatgctgctaaacgtcctacgatgcacaggacggtgccacaacaaag

SEQ ID NO: 774944 - DNA, 606 bp, Homo sapiens; identical to SEQ ID NO: 773907

SEQ ID NO: 774945 - DNA, 606 bp, Homo sapiens; identical to SEQ ID NO: 773908

SEQ ID NO: 774946 - DNA, 519 bp, Homo sapiens
tcacctactcactaattataataaaatcttgataactgatgtagtcactttactaattgggccttaaatcacttaggccttagcttcaatcttacaggtattttggttattcattttggctaaagtcataaaattccttcggaggttagtgacttttttttgtcagttttatagtgttttcctaaataggtagaatgatatttactatattcgtatatcattttattctgagactgaaagcattagaattcgtgtstaggtagaaattaggatgagacaacttcagttaatcttagcttgatttaattctgaactaaagccagtttcaatttggccaaaggcaatgtttctagtttattgttagtgccttagcagttgacaataggaggaagtgttccacttgctgcatcttcctactggtctgcagcatgaacggtcggtctttcgatgtgcaggcccaccctgaggctcagggctacgtgtgaatgtgcatccagggctggtttcaaggacgtgtgg

SEQ ID NO: 774947 - DNA, 519 bp, Homo sapiens
tcacctactcactaattataataaaatcttgataactgatgtagtcactttactaattgggccttaaatcacttaggccttagcttcaatcttacaggtattttggttattcattttggctaaagtcataaaattccttcggaggttagtgacttttttttgtcagttttatagtgttttcctaaataggtagaatgatatttactatattcgtatatcattttattctgagactgaaagcattagaattcgtgtctaggtagaaattaggatgagacaacttcagttaatmttagcttgatttaattctgaactaaagccagtttcaatttggccaaaggcaatgtttctagtttattgttagtgccttagcagttgacaataggaggaagtgttccacttgctgcatcttcctactggtctgcagcatgaacggtcggtctttcgatgtgcaggcccaccctgaggctcagggctacgtgtgaatgtgcatccagggctggtttcaaggacgtgtgg

SEQ ID NO: 774948 - DNA, 519 bp, Homo sapiens
tcacctactcactaattataataaaatcttgataactgatgtagtcactttactaattgggccttaaatcacttaggccttagcttcaatcttacaggtattttggttattcattttggctaaagtcataaaattccttcggaggttagtgacttttttttgtcagttttatagtgttttcctaaataggtagaatgatatttactatattcgtatatcattttattctgagactgaaagcattagaattcgtgtctaggtagaaattaggatgagacaacttcagttaatcttagcttgatttaattctgaactaaagccagtttcaatttggccaaaggcaatgtttctagtttattgttagtgcctkagcagttgacaataggaggaagtgttccacttgctgcatcttcctactggtctgcagcatgaacggtcggtctttcgatgtgcaggcccaccctgaggctcagggctacgtgtgaatgtgcatccagggctggtttcaaggacgtgtgg

SEQ ID NO: 774949 - DNA, 549 bp, Homo sapiens
cttctcattacccatttccaaagtcacttccacattttcaggtaactttatagcagtaccacatttttggtgccaattttctgtattagtccattctcacactgctataaagaaatacctgagactaggtaatttataaagaaaagaggtttaattggcatgcaggtctacaggctttacaagaagcatggctgaggaggcctcaaaaaatctacaatcatggcagaagtytaagggaaagcaggcatatcttacatggccagagcagaagaaagacagcagggaaggtgctacacacttttaaacaaccagatctcatgagaactctatcacaagaacagcaccaaagcaggaaatctgcccccatggtccaatcacctttgaattataattggagattataattcaacatgagatttgggtggagacacagattcgaaccatatcaaccactttgttaatcactgcccttcaccccgaggcccagcacagtaactgaccctgcttagtcactgtctgttgaataaatgaattaatataaaagactcc

SEQ ID NO: 774950 - DNA, 631 bp, Homo sapiens
accacagtgtcttccagtagtaggtggcaagtaacttatttatcaacttgtctattgactaataagaccacgtagatatcaccctcttatcaggtgaaaagaaatttccttgaaatctcactttatgagatagctaagtaaattccactcactccatatgtgaatgttctgctttcctgaatctgattaggttacaagttgtaagggcaggactcattttttgggtaattatagctttaaacgcactcagatggctattacacactagccatatccaatagatataataaataattaattgaacaaataaataaataaataaataaataaataaaaattacagcccataaaagctcctcattaactttcccagtactaacctacctcttgcaattaattttacattttcttgtttctcctttattaagtaagctgaaatgaaatagaaatgatatamttgtttttctttctcatttggagaaatactcatgcagtctcagtcctcagagcatacagaaaatgagactagatgagctccatttgatacagaaataacagaattctgaacaataatggaatcacatttattccagtgaatatatgtatacccattccaatgcagaaaatatta

SEQ ID NO: 774951 - DNA, 468 bp, Homo sapiens
taaaaggcaagaaaaaagaaggcttcttatttctaatttccagataagatatcccctaccttgtccctggatgatagaactggatattgtaaaataatagtaattagtatttgaatgccatttaactctttataaagcaccttaactgatatttgcttattcataattctgtaagttcttccaaaattactatacactttgaggctggtggtgtgatgtgtgaagatgagatagaggaagtaagcgtggaggatttggatttgcaaaaacattygataatgtattgcttttcattggtctcaaggaggtctatttctaggagtattgagaaagatatatatgtgtatatgtttacccatttaccagaaaatgggtttacttctctaacgttttagcaataaaaagaattccagatatgcagcaaataaatctgactgttagtcagccctcaggagctgctgatagcaa

SEQ ID NO: 774952 - DNA, 610 bp, Homo sapiens
aaaataatgtaagctattaaatggctatatattgttatttgcactacaaattccaggactatgaaaataatgggtgaggcagctagtaaggaacaaaatgactttttaaaaattgtccctggggatgggtgggggtatcagctagactccagggtaagattgtcttccctctctgtccccttctcatctccctttcctgctgagagctactttcatcagcaataaaatcccctgcatttaccatctccaatttgtttatgtgacctcattcctcctgaatgccagacaagaactcaggagcrggtgcaaaaagctgttgcactgatcctccactgagctgttaacacttaagtcatccatagatggcaaagctaaaacagcgctgcctgtaacactctttctggggcttcagggatcaagggcacctccctagatgctgctgtggtggtgcagggagttttgctcttgttggcacccaaaaccagcagccctggctcctgcacctgctcatctgtgctcctcctcctgcaaagggtggaatatagtgggaccgagcaagtggtatccatctctgctgcagtgaagcagctggctagttctagcacccatg

SEQ ID NO: 774953 - DNA, 574 bp, Homo sapiens
caggcccatatcaagctggctgcctcagtagaaacgcatattctaatttgcttttatggaaccaactccctgcaacaggcaaggtcagtcctaatctctgaaagaaggaataacagagactggaaaacaggagaggtggtttgggggaataccacttccaaattagttgacgcaactcaaatgttaacctgtcaaggccctgatggaacacaacatggtgtgttagaagctaaagtcattctttgggcatgcctaaaaaaagagctataacaccctaagagagaaagtatcttttctcttctcagtgagaactgcactggtgcttgcagaatttttatgatgagagactgtargaaaatttgattctaatagtcatggtgtgtttgctgagttttgagctttagctatattcctctactagcttaggtctaggctgaccccagtcactgtatgacttaggttagtttccctggaaacagtttcagagactgggacttgcaatcaggagatttactgagggcttttcttaggtgatacatttgcaagattgggcagagggagaagctgacccata

SEQ ID NO: 774954 - DNA, 580 bp, Homo sapiens
catacacgcgctctctctctctctctctccagacagaagacaatacgttgcaacccccttccactgcagtagcagcatgtctgtctcagcacactgctctgcaagtcagctatcattttcccttaaggtagagaaaacattatcctccccctaagggtggcttgctactcccaactgcctgcaaaaccgcgggctactacactatcatttctttcccctctgggcccaaactggttttccctgttccttcctcagctcttactttgttgtatcaagaagtcaygcttctacaaaaacgatagccctacctagagctcagcgtcctgcctgagatatgttttaccccctggtccaagacaaagcctcacgcagtggcacccaaagtcgtaggagtccttccctggtagctgacctccttcaacacctggacgctagaggtgaaagttattgtctatgcttccacacatactctttgattgtcttttaaaatgactcacagtatagaattcttaaatctctggtctctactgaaggttgcatcattcctaacagaaacacgttcagaaaccattcattctgg

SEQ ID NO: 774955 - DNA, 652 bp, Homo sapiens
ggagtgagggcgttgcgctgctgagggttgataagctggctcacagaaggcagcttgttcatgctgttcattttgttcagaggtggggagctgttaccatatgaagatggagactgtattgaggtcctaggaagacaaacatggaaataatggtgagcaagggacactgaagagtggggactattgattttcaacaggtctctgtttaaaacatggcctcaaaccaaacatttgaaaacattcttctaggattaatggtaagaagttaattttgtttccatctgagaatatttcctgaatagggagaaactgactgcgaggctatcatcaaatcatatttttcctgaatgtgcagagtgcaaggtttagtatttccttkgagaaagagaaaattcttgcctcctcttttcccttcagttgttttctccattcccttctcctcttttcccttcaactcaaatgagtttgaaaagcagttagggaaaagaattgagcaaagacttaaaggctgacgaaaaacatggatatcccaccctcaaactgcagctaaggcattccatttgtagctttctgtatattccatttgggatatgcagaaaatgactacaaacccaatcaaactgggcatttggcagctcatcttgctgtcatg

SEQ ID NO: 774956 - DNA, 616 bp, Homo sapiens
accacaatgttggaaactagaaaaaggtaaacatttgcatggctgagttaagagaacagagacataagaaactgttattacaggactaggatagactcatataccagttactaagcaggttcttgggcaagtcctttctgtacatttattttcttatttataaaatagggatgataattcaagtcaattatctgttatctacaattctgaagttccaagagctctgaaaatcagaagttggttcagttttattttgatttcttaagtttgtggcacactcatttgatggtgaaacccaggtttcgtagtcatttatcagttagtgtgaatatttatgaattctgcagaaataatgtttgatcttatggtgctaccctaaattctgctggatacattyatatgttatgcaaactactatttttctaaaatctaaacaattctggattctgaaaattctggcccctgtggtttcagataagagacagtatgcttgtaataccttcctcttagggttgtatcaggataaaatttcttaaggcagaactcagtaaacgatgaagctattattatttatcattaattaagcttaaaaattagattcccacccccatccccg

SEQ ID NO: 774957 - DNA, 608 bp, Homo sapiens
caagatttgaaagatgaaaaagtcagattccttccatgtgccacctcagctatcagcatgaatccaaatacggtctctgtctaacatatctacaaagattctggacaaaatctaagacaatatatccactatggctacttgagaactttgagtatgttggaagaaaagagcactggactgggagttaggagacaggagctccgtgcccttggggcaagttacttaaccactctggattcagattcctcatttgtgaaatgagggcagagctaaatgatttctaaagacaattacaaagataagagcctgtttttgtccagaatcagagaagtgatttagaggatattcctctgattttactcggatatttatttgtccctcagtttgctcatcttcatattgtacaagtgaagtagtcaagctgcacagctacttaagatacttaaatgacataaaggaaaargaacatattggtggaaaatccatattttttgctttaaggtatcctcacaatgaaaaattcgctaatagttcatgtagatttgaactcagcacaaacatttccataaaagagctaattaaagtatacctgataatgtttggtttca

SEQ ID NO: 774958 - DNA, 483 bp, Homo sapiens
actgagtggtctggaagctttcatggaactacaaaaaggggaagctacaaaaacgtcagaggaagagtggaaggaaggaaataaaaatgtccagggtagtatcttccctttgatcttccactcatagctaagggagctatgtactagccacacctgcgtakgtgtaattttatataaatgggattatattagtgaaaacatgaataagaacattttgagatttcataaggaggtcctcaataataaatttcttttagacctggtgatttttatgttattgctttttccattatgttcacataatagttcagagatttacttgaacctgccttacgccaccttttgccactaggttaacaaattcttcattacaataatctcatatcggcctgcaatttctagggcccagtcagctttggggttgtcatatttctgcttcttaatggttaccttgggctcctggcttctgttccttcattcccg

SEQ ID NO: 774959 - DNA, 595 bp, Homo sapiens
aaaacctgtctccaccaaaccctaggcccagttgacaagggcctctttgacataaactgtcaacactgtcatgagggcagcagtcattctctcataaactcatttatttcatagccagctctcccaccacactgtgagtccctgaatatctgtgtctcgcttgtcttcattttcctttttttttttttatttttgagacagagttttgttcttgttgcccaggctggagtgcaatggcatgatctcaactcaccacaacgtctgcctcccaggtctaagagattcttctgcttcagcctcccaagtagctggggttacaggcatgtgccaccatgcccagctaattttgtatttttaggtgagacggggtttctccatgttggtcaggctggtcttgaactcccaccctcaggtgatctgcccacctcggcctcccaaaatgctgggattacagacaygagccactgcacctgaccttgtcttcattttctaaacaccttttacctcaccctttacagagtagttggcatttgttgaacaagttaagactgtcttacttgggacagagactgttcatcaccccccaatatgcaca

SEQ ID NO: 774960 - DNA, 632 bp, Homo sapiens
tttcaggacacactgtcctcatccccagacctcactgacatcatagtgacactggccatcagaagaaagtgactttacagaggggaaaagagtatcctggaagcgtaccggtggggcaggacacactaaggcaggactcacccagtttgtacattagacacagcctattaaatccattccagaaatgagttccacttcaactgaaaaaataaactgaagattgcccaatcactgccatttcacaaatttccagtttatggtcagccccaaaatcacattcttccaccctatgtattggaaatcaaatggcccaaagactgaggtgtcttcaggaagcacatgcttgaaaaatgttttctctgcaaaacagtattgagtaatacataaggagacatagcctactttagcccaaaacttcyttcacttgttatgtccttttacctcttaaaacatagaatgaaataaactcggatcttctttggagaagctagaagggcattttggcccaaaggctgtacaggaaaagagaggctctctccaggagactgcaaggcaaaggaacagaagcaggaggggcaggccctctggcaccaggtgggcctgctactctgatgaaatgtgctcccagctct

SEQ ID NO: 774961 - DNA, 596 bp, Homo sapiens
gccaaggatcccctcattgctagacacagtaatcgacctgtcctcctcttacccgacctttaggcagcaacccgcccagctaatggctccctccttttcccttgattctcaggacaatgtgctctcctgttcctccccactcactggccttttcaggcttctctrtagctcctcctcaattcccagaactccacgggccttcctcagatcttttcctctctcagtgatctcgtccaatctcaagctcttgacactatctatcttatatggcttcaactcacacattttaatttccagcctgaatctcttcttggagctccagactcatacatcctgtggcctaagagacatatatacttggctgtctagttggcctctcaaatctaacatgtccaaactcagctcttaacagtgcagtcttctgtctccaagcatttactctttgcttccaattgtgcagacggaaatctgtgatgtcgtttttgacccgtctctcttttacaccctgcctggcttaagccgccatcctctcctggcgtgcattgctgcaatgacctcctccctggcctctctgcctccaacttaacccctaacaa

SEQ ID NO: 774962 - DNA, 576 bp, Homo sapiens
cggccgtccaatgagaaggctccaacgcagcggaaacgcgtggctttgagagcgagtgggtgccaggctgctcgcgtctccatggcgacggcctctggccggcctccgctgcgtaggggcgggaccgaggcaccctaggcgctggcgggagtcgccgccggcggtgcccagagtggakaccggggttgtcccgcacgggcacggcccgaactccctccctgctccttcacagttcacctggcgctctcccacactggcgatccctgcgcttcggtcgctgttcaaactcccatttttccgatggggaaactgaggcatagaaagggactgaattttgccaaagggtcgcaccgcaagtgtagggcagagtcaaggcaaaaacaaaaaaaacaaaaaaacgcttatgcattttccataaatactggtcgatttagaaattctccctaaaaggaaaaaaatgtatcaagtccctgctaccagggttgtcagatttggcagataaaataggagaagcccagttatatttgaatttcagataagcaaatgggacccacttatactaaaaaaaaaaatgca

SEQ ID NO: 774963 - DNA, 590 bp, Homo sapiens
actcagaggcttcagttaccctcaaaggaggggtgtggtgcaaatggggaacagaaacacaagtagtggtgatggggcttcctccctccaggcagttggcctgcagagcccacgtaccactcaggtattgcactgccaccaggcgctcatgtttattttatcctcaaggcagtctagtccaggagaaacaatcacaaaaacggattaaattttgggggaggcctctaaaggctttctctcagtccttcgtgtctttggtcaccccagagggtgaagaagatacccggctggctcctgttattgagcccttcagataccattcgtggttgggccatctgtgtaccaaggagcttggctccctttctgagatccagctgctcatgaattaggctgtcttttcagtaaaacgtaaagtctgagaccctggaggcagggtatgggatccgagygtgggatctaagacaggctgcctgcatcccatgcctagtcccatttacccactgtgtggccttgggcaagtgatgtacttcgctgagtttcagtttcctcagttgtgaaatagagatacagtcatgagtcacttaatgaca

SEQ ID NO: 774964 - DNA, 617 bp, Homo sapiens
catagagcagtgagacagaatagacagcccaggccagacatgggctttgggaggctgaggcaggaggattgcttgagtccatgagttcgagaccagcctgggcaagatggcgagacctccatctctacaaaaaagtaaaaatttagccaggcatcggtggctcgtgcctgtggtcccagctactcgagaggctgacgcaggaggatccctcaagcccaggatccagcctggaaaacagagcaagacctcatctcttaaagaaaaaaaaaggccaggcacggtggcttacacctgtaatcccagcactttgggagtctgaggcgggtggatcacaasgtcaggagtttgagaccagcctgaccaatgtggtgaaaccccgtctctactaaaaatacaaaaattatctgggtgtggtggtgcacacctgtaaccccagctacaagggaggctgaggcaggagaattgcttgaacttgggaggtggaggctgcagtgagctgagattgtgctactgtactctagcctggatgacagagagaagctctgtatcaaaaaaaaaaaaaaaggtcagaagaagagcgaaggtggtgagatatattttcaagattgagcttaaag

SEQ ID NO: 774965 - DNA, 545 bp, Homo sapiens
ttgatttgccaatagtttgtttaggatttttgcatctatgttcatgtctgatattggactacaaatttgctcccccatacagtctgttccagctattttattgctgcataacaaagtactcccacccatagaggcttaaagtaacaactattttattatgtctcctggttttgtgggttggaaatttgggcagggcttctctgggaaattgttcatttctttatgccgttaactaagatcactcagtggtagtcagcttgtgactgaactgagctgaagtccaagacaaattcaatcaaatgcctggtgcattggcagggaagcctggaatgctgggctcagctgggccyctctccttctccatatagtctcagggtctcactgcatagtctatacaacaggatagttatgcttcttccacagtagttcagggctccaagcaaccaaggtagtacccatcagtcctcttaaaagctgggtccagaattatcatagcaccacttctgccatgctttattagttctagaaaaaggcagtgtaagcat

SEQ ID NO: 774966 - DNA, 643 bp, Homo sapiens
aatgatcctgatgtgatttggctgtgtccccacccaaatctcctcttgaattgtagctcccttaattcccacatgtcatgggagggacccagtgggaggtaattgaatcaagggggtgagtctttcccatgctgttctcatgacagtgaataagacacacaagatctgatggttttataagkggagttcccctccacatgcactttgtctgctgccttgtaagatgtgactttgctcctctttcaccttctgccatgattgagaggcctcctgagccatgtggaactgtgagccaattaaacctctttccttatatattacccagtctcatgtatgtctttgttagcagcatgagaacagactcatacagtccctctctctactttgtgtcaacatggctggacatggtggctcatacctgtaatcccaacaatttaggaagccaaggcaggaagatcgcttcaggccagaagttcatgactagcctgggcaacacagggagacctggtatctacaaaaatttaaaaactagttgatcatggtggtgcacacctgtattcccagctactcaggaggctgagacaggaggatcgcttgagaccaggagttcaaggctgtagtgaactatgatcataccactaca

SEQ ID NO: 774967 - DNA, 643 bp, Homo sapiens
aatgatcctgatgtgatttggctgtgtccccacccaaatctcctcttgaattgtagctcccttaattcccacatgtcatgggagggacccagtgggaggtaattgaatcaagggggtgagtctttcccatgctgttctcatgacagtgaataagacacacaagatctgatggttttataagtggagttcccctccacatgcactttgtctgctgccwtgtaagatgtgactttgctcctctttcaccttctgccatgattgagaggcctcctgagccatgtggaactgtgagccaattaaacctctttccttatatattacccagtctcatgtatgtctttgttagcagcatgagaacagactcatacagtccctctctctactttgtgtcaacatggctggacatggtggctcatacctgtaatcccaacaatttaggaagccaaggcaggaagatcgcttcaggccagaagttcatgactagcctgggcaacacagggagacctggtatctacaaaaatttaaaaactagttgatcatggtggtgcacacctgtattcccagctactcaggaggctgagacaggaggatcgcttgagaccaggagttcaaggctgtagtgaactatgatcataccactaca

SEQ ID NO: 774968 - DNA, 615 bp, Homo sapiens
tctgcaaagtattgtcacctagttggcattgtaacttcaaaagaccattccaccattctatcaatccagctgcttcaggatgatggggagcatggcaagaccagtgaattccatgagcatgaacccactgccacacttcttcagccgtaaagtgagtgttttggtcaggggcaatgctatgtggaataccatgacagtggataaggcattctgtgagtccatgggtggtagtcttcgcagaagcattgggtgcaggataggcaaacccatatctggartaagtgtctattccagtgaggacaaacctctgccctttccataatggaagaggtccaatataatcaacctgccatcaggtagctggctgattactccgaggaatggtgccatgttgagggctcagtgtttgtctctgctgctggcaattgggcactcagcagtggtcgtagccaggtcagccttagtgagcggaagtccatgttgctgagcccatgtgaaacctccatccctgccaccatggccactttgttcatgggcccattgggcaatgataggggtgattgggtaaagaggctgggtggtgtcccacagaatgggtcattttatccccttgac

SEQ ID NO: 774969 - DNA, 595 bp, Homo sapiens
aattctcaagtgatttagacctcctatagacaaaaaacaggggagtggagggagagatgctgggttaaagagatttaaatagattcttttcttgcaggatttatcagagcctttactgttctaatattcacgggggctcttcatactggattgcccattcataataatgatgggtaacatttactgtgagtgtccaacactgttctgagtacccggcttagaatgactcatttggtcctcacaacaaccctgtgagttctgctgtgatcctcattttacagctgtgaatactgagggaagtagctttcccaagatcacatgactagcagggggtggagcaaagacccaaacctgggcccrtgtacttaaccactgtacacccagcctctccatgcctgtattttggacaccagcaaagcagaggcacaaaaatagtttttgaaagaacttgacactttataattcaaaataaaaagccattaaaggagttatgaaacaatgagaattttgtgggcttttgattatttactttatgttaatattgtttgattgtttgtttttgagacagggtcttgctctgtcacccaggctggag

SEQ ID NO: 774970 - DNA, 599 bp, Homo sapiens
agttctgtggcaagaactgtgtagagctggacaaagatgaatgaatcattttctgaccttaaggattaatggttgagctcactcaagctctggttggaaacacagggcctgggtgcccaatcccagctctgtaacttgtaaggtatgtgattctgagcttcaacctcttcatctgtaaattggaaataataaaaaatarccatataatattgtgaaaattaacaacacagtatatcagtgcttatggtatatgttcgataaaggtattttatttttgttgataattttgatggaaccttatatataaatagataattttagtatatgtgaattctataaatgctgattttcatgatccagtcttaaaggtagatagtttaagattggtgggaagttttcccaattctaggatattacttttttctcttacttttttcttctcttttctatagcatcctttctcctttcttttcccctatcatttcctcttcctgcctcctcctcttcttccagaattatccagattgctatccacctctccatttctcttggttgtgtatacctagccaatatcaaaggtactgtttggcctactgtgc

SEQ ID NO: 774971 - DNA, 617 bp, Homo sapiens
aacatatgagctaaaacgataagctttttagaagacaatatagacgaaaatcttagaaactttgagtttggcaaagatttcataaataaaacaaaaaatgagtgcagaagaaaatttaaattagactatataaaaagaaaaaactcttggttttcaaaaggcaccattaaaaaataaaaatgcaagactcagacagggaaaaaaatttgcaaacacctgtaagatgaagcatttctacctagaatatataaaagtactcttttaacttaaaaataagacagacaacccaataacaaatggacaaatgatctgagcaaacacttcaccaagtaagatgtgcagattgcaaataagctcatgaaaagatgttcaacatcgctactcattagggaaatgcaaattaaaactgcaatgggataatacyatatacccactaaaatgactaaaattataaagactgacaattccaagtgcttgtgagaatgtggaacacctggaattctcatatcatgctgatattgactacaaaacgatatggccactttgggaaacaatttcttactaagttaggcattcacttatcacatgatccagcaatgccacttttaattattcat

SEQ ID NO: 774972 - DNA, 712 bp, Homo sapiens
tgatagttgggctaggtatagaattctgtataaaaccaaaatctgtttttctcacaatttttaagttcttgatcttttaacttctaaaattaatattcaatattcctgctgagaacttcaaaaacattccaattcctaattctctgtgcgtaacctttctcctctatggaaccttatataattgtctctttggcctcagtgttctataatatcataggaatgtatcttgatgtggttctatgtttayttatattactggatgctcagtgaaccctttcaacctgtatagtcttgtctttcggttcagaaaaattttcttgaataattcttgaatgttttagctgatttattccttttttgtctttctggaattcctatttttcagttattggacttcctgggctgatcctctaatgtccttatcttcctctttttttgataatctatatatttttgctctgggagaattcttcaagttattttctggaccttcaccccacttctttaggtcactgtgtgccccagttctaagattttctgggatttcgtagtataaatattattgttcttgggttttccccagaactggtttagcattcagttttttctggttttctaagtctattattacatagatctgtctgcttggcacattccaacattttgatgctgttgttttgtgctatctttgttctatgagtgttcttactgt

SEQ ID NO: 774973 - DNA, 568 bp, Homo sapiens
tttgaaaaacacagaaattaatttctatcacatgtataagtatgaagtgagcattccaggctggcagacagctccactccacatggtcactcagggactcatgttcctacaaaagagctgtttcccataaccccagagcctgtcatcactttcacggtctcactgggtcacctgggttctacccgtccagaaggggaaagtggatacggaaaaagcaccccgcaatgttttaagaagtcarcaggcaagtactacacatcatatcacctgtgctcatatttcactgctgagaactatcctttggtcacatctaatgcaagggtatctggaaaatacaatatatgtaggcaaccatattctcagcaacaatcattttattgtggaggaaagcaagaaagaatcttagaggacagtcagtagtctctgccacagggtccatacaaccaaataatgagagtgatagttagaacagaatcacacttttattgcaagacaaaagagaagcataataagcttcaaacgttgatactattattaagttatttaataggccctggtgtgtaaagca

SEQ ID NO: 774974 - DNA, 568 bp, Homo sapiens
tttgaaaaacacagaaattaatttctatcacatgtataagtatgaagtgagcattccaggctggcagacagctccactccacatggtcactcagggactcatgttcctacaaaagagctgtttcccataaccccagagcctgtcatcactttcacggtctcactgggtcacctgggttctacccgtccagaaggggaaagtggatacggaaaaagcaccccgcaatgttttaagaagtcaacaggcaagtactacacatcatatcacctgtgctcatatttcactgctgagaactatcctttggtcacatctaatgcaagggtatctggaaaatacaatatatgtaggcaaccatattctcagcaacaatcattttattgtggaggaaarcaagaaagaatcttagaggacagtcagtagtctctgccacagggtccatacaaccaaataatgagagtgatagttagaacagaatcacacttttattgcaagacaaaagagaagcataataagcttcaaacgttgatactattattaagttatttaataggccctggtgtgtaaagca

SEQ ID NO: 774975 - DNA, 617 bp, Homo sapiens
agacatatgccttctggaaacaagtagaagcaatcatctggcccatgtcctacaaacccatgaatgtcagggaggtgccagttacagcaggtgattcagcaacttgaggcaggtaacagaccttccattcctcactgaaggtggggtttgtgtttttgttttgccccctgttactcccctggtagtcatctggtgtttgtactataacaacagcaagaaaatctcatttgtctttatgtactcttggcacctcctttttttaaatcgagatataaatatttgaggggagaaaagtatctacgggtatatatggaaactgataatgtggtctactttataagatggccagatctacattaggaaaagtatgagctccttccatagtgtctgtgggaggtgatggggggagaggggacrgtgtatgtctttggcgtttgtttttttataaagtatataataaaataatcatgctactaaaaaaaagaaattgaagaggacacaaaaaatggaaaaatagtccatgttcatagattggaagaagcaatattgttaagatgcccacactacccaaagcaatctacagattcaatgcaatccctataaaaataccaattatg

SEQ ID NO: 774976 - DNA, 578 bp, Homo sapiens
tatctaaccacagattagaaagagcagctgatcttcagcctgggtgacagagcaagaccccatctctataatatatatatatatatataatatatatattttatatataatatatatatataatatatatattttatatataaaatatatatattatatatataatatataaaatatatatatttatatatatattttatatatataatatatatatatatatatatcagattaggaaggcatggtggtgtgcacctgtagtcccagctactcaggaggctgaggaggtccaggagttcgaggctgcagcaagctacgactgtgccattgcactccagtctgggtgacagggagagatcctgtctctgaaaaaaaaggaggagaakaaagagcagccgatcctatcttcacatggcaggaaacaaggtcatgagcagtggccacacaggactgttttattttgatataatggaagtggcatgggaaaatgcgaaaagaaaggtcaccctgaatagctctagggaagaaaaagaatgttgggcatttcaacaaacagcattacagaaaagaagaagcag

SEQ ID NO: 774977 - DNA, 509 bp, Homo sapiens
ccataggagagtaaggtcccacagagagtgataaatgccaaaggacaaataatcagcaggcttcaggggatcccactgagtgagtgcaagatcttagtagaaaacaagtatttgataaatagttgaaacatgaagtcatgcttgttcagacatttattcccagtgtcatgaaaagagcataagccaagaggtagaagatttgtaattcaaattcatttctctactttctggctgtaaraacttggacaagatacctaatgcatttgaatattcatttcctcatctgcaaaatatgtgaacaatatttcaatgactttttgaaagcaacatgagaaaaagctgtaagtgcttggcaaagaaaaattgcaggtgctttttgaatgatgtcattcatacctcagtttccccatattacacaggatatgaatgacatggccatatagaaaaagaatcattgaaatttataatgtgagaaccagagatccagagatatgacttcagggataaga

SEQ ID NO: 774978 - DNA, 412 bp, Homo sapiens
tctgagttggagtcaagcatcactatataatatagccaggtggttctattattcagccaatgctgagaaccactgctttattgtaaatcttgcaccatattgtattataagtytttgtttatccttcccaagattaagtttcttgagaactgaaattattttgtattgatatgcatatcgcttgagatttttaaaaaaattccaagcactaggaagtgttcaataagtagtttataaataataaatgtatgactgaatgaatgaataacgtgtacacatcccaaccacccacccatctatgcttagaagcttgcttacattcatgcagctgttcagggttagaaattgtggaaaataaaagaatcaatgtggatcccaggtgtctggagataaaggatgtagtctaagagga

SEQ ID NO: 774979 - DNA, 351 bp, Homo sapiens
atctttacaaccctgaggggggtctatatcaaccccattttacaaagtaggaaattgggtattagagaggctatataacttgttcaagatcacagagctacacagaggattccctatcccaatacagatgtttaactccctgacttcccagcctctcctctgctttaacagcagacaaggaactaagccattaggagaatgrttgggggcggggagcaaacactaatatagatgctggtcagtgtttaacagccagctctggagggtgcctggtttgtggcatttgccaacttccatggtgaaaatactctcaacacgttaaaattcaggctaccaaaagaaccaaaacaa

SEQ ID NO: 774980 - DNA, 615 bp, Homo sapiens
atgtaataaactgtatttgctttttattagagaaatccttgggaaaaacacaacggaacctactaagaagaggtaagcattttgatttcctctcaagagtaaaaagtgaaggattgaagtgaaatttcagattatcatttgtttttattgggtacacaggattttgtgtttattatccatatagtttttgaccccaaattaggtacatctattagayaggaaattttgcagtgctgagtgcatagttgactgagaattctggttattttgctaaccaaagcttcactgcactggggagggttagagtcccaagatttccttctctttagttccctcttggtgcattgttatcttggtccacttacactgtatcttctacccagtattttcatttataaaatttatgtccatcatttacttataggttcaatatatacatccttatctttaaaagctgtgaagctgtatattttatgtttaagaacctgggaaggagatttagcccaacaacaagaaccaaatacacctatctcgacttgagtcattcctgactctgataggtccttaaaacaagactgtctcactgacaagcaatctctgttaattgtcacctcc

SEQ ID NO: 774981 - DNA, 522 bp, Homo sapiens
ttctcataagtacaaaattgccattcgttgtccaatccaatgagtgtctgtcagccagtggctggggaggagatatttagcttcatcctgaagcagctaattgcctccaaggtgccacaaaaaagagctcatgtttttgtttttgttttttcattaaacatttaattacataaacgcagagaatcatatggttgctttgatgctttatgagcacagacatcagtcctatgataaccatttacctttgagataattgtacctgttttaatgggattgatgttattttaacataaataggtgttaatttggggrcttaagagaaaagagtgtcttttctgtcaaaatgaatgttaggtacattttcagcctatgagaattcacccacgaggacctttatttaggaacaaattatcttcatcatggtggaatgttgtacattacttggttatgtacgtattctatgttgacccctccagaatcttcattatgtgaggacagcaacattgttttatttagaatagt

SEQ ID NO: 774982 - DNA, 635 bp, Homo sapiens; identical to SEQ ID NO: 774371

SEQ ID NO: 774983 - DNA, 635 bp, Homo sapiens; identical to SEQ ID NO: 774372

SEQ ID NO: 774984 - DNA, 621 bp, Homo sapiens
agtgtgaggtctgtcattgaccaaaaggtcattatgtggtgcatgattttattaggccataaaaatgaatgaaatactgatacatgctacatagataaaccttgaaaacattatgctacatgaaaggagccaatcacagargaccacatagaatgtaattttatgtatatgaagtgttcagaatagacaaatctacagagacagaaagtagattagtggttgcctagggctaaagggagtgaatgggacaaaatggagactgaatacaaatggatatggggtttcttctgggggtaatgaaaattttctaagattgtggtgataattgtacaactctgtaaatacaaaaaccattgagttgcacataaatgagtgagttgtatggcatgttaattatgtctcagtaaagctattatgcaaaaccaaaaatctctcactgtcctccagctttcatgtgttccgcttatattattgtattttgcatgttgctttgaaattgccatgtgtgatggatagctcctcatacctccacaacccaggactgaacaagttaaaagaatcataacagagagctagactttcctggctgctacaaaaccattgaaattctgggtaaaatgt

SEQ ID NO: 774985 - DNA, 584 bp, Homo sapiens
ctgggtgaagccagctgggctcctgagtctggtggggtcttggagcatctttatgtctagctaagggattgtaaatacaccaatcagcactctgtatctagctcaaggtttgtaaacacaccaatcagcaccctgtgtctagctcaagctttgtgaatgcaccagtcggcactctgtatctagctaatctggtggggacttggagaatctttatgtctagctaagggattgtgaatgcaccagtcrgcattctgtatctagctcaaggtttgtaaatgcaccaatcagcactctgtgtctagctcagcgtttgtaaatacaccaatcaacactctgtatctagctgacctagtggggacatggagaacttttgtgtctagctcagggattgtaaacgcaccaatcagcaccctgtcaaaacggaccaatcagctgtctgtaaaatggaccaattggctctctgtaaaatggaccaatcagcaggatgtgggtggggccagataagggaataaaagcaggctgcccgagccagcagtggcaatccactcgcgtccccttccgcactgtggaagctttgttctttc

SEQ ID NO: 774986 - DNA, 584 bp, Homo sapiens
ctgggtgaagccagctgggctcctgagtctggtggggtcttggagcatctttatgtctagctaagggattgtaaatacaccaatcagcactctgtatctagctcaaggtttgtaaacacaccaatcagcaccctgtgtctagctcaagctttgtgaatgcaccagtcggcactctgtatctagctaatctggtggggacttggagaatctttatgtctagctaagggattgtgaatgcaccagtcggcattctgtatctagctcaaggtttgtaaatgcaccaatcagcactctgtgtctagctcagcgtttgtaaatacaccaatcaacactctgtatytagctgacctagtggggacatggagaacttttgtgtctagctcagggattgtaaacgcaccaatcagcaccctgtcaaaacggaccaatcagctgtctgtaaaatggaccaattggctctctgtaaaatggaccaatcagcaggatgtgggtggggccagataagggaataaaagcaggctgcccgagccagcagtggcaatccactcgcgtccccttccgcactgtggaagctttgttctttc

SEQ ID NO: 774987 - DNA, 625 bp, Homo sapiens
cccttgggggccccaggaaggatccccccaacaatccctgcaggctcgagggtgtcttctcccgctgcctggcctctctccagcccccgctcccatcttggagcaggagctggggctgagcctggggcatcacaaatggcatcaggaggcagactgattcctgggcagaagagggtgggtccccagtaaggccccacctttggaccagggtgggcctgaaggctgggggccaagctgccagtcgggcagatgggagtggggactcctggtgcctctccccgcctgcccatggtcacccatggaccaatcagcatgcacttcctcccctctgaggtccataaaagccctgggctcagccagaacagggcagaggaggaagargacagagagaagatgggatggggtgaccagctgcagagaggagtatcctctaagctgagagctacagagatgacctgccgggagagaggaaccaccctctcagctgagagcttcagagacctccaagagcttcagagacctgcagagatatccgaatgacttgcttgaggagaggggccaccctctccagggcctcctgtctgctgagagctgaacacttgaagggaccacctgcctacagaga

SEQ ID NO: 774988 - DNA, 490 bp, Homo sapiens
tgaaatgagaacataattattttttacttctcttaaaatatgaaggaagctatcatttaaaccttacttcagtgtattacatgcaacaagttcccttgaaagagtggcagcaaggctattaagctctcaaccccaacacagaatggctgtgttccctaagggtttgtttaaatttaaagcacataagaacagtaaagaaatataatgtaatcgagtaagaaatgttcaacatcactgtcatccattcagcagtraatacatataatgcaaaactacttcaaattgtgtatgtagtgtgcaaagttaatatctaaatagaaatattagatattacttccatttcacatgtttatattttaattcttataaagctcaaaacaattctatcatttataagaaaacttcacacaaatgtgaaggaaatatatctatagtcccctcatagtgatttaacccaaaagtatatctacatacattccatacaaatcaa

SEQ ID NO: 774989 - DNA, 659 bp, Homo sapiens
ataaggatgtaatggaaaagtatataatataaacgtatatatatgtattttatataactagaaaatcagaaagaaggacaactacaagtatgctaatctaatttctaagactatatatggaattcatctgtgaactctctgacaagtcatagagagtaatacaatgagttaaaacaggttttcagctgggcttggtggctcatgcctgtaatcccagcactttgagaggccgaggcaggtgatctcctgaggtcaggagttcaagaccagcctggccaacatggtgaaaccccatctctactaaaaatacaaaaattagctgggctcggtggcaggagcctgtaatcccagctacttgggaggctgaggcaggaaaatcatcacttgaacctgggaggcagaggttgcagtgagccaaggtagcaccatttcctgggcgataagagygaaattccaactccatctcaaaacaacaacaacaaaacaaaaacaaaaacaaaacaggttctcctgattagatgcagtgcaactcatcaaatgatataaaaccaacctctctctctcaacacatatgtatacatattgacacatatgtgttatgtctacagatacaggcatgcaaaaattaaatataaataatttcaagctttattattcat

SEQ ID NO: 774990 - DNA, 553 bp, Homo sapiens
gctctgtcatgaggctacagttaagacgttgactggagctaaacgtttgactgaggctggaggatccaagatagattgctctcacacaacagaagttactgctggttgttggcgggaggccttaggaactctgcatggacctctctatagggctgcttgagagccctcacaacatggcagctgccttcctccagagtaggtgatgtgtgtgtgtgtgtgtgtgtgtgtgtgtgtgtgtgtgtgtgtgtgtgtgtgtgagagagagagagagagagagagggagagagagagagatctcaaatcctttaatgacctagacttgaaggaagtcacaaattatttagtggaagtcayacatgttcacttctactgcattctgttagttagaagtacttccctatgtagagacacactcaagtgaaagggaaccaggctctaccacttgaaataaggagtatcaaggaacttgtggacagcttttaaaactaccactggcaactaggtcttgaggtggataaatgaagaaatttggggaatctcacactggagatgt

SEQ ID NO: 774991 - DNA, 624 bp, Homo sapiens
tcaaaaggttaagcaacttattcaagtacaatcagttaaaaagtactataaccagtacttaaatccaggaaaatgtgactccaagactcatacacttttcattgccctctctatacacattgtgagttacttatagaaacatctccccattgctttggtgttttagacatgaagtccttgcccatgcctatgtcctgaatggtattgcctaggttttcttctagggtttttatggttttaggtctaacatgtaagtctttaatccatcttgaattaatttttgtataagatataaggaagggatccagtttcagctttctacatatgtctagccagttttcccagcaccatttattgaataggcaatggcaacaaaagccaaaatgggatctaattaaactaragagcttctgcacagcaaaagaaaccaccatcagagtgaacaggcaacctacagaatgggagaaaatttttgcaacctactcatctgacaaagggctaatatccagaatctacaatgaactcaaacaaatttacaagaaaaaaacaaacaaccccatcaaaaagtggacgaaggatatgaacagacacttctcaaaagaagacatttatgcagccaaaaaa

SEQ ID NO: 774992 - DNA, 434 bp, Homo sapiens
acaaaatacacattgttctcctcagcacatggatcattttcaaggatagatcatatgttacttcacaaagcaagtcatgaaacattcaacaaattgaaataatattacatatcttctctgaccacaagtggaacaaaactggaaataaataacaagaagaagtctggaaagtatacaaacacattgaaatcaaacaatatrctcctgaatgaccagttggtcaatgaagaaattaagaaggaaatggaaaaatttcttgaaacaaatcataatgaaaacaaaacataccaagacctatggaatacagtgaaagcaatactaagagaagttttggctttgagtgcctacatcaaagaagaagaaaaacttcaaataaacaacttaacgatgcatcaaagaactagaaaagcaagagcaaagcaaacccaaaatta

SEQ ID NO: 774993 - DNA, 622 bp, Homo sapiens
ggctggagtgcaatggcatgatcttggctcactgcaacctccacctcccaggttcaggcgattctcctgcctcagcctcctgtgtggctgggattacaggtgcccaccaccacacctggctaatttttgttttttgttttgttttgttttgttttgttggtggagacagggtttcaccgtgttggccgggcttgtctcgaactcctgacctcaggtgatstgcccacctcggccttccaaagtgctgggattacaggcattagccactgtgcccagccatatcctgatgttttattaagaatctgtaagtttcatgagggtcagcaaagtccttcatgatgagtcttctcaaacagttgtatgattctgcaggagtaatgtcaccttgagtgcccacataaaacaaaccctcttaaccccagcatttaccatgactggataatagggatattcagtgggtgaatatgccagctatcataaagccagtcccacatggcttgcatatgaagcatatcagctgcttcatcttggtgctgcacttggcattttatagggagagttgggcagtccccttcttaggaaaaacagaccttacagtggtgtttatccagtccactaggct

SEQ ID NO: 774994 - DNA, 622 bp, Homo sapiens
ggctggagtgcaatggcatgatcttggctcactgcaacctccacctcccaggttcaggcgattctcctgcctcagcctcctgtgtggctgggattacaggtgcccaccaccacacctggctaatttttgttttttgttttgttttgttttgttttgttggtggagacagggtttcaccgtgttggccgggcttgtctcgaactcctgacctcaggtgatctgcccacctcggccttccaaagtgctgggattacaggcattagccactgtgcccagccatatcctgatgttttattaagaatctgtaagwttcatgagggtcagcaaagtccttcatgatgagtcttctcaaacagttgtatgattctgcaggagtaatgtcaccttgagtgcccacataaaacaaaccctcttaaccccagcatttaccatgactggataatagggatattcagtgggtgaatatgccagctatcataaagccagtcccacatggcttgcatatgaagcatatcagctgcttcatcttggtgctgcacttggcattttatagggagagttgggcagtccccttcttaggaaaaacagaccttacagtggtgtttatccagtccactaggct

SEQ ID NO: 774995 - DNA, 622 bp, Homo sapiens
ggctggagtgcaatggcatgatcttggctcactgcaacctccacctcccaggttcaggcgattctcctgcctcagcctcctgtgtggctgggattacaggtgcccaccaccacacctggctaatttttgttttttgttttgttttgttttgttttgttggtggagacagggtttcaccgtgttggccgggcttgtctcgaactcctgacctcaggtgatctgcccacctcggccttccaaagtgctgggattacaggcattagccactgtgcccagccatatcctgatgttttattaagaatctgtaagtytcatgagggtcagcaaagtccttcatgatgagtcttctcaaacagttgtatgattctgcaggagtaatgtcaccttgagtgcccacataaaacaaaccctcttaaccccagcatttaccatgactggataatagggatattcagtgggtgaatatgccagctatcataaagccagtcccacatggcttgcatatgaagcatatcagctgcttcatcttggtgctgcacttggcattttatagggagagttgggcagtccccttcttaggaaaaacagaccttacagtggtgtttatccagtccactaggct

SEQ ID NO: 774996 - DNA, 623 bp, Homo sapiens
aaaactgtgcagaagacaaataaaattattcctttgctgtttgctgttagcatttgcaaaaatattgtatctggcttatcccacaagtatattaagagttcagatcaagttatttaactagaatataataataagttaattaaggagagtaaaatttttggtcagattcactctgtaattcaggaaaagaccaagtattttatcttgagctactgtataatgagtatgaattgatgctaatttgggtagtatgaataaaatatttcacaagtaatcaaatgtawtattaatttatttttctaagtaatctgccagcatctaccaagaagtaagtcataacttcttacattaaatgtttttaaataatttgtcatttttatatagctataaaatgaatattatttattttttccagaagtttaagcttaacaataatatggtcttccaaaccagtcaggtaaaattcatctgttaatgttgtgtttgattaatgaggtgtatttttatcaattataaattattttccatgtgagtattattttttcatctccaagtgtaaagtgagtgatgtttgtattgtcttaactgctatgaaattatgtgaaaggatcacgtgaaaacat

SEQ ID NO: 774997 - DNA, 528 bp, Homo sapiens
ggctattgtaattataaaatgtgtcctttttgcacgtctgcctacctactacttagcaagctcttaactatcactggcatctctaacttttcagtttgtaccacagctcctagtcaatgtctgacccatagaaggcygtcagtatatgcttaaggtgaataagttcagagtaaagagagttcaaggcagaaaacaggacaatatggttcattaaaaaaaaaagaagcaaaataacacaatttcaagtagcaagccaatttacaaagttctagaatgttgtattatccagatacttattgtccttaaacacacataaaagaaatatgtactagaacttatatgtcattaacatagctgcattagcttaactgccatgatgtaacaccatagaaaaatagcacaggattttactgttctaaaattgggtagaatgttaacttacctcactgcttgaaaggctttctatggtctgtgggaaaaaaaaattgacaaccagctaaatcttctagatcattagagaattttact

SEQ ID NO: 774998 - DNA, 522 bp, Homo sapiens
tagcatagagagttatttttgggaccaaaatcatttttaagggagaagaaggagagtgctagggttcagattctgaacccagagtcagaaagtgagaggaagccactgaatgctgtgagatgggtgtagtgtatgctttctcctgaattgccttttgacacgccaccttacacacttagcatgtaaaagactggaaatctgacaaattaaattagatgtcttgttgtctcagtgtccattaactgcaccatcctcttgctcagattaaaagcytaaggatataattgattgcttttccatctctggcagagagctgttcacttttttaaaaactttttttttatttccataggttttgagggaacaggtggtatttgcttacatgagtaaaatatttagtggtgatttgtgagattttggtgcacccatcaaccaagcaacattcactgaacccaacgtatactcctttatccctcacacccttcccaccctttcccccaagtcctcaaagtccattgtaac

SEQ ID NO: 774999 - DNA, 586 bp, Homo sapiens
acttgagtcttcttatattacatcactctgaaccctctgtctttctcttccacgtatgaggactcttgtgattacattgggtccacctgaataatctcaacgttggtgataagcaaatttaattccatctgcaatcttaatttccctttgccatgtaagctaatgtattccaagattcctggaatgaraatgaggacatatttgaggggtgggaaggtattggtttgcctacaacacacccttaggatgtaatcagcttctgactattagacgttagaaataccctgcactcaaaggtaaggcctgaaaaaaacaataaattgataattcaagtagacataaaatgactattttcaagaactggtaaagaattggtacattccgtgcacagaaaatttatctatgcattaaggacacttttggttctaatattttatgattccttaaatattactttgaatgagaacaaaagacattgaaagaaagtaaatacaagctgaggtcaaaagaactgttcaatattcatgatgcttatgcaatacttcaatttggtatctaattttctgaagtataattaaacatgaaa

SEQ ID NO: 775000 - DNA, 417 bp, Homo sapiens
gtagcaggagagggcacctagtaatgacacatgcagactggttctaggtcagcaatcttgtacttgcagcatgtctcatcacaaaagagaaacaacagctctagcagctctcctctgcaccatgattttgaggtggcaaaagcacaattctggtgcctagttttccagtgctttccataattctggctatgaaggttcttaacccactccagagcaggcagtttaaactctggcctgagactcaaaarcctgcatagccatgttcccaagtcaccaaagaatggctgactttgtatgcacctgtattaaaaatggcatcctgccatcagtcctgggtctgtgaaaatgtctgcagatgttcccagtgtctttccttcatagtgtctcatagcctctccccaggttagcttcaaggct

SEQ ID NO: 775001 - DNA, 635 bp, Homo sapiens
actcacagtttcacatggctggggagacctcacaatcatggcagaagacgaaggaaggggaaaggaacttcttacatggctgcagacatgagggcatgtgcaggaggactcccatttatagaaccatcagatctcctgagacttattcactaccacaagaacagtatggaggaaaatgctcccaccattcaattatctccatctggcctgcctttgacatatggggtttattacaattcaaggtgagattccagtggggacacagccaaaccatatcaaccttgaaattagtagtttcttaatcttctttaaacatcagttttcttatcaacaaaatagatattataataatacttaacctcattttagaattgggaagactattaacaaatatattacgtaaaatcccctgattagaaaggtgtacagttatgactgcagatttccmtgccactaattctgtttcagaatgttgttcaaaactatgccttctaaaacacaatctttggagaagatgtacaagcactatatgggaaattgtgggaaatttacattatatgccctaagtaaatccaagagcaattactgaaagaatcactagtataataccaacaaggagatataaaaacgtcttc

SEQ ID NO: 775002 - DNA, 641 bp, Homo sapiens
cacaagccctaagtatcttcccagccatccagcttgtgcctctccccataaacaccgccccagcccctggagctggcctgtaaacaaattttctcccctgcgcatatcccactggactgggaggtccagcaccatatttagttaatcccctgacgtcagccttgggtccactcttgcaaataatccccaagctatgaacacattgtagccaaagggtggctggtgctggggatgcttacagcttgctcaggatgtggtcaagaaggcagctggggtgagtgacttctgcccatgctgggagccagcctgtggcacgcacttggtgtgctgttctgggtgtgggcttggaatctcgactctgggaggcagcggaggccccacatgcctccagaagcgccccctgagaagtcactcttctcttacaaccaggtcagcacagctcaccctctgcccttgcttctcttctctggcaccctgagatacctgmaaagtggcaactcaagaaacttacccagccacagggtcccaatctgccagcgggtggggagaagggcaaggaggtggagaacccagactcatccgctctggagcccttgtgtttgagtcccatgcctcgctccttcctttctgttgctctggtg

SEQ ID NO: 775003 - DNA, 382 bp, Homo sapiens
aaactggaatgtcccagccaatcagggcccgctggtcactctatgaacatgaagagactggctcaaacaaacatgccctttggctgttatgtttaaagagagctatgtctggagtcagctatcagtgagtttgaaacccccaccagtagaacttctagaaagacttgtcaagtcattggaaagctcttcctttttttcactacactgaccttgagcaaactgccacattcrtgtcagtgttggtttaggcccctggagtcacacaggacaagccagccacctccctccccaggcagcagccacttcctccctttaatctccgccagcacttcctctgcatcattcttaaccctttgccagccgacccccaccaggccaactg

SEQ ID NO: 775004 - DNA, 626 bp, Homo sapiens
ttttttttttttctcaagaatgattaatattttctttcttttttttcagagatagagtctcactaagttgtccaggctggtcttgaactcctggccttaggtgatcctcctgccttgaccttgcaaagtgctgggaatacaggcataagccaccatacccagccagaatagatagtttctactgatctatctccaagtttgctgactctttttttgtactatccaattctaaaatttccatttggtttgttttttatattttatatttctctcctaagatttcccatcttcttattcactatgagcacatttttcattatgtaactggacataggtacaatagttgacttaaatccttgtctgataattccaccrtctggttcatctcagggttggcttctgttgattgtcttttccttgacaatgggtcacatcttcctgattctctgcatgctaagtgactttggattttatgctggatgttgtgaatgttttgttgtgattatggattttgttatattgctctgaagagtattgatgtttttgttttagcagtcaattaagcttgttgattgcaaactctgtgtcacctatgtgggcagcaattaaaaatcttagttgaattt

SEQ ID NO: 775005 - DNA, 619 bp, Homo sapiens
tggtcacattattcttattttataaagaaacaaagcaattattttataaataaataagactcgaggtcacacagctaggtcaacccagttccgcctccaaagccctgctcctaatcacgacttcgtcctgcctcccatgcacatgcgatgattctgttccaggactccacaggccataagcccacagatacaccaaaaggcattgtgattttttttttccttttgctgcctgtrgtgtctgagatggaaagtatgccagcccctgcttggagcaaccgcagaagctccagaagaatgcccccaccttgctcctctcaggttctctgtctcagacgtggcgccatcattgacactgtcctcccaagctagtgtgttctgacaacttgctggtaatgggacgccagcggcaaattattagcctcctccatccccaccgcacgcagccaggcttggcttgttgctgccgaatgcccgatacatgtcagctctgtttggaaattggatccagtctggaaattcactcgatcacagtggggatctgaagggaacagttgaaactcccacctggattcctgcaactgtccttccttggggctttgaaggggtcccaggcacagtg

SEQ ID NO: 775006 - DNA, 601 bp, Homo sapiens
cacacacacacacacacacacacacacacacgtatatatatacatacatacatatatacatacatacatatatatatacacacacatatatatgtatttgaaatgtgagataaacgtaaaatatatttgtatatatattttatgcctcataaattcaggaaattttgcatttattttatatatatgaaattttctatacatactatatatacatattatacacacacacacacacacacacacagatctagtttatatatatttctcccaagatcaacatcatttctgtcagcttagccacatactttcttaggctgtggaggcatatgaacctcagaacaccaggttattatattaggtttgctcctaatatcaactttctcttttcaatttgatctaaactgttaggtgaggatctaaaaaaagattaagattggggaaggataacarttcaggcttttggtacaggctgaccttgatcatttttgtcttgtgtttgaaataaacctcccgtcatttaattcagacctcaccatccatatcctcttaaacagattatttgtcatctagaatctgagcttaaaatgactttggtttcttc

SEQ ID NO: 775007 - DNA, 566 bp, Homo sapiens
ccatccagcattgcctctgatcaaggcactcgctttttgcctaaagaagtgcaaaatgggctcgtgctcatggaattcactggtcttaccatgttccccattatcctgaagcagctggattgatagaaaggtggaatggcattttgaagtcacaatgccaactaggtaacaatactttgcagggctggagtgaagttctccagaagaccatgtawggtctgaatcactgtccaatatatggtactgtttctcccatagctaggattcacaggtccaggaatcaaggggtggaagtggcaccacccaccatcacccctagtgatccactagcaaaatttttgcttcctgttcccacgacattatgttctgctggcctagcagtcttagttccagagggaggaatgctgccaccaggagatgcaacaatgattccattaaactggaagttaagattgccacctggacagtttgggctcctcctacatttaagtcaacaggctaagaagggagttacagtgttagttgggatgactgacccagactatcaagatgaaatcagtctacta

SEQ ID NO: 775008 - DNA, 525 bp, Homo sapiens
cccacaaaacacctaaccagcaccttacttatggtaggtacaaaaaagttaagtgaaatccagtttccattttatatatttaatctgctatattactgaaaaaataaatacatctaattgtttggtgttatataaagagatcatccagctaagaatcttaaatattaggagctatttgtgaaaccacctttgtaaattataactgaggaaattatgacagtgagagaaataagacctaaccaactctatcttgcttctaacccttaarctgtccttgttcattcctgggcataggccgaactaactttgggaaggaattcagttcatggtttgactctgaaacaaaattgataacagccctttcccgaaaagaccctgttcttgcctggggtccaatctgcccttgcagaactaccaaattagctgcaagattagaaattacaatttagggttcatgcagcctgtggctgaacctccccaaattgctcctggggataacatcactattgtaaagcttaagatcag

SEQ ID NO: 775009 - DNA, 601 bp, Homo sapiens
cattctgggtagcatatggggcatagatagtccctggaatgaggtggtagtccagttgctgaaacttccactggtgttaacttggtagaatattctggtggacagtaaacatctgggttggtgcaaagattcagactctttcagcatggggatagcagmattttttttttctgagacagtcttgctctgttgcccaggctggagtgcagtggcacgatctcagctcactgcaagctccgcctcctgggttcacacctttctcctgcctcagcctcctgagtagctgggactacaggcacccgccaccacacccggctaattttttgtatttttcagtagagacggggtttcactgtgttagccaggatggtctctatctcctgaccatctgcccgcctcggcctcccagagtgctgggattacaggtgtgagccaccgcacccggccagggatagcagcatttgaaaacaatgaactggcttgctgtgatgaagcctaaagagaataatgggtaactgaagatagttgccaaacagttaagaactaagtgtgaggaccaccaggcatctttagtagcttacaaagtgtctctccctcctgt

SEQ ID NO: 775010 - DNA, 592 bp, Homo sapiens
taatagtataagctcaaactgcaaattgtttatttttttcttctaagttgtcactgggttctttttcaattggaaaggtggaatgaatcagagagatggattagaaccataaaaaatgttccacatcactaatatcagagaaatgcaaattaaaaccacagtgagataccatctcacacgagtcaggatggctatggttaaaaagtcaaaraaacaacagatgctggcgaggctgcaaaggaaaaggaaaacttatactctgttagtgaaaatgtaaattcattcggcctctgtggaaagcagtttggagatttctcaaagaacttaaaacagagctaccatttgacccagcagtgccgttattgggtatacacatccaaaagaaaaccaatctttctactgagaaaacatgtaggttcatcacagcactattcacaatagcaaagacatggaatcaacccatcaacagtggattggataaagaaaatgtgctggaggccattatcctaagtgaattaatgcaggaatagaaaatcaaataccacatgttctcactttgaagtggaggctactagatgggagagggagggag

SEQ ID NO: 775011 - DNA, 592 bp, Homo sapiens
taatagtataagctcaaactgcaaattgtttatttttttcttctaagttgtcactgggttctttttcaattggaaaggtggaatgaatcagagagatggattagaaccataaaaaatgttccacatcactaatatcagagaaatgcaaattaaaaccacagtgagataccatctcacacgagtcaggatggctatggttaaaaagtcaaagaaacaacagatgctggcgaggctgcaaaggaaaaggaaaacttatactctgttagtgaaaatgtaaattcattcggcctctgtggaaagcagtttggagatytctcaaagaacttaaaacagagctaccatttgacccagcagtgccgttattgggtatacacatccaaaagaaaaccaatctttctactgagaaaacatgtaggttcatcacagcactattcacaatagcaaagacatggaatcaacccatcaacagtggattggataaagaaaatgtgctggaggccattatcctaagtgaattaatgcaggaatagaaaatcaaataccacatgttctcactttgaagtggaggctactagatgggagagggagggag

SEQ ID NO: 775012 - DNA, 642 bp, Homo sapiens
gtgttaatgcataacctcattcaatcaacttcttgaagaagcaagctctaatcaaacttagaaaaaccctccatttctctgaacctaagtacagatagtacaccacattgattgaaatattttaacttatttcaaaataaccaatggactctgatatctgatctaacataaacagtttagctattgacatgaagacctggggstattatttccagcagcaaatttcagtttaacaaaactatcaaaataagttaagctgatgttacgcaatctgcctggtgagactgagggcagccagaggtcagacttccttcctgagaggctgcatccttgtgctatttaccctgttgccacctgcattctctgccaacttccccaagtatccagagaaagcctctcaaagagaaaggctagattaagtaactgtcctaaccccttcgaatgatatcttctcttaaggaaattttaaacagttttgaaaagtaattttcttcagatcatagcaattgaactgtgctttcaaagtcagactgattaattttgatggtctctccattttcaccactgttattcaacatagtactagaactcctacctagagcaatgagatgagaataaaatagagagcatccagattggaaa

SEQ ID NO: 775013 - DNA, 636 bp, Homo sapiens
catacatgtatatttaatatataagttaccaataagagctgaaccaaatcaccaaaacccaaactatatatttatatcttgttcatgttcacatctagctaaaaaccaaacaaaataaaaattccctggagcatgggcatctttaaattatgttacatgtgtcagcaagtcctgtctactgtgggttatcttggggcttcaatctcctaaatattgaaactgtagccagaatagctaaccttttcaagcaattataatattctcctctaagccaaagaaaggagttattctgcaggctgatagaatttgagggaaaaatttaatcgtggccacattaaaaggcttagccctcttstaaaagatgatcttattcttaggttattgtctgtgtagctcttattcagaaaatatagattggagcaaaactcaagtgttaacattcttataactccttctttctcatttcgcagtcctgccttgttctttttcactaatgggttgataatagataatcagctaattaattctcctatggcatataatttatacctctactctatcatttttattgtttgaattattttattaaaattgcatcttgtcagaattattttacatgttcatcactttcaaaat

SEQ ID NO: 775014 - DNA, 582 bp, Homo sapiens
ttgtcagaattattttacatgttcatcactttcaaaattatttaggcttttaattcactgtcctattgtccaatggtgggcacatgcagagctcactaaataaatactgatttgaacttctttgaataatctcttctggtctctgtttatattacattataaaaataaaaaaggaaactccctgggagcaaggacattatgttccatgtatcctccttatactacatgccatcatacatatagcaattgcttcatattatttgaatggttgtttaggtagaaggataatatttttgtttgttttcttyaccaaagcaaagctgtatttctgttaatattcagggggtacctgtggttgaaagctagtatttctttgcagatgacctgtttgtgctcctagaattaataaacctatgaatagaaaacctatattttctagatttgcaagatcagatcactgcagttagcaataagtgttacagtaagctgtataaaaaacaattcagttaaattttctgtctcagaaaatgtctcaatttttaatcaagacagagaacttgaaaatttctcttctatcataca

SEQ ID NO: 775015 - DNA, 582 bp, Homo sapiens
ttgtcagaattattttacatgttcatcactttcaaaattatttaggcttttaattcactgtcctattgtccaatggtgggcacatgcagagctcactaaataaatactgatttgaacttctttgaataatctcttctggtctctgtttatattacattataaaaataaaaaaggaaactccctgggagcaaggacattatgttccatgtatcctccttatactacatgccatcatacatatagcaattgcttcatattatttgaatggttgtttaggtagaaggataatatttttgtttgttttctttaccaaagcaaagctgtatttctgttaatattcagggggtacctgtggttgaaagctagtatttctttgcagatgacctgtttgtgctcctagaattaataaacctatgaataraaaacctatattttctagatttgcaagatcagatcactgcagttagcaataagtgttacagtaagctgtataaaaaacaattcagttaaattttctgtctcagaaaatgtctcaatttttaatcaagacagagaacttgaaaatttctcttctatcataca

SEQ ID NO: 775016 - DNA, 645 bp, Homo sapiens
attacagaagcaaactgagttccagcaggtcaaatacaaccttattagtttgatatgttaagcagccctttggaagggtcagtgggggtggtatgatattgatgggcatggtacaatatatgcttgttgaagactgtggtagctcacacatcagctgaattttgtatctctttagcttttcaggggttctttaagcaacagggaggtatgctyatatgtgtgccttatgctcagaaaaatagctcgatcaccaagcagctgtaatccactcgactggtctctcttccttatggaaactgggtcctgaagttcggtgtcattcttttttttagaaatcatgccaccctcaaagcctcatccacctgtcgtgggcaaagtgactcatcacagcattgaattatactgggatctggaaaagaaagccaaacgccaaggacctcaagagcagtggttcaggttctcgattgaagaagaagaccccaaaatgcacacttatggtatcatttatacgtaggtgcagtgttgaattgcttgccactttgccttacttcctgattagctggaatgatttctgttgtctctaaaaagccactgcttgtttcaaattaaagaatgagtcagcatcatttgtattcatgctctttt

SEQ ID NO: 775017 - DNA, 734 bp, Homo sapiens
atatgccttgacgttttctgcatgtgtgttcagttgttttccctgtttggacagattttcccctctcaccctattctttcttctgccctggtcagattttacctccactgagaagctctccttactaccctattgtctgtgccctaaattcctgtgatcrttgctgcccatgccacgcattccatttattccatcagcgtgtattattgagtgtctgccgtgtgtcagacactgctccggatgctggggatacggcactgggaaaaaattcctccctcatgatgatgaaggcaaacaataaataagatacataagtaaaaataggtagtcagcaggcaatacatactgaggggcagcagcataggaaaaattgagggcctggggtagaggtggggaagtcttcaccaagaaggtagcttctgagtagatctgaagcaaggatacctggagccttgcaactatctgggggaagaaccttccagacatagcaaagggcaggtgagaaagcctggcagtacaaatgtacctggctggtcccaggagcattgaggaacagagggaacaaggaggaaaataatgggggcgagggcagctgggtcatgagaggtcactgcctgggccttgagggttattgggagaactctggcttactctgagagaggcggggaaagccactggagattgtgaagctgagaagaggtgtgatccggcttatgttttacgaggatccctct

SEQ ID NO: 775018 - DNA, 734 bp, Homo sapiens
atatgccttgacgttttctgcatgtgtgttcagttgttttccctgtttggacagattttcccctctcaccctattctttcttctgccctggtcagattttacctccactgagaagctctccttactaccctattgtctgtgccctaaattcctgtgatcgttgctgcccatgccacgcattccatttattccatcagcgtgtattattgagtgtctgccgtgtgtcagacactgctccggatgctggggatacggcactgggaaaaaattcctccctcatgatgatgaaggcaaacaataaataagatacataagtaaaaataggtagtcagcmggcaatacatactgaggggcagcagcataggaaaaattgagggcctggggtagaggtggggaagtcttcaccaagaaggtagcttctgagtagatctgaagcaaggatacctggagccttgcaactatctgggggaagaaccttccagacatagcaaagggcaggtgagaaagcctggcagtacaaatgtacctggctggtcccaggagcattgaggaacagagggaacaaggaggaaaataatgggggcgagggcagctgggtcatgagaggtcactgcctgggccttgagggttattgggagaactctggcttactctgagagaggcggggaaagccactggagattgtgaagctgagaagaggtgtgatccggcttatgttttacgaggatccctct

SEQ ID NO: 775019 - DNA, 666 bp, Homo sapiens
ggctaatattttgtatttttagtagagatggggtttcaccatgttggccagggtggtctcgaactcctgacctcaggtgattcacccacctcagcctcccaaaatgctgggattacaggcgtgagccaccgtacctggcctggtctcagtcttcttgctttccatggcacattccctgcacttccggctttctcaagatgctgacattttttcttctgttatgttatcrctggaaatcttgtttctaggttcaagtacccactcttccaacactttttaatagagaaagtgagcactttctctattagcccagtgggtgtatattcataacctccacaactgaaccacccactctattgcttatgaaagtgaacccttaaaagctcttttaccagaataaccaaaatgggatgaagtcacagccgaagaataatatttaagcatgtgatagatgcacctgcctttttttaaacctgattttgtcaggcagccttgatgaacctgcgtggatgcaggatgatgagcgccaaagcgccttcccacctgctctgcgacatccaaaaggtgtggctgagagagtgacaggtcagtggttagcgattctttttgctggctactttcagggggaagccttgttttatagctgggcatgtatggggtctaaga

SEQ ID NO: 775020 - DNA, 596 bp, Homo sapiens
tggcgagttccatgatacctacattagggtttacgacatttatattctgatctatagccataattcccacaattgtttttagctagaggtagaccgaatttgcacagtgaaacatattgatgccgccccagccctgcatgagctcgtcagggatctctggggcatctctggcattttcctgtgatgaattccagtcttcctgcagagatttctctggataagcagggcatgtttactctcgtttaccatgtgaagttgataacagctgagacttcatgatgctggtcaaggcaaagtggttatatctggatttaaaattgttttgaaacctctaaaaaatytgaaatatgtggctattgccagaacatgagcagaatatagaagaatggaacagccctatttaatagcatattaatagcatacctggatttttcttcaatatctggaagaagttaagagggcataaaaatgaggtttgaattcatttccttgtttaaaatgaaaatagatttaaagaaatgtttatcgtgtgtgagcaatctgcttagagtcatttctcagctcccttcagatgatgcttggtgatcacactggac

SEQ ID NO: 775021 - DNA, 594 bp, Homo sapiens
ccagaagccccatagttgagtgtttataactacgatccatggataagtcttaaatgttacagaaaattttggcaagaagattaacagaggtcagcctccacccaccttgtatggtgacaggatgatattcaggaagcagggcctgtgccaagcggcaggccctgcttctcaggggcctctgctggctcctggwaagtgaccctgcctaaccctatgtttattgcaggggacctgtaagccaaacccccctcagaagcctctgcctgcagatcctctggccagaacaactcggctcactcatgccttggccaggaccccaggacaatgggagactgggctccgcctggcacccctcaggtttgtgtgacatgccatgcccatctctttctctctcaaactcttgtgggaccaaccacgactaatccaagccaggacaggggtgcagtggtctaggccgtgcttcctgctccccctacaactgggaataccgtaaaatagacatgacaattaccaggaaggaagcagtccctgtgagcttataatcacaggcattggcacacagtgcctatcaacagccacagtggacctaagaga

SEQ ID NO: 775022 - DNA, 682 bp, Homo sapiens
tcacaggcattggcacacagtgcctatcaacagccacagtggacctaagagagcaaatcaagatgtcataaaactacagtacctcagaaagccaggcctgtaagacacaaagaaaaagaggagctaccaagtagcatgacagtatgaagactggacacctgtgttagtctgttctcacattgctataaagaaatatcgaagactgggtaattcctaaagaaaagaggttcaattggctcacagttctgtaggttgtacaggaagtatggcagcatatgcttccggggaggcctcaggaaacttacaatcatggcggaagggggagccagcacttcmcatggctggagcaggagaaagagaaaaaggggaggtgccacacacttttaaacaaccagatttaatgagaactcctatcacttagaaccaaggagatggtgctaaaccattcatgaaggatctagtcacctcccacaaggctccaccttcaactttggggattacaatttgatatgagactggggcaggaacacagattcagaccatctcaatgcccacctccacaactctcagcagaatctgcccagttcctgaggtcctgagacattagtcgggttggaggcatacggctggagcaagggacatatggggagtaagggaaagcagctgcctggcagcaggacac

SEQ ID NO: 775023 - DNA, 559 bp, Homo sapiens
aggagactacactctagataaacaaaacagacaggcgaatgtaatccagggttttggtggtttttctgagtctagaaggactaaaaattagccttgataggcagaaagagcatcccaacctgtctgtcaaaaactctggccatttctaggacacctttgccgaactgaaacaggaaacaacaaaaattttacatgcttataaatgttttctccccctccgaggaaaatctttacataaagatggactcatttacctcattttttacacttgcatctgcccctttgtcaagaagtaactgaactaactcttcatgattatttaacacagccacctagaaaacaaaacccagggtggtgtgcatgarcttctccctccagggcacacacagcagggggcatgagcctggcacatgcagggtcccagcagcccccctgcaaccccaaaagaccactgtggctttgcatggcctgcaggcacagcgcttcctctgcagctgtatggtagcaactccagagaaaatggaaaatggactccctctatccacactaaaaccagaac

SEQ ID NO: 775024 - DNA, 559 bp, Homo sapiens
aggagactacactctagataaacaaaacagacaggcgaatgtaatccagggttttggtggtttttctgagtctagaaggactaaaaattagccttgataggcagaaagagcatcccaacctgtctgtcaaaaactctggccatttctaggacacctttgccgaactgaaacaggaaacaacaaaaattttacatgcttataaatgttttctccccctccgaggaaaatctttacataaagatggactcatttacctcattttttacacttgcatctgcccctttgtcaagaagtaactgaactaactcttcatgattatttaacacagccacctagaaaacaaaacccagggtggtgtgcatgagcttctccctccagggcacacacagcagggggcatgagcctggcacatgcagggtcccarcagcccccctgcaaccccaaaagaccactgtggctttgcatggcctgcaggcacagcgcttcctctgcagctgtatggtagcaactccagagaaaatggaaaatggactccctctatccacactaaaaccagaac

SEQ ID NO: 775025 - DNA, 566 bp, Homo sapiens
cagacctgtttcttttccctacacaagataaacccccatgacaatcggaaagctcactctcatgtccattctaaggtttcaggggctttcttgctaagtcagaaaactttctccagcatttctaaggttagctaatcaaaggccctgcttctgccagaccccatggagcagcatttcagattcttaacgatatgtgcgtggttaacaaggcaggtcccgtacctcacagccatcctttatcatccactcaatcacactgcagtggcctccatctgcagcccagtgcagagctgtacagcctcccaggtctctagcctgccaagaagcgccatgtcttcggagatatttcacaacatctaggtgtcccgcatagcacgccagcattagactgcaacatatggaagaagcrgcatttgacaataagcacagtcaccaaactcagctccaccttttaccctacctggcttaaaccaagaaatcctaacttgagtggaaaagccatgggaactgttcatataaaacgtacacgtatccatcaactgatgtacaaaatgtggtatatccat

SEQ ID NO: 775026 - DNA, 633 bp, Homo sapiens
tacagagaagaaaatttgctgtcatcattctaaaaaaaataatgaaacctagaatcactacctgtgagacaacctgcatcacaggcctcccaatggatgtaacatgaagtcacaacactagctctgaagcattcttgctaaaggttaacctgagtctaattaagcctttaatttttttttaattcttaaaaaatttcaccttattgcccacgctgrtttcaaactcatggcctcaagtgatcttcctgcctcggcctcccaaagtgctgggattacaggcaggagccacagcacccaacctaatagagcccttaagcctgtctttaactttattgttaataaagggatagatgaacaagtgaaatgcctgccccacaaccgggagacaagcaaatccagaacataggacattctataagataactggtctgctctcctcaaagagtcactgctatgagaaaaaaaaaaaaaatttaaagagaggactggtctagaaccagagactataaagagagagaatggccagatgaaatgtgggaacgtctcaccccacaacacccccaaaaccccacaccacctcccaaatagagctgtggaagacctttggggaacaggttgggagacctgcagggt

SEQ ID NO: 775027 - DNA, 624 bp, Homo sapiens
ggtggtttatatcaggaagtcgatgcacaatgacattcagtaaatcaatcctaaaggcctcagcccgccatcaaaatatggctgccagatatacagtttcatattttaaggcaaaataaaatgcgtagagtatatgtctcccatgtaatgctttcctgcttcaaccgacttgttttgatgaatcaaccacctaccctcattgcttcagataagaaggccgactgtcaagataggctttaataagttagaaagtagactgctataaagcagaaattgagtagaacttgtcagcaagtggcagagcctaygtcaaatgtaagtgtcttgcctgtcccctcaaagatgctgctgtggacgtactagccccagattcatgcctgcccctcatggcttctctctgcaacttgtggtcatgcgccttgttttaaaacccacaggaaggtgctgccgggagcctgcccttgttagggtgggactgtggccaagctacccttcagcaaggctgggtaggctccacctacccagcaaatgcgggcctctccgctcccatgtgtggataaggccaaggggtattggaaagggagtggtccagggtcctcaaccagcttgcagcttgccggccat

SEQ ID NO: 775028 - DNA, 634 bp, Homo sapiens
atttggaaactgtgaagaggaaggatccttcaccagcacactcggtgctcatcacgccacgctccacactcacctctccagccttgtacacttgatgtaaaatatttcttttggtttgagatttctttttccttttcctatagtgagcatcctttagggattctgtcagagagccaccaaggagcacattcacattttcttcatgtgtatctgaaaagaattgttgccacagttgtcacacggatgctgaaatcaggagtttgggcctgtctgggttttgctgggtctatactggcaaatggcttcaactgacgagtgtgtccccagctgccaactgggagtkggggcgggcagcgtgttcgtgttgtgcactgaggataatgtgggatgagaaaataagcaaatgagggttaccccctgctctcctggggtgcaaatcattcacattaagctgaggtcagaccttctgcaatctacacccagatcaaatgaccacgtttaaggagaatgtgttgccatcctacttccccgcaagcatgtataactggcccattcgattacatttaattccattcaggacacattcatggcacacctgcctggacacggaacacaaacagatgtgtccccaggt

SEQ ID NO: 775029 - DNA, 613 bp, Homo sapiens
gaactgcttgcatttttccagaccgacctaagtagaagccccaggacataaagtcaagcggctttttcccagtgtgtttgacacatggaagtggccgtgaacacatctgggctttatgagagaactaaagctgcctcagtacagagccatgtccctgtgcaacctctgggaggtgggaggtagccccatttttaagccatttaattctgcaaacctccttcaatttatgttccarcagcagagaatgctttcctgtcactggctcgttaacccagcattttatttgttgtacagcatgtgtgaaaacatttcagctgaaatcctgccaatcctgcaatccccctcccacacacttacccccatggcttcctcctctccccaggcacagaggccacagtgtagggtaaaggattatttctagacttctctacaacagacaatatccaaaaggactcattttcagctccacaaggtcaggaatttgtgttttgtttattgctgaatccccagcacctagaacagtgcctgacacatagtagagctcaataaatacttcttgactgaaaggatccatgagcgggtggctggatgatggatgcatggatgggaggaa

SEQ ID NO: 775030 - DNA, 613 bp, Homo sapiens
gaactgcttgcatttttccagaccgacctaagtagaagccccaggacataaagtcaagcggctttttcccagtgtgtttgacacatggaagtggccgtgaacacatctgggctttatgagagaactaaagctgcctcagtacagagccatgtccctgtgcaacctctgggaggtgggaggtagccccatttttaagccatttaattctgcaaacctccttcaatttatgttccaacagcagagaatgctttcctgtcactggctcgttaacccagcattttatttgttgtacagcatgtgtgaaaacatttcarctgaaatcctgccaatcctgcaatccccctcccacacacttacccccatggcttcctcctctccccaggcacagaggccacagtgtagggtaaaggattatttctagacttctctacaacagacaatatccaaaaggactcattttcagctccacaaggtcaggaatttgtgttttgtttattgctgaatccccagcacctagaacagtgcctgacacatagtagagctcaataaatacttcttgactgaaaggatccatgagcgggtggctggatgatggatgcatggatgggaggaa

SEQ ID NO: 775031 - DNA, 613 bp, Homo sapiens
gaactgcttgcatttttccagaccgacctaagtagaagccccaggacataaagtcaagcggctttttcccagtgtgtttgacacatggaagtggccgtgaacacatctgggctttatgagagaactaaagctgcctcagtacagagccatgtccctgtgcaacctctgggaggtgggaggtagccccatttttaagccatttaattctgcaaacctccttcaatttatgttccaacagcagagaatgctttcctgtcactggctcgttaacccagcattttatttgttgtacagcatgtgtgaaaacatttcagctgaaatcctgccaatcctgcaatccccctcccacacacttacccccatggcttcctcctctccccaggcacagaggccacagtgtrgggtaaaggattatttctagacttctctacaacagacaatatccaaaaggactcattttcagctccacaaggtcaggaatttgtgttttgtttattgctgaatccccagcacctagaacagtgcctgacacatagtagagctcaataaatacttcttgactgaaaggatccatgagcgggtggctggatgatggatgcatggatgggaggaa

SEQ ID NO: 775032 - DNA, 613 bp, Homo sapiens
gaactgcttgcatttttccagaccgacctaagtagaagccccaggacataaagtcaagcggctttttcccagtgtgtttgacacatggaagtggccgtgaacacatctgggctttatgagagaactaaagctgcctcagtacagagccatgtccctgtgcaacctctgggaggtgggaggtagccccatttttaagccatttaattctgcaaacctccttcaatttatgttccaacagcagagaatgctttcctgtcactggctcgttaacccagcattttatttgttgtacagcatgtgtgaaaacatttcagctgaaatcctgccaatcctgcaatccccctcccacacacttacccccatggcttcctcctctccccaggcacagaggccacagtgtagggtaaaggrttatttctagacttctctacaacagacaatatccaaaaggactcattttcagctccacaaggtcaggaatttgtgttttgtttattgctgaatccccagcacctagaacagtgcctgacacatagtagagctcaataaatacttcttgactgaaaggatccatgagcgggtggctggatgatggatgcatggatgggaggaa

SEQ ID NO: 775033 - DNA, 652 bp, Homo sapiens
cacaatgtatatatatttcaaaacatcatgttgtacatggtaacttgtaaaatttttatcaatcaatgtaaaaaataaaaaataaaagttatatatgttcattatggaaaaactaaaaaaatacagaaatgcaaaaggaagtaaaacaattgaccctagactcactgcccagagaaagactgccaacattttagcaaatttctttcccaagtttttctatcatatgattgctctacatagttaataaaacawatttttaaaaagcaagtatgttgcaatgtagtttatggctgaaatgggtcaaggagaaagcactgcatgacaaggtgaaagcattgtgcgataagaaaagaagaattaaccatgtaaatttctaaataattcttacaataaaaaagagcaagaacccaatgtgaaataaagaaatacaaagacttaagtaaatatgaaaaagaaaagtttcatcccagatttaattagtgaagcgcagattaaaacaagtgttcccattttttggcctataaaattagtgaagatttttaataaaatggttaacactcattgttggtgaaggtgtgagatgaaaggcattcccacgtattgttggttgtagtaggatatagctagggcgacgtgtgtcccagttcaactg

SEQ ID NO: 775034 - DNA, 577 bp, Homo sapiens
ttatatatatatatatatgtccttgtaagtgcaaaaccctgcaaaaaactgtaacacccatccacagaagtgcaatggcaatagctgacagcatccccggccttcatccccctcctggaggatgctgcatttcacagccgcatggtttcagtgggataaagcatgaggaggggtgtgtccggggatcccttcccttgctggcttcaccaccacaccacccatcagggggaggctcggggtttgtctgtggtagactccttccctccaccatagatgaaggggaggctgtggaaggcagagaaatggaaacaagatcctgttgaygtcactgagccacttggatcaacccaaacctgaaactcaccccaccttgggactttccagtttcaagagccaaaacctcccctcattgtttaggccagtctgaattgggttttctattacctgcaactgtaaatggactcctctggtacaaaggcaaggcccatctgttcttggcacactcctacaactgatggcgtgaccgtgaaaacgcactgtggatcagtatattaagtaacactcataaaatagtatg

SEQ ID NO: 775035 - DNA, 613 bp, Homo sapiens
aagacagagacctgttgctgggagcagcatcatgcccttcaggatcctccatggggtcatgttctccctagggtgcttccagtcaagggcagggcacaggggtactagagccaccattcctacccaaagcaagattcctctagcaggcagtctttgctctggggctctcaatcagcctggccaagatttttctctgagctgtactccaggagcaggctcacttaccaatcatccttcttccctctctccctccacaggtgtcagatgtgtaccgtgttctgaagactctccccaccttctccagcaccctccccctttgtccttcacaggcatttcctccaatcagtctttcrtcttctgcttcatggaagacctgacggacacagacaactcatctttacatcctccatgcctgggacattggcagggattctgcagcagtgatgaagagcatggacacaaatcataacccgggacttgttccatgggtagccttgagagcaggtgacttcaacctctctgaaaccgagtttgaggtcctcatctattaagtggtattgatattaatagctatgtcttacggctgtttgagaatgaataagttaatgcatga

SEQ ID NO: 775036 - DNA, 496 bp, Homo sapiens
tgattgcttcctaactcctccctagtttctgttttcttacacattgttatatttcttacctgctacacaaacctctagttatagtcagttagggagatgaagatggatttgaggctgagctcccatctcctcagctgcagcacctgattaaagccttcttccttggcaatactcatcatctaggtgattgactttctgtgccrcaagcagtaggacctggatggaaccctggtgttttagtaataaagtggtggtgatcgtgccacctaacttaactgacaaggtggtggtgaggagaaaatgggttgaaacaggtggaatgccacagaatactacacagccataaaacagaatgaagtcacgtcctctgcagtaacatagatgcatctggaggccattatagtaagtgaacctacacagaaacagaaaaccaaacactgcatgttctcacttataagtggaagctaaacactgggtactcatggacataaagaca

SEQ ID NO: 775037 - DNA, 545 bp, Homo sapiens
tccatgcataaatcccatcagattgtgggtggcgattacagagccttggtgtgggtgaggaaggaatagctggtggaagcggaccagaggcattgaggccccttcatcccttatatcactgaacagttataccagttactgtgtgttgcatcttctagccatgaaacactaaatgcaatttcttgtactttcataccagctgtcgaaaccattggccaatcttccacttacgaaaatctagctagaccaagggtgatttcataaatcatgaaacactacacaagaattaacattcaggcagcaattggttcctggtcctcaatgctgttgtattcatgaagaggtagctttctggtgcatccttttatcctgwctgtcatatggaatactgatcagataggttgccttccactagttcatgaagtgcctggaccctcttattacaggtcttgggacacacaagctggccacctgctgggccaccccagatctcagtagttcagcaagaacagccagattccctagcctcactgggacaccagtga

SEQ ID NO: 775038 - DNA, 608 bp, Homo sapiens
aaaataggttgtgttgttagccagagagagcctggaatactggatttttttcttaaatttgtgtgcaataactttagtgctccaaccacatatcacagccttgcagacatggtgtgcttcctcagagtgctgtggcttctcctcttgcattctctcttctctgctaacccagaaaacccgcactgctgagaagaaatgatggcacacacagtttcttcctctgctccatgctgggtatgtttgctctggcaccatgtggtatggttcctgactatgtgcagagcaggagtagagtccagagaatgagtgggggatgggaaggctgcagggcgcagctgaaggtggaatytgaaaggaatgggaactcagccaccatgctctttattcccaattcaggccctgttttaataaggacattttatggtgaagatcttaaagcaaactgactttcaaaagaaaaggagaagatggagaaagaaaggtaggaagagatcaaatatttctcctgattaagttccttttattctagagccatagtcttcaaagtgtagttaatgaaacactcaatagcacatttttattaataacccaacattatgcttcattaa

SEQ ID NO: 775039 - DNA, 608 bp, Homo sapiens
aaaataggttgtgttgttagccagagagagcctggaatactggatttttttcttaaatttgtgtgcaataactttagtgctccaaccacatatcacagccttgcagacatggtgtgcttcctcagagtgctgtggcttctcctcttgcattctctcttctctgctaacccagaaaacccgcactgctgagaagaaatgatggcacacacagtttcttcctctgctccatgctgggtatgtttgctctggcaccatgtggtatggttcctgactatgtgcagagcaggagtagagtccagagaatgagtgggggatgggaaggctgcagggcgcagctgaaggtggaatctgaaaggaatgggaactcagccaccatgctctttattcccaattcaggccctgttttaataaggacattttatggtgaagatyttaaagcaaactgactttcaaaagaaaaggagaagatggagaaagaaaggtaggaagagatcaaatatttctcctgattaagttccttttattctagagccatagtcttcaaagtgtagttaatgaaacactcaatagcacatttttattaataacccaacattatgcttcattaa

SEQ ID NO: 775040 - DNA, 632 bp, Homo sapiens
ggctggaggaggacctcatgaggtggtacccaggaccccaaagggtcagaaacacagcctcaggcctccttccctgtctctgcagatgggcctgactatctgctgctgaggggcaatcctgatgccttcaatggcatygtgacggctgagatcggctcccaggtggaaatggagtgtgtctcctattctttcccagatctcaagtactgctggatccacaacagctccttcctaaacttctcatatgcaaagttgtatctcttgagtctggcctggtagcagatgggcacttaccaatgcactgtggaaaaccccgtgacacagctgatcatgtacatggacgtcaggatccaggccccccgtgagtgcagcagctcccgtccaggctcatgctctgcacatctccctgcctccatgccctgctaggcagtgcccaccctcaggagtgccacctccaccctgccatgacatgctcacaacctctgggtgaaatctcccagtcctctcaggtctgggtccaaagatgcctcctctatgaatcctctggagtcctcagatcagagtcagggtgagtcacagggggataagggggataagagtggtggacattagctgtgcacttaccatgtgcc

SEQ ID NO: 775041 - DNA, 541 bp, Homo sapiens
accaaaaaagtgcccaaatagccaaggcaatcctaagcaaaaagaaaacctggaggcatcacgttacccaaatttaaactatattacaagtctacagtaaccaaaacagcatggtagtggtacaaaaacagacacatagaccaatggaacrgaatagagagcccagaaataaagccacacacctacaacaatttgatcttcaacaaagctgacaaaaaaaagcaatggggaaaggactcctgattcaataaatggtgctgggataactgtctagccacatgcagaagattgagtgggactgcttccttataccacatataaaaatcaactcgagatgggttaaaaacttaaatgtaaaactcgaaactataaaaactctggaagacaatgtaggccaatatcgttctggataaaccaggcaagatttcctgacaagatgccaagccatcacaccaaagcaaaattgaccaatgggatctaattaaacttaagagctcctgcacagcaaaaataaccatcaacagagtaacaaccggaatgg

SEQ ID NO: 775042 - DNA, 614 bp, Homo sapiens
caatctctccttgaaactccagcccccgttggccaccatcacctgaacttgcactctcctggtcactcatttctcctcagcagctgctctatacagtcttcttgctgtttccacctcttctccctgacactaaatgctggagggtcctgtggctgtgtccgtggaccccttctcttctttgtggattcgtccatcatcaaaccttaatgtggaggctcccaaacctgtgtatctcccacctggacccctttcctgaacttcagactcctgccttctacctacaatccctacgtgggtggctcgggaccayctccaaattacagtaaccaaaacaatatttgatctacacttaagaatattctcctcctgcagggttggcaattttagttgttggcagttaaattatttaagtctccattctgggtaaccacatgggcatcatctttggcacctgtgggcatctgtgacatctatggaggtgtaatcagactctccatgatattattgaggtcatggatgtcttcatggatatccatgacatctatgatatctgtggactcacctgtgatatctgtggcacctatcaagcagaggccacgagctatctttgctct

SEQ ID NO: 775043 - DNA, 628 bp, Homo sapiens
cttaatactgagatttctgatgctatgtctaccagtgaacccctggcacctacaacaatgctggcacatagtaggtgttcagtatagttaccaaagaatctatagattaatgaataaatgtcactccttccctcaatatcatacaagaaacacacacacacacacacacacacacacacacacacacacacacwcgggtgacatttaagactgagcctgaaggacaatcaggacctggacttggcaggaatgggagggaagggcatttcaggaaacggaactacacatgcaaagtctcagagtcatagagggcttggcccagtgggtgtggggagactttgggtgacacagagaaaggagggatcaggagagtccagtggaggatagaacgtgcaaggccttcagtccagacggtggtgttctccagcaatggagaggaaacaaggagacaaggctgttcagactgtggaggcactggacgaggaggcagctagaagcagagtctggaggcctgtgctggggagacagggaggcaaaggtgaggatggttcagtgaccagggaggaggtgagggcccaggcatgaccaaggtcaggacggagaaaagggcaccaaatgagccctggtt

SEQ ID NO: 775044 - DNA, 569 bp, Homo sapiens
tgataaggattaaatgagctgatatagaacaaacatgttgcacagtatcttgtcacatagtaagtgttccataaatgttcattcttgttttatgattattaaatctcgtagactcactccccttatctgtgggttggcttggctaatttcttttgctttatatttatgaaatgcttatagaatgcttactatgtctcaaggactgttctaagtgctatacaaatattaatttatttaattttcataaccacacaaagtaggttatccccattttacagatgaggaaactgaggagaaggttaagtaygttgcccaaaataactaccaagtggcagagctgagattcaaacccaagcaatctgactctggagtcctgctctgcacggccatacgctgcctcccaggaggagggtggggggacgctccctaccttttgcccaggtgtcacccactaccttcctgtctgcatgctgctgccacctggtcctcagttcttctccctggagggcatcccagagttctcaaccagctaggattgtcaactttaacaaacaaaaaatacaaaatgc

SEQ ID NO: 775045 - DNA, 641 bp, Homo sapiens
tgtggctttcagaaactctgaaactgccaaaagcatcaatgccttaaggcagaactctcaggcccagagagaaagagagagtgcagtgtggggtagagcttgagagacagagacgcttggtataaacgttctataacttatatgaatatcactggctgccctgaaccaccactsaagctcctggagctctagcaccctgtcaggggaaattccccaccagagctcagcaggacccaggctcccggcttcctgactcctgtttaatagtgagggctcaggtctgaggactcagagcacactctccaggctttcaaggttgtattgcattgttccccccacacccctcctttctgattgaccagtccctcatttctagtcacggctgatggagtcctcagtgttctccactcctgaggtcagaagccaggacttcttgatcttggaatctgtagggctatgtgcatggcagggccacaggaagatgctgagtataggcttcttgttcctgcagaggctcacctacagctggttttctgtgctgtgacccacagtcagccacaggcacaatgcacgtgtcttaacctcaggtcaacactcaatggatatttcgtgtttctagcctctggcagatccaatcagaa

SEQ ID NO: 775046 - DNA, 645 bp, Homo sapiens
agaagctggaaagccagtggtataattcagttcaagtcagaaggcctgagaaccaggggagctgatggtgtgagttccagtctaaggccaaaggccctgaaagcaggagcatggatgttagagagcagggaaagatggatgttccagctaaaacagggagcaaatttgtgttttctatggctttttgttctatttaggccctcagtggattggatgatgcccaccagcattggtgagagcaatattgtttgctgggtctgctgactgaaatgctcatctcttctagaaacaccctcacagaccacccacaccccccaaaaaataatgtgttaccagctgtctgaggatcccttagtccagtcaagttgacatataaaatgatatactttccataatcagggacatgaayatctgtctattttcaacataattcatctgttaaaatgtttgataagactgactgcaactagggaatatgagaaaacataattttattcatgataaatttcagtattaggattcattcagcatgttaaaagtttacattctggaacatacagtcctctggtaaaaataatgttttagcttcaatttgacaaaatagcctacaggtattttggacaggaatttatagggagttaatac

SEQ ID NO: 775047 - DNA, 581 bp, Homo sapiens
atttttattttaaatttgtctttcttaatattcacaaatactttcttagtgctttaagattcatttacaaaggatacagaaacaagtttggagctgaggatatcagcttcttctttgccatcccttgacttgatggcattagctgcaagaagtgggcctattccttattttgaccttttgatttaaacataggtttccaaagacctactttgttgctttagtatttttgcaagccacagattattayatttatttagacttcctaacatcaaacttcccatcttttgcaatgagtaatttgttgcataggtctccctcaggccggatctgatctgcactaattttaaagatgaaattttcctttatcccttaactgcatcacttatgattatacagccaaaattgcagtcttgacactcacatgtaggtttttttttcctgtttttccccccagtttgccttctgaaagttgaaatgtatctagcctactaagttcagcatttttcttctggatatcacatactctaggaattaatagttgtttttctccttaggtatccaactcttctactttcactaat

SEQ ID NO: 775048 - DNA, 626 bp, Homo sapiens
tgcctcctatccttcataggaggagaaaggcacaaaccagaaaacccccccaacacacacacacatacacatatattaacaagggaatgagtgctttaaagttcaggaattataaacacaaagaaatgtggttatagacatggttcatggaaggctggagggctgtggacttttctccagaggagtaatatttcagctgcatcaagcaagatgtgacagtggcaggtgaaggggacccggagcaggtgggaggagaagscctcctggcagaggggtcaggtgtgaaggccccgagaaagggtggcaagggcttggcacatggagggattgaagaaaggtgaggtagcaggagcgtggcatgcaaacgccagcggcacaaactgcgctggggaggagagcaagggctgaaggtgcagagccttggacaccatcctaaggagtgtgattttttttttttttttggtccctcagtgcaataggaagccctagatggggctcagcagaaagtgacacattctgagttatattttaggaagtcacttgggcaggaggtgcaagggtagaatcagagagacccatcaggagggcacaggtgctggtggcctgaatgaagggactggcagaga

SEQ ID NO: 775049 - DNA, 645 bp, Homo sapiens
gggctcaagtgatcctcctgcatcagcctctcaagtagttaggattacaggcattcatcaccatgcccacctaactttttgcatttttagtagagacggggttttgctatgttggccaggtgggtctcgaactcctggcctcaagtgatccaccctcctcagcctcccaaagtgctgggattacaggcataagtcacctcacccagccccgcaaaattccttttatccaaataaggtaaatgttttagtttttccaggctgctgaaacaaactactataaactgagtggcttacaaacaacagaaatttgtttatcacagttctggaggctgggaagtccaaggtcaggacactggcagagktgatatctgggtgagacaggagaatagggaattagggtaaccaagggttaaggcataagcaaaagaacagcaggtgcagccagttctaggcaagattaggcagcatacaggccacatttttactccagtgataacaagacagaagtttccatctcagcctctgattgatagcaggccaagcttccacttcagcctctgattggtcacagggcaatcattcataagatggaaccaactggagacctctaaagggcacctaggggtgttaccaaattatttcagc

SEQ ID NO: 775050 - DNA, 550 bp, Homo sapiens
accagcctgttgtggaataacgcaatatatccttagaggaaaatacaataaagtaagagaattccaggcttcctacacaggcccagtaggtattttttatcttaataactcgttggtaaatggcctactatgtccataggaaaagcatcctcttcttcaactgtgttttaaaaagaataacttcttctttcctcctttggaaaagccattgctccaaaattcacataaaacaaatacagactggttttctgttcctttcactttctgtccctatcactttaggctgtggtaaccaggactyctaggcctaaatatgcttgcctgattttgcctgagtttgctggagaattgctcaaccaccctctcactttggctgtgtagaccatagctcttgccctccctccaggggagaggcattaactaatgaagaaaacagtgactcccctcttctgccaccactgacactccatacccaggcctgtgccaccaggcctgcttccaggactgtgggctgcctgttccctgctatcctgagccttccagctccagt

SEQ ID NO: 775051 - DNA, 529 bp, Homo sapiens
gacccagagtaacatctttctcatattttaatttttcacacatgcacggatctgtttctgggcactgtgtccaattcagtcagtcttttactaatactgctgtttcctactatggcttttattttgtttatttatttatttattattgagacrgagcctcactctgtcaccgaggctggagtgcagtggcacgatctcaagtcactgcaacctctgctgcccaggttcaagcagttctcatgcctcagcctcctgaatagctcagactataggtgctcaccactatgcccggctaatttttttttttttttgtatttttagtagagatggggtttctccatgttggccaggctggtctcaaactcctcctgacctcaggtgatccacctgcctcagcatcccaaagtgccaggattacaggcgtgagccacggtgcctggcctcctactatgcctttataatatgctttgacatggcaatctccccaacacatcccacatcaccttgtttaatttcctcaagaatgttt

SEQ ID NO: 775052 - DNA, 502 bp, Homo sapiens
tactcataacagagcaaccagagggatccttctcaaacccacatcaaatcctgcaggactggggctttcctgcctctctgaccccacctcctgccactcttcccctcccctgctctacacctgccggtcactctctttctcttccttgaagacatcatgctcattcttgctgcagctcatctgcaggagctgcttctgctacctggaatgttctttgccctggttgccccttggtkgcatctgggtcccagagtcctcagctaaaatatcttgggagtcctgccttgacctcccagctgaggtggccaccccttatctcaagtcattttgattctctgcactgacctttcccttcctaatgtattttcttccttcctccctcctgcccttctccctccctcccttcctatctgctcgctaggatgaaacctacaagagagcagactttgtctgtcttattcctgcagcatcctgagcatctcaaacagtgttttgcatatat

SEQ ID NO: 775053 - DNA, 573 bp, Homo sapiens
agacttcaattgtccttatcactaagaaatgataagtatcttaggtgatgggtatgttaatttgcctgatttaatcattttgcaatgtatacatgtgccataacacatattgtaccccataaaattcatacatttcttatttgtcaattaaaaataacattgggctggrcgtgatagctcacacttgtaatcccagcaatttgggaggcccaggcaggattgtttgaggccaggagtttcagaacagcctgggcatcataatgagaccctgtctctaccaaaaaaaaaaaaaaaaatatatatatatatatatatatatattagccatgggtggtggcaggcatctgtggtcccagtgacccaggaggctgaggtgggagaactgcttgagctcagggttttgagactgcagtaagctatgactgcgccactgactccagtgtggcaacagagcaagaccttgtctcttaaaaaaataaaataaatttaaatataaaattagttttttaaaaaagaacagtttagcaaccacaccccttcaccaagaaacaaaaaaataatgtgtttaagggg

SEQ ID NO: 775054 - DNA, 595 bp, Homo sapiens
catcctgggctgcatgtggcctgcgggcggcaggtggacaagcttgctgtaaagggtacagagtgtgtctaattcagaagtcagcaaacttcttctgtaaagggccagctattgactattttagactgtaggccagtctgtgtcacaactacccaactctgctgtggtcacacaaaagcagccatagatagtacataaatgaatggatatggctgcattgcaataaaaatttaaaaaaacaaagtagtaaaccagattgggcccaagggccatagtttgccaaccttggtctaattggctgttatattccctttttgctttctcaccttctcaactttccctagaagcctgctcactgctcctggtgtgcrtgtgtgtacgcgtgtgtgtgtttgtgatccctgggcaggggagacctgaaaagggaaggaatgagcatactgtgtttctagaatagagtaacccaggctgatagtgtctcaggcagcagtggaaaatgttaaagaatattaagaacaaaaagcgaaatcatgactccttttcaaagacaaaatgaacatgcgtcaaagattttatttaactcattaattaatga

SEQ ID NO: 775055 - DNA, 545 bp, Homo sapiens
aaacaaatgatttttgccaaattcttctaaaacaaggaaacaactggcgaatgctttcatcatttaaaaagctaaccctctgaattaggaactcaggtaacacttaaagtttcttttaaaaagtattatttatttaaagctcaggagtctacctattttaggggtcttctctttgtctcactcctaagaaacaaaccatcatgttttagaaagcgaagctgagtccacctgtcaaacttctctttcacgtggtaacatctccatctgctggaaatttaaatgtctgcattaaaggcagataatgttagctttatttttctataaatttatgtctaattcacatttccattttctcttacatgtgtcagtattttattgaaaatatatgccccytttcccttttctctgaggttcccagtggtctctattgtcatggtatttgcagcacctcccctaaccccctcttggccttctccacatgctttgggcaggtcctcatcagtctttctttataattgtacatccttatgttagtcctggaaccc

SEQ ID NO: 775056 - DNA, 508 bp, Homo sapiens
tcaagcccttatgtaaccaaaacctaactctgtaaacaaaccataaatctaatttaggaatttggctttgtaacagataactgagtctcagccaatcagggcagccaagtttcagtcaatcacaggtggccacgtattcaaaccaggttcaaatttattcgctttagcgaactccaagctctaagtgagccagctgtttctataagtcacttctgttttctgtacaatccttccctttttgtgtccataagtgtccagtcatgtggcagccccaaagtctttctgaacctgttctgcttcygagggctacccgattcacaaactgttctttgctctattaaactcttatttgtctaaggtttttcttttaagagattagtgtcacaagtgggactcaaagtcagactccaatgacccccaggaacaccaggcaaccaggtgaggtatccatggagcccaaagtgctcactgctctcgtttgtaactggaggtcatgggttagtttttc

SEQ ID NO: 775057 - DNA, 601 bp, Homo sapiens
ttggcacattcttaggatgcgaaggagtagaactggatccattgacatctttggtggttatcagcctccttctgcatatgttcttgtggcatctccaggagggaagtgtggagggtgcctggggcatccgtaccgccctggcttcttgggcctctgcagcctctgcctgtctgaatcagctagtggagtatcctgcctcgtggaaactggcaagggctgcacagggrctcccaaatgaaactgtgactcaggactggacaagcgaattcgagttcacacagaatggaaaggtgtactttttcccctttaaaaaaaaaaaacacaaagattgctacaacatgttggcattgattcatgcagtcactttttgttctgtacaaacagtggccttggggtagcaggaagagcaatgggcaaaggacacaacctcagtgcaaaagccctagctcccttggaccacagttgcatatctagaaaattaagaaataacttcctcttgttgtgaggttccggcgagatgccatgtgtaaagcacgtgtatcagtgttggacattccactattggtgactgggtgcctgctgtatgcttatcctccaggta

SEQ ID NO: 775058 - DNA, 601 bp, Homo sapiens
ttggcacattcttaggatgcgaaggagtagaactggatccattgacatctttggtggttatcagcctccttctgcatatgttcttgtggcatctccaggagggaagtgtggagggtgcctggggcatccgtaccgccctggcttcttgggcctctgcagcctctgcctgtctgaatcagctagtggagtatcctgcctcgtggaaactggcaagggctgcacaggggctcccaratgaaactgtgactcaggactggacaagcgaattcgagttcacacagaatggaaaggtgtactttttcccctttaaaaaaaaaaaacacaaagattgctacaacatgttggcattgattcatgcagtcactttttgttctgtacaaacagtggccttggggtagcaggaagagcaatgggcaaaggacacaacctcagtgcaaaagccctagctcccttggaccacagttgcatatctagaaaattaagaaataacttcctcttgttgtgaggttccggcgagatgccatgtgtaaagcacgtgtatcagtgttggacattccactattggtgactgggtgcctgctgtatgcttatcctccaggta

SEQ ID NO: 775059 - DNA, 628 bp, Homo sapiens
tagaaaataataattaattttcataatcgaggtgggcaggataaaatacacacgaggcaaacagaaattggctgatgtattttattcccccaaaatattctatgttacaaaatcaactaaaaacgtatttataaagcaaatgttagacccaggaatatatatgtagcataggtttaaggcaaagatgatgtacccagtgccaagaacagtggcttatgtctttaatccaagcataytgggaggcctaggtgggagaatggcttcaacccaggagttcaagaccaatgtgagtgacacagtaggaccctgtctctaaaaaaataaataaaaaaaaaattagcgaggaatgggggcatgcacttgtagtcccagctacgtggaagactgaggtgggaagatcatttgagctcatcaggtcgaggctgcagtgagccatgatggtgccactgaactcctgcctgggtgatagacagacactgtctcaaaaaaataaaaataaattaagggtttgtatccagaaaaaagaactaaaacctgtaagaagaagacaaactatgaaatagagtaatagacaaatgatataattaaaaattcataaaattttaaaaatgcttaaccttactgctaa

SEQ ID NO: 775060 - DNA, 574 bp, Homo sapiens
ttcagagactgtaatgaactgtctgtgtacccagtctggtctgtgggagtgcagtttattcccatgagtcctgccaggtaaagcctttgtagttgcctgtggtcaggtctaaaaaatcacatataggttttgaaccaggagttaatctcctcaaccagacacagtcattttttttttcaaaatgacttgtatctaaaatacacaaagaacacctaaaactaaacaataaaaaatacacaaagaacacctaaaactaaacaaatgacacaattacaaaataggcaaaagatctaaataracacctcaggtaagaggatacacagatgaaaagatgatcaacattatttgctatttgaaatgcaaattcaatctgtaaggtataacatcacacctattagaatagctaaagtaaaaataaataaattaaacaatatcaactgctgtagattcagaacaactagtgctccgtttgttgctggtggggatgtaaactgctacattcacttttggaaatggtttgacagtttatttcaaagctgaacataggcttattttacaatcaggccattgtgat

SEQ ID NO: 775061 - DNA, 643 bp, Homo sapiens
accttctgttcttcaaacagccatgccccttgaatacatcagttctagtttatttatggtaatcaacttaatctgtgcagaaagatcctattaaattatcttatagatagaaacccttctttgtattagtaaatgccagtaatatgtttatttaaaaattatttgaagacgattgtgtgattgtattgttgacacacctattcagctagtcatcccttaacaagtctgcattgagctatttattaacccatcaccgttcttaagtcttcctttttcagattttatagtccatttttttattagttaatatatttttgtgtagctttaaatatatgtgtataaattgtagaccaacwgaacaaaaatattctgcaccattaaaatgaaggttaacgatctggaaactatgattatatatatagttcatttttagaaaatactgtgcaagcctaggtaacatgcacttacagatatgccctcattagatactcacaggaacaatataagataagcgtttttatccctaattcacagatgcggaaaatgagcctcagagttattgaataatttatccgtagtgtcaaaaacagtgactggcaaaactgtaatttaaactgatttatgtcagactctgctattactt

SEQ ID NO: 775062 - DNA, 652 bp, Homo sapiens
tagattatatcagtaattatttttaatttatcatttgctttatcaattaatttgctgtctcccacgtaaaagagaagaagtactaggctgggcgctgtggctcatgtctgtaatcccagcactttgggaggccgaggcaggaggatcacctgaggtcaggagttcgagwccagccaggccaacatggtcaaaccccctctctacgaaaaatacaaaaattagctgggtgtggtggcaggcacctgtaatcccagctactcgggaggctgaggcaggagaatcactggaacccgggaggtggaggttgcagtgagccgagatcgcgccattgcactccagcttgggagacaagagtgagattttgtcgcaaaaaaaaaaagaacaagtactctatactttctgaccttaatttcgaggaaaaattttattgcagaatcaaataaaccttattatacacctagcatgagcagggcattattctagataattttactgacattatttattgtttatcttttcacagttaataaatatttgattacaataaagaatagcaaatcacatttgtatactgcttttaagatatcaatgcagattccctgtttgatgttaccttttaatatgctatttcatttatcttacaaggaaatgc

SEQ ID NO: 775063 - DNA, 645 bp, Homo sapiens
tttctagatatctaactgtagactggcaggatttttattttgtctttaggaatttaaagatgttgctccattgtcttttggcttgtgttgtttctgagcaggaatctgttgtcatccttattatctattaggtatccctactccccctggctgcttttaagatcgattttgcgggatgaagtgtctcacacttgtaatcccagcactttgggagggtgagccaggtgggatcaggtmaggagttcaagaccagactggcaggaggtcaggagttcgagactagcctggcaaacatggtgaaacctcatctgttctaaaaatacaaaaattagccaggcatggtggtaaatacctgtagtcctagctgctcaggaggctgaggtaggagaatctcttgaacccaggaggcagaggttccagtaagccaagattgagccactggactccagcctgggcgatagagagggactccatctccaaaaaaaaaagaaagaatgattttaagtactttaattataaggaaacattttccttatgtttctatttcaacgtataattccatttatacaatattttaatcatgccacaacaatgcagttaaaaaaagagacaaaaataaaataaaaggaatatacaaagcaatag

SEQ ID NO: 775064 - DNA, 660 bp, Homo sapiens
tgaacaggtcttttttttttactaagttagaaacatctaaaagtattcacttctccttgcacaaggtactatttaagtaaaatatgtaagtacttttgacaactttgctttaatacataatgaaaacaatcctagtttttcwcaaactaaaagataacacaatggaaaggagaatacaatctcagtcatctaaatctaaagtaattcaatcttgtgttagtcagtttccgctgctgtaacataaacttatttctcacactcctggaggctggaagtccaagatcaaggcaccaggagatgccaggtctggtgagggcctgtttcctggttcatagggggctgactttttgctgtgtccttacatggtggagtggggaggcagctctttggggtctctttcacaagggtaccaaccccattcatgagggctccaccctcatgacccaatcacctccaagggccccaactcccaataccctcacagcagggattaggtttcaacatatgaatttttagagaacacaaatattcagaccatagtaaacccacttttccttcctaacaagtgagtaaaagtacactgcaggagggcctggatttcagtcagttggagaagggagaagtgcgtgcgcccgtgcccaggcgtccagcagagggcag

SEQ ID NO: 775065 - DNA, 570 bp, Homo sapiens
accattgtaacaaggtcttgcatagcaatggggagagagattgggtttaactccaaatacatcatgggcaagtgggagttgatagccaaggagtagggttggggtcaatgaatagaaaattagtaagaggtagcataagggaaaggggaattctggctaaactgacctacaggattcttgttgaaggcaggcagggtgatcaggcatcacctggcagctggtggggatgaggaacctgatcaagatattgaggatgatccagtattgagaataggagcttcttgttaaactacctaagcagtgcactttgctaaaactggattttataagaaagcacagagatgggccttagcagaagattcagaagcctgactaaagtttggccaagcaaggactytatgtcagtggacaaggtggactttgttactcaaacatcctttgacctagtcttgggtacaattgtttcacatatcttgacagcagaatgcaatatgctatgctcccttaggaggaaactatagcattaatctcaagtgcttgcttaaagcagttctcagtctctgcacctct

SEQ ID NO: 775066 - DNA, 527 bp, Homo sapiens
gcttgagaggtcaattctgcagtgagccgtgattgtgccactgcactccagcatggacaacagagtaagataccatcttaaaaaaaaaaaaaagaaaaaaaaagttgtgtacccatacaatagaatactatcaagcaacagaaagcaatggactactgatagatgcaaaaatatggctgaacttcaaaaatattaggctacctggaagaaaccaataaaaaagcctacatattatatgtcaccattgatataaaatattcagaaaaggcaaattcttggagctgaaaagyatatcaatgatggccaaagggtgagagtaggggtgggaattatctttttggggagatggcagtgttctaaaattggattctggtgataattgcataactctgtaatatttacgaaaaatcattgaattgtacttttgcagtgagtgatgattttgcatgtcagttaaaatctcaataaaggtgttgaaaattgacaaaggcacatgatagtttcaagattggggtgcttaatgtaat

SEQ ID NO: 775067 - DNA, 604 bp, Homo sapiens
aagactgtatactgtatggccccaaccatgtaacattctgggaaaggcaaaagtatggaaacagtaaaaagatcaggtgggcgcaggcagcctcagtctggttgactttgcagagctatggagggcagcttctgcttggatttcaggggttcaagcagcagaaggcttgacccagggctcgttgtggagcaagtgaaggtgcagattgcatggcacctgcagaaaggtgcttctggaagcacattgggaaggtgggttggggcctcccaggacaatttcaagcagaagtgcatcctcatgtgaatagactgctacatggacacctggaacaccgtgtcttgtgcccacaactcctggcttcagcgagaacaagccaacatgtgatcaggagacatgacactagccggagggccaccctccggccgccccacaccatttytatttccatgtatgtgcattatgaggtgggggccaacatgtgtgcactgactgcccattgcttatggggatggcaccgtgcctggacagatgggactgtgttgctcctggcccccaccctgccccctgtcccttaccccctgccagtgagtgtggcttgggtctg

SEQ ID NO: 775068 - DNA, 643 bp, Homo sapiens
gaattctggattgttatctaggctctatgaagaattcctatctgttaataagaaaaaagaccaagatcaacaacctcatagacaagtggataaagaagatgaccagttagtccacagaaaagaaaatgcaaatggaagtgggagggcccagaggaactcttgctttatctaaattgtgttgattacgggagcatatgcttatattaattttataggtaaaaaaacagaaaaagtayctgaagattaaacccaagcaatgcgatgtgtcagttttgacaacacacaggaaggggctctcagcctgtaaaataggagcccttttgtgtgaagctgaccagatgcggagaagtttcaacagtcctagagaagaggaccgcaggggacagagagccagggaacagggcagggaggatctaagagggcacccggccaagcggttcactgcagctggtgcagggctcagctataccctggggctgggcgcttagcacagtgtggtcagatgaaggcaagcaagcagtggcagggactctccatttgagtcaaagtgacaagcagtgcccccagtccctgggaaggatgaaatccaaatttaattcccttctgaacaacattctacaatctatgcttcatttaggtatct

SEQ ID NO: 775069 - DNA, 643 bp, Homo sapiens
gaattctggattgttatctaggctctatgaagaattcctatctgttaataagaaaaaagaccaagatcaacaacctcatagacaagtggataaagaagatgaccagttagtccacagaaaagaaaatgcaaatggaagtgggagggcccagaggaactcttgctttatctaaattgtgttgattacgggagcatatgcttatattaattttataggtaaaaaaacagaaaaagtacctgaagattaaacccaagcaatgcgatgtgtcagttttgacaacacacaggaaggggctctcagcctgtaaaataggagcccttttgtgtgaagctgaccagatgcggagaagtttcaacagtcctagagaagaggacygcaggggacagagagccagggaacagggcagggaggatctaagagggcacccggccaagcggttcactgcagctggtgcagggctcagctataccctggggctgggcgcttagcacagtgtggtcagatgaaggcaagcaagcagtggcagggactctccatttgagtcaaagtgacaagcagtgcccccagtccctgggaaggatgaaatccaaatttaattcccttctgaacaacattctacaatctatgcttcatttaggtatct

SEQ ID NO: 775070 - DNA, 529 bp, Homo sapiens
atgctagcaatagcagacagattataataggagagagactatataataatcaaggcaccaaccgactcagaagctgtcacaggcccaaatgtatatgtatgtgtctaacatacacgcacctcaaaatatagtaagcaaattgacagaactacaagtctaagattacaacccatttaacttkatcaaaagttgataaatcaagcaatttaaaaagtactaggttataaaagatttgaaaaacaaaagtaacaagcattatctaatgggtgtgtgtgtgtaaaactttgcggccaaacataaatggtcatcatagatcatttaaaaacagttggtgatatacagattatttaaaaatttgaccacatactaggtcacaaagaactcaacaaatatctagaatcatcaaataacacagatcatattctctaaacacaacccaattaaattagaagtcaatactaaaatacagtctcaaactcatatatgtgggaactaaaaaattcactccctagtaactaataggctgaag

SEQ ID NO: 775071 - DNA, 615 bp, Homo sapiens
tctcacaccattaataaaatacatttgcatcagtagcaatatacatctgcattttgcctataatataaatgtatttttccactaaaagatttgatgtttccttgccagcaaataagccctatcaaatcctattgccatatgagtcctagaggtgaataagagaaaaaaaaaatgggggaaaattatttcaaattaaaaagaaaamagtttgattctgttttgggatatttcctagggacaggagctggggaggggatctcagcagcgatgcgctatgaagtataataacatgacacagagaacttaattgaagggggaaataaatggaagttttctttttttgaatatcaattgtagcctgctctgctatacttcaaaaaaactcttcagaaagtttaactgaactcaccgtaggacacactttgtggatttattgtgtgttttgaagtcacactgcgagctatagaattaaccaaaacacaactcttcttggaaatgagagttcaagttggcagaaagtgcggggtaaagacatggatatgggcctaaagcatctatttctttgtgatcttttgatacatctctcaagtgcttttcagtggattaggtttagaa

SEQ ID NO: 775072 - DNA, 615 bp, Homo sapiens
tctcacaccattaataaaatacatttgcatcagtagcaatatacatctgcattttgcctataatataaatgtatttttccactaaaagatttgatgtttccttgccagcaaataagccctatcaaatcctattgccatatgagtcctagaggtgaataagagaaaaaaaaaatgggggaaaattatttcaaattaaaaagaaaaaagtttgattctgttttgggatatttcctagggacaggagctggggaggggatctcagcagcgatgygctatgaagtataataacatgacacagagaacttaattgaagggggaaataaatggaagttttctttttttgaatatcaattgtagcctgctctgctatacttcaaaaaaactcttcagaaagtttaactgaactcaccgtaggacacactttgtggatttattgtgtgttttgaagtcacactgcgagctatagaattaaccaaaacacaactcttcttggaaatgagagttcaagttggcagaaagtgcggggtaaagacatggatatgggcctaaagcatctatttctttgtgatcttttgatacatctctcaagtgcttttcagtggattaggtttagaa

SEQ ID NO: 775073 - DNA, 619 bp, Homo sapiens
catctctcaagtgcttttcagtggattaggtttagaatgcatcagccaactcctgctcaataatccatttttccagcccggaatgtcttaaattgaggaaggacgaagtcccagaggtggggagcagggggactttggccgaggactttgcatgaattgatgagcgtgcatcctcctccctgtgctctgtgtaccctcaggaggtcaggacgggcctttctgagaatgagaatctgttcatttgccttcctactggatatttgtcatcagcatacaaaccagtgygctctgcagtgtgtcatctttcagaacctcccctgacctcatcttccctggagggctcgctgtcttcagagccaggcttgtctcccgctgccgcctccactgctctcctcgtcactctataacccactccctctgcctgcagcccccaccacgcccctcaaagtggtcaaggttgtcctgttgtctaattccatggagcttggctatcttcattttattagcctcttttggcctcttacccctgtgaaaatcactagcattctgtgcgaaggatggagctggcatctccaggcttggaatagacctaccaaagctcagccagatgtccggaaga

SEQ ID NO: 775074 - DNA, 619 bp, Homo sapiens
catctctcaagtgcttttcagtggattaggtttagaatgcatcagccaactcctgctcaataatccatttttccagcccggaatgtcttaaattgaggaaggacgaagtcccagaggtggggagcagggggactttggccgaggactttgcatgaattgatgagcgtgcatcctcctccctgtgctctgtgtaccctcaggaggtcaggacgggcctttctgagaatgagaatctgttcatttgccttcctactggatatttgtcatcagcatacaaaccagtgcgctctgcagtgtgtcatctttcagaacctcccctgacckcatcttccctggagggctcgctgtcttcagagccaggcttgtctcccgctgccgcctccactgctctcctcgtcactctataacccactccctctgcctgcagcccccaccacgcccctcaaagtggtcaaggttgtcctgttgtctaattccatggagcttggctatcttcattttattagcctcttttggcctcttacccctgtgaaaatcactagcattctgtgcgaaggatggagctggcatctccaggcttggaatagacctaccaaagctcagccagatgtccggaaga

SEQ ID NO: 775075 - DNA, 606 bp, Homo sapiens
ctcatttattaataaacatttgttttctttaaataaagaaaaatacttattggatttcctgcttcgttctgcagggcattccaatatcacagtaaagagcaacaatgtgtgataatggctgaaaacaggaagtcctccataatcattaggatgagagatgyagttttatttgaaaagtaaagtgagtacattttcttcctcctcctcctactgtcctccccatcctcccactcttcctctttctctattctatctttaatttatgagaccagaggaggaaggcgctatggtgttgtaaaattgaattctgagttaggacaggatttgattactaactaaccatgtcagcttgagtatattacttcacctcctagatttaatttttttttgttcaaaaaatgaaaggattagatttacaaaatcacttctacctctatgaccctgaaaataagatttttaaaatattattttatatttaacaaggagatgggaagtctaagcattccttttggtcttggcttcttattctgcagggtgaccatggtccttgggccctaacatctggacgaagccttgtaaaacagaaatactgaggtgttttaatcc

SEQ ID NO: 775076 - DNA, 470 bp, Homo sapiens
tcacctttgtcctgctgtgccagctccttcttatcgcctaggtgtcagctcaatcatcacctcctttgcaaatcttccttgacccctagacctccctttcacaaagtaccttgagtttacactttgatgagtgtcttatgtctactgtaatactatgtcccaatgaagatgtactggcaatcataataggtagtattgggttaaaagcattagtttgctgyaggtacgttaggagtactccccatgtgattgatcagtgaatttaaaaatggctaaagtgggtaaccttaaatgatggtgcaaatataccttaaacattttatattttcattgaaaacacaagtgtacttgacacctcttgatgtagagcagaggctttttttcttcgaatatggggtcaccagtagaaggtctctggtgcatttcctgcataaactatgctctagtgcaacatctacaataattacttt

SEQ ID NO: 775077 - DNA, 470 bp, Homo sapiens
tcacctttgtcctgctgtgccagctccttcttatcgcctaggtgtcagctcaatcatcacctcctttgcaaatcttccttgacccctagacctccctttcacaaagtaccttgagtttacactttgatgagtgtcttatgtctactgtaatactatgtcccaatgaagatgtactggcaatcataataggtagtattgggttaaaagcattagtttgctgtaggtaygttaggagtactccccatgtgattgatcagtgaatttaaaaatggctaaagtgggtaaccttaaatgatggtgcaaatataccttaaacattttatattttcattgaaaacacaagtgtacttgacacctcttgatgtagagcagaggctttttttcttcgaatatggggtcaccagtagaaggtctctggtgcatttcctgcataaactatgctctagtgcaacatctacaataattacttt

SEQ ID NO: 775078 - DNA, 470 bp, Homo sapiens
tcacctttgtcctgctgtgccagctccttcttatcgcctaggtgtcagctcaatcatcacctcctttgcaaatcttccttgacccctagacctccctttcacaaagtaccttgagtttacactttgatgagtgtcttatgtctactgtaatactatgtcccaatgaagatgtactggcaatcataataggtagtattgggttaaaagcattagtttgctgtaggtacgttaggagtactccccatgtgattgatcagtgaatttaaaaatggctaaagtgggtaaccttaaatgatggtgcaaatataccttaaacrttttatattttcattgaaaacacaagtgtacttgacacctcttgatgtagagcagaggctttttttcttcgaatatggggtcaccagtagaaggtctctggtgcatttcctgcataaactatgctctagtgcaacatctacaataattacttt

SEQ ID NO: 775079 - DNA, 533 bp, Homo sapiens
aaaaacaacataacctgaggagtagagaaagaatctgattttttaaagttgccacattgcatttttaatgtccagttttaacagaaaattacaagacatgtaaggaaacaagaaaatatgtctcatacacaggacaaaatcgattaayagaaactgttccagaggaagcccagacataaaacttattagaaaaagtctttaaatttagttcaaagggttaaagaaaaccatatctaaataactaaaggaaaggatgaaaatggtgtttatctaacacagaatatcagtaaagagatagaaatgataaaaaaaaaaaagaatcaaataggaatgctagagttaaaaagataactaaaaggaaaattttaagaggagctcaacagcagatttgatcaggtggaagatataatcagcaatcttgaacattgttcatttgagattttccagactgagaaacagaaagaaaaaaaaattatgaagaaaaatgaacagaacctcagaaacctgtagatctctatgcttgtttttctcag

SEQ ID NO: 775080 - DNA, 533 bp, Homo sapiens
aaaaacaacataacctgaggagtagagaaagaatctgattttttaaagttgccacattgcatttttaatgtccagttttaacagaaaattacaagacatgtaaggaaacaagaaaatatgtctcatacacaggacaaaatcgattaatagaaactgttccagaggaagcccagacataaaacttattagaaaaagtctttaaatttagttcaaagggttaaagaaaaccatrtctaaataactaaaggaaaggatgaaaatggtgtttatctaacacagaatatcagtaaagagatagaaatgataaaaaaaaaaaagaatcaaataggaatgctagagttaaaaagataactaaaaggaaaattttaagaggagctcaacagcagatttgatcaggtggaagatataatcagcaatcttgaacattgttcatttgagattttccagactgagaaacagaaagaaaaaaaaattatgaagaaaaatgaacagaacctcagaaacctgtagatctctatgcttgtttttctcag

SEQ ID NO: 775081 - DNA, 594 bp, Homo sapiens
attattcgctttataagtgggatcttttcttttggctgcttttctcagctttaggcttgtgagctctatccatggtgttgcacatggcagtggtttgtttattgttgtgtgcattcagctttactaatattgcacaatatgtttatctgttctgctgttggctgrcattcaggttcttccaagcttgggtccattatgagtaatgccattataaactttctttctttctttttggagatggagccttgctcttgtcacccaggctggagtgcaatggcacaatctcagctcactgcaacctccacctcctgggttcaagcaattctccctgcctcggcctcccaagaagctgggattacaggtccccaccaccacgcctggctaatttttttttagtagatacggggttttgccatgttggccaggctggtctcgaactcctgacctcaggtgatctgcttgcctcggcctcccaaagtgctggaattgcaggcatgagccactgttcccggccctgaactttcttgtccttacctttcggtgcacacgtgtgtactttaatttgatctgtgtctgggagtgcaagtgctttat

SEQ ID NO: 775082 - DNA, 606 bp, Homo sapiens
atttacctttaatatagcactttctattttcatatgctgttatgatgctgtgcagcatcatttcatttttggacttgatagactttcttttacatttcctttaggactgatctagtggttagtaacacactcaacttttatttattctggaaaggctttttttttatttctgaagtgaaattattccagttgaaggtttttgtttggcagtatatcttcttgtttaattaccttgtcatctggggatttctcagctactttttaaaaataatctctttattacttttctgctgtattttttttctaagactccttttataaatacaatggtctacttgatggtgtgcagtacgtcccatatttttttctctattctgtttaaataatttgttttcatgactcagtatttataactacagtgtcatmaattgtatgattttttctactttattagtctgcttttgtgacttgattgaaattttaatatagttattgtgttattcagattcacagtttttgttggtttctaaaaatctttttattgatatctcattttctttatgtatcacttctaatattattttgttgtctatgctctgtttttgt

SEQ ID NO: 775083 - DNA, 581 bp, Homo sapiens
  misc_feature 474: n = A,T,C or G
tattacataaagataaatttgcaaaagtaatttactcaaggattatttacactttgatgagtggatctggatattttgatactaagtgaaagtggttcccctataattataagggaacaaatatctgcaagtattatttaaaacaatgtatataagccgggcacggtggctcatgcctcacctcaggtgatccacccgcctcggcttcccaaagtgctgggattacagtcatgttaagtgttactctaattatatcaataatttaaacctcaaaagagattcattatgtatacaaaattaatcttgtgtaattaaatttaaaagtataattaatggaataaatcaaaaaacacaaggtggctcacacctgtaatctcattgcttttggaagtctaggtgtgaggatcccttgacctaaggagtttgagaccagtcaagcaacacagtgggaccccatctctataaaaaaattanctgggtatggtggtscgtgcctgtagtcctagccacttgagaggccgaggcaaaagtatcgcttgagcctaggagttggagtctgctgtgagctatgatcacaccac

SEQ ID NO: 775084 - DNA, 625 bp, Homo sapiens
gtattttggcatctaatttaatcaagctctttgtatcatcatctacacgttaattacttaacaaacatttctctgtgtgagaaagtttgagcaggttattgtgctttgttaatatgcaacttttgcttaatctagagataggcaacgctccctgtaagggacaaagagaaaaatgaatgagcaatagagatgtgacaggcatggaaaaagacaatacatttataaaacaaatagggccacagatgacgataatggggataaatcttgagatactgactcagtttacaaccgcactgtataatagagcaaatcatttgttaatttttttacaaatggaatttaatttaattaagatgaataaagtattttaaacaaggcttgtcatcttaaaataaaatagtggaataaagtgataaaaccaatgtaaaaatcataaacattktataaagaattttttcaggtaatttaatatttttgtttatttaaaatcaccctaatcaaaataatattatcttaattaacaagtaatcatcagaagtttaactaatttttactttataatactaggtttaaaaattcttaactatatttttaagcatatatgcttatatataaaatagacaca

SEQ ID NO: 775085 - DNA, 615 bp, Homo sapiens
tgaaattttgaagaaggaagtggcgcttacaaatgtagcaaacttaaattttgaggacaatttaatttaacttccatttttatgaccagattttgggtcagctattaagcattcaaaaaataaaatctgataatatctggcaattccaattttcagttttattgatcttcaccatgaaataatatttaagttaaggggcaaaattttggaaaagcakatcactttgttgtcctatttagcaggttctcaaattctgccatcttggaatcattgcaagtaattataccaagacaatatcttgtattttgtatttcattgttacacgtccaatttttctctagagatatcagagaaaacctactcaagaaggaaaggttagataaacagccctctctctgtctttgcctccatttggttccttccaattgtttcccagtgcatttcaaagttacttttattgttctcttcattttctctttcattccagaaatttaagtgattatgtaattcttttgacagctgaaggtggtatccgactttgaattaaaggtttacagctacagcttttcaattagaaaatctcagatcatgtgatctatgagttttaatatctta

SEQ ID NO: 775086 - DNA, 552 bp, Homo sapiens
ttaagaataacttaagtcctttatgtacaaactaaagcatgagagcctgaaccttggaaaccaagaaattccaaaaagccttatgtgtgagactgggtgccacagatcttggcagaaattactgcttattcttaattcttattgttcctttctaacacttcaacttataatgccaatatctacctcagcctaaagacaagctctagaatcacttgtgttacttattacatttcttttaaaaaactcatgaatwacacatgaatttcaaagttgccaactgagattccaaggacttaaaaaaaaaacctggcacctttgcattataaaggctgtaaacagtgttcatagtgtttgtctttaagggacatgcctcatccattaacaacttttcttccttaaatcagcatatcttgcctaaaaatgttttctcaaaagttaggaagcactaagatttacagattgttctatcacatcttaatctacttatcaactttagcattatcaaagcatgaactgttttgggttttcatagttaattatgtttgtcataat

SEQ ID NO: 775087 - DNA, 552 bp, Homo sapiens
ttaagaataacttaagtcctttatgtacaaactaaagcatgagagcctgaaccttggaaaccaagaaattccaaaaagccttatgtgtgagactgggtgccacagatcttggcagaaattactgcttattcttaattcttattgttcctttctaacacttcaacttataatgccaatatctacctcagcctaaagacaagctctagaatcacttgtgttacttattacatttcttttaaaaaactcatgaattacacatgaatttcaaagttgccaactgagattccaaggacttaaaaaaaaaacctggcacctttgcattataaaggctgtamacagtgttcatagtgtttgtctttaagggacatgcctcatccattaacaacttttcttccttaaatcagcatatcttgcctaaaaatgttttctcaaaagttaggaagcactaagatttacagattgttctatcacatcttaatctacttatcaactttagcattatcaaagcatgaactgttttgggttttcatagttaattatgtttgtcataat

SEQ ID NO: 775088 - DNA, 407 bp, Homo sapiens
cattgtcttggggattaacatttggatcctcgttacttatgcaaatctctgcagccagcttgaatttctccttagaaaactggtttttctttcctatcacattttcaggctgcaaatgttctgaacttctattctctgcttcccttataagactgaatgccttcaacatcacccaagtcacctcttggatgctttgctgcttagaaatwtcttccaccaggtaccctaaatcatctttctcaagttcaaagttccacaaatctctagggcaggggtaaaatgccagcagtctgtttgctaaacataacaagaatcaccttttttccagttcccaacaagttcctcatttccatctgagaccacctcagcctgggctttgttgtccttatcactatcagggttttggt

SEQ ID NO: 775089 - DNA, 555 bp, Homo sapiens
tggagacctttttccccattgtcttggggattaacatttggatcctcgttacttatgcaaatctctgcagccagcttgaatttctccttagaaaactggtttttctttcctatcacattttcaggctgcaaatgttctgaacttctattctctgcttcccttataagactgaatgccttcaacatcacccaagtcacctcttggatgctttgctgcttagaaatttcttccaccaggtaccctaaatcatctttctcaagttcaaagttccacaaatctctagggcaggggtaaaatgccagcagtctgtttgctaaacataacaagaatcaccttttttccagttcccaacaagttcctcatttccatctgagaccacctcakcctgggctttgttgtccttatcactatcagggttttggtcaaagccatttaacaagtctctaggaagttccaaactttcccgcattttcctgttttcttttgagccctccaaattgttccaacctctgcctgttaaccagttccaaagtcgcttccacattttcgggtatc

SEQ ID NO: 775090 - DNA, 584 bp, Homo sapiens
tcccatgctgaccaggctgggtctcgaactcctgagctcatgggatccacttggctcgccctcccaaagtgctgggattacaggtgtgagccgtcctacctggctaaataaagtaatttgtagctagtatttttttatctcccagtccaggatgcactttaaggtcgcgtcatgtcacttcaggttcctttattgtggaatttctttcttggcctatctctgtcgtttgtgacttgacatttttgaaccatacagatcagtgtttatttgaggcttccttatgattgaattaacatttgcattttgggcagggatacaacagaagtgatgtgtcccttatatcccaagattgccttatatagaagtcacatgatatcttcatgtrggttgtttctggtattggaatataatgaaccagaatgctatgaacattcttatacaagtatttttatcaatatttttatatattttgggtacatatctagaagtttaattgccatttcatagaacacgagcatgtttaccctgataagaaaccactaaaccttgttctaaacgttccttttggagtataaaatttatac

SEQ ID NO: 775091 - DNA, 545 bp, Homo sapiens
tcatatctaattaaataagcatcattatcaaatctgacactctaggcaaggccttggttgcataactaattatttaaattatgttctcgtaatagaaagtacagattcttactgggcctatgcagatgcttatgtctctctgaaaataagaacattcatctggcagagataaaaggatatcatttacaaatgttttatttctatttacaaaagcatggtctatgatatggtttggctgtgtccccactgaaatctcatcttgaactgtagctccccagatccccacctgttatgggagggacccmgtaggaggtaattgaatcatagggccaggttttcccatgctgttcttgtgatagtgactgagtctcatgagatctgatagtattttacaggggagttcttctgcacatgctttcttgcctgttgccaggtaagacatgcctttgctcctccttcaccttctgccatgattgtgaggcctccccagtcacctgcaactatgagtccattaaaactccttttctttgtaatacctagtctct

SEQ ID NO: 775092 - DNA, 632 bp, Homo sapiens
atcgtcaccatcaactacattttcaggatccacagtcttgatagatatactttattttttaatattatagcggaagaaagtgtaataatttggtgggaatttcctcctatgtatgatataggaaggtagacaaattagcatctgcctgtgctatgatgatcacaggaacaatattgcagctgacaatgccaagaaattactgtccttgaataacgtcaagctttacatttttgattaccggaatttcagtggcaaatattgcaatcaaaattgaatttcataacactttggattcattctacgatagtaatattcagcttcaagtgaataatgatgttgatactcagcttttcagtgtttggccaaatatttatttggtgcatctctactttatatatatttgcagatttaaaaatatttttttctgctgtgtatcatcataactgatacacatacacatacatacacacaaaatcttatggaaggsaaatgcaaacatatacacaaagaatatattataggaaaatgtgaaaaaagaaaacattcaaagcagaaatcattacataagatgtcaaaactcaaactaaacatatattcactgttatatgtaatgaaataaaattaataattaa

SEQ ID NO: 775093 - DNA, 619 bp, Homo sapiens
gtgataaacgtctctctctcttttgacttaacagtctgaattaaaatactactatttcatcaatcaatatgatatttaaatcaccaaattaaaaatgatcactgtgcgttaaaattttctctgatgacacttcactatgcagaacatggtaattactttatggaatcagctattccaaggtaactgggcagttacaatattttatcaggtaaattaccagtcaccatcaacattcatcacggactcatttgggttttattacagattgacatttacttatttgcccaatttttaaaattacaactgttgcacgattgccccagggtgcaactgtagaaaattagcacactaattacattaattatcataaataaaaggttatcaaagagtagcatgtaataacatagcattttttaaaagcaacttagggcatccctataayagcttaaatttagatattacattgaaattttcaagactgctttacctctatagttttaatctttaacacctcggccataggaatgttactattaatgccatttcagaaatgaagaagccgcagccaaaacagctgtgtgattgccctaagatcatatacagctggaacattttaagg

SEQ ID NO: 775094 - DNA, 552 bp, Homo sapiens
tgctggaactgagaaatgacttcagtaaagtttcaggttaaagaaaaaatgcaaaaaatcagtaacattttcatacaccaataatattctagctgagagccaaattaagccacaatcccatttacaatagacacacacaaaaatgaaatacctaagaatacatctaagcaaggaggtaaaatatctgtrcaaggagaactataaaacactactgaaataaatcatatataacaaatagaaaaacattccatgctgatggatgggaagttaatatagttaaaatggtcatacttccaaaaacaatttacagattccatgctatgtctatcaaaataccaagatcattttagacagaagtagaaaaaactactctgaaatgcacacagaactaaaaaaataaaaaagagcccaaatagacaaagcaattctaaacaaaaagaacaaagccagaggcatcacattactcaacttcaaactatgctataaggcttcagtaatcaaaacagcatggtactgggacaaaagcagacacagagactaatggaatgcaat

SEQ ID NO: 775095 - DNA, 504 bp, Homo sapiens
aaaataaatgaaaaacattatgtcattataatggttatcttttcagcctttcctttaaaatttgttagcctccagataacagaagtttctgttgcaaaaagaaaataataattccatttatatgtgtgtatatgtayatgtgcacacacatacatatataatcatcaatattccaaagtttcatcatcttctcatgacccttgacaactcagccaattcctctagcagcttgaaaacaagaaatgcagcatctctggtgtaagccatcaaaattagaattcaactctaggagcagtccatgtgagaacccacaactaaggacatatgtcagcgagacagtagacaggaatgattattccatctaaattacccccaggagactagaggtagcagcagaaggatccacctaattttaatgcagaaatgaagggagagaacttagtataacctcctgaagctgaacagaaatctccaatatgcttcaggaatgtcccagaccagctc

SEQ ID NO: 775096 - DNA, 536 bp, Homo sapiens
atatagctggggaaggatgttccaggaactgggatcagcaaggaaaaaactctttttttagacggagtcttgctctgtcaccaggctggagtgcagtggcgcaatcttggctcactgcaacctccgcctcctgggttcaaacgattcccctgcctcagcctcccragtagctgggactacaggtgtgcgccaccatgcccagctaatttttttgtattttagtagagatggggtttcaccatgttggccaggatggtctcaatctcctgaccttgtgatccactggcctcagcctcccaaattgctgggattacaggcgtgagccaccacgcccggccagaaaaaaactcttaaattacgagtgggcctcatgtatttgagggacagcaaggatgccactgtggcttgggcagggagcacaagaaagaataccaacaggacacgacagagaaggggaagggctataatttagtgcatgtcgctttgcacaggcaaccaaaattttatacaacagttaaataaatattaaatgttaa

SEQ ID NO: 775097 - DNA, 600 bp, Homo sapiens
ctttgcggtgacaaaggcaggatgctatcttcagcattctgattccaaatttggttcttacatattcctatgtcaacatctagtgtagcacttaataataacaataacaaagtgatcatcaacgtctattgcacggggtaatcagaayttactagatgaggctctgacgcaaacgaaaaggataataagtgaagtaagatgtggttttgaagcctgaggatctggccatgtaatcagccatccatgtgcagaagagggagtgaccacctttctgagtggaaatgaaaatggtttctcagaggcagcgatggatgtttgaggccagtctgagagagaaataatatttgctaggcagagaagagggagacaggctttccaggcaaagagatccacttttgcaaaggcaggaaggcatgacagagtgtagcgtccccaggtcaaggaggaggccctggcacggctggagagaagcaggggtttctgtccttgtggagctgcacctgcacgagggagctccggccggatcacagcacgtatgtaatgggaaggacttttattttattttactcagtggaaaagctaatggattaaatcatcaga

SEQ ID NO: 775098 - DNA, 694 bp, Homo sapiens
agtactaaaatttcacattagaatgctattctttagaaggcaccttcctagactaggctgcaaggagactgaggaagttactgtcagtcacttaaaccccacagggacattaattcaacagagctttggtgggggagtagaggagctcactgcaggcaggtctggatgctgcacagagtgtaaagggagcagaaagacccaggacacctaggcctggagatagctccaatcccgggaggtwctgttattatccccattttacagaggaggaaactgagacacaggcaggtaatatgatcaagaccacgctgccccacagtagaggagccaggatctaaacccaggcagcctgccttgctatcagagctctcacccataacctcatgctgctgttaagcaggattgccctgtggccagggtcacagcctctgggttcacattctagctgctctaccacttcaaggtgtgtgtccttgggcaagttacttgtctgtgctcagtgtcctctatacagtgggtgtagcagtacctgcctcatggagtcccttaagtgagttaatagctgtaacatgcttagaatggtgtcatgtccatcatcaccatccactacatataggccatcatacctgaatcccagatggacacatatccttgaagggtctaaaatccaggatcctgaaatacctggaagtgg

SEQ ID NO: 775099 - DNA, 563 bp, Homo sapiens
ctttgggggaccaaatgtgcactctcagtcaataaattatgattgccccttgcctagctgtagcacaaagtcaatcatgacaatgctattctctgatgctagggttggtcatgagatcaggttctggccaatctaaacacagatttccagacctaaagagaaatcctctggtggtcacctcagaagttcttgcttttctaataaaaatgtagaagtgactgcttttgctggccttggaaacacttgtagtggttggagctgcagcaaccatcttacagccatgagctaaattccaatagactcacaaagatgctgggcctaacattkttgaaccagtgcaccatagccagggaccatagatactctaactatgtaagaaaaatgaacctgtatttgtttaggtgactgaactttcagattaacgcactcccaacagatacagagcatgatcccatatatacctgtatgtgcaagtatgaatagaaaaataattaaagtgattatctctgtgtggtaggattctccttcatattttttattttataaagttttcccaaacggcg

SEQ ID NO: 775100 - DNA, 385 bp, Homo sapiens
agcctttggtgaaaaaggaaatatctccacataaaaagtagacagaagctttctgagaaaattctttgtgatgtgtgcattcatctcacacatttgaacctttttttgatcgagcagttttgaaacagtctttttgtagaatctgtaaagagataaatgtgagccctttgaggcctayggtgaaaaggaaatatcttcacatcaaaactagacagaagctttctgggaaacttctttgtgatgtgtgcattcatctcacagagttgaaactttcttttgattgaacagtttaaaaacagtctttttgaagaatcttcaaatggatatttgagctctttgatgcctatggtgaaaagagaattatcttcacatgaaaactagaaag

SEQ ID NO: 775101 - DNA, 496 bp, Homo sapiens
ggatgtgtgcattcatttcatggagttgaacttttcttttgatcaagcagtttggaaacagtttttttgtagaatctgcaaaaggatatttggtgggatttgaggcctactctgagaaaggaaatatcttcacataaaaactagacggagrccttctaagaaacttccttatgatgtgtacattcatctcacagagttgaaactttcttatgattaatcagtttggaaacactgtttttgtagaatccacagatggatacaagtaagccctctgaggcctatggtgaaaaaggaaatatctgcaaataaaaactagacagaagattcctgagaaacttctttgtgatgtgtgcattcatatcacagagctgaatctttccttagattgagcacttttgaaattgtctttttgtatattctgtgcagggatatttgttagcagttaaagtcctttggcaagaaatgaaatatattcacataaaaaccacacagaagc

SEQ ID NO: 775102 - DNA, 589 bp, Homo sapiens
tgagttttgaatgaaacttttcaaaacttttgtgcctgataactcaaaattttggtactcaaacaggccatcacactggcccattgctctcactgatggtgagcagcttccccatacgatgaggcaaaggacctagctgataacacactgctgtctgtggatggtggagataagagagcattgtaacatgccctctgggtccttggggtcacaggcacccccacctggacactgccacagagcctacacakagtttcctcttgcaggctctaaagcaaccagccagttcctgcacttgcttgttctggttcccacactcattcactcatgcactccctcctgcaagggttgagcagggtgggctgagtaaatggggcaccttgtcacaagtcctgtgaagggagaaagaaaatatcctgcttcaatatgggagagaggggtcctaatctaatctttttggtgtcagtataagaggagaaaattggacacacaaagagacactaggaatgtacatttaattatagttgacctaagtgctatcatataaaggtatatgatgccaagagagtgagaaatatttccaaactta

SEQ ID NO: 775103 - DNA, 646 bp, Homo sapiens
gccctgttggagacattgccaatctgtttcttctaactgacatcggtccatttttggggtcacagtcatcgtaaataacatgttctttctaggaccattgtgtgaacccttaagactatatgtctttttttttttttttgagacggagtcttgctctgtcacacaggctggagagcaatagcgcaatcttggctcactgcaacccccacctgcygggttcaagcaattcttctgcctcagtctcctgagtatctgagactacaagcacgtgccaccatgcccagctaattttttgtatttttagtagagatgggatttcaccatgctggccaggctggtcttgaactcctgaccttgtgatccgtccacctcggcctcccaaagtgctgggattacaggcatgaaccactgcgcccggccaagactgcatgtcttatgtccaaatcatgcattattttccctccctatccaaaatatagtgacttgaaccacagggatggtcataagagacctttgaatgtttaagcaaacaccaccagtagattatgtaagcttcagacgatttcggagagaactccaaaatctacacttggctatgaggatgagcttcctggagggataattgacttattagttttgtgtgccc

SEQ ID NO: 775104 - DNA, 631 bp, Homo sapiens
tgtaagcttcagacgatttcggagagaactccaaaatctacacttggctatgaggatgagcttcctggagggataattgacttattagttttgtgtgccctacaggcagttatccctacaatggtaatcatcaaattagaaaaattggtgagaaatttgcccctgaatttaatctaaaagattaatgatacaattccagtcttctttagcctcagttcatggactaasgtttttatggatgataggattgccctcagctacctccttgtggtccaaggaagagactgtgcaattgcttatatatcctgctgtacctgatctaatgcctccggccaagtggaaaggttaatatagaaacttaaggagaaagtcacatggctttgtaagggaaacctttatggtttgggggatttattcagtttgttgggttcagcagctgaatacatcagcagtgtggttgaggtatatactgtagattggtcccatccttctgctttgagtcctgttgatagtgaccttaagtaaagacatgtatgagacaaagtggatgaacttttttccagcatctgttggttagatttatccgtgactgatggcgtatttatgggaaaattagtcagagaaaagatga

SEQ ID NO: 775105 - DNA, 568 bp, Homo sapiens
tgcttaggactcccttctcacggtccacactgcctccccaactgacttcaacggggcctcatggcgcagaggtgcccaggggagcatcaggagcttgagggatagacggtggagccacgcgggagaagcttcatccctggcccagcmgagcaacgccctctcacgggtgagctgcatgcatccattgttcattattcaacaactgttactggttctcgtgccagtctctgggcaggggcagggttggaaggtgagtgacttgatcctgggctccaagggtgcctggtgaggagttattacagtgcagagaggcacctgcacgcgacacatccggcttcctaggagcggggacattcagcaagggccggccagggcagggaaggccgggagctgtaggagcagagcaaggtcgggggtggccaccaaggctggagccagatgtccaggttccaacactgctggcctgtgggagcccaggtgacaagatcacagggaccctgtgggctttggtgagctcccttgggcagggtgtagccaggggtctctgggtgggggaggaggaccagag

SEQ ID NO: 775106 - DNA, 636 bp, Homo sapiens
tattcctttgtcttattttgcaacttagattgatccttttaagagatgctgtgatcaggcacatgggcctgatgtaattatgtgcatgggctgcatggtaaaaaatgataccaacccatgctcacaataaatgccattatttgtccttcttgacaggttggtttaatacgctggccttgtgctttagaaaagaaaagacaacggtgtatgaaatggcacaaaactgaaaaggcaaaaacgtctttggaaaattacgcaaggcttcttcagctgagttaygatgcttgcaggctgtaattaatatattacacaatagtacattgttacagtattagtgttacagaacatgaaaacaaccatttgcttcagtggaaaagctactcaccgttgggaatttatcactatgtggaggaaatatctagtgatttgactcaatgtaaacctttccactgactgatttgatgatctgcagacagagctttaatgaatcactgttaaatctacttagctgcctcacggaggaaggaaaagaactgtctttaaataaacaaaatgaaaaccagggaatatgcactaaggttccctgtgttctaatctgtgctttaactgaggggcaaataagaaacactgctgtgg

SEQ ID NO: 775107 - DNA, 520 bp, Homo sapiens
aagaaaggctgtttacagacttgccatcaaggagccagttatgtaagtaaaggcactggcaggccttatttcaggctgagggtgacgaccacaaccgggcgcatgctgacctcgcttacgtggcatcccctttcggcgggcctgccattgctcttgggtcagggtaggcggggagagtccccatgaggttggctggacaccctggatgtcccctttcccagagtgacckctgggctcagtggggtgtcacccagcccctgacctccactccttttcagacagagctgctacactatgtcacgtagcaggcagtttctcagtggcctcttgaagagacatgtaaagaaagctggggggcggggagcaaatgtgggaaagagaatgaggcgctgctgtcacttggccacgtgggcgggcacgaggtccccgcgggcgttttagaggattgtcttggggacggtcgcacttgccatccctgtagtcacttgtcacttttcctccttgacgtctctgaggatcc

SEQ ID NO: 775108 - DNA, 609 bp, Homo sapiens
aacaaccatttgcttcagtggaaaagctactcaccgttgggaatttatcactatgtggaggaaatatctagtgatttgactcaatgtaaacctttccactgactgatttgatgatctgcagacagagctttaatgaatcactgttaaatctacttagctgcctcacggaggaaggaaaagaactgtctttaaataaacaaaatgaaaaccagggaatatgcactaaggttccctgtgttctaatctgtgctttaactgaggggcaaataagaaacactgctgtggccagtgagggttgccctgcctgccmgccccaggggatgatgtgaggatgctcccctcggcccctctgaccaaggagctgttttgccctgggtgaggaggcgatctgcgcagacctcaacaggaggcaaggctttctcagtctcagcatttgcagctcagtgccactctgtgtttctgcatgagcctctgggagaagaagccagggagaagttgaagaagaggttaatgttacaagccacaggcatctgatgggaggatgctggtgctgaaagaaataggagaacttattaatttatcttaaatgggcaggttaatggattgatg

SEQ ID NO: 775109 - DNA, 480 bp, Homo sapiens
tgaagaagaaaagggagcaaaggaggaatccattttgcagacttctctgggtaggtggaggaacacttgatctcgtcttgtctttggcctgcccctgggaggacaagcttgtaaaggacattatcagcatagaatggaacagactctcattttaggagctggacttacattgcacacctaaatttatgattggcatgtccttgtttatgggaggccagcaaagaatgtactgatgaaagatctgtgggagcacttgcagacggctgtggcctccacctttctgtggggacctggctgatgyatcctattcatgacagctgtccatacggatgcagcgttgcatgattctcactccaggcttaatcttccctttggcataagaagtttgggcatcctgtgatttttacgcccacagccacttttttttttttttttttttgagacggagtctcgctctgtcaccaggctggagtgaagtgg

SEQ ID NO: 775110 - DNA, 586 bp, Homo sapiens
ggcatggaaaattctggaaggatccacatcagaccattagcaatggtcagccttcacggggtagaggcagaggagagactttcacttattttttagacttcaaaatacgtaggttctggatgattttcatattgtgtgttctttattttatatacatattacgtgcatatacaagcatttatttttttgaacgctggttcatttttatagttttaggcttctaggcactgtttcccctgatctttttcccctcctattgtcctcattttggcttttttcccattgtctatgcaacattttcaaaaccagagctcctggcggctgctcaccgaggacctgcgccasgcttggtttctcagctctcccctcctcccttcttcccctggcgtttgctattgatcaggttgaattttaggtcctgcagagacatctgacaggggtcccaggaaggccctggctgtcgaggaatccagcagacacgtggatgtgtctgggaaggaaggccggcgcagctcagggcaggggcgcgcgttgcaccttcacgcctctcacgctggctgctctggggcctcagggaggagcagga

SEQ ID NO: 775111 - DNA, 586 bp, Homo sapiens
ggcatggaaaattctggaaggatccacatcagaccattagcaatggtcagccttcacggggtagaggcagaggagagactttcacttattttttagacttcaaaatacgtaggttctggatgattttcatattgtgtgttctttattttatatacatattacgtgcatatacaagcatttatttttttgaacgctggttcatttttatagttttaggcttctaggcactgtttcccctgatctttttcccctcctattgtcctcattttggcttttttcccattgtctatgcaacattttcaaaaccagagctcctggcggctgctcaccgaggacctgcgccacscttggtttctcagctctcccctcctcccttcttcccctggcgtttgctattgatcaggttgaattttaggtcctgcagagacatctgacaggggtcccaggaaggccctggctgtcgaggaatccagcagacacgtggatgtgtctgggaaggaaggccggcgcagctcagggcaggggcgcgcgttgcaccttcacgcctctcacgctggctgctctggggcctcagggaggagcagga

SEQ ID NO: 775112 - DNA, 544 bp, Homo sapiens
ttgagagcagctttggaagacacagaaggtttaagttctgagatagctccataacccccaccagagagggaggctttctacaatactccattcttaccccacagactaggacatgaagatctgatatgatttggctgtgtccccacccaaatctcatctggaatcatagtttccataatccccacgtgttttgggagggagcaggtggagataattgaatcatgggggcagtttcccccaccctgttctcatgatagtgagttagttctcacaagacctgatggttttcaggggcttccgccttcacttggctctcattctgtctcctgccgccatgtgaagaaggatgtgtttgccsccccttctgccatgattgtaagtttcctgaagcctccccagacatgctgaattgtgagtcagttaaacctctttcctttataaatgagccaggctcacgtgtgtctttattagcagcatgagaacaaacaaatacagaatcccaatgaaaatgcagcaatatcagaaacatgcacacattcaagac

SEQ ID NO: 775113 - DNA, 583 bp, Homo sapiens
agatcagcggacaaagagcaggaaaagcagaaaacaagtccctaagaaaggtcaaaggcaaattgagacaagaaggcaactgtagccaggggcggtggttcacgcctgcaatcccagcactttgggaggcagaagcgggcggacagcttgtgcccaggagttctagaccaacctagtcaacatagtgagaccctgtctctattaaagaaagaaagaaaaagtwcaatacaaaattgaggccgggcgtagtggcttatgcctgtaatcccagcactttgggaggctgaggcgggtggatcgcttgagatcaggagttcgagaccagcctggtcaacatggtgaaacccctgtctctactaaaaatacaaaaatcacctaggtgtggtggcgcatgcctgtagtcccagctactcggtaggctgaggcggaagaaccgcttgaacctgggaggcggaggttgcagtgagccgagattgcaccactgcactccagccggggcgacagagcaagattttgtcttaaaaaaaaaaaaaattatatgcagataacagccctgcatagatgaggatgcataggacctggg

SEQ ID NO: 775114 - DNA, 594 bp, Homo sapiens
tttcagtcatcacatcctatactttatccctaggtggcatacctggatacatattacttctgaggtgagtactgattctccctattctaattttaacacaagacacaatcatctcgagcaatgatttaaatttttttctgtggagtctatgattcctcttagttttttcaagaaacttgtcccacatccttgtttcacttttatatatatcgcactttgggtatttatacaaaaatgtggctgaatagaagttttcttagttaaaaatgtttgcaaactattggtctaggaagcaatgttagtttctacatcactagagttgcttaataaatayagtatcctacttctaacgctggtgataataataattagcataggtaacatgcattttagattaaatatagtttcaccaagtcatgggaaatagaatttataaaatatttaaggctcatctaatacaacaatgttagaatttattttatttatatatatatatatatatatatatatatatggctttatctgtatatttttgccatgactggaattgtctgtggaggatttcatggctttgggtaaattgaggctcctaat

SEQ ID NO: 775115 - DNA, 573 bp, Homo sapiens
gtatccaggccatcaccaataattctaaatgacaaatgtttcttttaacaaccccacaatatcaccccttaccacaaaatcttccttcagcttaatcgctcccactttaggttcccacgccacccctaatcccgctggaagcagccctgagaaacatcgcccattatctctccacactatcccccaaaaattttcgaygccccaacacttcaacactattttgttttatttttcttatgaatataagaaggcaggaatgtcaggcctctcagcacaagccaagccatcacatcccctgtgacttgcatgaatatgcccagatggcctgaagtaactgaagaatcacaaaagaagtgaatatgccctgccccaccttaactgatgacattccaccacaaaagaagtgtaaatggccagtccttgccttaagtgatgacattaccttgtgaaagtccttttcgtggctcatcctggctcaaaaacacccccactgagcaccttgtgacccccactcctgcccgccagagaaccaaccccctttgactgtaattttcctttacctactgaaatcct

SEQ ID NO: 775116 - DNA, 616 bp, Homo sapiens
tatgtgttatgcatatatgtatgaacaagaatacatctctaaaccttataaatattccactgttctatataaaagagtcaactgacgtaaaaagttgactcattttactggtctttaaaataggggcttaataactctgaaacttatgatttctcatatactttgacttcaaaacttcacttgtaggaatttatcctacagatatgrccacacagaaaatgacatataacatattaagaacattttctaatatgaaataattagatataagctaaatagttaacgatatagaactagttacatatattatgaacaacagaataccctgctaccataagcaaaatgaggacttttattaatataaagtatatacagaagataaaaaggtagagtgcagtaatactggtatgcttacatttatattaaaagagaaaatattatgtatttaattaaaaatgcatattaaggctgggcgcggtggttcacgcctgtaatcccagcactttgggaggccgaggcgggcggatcaggaggtcaggagatcgagaccatgctggctaacacggtgaaaccctgtctctactaaaaatacaaaacaattagccgggcgttgtgg

SEQ ID NO: 775117 - DNA, 525 bp, Homo sapiens
ctggtactagtaaacagatagaaaatcatagattagtataacactgtaattgtgatatgtaagtttctcgacttaaatagaaagactaaatgatgaatgaataaaaaatgataactacaacatttcaacacatagacagtagcataagacataaagagaaacaacaaaaagttaaaaattgggaagacaaagttaaartgtagaatttttattagtttcctctctacatgtttgtttgtttatctaatcagtgttatgttttcatcagtttaaataatgggttataagataggatctgtaagcttcatgttaaactcaaatgaaaaaacatacaacagatacacaaaaaataaaaagcaagaaattagtgtgtaccaccaatgaaaattacctttactaaaaggaagataggaaggaagaaaagaagggaagaccacatagcaatcagaaaataaataataaaatgataggagtaagtccttactcatcaataatagcattgaatgtaaatgaactaaactctcc

SEQ ID NO: 775118 - DNA, 513 bp, Homo sapiens
gcagggaggtgtggagggagaggcgcgagcgggaaccggggctgcatacagtgcttgcgggccagctggagttccaggtagtcatgggcttggcgggccctgcactcagagcagtcagccagccctgctggccccaggcaatgagaggcttagcacccaggccaacagctgcagagggtgtactaggtcccccagcagtgccagcccacyggcgctgtgctcgatttctcaccaggccttagctgccttcctgcagggcagggctcaggacctgcagcctaccatgcctgagcctcccacccactccatgggctcctgtgtggccagagcctccctgatgagtgccgccccctgctccatggtgcccagtcccatctaccacccaagagttgaggagtgcaggcgcacagcacgggactggcaggcagctccacctgcaaccccagtgcaagatccactgggtgaagccagctaggctcctgagtctggtggggacatggagaacctttatgt

SEQ ID NO: 775119 - DNA, 523 bp, Homo sapiens
ccggactatagacacgggtgtcaggctttctgggaaagggctctctaacaacccccgactcttcagagttgggactgttggtttgcctagaaccagcttccacttttcctgtactactgggctgagccgagggtcaayagagaggaaagccatgcagctccggggtcccaacaacatgttggttgaccctgtggccatgagtggaactctcaaaggcatgtcgcccaagcgagactctcccatctatcctatctatcctgacctttgccccctgggtcctaatgcctgccagacaaacttccactcgcctctcttctttgaggttagacctgcttctaaaaattgctacctgtctctggtgcttttctagtttctcctataagaatgatttctagtataaactccaggactctgttaccttctttaggcacctgggctcaccaatcagaaagacataatttttgcccaaagccccgtcataccggggactacctggaatttaggatcccttctcagactaata

SEQ ID NO: 775120 - DNA, 611 bp, Homo sapiens
agctccaaggcttggggcttccacattctgaagcggcagcccaaactgtatcttggccccttttagtcatagctggagttgctgggatgcagrgcaccaagtccctggactgcacacagcagaaggaccctgagcctggcccacgaaaccattttttctcctaaacctcagggcctgtgatgggagggactgctgcaaagttctctgacgtgccctggagacatttttccccattgtcttgggggttaacatttggctccttgttacttggtcaaatttctgcagccagcttgaatttctcctcagaaaatgagattttcttttctatcacattgtcagggtgcaaatttcccaaacttttatgctctgttttccttttaaaactcaatgcctttaacagcctccaagtcacttcttgaatgctttgctgcttagaaatttcttccaccagacaccctaaatcacctgtctcaagttcaaagttacagaaatctctaggcctagggcaaaatgctgctagtctcttcactaaaacataacaagagtcacctttactccagttcccaacaagttcctcatctccatttgagaccacctcatccaggatttca

SEQ ID NO: 775121 - DNA, 611 bp, Homo sapiens
agctccaaggcttggggcttccacattctgaagcggcagcccaaactgtatcttggccccttttagtcatagctggagttgctgggatgcagagcaccaagtccctggactgcacacagcagaaggaccctgagcctggcccacgaaaccattttttctcctaaacctcagggcctgtgatgggagggactgctgcaaagttctctgacgtgccctggagacatttttccccattgtcttgggggttaacatttggctccttgttacttggtcaaatttctgcagccagcttgaatttctcctcagaaaatgagattttcttttctatcacattgtcagggtgcaaatttcccaaacttttatgctctgttttccttttaaaactcaatgcctttaacagcctccaagtcacttcttgaatgctttgctgcttagaaatttcttccaccagacaccctaaatcacctgtctcaagttcaaagttacagaaatctctaggcctagggcaaaatgcygctagtctcttcactaaaacataacaagagtcacctttactccagttcccaacaagttcctcatctccatttgagaccacctcatccaggatttca

SEQ ID NO: 775122 - DNA, 581 bp, Homo sapiens
aactacatcaaaattccaataacttctctttctttcttttccttcattccctccctctctctctccatccctccctctccacctttctttctttctttcttttctttctttccttccttctttctttccttttttctttcttcctttcctttctttatttttctttctggcttgcgtgctttttcttgcttgcttgcttgcttgctttctctttcttgctttctttctttctgacataaagtcttgctctgtatcccaggctcaagcaatgcttcctccccagcatccctagtagctaggactacagatatgcaccaccatgcctagctggtaatttacgtttttttttttttgttttttgttttttgttttttttttgaaataggatcttgtgatgttgtccaggctggtttcaaactcctagcctcaacwgatgctcccacgtcagcctcccaaagcactgggatacaggcatgagccactgtgcctgaactcaatatttttcaaagaaataaaaaaattataaaatttggagggatcctcatctgatgatacagctattatggaaaacagtaaaaagt

SEQ ID NO: 775123 - DNA, 619 bp, Homo sapiens
tgctttatacccaagcatgggaaatcactaggaatttccatacttcggcagtgattcagaaagaagacaggggtaggggcaggtaaaatgtaaaactaatccctttcattgaaaatagccattttgtttttattcattctaaagtttgctctcttagattagatcctctagtaacagttcttcatctcccagtgctgctctcttagacttgtagcaaaatattaaacctttgtacaggtgcttctcaacttacagtgagattatatcccaacaaactcatcctacattgaaaattttgtaaggttaaaatgcacttaacacatytaacctaccaaatgtcatagcctagcctaaccttaaacgtgctcggaacagcactacacttaggttacacttagcctacacttgggcaaaatcatctcacatgaagtctattttatgataaagtactgaatatcttatgtaatttattaatactgtactgaaagtgaaaaacaaaatggttgtatttgtactaaaatatggtttctactgaatgtgtattgccttcacatcaccttgaagtaaaaaaaaatttaagtgaaacaattgtaagtcagggaccatctggatgggattt

SEQ ID NO: 775124 - DNA, 619 bp, Homo sapiens
tgctttatacccaagcatgggaaatcactaggaatttccatacttcggcagtgattcagaaagaagacaggggtaggggcaggtaaaatgtaaaactaatccctttcattgaaaatagccattttgtttttattcattctaaagtttgctctcttagattagatcctctagtaacagttcttcatctcccagtgctgctctcttagacttgtagcaaaatattaaacctttgtacaggtgcttctcaacttacagtgagattatatcccaacaaactcatcctacattgaaaattttgtaaggttaaaatgcacttaacacatctaacctaccaaatgtcatagcctagcctaaccttaaacktgctcggaacagcactacacttaggttacacttagcctacacttgggcaaaatcatctcacatgaagtctattttatgataaagtactgaatatcttatgtaatttattaatactgtactgaaagtgaaaaacaaaatggttgtatttgtactaaaatatggtttctactgaatgtgtattgccttcacatcaccttgaagtaaaaaaaaatttaagtgaaacaattgtaagtcagggaccatctggatgggattt

SEQ ID NO: 775125 - DNA, 523 bp, Homo sapiens
gctttggtactctcaggaagaatttcatgagagagatgattttttcatggaaaatcatagatgaggcaacagctagcactagggctcttactgccaagatttggtttaaaatgtgaatgcagttaactcatgagaaaataagaaacggactcaaagggacgttgataaattaattctgcaagccttgctagtctggagtagagggtagagtagggtgttaaaattgtacaataaaaataacagaaatcacacaaaacaaacattgcaaggctagagttcctttggctaaaagaacccttatatgaagggaaagaaaacaagtcactctccctactgagggaaaacttaagagatattattcttgtaatggacagcaratgatatggattaaaatggcgtcctaaaaaaaaagactgacactaagcaaatcaagtctgattcagtcaaacaaaccttgtggttttagtcagaaagcaatgtgatggtggcttctgaaatagaagatcccaaaactgagaatgtc

SEQ ID NO: 775126 - DNA, 541 bp, Homo sapiens
atgctaagccatcaaagatattcagcagggagtggacatgtttggatttgtgttttaaaaatatcatactaaaagaaaaataattctggcttctttgtgaagaacaaaatggacatgaccataaaagatgtaggaagaggaattaggaagaaattacagtagagtgaataagagagaatagtaatggattgggagaaataaagagaagtggtccgaggttattgattgttggattagcgtagaattttatgtttaaaaataatattattttggattttcaattatgtgtcactatcaacctataatattcaattttgctattgagaagttattcacattcctttgaatttaactttgatagttttagatattctcttaattataatgtttgaaacawgataatgtgctttaagggtgtatatttgcatatgtgtatgtgtgtgtgtgtgtttcattcattatactcagcatttgatggacattttcaatctggaaacttatgtgcctttgagttatagaaaatggtctctgctgattaatc

SEQ ID NO: 775127 - DNA, 626 bp, Homo sapiens
ggaagacaggtgatttctgcatttccatctgaggtactgggttcatctcactagggagtgccagacagtgagtgcaggtcagtgggtgtgttcaccatgcacgtgctgaagctgggcgagccattgcctcactcgggaagcacaagrggtcatggagttccctttcctagtcaaagaaaggggtgacagacggcacctgtaaaatcaggtcactcccacccgaatactgcacttttccgatggtcttaaaaaaaggcgcaccaggagattatatcctgctcctggattggagggtcctatgcccacggagtcttgctgattgctagcacagtagtctgagatcaaatgtcaaagcggcagcgaggctgggggaggggtgcccgccattgcccaggcttgcttagttaaacaaagcagacgggaagctcgaactttgtggagcccaccacagctcaaggaggcctgcctctgtaggctccacctctgggggcagggcacagacaaacaaaaagacagcagtaacctctgcagacttatatgtccctgtctgacagctttgaggagagcagtggttccccacacagctggagatctgagaactggcagactgcctcctcaagtgggtc

SEQ ID NO: 775128 - DNA, 653 bp, Homo sapiens
tgtttcataattgcccaatcaaaagaaagtttcaactctgtgagatgaattcacacatcagaaaatagtttctcagaatgcttctgtgtagtttttatgtgaagatatttccttttccaccataggctgcaaagggctccaaatatccacctacagatgctacaaaaagagagtttcaaaacttctccatcaaaagaaagattcaactctgtgagttgaatgcacacatcacaaagaagtttctcagaatgcttctttgtagtttttatatggagatatttccttttccaygattggcctcaaagtgctccaaatatccacttgcagatgctacaaaagagtgtttcaaaacagctcaatcaaaacaaaagttcaactctgtgagatgaatgcatacatcaaaaagaagtttctcagaatgcttctgtgtagtttttatgcaaagatatttccttttccacaataggcctcaaagcacttcaaatatctacttgcagattcttcaaaaagagtgtttcaaaacggctcaatcaaaagaaatgttcaattctgtgagatgaatgcacacgtcacacagaagtttctcagaatgcttccgtgtagtttttatttgaagatatttcctttacaaaaataggccacaaagggatcca

SEQ ID NO: 775129 - DNA, 602 bp, Homo sapiens
tgtgagatgaatgcacacatgacaaagaagttcctcaaaatgcttttctgtagttttcatttgaacatatttctttttccaccataggccagagagggctccaaatatccacttgcagattctacaaaaagagagattcaaaactgctcaatcaaaagataggttcaactctgtgagttgaatgcacacatcacaaagaagcttctcagaatgcttctgtgtagtttttatttgaagatatttccttttccacaataggcctcaaatcgcttcaaatatccaattgcagattgtacaaaaagagtgtttcgaaactactaaatcaaaagaaagtttcaactctatgaggtgaatgcacacatagcaaataagtctctcagaatgyttctgtgctgttttcatgtgaagatatttgcttttccacagtagacctccaagcgctccaaatatcctcttgcagattctacaaaaagaaagattcaaaactgctcactcaaaagatacgttcaactctgtgagatgaatgcacacatcacaaagaagtttctcagaatgcttctgtgtagtttttatttgaatatatttccttttccaccataggc

SEQ ID NO: 775130 - DNA, 602 bp, Homo sapiens
tgtgagatgaatgcacacatgacaaagaagttcctcaaaatgcttttctgtagttttcatttgaacatatttctttttccaccataggccagagagggctccaaatatccacttgcagattctacaaaaagagagattcaaaactgctcaatcaaaagataggttcaactctgtgagttgaatgcacacatcacaaagaagcttctcagaatgcttctgtgtagtttttatttgaagatatttccttttccacaataggcctcaaatcgcttcaaatatccaattgcagattgtacaaaaagagtgtttcgaaactactaaatcaaaagaaagtttcaactctatgaggtgaatgcacacatagcaaataagtctctcagaatgcttctgtgctgttttcatgtgaagatatttgcttttccacagtagacctccaagcgctccaaatatcytcttgcagattctacaaaaagaaagattcaaaactgctcactcaaaagatacgttcaactctgtgagatgaatgcacacatcacaaagaagtttctcagaatgcttctgtgtagtttttatttgaatatatttccttttccaccataggc

SEQ ID NO: 775131 - DNA, 630 bp, Homo sapiens
gataagctaatatttaatcaagaggaagatactattccgccccactcagaaaaacctttgttgaaaattatgccagatagtatactctgtaaaaaattttttattaataatctatttataaaatgactggagataaaatatgctaccttccccactgtcttataactaatccaaatactcaacaaagtttaaatcatatataaaatgttcttcaaaacctttctatagccaatmatgttcactagggacatttttattttaaaaagtagctacttaactaaattatctctccatggcttaatttagtaataacattaaactaacagtatgaagtttaatggtatctttcttccttctccctttctctcttgtatctacactcataaacaaacaaaaaaaaagttggcataaagaaaaacagcaaggggctgggcacagtggctcacacctataatcccagcactttgggaggaccaggtgggtggatcacttgaggtcaggagttcgagactagcccggccaacatggtgaaaccccgtctctaccaaaaatacaaaaattagctgggcttgttggcagatgtctgtaatcccagctactcaggtggctgaggcaggggaattgcttgaa

SEQ ID NO: 775132 - DNA, 612 bp, Homo sapiens
aacttctagaacaatcagttttctagaacatagaaaagatattaccttggtgttagctttaactcctgccaaataatgctttaaattatttaaactttaaaaaggtgtgtcaatgtatacattgcaggtaaattcatgttccagtaacttttgttttctytgtatgttaaaaatctaactgtggaaaacattctagcttggtttgagagtccaataatacaaaatgctttatttcctaaaattgtttgagagaaaaccaaaatgctaccacactgcaacaaaatactaaagaattatttgctatgtcagttgacatatttttatttagattttgcctaagatgccacatgaagcctatataagacattctttccctaaaacttacatatgtatgtacatatatatatataatgttttacatcctaaacagtctacttcacgtcttcaccaaatgtgcagcagcgtgattcacaggttcaccactggaaaatagaccttaaaattccgccaatattgggtcaaagatcttacactataacacatactacactgtgggcacggatcaacagacgagaatactttatacagaagcttctcgacggaagaaggcct

SEQ ID NO: 775133 - DNA, 586 bp, Homo sapiens
acctaggggatccccaagccagagctgtgacaccctctttggggctgtgtggttcctggcatctccaagcttctgggtaccaccacattcccctcatccagacgtggatgcctgcagcagaagctgtgtgtggtgcatctgttccagccacagcttcacatggagctggcacctgtgccagagcctggagctgcctgccctgccacagcagycagcatccctggctgtgcacagtgacctcacctcgcactcgctcacccacacacccctcgccactccctgcctggcttgcctttggcaggtgtcagatccaggccggtagtgcaagccaagcacagcctgccaggcagagtgggcagaatgagcccagcaggtgcaagcaacactcaggcagaatgtactgctagccacagaggtttctggctggtgaagcaacaccccaaggattccatgacaacaggaatctcactcacttgcccaggttagagtgtaatgatgtgatcatagctcaccgtaacctcaaattcctgggctcaagcaatcctctggcctcagcctcctgagtagtgaggctaatttttaattt

SEQ ID NO: 775134 - DNA, 616 bp, Homo sapiens
cacctatataagctgagtattggatccagtgccacattaaatgcccattatttgtgtaagcagaagttgcagctttctgagcttagaggcgatgtcatccagtggttggaggagttggtcaaaatgcatgggttggacacctacctccaccatgtattgcctgggggcttggcagatgtaattaaggacctcaaggtgagatcattctggatcaggtgggccctaaatccaatgacaagtgtccttctaagacaggaagacacaacagagagcaggaggccatgtgaagacagaaacagagattcacaagccaaggaatgccttgggccaccagaagctggaagaaggaaggaacacattctctcttagagccccagagagagcccagcccagcccacctcttgatttcagagttctggcctccasaactctgagagaataaattttcgttttattaagtcacccagtttgtggttgtttgctacgacaattctgggaaattaatatgatggatgggtctcacaatcctaatactgaaagaaaaaaatccaagttacagaaaacacggataccatctcaacagcgtttcagaaacgtgaaacccgtacattgtacc

SEQ ID NO: 775135 - DNA, 436 bp, Homo sapiens
ggctgggcgaggtggcacgtggcttgtagttccagctactcaggaggctgaggcaggaagaatgcttgagcccaggggttcgagaccaacctgggcaacgtagtgagactctgcctcaattaaaagaaaaaaagtctagggcaccagactaccatgccaaggtgcctattaagccccattggggctgggtccctggtaggggcctaggagggtgatggcaggaaagagcactttccagtaggagatccccaagggkcaacatgtgaggaatgagagtggagaagtggacccagaaggctggatgaaagctggaacagcttctatagacagagactgctgataggcatcaaagactggtcttctggcaggttcactgtaataactgggagcggttttattgctctcatccccccttataagatgtgtcatctttaaa

SEQ ID NO: 775136 - DNA, 593 bp, Homo sapiens; identical to SEQ ID NO: 738916

SEQ ID NO: 775137 - DNA, 656 bp, Homo sapiens
agaaggtgtgggtcctgtcagaaaactccagagcccgtaatcaaagcgaaggatctatcagcccagcaagtgccagcttcactaaacaaaacctccctgaaagaaatctcaggggaaaggctgagctcgatccccgaagcatctgtaagtggttcccgtgtggtttacagatgccggcaatwcatcctgctgtgttccgttctgtccacccatgtttttagcagtatctctttttcatcatttgggtgatgagtgttgtattttctttcctgttctgatgtgttttagtttggtaatagcagctgttaaagagtctactgcacatcccaaggataatagaatacctcatgtttttaatgagaaagataattatgtaattttcatcataacagttattttattttctagttacttcccataatttgtagttatcactgcctgcaaattataaatgatgatcttatttttgagccaaaagcttgccagtaaaattgacagattttcaataacaatctacattaggagccataaaaacaccattattctattcactttctacagcagttccccaaataataaatgatatgagtgaaggttaacattaaaacagtgtcatcgaataaatccctcggctagtttggtggctgtattcgtgt

SEQ ID NO: 775138 - DNA, 434 bp, Homo sapiens
atttgctcctcacatgccagccactttgtccttcattaaggtcctcaaaagcatcagtcctctcttagtcctgtgcacatgcaagtcccctctgcctcgtgttctgggtaatgcttaggctcccttcaggtcctcagttatgatgacttcctcagggaagcctttcctgacaaccataaactgggtcagctcctttatgatgccctctcagaatcttaaaattttcacttttagcattgatcacagttgcactgatggaattgtttytggagttggcaggtttgctgggagctctacaacggcaagcaccatgactgttttgctctcactgcctttcctaggtctggtgcctagtaggtgcccaaccagtttttgtagattaagtaaataaacaaaaactcaaagtagttttttttttaaatttgccatttaaa

SEQ ID NO: 775139 - DNA, 655 bp, Homo sapiens
ccatgagcatgggatgtttttccatttgtttgtgtcaactatgatttcttttagcagtgttttgtagttttccctgtagaggtctttcacctccttggttaggtatatccctaagtgttttatgtttttgcagctattgtaaaagggattgagttattgatttgattctcagctttgatctcagtcattgttggtgtatagcagtgctactgatttgtgtatcctgaaactttactgaattaatttatcagatctaggagctttttggatgagtctttagggttttctaggtatacaatcatatcattggtgaacaacaactgtttaacttcctctttaccaatttggatgccctttatttttttctcatctgattgttstggctaggacttccagtactatgttgaatagaagtggtgaaagtggacatctttgtcttgttccagttagcagggggaatgctttcaacttttccctgttcagtataatgttggctgtggatttgtaatagatggcttttattaccttgagatatgtcccttctatgctggttttgctgagggttttaatcacaaagggatattggactttgtcaaatgctttttctgcatctattgagatgatcatatgattttttgtttttaattctgtttat

SEQ ID NO: 775140 - DNA, 576 bp, Homo sapiens
aagaatattaaagaagaagaaaggtcaaaaattaatgactgaatcttctaatttaagaaatccccaaaagagtagcaggataagcccaagtaatggaaatggccgggcacggtggctcatacctgtcatcccagcactttgggaggccgaggcgagtggatcacttgaggtcaggagttcaacaccagcctggccaacatggtgaaaccccgtatccactgaaaataaaaaaaaattagccaggcatggtggtgggcacctgtaatcccagctactatggaggctgagacatgagaatcacttgaacccaggaagcagaggttgcagtgagccgagattatgccattgcactccagcgtgggcagcagagcaagactccatccccctrcccccccaaaaaaagagaagaaaagaaaaggaaataagatagaatttaaagtaacagtaagtaatatcctacagaactgataaagccataaattgcttcttaggaaaaaaataatcaaattgacaatgctttggcacaactggccaagaagaggaagcattacaaatgaagaaagggatacagttcca

SEQ ID NO: 775141 - DNA, 621 bp, Homo sapiens
tggacactttatctaatctcagatagaaaggagggagaaagaactatctttgattaatcaagtattattcttaatgtttttgccttctttctggacctaagcttttaaaactcaaaaggtaaaatttcactcttttgttctccgatttttctgcaacaacctttcctaagacaatctatatctcaagaatgagggaagggctgtaagataaataaaaagaatcatagggaacttatatcagttaatatcaaagtactattctgttacaattaaacatattatatccttatataaaatttgtttcattttattttaatttattttaattttttagasacagggtctcactctgttgtccagactggagtgcagtggagttgatcatagtttactgtaacctcatactccagggctcaagagatcctcccggctcgaccttccaaagtgctaggattataggtgtgagccactgtgcccagccgaaatctgtttatttaaaagaaatcatagtccttaattttccttcagttctacccaaagcagaaaactgcctagcagtgctctaagtttccttgatgtgaagaaagtccgagacacggtcctcaaccttataggttgaat

SEQ ID NO: 775142 - DNA, 600 bp, Homo sapiens
caggctcctatagtcagcgagtgaaacagagattttagttgaaataatgagacctggtattactagtcagctctccatgctggagaaccataagaaattataccaaaggcaggaaaggggatagaatatggggatcatcacaccaagaataaggtgcagcccatttagcccctgggtcttaaagagacccatagctctggataatggcagatctatgcgtgacacagttatcatctttgtgcatcttcagagaattgtttttccttttactcctaggaacaatgtcttaagtttgttagtaaattctattgaatttattaaagattcttctgataaattctttttatattcatttcaaaaaagaagmaatttcacactgacagagacattgttattatagcactaaatacttttacactcttcaaattcctttgaggctaactgaaatttctgacagccccacattctacaactttattgtaaattttctgccaaaagtgatgcttccctatacactcctaatacaggtataaatatattatttaatctaggcttaggttgatttaaaattttgaaaattcactccaaaaatatgttctg

SEQ ID NO: 775143 - DNA, 564 bp, Homo sapiens
agacagctttgcagctaagtttgcatttccagcccttctcaatagccattttgaaatatatcaaggaaatatatttaggggtaaaatatattagtttccttcatacagctataaaacatacagcaataatttttgtcaatgtctactacaaatccaatatarcagtaaatataaaacccaccagatattgaagaaaaaatatgtagagtacctcaattgcaaatgttgatactaaaatgccaaataaaataaaaataattttcaacaatatttgaaacagtaacacaagaaattggcaaaaaaaaaataaaacaaatatccaccttggggatgaaagtgtgcttccaaatttggtaatccaataatattaataatcatattgattagcccaaattaaaaataaataggggattctcagtacatgctaaaatatatttgttaaaaggcaatattcatgtctttaaagattttaaatgctataaagagtctgatattctataggcaaacatgtgtatgtccattagaagaagagaggtctgattttcatatgttactacatagaga

SEQ ID NO: 775144 - DNA, 604 bp, Homo sapiens
aaatgttgttaataaattttacacccattaaggaaatgtgtgagtctacctggtagaattaaagtatagttgaaactattgctgtgggatgaarttatgctcactttaatatttccgatatgttttctttgtactagaaaaaaacagatattttaaaaatgctgcatttatctttatctctctgtgcacataaggatttcataccttattttcacttgagtttctttgaacaatgaacactttggaggagtgtatgctatattaggaatttattagatttcatcaaatggcaggtggttatgaattttgtttccaaaaaggagacctgagggatattccatattaacggttttattcccttttggtggaaacatgcaaatcatttgtttttgctaaaaaaactatgaaatatttctttcattatttcccttgggaatggcagctcgctattattcataattgtaaatgcagttgacattttgaagtttatgttcatgggaataagatattttttggacattttagtgatgccaagcccaggaaaatctagttattttttgcaatacacacttatatacagtatgttaattggagtaacagagat

SEQ ID NO: 775145 - DNA, 605 bp, Homo sapiens
atggcagctcgctattattcataattgtaaatgcagttgacattttgaagtttatgttcatgggaataagatattttttggacattttagtgatgccaagcccaggaaaatctagttattttttgcaatacacacttatatacagtatgttaattggagtaacagagatggccatttcaaattgggctctgttattcatctttttttttagaggcaaagagtgttggtaagcgaatttaaccagaagagcagtagattcttttgraataatgacatagtggaaaataaaaacacatatacaccaagaaacaatttgtgaactaaaacatgattaaatttaatctattgccataaagtagaaaatgttcgaaacaaggaagactgtgtactttcagctaaactgaaaataaaatgacaacaaaaaagcaggactctccacaattcaagacttgctgcttctatgatgccacactcttgattatttacccctgctatatgaatgagtgagtgttaacactgatgtattacacctaaaagattggaagagcatctttgattccattccagtccaccacgtcgtgctagaaccagcacatctgccctcc

SEQ ID NO: 775146 - DNA, 521 bp, Homo sapiens
taatcatcagggaaatgctaattaaaatcacaacgggatttatcacctcataactgtatgaccattttaaaaaaaagaaaatagcaagtgttgatgaagatgtggagaaattgaattagaaccttatgtactgtcagtaggaatgtaaaatggtagagccactatggaaaacagtatggagggtcctcaaaacattaaaaaatagacctaccatatgatgcagcaatcccacttgtgggcatttttccaaaataattgaataattccaaaataattgaaaacaagatcttgaagtgatatttgcattcccatattcrttacagaattattcacaatagccaaaaagtagaaacaatctaaaagtccatcatcaaatgaacagatgaagaaaatatggtatatatgtgtgtgtgtgtatatatatatatatatatatatgtatggtatatatatgtatggtatatatatgtatggtgtatatatatatgtatgataaatatagtatggcatatatatgtatg

SEQ ID NO: 775147 - DNA, 624 bp, Homo sapiens
caggtaacaactctgctggcacctaaatcttggacttcccaacccccagaactgagaataataaatttggtttataaattacccagtctaaggtaatttgttacagcagtccaaatggactcaaacaggttgtaaacacttgaaaaatgagtatctgtattgaatcgcatattttagccgtagtttgcttgtaggagtacagcctatggccaaagaattaatarctgactctcatttgaatggccaagatttgctctctatttccagtattttatttttgtgcctgtatgttggatacaggcaaatttttacacaataaaccagaaaagttcaatagtctttcattctctgctttcactaacttcttttaagtatatttcaacaattatcttaatattagcaccagtagattaagcatactgttataaacactctatttattcaaagcttgaattgagctagctgctaataacatttttttaattagcattgcaaccatattcacctaccatatttttccctctcctttgatttctgggccattactcactttcacaatttgtatgtgactcaccattctgtacctacttttgccttaccttaaaatattttttgatttaatac

SEQ ID NO: 775148 - DNA, 645 bp, Homo sapiens
ttggttttccattcctgagttgcttcacttagaataatggtatccaattccaaggttgctcaaatgtcattattttgttcctttgtatggctgagtagtatttcattttatatatatatatatatattatatatatatatatattttatatatatacacacatatatckatatcacattttctttatccactgttgattgatggcatttgggctggttccatatgtttgcaattgtgaattgtgctgctataaacatgtgtgtacaagtatcttttttgaataatgacttatttacctatgggtagttacccaggagtaggattgctgaatcaaatgatagatctactttcaattctttaaggaatctccacacagtttcccacagtggttgtactagtttacatccccactaacagtgtaaaagtgttcccttttcatcagatccatgccaatatctatttttttgattttttgataacgacaattcttgcagaagtgaggtggtatcgcattgtgattctgatttgcatttccctgataatcggtgatgttgagcatttttcatgtgtttgttgaccatttgtatatcttcttttgagaattatctattcatgtccttagcccactttttgatgcagtcgttt

SEQ ID NO: 775149 - DNA, 602 bp, Homo sapiens
atgagaaaaacatgaaatttaaaatttaaaattatctttcaaatattggaagaggaaaggatggttttaattccccaggtcgttaaatgagtaatgaagcaagttttacattctaaccgtgagacatattagctgttaatttgaaaaggaaacatttagtttccagtctttggggacctcactgcaaacttttatttacaaagctagttgcacgtgtctattattgwgcatcgtttttgagcttttgcattatattttgcatcaccacagttaagggtaaaataacaggactatggcatctgtgtttagatttagatagacaaatggggaaatagtgcagagaaaagccaactaaagaaattttaattgttccttgtataaagccccagtttacagaaaggttgaaccaattcatttctgcagcttacatatctaaatctgtgaccatgtagcatatgaaacaaatagggtatccctattaatcactgagttgtcaatatgaacataaagattggtgtgaattcagtgtcctgcacaaaagtcttcagttaaaacagaagagatattatggtgatggattccccaggatgttcaacaaacag

SEQ ID NO: 775150 - DNA, 602 bp, Homo sapiens
atgagaaaaacatgaaatttaaaatttaaaattatctttcaaatattggaagaggaaaggatggttttaattccccaggtcgttaaatgagtaatgaagcaagttttacattctaaccgtgagacatattagctgttaatttgaaaaggaaacatttagtttccagtctttggggacctcactgcaaacttttatttacaaagctagttgcacgtgtctattattgtgcatygtttttgagcttttgcattatattttgcatcaccacagttaagggtaaaataacaggactatggcatctgtgtttagatttagatagacaaatggggaaatagtgcagagaaaagccaactaaagaaattttaattgttccttgtataaagccccagtttacagaaaggttgaaccaattcatttctgcagcttacatatctaaatctgtgaccatgtagcatatgaaacaaatagggtatccctattaatcactgagttgtcaatatgaacataaagattggtgtgaattcagtgtcctgcacaaaagtcttcagttaaaacagaagagatattatggtgatggattccccaggatgttcaacaaacag

SEQ ID NO: 775151 - DNA, 593 bp, Homo sapiens
cattctcacactgctaaacgatactacccaagactggataatttacaaagaaaagaggtttaattgactcacagttccacatggctggggaggcctcaggaaacttacaatcatggcagaaggagaaagcaagcacatcttacatggtggcaggtgagggaacatgagcaaaagcagggaaaactgccttataaagccatcagatctcatgataattcactcactatcacgagaacagcataggggaaaccacctctacgatccaatcgtctcccatcagattcctccatccacacgtgaggattaccggtattacaattcaagaggaggtttgggtggggacacagccaaaaagtaacactytttatttattacaattttatatcatccctagaaaattgttccaaattcttgcccatcctccatcaatatctaaaattgcacttgtaattgagaatacttgctaaggttttacttgtacttgcatatagaatggactcaagatatgaatgctgtttgtcacgatttcataaatgaagacaaaacaggtattaaatattcaccctgttttctggatgctcagtttcatagta

SEQ ID NO: 775152 - DNA, 691 bp, Homo sapiens
ttatggtgatggattccccaggatgttcaacaaacagagaagaggccaaagcacgttgtctcaatctttcttcttgttttagtccattctcacactgctaaacgatactacccaagactggataatttacaaagaaaagaggtttaattgactcacagttccacatggctggggaggcctcaggaaacttacaatcatggcagaaggagaaagcaagcacatcttacatggtggcaggtgagggaacatgagcaaaagcagggaaaactgccttataaagccatcagatctcatgataattcactcactatcacgagaacagcataggggaaaccacctctacgatccaatcgtctcccatcagattcctccatccacacgtgaggattaccggtattacaattcaagaggaggtttgggtggggacacagccaaaaagtaacactttttatttattacaattttatatcatccctagaaaattgttccaaattcttrcccatcctccatcaatatctaaaattgcacttgtaattgagaatacttgctaaggttttacttgtacttgcatatagaatggactcaagatatgaatgctgtttgtcacgatttcataaatgaagacaaaacaggtattaaatattcaccctgttttctggatgctcagtttcatagtaaatgcctgccttgg

SEQ ID NO: 775153 - DNA, 667 bp, Homo sapiens
tactcttggctttgacaattaacaaaaacagaagaaatggaagaaaaaaaccaatatggtatgcagtactcataattacattttcatttgtgttgctatccttgattactatacatataagaaattatctctcaaggaaataaatgatccttgtattgcttctggagatgaaaatcaatgagtttaccttttgctacaaatatagccactctttttttttcttgtagacattaaacaccaatttgtggagacagttttgcatatacaaaggaatctgagcagcatacctgactcaatattaataaatgaagttgaaataggacctgtgattggtctgtgatgacagaaagcaaatagcttttcctcctgatacaactaaaagattattttgctaagcatttatttcaaggattggcaaagaatgtgttataacacacgtctgtaggcataatggaagaaatgccttgagcgtcattcaaaggaaggatagagaaaaaatatatatagaatcaatgtattttaayggtaacagtcttttaatgtttattaaaaataaaatattttaattttaaaaaatcaatcttttaattttttattaaaatagaaattataagtcaaaagtagtgatggacacattatttagcagaaaattcttcagagaccacag

SEQ ID NO: 775154 - DNA, 628 bp, Homo sapiens
ttaaaaataaaatattttaattttaaaaaatcaatcttttaattttttattaaaatagaaattataagtcaaaagtagtgatggacacattatttagcagaaaattcttcagagaccacaggaaaatccaggttgttggagggttaatgttgagaagtaagaaaggacagaacagtgaatacatcaatttaaccgtaggaaaaaaaatgtttactgctgatgaattaacttggaggccctctatctagaagaggggcattttttccttgcctaataaaagggagtttataaaacttatagcatcattgtaattgagaaatgtattttgaaaaatggaacagaataataggtttttcatagattaraataaaccacagtgtttaaatattacatgtatttatgtagttttaaagacatggaaaaagtgcatagcaaaattaaagttgacatagaaactatactttacagatcaaacttagaccaactagaatagaagggcaaggagagtctgcaatgagttgattagctctgctgcaggaaattgaccaactgcaagtgaactacttgggggatcgacgttttatatggatctttgtgaagcacaaaacaagatcagcaaatcataaag

SEQ ID NO: 775155 - DNA, 614 bp, Homo sapiens
gcagcgtgttggcatgtccagaggacagtgaggtggccaggaccactggtaagatcaagggtgaagatataaaagaattttggcggttaacatgaggcagatcatgatggggttgcagaccattgtaagaattgtttttagtgtacrtgaagtggggaaacaaatcattatcccattatcaatattttaataaattggatccatgaaccaaatgcaatgagattaaatcaattaataataatatgcaaatttgtattaaaattacaagaattatttgcacatttgagaacaggagagtcatgattgtttatcagcaataataaacattattaattttaattgtgatcagctaattgagattaattgcaatacatcatgctttataatgtgactgtcaaaaggaaagtatgattgtaatcttatactacatctatcaatgcctttgattcataagactatagagtaagcccctagttttcaaagccaacttatgaggcagtgacatcttatgcaaatttgctgctttctgccacagtgatccttggtcagctggcacaaattgttttacaaacgcccctaggtctaaaaatagtttggatcacaatgaacacaga

SEQ ID NO: 775156 - DNA, 607 bp, Homo sapiens
aaagccctgagtagcaaccttcttgcctgaattgtgaaggcaacacgaatacacagatcacatcttgggaaaaataaatgtgaccccttaaaatttgcaccatattattgaaatctctttgacacaagtaaccatagaagacacaggtaacatatgggttgctctttatgtagggctttagcagtctattcagtcttttaccatgtgactactttgtatgtggaaaaattgttacataaacaaaatagaagcattttctctttgataccaagagtagagctaagaccaataaatcaatattaagggaaaattttaccttagatataagaaaataattttctaacagctcaaattatactcagttgttgytattaactaacaacccttatgatatctgcatactaatacttgtaaaatcaagattaatttgatattcatttctggtaggggatggggttatgtcattttcgtacagtcttggagagaaaataatttgttaaatgcaatttgctagcatctattagaaatcttgtaaaggttatatatttttaatttcacttaatatttctgcttttatttttctacacatgaccataaatatatatct

SEQ ID NO: 775157 - DNA, 633 bp, Homo sapiens
ccgtttcttaagccggtctgaaaagcgcaatattcgggtgggagtgacccgattttccaggtgcgtccgtcacccctttctttgactcggaaagggaactccctgaccccttgcgcttcccaggtgaggcaatgcctcgccctgcttcggctcgcgcacggtgcgcacacacactggcctgcgcccactgtctggcactccctagtgagatgaacccggtacctcagatggaaatgcagaaatcaccatcttctgcgtcgctcacgctgggagctgtagaccggagctgttcctattcggccatcttggctcctccctcctcccgcttgttttcttatgcatataaagggataggaawtatgtatgtatgtatgtatgtatgtatgtatgtatgtatgtatgtatgtgtgtgtataggatcatgcactatatatagcttgcttctttttccactatgataattttcccatgtcatgaattacggcttgcaagtgcttattcttaacaggctgcattatttttcattatttggatttattgttatttaattggagctctattattgaacatttagattgcttccaaaattttttgctcttgttaatatattgtaataaacttctgtgaaacaca

SEQ ID NO: 775158 - DNA, 611 bp, Homo sapiens
agattaatgtggatcctagaatccagaaagttgtctagagactatttaaaacggttactgcaagaaagctcaaaaagagagtaatcattcagaataggaagagatagaaatccttaaacaattaaagtaacaataccaggtgtgtatagtcagagggagagattttgcctatattattctggggagagaaataaaatatttctgtataacatcatagaaatgtaaatggagatgttaaacttctctgatgggtagtttgagaaaaattttaaaaattgaaaagttttttttttttttttttgagacrgagtctcgctgtgtcatccaggctggagtgcagtggcgccatctcggctcactgcgagctcagcctcctggcttcgtgccattctcctgcctcagcctctctagtagcgggactacaggcacccgccaccacgccaggctattttttttttatttttattagagacggggtttcaccttgttagtcaggatggtctcaatcttctgacctcgtgatccgcctgcctccaccttccaaagtgctgggaatacaggcgcaagccaccgcgcagggccaagactattgttttaaagtgtgaaaattg

SEQ ID NO: 775159 - DNA, 564 bp, Homo sapiens
atgctaagcaagctacagtggagataaacctacctctacatatctcctagagaaatagtaaacaatcaggaagggaaaaatatttcaattagcactagaaaaatcaaattacctttaatcatattgaaatctgaaagcatgaaaggtaaaataaacaatattatttgttaagaataataatgccactctgaaattctcaaccaagaaaaatattcatcaacctatggctaaataacatatttagagacaaaaaacaaaacaccaccagcagaattccactaaagaaactaaaaagaaactctgaaaacatgcttcagaaagattgaagttctgaaatcaaagaatgaacacagagaaaaatatattgtaaacatacagatagatctaaataaaaaattaggtgttgaaacaaaaagatatttaaaattagataagcactgcaatatgtatgttaggaagcaaattattagggctgaagtattcaaagaccccttaattgtctgacaagagcagaaaggtatgactttgcaayttttttttttttttttgagaaggagtctcact

SEQ ID NO: 775160 - DNA, 642 bp, Homo sapiens
tatggctaaataacatatttagagacaaaaaacaaaacaccaccagcagaattccactaaagaaactaaaaagaaactctgaaaacatgcttcagaaagattgaagttctgaaatcaaagaatgaacacagagaaaaatatattgtaaacatacagatagatctaaataaaaaattaggtgttgaaacaaaaagatatttaaaattagataagcactgcaatatgtatgttaggaagcaaattattagggctgaagtattcaaagaccccttaattgtctgacaagagcagaaaggtatgactttgcaatttttttttttttttttgagaaggagtctcactcactctttctcccaggctggagtgyggtggcgccatctcggctcactgcaacctctgcctcccaggttcaagcaattctcctgcctcagcctcctgagtagcggggattacagccacgtgccaccatgcctggctaatttttgtatttttagtatagacggggtttcaccatgttggtcaggctagtctccaactcctgacctcgtgatccacacgcctcggcctcctgaagtgttgagattacaggtgtgagccactgcgcgcgaccgactttggaactttaataaattgactggacat

SEQ ID NO: 775161 - DNA, 609 bp, Homo sapiens
cagttggcagttaccacctcttatagtggcatggaacctcttgagttaaaccaagactcagtgagattgggtgatttaggtagtgtcattttatgaacaaggggtaccctactcagttcttttattttattatacttctctttgacattcactccagtgaaagaactctttcaaaagacatcatgcctggtctcacrgagattcaaaggtgtttgagtccttccttattatgcccttggaagatgctttgaggaccccagtgatgaatcccaagaactctgtctccattatccctggaatagggcacctcatcactctggtgttaaccctgaagggccttcataataatgtgcttaaaagagtcccctattatgtccttcaggatggagcttgacttgcccaaattgctatgtacatgttaaagagaggctggaactgaagttggtcatttctcactggatcagtcaacaaggtttgactttctgtgtgctctgcatcattctgagtacagaataaggcatggctcctgccttcaaggagtatggaatttaatagacgatgacaacatacatgattgtaaatctatctacatgagagtgaataattgtg

SEQ ID NO: 775162 - DNA, 401 bp, Homo sapiens
taccatcaatgtgttttcctgaagcctaattacacaaaaaattatcacatattttccctccttcgggtccagacagagctgttattgagctccaggcctagttgctgtttttgctcaaagagattttcaatgtccaayggcatctcaaagtaaaccttggaccctaaattttttgtccaataacatatcctgattgtctgtggtctcttaagactatctaattcattaagacatttttttcacccaagaaattaaacaaatgttaaattttctcagcgaatttcatattttcgtgaaatttttacaatggcttgagcagtttaagaagaaaaaaacctttttgatgctttgcattttatttgctgggaaattacctaggcaaagaaacttattgttccatt

SEQ ID NO: 775163 - DNA, 659 bp, Homo sapiens
ataaacttcaaacaaaattgttttagaaagtgaaataaatgaagtaatacttgctgattaataatattggaaccttaatatctgattgataactaaaactttggcctccaccatctaaaagaaattattaggtaaatatatttaatattggctctatattccattaaactctgaaagtctatgatttcttaaatagtcacatggaatgcaatttcatttgcagaggtcttgtgtatattttacatttttaaaaatcgactacactattaaccaaaaaagtcacataygaaaaaggttaattataaaattaaattgaacttggctaaacatcaacattattctgaaatttcaagaatgaagaaactataagtgaattttaaaaatcactaatgttttcagggggttaagatctaaattccacatttgcattttcctaagtgtttagtggtttcaagactgtttggaagcctagcattagaaatttctatcatcaagtcattaacctccagaataaaaacactggcaatcctctttcttagccaagtttttctagagaaaatctccatggtaatgcttattaaaatagaaccttttatttagtgttctttgtaaagtcttagtagaaacttaaacatacacttttcaaaaatgatatatgt

SEQ ID NO: 775164 - DNA, 621 bp, Homo sapiens
agaagtaatttcgactttcaagtcttactcttgaagaaatacattttgtaagactatagctgccatagatggtgactcttctaatggatctgggcaaagtatattgaaaaccttctgggaaggattcaccattctagatgcgattaagagcattggtgattaacgggagaatatcaacattaacaggagtttggaagaagttgattcccatccccatgaatgacttcgaaggtttcaagattcagtgaaggaagtaactgtagatgtggtggaaatagcaagagaactagaattataagtggagcctgaagacgggactgaattgttgcaatctcatgataaaacttgagcaaatcaagagctgcttcttatggatgagcaaagcaagtggtctcttgagataaaatctattcctggtgaagatgttgtgaacattgttkagatgatgacaaaggatttagaataacccataaacttaattgataaagcagcagcagggtttgagaggattgaatccagttttgaaagaaattctactgagactaaaatgctgtcaaacagcatcgcatgctacagagaagtctttcatgaaaggaagaatcaatctatgtgacaaacttc

SEQ ID NO: 775165 - DNA, 589 bp, Homo sapiens
aaatagtcacaacatgatgcactgatattttgtaaataaactgtaactttaaatttagttttagaaaaaccagtgtggacaacagaaaacttcgacttatataaaactataaaagaatgttatactatgttaaactataaaagaaaaccaattgtaatacagtatggagaagactacatacctaattgtatcagtctcttttcactttcattttcaaggttatcacccttcagtgaagataaacactactaaaagcttgtcagctctttttgagacaggataaaggatttgtttctttgcctgtctcaaggagatagatgtggacttcagtgtccttctataaagcagtcgaagagcctaaacaagatgaagtggcagcatgttgatggagtatattcgaaggtgasaagcagccttgcagacagttctgcaaacaagacttcagagagctcttacgataggaaaaaaaaaaagtgcccttccaaggttagaagttaggaatgcattgtgcctttaagaaggccagcccacagatgaggacgtggagttttcttttgcctgaagggcattttctttttaaaaatgatag

SEQ ID NO: 775166 - DNA, 632 bp, Homo sapiens
acagacaattcatcaaccctgcaagtgttatctcataagctcccagggtagagggaacatctaaatctttctcacagttttcttacagatgatgaatagtacataaatatttactgtttcaatgtatgctttaattataacattaaagtagttacttacatgttttaattgtagcattagtaaagatggtagaaatgacattgactttgctgatctaatgcaaagcggttatctttgtaaatgttccttataccagaggtccatatttctaaaatgcattttaatgtctctttaaagagagatctcttccccaaaggacttaataaattgttcacacagtagacastcccagaagcatgagatagccatcctctcccatctttggaatttcttttcctcttcagtgcttttttgctgcccctcagtatttagagattctcaatgcagctcctggccattcagtatacaatgcacatcttccttccctcagacttatctgtcttgtttccaattccttcccagtctcactttgtattatacaagaaaatgtctagctgtgggttaataaaaagaaattaagaaacatatatggcatgttagaattggcagatccttagaagttgctcatcctc

SEQ ID NO: 775167 - DNA, 376 bp, Homo sapiens
ataatttttcaattttttgtagagaagaggtctccctatattgcctaggcttgtctcaaactcctgggctcatgcagttctcctgcatcagccttccaaagggctggaattacaggcatggaattacaccatgcctggccttcattcactttaaagrtttattttgccagggctaaggactggctgtgacacagcctttggaggtcctgagaacatgtgcccaaggtggtcaggatataccttgttttttatacattttcaggagacgtaagacatcaatcaatgtatgtaaaatgtacattgggttttgtggaaaggcaagacaacttgagttgggggcttccaggtcacaggtggatccaaagattttctgatt

SEQ ID NO: 775168 - DNA, 393 bp, Homo sapiens
attttttatcacagcacttaatagtctcagactcatattatatatttgcttatcttccttaggatagtgtaagccccattagggcaaaaaaatttttttaccactttattttcttaaacagtgcattcctcatagtacacgtttcactatatgtgtcaaatagatgaatgagcagtttggctttaaaaaaaataagaaaaagaaaatgttcacaaatcacaaggctraagttaaaattggcttctatcacctcaaaatttaccagccaatcccagagaatggcggttggcaatacaataattaaatatttctctgaacaaagaaaagtctggaaaaataaccagtgattttttaaatgagtgtatggtaactttcgtcttatcactttgtgcc

SEQ ID NO: 775169 - DNA, 391 bp, Homo sapiens
caaagtgctgggattacaggtgtgtgccatggttcctggccgccatcaccaatattttcaccagcaccaatacaaccctgcacaagtcacgaacactttctgagtctctcctgggctttaggctagtgttaaatgccaaagatgaaaacatgctgatgaaaggractgtgatttgtgttttccgtcattgctatcatcagcgattactgggctctctcattcatgccttattcaccaccattccctgcctaaacagttgctttgagcagaagtgcatcctgtaaaacgtgtgagtttctccaatatcaaaacacgccccagagcccagcttttgcctttccccttcccttatcccacaggcaaatcccactcaccgttcccttactggttt

SEQ ID NO: 775170 - DNA, 585 bp, Homo sapiens
gtgtatgaaacatacatgaatttcctgtttaggcttgggtcccagccccaagatatctcattatatatttgtaaatattccaaaatctgaaaaaatctgaaatacttctggttctaagcatgtcagataaaggctgttcaacctgtatatgtttttgtttgtttgtttgtttgtttttgcagagtcatggaagacagtsaaatgggtactcagcaagtaccttcccaagctcccttgcagggatggtggtcatgtgacacagatctgaccaatgagatgtgagcattgctctcctctcccagtgcattaccagaaatgggatcacatttgcagagctgcacagagggatgcttcaaggagaggggacgatactcgtccaggatctgggattcccaaacatccttctggtcagccagtatatggagccgttgttaagctttggaatcagacttcctaggttcgtatctggcttctgcacaacttactggttgtgtaatctcagcctgagcctcagtttcctcatgttgaaataggaacagtaatcatactatattctcaggttgttggggcaactagatcagtgtg

SEQ ID NO: 775171 - DNA, 584 bp, Homo sapiens
tatggactgcctactgtgtgctgggccaggtgcaggtcagcaggtggtaaactcaatacacatggccattgccctcagatcactttcagtctagcaagggaaacagacaaccctcaaagagaaaataataaaatatgacctgaacaataaaggaagtgcggctgggcatggtggctcacgtctgtaatcccagcactttgggaagccgaggcaggtggatcatttgatgccaggagttcgagaccagcctggtcaacatggtgaaaccccgtctctactaaaaatacaaaattagctgggcatggtggcgtgtgcctataatctcagctactcgggaggctgaggcatgagaatcacctgaacycaggaggcggaggttgcagtgagccaagattgtgccactgcactccagcctgggcgatagagtgagaccatctcaataaataaataaggaagtgcacagagtgacaggatggcaagaactggggggctcttgtatataaagtgttgggaaggcttctctgaggaggtgacatttgagccaagaccagaagaagaagaataatgctaactcccagggtgtt

SEQ ID NO: 775172 - DNA, 633 bp, Homo sapiens
tgcatggaatggtaattaatactattcagtcttgttatttgcacaacggtcttgtgtaatagtatgttaaaattgaagtttcacttaggcacgaagataagatagaagggaaattttgaactgaggtgccaattcactgtatacagatttttttcttttcttttctttttttttttttgagacagagtcttgctctgtcacccargctgcagtgcagtggcgtgatctcagctcctctgtctcccggagttcaagtgcaacctccgtctcccaggttcaagtgattctagtgcctcagtctccctagtagctgggattacaggtgcctgtccccacacctggctaatttttgtatttttagtggagatgaggcttcaccatgttggccaggctggtctcgaactcctgacctctagtgatctgccagccttggcctctcaaagtgctgggattacagacatgagccactgcacccagctatgtagattttcgaatgaaatagttgggcacatataccacaattctcaatccccttttacctgtttcagaaatagaaaataattgggaatgaagaagagacaaataatttgtaaagatgatatctgtacagaaagcactgctgcaaaccttatc

SEQ ID NO: 775173 - DNA, 542 bp, Homo sapiens
aggctgcgaagggtagtggggggtgccggttggtggcggggaggagttgggaaggctaatgagtacaaaaatagttagaaagaatgaataagggccaggtgcagtggctcatggctgtaatcccagcactttgggaggccaaggygggtggatcacttgaggtcaggaattcaagaccagccttgccaacatagtgaaaccccatctccactaaaaatacaaaaattagccaggtgtggtggtgggtgcctgtagctccagctactcaggaggctgatgcaggagaatcacttgaacctgggaggaggaggttgtagtgagctgaggtcatgccactgcattccagcctgggcaacagagcgagacttcatctcaaaaaaaaaaaaaaaaaaaaaaaaaaaggagaattagacctagtatttgatagatttgatagcacaacagtgtgactatggtcaataataatttaattacacatttataaataactaaaagagtgtaattggcttgtttgtaacacaaaggataaatgcttccaatga

SEQ ID NO: 775174 - DNA, 567 bp, Homo sapiens
tactaggcttcaaatttaatttgcttgaagtaaatgttgataaaatacatgcagccatccctagataaaattacataataaagctggttatcttgttcccaggagaacactgtcattttcgcatcacccactggtaccgcagatacrttcctaatttaggacaaaacagacttagtttatgaccgacttttgatgaaaaaggcctaaccacctacccagctgcatagtcaaaaggtttacatgcaaaacaaggtaggtttttgagaaacctaaataataaacttccagttatttgaatagtcttctgcaggcccagagaaagcatagttaaatcatacagcaaccacctctcataagggctgaaggtttaactatttaaaaaactaaccaaaaggtaggttcttgttctacttggtactattgaaacacttctaatgaagagccttgtgaacttagtttgaaatcggaaactcgggtgaattttatatgcctagtttttattagtaaatttgaagaatttctgtggctgcaccacaaaactctgctgaaaacctactgattctccat

SEQ ID NO: 775175 - DNA, 480 bp, Homo sapiens
ttcagcattggacagatcatccagacagaaaatcaacaaagaaacataacacctaatttacactatagataaaatggacctaatagatatttacaggttatccaatggccataaaatacaccttcttcttctcagcaggtagctcattatcaaggagagaccatawgttaggccacaaaacaagtcttaacaaattcaaagaaaatgaaataatttcaaatatttctcagaccacagtggaataacattaaaaatcaataagaagagaaactttggaaactatacacacacacatcagaattaagtaataagctcctgaatgaccaatgggtcaatgaagaaattaagaaggaagttgaagaatttcttgaaacaaatgaaaatagaaacacaacataccaaaacctgtgggatacagcaaaaacagtactaagaggaaagttgatagcaataagtgcctacatacaaagtagaagaact

SEQ ID NO: 775176 - DNA, 601 bp, Homo sapiens
attttgccttcattcttgatcttataataagctccactttgcctgtatcattctagaagtccatcattcaaaatgaatctaatggttaagatgtgttctgatcagaaacttgtggagacttcaattatgcctgaaacctccttcaacccagatactttaattctattaatgcaacccaaaatcttatcagctttttgtggcagcattacacattgttggcaaatagtgagctgactataaaatcaaaatgtccaagtattttacaggtacagctttccatattattcaccatgtattccccatactgatgtcttaaatttgtttatatcagaaactaatacagtactgtcatytcaattgaattgcctatgttggagacagattgttacatcggcatgttatattttgtatcctgactctattattcattctattttcagctatctcaattgtgtgtcatcatagataagataaacctattttgttatttttatctgatccataacaaatgtatgaaacaaaacacagctaaaagagagccctgcagcagcccatatatccccttctaattcacattgatccccttgtcaccatcattaaa

SEQ ID NO: 775177 - DNA, 525 bp, Homo sapiens
tttatcttatgttttataaacatttaaatgcggttatcaacatgcccatgtgtgacaaaaatttattagcaaactcagtcaactgaaattgtaaaagtgatgcacagccaaaagttactaacaccatgcaaacctgacagtctgctccccagataaaaatataattgtagaaaattggtctgccattaatttttaatatgctgtctaatttaggcagtgtattaaggatccttgttgagtcacaaggtaatatatctccctgaaacttgttagaggttgctaaatattacgcagttgatgctagtaaagaattggtataagtccctaaagaacagttctaatagatgatgtattatttattccattarcattatttgctcttcagctccccagtgccaatgattttagtataatccttaccttttataagcaacagatctgaaataataagaaagagaatttctatggcaaaaataagaatcaacaggcatagtcaaataataactgctggctgcattctgatga

SEQ ID NO: 775178 - DNA, 465 bp, Homo sapiens; identical to SEQ ID NO: 766926

SEQ ID NO: 775179 - DNA, 582 bp, Homo sapiens
acttattctgaaatgagttatagtttacaagtattttcaaatctttgagaaaataaataacttacaaacttaatgacctatttcatctataccttgtcctcatctgaacatgtgagatggatttaaaaagataaaatacttcccctgaccctagaggagcaaaaaactatatggcatacaacaaacacctgtctgatattattgttgatgacatttgtccagctaaataaagcttatttttctcaggccacaaatgtatttctcaaatcctggaaaaatgaacagcaaaaaataattctctattctcccatcttcaaaggcacatgtyttaaagtgtaagttttcctttaatgaaaacatagtaaatggtatttctttaaaatgattagctgaacaatgtttgactatgaaactataagaaaggttaagtgtttttgtttgtttaagtgattgatttaagaatttcaggacacagtaggttgtttttgtcattaaaaatgtttcccaacaaagcaagtatgcaagactttagttaactctttttcatatccacaaacttctgttaaaaaaagagttgggata

SEQ ID NO: 775180 - DNA, 623 bp, Homo sapiens
gcaccaactgggcagttccatttttcaggagtcactttcaattctgtagagtcctcttagaagctccctggttgtgaaaatgaagcagcatcattgtctggggtaaatcccagggttcgtcgtctcgcaccaagaagattaaccacacggacatacacacactggagtgggttaaggagcagaaattttaatagcagaaaggagagaggagagcagctcccgctctcttgtgagagagaggcatccaaaagggaaaggctgcagatcgcagcagatggtataggcagccttgaggaggcggtgtctgatttgtagggcccacagattggtttaaccaggtgtgatgtttacatagggcatggaaagcctggttgccccaccctaatcttattwcgcaaacggcctttccatttggccagtgccatcttgtctgctctttactgtacacatggctggcaaaaggagaagatggagccaccattttgaacatgcttactcccaggtagtatatttgtattggcacaactgctagcattcacctgtgcaagcttccagcttgcttgtctatgtctgcagttcgattttacaggctgctctttattagaaaagaaaatgattttggg

SEQ ID NO: 775181 - DNA, 611 bp, Homo sapiens
gcaccaactgggcagttccatttttcaggagtcactttcaattctgtagagtcctcttagaagctccctggttgtgaaaatgaagcagcatcattgtctggggtaaatcccagggttcgtcgtctcgcaccaagaagattaaccacacggacatacacacactggagtgggttaaggagcagaaattttaatagcagaaaggagagaggagagcagctcccgctctcttgtgagagagaggcatccaaaagggaaaggctgcagatcgcagcagatggtataggcagccttgaggaggcggtgtctgatttgtagggcccacagattggtttaaccaggtgtgatgtttacatagggcatggaaagcctggttgccccaccctaatcttattacgcaaacggcctttccatttggccagtgccatcttgtctgctctttactgtacacatggctggcaaaaggagaagatrgagccaccattttgaacatgcttactcccaggtagtatatttgtattggcacaactgctagcattcacctgtgcaagcttccagcttgcttgtctatgtctgcagttcgattttacaggctgctctttattagaaaagaa

SEQ ID NO: 775182 - DNA, 602 bp, Homo sapiens
acagggcatgctacaatgtcagaggggcccaaattctgtggtaagtcaggagttcagatatacatttctggaaatacaaaaaggaatttttaaagctacttcccaaatgttcaaataaaattaataaattattactataaacccaagaaccacttactcttcagactatatttcatttctcaccaagttttctctgttaaatatgattaccytgtccagtttaacctcaaaaactacctttctagattttagtattaatcattattacattaaaaatctttcattattgccatctctgttcgatcttcacatagttaagttcatgcctgttcagcctctgtaaacagaaaactatggtctcctatgagtatcactctagcttccagtgtacagaaaggaattcatccttgtagtaaaacttctagttcagtttgttttaatacataaacgactcattatttaatattctctcctttgttacatacttctagtcttgactccttcatttggaccctgtgttagttctgaaaaacaacctttctgctatttgtttcttcatcttgatctgtctccaaattactaacctcttgacatcaattttg

SEQ ID NO: 775183 - DNA, 619 bp, Homo sapiens
tcttacatggcaaagcagagttaagattgatagaattaagattgttaattagctgcctttaaaatagggagatcatcctggattacctgggtgggcccaatataattataagagtccttaaaaatagaagagggcacagcacagaagagggagaaccagagagatggcagcatcagaagggcttggtccagtgttgctagctttgaaaatagagaaaggagggcacaaaccaggaatgcaggagctctatgagctggaaacagcaaggtcactagagcctccagaaggaatgcaggccagtgacatcttgattttagcccagtgagaccaatcttggacttttaatctccagagctgtaagagagtccatttgcattgcttaagccactaagtttgtgattatttgttayagcggcaatgagaaatcaatacagtattattttttctaggtattaaatgtattttttgaaattatcaaagaaaaaactgaaactgagtagttgctgaactttagataattgttcctttaccacaagagatattagttaataacatacctctgtaaggataagaataataattataacaatgtgaagaggctgcagtcattgtatctttt

SEQ ID NO: 775184 - DNA, 611 bp, Homo sapiens
ctacaatcatttactctccttgcttaaaatcatccacacttccccatctcactttcccctaagacaaaggatatataaaaatctgtacctcattgtgtggtggagtaatggctctgtgatttttcctccctgcacgctaataaatttgtatgtcatttctcatactaatttgccttttatcaattaacttttaagtgaaccttcagagagtgaaggtaaaagttttttcctttgcctctacaacacatagcgagaaaaggaaaaggacagagagtgtctttaaacttctgctaaaatttctctcgggtaaaaattcaataattggagtccaargaatatgcatgcttaatgtcactaagtacggccaaatttctctccagacaattcacacttctacaaactaatacatcatcattcctatttcccacattgtcacaaacaattacagcataaattggatggagaaagttggtaactgaaagatataaagctttggaagaacaccttatctatactatactttcatttagccaggtgaggcagattcagcacctaccacaatactaggaacatagaagagctcagtgaacatttgttaagcaaatatatgg

SEQ ID NO: 775185 - DNA, 659 bp, Homo sapiens
agcaacaatagctatcaatgaattaagttgctttcctggaagtgaaaaaatggcattggaggcagcattaatgtgcatgggttataacaaaaacacttacaagcaaacacaagaatatgctgtaagaaggcaaagataaaaaattcttcctgtgtccacgttgtgcacatgtaccctaaaacttaaagtataataaaaaaaattcttaattcacaagaatttccttgaattcactaattttttaaattctcatgtttgtacctccataaagcctagtgtagaaaattgattcaaaaaatgtttctttgttgtttgtaaaatgytatttttaaaacgctatgatttatatctttatcggataatttaaatttctagtaaatacacaaacagaaagagagagatggagagggagaaaaactgtggcttaaaacagttaagcaactgtttatgattacgagaagtaaaaactgggatgtgcactctatcatcaaaactctgcatttcagtaatgtcatacttggcacattatttgctggaggaattaattactagattaggattaaatgaatttgatccatttgtgtcgtgtgatattaaagtagtaattaattctgaggaatcaacaaattttacaaaaggaacatctagattttgttttt

SEQ ID NO: 775186 - DNA, 563 bp, Homo sapiens
gctattttgtcaggttttggtaacaggagcttcataaaacaagtacataaactttaccttttttctctattttcaaaaacattttcctttttttttttttcattttatttgagatggagtctggctctgtcacccaggctggagcccatggcatgattttagctcactgcaacctccaccttctgggttcaagtgattctcctgtctcagcctcccaagtagctgggacaacaggtgtgcaccaccatgtctggctatttttttttttatttttagtagagacagggtttcaccatgtcagccaggctggtctcaaactcctgacctcaggtgatccaaccgccttggcctcccaaagtgctgggattatgagcgtgagccaccgcgcccaggctgaaacattttcarataagattagatttcttatttcttacagattttatagattcaactgtaaaaaatgtctgaaccaagtacttttgtttttgatgttctcctgacaactttttcattttaacttcatatttttaccaggatatattttggcaatttgttcctttgaa

SEQ ID NO: 775187 - DNA, 563 bp, Homo sapiens
gctattttgtcaggttttggtaacaggagcttcataaaacaagtacataaactttaccttttttctctattttcaaaaacattttcctttttttttttttcattttatttgagatggagtctggctctgtcacccaggctggagcccatggcatgattttagctcactgcaacctccaccttctgggttcaagtgattctcctgtctcagcctcccaagtagctgggacaacaggtgtgcaccaccatgtctggctatttttttttttatttttagtagagacagggtttcaccatgtcagccaggctggtctcaaactcctgacctcaggtgatccaaccgccttggcctcccaaagtgctgggattatgagcgtgagccaccgcgcccaggctgaaacattttcagataagattaratttcttatttcttacagattttatagattcaactgtaaaaaatgtctgaaccaagtacttttgtttttgatgttctcctgacaactttttcattttaacttcatatttttaccaggatatattttggcaatttgttcctttgaa

SEQ ID NO: 775188 - DNA, 629 bp, Homo sapiens
gatgaattatttcaggttagctttaaatcatatttgagagattgcaggtaggaagaaaaatgtgacaagtcagttaaggtaaaagtgggtgagaaggcaaacaaacaaaaaaactctgatataacagaaatttgggcaattagccaaggtaagggagggtaagaggacaagttgggactgaaacaaagaaagccacatgttgattgttgttcttaagtgtgaaagagatgatgggtggaggtaggaaaagaaaaaggaaaggaggccgggctcggtggcccacrcctgcaatcccagcactttgggaggccaaggcgggcggatcatgaggtcaggcgatcgagaccatcctggctaacacggtgaaaccccatctctactaaaaatatgaaaaattagccgggcatggtggcgagcgactgtagtcccagctactctggaggctgaggcaggagaatggcatgaacccaggaggcggaggttgcagtgagccgagatcgggtcactgcactccagcctgggcgacagagcaagactccatctcaaaaaaaaaaaaaaaagaaaaaggaaaggagagtagtgttagaataagtgatagaagatatttgctgcttagttgggcactaatt

SEQ ID NO: 775189 - DNA, 382 bp, Homo sapiens
  misc_feature 1, 2, 3, 4, 5, 6, 7, 8, 9, 10, 11, 12, 13: n = A,T,C or G
nnnnnnnnnnnnntagaggtagaggatccagaacctcagatggttcagatacagtatgagagagaaagagagagagagagagcgagaggaaacgcatgtgggataaaatattgataacagggaatctggctaagggcatagaaatgtttttygttttttttttttttgaagacagggtctcactctcattgataggctggaatgcagtggcggctcactgcagccttgacctgccaggctcaagcaatcctctcacctcagcctctggagtagctgcgaacactggtatgcaccaccacatcaggttaatttttatattttttcatagaaatgggatcttgccatgctggccaggctggtcttgagctcctgggcccaagtg

SEQ ID NO: 775190 - DNA, 626 bp, Homo sapiens
tatttttaatgcttttacatattcattaaacaaaaactttttgtttgttcgtttgtttgtttgtttcttgagacagggtctttctctgttaggctggagtacagtgatatgatcatgactcactgcagcctcaaccccctgggcccatgtggacatcccagcttagcctcctgagtagctgggactacaggtgcacaccaccacaccagctaatttaaaaaaaawtttttttaagagatgggacctcactatgtttgtctggctggcctcaaactccttggctgaagcgaacctccagcttcagcctcccaaagtgctgggattataggtgtgagccaccacgcctgggctaatttaaaaattttttttacggagtctgggtatcactgtgttgcccaggctagtctcaaactccttggctcaggcaatcctcctgtcttggtcttgaaactttttgttattgacacttttaaacatgtacagaagtagagagaatgacattaacaaatccccatgcactcattactcagcttcagcaattatcaacacatggccatcttattgtccataaccttctccctgaccgaccccacttctgccacaaattttcccttgccccttggact

SEQ ID NO: 775191 - DNA, 615 bp, Homo sapiens
ctctggcttctccctcctttattctccttctgtacttcctcctccctgatctgtgcagagcctttaagctctgctccagcttcaagcccatttttgcataggccatgcctgcagatccaaactctttaagatgcttaaccaagggcctctcaattgacagaaaccctctttggaaggcagtttaccaattctgtcttgtggcctgactgccctttgaggcctcgctcttttctgcagcttctcatatatatttctttcaaacaaatggaagaccctgctcaaaggaaaagctaagagcataaaacatctctgtatgcttctgccctatgtatttccatggaaccactaaccttatctcaggtatatcctcaattaccaattcattccatggtttgttaatttcatggactccttaaaaataatgcagttctttcctttttgcttcattttttttcttaaacttactgcccttsgtgagcattatctagaatacttttgcatatgcacttaaaggcaggtaggtattatccttctagaaaagtctactctttaaataggattttcatattattaaatggacatttagcagaatagacattactgactttaccttgg

SEQ ID NO: 775192 - DNA, 633 bp, Homo sapiens
gcctaaggtggaaaaggaaatcttttcacataaaagctagacagaagcattcttagaaacctctttgtgatgtttacattcaacacaaagagttgaacatacgttgtcatatctcagatttgaaacactcttttcgtggaatctgcaagtgtatatttggacagctttgaggccttcgatggaaatgggaatatcttcacataaaaactagacataagcattctcagaaacttctttgtgatgtgygcattcaactcacagagttgaaagtaccttttcatagagcagatttgagacattcttttcgtagaatctgcaagtggatatttggactgctttaaggccttggttggaaaagggaatatcttcacataaaaattagacaggaggattctcagaaacttctttgtgatggttgcattcaactcacagaattaaacataccttttcatagagaagttttgaaacacacttttcgtagaatctgcaaatggatatttggacggctttgaggccttcgttggaaatgggaaaatcttcacataaaaacgaaacagaagcattctcagaacgttctttgtgatgtttgcattcaaccaacacagagatgaacataccttttcatagagcagt

SEQ ID NO: 775193 - DNA, 514 bp, Homo sapiens; identical to SEQ ID NO: 763923

SEQ ID NO: 775194 - DNA, 613 bp, Homo sapiens
gtatatatgagttgagcctgtaaagttatgagatgggatttttcttgtggtttgtggaatcagttttagaagctgaggaaacaacggaggtgatttaggctgcccagatggataagttgtaagagaatttatgtgatgctgagatatgtgatagagttgagatgatgtaaatgaagagattttggaaagtaraaagcactacataaagatattccaactcagagtggttaataatcactatgttattcagcacattgactaggaattacattattttatataagccttgtatttcaggttaaatgttatccaagagagcattttaggaagtgatttctatttcatctggagtagtcttctggttttcattatgattttaatattattgacaatgcatatttgttttagctgaggaggatgtacacagtgtaacttgtacctttttccagagctgttgcaatgttctacaggcaagcattaattcaactttgctaatggatataaaggcacagaaaagttgagagtgcttcttgatgtcacacagcaaggcagcagcaggataaggttaggacacagaagccttgaccttcagttatgtgctcacaactcttga

SEQ ID NO: 775195 - DNA, 544 bp, Homo sapiens
ttgaaaaggaggtttctttcaagcaagctgctaggttagcattagctgtccataaaaattaagtaattgccctatctcaggatggttaggaagttggtcatattcaagggccatccctggccatgttgaatcttctctaatggcacagcctcaggtttcagggattgcacatcattggaagacttggcagaaacatccagtctttcattgttctyttccatgaaaatctattttcagttcaagaaaacattaatttgtgagtaatccaattctgtcaaccccagaactgaattcccctgcctttgtcattctatccccagcctttcatagatagagctatgaattgttccaatgcaaagctcatctctacaccccagcctgggctggttcatatgcaaacaaagcatagtaaaaccaatgaacaattgattaaaaaaaaaaaaaaaggactaatggtcagcattgagtactcactatggacgaggcatcgtattaggccctttaagtctcatttagttctgtttaccattcagaaaaagtacat

SEQ ID NO: 775196 - DNA, 596 bp, Homo sapiens
aggctctaagactgccaaggtctcaagtaagcattactaatcactgatcaaaaaattgctcatggaatggaaaatagaatgatataagttaccacgggctgaggagaggggaagatggaaagttgttctttaatggatacagagtttcagttttgcaaaatgaaaaacttctggagatctattgtacaacaatgtgaatatacttcaggctattgaactgtatacttaaaaatgtttacaaaggtttttgttgttgtcgtygttgttgttgttttcagatggagtttcactcctgttgcccaggctagagtacaatggcacgatctcagcttaccgcaacctctgcctcccagttcaagtgattctcctgcctcagcctcactagtagctaggattacaggcatgtgccaccacgcctggctaattttttgtatttttagttgaaatggggtttgtccatgttggtcaggctggtctcgaactcctgacctcaggtgatccgcccgcctcggccttccaaagtgctgggattacaggcgtgagccactgcgtccggcctttaaaaagttttttttaaaaaaaacctttaattgtgg

SEQ ID NO: 775197 - DNA, 596 bp, Homo sapiens
aggctctaagactgccaaggtctcaagtaagcattactaatcactgatcaaaaaattgctcatggaatggaaaatagaatgatataagttaccacgggctgaggagaggggaagatggaaagttgttctttaatggatacagagtttcagttttgcaaaatgaaaaacttctggagatctattgtacaacaatgtgaatatacttcaggctattgaactgtatacttaaaaatgtttacaaaggtttttgttgttgtcgttgttgttgttgttttcagatggagtttcactcctgttgcccaggctagrgtacaatggcacgatctcagcttaccgcaacctctgcctcccagttcaagtgattctcctgcctcagcctcactagtagctaggattacaggcatgtgccaccacgcctggctaattttttgtatttttagttgaaatggggtttgtccatgttggtcaggctggtctcgaactcctgacctcaggtgatccgcccgcctcggccttccaaagtgctgggattacaggcgtgagccactgcgtccggcctttaaaaagttttttttaaaaaaaacctttaattgtgg

SEQ ID NO: 775198 - DNA, 586 bp, Homo sapiens
gtattacattttcaaaactgacagagataggaaagaaaaacttatccgggaaggaaaattggatggaacatttaacctttcatattaagtctggcaatgatgactatatgtattcctgccttaatagtctattaatcattaataaataaataaataaataaataaataaaatgggctctttatggccaggagcggtggctcacacctgtaatcccagcactttgggaggcggatgcaggcagatcacctgaggtcaggagtttgagaccagcctggccaacatagtgaaaccctgtctctactaaaaatacaaaagattagctgaggatggtggcatgcacctgtaatcccagctattagggaggctgaggcaggagaatcrcttgaaccttggaggcagaggttgcagtgagccgagatcgtgccattgcactccagcctgggcaacaagagcaaaactccgtctcaaaaaaaaaaaaaagggctctttgttttgatgcactgttatatgagatcccttatcaatggagcaaatattttgtaagctcttgaaagtggtgctggctgagcacactttgaggctcta

SEQ ID NO: 775199 - DNA, 674 bp, Homo sapiens
atgaaaatgggattctccttgttcaaaatgcagggaaaaagtaccattaaaataattaaaacataaaaaaaaaaaaaagctgctatgcacattcatatacaagtctttgtttggatatatgctttattttctcttgggaaaatacccaggaagggaatggctgggtcacacagtagggataggtttaactttaaaaataaaaaataaataaaacctgycaaatggtttttccaaagtggatattcattttatagttccaccagcagtgtgtgagagttctaacactaggaacagtgagttttttttatcttagccattctagtgagcacgtaatggtatctcattatggttttaatctgtattttcctaatggctaatgatgttgaaaaccttattagatgtatatttgcccaccatgtgtcttctttaactaagggtctattaaaatagttttctgacttttacatgggttgttggtttgcttattactgagttttgaaagattttatacattctggatccacaactttttatatcagacatatattttatttatttatttatttatttatttttgagatggagtcttactctgtcacccaggctggagtgtagtatagatctcagctcactgcaacctccacctcacaggttcaagtgattctcatgcctta

SEQ ID NO: 775200 - DNA, 504 bp, Homo sapiens
atttaagatctctgtccatcttatgaaagtggagttaacttttcataactcagaagagctcaaatgcgatacatgtaatatttataaacttggatattttaaatttttactgcctataggatattcattaaaatgtcaagccaggtcttagtgatttctgcggaatcttatttctgtggaaatattccagtcttaggtggtgatactttcaaccttcttgaaaatcatcaccataacaatacttttttatattgygcctccctatttttttatagagtgctctcaagtatggtgggtctcatctctcatgtgtttgactcgtgggcagcatgtatttcatggtgtaattgacacctttaaactgccttttatagaccaaattagaactttttattatctcctgatggcagacatttcaggctgcaacatggtgtgctgcctaccaaccagctgtttagttttagcaatgctatctttaacagtgtgtttgtgcagttgaacccc

SEQ ID NO: 775201 - DNA, 621 bp, Homo sapiens
atgcgatacatgtaatatttataaacttggatattttaaatttttactgcctataggatattcattaaaatgtcaagccaggtcttagtgatttctgcggaatcttatttctgtggaaatattccagtcttaggtggtgatactttcaaccttcttgaaaatcatcaccataacaatacttttttatattgtgcctccctatttttttatagagtgctctcaagtatggtgggtctcatctctcatgtgtttgactcgtgggcagcatgtatttcatggtgtaattgacacctttaaactgccttttatagaccaaattagaactttttattawctcctgatggcagacatttcaggctgcaacatggtgtgctgcctaccaaccagctgtttagttttagcaatgctatctttaacagtgtgtttgtgcagttgaaccccctccccccatatcataaaaataagtggcagacggaaaattaaaagtgcagatactgagtagggatgagaaacgtacttgtcaatattaatgatatatttgtctagattgtattaaggtgagccaaaatagtgggtaaatcttgtcacggagctggacacgagacgtgcttttttttgagg

SEQ ID NO: 775202 - DNA, 621 bp, Homo sapiens
atgcgatacatgtaatatttataaacttggatattttaaatttttactgcctataggatattcattaaaatgtcaagccaggtcttagtgatttctgcggaatcttatttctgtggaaatattccagtcttaggtggtgatactttcaaccttcttgaaaatcatcaccataacaatacttttttatattgtgcctccctatttttttatagagtgctctcaagtatggtgggtctcatctctcatgtgtttgactcgtgggcagcatgtatttcatggtgtaattgacacctttaaactgccttttatagaccaaattagaactttttattatctcctgatggcagacatttcaggctgcaacatggtgtgctgcctaccaaccagctgtttagttttagcaatgctatctttaacagtgtgtttgtgcagttgaaccccctccccccatatcataaaaataagtggcagacrgaaaattaaaagtgcagatactgagtagggatgagaaacgtacttgtcaatattaatgatatatttgtctagattgtattaaggtgagccaaaatagtgggtaaatcttgtcacggagctggacacgagacgtgcttttttttgagg

SEQ ID NO: 775203 - DNA, 631 bp, Homo sapiens
gtcttatttgaaaatatgtgtgcatatgtgtgtttgtatgtttgtgttgatcttgggtactgtgaccttgttgaactctcatctattcttggattgtgtttgtgtgtagattctttgggattttctacttaggcaataatgttattgacagacaggaacagtattatttcctaacttacttggtatttgcagaacttaggctgcagtgttactgtgtagmagatgctaaacattctgtgagagagtgaggggtcagtggactgctgagtgaaactgctggcaatttcagagggtgttggtagtaccagacagtcttcaatgctgggtttgaaattgagattatgtaatacataattaattattttcatatttattcttttggtaactagttactgaacgtgtagtatttgccagttactatactaaacgttggggattggtcatatttcctactaaagttaattttgtgggagtaatggacaaataactatttacaacaaagtgtgaaactctgatagggaagtataggatgctatggaaacaaacatttttcttatttattgtttctgtgaaactagtgggcatacatcctaaaatggcaaagcagtgaggctcaagggcagaacttgaa

SEQ ID NO: 775204 - DNA, 631 bp, Homo sapiens
gtcttatttgaaaatatgtgtgcatatgtgtgtttgtatgtttgtgttgatcttgggtactgtgaccttgttgaactctcatctattcttggattgtgtttgtgtgtagattctttgggattttctacttaggcaataatgttattgacagacaggaacagtattatttcctaacttacttggtatttgcagaacttaggctgcagtgttactgtgtagaagatrctaaacattctgtgagagagtgaggggtcagtggactgctgagtgaaactgctggcaatttcagagggtgttggtagtaccagacagtcttcaatgctgggtttgaaattgagattatgtaatacataattaattattttcatatttattcttttggtaactagttactgaacgtgtagtatttgccagttactatactaaacgttggggattggtcatatttcctactaaagttaattttgtgggagtaatggacaaataactatttacaacaaagtgtgaaactctgatagggaagtataggatgctatggaaacaaacatttttcttatttattgtttctgtgaaactagtgggcatacatcctaaaatggcaaagcagtgaggctcaagggcagaacttgaa

SEQ ID NO: 775205 - DNA, 631 bp, Homo sapiens
gtcttatttgaaaatatgtgtgcatatgtgtgtttgtatgtttgtgttgatcttgggtactgtgaccttgttgaactctcatctattcttggattgtgtttgtgtgtagattctttgggattttctacttaggcaataatgttattgacagacaggaacagtattatttcctaacttacttggtatttgcagaacttaggctgcagtgttactgtgtagaagatgctaaacattctgtgagagagtgaggggtcagtgractgctgagtgaaactgctggcaatttcagagggtgttggtagtaccagacagtcttcaatgctgggtttgaaattgagattatgtaatacataattaattattttcatatttattcttttggtaactagttactgaacgtgtagtatttgccagttactatactaaacgttggggattggtcatatttcctactaaagttaattttgtgggagtaatggacaaataactatttacaacaaagtgtgaaactctgatagggaagtataggatgctatggaaacaaacatttttcttatttattgtttctgtgaaactagtgggcatacatcctaaaatggcaaagcagtgaggctcaagggcagaacttgaa

SEQ ID NO: 775206 - DNA, 641 bp, Homo sapiens
atcatttatctgaattgtttaaaatagaaaaggcttagattagaggtttggtttacagactgattttaaactaattctttcggtccttcatgtttccaaacaaaaatgcaacagcacatggtggcttagaacggagtgtgaagacatatgaatcagggactgaatcccagttctttcacaaagaacctgttaaggcctcgggcaacttacttctccagaccttagatttttcatctgtagaatggaaacaataatttttacttcatgggawtgcagcaaggaataaaggcagggcttggcttaaggtaagcactcaatatatggcagctactactattatgactacatggtattggtaaactgttgtagagttctaactcatgtgtgatagaaataaaagacaaatgctgctaatgcgaagtaaaaaattttagctggaaattcatttgataaaatcgtttaagctgggctagaacagaagaacaaacatcaatgtttttgtccctttcctcttgtctgctatactaaccttctatatcaaaaatggacatgaagaaagaatatcgcttttgcgccctttgattcatgaactgggactaaccttctgggacaggaacaagaaaaaaatgatctggataaca

SEQ ID NO: 775207 - DNA, 599 bp, Homo sapiens
agggctgtaaattggtataaacccttcaggggaaaattttacaatacctagtaaagctgataatgaggcacctgtcctatgatgaaataatccatatttaggcatataccagatagcagtgctttacaaaccaagggctggaaaataaacttggtagtgtgtcataatcagcattttgtagatgcattttttgatgtagacatyccatattctccttacggtatttatacctcttctttggttatcaacattaagagaaaggtagattcacactgttatgttattgctttatttaaaaaatgagggagtaacgtgccaaaccactctgccaggcctttctgtcacatttgcatccctatccctccactattagttatctgcctttctgtggctattttattaattcttccaaggatgatatgtatctcttaccattctatggaaaggagagaaattcatatgtagagtgggtgccctcagggcactagagatgaattctctcaaggaactccagttgagaaaggttcctccaagtcttaaaatctgggttttaatcccaactctgtgacttcaggcaggttacttacaaatctaagttt

SEQ ID NO: 775208 - DNA, 597 bp, Homo sapiens
cacgcaggagacgcatttttccaatgggttttctatggaataatagcatcaccaaatgcctaaagcagttagggccatggagccaaacacatatgagatgtgttgcatatcaatatatgaacatgcattcacaggcgtgacatcaaatgctatagatgcacatacaaatttgcatctacaggtgtgaacataagtgctatatatacatataaaaacgtgaaatgtggtatacgcacatattaatatgcactcacaggtatataacactgttattccttgttcctcttagaaagttagaattcatgttagcctgttaaagaccctgagaagtcctgcagygaagaaacctgttgaactctttttaaccaggaattcaccaaacacttatcaacaaaacaggtagaacagttccataaaacccaccttgagaggcactcaggctaataatttccatatagaatggatgggataaaagtcagtcgtggttcttgagatagttataagatagtaaatgccttggaaataatgctaagataagtgaagtagccaggatgctatatatatatatatatatatatatatatatatatatatata

SEQ ID NO: 775209 - DNA, 617 bp, Homo sapiens
aacatgatctaactttgtgaatattccatatgaacatatatatacatatattctatatatatgtttgtgtgtatatatacacatatatatgtatatacctgtgtgtgtatatatatatatatagtgttgttgttaaagttttctataaatgttacttaggtaaagttggtttctatattcttacagattttctatgtattctactttttctgttcattaccaagagaggagtgttgcagtctccaactgtaattgtagatttgtttatttctctttcaatgtgtattcatttttggtctcatttatttgaggtttggtcattagatacatgcatatttaggattgttatgcctttttagtgaattgrctcctctgtcattttgtgatgtccctttttacacttgtagtattccttgttctgaagtacgctttgtctaatattaatatagctactgcaggttcattgtgactaacattttcgtggaatctttccccatcttttagctttaatcttttcagtatgcttacaattaatgtgtgttcttatagataggacgtaattgggtttcaccttttaatccagtatatcaatctaccttttaattggtacatttggg

SEQ ID NO: 775210 - DNA, 438 bp, Homo sapiens
ggggaattaaaatacattgaataatgttaaagtaaaacatttttgcaacagagtaaaggtcataattgggatgaaagccatacttttatcgccagtgtaggaaaaaaatgtccaccttgtttttgtttcataagctatgctgttttcaaaataaggtacattcactcttatggtgatgacaataaggagtagggattacaattagtaarccagctggtttcctacactttgtcaatgtacagggcttatcctggtccaaacctgtttcctggtgcttaagaaacacagaatcctgccatgctttatcccaaagtggttcttcttagttctcctgtcccttggagacatggcccaagtaaattccatccgggtcttagaatccagttcagaacagcacattccctttggaatatcttgctcaatgcagaccatccttgt

SEQ ID NO: 775211 - DNA, 643 bp, Homo sapiens
gtttataaattacccactctgagatattttgttatagcagcctgaatagatggaaacacataacaccaaatatataaaaagtttttaacacctgtaaaccattctgctgaaatgtgaatatttctttccacagtctaatgttatttcactactgtagaattccctgtataaaaagctatagcatatatgtctcagatatgatcacaggccgtgtgtgatggaagggttgttgacaattcatgactctatggttttgtgaggtaaatgccactggttttataatgattgagatcctttttgaccaaatgcatactataccctcagtcatcataactacaaactctatgaggcggccagtatctcttagtgaagataggcacaatcatatttagtagagcragttagggttcttatttctattctaagtgagaaaaccaatagaactaagataggacattgctagagcaagcagtatttttccttattagaaatcgtaattagaaaataaagaaagaaatgcagttggattaaagaaagtgacctaaagatttcaaactaaagaaataactacctttcattcagtaggaataggaggtcattgcattcctgctgtggtctagaaactgtgctggtgctttgggga

SEQ ID NO: 775212 - DNA, 609 bp, Homo sapiens
ctatacatttatgatattcaggtgacagatgaaatatcagcccagatgagactcacaaaagacccagctggtccacagattcatcctatgattcctttttcagttccaagatgtataattggaatagacctactaggccactggtagactctctagtgattctgaaccacaggtaagaaatatgatgaaggaaggaacatgatgaagaaagggctataacagttcctggaacttttccttatcaagatagaactgcagaaattagtacaacaatcacagactttaaagacaaagggataggatacctaccacatcctctcttaactcatttgtttacgcaagttggatgaatcttggtgaataactggattgtgtaaactaggtggtctctgtgatagcagctgctattccggatatggtattttcactgaggaaaatcaatacaacctctagcccctggcatrcagctacacatctgataatgcagctactcaccaggcagcagagactagcactgaaccccagagtcacccctgggactggccagctacctactggcaggttgattgtgttggatgccttctattaggcagtgggcagagatttgtc

SEQ ID NO: 775213 - DNA, 423 bp, Homo sapiens
cattacagtctacagtctatctgaggaaaaaaactttaatcaaataatctcacaaatatacaaagggtagaataaaggactagccttcttcctgagaccaatgagacatttttgaaggattttaagcagagagaatagtatgatcaaatatgctttctaaataaggttgtcgggagaccagtgagacgtagyacagtagataccacgggagagatcacaatagcctcaactagggtgagggcactggagacagagaagtgaaaaaattcaaaagatattctggaggtaaaatcagtaggttttagtgcagactagatatggttctgttgccaactacctatattagcttgagcaagtaacactctaggcctgttttcactttgaaaaataagggcatttgaataggtaatctctaagtctttt

SEQ ID NO: 775214 - DNA, 595 bp, Homo sapiens
actgctaagtgaaaagccagtcctaagcttggtgcaggacgcttgctcatagttctagctgctcacggctgaggaggaaggataacttgagcctcggagtttgagtgcaccctgagtaacacagtgagaccccatctcaaaaaaaaaaactaatctgaaaaggctatatgctatttgataccaactatggtatgacatcctaggaaaggtaaaagtgtgaagacattgaaaagatcartggttgtcagcgaggagagagggagggatgaataaacgcagcacagaggacttttagggcaatgaaacttattctccatgatgctatcgatgctggtggatgaatgtcttatacatttgtcaaaacctatagaatgtgcaacacaaagaatgcaccctaggctgagtgcagtggctcatgcctggaatcccagcactttgggaggtggaggcaggaagatcactcaagctcaggggtttgagaccagcctgggcaatatagttagatcctgtgtctaccaaaaaacttttaaaacgccaagcttggccgggagcggtggctcatgcctgtaatcccagcactttgggaggctgaggc

SEQ ID NO: 775215 - DNA, 602 bp, Homo sapiens
tctgcatctcacccccgcagaggagtggctgtaggtacctccctgtaatccaattgtgagttggagtcttgctttaggctgtctgaataattagcacaaatgtagtcaactatcccctactgtaggggaatttataggcagggcttatagggatttgcaaagcaagtgagaatactagcagattgaaaaatgaaaacaatttgttgggcacaatcgaactacagaaatatcttctttaaattctgactatctttttttcttttttcagtattaagtccatctgagaaactagagccttgggacccagggatgaggaaacttaccgtacagacatgcgggctgaccttcattcaccctgcgggccatggcctctgccatccaactgcasaggcttcagccgaaactctctccagcactgccctaaacagaccaagtgtgagggagggagcatgtaatgaaaagtccacagagaacaagaagccacaagattcggtgctctggagccattctagatggtttcaggggaactagcttcccacctctgacagggataccatggcaaataccactctttgcctaggattataattctttgtgcacaa

SEQ ID NO: 775216 - DNA, 567 bp, Homo sapiens
acttgctccatctctgaactggtcttacccccttaaacctgcctttatatctaggagtttctttattttattttatttttttgagacagagtctcgctccattgcccaggctggactgcagcggcgtgatctcagctcactgcaacctccacctcctgggttcaagtgattcttgtgcctcagcctcccaagtagctgggattaaaggcacgtgccaccatgactggccaatttttatatttttagtagagatgaggtttcaccatgttggccaggctggtctcaaactcttgacttcaagtgatccrcccgcctcagcctcccaaagtgctgggattacaggtgtgagccaccaggcccagcctatatctaggagtctcttgatgagcattggtcgacagaaagaagtctcttctaaaaattgttaatgcttttatagactactcatagtctgagtcataaaacatcatttgcctttcaatttataccttccaagtgaatatgattattgaggattatctaattattatctacgtttctctctagatataaaaaacaccatagatc

SEQ ID NO: 775217 - DNA, 543 bp, Homo sapiens
attctaatctcaaggccccttaggcttatgaattcaaaaaaaaaaatagaagaaatgaacaaaaacttaaatcacagtttgttattaagtaatatctgaaatgaattagaaagaaaccataagccttaacaatactccaatcacagttaaattaatttagacagaaaagcaaatagcaattgacttgaaaataagaagtggrgccgaaggtggatacaagaaatccaggagggctaagataaatcccaaatccaatgttcatcaatgcctacacattcagtacaacctgatggcattaattctgtggttggggaaatgtgaaagtgaaatcgataataccacagttctaaatgtgcactgttggctgaacttatggtgtggtggggggtggtaaaaattaggcttctaagaaaggatgggactctgccctccaggcaaggagtaaatggccccagcagatggaaaactaaagcaaatgtaatcacctgcattttgaaaataggtgtgtttctgagaatttgtttgaattagttctttgtaaat

SEQ ID NO: 775218 - DNA, 543 bp, Homo sapiens
attctaatctcaaggccccttaggcttatgaattcaaaaaaaaaaatagaagaaatgaacaaaaacttaaatcacagtttgttattaagtaatatctgaaatgaattagaaagaaaccataagccttaacaatactccaatcacagttaaattaatttagacagaaaagcaaatagcaattgacttgaaaataagaagtggagccgaaggtggatacaagaaatccaggagggctaagatawatcccaaatccaatgttcatcaatgcctacacattcagtacaacctgatggcattaattctgtggttggggaaatgtgaaagtgaaatcgataataccacagttctaaatgtgcactgttggctgaacttatggtgtggtggggggtggtaaaaattaggcttctaagaaaggatgggactctgccctccaggcaaggagtaaatggccccagcagatggaaaactaaagcaaatgtaatcacctgcattttgaaaataggtgtgtttctgagaatttgtttgaattagttctttgtaaat

SEQ ID NO: 775219 - DNA, 520 bp, Homo sapiens
caaaaaaaaaaatagaagaaatgaacaaaaacttaaatcacagtttgttattaagtaatatctgaaatgaattagaaagaaaccataagccttaacaatactccaatcacagttaaattaatttagacagaaaagcaaatagcaattgacttgaaaataagaagtggagccgaaggtggatacaagaaatccaggagggctaagataaatcccaaatccaatgttcatcaatgcctacacattcagtacaacctgatggcattaattctgtggttggggaaatgtgaaagtgaaatcgataataccacagttctaaatgtgmactgttggctgaacttatggtgtggtggggggtggtaaaaattaggcttctaagaaaggatgggactctgccctccaggcaaggagtaaatggccccagcagatggaaaactaaagcaaatgtaatcacctgcattttgaaaataggtgtgtttctgagaatttgtttgaattagttctttgtaaataaaacaggatt

SEQ ID NO: 775220 - DNA, 600 bp, Homo sapiens
catgttggccaggctggtctcgaactcctaacttcaggtgatccacccgtctcggcctcccaaagtgctgggattacaggtgtaagccaccgcacccagccttattttgtatttttgtagagatggagtctggcaaacatataattaccaatttattgctcttctgtttgaaagaagtgttttgactgcagtaaagttctagcctattgtgaaaatcaggctagcccatttctcagatggctgcctggctagacaccctctctgagatggctggaatgattagtagaaaggagtgggcaggaagtaggtggagagtggggattctagatcaggggtcctatggcctgttaagaackggccattacagcaggaggtgagtggcgggcaagcaagcattaccacctgagctccgtctcccgtcagatcagtggcggcattagattctcctggaagtgcaaatcctactgtgaactgtgcatgcaagggatctaggttacgagctccttgtgagaatctaatgcctgatgatctgagatggaacagtttcatcccaaaaccattccccctaactcctcccccattttttcatggaaaaattgt

SEQ ID NO: 775221 - DNA, 526 bp, Homo sapiens
cccgctcctatgagaatttcatgccatcactaatctgacaggaagcagagctcaggcagtaatgtgagcaatggggagtggctgtaaatacagatgaagcttctcttgcacacctgccactcacctcctggtggtggcttggttcctaacaggccatggaccctggtacaggcccttggactggaggttgagaaccctggcatataggacagtggtcycataagattgtagtggaactgaaaaatccctaccacccagtgacatcatagccatcgtgatgttgtatcacaaagcattactcatgagtttgtggtgatgccggtgtaaacaaacctactgcactgccagtcttataaaagtctagcacatgcaattacgtacagtatataatacttgataattataataaatggccaggtgcggtggctcacgcctgtaaacccaacactttgggaggccgaggcgggcagatcaccggaggtcaggagtttgagaccagcatggccaatgtggtgaaaccctgtca

SEQ ID NO: 775222 - DNA, 615 bp, Homo sapiens
ggtgtccaagatgtggttaagtttagctctgaagctcacaaaagaagtcggaaacacagatttggggataaaactatggaagtagatgacattgcccatgcaagtaaatggagaaaagtggcacgccccaactccagattgtacgggacagacagaggaagaggagrcttgggatgagatggagaaggaaggtcagataagtgcagaagcaaacagttgcatcatggaaggtaaaagaaggataatttcaaggagtgagtgcttagcatgggagatctggtgaatcaaggataaaaaaaaatgtccagtcaacttggaaagtaagacgtccctggaggacattcgcaagagctctttcattgaggcagaagtcaaagaacagcgagttaaaagtcaccagctaggattctagctcaagcagctaaggggtgcaaaaggccggaagcgcacccagtttgagaaactattattttggcaccagggtctgctttagcaccactaagctgcaaaaagatgcgatggcctgtgttctaggtcctagggcaagggccgtgtaacagtgaagagaaaagagaaactgaagaggaatagccccacctcctgcagtcatttatt

SEQ ID NO: 775223 - DNA, 615 bp, Homo sapiens
ggtgtccaagatgtggttaagtttagctctgaagctcacaaaagaagtcggaaacacagatttggggataaaactatggaagtagatgacattgcccatgcaagtaaatggagaaaagtggcacgccccaactccagattgtacgggacagacagaggaagaggaggcttgggatgagatggagaaggaaggtcagataagtgcagaagcaaacagttgcatcatggaaggtaaaagaaggataatttcaaggagtgagtgcttagcatgggagatctggtgaatcaaggataaaaaaaaatgtccagtcaayttggaaagtaagacgtccctggaggacattcgcaagagctctttcattgaggcagaagtcaaagaacagcgagttaaaagtcaccagctaggattctagctcaagcagctaaggggtgcaaaaggccggaagcgcacccagtttgagaaactattattttggcaccagggtctgctttagcaccactaagctgcaaaaagatgcgatggcctgtgttctaggtcctagggcaagggccgtgtaacagtgaagagaaaagagaaactgaagaggaatagccccacctcctgcagtcatttatt

SEQ ID NO: 775224 - DNA, 615 bp, Homo sapiens
ggtgtccaagatgtggttaagtttagctctgaagctcacaaaagaagtcggaaacacagatttggggataaaactatggaagtagatgacattgcccatgcaagtaaatggagaaaagtggcacgccccaactccagattgtacgggacagacagaggaagaggaggcttgggatgagatggagaaggaaggtcagataagtgcagaagcaaacagttgcatcatggaaggtaaaagaaggataatttcaaggagtgagtgcttagcatgggagatctggtgaatcaaggataaaaaaaaatgtccagtcaacttggaaagtaagacgtccctggaggacattcgcaagagctctttcattgaggcagaagtcaaagaacagcgagttaaaagtcaccagcyaggattctagctcaagcagctaaggggtgcaaaaggccggaagcgcacccagtttgagaaactattattttggcaccagggtctgctttagcaccactaagctgcaaaaagatgcgatggcctgtgttctaggtcctagggcaagggccgtgtaacagtgaagagaaaagagaaactgaagaggaatagccccacctcctgcagtcatttatt

SEQ ID NO: 775225 - DNA, 649 bp, Homo sapiens
cagtgaaaaatagcagacagaaagccttcagcgaacatcaatagaaacaaaaaagcagaaaacgacttgtaagacttcagattattcaaattatcagacacaagcagtcattctgctgcagttggcttatataggttggtcagagacaactgtgagcatctcttcctaattctgtattcagtgatgtcaaggtggtactttgaaatcggccaagctgggaagagttacaccacagaaatgagcaaatgctacaaataaaggctttgtctttcttcagagagctgataattaaaaatgtactagaacattgctggaggcagattataaaaatgaatatgaaaattatctttaaagaaataaaatctaggtgatcttgastttgacaatgagtgtttagatataaagctcaaacacaatctttgaaagaaaaaattaacaaaatgggccacattaaaatttaaaacttctgtgaaaaatacttaagagaatgacaagacaagttgcagattgggaagaaatctttgcaaaacacatattcgataaggactgttatccaaaatataaaaagaacccttcaaactcaacaataaacacaacacaatttaaaaatggccaaaagactaacagacacctcaccaaggaagatcta

SEQ ID NO: 775226 - DNA, 669 bp, Homo sapiens
tctgagacttaaatatggcaactgagagcaaacggtactactttacaggttctatttccatactaggccccagtggtaataagacatacaaacgatgaaccagagcacaggcagtatgtgagagctccaataaaggtgcaggggactaggggagaacagacaaggggagctaaatgcacaagggggagctcagcagaagacgccatacacattccaggaattttaattcgtagtgctctaattgccatctaaaaaaacttaatgyttattaattgtgcaacaggcctcaaatttccatactccttattttttaaagataatttagaggcagccgagcagaatgaaaaaagaatggacaatttaactcacactattttctctattaagaattttgttttctccaaatgatggcagtttagagtggcatggatttgactgaaatcaaattggtaagatttgatttaatcagtattttctagggaaagtatatacttcatttaaataatgcatattcatcacaattcaggcataaatgaaagcattctattcagaacatacacaaataccattttaacgcaaggatttatttagacttaagaagattacagcaacaacagaacactaagtaatgctttggttattttatcaaagtttaggacacagatagat

SEQ ID NO: 775227 - DNA, 535 bp, Homo sapiens
ccacacacacgaaaacaaaaatttcgcaactatatgactgctaatcagttcacagaataacagaaatattttgatgcgaaagagcttcatgcagaatgtgaaaggaaagcggcaagtgcaaaaacaaaaacctgaatgagccatgtttccctaaaagcagtaagcctgagcagggtcaaaagatggaaagaaaracatggaaaaccatttctaaagaattcttttcatacatatcactgccccccgtatctcacccttctaggtcacatgctttctggatattatgctctgactttcaaagagtcttttctcaaggtacaaccaatggtttgttaataagaatactaatctatatatagcatctttctttgaaagagcttaaagtgccccacatgttatcacgattactttattaatagtcttgggcaaaagtgtgctgggtagtcatccttattctctacacctgctgggaaaacggcacactaagaacagaactgacatttattgggtacttactgcgtgccaggcagcgtcg

SEQ ID NO: 775228 - DNA, 664 bp, Homo sapiens
agcctctacttaaaatacaaaatttagcaaggcgtgttggcgagcacctgtaatcccagctactcaggaggctgaggcaggtgaatcaattgaacccaggaggcggaggttgcagtgaggggagaccccaccattgcactccagcctgggcaacaagagcgaaactccatctcaaaaaaaaagaaaaagaaaagaaagaaagaatttatttgaagattaatgtccaacaataggaaaatatacatgtataaggttattatttgcaacattatttgtaatttcaagatattagaatcaatcaaaatattaaaatataggagatcggttaaacaaattctgttgcatccacacaatggaatgttatatggcaggaaaaatgaatgagggtgaactgatatgaagcaattttatgtatttttaaatgaacaaacaaaaagtacaaaaggcatatataatatgctaacttttgagtaagamaaaaataaagtaagataacatctgtctgcttactgttacaaaataaaacacaggaaggataaaccaaaaaacaataaaaggggaaactgagtgaaagttataaggagggaagatatttttctgagtatgtcatttttacttttagaagaatgtcaatgctctacaaattcaaaaactgtgacaagat

SEQ ID NO: 775229 - DNA, 641 bp, Homo sapiens
tcctagaagatccgtagacagcaggaagtctctagttagttctctaagatgtaaagtaatttttaaatgtaaatttgaccaggcactctttcaatggaacacttccgtggtgtgctcaaatgatgcactccatgttcaaaggataaagacaaatctctcataggagtagcacagaacttcctttcccmcttggtctgccccttgcttccctggctccctgccattagccagcctagctcagcacttccgccaccacagggctgtgtacaggcatgactgttttctctcttccccaccttccccactgtattagttcgctttcacactgctataaggaattacctgagactatgtaattcatgaggaaaagaggtttaattgactcacagttctgccagctgaacaggaagtgtgactgggaggcctcaggaaacttacagtcaaggcaaaaggtgaagggaaagcaaggaccttcttcacatggcatcaggagagagagagcacaagggggggaagtgctacacatttttaaacaaacagatctcatgagaactctatcataagacagcactagggagatggtgctaaaccattagaaaccacccccatgatccaatcacctcccaccaagccccaccttc

SEQ ID NO: 775230 - DNA, 530 bp, Homo sapiens
aaatctctcataggagtagcacagaacttcctttcccccttggtctgccccttgcttccctggctccctgccattagccagcctagctcagcacttccgccaccacagggctgtgtacaggcatgactgttttctctcttccccaccttccccactgtattagttcgctttcacactgctataaggaattacctgagactatgtaattcatgaggaaaagaggtttaattgactcacagttctgccagctgaacaggaagtgtgactgggaggcctcaggaaacttacagtcaaggcaraaggtgaagggaaagcaaggaccttcttcacatggcatcaggagagagagagcacaagggggggaagtgctacacatttttaaacaaacagatctcatgagaactctatcataagacagcactagggagatggtgctaaaccattagaaaccacccccatgatccaatcacctcccaccaagccccaccttcaacacatgaggattgcaatttgacatgagatttgggtgg

SEQ ID NO: 775231 - DNA, 622 bp, Homo sapiens
ttactaataggaacatatgaacttgttttttccttttgtggcacaactaatgggcctgactaatgcaaaataagtttggatgttaatttttcatgcattgtcagcatatttctgaagcaatcttaccacctgattatatatttagaatgtttcaatctaatgtgctcaaaggaatctgttctctcttccctcttgagactcttctcargacttgggattagtgtagcctggtggcagttgtctcagtcccttggcacacctagctggcttaagttgggtttcttgatgtaattctcatttaagttgtggacagcagcatcttttgactgctggcttatttctccatggcatttcttttcttcatctcatacagctttggaaatcatccagggctttgtggtcagtgtgtttctcagctctgtggggaggcagagaggactgagaagtcatcagattcctttttctctcaatccttaattaaaccaatgagcctctatgtttcccttagcagttaaagccaatgatgaggaatctttcctcgagggaagcaatgtccgataaaattctctgtaataatagaaatatatctgtgttgtcctatttggcagccactagccaccta

SEQ ID NO: 775232 - DNA, 496 bp, Homo sapiens
taataactgacaattgactttaaccaatcatttgtaatggctaaaaaagagaataatcttagttgtcaaaattcatgcaataactttcttttctattatcattctcttttttgagccattatggttggtattgggttaggtaaagtaagaaacatacagctgcrgtttcataggtacagagagctcagaattctgtgagaattgagtgatgagccactcattcctgccatagcttgaggtagtcataagaatattttataagccaaccttcaccagcatctttcttggtaactacctgcatcatataacagctgggaagtgtgtgagggtgggggaaagatacggaagagactgactcaagaagattctgatcctatcttttcagatctcgaatctttttaatattttaaatatgccatagctaaatgtctctatgccccatatcaaacattaaattcagaatgatcagaatgagccacataggacaaataagcct

SEQ ID NO: 775233 - DNA, 630 bp, Homo sapiens
agctagttcaaatgagtttctcttactgtaatccaaaaacagctctaagccatgcaggtcccccaatcactttaacaaatgcttctgccgatgagggagacagtacacaagatacaagtcaaggccaggtgcctttgcccttcagcagttctacagaagtcaggtcyttctttctccatccatttgtttcccttgggaaacagcagctcctctgaggtttcccatatctagggagaggaggtggaatgttcttgccatctgcaatgatgaggaccaacatgtctgaaatcttctttcaaaaacctccagggtggcttcttggcatcctgcagttgttaagcaaatccaaaggcagagaaaataaccaggaaaccgtgttgaaacttatgtgacttcatgaaaggcaaatctattctaacttctgttgtgggcttgaaagccagtattttccaaatccctgataagaaagctaagagccacattttcggttgatctagagtgagtgtcctatgtagtggcatttttatattggtatcattcctggatccattttatattcctaaccttgccttgactttttttttctttcttatttctaatatgttattttgctgcattttaagactcctt

SEQ ID NO: 775234 - DNA, 550 bp, Homo sapiens
cttccgggtgttttgatatgaactaaagcgctcttgtgatacaaagaatatcattaattaggaactttagccaatcaaagatggacttatgtaatattacagattctattgggattgaaatataatggtctttttagtacttcctggctattgactttaactatgatgcactcactggtagtcaagaataaaaatgtatttcacctaagatatttagtagttagctagaaaatatgttcatggtgtaatgattctaaactttaatatcagattttaaagaaaataagattcatgactaaagtttttttgagacacrtagataaatatcaagacatttacaacatttctttctcttctgtttcttatcctgctttaggagcagcaatacaatataatttaagagtggtgaagagttaaaatagactttcacttacaagcttagagtttgctgcagtatcagcaggtgtgtggctagcctctgtggtgaggacacatgagggttgtttttagctttggattgtgccctcctaaaataaattgcatctactgg

SEQ ID NO: 775235 - DNA, 561 bp, Homo sapiens
tctaaaggctgcatgtttctataagaacgcttggcaagcttattattcttgacgactagcatagtatatctttcacaattttatgtgagattaggtgttcagtatgtttcatacaaactgatttattgtgtctctcatacatgttggatacaggatgaattcaatagtctctagggcgatgaaactctacctctaaactagagtttgagaaactcatataggctggtgctttagttcttttgacaatgtgccacctcctgtaatcttccatgtctgagggtagtgagtgtggaaacagttaccctttacccttcctattcattttaccatcacctcagacacccaagaccrtcacttcaacacttccataggatcatgtgtcaggcagccacttgaggagtggccatgctcatgtcttccaggagttttcacaccattgctctgaaacaccaacggactctttgatcaatgtcctctcttgccttcagtctatatggtgatgtgttttgctgggttgcccttatattgcgccagacaaagaacagtcgatccttgagcaca

SEQ ID NO: 775236 - DNA, 481 bp, Homo sapiens
gtctaagaaaaaaaaaaaaaaaaaaaaaaaaagagctgtaacaccactgcaaaggtctgcggcttcactcctgaagtcagtgagaccatgaacccactggaaggaagaaactctggacacatctgaacatctaaaggaacaaactccggacacaccatctttaagagctgtaaaactcaccgtgagggtccgcagtacaattccatgctatctcactaattaatatgtacgtccctttagttcatcaacacgcatcaccaggtaacgagttctctttctatctgctccagatccacttgctgccaatccaaagaggggagttaaataactctttyttctttgttagcataaagctaaattaaatctggtattaattctatagtaaaaatattctatcaaaaaacaacatagtaataaaaattagttttatttgttaagtaaagcaaatgaagaattcaaaatattatataaatagatgttg

SEQ ID NO: 775237 - DNA, 501 bp, Homo sapiens
agtgggcgctaaaccttgggtactcatgaacataaagatggcaataatagacactagggactactagagtggggttggggataagggttgaaaaaaactaactgttgttggatagtatgcctattacctgggtaaccggatcattagtatctgaagcctcagtaatgcacaatatattcatgtaacaaacctacacatgtaccctctgaatctaaaataaaagttgaaattattttttaaagycttcataaatgttgaaaaagacataaaatttagctaagcaaaacaaaaagagaagatatgtttaggcttacagaagtacatgcacataggttcaggaaaaaaatagaaatgtcttgattgaggattacaagaaagtaagtatgacctgagtaaggaactggagaaggattggcaagaaatagggcttatgaggtaagagttgctagaatatgaaagattcttacagtgtgtcataagcctcttaaagacttattagaa

SEQ ID NO: 775238 - DNA, 595 bp, Homo sapiens
acagggctgctgaaccccagcaattgttcatggcctccagcaacttctgggaaaaggacatattgaacaggtgaggagttccttaatctcataatgaatctctggaattctagcgcaggagaccccaagacttccacagacactagagctggcagggagagctgcttagaacaatagcaggggcaggactccaacctgtatggagcctaaaaagtttggcatgggaacacttgcagtggggcatggccagggacactcattccccaaggtttgccatgmtctttgtagagaaggctaaaggaggctttagcctctgagtgatggtcagatctggatagaacagagcatttgttctcatgggatggggcaagtctcttctgagcaccatcctgtctgctgacctctcttaggatcccagcctggaaatacctgatgtagtgcagccttggatgcccaaccaggatgttttcctggggaaaacatcatcatagctccttggacagcagattgtgcctgtcacagagctcaaggagactggtctccactgatacacaccagctcacctacagccttgccccactgtagccatcccctg

SEQ ID NO: 775239 - DNA, 499 bp, Homo sapiens
aatgtgagtggtgttatgttaataaataattaaaaatggcttaaatatttttaaaatacctctgtggtttttaggtttgcttgcttgtttaccagcttatttcatttacacatataattttatccagaaaccccatgtatcaaataaataaaagtatagctgctctgtttcaaagggggaggagagcatgaagcccagagctccatataaagagtctcccactggatttcagaggctccactgagaaactttggtttattcagagcacaattaaaaatgatgtgcacagtgactgggaatattatgawgccatagaaagaaatggaatttgtaagaggagtaagttgggcatagaggttaatgaatttggtgcccatactgaggtgacaaacattcaggtaaatatgtccaggaggagacacgtacacacacactcacaaatggttaattctctaaacaagaagtacattgataatcattgaattatgatgattttcta

SEQ ID NO: 775240 - DNA, 555 bp, Homo sapiens
  misc_feature 130, 167, 169: n = A,T,C or G
taattgtcaagaatacacaatggagaaaggaaaatatcttcaataaatagtgttaggaaaactgggtatccatatgcagaagaatggaatgaagcactcatttctcaccatatataaagatccagtcaanagggattaatgactttaagtgtagcctgaaactatgnanctactcaaataaaacatagggaaaaagtctccatgacattgatctaaacaatatttttccacagattacttcacaagttcaggcaataaaagcaaaaatggacaaacatgattacatcaatttaaatagtttcttcccagcaaagaaaatgatttaagaaagtgaggagacaacctaaagaatrggagaaaatattagcaaactctactcctgtaaggggttaatattcaaaatatataaagcactcagagaattcaataacaaaaacacaaatagtccaattaaaaagtggacaaaagacctgagtaatcatttctcaaaaaaagacatacagaagaccagcagatatatgagaaaatcctcaatattattattcagtagagaaa

SEQ ID NO: 775241 - DNA, 555 bp, Homo sapiens
  misc_feature 130, 167, 169: n = A,T,C or G
taattgtcaagaatacacaatggagaaaggaaaatatcttcaataaatagtgttaggaaaactgggtatccatatgcagaagaatggaatgaagcactcatttctcaccatatataaagatccagtcaanagggattaatgactttaagtgtagcctgaaactatgnanctactcaaataaaacatagggaaaaagtctccatgacattgatctaaacaatatttttccacagattacttcacaagttcaggcaataaaagcaaaaatggacaaacatgattacatcaatttaaatagtttcttcccagcaaagaaaatgatttaagaaagtgaggagacaacctaaagaatgggagaaaatattagcaaamtctactcctgtaaggggttaatattcaaaatatataaagcactcagagaattcaataacaaaaacacaaatagtccaattaaaaagtggacaaaagacctgagtaatcatttctcaaaaaaagacatacagaagaccagcagatatatgagaaaatcctcaatattattattcagtagagaaa

SEQ ID NO: 775242 - DNA, 575 bp, Homo sapiens
cgggctttgtggttcctagcatcaccaagcttccaggtaccaccacgttccccagtgcccagagtggaagctgcttgtggtacgcctggttcaactgcagccttgaatgaagccagcacctatgctagcgcctggagctacccatcctcctgcagcccacgtkcctagcacagtgactggaccccatggttgctcacataccccttgctgcaccgtgcctggctcgcccttgacaagtgtggaatctgagccagtaacatgagctgagcacaagctgccaggctgaatgggcagaataaacccagggaattgagcaaaatttgggcaaaggtgccaccagccccagaggtttctggctggaaaagcaacacactacagatcctgtgacatttgtttgacatatctaggttctctagcttttggtgcatatatattaataactattatatcttcttgctggattaatccattgatcattctataatgacctgtaataaccttctttgtctattttatgtgtttttttttacttaaagtcattttgtatgattcctattcctgcacacttttgcttt

SEQ ID NO: 775243 - DNA, 575 bp, Homo sapiens
cgggctttgtggttcctagcatcaccaagcttccaggtaccaccacgttccccagtgcccagagtggaagctgcttgtggtacgcctggttcaactgcagccttgaatgaagccagcacctatgctagcgcctggagctacccatcctcctgcagcccacgttcctagcacagtgactggaccccatggttgctcacataccccttgctgcaccgtgcctggctcgcccttgacaagtgtggratctgagccagtaacatgagctgagcacaagctgccaggctgaatgggcagaataaacccagggaattgagcaaaatttgggcaaaggtgccaccagccccagaggtttctggctggaaaagcaacacactacagatcctgtgacatttgtttgacatatctaggttctctagcttttggtgcatatatattaataactattatatcttcttgctggattaatccattgatcattctataatgacctgtaataaccttctttgtctattttatgtgtttttttttacttaaagtcattttgtatgattcctattcctgcacacttttgcttt

SEQ ID NO: 775244 - DNA, 638 bp, Homo sapiens
gtggtcaatttgcattcaaagttttcattcagtttagtagaagcacttgtaatattgaatattaaggaggagtttcaggggccaatgtatgagttatctgttcaaactgcctacaacaaatccatagaggattaagtggaaattattcacatatactaattaaaakttatttaaatacttaatgattttgagaaaatattgctaaaatgaaatctttttacaatatatttctaggcccagctctatgagaaggagatctttgtgctcattatgcacagtgagggagaagaaatataggaggaagtatcagtccctctctacatgcagtccatactttcatttctattatactttcagctgtatttaaaattcaaccacaggttgaggaatgttgccatttcctccatttttcatcttgtcaaatacattgtatcaaatttatttaatttttaaagatactcacccagtttaataactaatgtgtataaccagcatatacatcatggcaatagaatagaatttaattttaccaagacaacatcatatatatcaaggagtttttctgctgaaaaatcctgctgacccaaatgtattttaatacaggatttcacctcatattttggtattattgtgttaaa

SEQ ID NO: 775245 - DNA, 602 bp, Homo sapiens
tcagatggcacttctggacccatccagggcctgggaaccttgccaccatgaaaggaaggacacaaacaactgactttgccacctactgacttgagagccccaggacctttagtgaatacaggtggagccaggtagtggttacagcaggcattagtacataagtcccagtgctgtactggcttcagttctgacccagaacagtagcagtggtggtagccacaggggtacttgcagctcagagaagagaaagagactctatttggaaaaaaaagtaagggaagagagcaagagtctctgattggtaatccagagaattctggatcttctccaaggctattaagatgatacttctataagtctgcaaggatcacagcattactaggcttgcrgcatcccctaataagatatggtttagatcacaacacccaagtccttccaaatacctggaaagcatttccaagaaggacgggtgttcctgggatccaccaacactgggaggctacagtatatacctctctttaatgcccagacacagttgaaaatccacaagcattgcgacgatccaggaaaacatgacctgcaggatttttattggttagggt

SEQ ID NO: 775246 - DNA, 552 bp, Homo sapiens
aacatttgctaactgaagaacccttgggccttaaatacctagcagcaggatccaggtactacatcaaggaatttggataagcctctgagattcactggcttcaggtgggactcagcacattcccaactgtggtggcctcagggcaaaaatctttctgcttgagaaaagcagagggaaaagtaaaggggactttgtcttgcaccttaggtactggcatagccacagggggttagagcaccaaacaggctcttggggtccctaattctaggacttaactcttagatagcatttctggacttgccctgagccaaaggggagcccactgtccgaagggcaagtcccagggcaggcagcattcacgacaagctgacctaagagaccttaggccctaaaggaacaccagtggtagtatggtagyatgccctatggcccggggaggtggtggctacagggttaggcttctctgcctttggaaaggaaagcaaagagggacaaggacggtgtcttgtggttttggtgccagctcagctacaatacagtagaacactaggt

SEQ ID NO: 775247 - DNA, 605 bp, Homo sapiens
gtctgcaaaaaataggtctccattaatgaggaatcatgcttaaataagtcaatgagttcatggaaagggcattactgtgaaaaaacaacacgtggctaacatcctaaaaaaagagagaaatcatgattggtgggcagatcaggacatcaatacaggacccaaraaaagcctcatgaagaagccttttatagacagaggtgtcagaggaagtcttcaatgaaattttttaaaaatacaagcaaaataaagaatgtagtgtgtgtgtgtgtgtgtgtgtgtgttttaattagaagagtttggctaaaagtgaaagtacattatgtgaaagtacattatgaatttacatatatgaacataacaatgtgttataggattttggaaacttttaactcatttaatttttctaataacactatacacaggtacaatttctatttatgcttgagaaatcaagacaaagagaggtcgagtaatttgccaaaattataaatacatatccaagggctttaatttgaacccaggaagccaagcatttaatagtatttagtcattgcaacaaatctataacaaaggcagtattcttatctgcattttatccatgtgaa

SEQ ID NO: 775248 - DNA, 657 bp, Homo sapiens
cagttgtgaagccattttgtcaaataattttctttgttggtaaacttttattattgattctacttccttactaactataggtctattcttattgtctgtttataatttggtcttgttaagtttgtgcttctaggaacttgtctacttcatctaagtcatccaatttgttggtgtacaattattcatagaactctcctataattttttaattggtagcaatgctcccacatgcagttctgatttaagtaatttgagccytctcccgttttcccttagtcaagctcactcatgtttgccaattttgttaagctttttaaataaaaagttgtggtttccttgattttctatactgtttttctattttctgctttatgtatctctcttggaccctttattgtttcatccgttctgctattttgggcttactttaatgctatttttctacctttttaaggtgtaaaattggggtttataattgagatatttcttcttttttaatgtaattgattgtgactatacattttctttttagcactgctttcaccaaatcccatatgttttggtatgttgtgcttttattttaatttgtctgaaggaattttccaatttctcttggaattgcttctttgatctattggtttaatggtgtgttgtcta

SEQ ID NO: 775249 - DNA, 396 bp, Homo sapiens
gataatttctaccaatttattttattctttttagtggatcatgtttttctgtttctttgtatgctgtgtgatatatttatatatataaatctgtgagtattttcagactgccattttgccaggacagcctatcattgattagctgtgcatgctctgagtctagggatcaggccaaggtgaaagcattaagcaatttcaraatgtttctgagcatatctcttgactggatctgcatgtagctttctcagttatccctaatacatggctgcttttcaatttcttagtcttccaaagaattttacttcagcttttcctcaggatcttagatggtctgtagaatgatgctaccattatctcttgcaacaggtatatgtgggtctgtttttaccttatagc

SEQ ID NO: 775250 - DNA, 640 bp, Homo sapiens
tctttctttatcatgtggcacttcatcaataacaatggattgcaggacgaacttaaaggggccaagtgctctctggagctgttcctatttctctaaaatgtattcattgtttaaaagacaatgtaggtaaatattaaaatgtgattcctgggcaagagtggcctctcagtaagaattttagaaaattaactttaggaccaacttcacatgataaacgatatatgacagatcatgtctttactttaaaaaaacagttttaaatagtatacaataacataattcacattagagagttagtagagctcaaatacattaataatctaaagctcatcacaaaatgtaatagagagctgtgctttaaatatgcccacccctacagacacacacacacacacacacacacacacacacacaygacacctcagagaatgaagaccaactctgagaatggcatacttcttgtgcagtatttcagagggtgttagacatccaacatgaaactcaagttactttgtcaacttaaggttgatggaatggtacagaatgagaatgaatctgagagaagatacctaaattcaattccaaaaatgtttcatcaaccctctttatttctgaatatttcctctcactaacctgtctt

SEQ ID NO: 775251 - DNA, 544 bp, Homo sapiens
tttactatatatgatatcatattagtatatactctatattatattagtatatattgcattatctgtctatctatctatctataaggtaggtctcagaacccctttacactgtcttcaaaattagacaaccccaaagaccttttgtttatgtgaattatatcaatcaacatttaccatattgcaaatcaaaaccaattaactttttaaagatgtatttaaaattcatttaaaagtctattacatgttggctgggcgcggtggctcatgcgtgtaatcccagcactttggaaggccaagggaggtggattacctraggtcagcagtttgagaccagcctggctaacatggcaaaaccccatctctactaaaagtacaaaaattagccagccgtggtggcgggcacctgtaatcccagctactcaggaggctgaggcaggagaatcgcttgaacccgggaggcggaggttgcagtgagccgagatcgcgccactacactccagtctggggaacaagagtaagactctgtctcaaaaaaaaaaaaaaa

SEQ ID NO: 775252 - DNA, 549 bp, Homo sapiens
gcaggtggatcacttgaagtcaggagttcgagaccagcctggtgcctggtcaacatggtgaaacctggtctctactaaaaatacaaaaattagccaagcatggtggtacatgcctgtaatcccagcgactcaggaggctgaggcaggatcattgtttgaacctgggaggcggaggttgcagtgagctgagacggtgccattgcactccagcctgggtgggtgacagagcgagactgtgtctcaaaaaaaaaaaaaaaaatcaatatgagaccacctgtagaattaaaagccaggatatataacttcaaaagaccagagaatatayatatgtgtgtgtgtgtatatatatatgtgtgtgtgtgtgtgtgtgtgtgtgtgtgtgtgtgtgtgtatggccagtcctccattctaacaaaatttaaaagcagagtcccagttctgctattcaattctttaagtgggcgtggggagtgggcaacaaggtggtattaaaaaccccagagaacaagatgatggaaagtagaataaaaaatacaaatagtattttac

SEQ ID NO: 775253 - DNA, 615 bp, Homo sapiens
agataaggccttttttgttcttaaaagatcttgaagaaataagattttcacgcttctctttgaagattatctaacagtaataaaacatatcctggctgtgaagcttatatgtggcctcaatttttccctcaacttgagctcattagctcttacataaaagagatattaaaatattagtttaatttaaattagacaatcacgataatgatactctttmttggctgctcatcaaaatgaactgtggaattattttactattttattggggttataacactgtagtaggctgaataatggctctcaaagatatccaggccctaatcaccaaactctgcaaatgttaccttaaatgaaaaatgggactttgcagacgtgattaagttaaggatcttgagatgggggattatccctgtttatccaagtaggccttaaatgtaataacgaagtgtccttaaaagcgatgtagagaaggccaggcaaagtgacccatgctggtaatctcagcactctgggaggccaaggtgggaggactgcttgaggccaggagttcaaggatgcagtgagttatgatcatgccactgcactccagcctgggcgacagagaaaaccccatct

SEQ ID NO: 775254 - DNA, 617 bp, Homo sapiens
taacagaaatgaaggacctcatatttatgataacatattagaaatcatgagaatgaagttgctcatttttcttctaatacttttctctatcaagtagagacactactaggagagtgcctagtgagtacttacacacagtgtaaagttatccattctgtttaggtgatcttgcctataatcatggtccaatatagtattccactcttgcagtaaagagtggttatccatccattttaaaagttctaagtctatatccttattggaggatgcagacagaagagggaattgtttgaagtttatgagtgtagagtagggaaaagtaacacatgcttgcatcttacttaagggttttctgagtggtcataaaatcaaaccacctgtttagggacgtacttagtggtaacagaaaccaataagacagaacacatcttcaacgtycccagaaggagaagatgcataaagagctatcacaaaaggttaaaactaaaggagagaagagggatcagtgaaacaggaagatatatgtacagtgatagttctgagaaaggttcttttaccctaaaatggcttttgtttttatttttttgagacagagtctggttctgtcacccaggctg

SEQ ID NO: 775255 - DNA, 646 bp, Homo sapiens
ctttgaggaattcagaattctatttttagactttttcataaatggaaacataagtgacagtcatgctgtagaatacaagatgttgtccttatattaactaggagaacaacatggatgctaatatatatagttcactgtagtttggtattattgatattcctttccttttctgtgttcagcttcttcaccaaattaaaatgctttgcaaagtgtggcttgtttatcatcttctttctcaatcatttagaatgtgggtgtgcatgttcctgtttcctatttactaaattcaaacatagaaatttaaacatgcttagaggctaagamagaggataatacctcctggtgttcctaacacattatctctctcaaaaccattttattaccaaataacactcagagctttgtggaacagaaagtatgcttctttatagagacaataagtcctagaactcaagcaagttgttccatggtcattgataacaagtataactcaaagtcccattactgtcatatggtttttttccataaacaaactgatagaaaactagcaaacttgactgaaaaatgtaaattcttgggagaataatttttcatgtaaaaacctaccgctaatacctgttccacactgtccttaatgctaagaagg

SEQ ID NO: 775256 - DNA, 654 bp, Homo sapiens
aaatggagcacttataaatgctgaaaataacacaaagctgtagccagactgagttttggacatggataatcagaacagtctgtagcccgtctgtggctaatgggatgtttctcccagctttgtcaccatggcaaatactttataatacacaaacatktgtagcgctaaaaatccacccactctttttgaaagatggccaggttttgtaaaattacattccagctagtgctaccctgctgatttttaaggttttttttttttctggttgctattcatgtgcttaacaaaagaccaaagggaaaaaaatatatatatagtttgtaaacatatattgcactttcatagttcaattaccttatggagaaatacatgtcaggtttttctgatggccaaattttgggggaaaggagtctattttgtagtggtgatggtggggaggggaaatctgtgggtctgtaattctaaaccccatcatttttcccaaataaacatacaatcaaagcgaaacacatttgtgggacaaatatagcttcaaggcaagccccttagtcccatggagaatcagattgctgcctttaagctccctgagagggtttggggtatatatctttatagtgaataccaccagagccagtatatgattgaagccatagc

SEQ ID NO: 775257 - DNA, 648 bp, Homo sapiens
gtaactctgcaagccagaagacatggaggaacatctataaaatgttgaagaaaaattgcaaacccaaagttctatagctagcaaaaatatctttcaaaaatgaaggtaagataataatttgttttcagataggcaaaagtgatggaaagtcactgccagaagcaagaaatatcataggaatttatttagaaagaatgagaattttactagttggaaagctggatctgcataaagaagtggagagtgaaaaaacttggggagttgggcatggtggctcactcttataatcccagcactttgggaggccaaagcaggaggatcacttgagcccaggagttcaagaccagcctgggcaatagggagatcccatttctacaaaaaagtttaaaaattagctgggtgtggtggcacatgtctgaggttccagctactcaagtttctcaaatsagaggatcacttgagtctaggagattcacgctgcagtgagctatgattatgtcactgcactccaggctaggcgaaagagcaagacccagtctcaaaaaaggttttggatttggatctatacataaagaaataaggggttaaaaaaaaggcggggtaaaaatatcagtgaaaataaaagacatttcttaattttaatcaact

SEQ ID NO: 775258 - DNA, 505 bp, Homo sapiens
tcattggctctacattatttcttttttatccacaatataacttttctgtatctacatagcttgtgatctgatatatttaaaaataatcttgttattactgatttcagaaaactttgcaatgtgcttctaaaattatttatttaattacctaatctttaattcatccctaatacctggacattttatttttggcaaacaattttcatgtgtttgcattaaygtttttagttagcctctaggcttttttagaagttattttaaaatccatttcagccaagatttctgatctgttcttgagttgtatttaaatcggtgtcttttgctttacctcaccttgctaaaatgttggacgtaatggtgctatgattacctaaaggatcacgcatgtattcctgactaaaccagttcttgttcatgacacaaacactttatgccatgaggggttattcccctttgttagaattagtcatttgtctcatcctaaaacctcactgatgcatttcct

SEQ ID NO: 775259 - DNA, 584 bp, Homo sapiens
ggaaactatgtatactattcccgtattcttttgtcactggtttcatctgctattttgaggttaggcttttcccccttcaaatagctgaatgtatgtatgtatgtacgtatatatacagatataaatataatatatgaacctgaaatacattattatatgtttttaacattttattttgaaatacttatagattcacaggaagttaaaaaaatagtactgacaggtccaatgcactctgtattttaatgaatatttagttacgaattctaatttttctttttcttttcttttctttttttcttttttttttttttttgagatagttttgctcttgttgcccaggctggagtgcaatggcgtgatgtcggctcaccgcaacctccgcctcccagattcaagagattctcctgcctcagcctcctgagtagktgggattacaggcatgcgccaccatgcctggcttattttgtatttttagtagagacagggtttctccatgtgggtcaggctggtctcaaactcctgaccttaggtgatccacctgtctcagcctcccaaagtgctgggattacaggcgtcagctg

SEQ ID NO: 775260 - DNA, 576 bp, Homo sapiens
tttgccagaggctaaagggattgggaaatggagagaaatttgcttagtggagtgtttctttttggcataaaatattttggagctcaatagagatgatgctcacacaacattgtgaatgtactaaatgccactgaaatgttcactttaaaatggttcattttacatcagtaaatttcctttttttctttttttcttttttttgagacagagtctctctctgttgcccaaaatraagtgcagtggcatgatcttggttcactggaatctctgcctccccagctcaagtgatcctcccaccttagcctccagagtagctgggactaccggtgtgtgccaccacacctggctaatttttgtattttgttgtagaggctgggtttcaccatgttgcccaggctggtctctaattcctgggctcaagtgatctacctggctcggcctttcaaagtggtggattataggtgtgaggcactgtgcctggccttagtaagtttcttaaataaaccttagccatttgttattttacaagaatctgcacagttggctagactcagttctgttgatctgggtgaggtt

SEQ ID NO: 775261 - DNA, 623 bp, Homo sapiens
atgaatacttttaaaataaggtgctgtgcacagagaacattcgttatggtatttttctttgaaagattcctgatttcaaaataaatgccttgccttataaaaatgaaagcatctgtgttgctggaaattattatcttccaataatagttaaacaaaacatcatttttttcaaggacaatagatccagttaatctcagaatagcaattttaaagrcttgtgtagtggatgaaccattttacatgggttaatttttttgaaaacaaaagcttgtatttctaagggtaaaaaagctttattttaattttccagttctgcaggaaatatttccaaaaatattttacactatactctttaagtagaatatgcttgatttattaattcagggactagtcaagtattttggactgctaacctttacagtaaatgatcacactgaactttttacatttttaaggtttattttcatgatttttttttcttttcccactttatctgaatacaacctatcagaactagaactagttagtacacttagttctagcaaccactttacattttctaaatactttcctgctcttaaactgtaaaacaaatgtgatagattttttctgaaatagtgata

SEQ ID NO: 775262 - DNA, 671 bp, Homo sapiens
aatgtgaaatgcctatagtaaaataccaagcagaaaaattgagtagattattgcaaacaacttagcactttcatcattgcagttgatacaaaagtgaatcaagaactcttaattgtggaagacaagaaattgtcctgtaggtgagtagcaatgactaatggtgatatatatctcgggaaacagacattttgaattatttctatttccagttttgttaggaaaatctattaaacctcttccataagagaratcctttcagactacacagctggtgtttcagcagaagctgctgttagtgagtttacagtaaaggagaatactcctacttaaacactccagcattcccaaatccaactcggaccatcctgctagaaaatctctccagcagaataccctatcttagtaaatggctatcacagtgttttagatgcttaagtaaaagtaaaaaatcttggagtctaacttgactcttttctttttcttatgctttccatctaatgcattaattaatcatatcaccatgtgtctttattggatattagtgttgaagacctttgtgatatattttgtagattagaataagtaaatcgtctttgcagctggagcctgaataggaatcttttgtaatttagtatgatatcacttgatggtgtatttaaataatacttttc

SEQ ID NO: 775263 - DNA, 615 bp, Homo sapiens
aatagatgccacaaaggcagggaattaacaatcacaaaggagaaaagaaagaaaatatgtaacataaaaaatatcctgagctgagaaaagatgtgaacttttgaattaaaagtccacactgaatgccaagtgggaataatcattttttagatttccaccaagacaaattcggataaaattttagaattttagaattttaagtaaaaaagggaaactctaaaatcatttgtagggaacataaaatacagaaaatagtgtatatatgtaatttatatgtaaatactatgctattatatatattctctgtatatatcatatttgtattcatatttgtataatgtttatatttatcatctataaatttgagatccttgtctttaaaattattttaactgtggtattaytggtcacaggtcactgctgtatgtatcctagggacttggtgccctgtgtcccagccactctatccatggctgaaaagggcctaggtacagctcaggctgtggcttcagtgaatgtaagccccaagccttggtagcttccatgtggtattgagcctatgggtgcacagaaatcaagaattgaggtttgggaacttccgcctagatttcagag

SEQ ID NO: 775264 - DNA, 639 bp, Homo sapiens
tgtaattttggtgaacacaaatttgacctacttacaactttagagtgttggttagttctttgaggttttgctataactcctacctcataagtgaattctctttataattgacccctcggttttttaggtaagcaattactctgccttctgtattttagcacctgagaaacctgcttagatagagctgctatgatttccattttcactggccacttcacataacaggttgaagctatcaactctgcggatagggctttctcttrgtgggtcatttccattaacaggctgttgtcttgtcattcaccctgcaaactcattgcttttcctctcttccacttcctggcaggtccatactctcacactttattttaactggtttgtgacatttctatccccaaatatctggttatctttctcctggctttttaagttttaaaggctcttagggatgagacggtttataggaaagtaaaggttaatgtatttaaaagtaattgtcctgcaggctggcctccttacaaaagagattcgcctcctgtagaactccatggaaaccatttatagctaagagcttaaggcagtcaattttggtcaacaaaaagacgtatacagaatctccatgatcgcatcagaggatcg

SEQ ID NO: 775265 - DNA, 587 bp, Homo sapiens
tcattgcaacactattcacagtagcaaagacatggaaacaacccaaatacccatcaataataggctgggtaaagaaaatgtggtacgtatacaccatggaatactatgcagccatgaaaaggaacaagatcacatactttgcagggacatggatagagctggaagccattattctcagaaaactaacacaggaacagaaaaccaaacaccgcatgttctcatgtataagtggaagctgaacaatgagaacacatggacacagggaggggaacaacacacactggggcctgttggggagtttggtagcggggaggcagagaattaggaaaaatagctaatttatgctgggcttaatacctaggtgatgggttgataggtgcagcaaccactatggcacatgtttacctatgtaacaaacctgcacatgtaccckgaatttaaaataaaaatgtataaaataaaagttagagaggaactgattggtatgcaacaatttcttttagacattgagcctattcttgttttgctggctgaatgaggggaggagagtagtttgaagtcaggagaatctggtaagctaaatgtcc

SEQ ID NO: 775266 - DNA, 528 bp, Homo sapiens
gtagttaaataattacaaaagtagaaaaaaaaagaaagtaaatttaccattgtttcttccactagaattaattactcttttgattaaaaaaataggaatattggcccactctaagaaacagaacctattgatttttttatttattttacatgaattttataattggctttcaagttttctttaaattctcatttcaaaaataacctcaaataattatcactgctgcttaaaaacggttttctttattgcaatcagacactgagttacttattctccttcctctcattgaatgttgtttgctttgtatggattcaaaargtctataataatagagatactctaattccattattatataaacaatattgtatatgtgctttaaaagattcactttaatttgaggtatttctagattgctaaagtgtcaaaaatacaaccaaaagggaaaaggaaataatgctatttaaaactgttcaggatgccaaaccaaattaaatacctaatttaaaacaacattttctttcaata

SEQ ID NO: 775267 - DNA, 528 bp, Homo sapiens
gtagttaaataattacaaaagtagaaaaaaaaagaaagtaaatttaccattgtttcttccactagaattaattactcttttgattaaaaaaataggaatattggcccactctaagaaacagaacctattgatttttttatttattttacatgaattttataattggctttcaagttttctttaaattctcatttcaaaaataacctcaaataattatcactgctgcttaaaaacggttttctttattgcaatcagacactgagttacttattctccttcctctcattgaatgttgtttgctttgtatggattcaaaaaktctataataatagagatactctaattccattattatataaacaatattgtatatgtgctttaaaagattcactttaatttgaggtatttctagattgctaaagtgtcaaaaatacaaccaaaagggaaaaggaaataatgctatttaaaactgttcaggatgccaaaccaaattaaatacctaatttaaaacaacattttctttcaata

SEQ ID NO: 775268 - DNA, 608 bp, Homo sapiens
caaaaacaagtgaagggagtgagtgtggcaagaccctggcgagaaagcagctgctcccccacccccttgtaggaatgtaaatgaaaggttgtctgatctcccttttaaagataaaccagaaacttggatttttatgtgaactctttggaatttttttttttttggatggagtttggctctggttgcccaggctggagtgcaatggcacaatctcagctcaccccaaactcctcctcccgggttcaagcgattctcctgcctcagccttccgagtatctgggattacaggcatgcaccaccatgcccggctaattttgtatttttagcatagatggggtttctctatgttggtcagactggtctcaaactcctgacctcaggtgatcygcccgccttggcctcccaaagtgctgggattacaggtatgagccaccacacccagccaactcttttgattttttaaacggtgtccactctatacactaacactttataagccaatcagaatccacctgtagattcagatgttaccatctagtatacagctgaagccagaagtcaactatggaaacgataaaagggcaacagaagtcagctaacatctgtaa

SEQ ID NO: 775269 - DNA, 470 bp, Homo sapiens
gcactaactctcttctcaagatcaactaggaggaatttcagaatattaatttttgtacagtatgacttcactaaatttgggtgggtgttaatgcaaaattaataataattaggcgggttggactaaagcttaactttttacaggttgtatgaaaacaaacacagtgtaaacacaattacattagaacctttgaggagcattttcctctatggattgtcagtgcatacactggtaataaagaacaattcttttckacttgtttttgtaaaggccctgatgaacctctccttgtaagcatatagacttttatcataagcattgaaagaaaattgtcctgtgtgtggtcttgtagtattagttcctgaacaaaaataaaacaaaagaaaaaataaaatatttgaagtgttctaaaattaataattttataattttcttctaattaaatataaaataaattgaaataataataa

SEQ ID NO: 775270 - DNA, 489 bp, Homo sapiens
gaaaataattcaggataggcgcagtggctcacccctgtaatcccagcactttggggaggccaagatgggcggatcacctgaggtcgggagttcaagaccagcctgaccaacatggagaaaccccctctctcctaaaaatacaaaattagcagggcatggtggtgcacccctataatacccgctactcaggaggctgaggcaggagaatccctttaacccaggaggcggaggttttggtgagcctagatccccccattgcactcccgcctgggcaacaagtgagaaactccgaccccaaaaaaaaaaaaaaaaaaaaaaaaaaaaaaaaragagagagaaaagaaaaagaattcaacatgttttatcactaattaaatggcattctgaaaattatgattcagtaaatatttgctacttccaaatattggggcaatctggtacatagatttgaataataaactagattttgaaaccaggtgatgtttggac

SEQ ID NO: 775271 - DNA, 625 bp, Homo sapiens
ttcaatacaaataaacactatttgttttatcagaaataaggttgaaatttacttttagtaaaatgctacctagttaaaatcataattctgttggcatacacgaagttttggataaacctggatttttatttatttctcacattatatgatctatttatagattataagaatagacaccaatmgataaaatctatatgttccacataggagattcatattatgttatttaatgaataataatgaatatcaaattttgcttagtttggggaaaaacctaaatttcatagaacacagatatagtacttgaagaaagagtaatgcctggctaacaaaggaccctgagagagaaggacctgtctgatatctagaaagttattggaactagcacatggttagtttatcagtgttgcaatttaaaaaattaacaactcggtataaaactcagcaaaattgacaaccaataatactaccactagaaatgtcacttgttttttcaaaggtgtccagtgagatattttgcagcacttaggattcatcaaagtgtagcatatgtaatatgggaaagtagctttcaataattgcccaacccttaaaatggtggcaattgctgagggcctaatatgat

SEQ ID NO: 775272 - DNA, 587 bp, Homo sapiens
gatgcataaaacaacttacatctgttaaccactcttccttgggatggtcaagggtctcatccttcttacgtctggtctgctagaataaatttgtttcataacctgtgacatgctttggctgtgtccccagtcaaatcttatcttgaattgtagctcccataattcctatatatcgtgggagggatccagtgggaggtaatcgaatcgggrgatgggtctttcccaagctgttcttgtgacagtgaataagcctcatgagatctgatggtttatttatttatttatttatttttgagacatagtcttgctctgttgctcaggctggagtgcattatcattaccttggctcactgcaacctctgactcctgggttcaagcgattctcctgtctcagcctcccgagtagctgggattacaggcacctaccaccatacctgtctaatttttgtacttttagtatggacggggtttcaccatgttggccaggctggcctcgatctcctcacctcaggtcatccactgccttggcctcccaaagtgctgggattacagctgatggttttataaaggggagtttccctacacaa

SEQ ID NO: 775273 - DNA, 654 bp, Homo sapiens
gctagaagcacctgtggactctggcagataagtagctgggtttatggtttggcaggctttaagggttatgtctggagggtctagcaataaggtctgatactttcataaatgttctcgtattatccactgcttcactttagcttctaggaccaccttcccttggtgtggggtcraaaacctgtaggtgccgttctaatgttagtttattagctttgcctgctagaaaagtggtagcagcaatagctctaagacatcaaggccaccctgaggccacctggtctatctgcttagaaaattaggctactggccttggaatgcaccccagttttgggacaagattacccaaggcctatgccttgctttttggtcacataaagaaaaattgtttatccaacttggggactcccacggctgcagcagagcccaatttctccttgagagtattgaaggtttgcttgcagttctcattacattctaggagctctaaatctttccctttagagtatcatataaaggcttggctacatgcccaaacctgggcacccataagcagcagtacccagccatctcctaaaaaaagcacacagtcaatttttggacagggacccttgggtgactaaaataacttttttatcttctagggatgttgatcag

SEQ ID NO: 775274 - DNA, 477 bp, Homo sapiens
aaaaggagtgttttggggctagtccatcatttgaagacaggagctcattgtattgaatcaggacagagtcatctgctcccacacccaatatgaagttaatactcctacctgctacttcaagagtcacctgaggctcttccatctctcgatagctaatagtccaatggaggtggaggtaggaagtatcaggccctgccacttttgagtctgctgrgctctgatgatggctcccttggaagcacagtacatttccttcggcagtggctgaccttcctacagaaggcaaattgatttatatcaaaggcacagtggcccagaggcacagactgggactttcaccttctcacttcctctgtgagggccaggggttaaggggttgcctctgaagtggtggagagcacaaggctgcagctagaagctgggcctcttgggagatttgctttattttacgttttctctgcccaattcctgtgatgg

SEQ ID NO: 775275 - DNA, 477 bp, Homo sapiens
aaaaggagtgttttggggctagtccatcatttgaagacaggagctcattgtattgaatcaggacagagtcatctgctcccacacccaatatgaagttaatactcctacctgctacttcaagagtcacctgaggctcttccatctctcgatagctaatagtccaatggaggtggaggtaggaagtatcaggccctgccacttttgagtctgctgagctctgatgatggctcccttggaagcacagtrcatttccttcggcagtggctgaccttcctacagaaggcaaattgatttatatcaaaggcacagtggcccagaggcacagactgggactttcaccttctcacttcctctgtgagggccaggggttaaggggttgcctctgaagtggtggagagcacaaggctgcagctagaagctgggcctcttgggagatttgctttattttacgttttctctgcccaattcctgtgatgg

SEQ ID NO: 775276 - DNA, 561 bp, Homo sapiens
ggcagcttcctgcagatatcagaaggagaccgtgctataaattaaactcctagcaatgcctgtccctttttggagtcagggtcaatgttagtgtatttcctcaaggtctaaattatccacccttgtaataaggctaggttttcatcttttccctgagtaattttccagactttatwaaaattaaaaagctgtatcacactttttttttattccttcacggagtcaaacgatcataattttttctctctatatcccattttcttcctaatttatttgtcttttctagattctagtcctcttctgggtcctagtcaggcactgctgtgcctcctacttgataggtctcatgcccctggttgcaggctgccaccctattagcatgtgctctagccaatcccatcatacactgcttttctaccatgcagcaggtaaacataaatatatgcaaatcctgcctggtcagatcatacgtcaaggttagccttttaaatttgtctatgaattttaccagaacctctgaaaactttttaagtttttccttgcatatggctaattcagttg

SEQ ID NO: 775277 - DNA, 561 bp, Homo sapiens
ggcagcttcctgcagatatcagaaggagaccgtgctataaattaaactcctagcaatgcctgtccctttttggagtcagggtcaatgttagtgtatttcctcaaggtctaaattatccacccttgtaataaggctaggttttcatcttttccctgagtaattttccagactttattaaaattaaaaagctgtatcacactttttttttattccttcacggagtcaaacgatcataattttttctctctatatcccattttcttcctratttatttgtcttttctagattctagtcctcttctgggtcctagtcaggcactgctgtgcctcctacttgataggtctcatgcccctggttgcaggctgccaccctattagcatgtgctctagccaatcccatcatacactgcttttctaccatgcagcaggtaaacataaatatatgcaaatcctgcctggtcagatcatacgtcaaggttagccttttaaatttgtctatgaattttaccagaacctctgaaaactttttaagtttttccttgcatatggctaattcagttg

SEQ ID NO: 775278 - DNA, 561 bp, Homo sapiens
ggcagcttcctgcagatatcagaaggagaccgtgctataaattaaactcctagcaatgcctgtccctttttggagtcagggtcaatgttagtgtatttcctcaaggtctaaattatccacccttgtaataaggctaggttttcatcttttccctgagtaattttccagactttattaaaattaaaaagctgtatcacactttttttttattccttcacggagtcaaacgatcataattttttctctctatatcccattttcttcctaatttatttgtcttttctagattctagtcctcttytgggtcctagtcaggcactgctgtgcctcctacttgataggtctcatgcccctggttgcaggctgccaccctattagcatgtgctctagccaatcccatcatacactgcttttctaccatgcagcaggtaaacataaatatatgcaaatcctgcctggtcagatcatacgtcaaggttagccttttaaatttgtctatgaattttaccagaacctctgaaaactttttaagtttttccttgcatatggctaattcagttg

SEQ ID NO: 775279 - DNA, 626 bp, Homo sapiens
aactgccacagggctggaggtgagacatgctggaggcaatactgctctttaaggcattgaggtgtttatgtatatgcacatcgaaagcacagcacttttttctttaccttgtttatgatgcagagacatttgctcacatgttttcctgctgaccctctctccactgttaccctattgtcctgccacatccmcctctctgagaaatgcccgataatcatcaataaatactaaggaaactcagagagtggtgccggcgctggtcctccctatgctgagcgctggtcccctgggcccactttttctctttactttgtctctgcgtctcttttcacaagtctctcgttccacctgatgagaaacgcccacaggtgtggagggacaggccaccccttcaatatggtgttcctattatcatctgtcacttcccagagagggcaaacattcaactttgccagctgataagaggccccactgcatgttgttctggtgaagctcgggtgttttgagagtggggtatgtacgtaagacaggactcgaagggcagggagaagatgatgaccggtcactagataaccctggaaaactagaagaaattaataacatgttgcacacctcactagaactgg

SEQ ID NO: 775280 - DNA, 626 bp, Homo sapiens
aactgccacagggctggaggtgagacatgctggaggcaatactgctctttaaggcattgaggtgtttatgtatatgcacatcgaaagcacagcacttttttctttaccttgtttatgatgcagagacatttgctcacatgttttcctgctgaccctctctccactgttaccctattgtcctgccacatccacctctctgagaaatgcccgataatcatcaataaatactaaggaaactcagagagtggtgccggcgctggtcctccctatgctgagcgctggtcccctgggcccactttttctctttactttgtctctgcgtctcttttcacaagtctctcgttccacctgatgagaaacgcccacaggtgtggagggacaggccacsccttcaatatggtgttcctattatcatctgtcacttcccagagagggcaaacattcaactttgccagctgataagaggccccactgcatgttgttctggtgaagctcgggtgttttgagagtggggtatgtacgtaagacaggactcgaagggcagggagaagatgatgaccggtcactagataaccctggaaaactagaagaaattaataacatgttgcacacctcactagaactgg

SEQ ID NO: 775281 - DNA, 534 bp, Homo sapiens
tgcccctggcctgttattttgatagagatggcatgaaatgtatagattgctatggattgtatggacattttaaaaatactgattcttccaatctgtgaacataaacatatctttccaattttggggtcctttttcatgtcttttatcagtgttttacagttttaaytgttgagaacttttatttctttggtaaattcccacacattttatttgtggctactgcaaatagtattacatttttgaattctttttcagtttgttgactgttggcatatagaaatcctactgatttgtatatgttgatttgtattctgcaaatttactcaagttattacttctaatagtttttggtggatgtattaggccattctcatattgctataaaaagtaattagtgactggttaatttataaagaaaataggtttaattggttcatggttctacacgctatacagaaagcatagcactggcttctgcttctggggaagcctctgacaactgacaaggcgaaaaataaatctggtgctcgcaca

SEQ ID NO: 775282 - DNA, 534 bp, Homo sapiens
tgcccctggcctgttattttgatagagatggcatgaaatgtatagattgctatggattgtatggacattttaaaaatactgattcttccaatctgtgaacataaacatatctttccaattttggggtcctttttcatgtcttttatcagtgttttacagttttaattgttgagaacttttwtttctttggtaaattcccacacattttatttgtggctactgcaaatagtattacatttttgaattctttttcagtttgttgactgttggcatatagaaatcctactgatttgtatatgttgatttgtattctgcaaatttactcaagttattacttctaatagtttttggtggatgtattaggccattctcatattgctataaaaagtaattagtgactggttaatttataaagaaaataggtttaattggttcatggttctacacgctatacagaaagcatagcactggcttctgcttctggggaagcctctgacaactgacaaggcgaaaaataaatctggtgctcgcaca

SEQ ID NO: 775283 - DNA, 618 bp, Homo sapiens
gtcttttcattctagttaattaagatgtattgttcaaagaaattcaggaagaggagccaagatggctgaataggaagagctccagtctacagctcccagcgtgagcgatgcagaagatgggtgatttctgcatttccatctgaggtaccgggttcatcgcactagggagtgccagacagtgggcacaggtcagtgggtgcacacaccatgtgcgggccaaagcagggtgaggcattgcctcactcgggaagtgcaaggggtcagggagttccctttcctagtcaaagaaatgggtgaaagaaggcaccgagaaaatcgggtcactcccacccaaatactgcacttttccgacgggcttaaaaaacggtgcaccgggagattatatcctacacatggctcacagtgtcttacatccatggagtctccctgattgctagcamagcagtctgagatcaaactgcaaggtggcagtgaggctgggggaggggtgcccaccattgcccaggcttgcttaggtaaacaaagcagccgggaagctcgaactgggtggagcccaccacagctcaaggagacctgcctgcctctgtaggctccacctctggcgacagggcacagaca

SEQ ID NO: 775284 - DNA, 647 bp, Homo sapiens
tggagtgctttgaggcctatggtgaaaaggaaatatcttcacataaaaactggactgaagaattgtgagaaacttcctggtgatgagtgggttcatctcatagagttgaaccttttttctgattgagcagtttggaaacactctttttgtagaatctgaaagtggacatttgtagctcttagcggcctatggtagaaaacgaactgccttcacataaaatctagacagaagcaatctgataaacttctttgtcatgtatgcattcatctcacagagttaaacctttctttcgattgagggtttttgaaactctctttttgtagaatcttcaagtggatatttggagcgctttgaggcctctagtggaaaaggtaatatcttcacataaaaactggactgaagagttgtgagaaatttcgtggtgatgggtgggttcakctcatggagttgaaccttttttctgattgagcagtttggaaacactctttttgtagaatctgcaagtggacatttctcacgctttgcagcctatggaagaaaacttaataccttcacataaaatctagacagaagcaatctgagaaacttctttgtattctgtacattcacctcacagtgttaaaccattcttttgattgagcagtttt

SEQ ID NO: 775285 - DNA, 483 bp, Homo sapiens
gttaagaaggctcgatgtgaaatgaatcattccaggggagctaaatcccgaccttatctaattctgtatcctgaggctgattaatttaaactcaaaaataaaataaacatcatctttaaatagggattaaatactcagcggggtccttagttgaacaaactgacatacactttatgttatggattcaaggggcccagggtggggcgagggctatctgtggggatgctagctgagctaatcagagaaaatcgccagtgctcctggattccggagtgcattcacctttagcttcttctctggatacccrcagaaaaccaaagagccaccctgtggcaggatcttcacacaggaagtgggcttgtgccctgtgtccccgagggagaaagaattatggagggagtgggtgaagagtttggaggaaacccctgatgttcttagaaaacagtaggaaagagattcccttggctgggcattgttcccaaa

SEQ ID NO: 775286 - DNA, 582 bp, Homo sapiens
agaggttagcagcatgagcaagctcacacagtgaggggtggagcttggatttgaatccaggtctgtctaacctcaaagactgaattggggatgaaaataagttgtcattgttgtttgcctgtcatccaggtgatgtaactcttgtctaggctctgcctatgggggctttgtgacatatctctgcactgatcacccaggtgatgggactcttgactaggctcttctatccttggattgtaaccttgcaggatcttgaactcatatcctttcagggatcataaaagtgagcayatcaaagctgccacgataaagttgtggaaaagtgggcaatattgccaaatgcaaaatatctggactatattttggtctgagatcaccatttgagattcctggaagatagggaatatggagaccaattcccatagggatgttgtataagactccaagccctaagtcaatgatcttaaccctgtggatcagcactctccatgtaatggggcatcttaacccattttgtgcggctataacagaatatcatagactagggaatctataaagaaaagaaatttatttcttagagtt

SEQ ID NO: 775287 - DNA, 582 bp, Homo sapiens
agaggttagcagcatgagcaagctcacacagtgaggggtggagcttggatttgaatccaggtctgtctaacctcaaagactgaattggggatgaaaataagttgtcattgttgtttgcctgtcatccaggtgatgtaactcttgtctaggctctgcctatgggggctttgtgacatatctctgcactgatcacccaggtgatgggactcttgactaggctcttctatccttggattgtaaccttgcaggatcttgaactcatatcctttcagggatcataaaagtgagcacatcaaagctgccacgataaagttgtggaaaagtgggcaatattgccaaatgcaaaatatctggactatattttggtctgagatcaccrtttgagattcctggaagatagggaatatggagaccaattcccatagggatgttgtataagactccaagccctaagtcaatgatcttaaccctgtggatcagcactctccatgtaatggggcatcttaacccattttgtgcggctataacagaatatcatagactagggaatctataaagaaaagaaatttatttcttagagtt

SEQ ID NO: 775288 - DNA, 582 bp, Homo sapiens
agaggttagcagcatgagcaagctcacacagtgaggggtggagcttggatttgaatccaggtctgtctaacctcaaagactgaattggggatgaaaataagttgtcattgttgtttgcctgtcatccaggtgatgtaactcttgtctaggctctgcctatgggggctttgtgacatatctctgcactgatcacccaggtgatgggactcttgactaggctcttctatccttggattgtaaccttgcaggatcttgaactcatatcctttcagggatcataaaagtgagcacatcaaagctgccacgataaagttgtggaaaagtgggcaatattgccaaatgcaaaatatctggactatattttggtctgagatcaccatttgagattcctggaagatagggaatayggagaccaattcccatagggatgttgtataagactccaagccctaagtcaatgatcttaaccctgtggatcagcactctccatgtaatggggcatcttaacccattttgtgcggctataacagaatatcatagactagggaatctataaagaaaagaaatttatttcttagagtt

SEQ ID NO: 775289 - DNA, 553 bp, Homo sapiens
ggccaggctgcttctttaagtgagaccaaattccatccctcctcactggacagggcctctccattagaattttagcaactgcagccagagttctatggacagaactctgatttctccctgggaggaagtccccagggaggggggtagctgctgtctccccagttcagccaactgagcctttccagcctcttggctttggagactcctgggggtcagcacaacacacctgctctgccaaagggcagccagactgcttctttaaacagtccctgatcctgttcctcctgactgggtgagacctcacaacaggagtctccagaaaccccctacaggagtgttccagctggcatcaagtcaataccmccttggactggtgctcccagaggaaggatcaggtttccagctttgctgtttcacagacttcactggtgatacctccaggtgcaggagagactgaggtgactagggtccagagtggacccccaaaatccacatgagccctagccctagggaagagtggtctgttaaaaacaaacagaaaacaacaacaaca

SEQ ID NO: 775290 - DNA, 635 bp, Homo sapiens
acaaacaaatggaagaacattccatgctcgtgggtaggaagaatcaatgttgtgaaaattaccatattgcccaaggtaatttatagattcaatgtcatccccattaagctaccaatgactttcttcacgaattggaaaaaaaacactttaaagttcatatggaaccaaaaaagagcctgcattgccaagtcaatactaagccaaaagaacaaagctggaggcatcacgctacctgatgtcaaagtatactayaaggctacagtaaccaaaacagcatggtgctggtaccaaaacagagatatagaccaatggaacagaatagagccctcagaaataatgccacatatataaaactatctgatctttgacaaacatgacaaaaacaatcaatggggaaaggattccctatttaataaatggtgctgggaaaactggctagccatatgtagaaagctgaaagtggatcccttccttacacattatacaaaaattaattcacgatggattaaagacttacatgttagacctaaaaccataaaaacactagaagaaaatctaggcgataccattcaagacataggcatgggcaaggacttcatgcctaaagcaccaaaagcaatggcaacaaaggccaa

SEQ ID NO: 775291 - DNA, 635 bp, Homo sapiens
acaaacaaatggaagaacattccatgctcgtgggtaggaagaatcaatgttgtgaaaattaccatattgcccaaggtaatttatagattcaatgtcatccccattaagctaccaatgactttcttcacgaattggaaaaaaaacactttaaagttcatatggaaccaaaaaagagcctgcattgccaagtcaatactaagccaaaagaacaaagctggaggcatcacgctacctgatgtcaaagtatactataaggctacagtaaccaaaacagcatggtgctggtaccaaaacagagatatagaccaatggaacagaatagagccctcagaaataatgccacatatataaaactatctgatctttgacaaacatgacaaaaacaakcaatggggaaaggattccctatttaataaatggtgctgggaaaactggctagccatatgtagaaagctgaaagtggatcccttccttacacattatacaaaaattaattcacgatggattaaagacttacatgttagacctaaaaccataaaaacactagaagaaaatctaggcgataccattcaagacataggcatgggcaaggacttcatgcctaaagcaccaaaagcaatggcaacaaaggccaa

SEQ ID NO: 775292 - DNA, 573 bp, Homo sapiens
tttgttgttcccaccagcaacagtggacaaatcttatacttcccggaccatttgatggaacactcagaaaagagttgcctcagtagtgtggaagattagatctaggctgaggctgctaaggtcctacttaacaagacctcaaagaaaaccatcaaagaaccaaaatctttccagataatttaactgcatcctagaacatagctcaataatatttataggaacccaacaatatccaatgcacaataagataaatttcactttgtctgccawtcagctgaaaattaccagtcatatatagaaaaaggaaatgtctcaataatgagaagaaaacttgatcaatagatacagaaatggcaaataagatggaattagtaggcaacaatattaaaacagttattgtaatgataacattccacaagaagaaggtaaagggaagctagaacatggaagtagagacatggaagacccagcttgaatttctagaggtgaaaaatacaatgtctgagatgaaaaatatactaaatggcatttaaaatagaatagatattatataaaaaaggattggtcaactgg

SEQ ID NO: 775293 - DNA, 579 bp, Homo sapiens
tctatgtgggtcaggtgggtctcgaactggccacctcaggtgatctgcccaccttggcctcccaaagtgctgggatgacaggcgtgagcaattgcgcccggccagctacgtttttttttttaattttctatttccatctatttattattattattattttttgagacggagtctcgctctgttgcccagactggagtrcagtggcgtgatggctcactgcaagctctgcctcccgggttcacgccattctcctgtctcagcctcccaaatagctgggactataggcacccatcacagtgtctggctaattttttgtattttgagtagagacggggtttcactgtggtagccaggatggtctcgatctgacccccgtgatctgcccacctcggcctcccaaagtgctgggattactggcgtgagccaccgcacccagcctatttatctatttattaattttgagtccaggttatgaaaccagttagtttttgtattttttagagacgaggtttcaccatgttgccaaggcttggatcgagggatccaccttccctcacctcccaaagtgcagggatgaca

SEQ ID NO: 775294 - DNA, 378 bp, Homo sapiens
aggggatccaaggggatcattgagctctgaggcttatgagagaagagagagaggtctaagactttttgtgtataaatttatgggttccaagtgcaattttgctgtaagcacggatggcatagtggtgaagtcagggcttttagggtatycatcactggaataatgcacattgtacccattaagtaatttctcactgttcacctcttccatcccctcaccctgctgagtctccattatcattccactctctacatcaatacctacacatcttttagcacccgcttatgagtgataaaatacgatgtttactctgtgtctggtttgtttcacttataacaatggcctccagttccatccatgtgtctgcaaaaattatga

SEQ ID NO: 775295 - DNA, 500 bp, Homo sapiens
aggggatcattgagctctgaggcttatgagagaagagagagaggtctaagactttttgtgtataaatttatgggttccaagtgcaattttgctgtaagcacggatggcatagtggtgaagtcagggcttttagggtatccatcactggaataatgcacattgtacccattaagtaatttctcactgttcacctcttccatcccctcaccctgctgagtctccattatcattccactctctacatcaatacctacacatcttttagcacccgcttatgagtgataaaatacgatgtttactctgtgtctggyttgtttcacttataacaatggcctccagttccatccatgtgtctgcaaaaattatgattctattgttttttacgcctgaatagtatttcattgtgtatattttctacattttctttctccaattatttgttgatggacattaggttgattttatatctgtgctactgtgaatagtgttgcaacaaatat

SEQ ID NO: 775296 - DNA, 562 bp, Homo sapiens
tactcaggaggcctaggtagcttaacagtattagcttcactcttgatccatacaggaaaagtttgttttccttgcactgagacaagaaaaatatgaattagatagcactttggtttctctttctgtgttgatcttttccaaattaattttttttttgtcttttcctgagggactaatgcagcttctctccatcctgttgccttcatrtggggcacagtcttttatcaacattttcagtgattcccagatcaagtttctttgtcatgtctaccttcctagcttcatgctgtatggattagaagggactcttggaagtggaatctaggctggccagaaagcacagaaatctgtgtcattaaataaagcaggcaattcatactggctgaaaaagttatgacctcatcccccttttcaggaaaacctaataatggaggaaactgtctatgtaaaaaaccatcacctccctctttcctagtgttagttatggacagaaaggcttaaagacaggcagggagggtagaaggagaagtgatagcagataaattttccacagactcatgcc

SEQ ID NO: 775297 - DNA, 503 bp, Homo sapiens
ataagaacagatacatagttcagtggaatagagaaaaaccaaaaaataaatctaagcatatgcatttaatttatttttgacaagtgcctcaataatgcacagtgggaaaaggatagtctcttcaataaatggtgtatggaaaacrgaatatccacatgcaaaataatgaaattaggctgttacattacagtatattcaaaaacaaactaatgtgttaaagacctaaatgtaaaatctgaaatcataaaactccaaaagaaaatatagaggaaaactccttgacattcaacttggcaatgattttttttgatagaacaccacaatgataaaccacaaacacaaaaataaacaagtgggaatacaaaaaattaaaatgctcagcacagcacaggaaccaaccagcaaaactagaaggcagactgtggattggaaaaaaaagtatttgtgaaccacatataagataagggattaatattcaaagtctataaggaactcccacaatt

SEQ ID NO: 775298 - DNA, 503 bp, Homo sapiens
ataagaacagatacatagttcagtggaatagagaaaaaccaaaaaataaatctaagcatatgcatttaatttatttttgacaagtgcctcaataatgcacagtgggaaaaggatagtctcttcaataaatggtgtatggaaaacggaatatccacatgcaaaataatgaaattaggctgttacattacastatattcaaaaacaaactaatgtgttaaagacctaaatgtaaaatctgaaatcataaaactccaaaagaaaatatagaggaaaactccttgacattcaacttggcaatgattttttttgatagaacaccacaatgataaaccacaaacacaaaaataaacaagtgggaatacaaaaaattaaaatgctcagcacagcacaggaaccaaccagcaaaactagaaggcagactgtggattggaaaaaaaagtatttgtgaaccacatataagataagggattaatattcaaagtctataaggaactcccacaatt

SEQ ID NO: 775299 - DNA, 503 bp, Homo sapiens
ataagaacagatacatagttcagtggaatagagaaaaaccaaaaaataaatctaagcatatgcatttaatttatttttgacaagtgcctcaataatgcacagtgggaaaaggatagtctcttcaataaatggtgtatggaaaacggaatatccacatgcaaaataatgaaattaggctgttacattacagtatattcaaaaacaaactaatgtgttaaagacctaaatgtaaaatctgaaatcataaaactccaaaagaaaatatagaggaaaactccttgacattcaacttggcaatgattttttttgatagaacaccacaatgataaaccacaaacacaaaaataaacaagtgggaatacawaaaattaaaatgctcagcacagcacaggaaccaaccagcaaaactagaaggcagactgtggattggaaaaaaaagtatttgtgaaccacatataagataagggattaatattcaaagtctataaggaactcccacaatt

SEQ ID NO: 775300 - DNA, 645 bp, Homo sapiens
ttgttccctgttaatgttgttacaaatttgatggcttaaaacaccacagatttaatctattgtagttctggaggttagaagtcttgtcctgaatgtagctgggctaaggttaggtgttcacatggttgtgctccttttggaagctctagaagataattaatttcctgtttttcccaatttctagaaaccacccactttctttgactgaagtccctttcattcatcttcaaagccagtcacttcaaagtgagtcctttccacaccatcatgtctctggatctctacctggttttctcttccacttttaaaggactcttgtgattacattagggctgctcaggtaatccaggattacctttcattataatatccttaacctaatcacatcaagaaagttcttcyccccaggtaaggtaacaaattcacaggtatttgttacatattcttatttttatttatttatttattgagatgcagtcttgctctgtcacccaggctggagtgcaatggcaggatcttggctcactgcaatctccgcctcccaggttcaagcgattctcctgcctcagcttcctgagtcactgggactacagatgcacaacaccactcccagctaatttttgtatttttagtagagatggggtt

SEQ ID NO: 775301 - DNA, 594 bp, Homo sapiens
ttcatacagtagccttaaaccagaatgttcctaaaactccaaactttgccttgaggtatctccaggttcttcctctgaatgagttcacttattagtgaaagtgatattttcatgagcatttcatagaagtatgcataaatccaatgggtatagagaaagaaagagaggagtggtaaaccctaagcaaggaagtctagaaagacataagcagaaataatacatattagttgaaggacgaaaagagatgaaatccactgggtgctgaagtgtaagcagatgagaatttaataacgagttctccaaacttaaaaattgacatttggcaaaatgaaatctattgatttatttcctatattatagcccagagtagaaatcaggaaaaatacaaataggtagatagaaygtgtgtgccaaaggtcatagaaaagtttatttaaaagttgaagaaataaataaacttaataaatgaggtaggaagtatttattgaaaattgcataaaacactgcattttaaaatgtaacatgatttcatttcaaatatgattttaacaaagatatggaattgtaaatttattgacaattattaggaagtgg

SEQ ID NO: 775302 - DNA, 552 bp, Homo sapiens
taataatactgtattgcttacttgaaattgaattaaagatcagattttaaatgccttacctcacttccagtgtgcacacacacacatacacattgatttatcttcatccacacctatggtctcctactgagttctctctaagtacatcactgaggaagaaaatatctgcatgatattytgacacatatgaaagggtattgttttattatttccatggcaatttgagatgatactgaaagatggtaaaaggaaattcttgaactgggtagatattttctactacatcttggctactttgcttagatgaagagatggccagaggtgcaagtctgtattaaatttggggcagtggctcatggtttggggaggtagacaaaatatgggaagaatgtgattagaatatgccaaagaagtttaaagaagagacacatgaatgtatctttcacaatgagtataaagtatagaataccagtgtcccatgtatcttgtctgtagacagtgctcattgctgagaaggggctcagaattcttccttgagctaagcaagatggg

SEQ ID NO: 775303 - DNA, 535 bp, Homo sapiens
tttaaatttaattattatcttttgtaattcaggatccagcatttgtgaaaatcacagaagatcatatgagaaggcaccattttaatgaaagaacaagaaacctgaaattcaataacaaagcctgaaggctagaaaaggttatgaaatagcccatgataagcacaggtggaaaattgacacaaagagttttctgctatgccaaataaattttgttgtctttgtgtgtgtgtatgctgcgtatcttaaaaccataacattttcactgacattgaatcatcctcctcagtaactgagggaaacttccttgggaacccaccttaaattttaccatctttggcagcttttgaaatgactctatcttcaaattcttgaatttccacattctcttctctgmctttacctttgattattttgctctcagtaaatctgcatctcagtcttcctcttctcagttctatcctagtgtaccagcccattaacccctgtttgattttatttggctctcttcctccatggggctacacgtaagcctcat

SEQ ID NO: 775304 - DNA, 574 bp, Homo sapiens
tagcattactcaagggaaaaataatttccaaaagaactgaatatatgaaactgttatcccatgacagaaagttaataggcaagcggaaggtgttatttggtggctgtgacaaagcagtatgagagattctaaatttttaagtgttctttttttgtaaattaactttacccgtcagaaatttttcctgtagaggagagctgaagatcggatgtctctcraaatcagagaaaaaaatgaacccaaaggcagcagggctagttatgtctggcaatcacgaggaacctgaacaagttcagtttattattcactaggaagttagggagtcacagaatgaacagatgtataaatttctagtacaagatattcagcttctattacatgaaagcaggctgaagattttagggtgtttttctcagaggccccatagtgccaaaatgtaaaccaagagaaaactctaaataaattgctttgggattattttagctttcatattataatttaagccaacatttgcgtgtcaaaatctagacactcccaacattaattgcaactcaaccaagccacccatccaaca

SEQ ID NO: 775305 - DNA, 640 bp, Homo sapiens
cactgtgaatcctaaatcagctctccccagcctattcaggacactcatcacggctgctcatttatgatgcttgccataaggaggaagtgaggtgcagtagaaagagcatgagctaagtagagagacctgtgtatccttgagcaagtcacttgacctctctaaacatcaattgcttcgtytgtaaattagaaacaagatctactttgaagacttgagtgcatttagaaacacagtgagtgacaaaaagtgagcactcaaaaatgcttgtttcctctgtcttcttcaaaatgcgtatgcaaaggaatactctgacagtgtcactgaaaatttcaaaatagaccttgcatcctttcaatagccttcgtatgctcttattgaccagggtctgttgtgtgtcatggaggaaaaactttttctctactctgttaggtcagcgtctaggggcctgtgaattaaactagcaaaagacagattcacaggagaaaaatcacacatttaaaattaatatttatgtgcatgagcattcacaaaaaagaaataatactcaaaaaggcagttaaacttgggggcctgtatactattttaataaaagaggtttggacttaaagggaaaataaattgtggggaagtgactaggaaa

SEQ ID NO: 775306 - DNA, 640 bp, Homo sapiens
cactgtgaatcctaaatcagctctccccagcctattcaggacactcatcacggctgctcatttatgatgcttgccataaggaggaagtgaggtgcagtagaaagagcatgagctaagtagagagacctgtgtatccttgagcaagtcacttgacctctctaaacatcaattgcttcgtttgtaaattagaaacaagatctactttgaagacttgagtgcatttagaaacacagtgagtgacaaaaagtgagcactcaaaaatgcttgtttcctctgtcttcttcaaaatgsgtatgcaaaggaatactctgacagtgtcactgaaaatttcaaaatagaccttgcatcctttcaatagccttcgtatgctcttattgaccagggtctgttgtgtgtcatggaggaaaaactttttctctactctgttaggtcagcgtctaggggcctgtgaattaaactagcaaaagacagattcacaggagaaaaatcacacatttaaaattaatatttatgtgcatgagcattcacaaaaaagaaataatactcaaaaaggcagttaaacttgggggcctgtatactattttaataaaagaggtttggacttaaagggaaaataaattgtggggaagtgactaggaaa

SEQ ID NO: 775307 - DNA, 640 bp, Homo sapiens
cactgtgaatcctaaatcagctctccccagcctattcaggacactcatcacggctgctcatttatgatgcttgccataaggaggaagtgaggtgcagtagaaagagcatgagctaagtagagagacctgtgtatccttgagcaagtcacttgacctctctaaacatcaattgcttcgtttgtaaattagaaacaagatctactttgaagacttgagtgcatttagaaacacagtgagtgacaaaaagtgagcactcaaaaatgcttgtttcctctgtcttcttcaaaatgcgtatgcaaaggaatactctgacagtgtcactgaaaatttcaaaatagaccttgcatcctttcaatagccttcktatgctcttattgaccagggtctgttgtgtgtcatggaggaaaaactttttctctactctgttaggtcagcgtctaggggcctgtgaattaaactagcaaaagacagattcacaggagaaaaatcacacatttaaaattaatatttatgtgcatgagcattcacaaaaaagaaataatactcaaaaaggcagttaaacttgggggcctgtatactattttaataaaagaggtttggacttaaagggaaaataaattgtggggaagtgactaggaaa

SEQ ID NO: 775308 - DNA, 640 bp, Homo sapiens
cactgtgaatcctaaatcagctctccccagcctattcaggacactcatcacggctgctcatttatgatgcttgccataaggaggaagtgaggtgcagtagaaagagcatgagctaagtagagagacctgtgtatccttgagcaagtcacttgacctctctaaacatcaattgcttcgtttgtaaattagaaacaagatctactttgaagacttgagtgcatttagaaacacagtgagtgacaaaaagtgagcactcaaaaatgcttgtttcctctgtcttcttcaaaatgcgtatgcaaaggaatactctgacagtgtcactgaaaatttcaaaatagaccttgcatcctttcaatagccttcgtatgctcttattgaccagggtctgttgtgtgtcatggaggaaaaactttttctctactctgttaggtcagygtctaggggcctgtgaattaaactagcaaaagacagattcacaggagaaaaatcacacatttaaaattaatatttatgtgcatgagcattcacaaaaaagaaataatactcaaaaaggcagttaaacttgggggcctgtatactattttaataaaagaggtttggacttaaagggaaaataaattgtggggaagtgactaggaaa

SEQ ID NO: 775309 - DNA, 566 bp, Homo sapiens
ttgtggttcttagctatcaaggatccgatctgtaatttctgcgtgcagagattccaaatagttattatcatatttctcccactgttcttagttgttatctgtaaaagggttagtccaaaaaaagttacttccccagtactggaatcagaaattagattgtaacatattgaatagaaataattttatgagcacttgttgatagttaagatatatatgtatatgtatatgcatatcttatatatcaatatgtactctgtgtgtgtgtgtgtgagagagagagagagagaagaaaaaatagcttcttttaatggaaggaatgaacaatttagaaaattgctactttgtaatctctctaatgtgaaaattacttcaggcacaggccatcaaagataaaaggctgttagagaacaraatatgtcctttaaccggaatctaattatgacaaaacaagtatacaaattttgactactcatcatttcagaaagtaaagaataaagaagatcatgttatttacaatgcattaagaatcagactgataacaggttgaatacaagaatacaatattt

SEQ ID NO: 775310 - DNA, 556 bp, Homo sapiens
aatcattcaagagatagaaataaaaggcatctgaattgaaaagaagaaagttaaattgcacctctttgcagatgatataattttatctctagaaaaacctaatgactccaccataaaactctgagacctgataaataaagtcagtaaacttacaggatacaaaaatcatcaaacaagattgagtagcatttctatataccaataatgaactagttcagaaagaaattaagaaggcaatcccatttataagagctacaaaaaatatctaggcataaatttaaccaaggaggtaaaatatccctagaartaaaacaataaaatgctgatgagagaaactgaaaagagtaaagtaaatggaaaaacattccatgctcatggattggaagaattagtattgggaaaatgacaatactatacggacatagaaaattctaaaatttgtatagaaccaaaaaaaaaaaaaaaaaaagaccttcaatagccaaaacaatcctgagaaaaaagaacaaagctggaggcatcatactacttgacttcataatatattctaagagca

SEQ ID NO: 775311 - DNA, 556 bp, Homo sapiens
aatcattcaagagatagaaataaaaggcatctgaattgaaaagaagaaagttaaattgcacctctttgcagatgatataattttatctctagaaaaacctaatgactccaccataaaactctgagacctgataaataaagtcagtaaacttacaggatacaaaaatcatcaaacaagattgagtagcatttctatataccaataatgaactagttcagaaagaaattaagaaggcaatcccatttataagagctacaaaaaatatctaggcataaatttaaccaaggaggtaaaatatccctagaaataaaacaataaaatgcygatgagagaaactgaaaagagtaaagtaaatggaaaaacattccatgctcatggattggaagaattagtattgggaaaatgacaatactatacggacatagaaaattctaaaatttgtatagaaccaaaaaaaaaaaaaaaaaaagaccttcaatagccaaaacaatcctgagaaaaaagaacaaagctggaggcatcatactacttgacttcataatatattctaagagca

SEQ ID NO: 775312 - DNA, 656 bp, Homo sapiens
ccaaagtaaaaatggacaaatgggatcccatcatgttaaaaagcttctgtacaacaaaggaaacaatcaactatgtgaagagacaactcatgggatgggagaaaatatttgcaaactagtcatctgacaagggattaataaccataatatatgagaagctcagacaactcaataaaaatctaataatccaattaaaacctggggaaaacatctaaataggcatttcccaaagcagacatacaaatggcaaacaggtatatgaaaagatgatcaacattattaattatcagagaaatgcaaaaaaaactacaataagatgtcatttcacctcagttaaaatgacttatattaaaaagacaggcagtaacaaattctggtaaaaatgtggagaaaagagracttttgtatactattggtaggaatgtaaattagtacaatcactataaggaacagattagagattcctcaaaaaactgaaaataggttcttccagccccagatagtggattggagatgttgttaacatgtctcttcttggaaagaccaaagagtgtgtcaaaactcatcgtgaacatttttccaagaagcagcacagcaacataatgggaaaacggaaagaaatcagacactttgaaagaagtggcaggctgcagcct

SEQ ID NO: 775313 - DNA, 602 bp, Homo sapiens
ccatctcagcaccgtttctttctctgaagaaaaagctgtttggatccatctgactttagtcaggttgcaggctgagaggaagaaaaaccaccatgaggagggtgggggttagaagatcaagaggccatgagaaaagggaaaaggagagagcagtcacagaggaaggctctcttatgcctaactgaggtggatgcagtgtggatgacagcagacagaggacataaagtaaagaatcgtttctgccattctcaggattttgtgtacatgcctgactgtctaatgataagacccctgaggatggactctctgcctagcttttgtttcaatatcttgtaaaaatgcttccagatttgaygaagtatctgcagagactatagaagaaatagcatctgattgtgtaactcttttgttgttgttagtctgataagacacacagcctgcagtacgtgaagtgaagcaatattttcaccacacagcaggctgttgcagaaaaacccttcatttcaagtgtgcacctggcttggtctgtggaactgaccaaggtataggtataagtcttaggggagggcaaccagcctgatggagggcaatgaaccaatttt

SEQ ID NO: 775314 - DNA, 636 bp, Homo sapiens
tactttgtaccttttgtacataaaaagaggggacaaataaatttagttcctaaaaggactctttgggctatagaagttaccattactgttcttctcaggtgtatttctgtccctttaggcataaaggaaggacagagaagccaaatagagttttgcaagtacagagggaaatgagtaaagacttaggaaatggaatccattccatttggcaacggtatgcaaaaagatgaaaacaacaaactatagcctagaaaggtagttttgaaacatgtaattcactgagtaattagatttaacaatacttgaatataaaatagacaaaggcatgaagagatcttttcttaaaaaaaatgaaaaaaattcaagaatttttattgctaaaactaaatatatattagccttccaggcatggtggctcatgcctataatcccagcactttgggaggctgaggcaggtggatcacttgaygtcaggcatttgagaccatcctggccaacatggcaaaaccccgtctctattaaaaatacaaaaattagccaggcatggtggtgcgcacctgtaatcccagctactaggaaggctgaagcaggagaatcacttgagtgcaggaggtggagttgcagtgagctgagatt

SEQ ID NO: 775315 - DNA, 554 bp, Homo sapiens
taaattacccagtcttgggtatttgtttatagcaatgcaagaacagactaatacaaccaccatgaggctaaatccaatacattttaggttctaaccttttgtaacttctcagtgtgagttcttgaacactctctttgtagccttcagtttctctggcaatatactctcttgagttccctcctgcctctctcaccatatgaccatgtcttttcttgactcatcctcctctacctagccactaaaaattgttcccatagccaggtgccagtgactcacacctataattctaacattttgggaggctgaggcaggaagatcrcttgagcccaggagttcgagaccagcctgggcaacatagcaagaccctgtctctataaaaatagtaataataataataaaattgtcccccaaggctttatcttatgatctggccttgccctacactctttcctcatatgttgtcatccatgcacattgcctacaatgactctcaattcatatcgccagcccagatcattctgtgtggtacaaatttatgtatccaattacctact

SEQ ID NO: 775316 - DNA, 624 bp, Homo sapiens
acttccctctcctgccaccatttccttaattcctgaaaatcactattctgttctccatttctataattttgtcatgtcaagaatgttatagtagtggaatcatacagtatgtaacattttggggattgacttttttactcagcataattctttgtagattcattcggcttgaygcacacacatcattagtttgttcctctttattactgaatggtattccatggcatggatgcatcacactttagacagccattcacccattgaagaacatctgggttgtttccagttctgcctattacaaataaactgtctataaacattcatgtacacgtttttgtattaatatatataatcatttatctggggaaaatgcccaggggtatagttgctgggtcacacagtagttgtgtatttagcttttttaaaaactgccaaaatcttttccagagtagccgtaccattttacacttccaccaataacatataagtgattccatttctctatatccttgccaacatttggtgtgtcattatctcttagccattctggtgggtatgtagtgatatctcattgtggttttaacttgcacttccccagtagctatgatgtcgaacattttatta

SEQ ID NO: 775317 - DNA, 635 bp, Homo sapiens
ttgagtgttctattcaaattttatgtaatcagaaacctattttaaggcataaaattagaaaaaaatttaaaaattattaacttcaattaacctcaaataaatagaattgtattgtatgctccactgcctttgttctactcagctttttcagtttgcggtttaaagcctccatatttcttttcaatgtttaaaaagacatgctgttttcattttccctttcctttaaaaaatggcagaataatctattkaaaaacaaagaggcaaaaactccttgaactatttttcctctcctttaaaacagacctatatttggtgtatgtatcttttaagtttgcagtatgtgagaaagaggaccgtaatcataaagttctttttttaaaataactaggaatgacagagtgatttatccccatgggaagtgcaataaacatattgtatagtatatatgaccttatgctttacttggtgcccctaaaagactgaattatattcattgatctattttaatacagcaaactacaatttaacgttaaaacaaatttgatgctcaaagcacttctgtagaagatacaaaagataaatgtttgaatcttacccagatcactataggcaacaactaagcatataaactacag

SEQ ID NO: 775318 - DNA, 492 bp, Homo sapiens
gtagttgcctagggcttgggagtaacagcaggattaactgtaaatgggcacaagggtttggggtgatggaaatgttctaaagctggatagagtgaatagtttcacaactctaatttactaaaattatttttcacttatgggtaaatttcatggtaagtaaactgtaccttaataaagctgtaaaaaaccaaatgattttgaacaactagaaatgtattctagaataaatgaagtttattcagagaaaagcattttggttctcctatgaccaaacttgttgagyccggttaggcaaaattgtaacaagtatattttctaacacactgtacgttaaaaggaactctcatcaggagcaaatgataattgatagagaaataaaaactcttaagtatagcaggcaaggaccatttaatgtcagattatcttgtacaagtcagtagcatctgaggccatcttgacataaataaatctgtataattatcaattacaatg

SEQ ID NO: 775319 - DNA, 634 bp, Homo sapiens
cagtgtgccgccactcccagctacttattgtatttttggtagagacaaggtttcgccattttgtccagactggtctcgaactgagctcgagcgatccacctgcctcggcctcccaaaatcctgggattagaggcttgcgccttctactgtgtctgtatgtatccagatacatcagaacttttcttaagccaattcttactttattttgctataatttttttttcttttagggagggggagtgaatgtagtgaatgttaccaaaaactttgcgtttaatatggtattytgaatatctgttaagaatatgcttttgtttagacttttggtttgattttagtggatcttcttacgaaatatttctacagtgccatgtaacatagtaactagcactttataaaataattacaatgtaattagagtttttcacaccttgttttagcatttgctttatccatttattgaatttgtttttttttttgtcttttatacacttgtattgttaatatctaggcctaatataatgggaaataagaggaagactaaatagttggcagctttcggatattaagaaacagattgttaaggccatctagaagttaagtaatagttaataaaaaaccatacaaataacat

SEQ ID NO: 775320 - DNA, 643 bp, Homo sapiens
tcacacaaataaaatgattttggatccttatcttacaccatacccaactattcactcaaaatggattaaagactgaagcatgaggtgcaaaagcatacaacttctagaagaaaacacaagggaaaatctccataacattgatcttggtgatgactattgggatatgacaccaaatgcatagaaaataaaagggaaaattgtcaagtgggactatattaaagattttgcacagcaaaggaaacagttcacaaaatgctaccaccacctatggaatagaagagagcatttgaaaaccatacattcaattagaggttcatatccaaaatatataagagactcatacaactctatagcaaaaccaaacaaataaccctatttaaaaatgggtaaagtacctgagtattttttttttctaaagagaacacgcaaatggtcaatagatatatgtaygagtgctcaacatcgctaatcatcaggtagattcaaatcaaaaccacaacgagctatcacctcacatctgttaggattgctactatcaaaaagccaacagacaagtgttaacgcggatgtggagaaatgagaacccttctatatttctggtgggactgttaagtggtacagccattatgaaaaacaatatgga

SEQ ID NO: 775321 - DNA, 643 bp, Homo sapiens
tcacacaaataaaatgattttggatccttatcttacaccatacccaactattcactcaaaatggattaaagactgaagcatgaggtgcaaaagcatacaacttctagaagaaaacacaagggaaaatctccataacattgatcttggtgatgactattgggatatgacaccaaatgcatagaaaataaaagggaaaattgtcaagtgggactatattaaagattttgcacagcaaaggaaacagttcacaaaatgctaccaccacctatggaatagaagagagcatttgaaaaccatacattcaattagaggttcatatccaaaatatataagagactcatacaactctatagcaaaaccaaacaaataaccctatttaaaaatgggtaaagtacctgagtattttttttttctaaagagaacacgcaaatggtcaatagatatatgtatgagtgctcaacwtcgctaatcatcaggtagattcaaatcaaaaccacaacgagctatcacctcacatctgttaggattgctactatcaaaaagccaacagacaagtgttaacgcggatgtggagaaatgagaacccttctatatttctggtgggactgttaagtggtacagccattatgaaaaacaatatgga

SEQ ID NO: 775322 - DNA, 611 bp, Homo sapiens
taaacctttatctagacaagcaaaggaaacaagaggaagacctaaagaaataaaatcagaaacaaaaagaggaaacataacaactgatgccacagaaatagaaaaaaaaaaaaaccttaggaaacaccatgaacaactatatgccaaaaaattgaaaaacctggaaaaatggataaattcctgcagacatacaacctgccaagattgaaccataaagaaatagaagacctgaacccaccaataatgagtaatgagatagaagcaacaataaaaagttgcccaccaaagaaatcccaggcttcactctgaattctaccaaacatttaaagaaaaactaatactatttctattcaaactattaaaaatattgaagagcatggaatatttctgaattcrttattgatattgatacccagtattatccttataccaaaaacagacaaagccataagaaaactacagacagatatcactgatggacatagttgcaaaaatccttagcaaaacataagtaaatcaaatttagtacattaaagaggccattcaccaccatcaaatgggattcatcccaggaataaaaggatggctcaatgtgtgcaaatgaatacatg

SEQ ID NO: 775323 - DNA, 658 bp, Homo sapiens
cttgtattttttttttatttgaggttatcatgaggcttgaaaataatatcttataatccattattttaaactgatgataattttacactgatagtataaacaaacaaaaacaagcaaatagataattaacaaaaactccacactttaacttaatccctcactttttaacttttagtcatttctatttatatcttattgtactctctatatcttgaatgttgttggttttattatttttgtttggtttgtcttttagtctttctagtcaagatatgagtaggttacacaccrcaattagacttttgtaacactttgtggttttctatgtacttactattaccagtgagttttgtaccttcagataatttcttattgctcattagcatcctttccctcaggttgaagaactcctgctcgcatatcatgtaggaaaagtctggagttgatgaaatccctcagcatttggttgtttgaaaaaaaatattacttctccttcatatttgaaggatatttttcattggatatactattctgggataaaagttttttcctgcagcactttgaaaatgtcaggccactctcttctggcctgtaagatttccactaaaggtctgctgccagatgtactggagctcctttgtatgttatttgtttattt

SEQ ID NO: 775324 - DNA, 462 bp, Homo sapiens
caaagtcaccccttacatggaggcaagcaagagaacttgtgtaggggaaattccctttataaaaccatcagatcttgtgagatttactcacgatgctgagaacagcatgaaaaagactagaccccatgattcaactacctcccacctgggagctataattcaagatgagatttgggtggggacacagccaaattatatcattccacccctggcccctcgcaaatctcatgttctcacgtttcaaaacataattatgcccttccaatgacttccccaaagtcttaactcayttcaggttaactcaaaagttcacactccaaagtctcatctgagacaaggcaagtccctttcacctatgagcctataaaatcaaaagcaagttagttacttcctagatacattgaggatacaggcattggttaaatacaccctttccaaatgagaaaaattggccaaaacaaa

SEQ ID NO: 775325 - DNA, 593 bp, Homo sapiens
caggggatggctacagtggggcaaggctgtaggtgagctggtgtgtatcagtggagaccagtctccttgagctctgtgacaggcacaatctgctgtccaaggagctatgatgatgttttccccaggaaaacatcctggttgggcatccaaggctgcactacatcaggtatttccaggctgggatcctaagagaggtcagcagacaggatggtgctcagaagagacttgccccatcccatgagaacaaatgctctgttctatccagatctgaccatcactcagaggctaaagcctcctttagccttctctacaaagakcatggcaaaccttggggaatgagtgtccctggccatgccccactgcaagtgttcccatgccaaactttttaggctccatacaggttggagtcctgcccctgctattgttctaagcagctctccctgccagctctagtgtctgtggaagtcttggggtctcctgcgctagaattccagagattcattatgagattaaggaactcctcacctgttcaatatgtccttttcccagaagttgctggaggccatgaacaattgctggggttcagcagccct

SEQ ID NO: 775326 - DNA, 638 bp, Homo sapiens
atattaatgggaaaaaaaatcacatgagagattataaaatatttctcactgaataataaaggaacacgacataactaaaatgaagaagaagaaaggaaatgaaagaaagaagaaagaaagaaaagagaagagaagagaggaagggagagagggagagaggaaaggagggagggaggaaggaaggaaggaaggaaggaaagaaggaaggaaggagcgaagtgagggaaggaaactyccatttttgtcgcttagttctatgctgcagcactctttcaacacttcgccaggccgccagtttacaactccatcttagctttcacttcctgcttctgctgactgtagatcaaccagagatcaaaatgtagggttttctcaagtctttctgagtatgagttctgtcctgggcatgcacgtatgcatggctttccaaatagccttgcccttttggatgtcacaatttcccccaaaaatattctcctcagcttttccttccaggcttttgacacactttatttatttatttattttttgcctcaaatgtaatattttgccccagttggcagcaagttgtttatgtgcttttgagaaatgatgggtgactctattttgagtaattctgagtaagggaaaacaaagac

SEQ ID NO: 775327 - DNA, 343 bp, Homo sapiens
agttgagcagaaggacacccacagcctccgccattgtcccccacagtctgttgcagccgatgagcctgcactgacagcactgtcaccctcagtccatctgtactttagggttcactgttggagtgtgttctgtgaatctggacaaatgtataatgagctgtatccaccactgcggtgtataggatcataagaaacagtttcactrccctaaaaatcctgtggtccacctcttcatttcccccaccgcctgaaatcacagatctttttactgcctctatagtttttcctttgccaggatgccatagagttggaatgatagaggtgtaaccttttcagattggct

SEQ ID NO: 775328 - DNA, 518 bp, Homo sapiens
ccagatactccaattacaaacaactgctttcgaatacacttagaggatttctgtattaaggggaaagggatctcacagaaggcctagctgtaccgtggaacacgggtgccaccaatcgaagacccctcagcgttggcgctatttaraaaacgtttctgcagtagtccctgggtgtagtcctgtgcctgaatttttaacataaacagaatgttaagttatatataagttaagttacatactgggagctcggtgctacataaggcccttcaatgtgaagaccactggttttaggataggcagacctgggtttgaatcttatctttgcctcttccaggctctaggaaatcatgcaaggcgagcctcagctttctcatctataaaatgtgcagaggaatgaatgccacctagcctcacaggactgctgggaatcaatgagcctgctagatacataaacacacaaaggatggtcatgttgtctcttagtaaccacatgctttcaaaggtaatgctttttatct

SEQ ID NO: 775329 - DNA, 522 bp, Homo sapiens
taaatcttagggttaatctatagaattatagattataattgttaacataatacataatgatatgttacatatcataataacatgttaatatgttacataaatttacatatgtacacacatactatacatagtttttgttctctgagagaaactacttggaaaaaataggtaagattctgagtaacagaattcccaaccttcatgaatgaaattacgagatgaaacccaaagaacacatgttggtttgtggcagcgcctttgtgaagcttctttacctaaacagcgagccacacctggatcacagtagcacttgaattgcatctgttgcttgacaaacatattggcatggcctgaagggaaatcaatarccatccatccttccctcggatgtgctgggtatctaccgcatgcccacccgtcggggtccacgaccaggaagcccctcttgttcagttctagaactgccaccccattctcaccagatctatctgggaaggtccactcacactcaccactcccagc

SEQ ID NO: 775330 - DNA, 617 bp, Homo sapiens
aagcagatgagctcttgctgttctgcagactccggcatgggcctgcctagtgtgtctgtcctctgcatttctattgatagcaccagatcccctgcggcccgtggactcctccccactgaccccaacctcattgcatgcttggaggacaggacaagggccaggagacaggatccttccggtccttcatgtctgagatgaggagatagagcaacaaagaacttctaggtctttgaagagacttttgtcaccaggaaaagtatttgtttttaaacttaggaaatgaagtacaatgagtgggaggtgccctgaggtgggaaggccctgtggtcactgtgcsgtctctctcattggtgtctgacacacccatccccaccgcaaccgcggggtgtcatcagctgggcccatctccttcccggtgtctgccccccgccccattcctccctgaaggtctctgggctgtctctgcagcacttgcccgtgggagacaaagcgtctctcagtcctagtgctgtctcagaagcctggggttccgcaagactggcctggaaagagccgcctctttctgtcttttgtgtgctttgtcaccgcggcactggcagggtgtcttaagcctattg

SEQ ID NO: 775331 - DNA, 617 bp, Homo sapiens
aagcagatgagctcttgctgttctgcagactccggcatgggcctgcctagtgtgtctgtcctctgcatttctattgatagcaccagatcccctgcggcccgtggactcctccccactgaccccaacctcattgcatgcttggaggacaggacaagggccaggagacaggatccttccggtccttcatgtctgagatgaggagatagagcaacaaagaacttctaggtctttgaagagacttttgtcaccaggaaaagtatttgtttttaaacttaggaaatgaagtacaatgagtgggaggtgccctgaggtgggaaggccctgtggtcactgtgccgtctctctcattggtgtctgacacacccatccccaccgcaaccgcggggtgtcatcagctgggcccatctccttcccggtgtctgccccccgccccattcctccctgaagktctctgggctgtctctgcagcacttgcccgtgggagacaaagcgtctctcagtcctagtgctgtctcagaagcctggggttccgcaagactggcctggaaagagccgcctctttctgtcttttgtgtgctttgtcaccgcggcactggcagggtgtcttaagcctattg

SEQ ID NO: 775332 - DNA, 644 bp, Homo sapiens
cacataaggacacagtgagattttaaagggtgcttactagctgtccacaaacctcagctgtagttccagtgctacgtgtggttgatccatcactttcctccattgggctttttctgctcttactgagatcaatggttctcaaacatcactatgcatcagaaccaccactggagatttttaaaacacctattccctggtcccacctcagactaattaattcagaatatccagtgtgtgtggcccrtctgtgtatttaattttaatttgattttattttaagtacaagggtacctgtgcaggatgtagaggtttgttacataggtatatgtgtgccatgatggtttattgcacctgtcaacccatcacctaggtatgaagcccggcatacactagctaatttttctgatattgttctctcacgccaccttccactgacagatcccagtgtgtgttgtcccctccctgtgtccatgtgttctcattgttcggcttccttttataagtgagcacatgtggtttttggttttctgttcctgcattagtttgcagaggataatggcttccagcttcattcatgtccctgcaaaggacataatctctttcctttttatgactgcatagtattctatggtgtgtatgtacca

SEQ ID NO: 775333 - DNA, 620 bp, Homo sapiens
gtgggcatacatccagtataactggcatcataataagaaaagacgattaggacaaagattcgcacagaggaaaaaccatgtgaaaacagagagaagtcagtcatgtacaaggaaaggagaaaggccctttgaaaaaccaatcttgctaacactttaatcttgaacttcagaatgtgacataatgcctccctgttgtttaagccacccagtctatggcattttgttatggaagtcctgagagaggaatatactcatcaagccgaattgttccaaagacatggacttaacccacgtttatctttgttaatcctttaagaacactatctaaacaatagtaaaagrgcatgtgggaaggactgtaagggcaaagaaaatgtgagagtaggaaggcaatttcagaaggtataaggcaaatgaaggaagccacattttaagctggcaattaagaaagcccagaagcaaacacatttacattgcataaatctaagagatccagggattagtgcttccaggtgtgtctaaaaaggggtaaagatgggactataaacaggagtgattgttcctatatttgaaaagcatttagatatacatactttatcacacttcctggatcctggtta

SEQ ID NO: 775334 - DNA, 558 bp, Homo sapiens
agatcttgtcatctgcaaatgaagataatttgacttcatcttttcctattgaaataccctttatttctttctcttgcctgatttccctggccagaacttccaacactgtgttgaataggaatggtgagagaggacatccttgtcttgtgctagttttcaaggggaatgcttccagtttttgtccgttcagtatgatattggctgtgggtttgccattaatggctcttattattttgaggtatgttccttcaatayctagtttattgagagtttttaacatgaagtgatgctgaattttattgaacgcctcttctgcatctattgagataatcaagaggttttgtcttcagatctgtttatgtgatgcatttattgatttgcatagattgaaccagctttgcatcctaggaataaagccaacttgactgtgtgaataagttttttgatgtgctgctgtatttggtttcccaatattttattgagaattttttgcattgatgtttatcaggaatattggcctaaagttttgtttgtttgtttgtttgttttttctgttgt

SEQ ID NO: 775335 - DNA, 634 bp, Homo sapiens
acttcagttgcctggggcattgccctttttattccaatttgtatatttatttacctgcaatttaacttctaacatccaataatgaaacctagacctcaatttcatttaactagactaggttgtaactaaggctctgraatgcgtctgtcaaatcccaagattgccaggtcatagggtctccttttttgttctttctattaaatgtgtcatttgaaatatagatagccatcactttctctctgaatcaagtctcacagagtagtgactgttggatattttgcttcacttatttatcagaaaaatatatcatttattttgtgaccaaaatggtaattgttactgatgtgcatcacattttccccaaactgtggagaatttacatcattcatgcagtgtagaggtagaaaaggttcaaggttcaaatcctgtgtaaaactcttgcataagctcccaagggggcttccagactgcgtttttgctcatgatgaaaatacaggcatttgtttaaaaattgtgtagaagctatgaatatggaaaagatgaggctaatgccagtgcatgcgtcagccactccatgttttattcagagccatggctcacagacccagagaccttgcgacacacccttgcctga

SEQ ID NO: 775336 - DNA, 599 bp, Homo sapiens
attcagaaaaaaatcaaggaagtaaaactcaccttctacatttgctttacttttaatgtagaacctgcagattattattggattcttttattattattttatttgtttataatatttggtcttagattattaattgatttacttttatgaatttatttataatagtcttgatttttccaagaaatatataaaacaacttaaattattaaggcatatgaaaattggaaataagcaagttgtagaaagggaaattcagaggaaatttagccaaaataacttctctagaagatcagaagttgttactacaaccaaagagcgcttttaatctttgtacccaggaagcyaaatcagaaaaagaacattcaaagctgtgtgatcttcagcaatttagtcaaagtctttaagaaccatttttttaagtatgaaaatggagttaataaaacatccgtaccatatctggtagttgtgaggataaaatgagagaatgtgtgagtcttggcacgttacatgggaaatgccaaaagctcaaatattagcctatgtcttcctccttctactctttttccttccctacttcttcttgctaatcctcctctgcc

SEQ ID NO: 775337 - DNA, 569 bp, Homo sapiens
ttatctatgtattatctatcatctatctctctgtcaatcatctatcatttatattaattttatttggggtgtattgtttgaagacaaggggatcctgactaatatgcagactacttgattgaacccttgagtcttacagttggagagggaaagggatgtgaacatgttctgctctgatattagaggcgtcattcctgctgtcctccaaaagtcactgtgtgctcctctatctccttatctgtctgggaatttagcccccttmaatattttaattttactttctcatgatgaatgagcttcctttgggaggaaaaaaattacaaaagtctgttttcctcctagcgtattttgtttttgaatttttgaatgtcaaatttttacttgattccgaaataaaagaccaggaaagtttatgcacagtgacaagcctatggcatcagtttcatgaacagagtggcacctatatgttcttactgagggaagagaaaatcaggataagaaagaaggacttgagtgagtcacagatatgctttgctgtcctgggcaagctatttaaattccctaatctg

SEQ ID NO: 775338 - DNA, 616 bp, Homo sapiens
tgatattcaggatgaacatgatggcattagctctttgctattcagtgtttttcccttcagaaaatgttggcaacttttcattcttaaaataactttttcttttggcaatcactgagctgcacacttagtaaccactcagaagccatcaakgaaatgtgagaagattcaggtttaataaggaaaaaaaggcttattattgtcatctttcattacatttcaacccaaaacatggagtggaatttttttatccccattcagtgagggtctttctctacccattgaattttttttttttctacttgaaacacctacctcaatgttcccatgtgtctttcctagacactttctaggaactcttgggagaggttggatatcaatagggtaatgctcatgggaatgatacttatattacagttttgtgttttctacttctagctataggaaaattagaacaaattatgctggccaaggttagacaaaaacaaaacaaaatgaaaaaccccactgagtttgtaagtcttaaagtaacctgccaaaactcacctggccagtagtggtacaacatttatgtgattttggtggatggagtcagtatcatgaattgattacatacata

SEQ ID NO: 775339 - DNA, 452 bp, Homo sapiens
gtcattgggtatctgtggagaaaagtgtgttatgaagtgtgctaagaatttgtatgatatttgcaatcctttttgttatttagactcaattattttcaatttttcctaaaagacttatttttttaaatgtaatacaccaggaggaagaccatattcccttcttttccaataatttgtcattgtgttagtacttttgatgcttgtttgctggactaatatatttcacttgcccattttatgggactgtgtattctgtgttgatttaagtaactcttgagagagagtgatttcatacaaaagaacaamatgttcctaaccatagactaaaagcagaggcaatgggacctaaaaacttcaggtgtgttatatggaggatgatataaatctaaatgttcccagcatcagtaggaagaatacaagatattgggtggtgtcatattttgggaaagtga

SEQ ID NO: 775340 - DNA, 620 bp, Homo sapiens
gggattttccacctgtctgtgtgttacagcagcaacatcctagattgagattgcagtctagactgcagcaacatcctagatttcgccatcaccattgtcttcattgctgcagagacttctgaataatattgacgtacatgttaaggactggttgtcttagtcctctctgattcatatagtcctatcctatctgttttggatagatggagcacactgtacgttggggctttaaaaagtggaaaagaggcatatttattagcacaatgcacaaagaaggaagtcgtattaaccatttgcccatcgtattttcccagagcaggatgtttaaaatgttccaggaattagtcccctggaggtagattaggctagctgcaaaaagagactaacacagaggaggatgtttgagmtgtagaagcacccaaacaagatagatggtattaaccagtagcagtaattttgcttcatatctcagcccttctataatattctcacattcctgtccattatggcaagattagcttcccactggtccatctccccaaggctgccacatcagaagctaaggcttacttctcgttttcttattttttcttaatacttcttaaagaagtgtgggctta

SEQ ID NO: 775341 - DNA, 559 bp, Homo sapiens
aagaatatcaagatagcatgaagagaaattagggccattcaaagaatgatactggtagaaagtcactggtaaggcatttagaatgaaaagacgtaaatgggaagtaaataaagctcagactggggagctgttacaaaagcaaagttatmtatgcctactgccaagtggggagctatcccttctagaagaattttcaagattttttttaattgagtctaatatattttcacatgtggtaagccctatcataataaaacttttttttacctgtattggatgatgagctgtaaatcaatgattgaaaagtgccttgaggaacaataacactaaataaatacataattattatttagggctatttatttcacttgagtaaaaaattgttgacagcttcattatgtcaggcctatagcaagctgataacttactctgtggtctttgaaattatttgttggatttttctgtgcatgagttgatgaatggtggctaaaaacactgttaaataaaactatgtagtacacacactattttctccattaaattttatgtaaagagttta

SEQ ID NO: 775342 - DNA, 613 bp, Homo sapiens
ttggcagttacataaattcctgcaattatactagacagacaaatatttgtacagttaacaaaaacaaatactttttttaaataaagaggcaccaactagtgaaattgaaaagcaaagtaaaatgtaggctgagtttcagaactggatcttcaaaaatgggaactcagttagggcccagttagaaacagtatcaaaagtcttcatattcaatcagaacctaaactctacccataactgccacttgtaaaaccatgtgcctctttcttttggctatttagtccaattccattatactcactataggtgtttgaagaaagaatgggaaagcccaaactaatcagtttttatagtgttgtaaatctgtgcaatggccaaaagctattgctctgctgttttstgcagcagcacagaccacttttcctctgggcagtcactgcttgaaataattactgacattaatgatgcaagctcctgaatttaatagatctaggtttatgttgtcatccatcactgtgcaacatcttctatcttctctgctattaccaaaagtttctttaagtgttttaagatattttatttgacccagcgatgcattttaactacaagaaaccac

SEQ ID NO: 775343 - DNA, 609 bp, Homo sapiens
tatgttctttttttcttgatcagtttagctagaagtttatgaattttattaaattttttttttttttttgagatggagtcttgctctgtcacccaggctagagggcagtggcgcgatcttggctcattgcaagcttggcgtcccagattcatgccattctcctgcctcagcctcccgagtagctgggactacaggytcccgccaccacgcccggctaatttttcttgtatttttagtacagatggggtttcaccgtgttagccaggatgatctcgatctcctgacctcgtgatccacctcccagagtgctgggattacatattaatgttttcaaagaaccaacttttagttgcatccattttatcttgtattttgatctctgttttattgattttcattctgatctttattatttcctttattctactttcagtttcatttactctttttctagtttcttaaggttattcatttgagaaccttcttttttcctagtacaggtgtttagtactaaaatttctctgtaactactgctttagttacatctacaaattttaatgttattttttcatttagttagaaacactttctaatttacctttgttattt

SEQ ID NO: 775344 - DNA, 609 bp, Homo sapiens
tatgttctttttttcttgatcagtttagctagaagtttatgaattttattaaattttttttttttttttgagatggagtcttgctctgtcacccaggctagagggcagtggcgcgatcttggctcattgcaagcttggcgtcccagattcatgccattctcctgcctcagcctcccgagtagctgggactacaggttcccgccaccacgcccggctaatttttyttgtatttttagtacagatggggtttcaccgtgttagccaggatgatctcgatctcctgacctcgtgatccacctcccagagtgctgggattacatattaatgttttcaaagaaccaacttttagttgcatccattttatcttgtattttgatctctgttttattgattttcattctgatctttattatttcctttattctactttcagtttcatttactctttttctagtttcttaaggttattcatttgagaaccttcttttttcctagtacaggtgtttagtactaaaatttctctgtaactactgctttagttacatctacaaattttaatgttattttttcatttagttagaaacactttctaatttacctttgttattt

SEQ ID NO: 775345 - DNA, 614 bp, Homo sapiens
aatggttctcaacactggcttcaggttggaaccacctaggcctccatctcagatcaatcaactcggaatctttagcggtggggctgagcttcacctttttttaagttcctggtgattctagcatacagtcagggttgagtggttcccaaagtgtagtcccagagcagcagtgtgagcgtcacctggggacctcagagtttctcaagcttcatagaaatcactggaattgggaggcctggggtgaggggggagcctgactatgtgtgtgtctaacaaattctcagatgctgctgaggctgctggttggggggtcgcactttgagacccacaggtccagaggtcttctttctctctagtcctttagtgaaagaagggttggaggaggtgacagatactgcttcctggtccagggatgagaagccctaaaagggtgggacagagattgctctaacaattgtyctttttctttactttcccgtttttgtggattaggaacctgagaccttgggaggagcagaaacttgcccaaagcccaggatcaatcttggaaacactgacttagcaggatatttcctgagcacttgtgacgtgccaggggcatatatgctacatgc

SEQ ID NO: 775346 - DNA, 591 bp, Homo sapiens
  misc_feature 399: n = A,T,C or G
tttatcatttcctctatatgttttagctactaattgaatacttatccacaagagctagtatttctctaaacatagcttattctgaaaaggaggaataaatgcttaattcttttctattattcatcaactttcagagtaagaagctgatacaatgacaacccccagtggcagtaaatgaaggctttcctttgttttgctgagattaattataactttctcgatgtaaaaatatccagtgcatttcaatccattgcaattgatgttctgtttattgcttaagtgcgtagaagcaagttcaagatgcattatacatccactagttttcaacttctttactgggggcacaataagatgttctaggctcatcttgtacctgccctgccccagacataaaaccanacatttctccaagaaacactgtttccttttagtggggatggtatttagagaccacastccacacacggcaagtgggagagctgagatttggaaccaggcagtctgacttcagagttggcgctcttaacctttgtaccctctggtcaacatatttattagtgatgataacagtaataattacaactgtaactc

SEQ ID NO: 775347 - DNA, 580 bp, Homo sapiens
ctcttctaccgattcacttgcctctatgctgccaccaggttttctgtaacattgactgtggggtaaggcctaagcccctgaacatggccttcaaggctattcaccatatggctacaaggagccctttctgcctgagcttcttccatgccctgctaaacttcttaacttttagccttgttgaacccctcgccagtccctgaacaggtcacatacttccagacctcagggcctttgcccactcaccatatccctcatgccttctctctcctcacctggtgaactcctatccaacctttgaggccaggcatgcatgcccagtgaaacctccctggcccttttagttcctaccatctcccctacttcctgagttcctttccttcttgatrttcttcttttgtgtgtacccctgttttagctcattgtaatgttgtgattttttgtatttgttagtgtctgccgaattcctcaagggaagctcctgagtctctcccagggttgtacattcttttcctagcacagagcctggcagatgctaataaatgttgtatgaatctgtaaatgaatgattgaatatggaaat

SEQ ID NO: 775348 - DNA, 597 bp, Homo sapiens
ccaggctggtctcaaactcctgacctcaagtgatccacctgcttcggcctcccaaagtgttgggattacaggcatgagccactgtgcccggcctccaggatgtattattaaaagaaaaagataaggtacagaacactgtgaatgatatgctctaacatgtataaaaacagaggaaataatatatttaacattctatatatgtaaattctatatatagatattctctcttatatatagatatatataatatatcatataatataaataatatgatctayataacatatatgttttatatatatgccattatttctggaatgatgcacacgatcatggtagtttggttgttttgcgagaggggaactaggtggttgatagacagaggtgggagtaaaactttatataccctttctaccttttcagttgtgtatgtaatattaaaaaaaccctatatttcctatttaaaaatgtaattcctttttttcagtaagcctaaaactgctataaaaataaagtctattgatttcaaaaaggatatttacccaaatgagttgaaaacatgtccacacaaaaacctgcatacagatgttcataaca

SEQ ID NO: 775349 - DNA, 625 bp, Homo sapiens; identical to SEQ ID NO: 773252

SEQ ID NO: 775350 - DNA, 443 bp, Homo sapiens
catcaggggtttgctgttatcctcctggtcaactcctacacagaggccagcttagggcttgccttcttggtgaagcccctgctgttggttgatcccaagtctacagtcagctgctcctctcgcctcccatgtgagttgtgtggggcttgcatcagattatcaaggagtgatccagttcctatatctggttctctcrcttcagtcggccagctgcctgaaggcaagggaccatttctagtctccctctctctggtatataattgatgctttatcaaagttttttcaatgaatggctgaattaaccaagacactaccaaatgctttctttaaatatatttaacaaatagacttattttgtgtggctgcgaaaggagataaatgatgtccaaggatagcattttcagagaagcaaacttcaattcaaccttaaggacgttccagta

SEQ ID NO: 775351 - DNA, 587 bp, Homo sapiens
catcaggggtttgctgttatcctcctggtcaactcctacacagaggccagcttagggcttgccttcttggtgaagcccctgctgttggttgatcccaagtctacagtcagctgctcctctcgcctcccatgtgagttgtgtggggcttgcatcagattatcaaggagtgatccagttcctatatctggttctctcgcttcagtcggccagctgcctgaaggcaagggaccatttctagtctccctctctctggtatataattgatgctttatcaaagttttttcartgaatggctgaattaaccaagacactaccaaatgctttctttaaatatatttaacaaatagacttattttgtgtggctgcgaaaggagataaatgatgtccaaggatagcattttcagagaagcaaacttcaattcaaccttaaggacgttccagtagccacagctgtccatcagtgaaagggctgcctggggaggtagtgagttctcaatgcacagaggtatacacacaaaggctgggtattttaagggtgtcatttcggtaatatggatgatcaaaatgaaaggggattcttgataaca

SEQ ID NO: 775352 - DNA, 587 bp, Homo sapiens
catcaggggtttgctgttatcctcctggtcaactcctacacagaggccagcttagggcttgccttcttggtgaagcccctgctgttggttgatcccaagtctacagtcagctgctcctctcgcctcccatgtgagttgtgtggggcttgcatcagattatcaaggagtgatccagttcctatatctggttctctcgcttcagtcggccagctgcctgaaggcaagggaccatttctagtctccctctctctggtatataattgatgctttatcaaagttttttcaatgaatggctgaattaaccaagacactaccaaatgctttctttaaatatatttaacaaatagacttattttgtgtggctgcgaaaggagataaatgatgtccraggatagcattttcagagaagcaaacttcaattcaaccttaaggacgttccagtagccacagctgtccatcagtgaaagggctgcctggggaggtagtgagttctcaatgcacagaggtatacacacaaaggctgggtattttaagggtgtcatttcggtaatatggatgatcaaaatgaaaggggattcttgataaca

SEQ ID NO: 775353 - DNA, 623 bp, Homo sapiens
atcagggtccccatttgggatctagagattgcttggtttcatctccccttccacctattctctgtcttgctcagtctcagttctctttcttctgggtggaatgggttgtaagcccctttgcaactcaggcctttgtaactgttgaataggcaaatgaaggaggaaggctccgaggatggaagccagctgtgcacttcgctgatgatctgggatgcacagaggtgggatggggcgggtgagcaatggaaggctgctaatgagcgtttcccagtgttgcctccgagggyggctgcagcctctgcgctgctgtttggggttgttggagccatcacagcacagccaggatttgcccttaggcttggtgacaggttggatcaccttcactcagaaggcctggccactctttgccatgtctgatctgtggtgtggatgacggcagctgacatggactcctcgccacctggaaatgcataaagtgcagcttagccccaggccaaggggagacgttctgtgcagcccccagagcctttgtttctcatgatttccttcaaccctgcccccaactccaacccagtgtcacagggatcttagtcccacctccccagggtctggcccaggatccc

SEQ ID NO: 775354 - DNA, 491 bp, Homo sapiens
ccaacgtgacgctgggcgcgcggatcctggacacttgttccagggacacttacgcgctcgaacagtcgcttactttcgtccaggcgctcatccagaaggacacctccgacgtgcgctgcaccaacggcgaaccgccggttttcgtcaagccggagaaagtagttggagtgattggggcttcggggagttcggtctccatcatggtagccaacatcctgaggctcttccaggtagggrtgcgctccctccggggcggagcacacagtggctacctgcgcccttaaccctaaaagctggcttggactccggtggtgcgggtcaggtcagccttcgctcatttcctccctggagatcctgccgaatccctcccaccccgctcgaggagataccttccctgcttggtttatttcccttccatctctcccctgtccacgctccactccatccggcttgacatctggatttatggccccatttacaagaagcaatct

SEQ ID NO: 775355 - DNA, 578 bp, Homo sapiens
cacatattatatttgaagacatctccatgtgtatttcgtgtatacatacccatgcaattaagatgtctttgggcatttttctctttaagaataattgaaacaatgaatgcatttacttcaacttcatgaacatttggagattaacaaattacaagtgctatatttcttacatatatacaggttatatcatagatataaaagaccatacttggattttacagtgtgttttagtctcaatcctgccattaactggctaagttaccctaaataaatctcttaatttttctaggcttcatttgccttatctgcttttttttttttctttaaaartgtagtttctaaaagtctgtaatcttttttgtttagcttggaaaaaactttgtcttgtcaaaactgtctttgcatttccagctcccacttttggtgagtttgtgggaacttttaaaatatattttcacacagctctcttggtcattactagtcaagttaatttcctgtattcagactgcttttgtattatcttacaatttacttctcaatcatatatatcaaggctactggtagggaaaatgatctct

SEQ ID NO: 775356 - DNA, 618 bp, Homo sapiens
ccactgaaaatgactctctggttcaccacaataaatccattaagcaggcatatttcaggccacaaggttctgataaagtgagtccatgatgaaaatgtaattagacctgaattgttccgactcccgaaccatccataaatataaaatacctgcttttcacagctccttgtcctctacctttccatattgaaattgacagctgctatacaatctgcaaatgaaagaacctatatttgataacatttattctttggggctttgagaaaaaaaaaaaggctccattaagcagcatttttggtttggcacttacataggctagtttgattcttmtttccaggtcactctgcatcatctcatctcaaccttgacttgggaattactaaaggaatcaaactacaaggctcttattcctctcataggttattgtagaaatagtggttgacaggactgatgtcagtccagctaactcatgatttattgcctcctatggagagagtaatgcaataaaaccttagtattaaagatcctgctgcattttattctgttgtcactatttagtcattgcttgtgctttccctctaagttctctgcctgccacttccctgttttcttcatgac

SEQ ID NO: 775357 - DNA, 639 bp, Homo sapiens
catgatgatgacaaaaatttataggaaaaaggttttaattaccccaagtcgatttatataccattttgaatttcatgccattgattgggggaaaatttcctatcatcttctactctccagggtatacttccaaatggcataattctctgtcataaaatatttccaatttttcttcaaatttcagtagaaagggattgaatttgaagagtcatcaccgcagttctgctttcataaacaaaagcaaacaagcaaacaaaaatcactacgagtgttttgtaaagggagaaaggcaccaatagattattaaagttgaattaccagggccatttacgctcattcccagtgcctgtgtcacacataacccctgaagaaggaaaatagcaatacttagtgaagcaggtaaacggaatttccagccaaggagttcaacagacaatctgaattctggctggccttttaactcagaggtaattacagtagatttgggggcctaascttagtttgcaatatttttttaactgatattatattttatgcaggccaagtcaaacacttgaagggcagagggcaagatgtaattaaattactaccttatttatgttaattattcattcttattaaatgaggacaaatatgtga

SEQ ID NO: 775358 - DNA, 592 bp, Homo sapiens
gcatgaaacaaaataagaaaaaatgtcatgtagaaggctgattataaaaatagacaccattatttctgccttcttgtatccatgctgtgttcagtatgagtcttcacttctctcattgagaagtggagcctttttttccatctattaaatctgggctggcctcacagcttgtggcttgattcagccaacagagtatcacagaagtgatatcagctggttccaagcctaaacattaaaagagcttgcctgcttcctcctgctctcttcaagctcttcctgctgccaggtgaataagctcagggaagtttgctggagagcaagggactctgtggracaagggtattcatctgaagctgtccagcccatccttagctgatcacatattcatgactaaatctaaccaagaccagcaggacttcttattccaaattgctgactgatagaattgtatacttaataaatgatactgatttgggctactaaatgtggagaatgtttattacgtgtcaatagccaacagctacaactccatttatagggaatagcggttgttcagaatttagattgtgtgttagaaggctagatcctgacc

SEQ ID NO: 775359 - DNA, 631 bp, Homo sapiens
tataaaacagaatggactagattatgtaatctctaaagtactttgtcactagttcaaaaatactccaaaggactctggaggccaaggtgggaggattacttgaggccaggagatggaaaccgtgtctctaaaaacgttagctgggcatggtggctcgtgcatgtagtcctacattatgtaaactccaaagttctttcttgctagctcaaaagtatttcaaaggactcaggaggctgaggcagaaggattgcctgagcccagggttcaaggcttcagtgagctrtgattgtgccactgcgctccagcctaggcatcagagcaaggccctatctctggaaaaaaacaaaaaacaaacgaacaaaacacgccagagcaaaatgtcttagtgttcaatcattctttacacttgttttatttatttttaatttttattttttgtgggtacatagtaagtgtttatgtttatggggtatatgggatatttcaataaaggcatacagtgtgtaataatcacatcagggtaaatggagtatccatcacctcaagcatttatcctttgtgttacaaacaatccagtcatactcttgtagttatttttaaacgtacaattacattattctttatgcctgtt

SEQ ID NO: 775360 - DNA, 599 bp, Homo sapiens; identical to SEQ ID NO: 766435

SEQ ID NO: 775361 - DNA, 548 bp, Homo sapiens
ctgcatattaattaatgttagatgttaatagtaggggagactgggtggtgtgatgtgcctgtaattgtcttcacaatttttctgtaatctgaaaccttctaaaatatagtttatttttaaaaagagaattttgcagcttggtacggtggctcacacttgtaatcccagcattttccatctcagcctcattgcatgagctcaggagtttggcaccagcctgagcracatggtgaaaccctgtctctaccaaaactacaaaaactttgcagggaatggtggcacacacctgtgttcccagctactcaggaggttgaggtgggagaaggatggctggagcccaggacacggaggttgcaatgagccgagatcacaccactgcactacagcctgggcgacagagtaagactgtctaaaaagcaaaacaaaacaaaagaaaagaaaacaaacaaacaaaaaaacacaaaaaccaaagaaacttttctacatcaccctccattgaggttatgtgcatctttactctcatctgcagtgtaaaaaatgttttcttt

SEQ ID NO: 775362 - DNA, 628 bp, Homo sapiens
aataacaaaaccagttgtgaacagttaaatatttttatatcatatcctcagatcatcatgattttctgtgaaataaagaacattagtccctttctttggtaagggagtattcacaattctgtctttatataaaataattttcacttattttagttaattaatatttactatatgcctactctctgataggtgctgagtctcatcaagtatgtagcagaatatgaattttagagcaggtctattcatcttctattgctgtgtaacraatcactgcacatttagcaacttaaaacaacacatattgattatctgacagttataggtcagaattcaaggcaaaactgcaagtttgctgtcatggtgtcagcctggctgggatctcatctgagatttgactgaggaagaattcactttcaggctccttcaggttgctggcaaaatttatttccttgtggctgtgtgactaagggctctggctttttaccgcatgttgactggaggttttgtaggtcctagaggccccgacagttccctatcgtgttgtcttcccactgatttttgcttcttaaagccagcagaagcgtctcgaactccagtcaaagacagagttctgtataaaataacacaa

SEQ ID NO: 775363 - DNA, 504 bp, Homo sapiens
ttctacataggcaagtaaagaaagagttcacttcaccttcagatcttttcataccctctcaaatttatcaagtgcaatgatggcaggcagaagagatgaggaggaatcgctgagacatgatttttcactattttctcatccagcaaaaataccttgtcactatctatttctagtcccatggcaaaaatgacaatccatagcctgggagaaacccatcctttgtaattaggaagataaacatctgagatttgtctgacccaagaaagactagttttctccattaatatgtgatgactttccaacccagagaaacaatatggtagttcccagtgagttattggaggcattarggccagaacccgatgttcttggtttaaaagccagaaagttttttggaatggctaccacattgcttggaagacaattttccatcacattaattcaagattcacacaagttttcaaagcaatagtatttctcttgcaacattcaagtatttaaacg

SEQ ID NO: 775364 - DNA, 484 bp, Homo sapiens
tataggcatagtattgcttcagttaaaagaaaaagttcaggtgtggaccgaggtcagatctgttttgacaaggactctggccctgtccacctgggtcacccactcgaacatgtggcagcctaattgtcagacagaaagamaatggttgtgggaaatctaggcctcgtgtcagtatttaaagttcagaggaggagagatgatctctttcagtggttctctcttaggaactgagattatctcttccagacattctctcttaggagcaagagcatctctttttcatgcccagagcaaaaatctactgagttttgtcagctaatattgggttacccatcaattatttaaccagtctttttggtcaagaaaatgtcatgaaatctattggcttagccttgcattcctgagtccattgtggacaaagggaaaatgattccgttagcttagtcagctctggaggttaggctggttctccctgaagcacaca

SEQ ID NO: 775365 - DNA, 630 bp, Homo sapiens
atcaccatccaatatatggtactgtttctcccatagccaggattcatcggtccaggtatcaaggggtgaaagtggaagtggcaccactcaccatcaccccaagtgatccactagcaaaatttttgcttcctgtttccattacattatgttctgctggcctagacgtcttagttcctgggggaggaacgctgccaccaggagacacgattccattaaactggaagttaagattgccacctggacactttgggctcctccgacctttaagtcaacaggctaagaagggagttacagtgttggctgtggtgactgacacagactatcaagaagaaatcagtctactactccacaacggaggtaaggaagagtatgcatggaatacaggagatccattagggcatctcttaacattaccatgccctgtgattaaggtcaataggaaactacagcaccccactccaggatggackacaaatggcccacacccttcaggaatgaaggttagggttcaactccaccaggaaaaaaaccacaacctgcttaggtgcttggtgaaggcaaagggaatacagaatgggtattggaataacgtagtcattaatatcagctatgaccacatgaccagctgca

SEQ ID NO: 775366 - DNA, 554 bp, Homo sapiens
ccttagtgtcttcacctgtaaaataggagagaaaacacaaccgcagccagttgttttgtggatcaaacagagcaatagaaagcactttggagagtcccttggtcagttctcaacaaagattagtggctgtcactgccatcctcttcttcgtcatcaccctggttgtctcctagtggctcacactccgcctgccctccctcagctcaccatcctgcatccttcaagtctgctcctacccctctgttttctcataataacatcactgattctctgccctagaagggagctgacaagtattcccgacttgtcctgtccctcaccatgctcaggaccaggaatggaagtgcagctgaatttcttcaacctggaaaccagggatragtgtgcttcctctggctgcgaggaagaacccttagaggggtaggagggaggaggagagcgttggcacagctttggctgataaagggatgggttgggccgaaaggtaaacaggagaagtaggatgtaaaaggaatggtaaaaagtcagccaaatcgagcgaacttcagctgagg

SEQ ID NO: 775367 - DNA, 621 bp, Homo sapiens
atatatttcttacgtaattaagaagtaaaaggttatgaaatgagtgcagaggaggaggaggtctccttcctgttgaaatgtgggctgttgacataaggagcacccagtttttatatcccaaagccccagcccctcattatgaccaccctgcctcccatgaggtccgcagccagcggcctaaggtggccacatttgtgtgttatggacagggacggaagtgtggcaaagggcaaagacgtttagacctgcctctaccttccggggcgaaagcaggaggtagcgacttgccctctctgaaactccatttcttgggaaccccaaacttggggcccttctggagttctccgtgattctgagcagctggaacrtctcttccagagcctcagagggagggtgtcctggtgactttgcccccagaggcaatgctgctccgtcctgtgctgctgcagtccttgaggggtgtgaatgctgggcatgggacaggacaggccacctacccgggactggcatccctgtagggtccccggctctctgacatctacagaggccaggtgccgacccccccacggcccagtgtcctcctgaaggcatgcatgtgcctctgctttagggcatagaatg

SEQ ID NO: 775368 - DNA, 708 bp, Homo sapiens
cctcctcctcaattttttgtaatagtttcagtaggaatggtatcagctcttctttatacatctggtagaattcaactgtgaattcgcctggtccagggctcttttttggtttgtagactttttattactgattccattttggaactcattgttggtctattcagggattctattctgattcagtcttgggaggttgtatatttccagaaatttatccatttattctggattttctagtttgtgggcatagaggtgttcrtggtagtttctgaggatgttttctatttctgtgggtcagtggtaatgtcctttttgtcatttctaattgtgtttatccagatgttctctctttttgtctttgttagtctagccactcgaccctcaatcttattaatttttttcacaaagaaaaactcctggcttcatcgatcttttgtatgtttttgtgtctcaatttccttccattcagctctgatttttgttatttcttatcctctgctagctctgcggttggtttattcttgcttctctaattcctctagttgtaatattaaaattgttaatttgagatctttctaactttttgatgtgagtgtttagtgccataaacttccctcttaacaacagcatacctatgaatacagctaaccagataggtaaaagatctctacaatgataattacaaaacactgctcaaagaaatcagac

SEQ ID NO: 775369 - DNA, 708 bp, Homo sapiens
cctcctcctcaattttttgtaatagtttcagtaggaatggtatcagctcttctttatacatctggtagaattcaactgtgaattcgcctggtccagggctcttttttggtttgtagactttttattactgattccattttggaactcattgttggtctattcagggattctattctgattcagtcttgggaggttgtatatttccagaaatttatccatttattctggattttctagtttgtgggcatagaggtgttcatggtagtttctgaggatgttttctatttctgtgggtcagtggtaatgtcctttttgtcatttctaattgtgtttatccagatgttctctctttttgtctttgttagtctagccactcgaccctcaatcttattaatttttttcacaaagaaaaactcctggcttcatcgatcttttgtatgtttttgtgtctcaatttccttccattcagctctgatttttgttatttcttatcctctgctagctytgcggttggtttattcttgcttctctaattcctctagttgtaatattaaaattgttaatttgagatctttctaactttttgatgtgagtgtttagtgccataaacttccctcttaacaacagcatacctatgaatacagctaaccagataggtaaaagatctctacaatgataattacaaaacactgctcaaagaaatcagac

SEQ ID NO: 775370 - DNA, 708 bp, Homo sapiens
cctcctcctcaattttttgtaatagtttcagtaggaatggtatcagctcttctttatacatctggtagaattcaactgtgaattcgcctggtccagggctcttttttggtttgtagactttttattactgattccattttggaactcattgttggtctattcagggattctattctgattcagtcttgggaggttgtatatttccagaaatttatccatttattctggattttctagtttgtgggcatagaggtgttcatggtagtttctgaggatgttttctatttctgtgggtcagtggtaatgtcctttttgtcatttctaattgtgtttatccagatgttctctctttttgtctttgttagtctagccactcgaccctcaatcttattaatttttttcacaaagaaaaactcctggcttcatcgatcttttgtatgtttttgtgtctcaatttccttccattcagctctgatttttgttatttcttatcctctgctagctctgsggttggtttattcttgcttctctaattcctctagttgtaatattaaaattgttaatttgagatctttctaactttttgatgtgagtgtttagtgccataaacttccctcttaacaacagcatacctatgaatacagctaaccagataggtaaaagatctctacaatgataattacaaaacactgctcaaagaaatcagac

SEQ ID NO: 775371 - DNA, 642 bp, Homo sapiens
ggacttgccttgactcaggcgagactttgaacttggatttttggttaatgcttgagagacctaagaatttgggggactgtgtggctggaaagatggccaaatagtaagagctctgatctgcagcttccaacaagataaacacaaaaggcaggtgatttctgcatttccaactgaggtacgtggctcatctcattgaaactggttagacagtgggtgcagctcatggtgggcgagccaaagcagggtggggcggtgyttcacccaggaagcacaagggggcagggaaccccctcccctagccaagggaagccgtgagagaccgtgccctgagtaatggtgcatttcagcccagatgctatgcttttcccatggtttttgcaacctgcagaccaggagattccctcgtgtgcctacaccactagggccctggatttgaagcacaaaactgagtggccatttgggcagacaccgagctagctgcaggagttgtttttatatcccagtggcatctggcatgccaaagaaacagaactgttcactcccctggaaaggaggttgaagccagggagctaagtggtctagctcagtggatcccacccccatggaggacaactacctaagatccatgggcttgaaaatctc

SEQ ID NO: 775372 - DNA, 495 bp, Homo sapiens
gagttgaacaatgagaacacctggacacaggatggggaacatcacacaccggggcctgttgtggggttgggggatgggggagggacagcattaggagatatacctaatgtaaatgatgagttaatgggtgcagcacaccaacatggcacacgtatacgtatgtaacaaacctgcacrttgtgcacatgtaccctagaacttaaagtataataaaaaaattaaattaaaatttttaaaaaaagaaaataatttcaccaaaggcagcaacatgtgtctcagaaggtttcacttacggtaaaatatgaagtggcagtttctgagttcagacacagctgaagaaacctcagtacacaagtgcagaaagaaaccttctttgcctttaggttttctgaaagaaaataaaaagtcaccctgtatttcccccagcattcagggtagtgccatgtgtgaaaagagatagcaatgctctatcagccatgatggccttagtgacag

SEQ ID NO: 775373 - DNA, 606 bp, Homo sapiens
attgatgtttatttggagttctggatgaagagaatggaaagaaaagaagaattagcactatttgacataaaacacctgataattttcaagaattgaataaaggcatcacagtgaaactgcaaaagatcaaagagaagaagaaaatactttaaactactagagtagagacagattatgtaaaatgtacagttagactggtagcaaacttcatcttagcgataagagctgccaaaaaccaatacagcaatatgttcaaaatgcataattatcatgtagaattttatgcacagtaaaacactcaagaatgaagacaaaatgaagctattttcagatattcaaagataaggaaatatagttaccacaggtcatcactaaaaataattaaaaggtatacttcaacaagaaaatgagctcagagggaaggaataggatatataaaaatgatgaacctagaaattgtaaaaayacatgagtattttattaattattgacaatgttcaactacttttttaagtcaaaaaaccacagatgctggcaaggctgagagaaaaaggaatgcgtctactctgttggtgggaacgtaaattagtccagccactgtggaaa

SEQ ID NO: 775374 - DNA, 558 bp, Homo sapiens
aagctgcaaaacaaagttcccgtactcttccctccccttttctcaagcagaaggagtctctccccgtagccaccacagctgggaatgggctgtatcccatctgaagccatcatgtctctgagtctcactcaaggcccttggcgagtgcttcctggctaccactgctaactcgtgagggcccaaggagtcttttgtcagcagatgacaaatccttccaggactgggtctttccctttaaggtagcccattccctttttgcccaggatakgtctaaaaataccatccaggagctagggcctggaatgggagcctcaggattctgcccagttattccgtcctactatggctgagctggtttccaagttgcaagacaaagtcctctttttttctccttcttcttcttctttttgaaacagggtattgctttttcacccaggctagagcgcagtggcatgatcatagctcactgcagccttgatctttgagactcaattgatcctgcctcctcagcctcctgagtaggtgggactacaagtgtgtgccaccacacccagctaa

SEQ ID NO: 775375 - DNA, 558 bp, Homo sapiens
aagctgcaaaacaaagttcccgtactcttccctccccttttctcaagcagaaggagtctctccccgtagccaccacagctgggaatgggctgtatcccatctgaagccatcatgtctctgagtctcactcaaggcccttggcgagtgcttcctggctaccactgctaactcgtgagggcccaaggagtcttttgtcagcagatgacaaatccttccaggactgggtctttccctttaaggtagcccattccctttttgcccaggatatgtctaaaaataccatccaggagctagggcctggaatgggagcctcaggattctgcccagttattccgtcctactatggctgagctggtttccaagttgcaagacaaagtcctctttttttctccttcttcttcttctttytgaaacagggtattgctttttcacccaggctagagcgcagtggcatgatcatagctcactgcagccttgatctttgagactcaattgatcctgcctcctcagcctcctgagtaggtgggactacaagtgtgtgccaccacacccagctaa

SEQ ID NO: 775376 - DNA, 613 bp, Homo sapiens
aggttgaaagtggataaaaagacatacatagtaagcataagaagtagctatattaatatcagagtagaatttaatatcactgtattagtatgcaaagaggcattgcctattaataggatatcaaatcaacaggaagatataacagtcataaatgtgtatactacaaaatacatgaagcaaaaattgacagaatataagggagaaagaaacaatttccatatgagaatttccattctcagagatggatattttaacagacctctttcagcaactgatacaataactagaccaaagaaatcagtaaaaatatacatgatatgaacaataccattatcaaccactttgacctaattgatrtttgtagatcactgcacctagcaactgtagaatacacacattctttctgagcatactgaggatgttcaagatacactatatgctggaccataagacagttttaatacatttaaagagcttgaaatcattgaaaatatgtcctctgaagacagtgggatgaagttagaactcaatattatgtatctacaaattcacaaagaaatgagaaaatattttgaactgaaaagtattttcaatgaaaatatagcatcaggaa

SEQ ID NO: 775377 - DNA, 534 bp, Homo sapiens
ctggataaaatatatgaaacaactatttttagacgttaagataatagctatctcaggactgtgatgcctaggggaagggaaataaatgatgtgagcttcataatcaccctggctttttgaagactactgtgaagggaaggagatgcaaaggacagtggtctcastaagtcgagaagacagaaataagagttcaggaaggtgaagttagatggaatatgtggaacagaataccagaaaagatggagcaacacagagaaattaactatagaaatttgcctggaattctatttaactctactgctgatattaagtcatgcttgtgtggatgaaactccataaggcaaaaaacagacataaaaaaagacatctcccatcccctaaaaaaatattcccagagctcacacagggcagggagaaactgaagtcctgatcagccagcggaaagtcctagctcaacatccagaacgcacagaagaaacccaaaaatagctatgccttgacagtaggactaaactaggcctagagtaaaatttc

SEQ ID NO: 775378 - DNA, 598 bp, Homo sapiens; identical to SEQ ID NO: 749419

SEQ ID NO: 775379 - DNA, 457 bp, Homo sapiens
cgcttgaagggtactcaggaagtaaataaaagtgaacatcctgctatgagctggaaagcacaggcagaatcctccaccaccctgccagcctaactgtactgcccaaagacaaaggaatctttcctgttacaggtacgtgcaacccacaccaggtaaaatgcattcactaaggctgtttggtctttscttgacacatcactgccattacagactgattcttccaaacagacatttcatgaaggcccttagtaaatataggcttgacatagtagctggcaaagttatgaacaaaatgtattttattctgagacagaacctattttaaatagctcattgacctctataatcatagtgtttggtcaaaaaccatcaaaaccaccacatagagccaaataagatgcttccatttatatgaagtaatttcttctcacagtgcagaaaagagtggtgatgttca

SEQ ID NO: 775380 - DNA, 489 bp, Homo sapiens
tggatccattattttcatttatttttgacatgcttcttaaatatgggcaatttggatgtatgcattttaattagtaagactagctaatgtataaaattacttttaaaagtaaaataaaacaataaaaaataatttgcaagtattaaaattctcataattgggtaaagttcaaatgaagaaattcagcattttaaatttgaacycttttagaacaatatgttctggtctcagacgttacacgtttcattttttaagagggaaaaagaaaaaatgagaaaaacaagctaacaaatgccacggaattataaattaataatgcttgttatgttctgtggtttttgaacctctaactattccacccaaatagaacatggcacttctcactctagtgtggtctgatataagccatggattcaggtactctcagcggccagacacatcctcaatcaattatggagagatcaacaaccattttgcctttcaaatgag

SEQ ID NO: 775381 - DNA, 489 bp, Homo sapiens
tggatccattattttcatttatttttgacatgcttcttaaatatgggcaatttggatgtatgcattttaattagtaagactagctaatgtataaaattacttttaaaagtaaaataaaacaataaaaaataatttgcaagtattaaaattctcataattgggtaaagttcaaatgaagaaattcagcattttaaatttgaacccttttagaacaatatgttctggtctcagacgttacacgtttcattttttaagagggaaaaagaaaaaatgagaaaaacaagctaacaaatgccacggaattataaattaataatgsttgttatgttctgtggtttttgaacctctaactattccacccaaatagaacatggcacttctcactctagtgtggtctgatataagccatggattcaggtactctcagcggccagacacatcctcaatcaattatggagagatcaacaaccattttgcctttcaaatgag

SEQ ID NO: 775382 - DNA, 489 bp, Homo sapiens
tggatccattattttcatttatttttgacatgcttcttaaatatgggcaatttggatgtatgcattttaattagtaagactagctaatgtataaaattacttttaaaagtaaaataaaacaataaaaaataatttgcaagtattaaaattctcataattgggtaaagttcaaatgaagaaattcagcattttaaatttgaacccttttagaacaatatgttctggtctcagacgttacacgtttcattttttaagagggaaaaagaaaaaatgagaaaaacaagctaacaaatgccacggaattataaattaataatgcttrttatgttctgtggtttttgaacctctaactattccacccaaatagaacatggcacttctcactctagtgtggtctgatataagccatggattcaggtactctcagcggccagacacatcctcaatcaattatggagagatcaacaaccattttgcctttcaaatgag

SEQ ID NO: 775383 - DNA, 626 bp, Homo sapiens
ccaatatatgaaggtaagtgtctcacatcattaataagagaaactggaataaattagcctctaaagaagacatgaagaaaaatcaacccatgatctcctcttagttgatgaattacacacagtttcaaccaatgcaataaattcttttgctcttgttattctgaaggattgtatagcaagctctcttgctacctcgctttaaaaactccggtggtctccattacaccttgattactggcaatccaatgctgcataattttccttcagcctctccctctaacattttttagkgtccctgttaccctcactgactacatcctgcctcactaccttctctcagcttcccacacatgccaagcttgtttcccaccgaggtgcccacgggataactcttctctttgcccttctttatggccttttcttggttggcctctccttatctcaaagatttcaactaaaataccacttctgagaaatcttctctaataactcagtcaaaagtagccccatttctaaagctttctctatcattttacccagttttatttacttttgtgcctgaaagtcacctaacacttcctcactttacatatgtctatttatttatttatttatttatttatttt

SEQ ID NO: 775384 - DNA, 626 bp, Homo sapiens
ccaatatatgaaggtaagtgtctcacatcattaataagagaaactggaataaattagcctctaaagaagacatgaagaaaaatcaacccatgatctcctcttagttgatgaattacacacagtttcaaccaatgcaataaattcttttgctcttgttattctgaaggattgtatagcaagctctcttgctacctcgctttaaaaactccggtggtctccattacaccttgattactggcaatccaatgctgcataattttccttcagcctctccctctaacattttttagtgtccctgttaccctcactgactacatcctgccwcactaccttctctcagcttcccacacatgccaagcttgtttcccaccgaggtgcccacgggataactcttctctttgcccttctttatggccttttcttggttggcctctccttatctcaaagatttcaactaaaataccacttctgagaaatcttctctaataactcagtcaaaagtagccccatttctaaagctttctctatcattttacccagttttatttacttttgtgcctgaaagtcacctaacacttcctcactttacatatgtctatttatttatttatttatttatttatttt

SEQ ID NO: 775385 - DNA, 633 bp, Homo sapiens
attctgacatcaactctttgatgcaggcatgacatattgccaccttataggtaaggacactaaacgtcagaatggcgaatggcagggaagaatgaaggtggctttttgagtttggctgatgctctatcaagatctttctattgtaacttgttgcttgagatcacacaggtaagtagtagcataagacagggagtgtaaccaagattcctggttctcagtttaatatgcttttttatacattacagagaattggaatactgtccaatttctgactttgtgcaaaggaaaaatatttacaatttagtaaagaatgctaatttataattccaaatgaaaaatgatgacttaatgcccagggagatkaaatttctctttcttccaaaagttactaattgctacttatgtagcaaatattgagctaaatcctggggtcatagtggtaaacaatatgggcaaggtgattactagtgaatttttaataaattttaattactcaggttattttttctttcattcatttcttttatgatttttacaaaattgtgaacttggttctgattctgtaggattttacttataggcacaaattatacttgtccataattattacctagcacttaaaaaatgatcatt

SEQ ID NO: 775386 - DNA, 653 bp, Homo sapiens
gaactgtgcccacacacaaattgacagaatcgaggccccaaggttagcgatgattaaaatttaaaagtccattcattcattttcaaaatattttattcgattgcttctgaggcagaatcatgagttgccttcgcttttgctgctcccggtggtggcatccaactctgaggatagctcatccaactmtgagggtagctctgaggggagctaaatatcctcattgttcaatgagctagatgaaaacaaaacgaggctgtaaggtcaatctcacagccttagtggagtaaaaattagaagtcaataattctcttaccaacaaagaggacttgcattcaacaggattttcaaaagtggtatcctgtaaaaattttggaaaataccaccataatggaaaaaaaataaagtggcatataaatcaaatgtagtgctaaaaattataatttttccatatgaattttggaatcctaaaatatttttatgtgtttgtggattcataaggcatcagaactggctttttgcactgaatatgagtacagaaggctttcctctccaatagtgaattaataaaggataagtaggaaaaacgttacgaaacgatgtggtaacattatagactctgtattagggcaaaaattgtgagatagtagaagatc

SEQ ID NO: 775387 - DNA, 584 bp, Homo sapiens
ctttattttatcttacttcttttgttttctttctttctttccccttgtcctgttctctgtcttagcctggctttgaagtgatctagccattaaaatcctaggttcctgttgtaaagtagaatcctttccaaaatataaaaacaaaatctcactcacttcttacaaatgatgatgaggatggtaatcatgatgatcgtgatgataattgagtccagaaacttactgttttcctacaatttctagataaaaaaattccagaaataatttttatccaagattaacacagactttagaatctgaaagactgtttacacatcccagctctgcactgaccaagtatgtgatcttgggactcagttttcttttctgtaaaaagatacaatgcacttacctcaaagagagaaattaaacaatgtattgaaagcactctgcatgattytttcagcctctggcctactccttttaagttaatatattttgaaagaatgatggaaggggaaacaacaaatagctcctgaaggtttgaacatttatccactttcttccagatctgtccagtagacatttctgtgacagcaggaatg

SEQ ID NO: 775388 - DNA, 618 bp, Homo sapiens; identical to SEQ ID NO: 770702

SEQ ID NO: 775389 - DNA, 609 bp, Homo sapiens
ccagccccataatcagacaacagccatcagggcccctgggatgcccatgggccaaaacggtgaaattaatttgtttccacagccatgcaggggagcagagatgagggaggacattgagatgctcagccaacaccaaccaccacgaggactagggaagttgtctaagaaaacacagtgatgagcgagatcttcagagacagacaagagacagagagaaagagagaacgtgtgtgtgggcacgygcatgcatgctcatcaatgttttttgacgatgtgttttcattttgaggagactctaagaagaacagaactttctggatcatctaaaagctcaacttgggaccaaggttggggctgggaattcagggccaggatgggggtcccaggctaaggagggaagaactctgggaggcttatcaagcactggggtaccccgatcacaagcccaagggctggccccaacacagatgatggtgtctccgtggccagaagacagaagccacgggagacacaggtggctgcactcagccacactcaagaaccagctacggccagcagcactgtccgcctccccagagtgggcctggggctctccattcatccttcagc

SEQ ID NO: 775390 - DNA, 511 bp, Homo sapiens
gtgtcattcatttctaacctaagctgaaggtgcagtagcttggggcaaaatcttctactgactaatggcagtagcattcatcatgggtggcatgaggccagctaacccatcaagcatatttaaagcctatgccatttgtcaggcctctgagcccaagctaagccatcatatcccctgtgacctgcacgtacacatccagatggccggttcctgccttaactgatgacattccaccacaaaagaagtgaaaatggcctgttcctgccttaactgatgacattgtcttgtgaaattccttctcctggctcatcctggctcaaaagctcccccactgagtaccttgtgacccccactctgcstgccagagaacaacccccctttgactgtaattttcctttacctacccaaatcctataaaacggatccacccctatctccctgcgctgactctcttttcagactcagcccgcctgcacccaggtgaaataaacagccatgttgctcaaacaaa

SEQ ID NO: 775391 - DNA, 567 bp, Homo sapiens
gatcccccctagacctggcatccctgttgaatttcaatgcccttttaaatcttcttacagacgataaagaagatgactgaaaattgatgggtaatagaaaaaaggagcatcactcgatttctgttttgcttccactttttctgtcagaagatagatactggtatatattgaactgtcaatttttagatctctattatttatctatatcaatagatattgatatgaaagaagtgaaactcaagcagggtgaggcctctaaaatagttttgtgtttaggtctttgataagcagaatttgaggacactaagaggactcacaagtgagatatgttaatatgaagtagatgagtatttgtgagggatgccagagaaaaaaatagctctttcattgattcattcrgtcaatacatttattaagtatgttctgtttgccagacatgtataggataaaatggaaaacagaaagacaagaacaatgatatcaatgaaatgacattctactgaaagcctgagacaataaacaagaaaaataagttaatttgagattataggttgtatgaaagaaaat

SEQ ID NO: 775392 - DNA, 623 bp, Homo sapiens
  misc_feature 30: n = A,T,C or G
ttttttccactgcaacttttgctttcactntaatataagtaagctggataacttttacaccttgtctttcctgctgtatctagagactgatcttaaaattgtatatcaagaaagttgataagatggttaattttacgtgtttacttgaytgggccacggggagccagatatttggttaaacattattctggccctttggaaggctgaggcgggtgaatcacctgaggtcaggagtttgagaccagcctggccaacatggcaaaaccccatctctactaaaaatgcagaaattagctgagcatggtggcaggcacctgtaatcccggcactttgggaggccaaggtgggcagattacttgaggtcaggagttcaagaccatcctggccaacatggtgaaaccccatctctactaaaaatacaaaaattagctaggcatggtggcaggcacctgtaatcccagctacttgggagcctgaggcaggagaatcacttgaacctgggagacggaggttgcagtgagccaagatcgcaccactacactccagcttgggtgacagagtgagatgccatctcaaaaaaaaaaaaaaagaaaagaaaaaaaaagaaaaagacaattattttg

SEQ ID NO: 775393 - DNA, 636 bp, Homo sapiens
ggtattagttcttcttgaaatgtttggtagaattcagcagtgaagccattgggtcctgggcttttctttattgggagactttttattatgactttaatctaattacttgttattggtctgttcaggttttggatttcttcatggttcagacttgataggttgtgtgtgtttaggaatctgtccatttcttctagattttccaatttattggcgtatagttgctcatagtagccattaaagatcctttgaatttctgcaatatcatttgtaatgtctcctttttcatttctgaatttatttgtatcttgtctctttttttcttagtgtgggtaaaggtttgtcaattttgttcaacttttcaaaaaaacatttttttgtatcattatcttttgaattgttttcttccattcaatttcatttatttctgctctgatttttattattatttttcttctactaatttwgggttaggtttgctcttgcctttccagttctttaagatgcatcattagattgtttaagtttattatcttctttgatgtaggaacttacagctattaacttccctcttagtactgtttttactgtatcccataggttttggtatgttgtgtttccactatcatttgtttgaag

SEQ ID NO: 775394 - DNA, 636 bp, Homo sapiens
ggtattagttcttcttgaaatgtttggtagaattcagcagtgaagccattgggtcctgggcttttctttattgggagactttttattatgactttaatctaattacttgttattggtctgttcaggttttggatttcttcatggttcagacttgataggttgtgtgtgtttaggaatctgtccatttcttctagattttccaatttattggcgtatagttgctcatagtagccattaaagatcctttgaatttctgcaatatcatttgtaatgtctcctttttcatttctgaatttatttgtatcttgtctctttttttcttagtgtgggtaaaggtttgtcaattttgttcaacttttcaaaaaaacatttttttgtatcattatcttttgaattgttttcttccattcaatttcatttatttctgctctgatttttattattatttttcttctactaatttagggttwggtttgctcttgcctttccagttctttaagatgcatcattagattgtttaagtttattatcttctttgatgtaggaacttacagctattaacttccctcttagtactgtttttactgtatcccataggttttggtatgttgtgtttccactatcatttgtttgaag

SEQ ID NO: 775395 - DNA, 341 bp, Homo sapiens
tttttgttgctatcaaacaatacttgagactgagtaatgtataaagaaaagaaattcatttcttaaaagggaggctgggaagtcaagattgagagtcctgaatctgctgaggaccttcttgctgtgtcatcccatggcagaaggtggaagggcaasaaagcacatgagacagagaaaggaagggtgctggactcatgcctttatgaggagcctgctcccaccataactagcccaccctcgccataacctcttaaggatcccaactcttaatactgtcacaattgcaattaaatttcaacatgagttttggaggacatgttcaaaccataacacctaccatt

SEQ ID NO: 775396 - DNA, 584 bp, Homo sapiens
tcactgcaacttccacttcttgggttcaggccactctcctgcctcagcctcccaaatagctgggattacaggcatgcgccaccactcctggctaatttttgtatttttagtagagatggggttttgccacgttggccaggctggtctcgaactcctgacctcaagtgatccgcccgccttagccgcccagagtgctgggattacaggcatgagccaccacgcctggcatccgtcacatttttaaatgccccataatgagatggtactacccccaaaagagaatcaccggatcacagactatataaaactctctacttctcagcccrgtcagaataatctctcttccctggatttgctgagcctgctgtgtagggcattgatcaacatcttccttgccctgttctaactgtgtgcctgatttattctccttcccagtattggctcccagtggaagaatccttgacttctctctccccacattgccaaatccagctcagggacaggtccatagtaagtgtttaataaatgtttgtgaagaaattttgtaaacaagacaactgtcctagggtatgactcccaggagg

SEQ ID NO: 775397 - DNA, 556 bp, Homo sapiens; identical to SEQ ID NO: 757975

SEQ ID NO: 775398 - DNA, 522 bp, Homo sapiens
gcctgcctgccatgccagctgtgtactggggaaataaagctctgccgagttatataacccagctcaggagaaaatgatagacactagcccaaagggactcctgagattaccatccttattctactctggtggtgatggtattgagcagggaatgggcctattcaatatccttcagtcctgcwgaacatggcacaataaccatgactataggggtctcctctgcactgtcccacccaatactacccaaattgaaggccaatcttaaatgtcaccattccttgaaccctccatgctcccatccctacctggctagaatttttatctcaactcccacaatgtcttatctatacaatttattatttggcatttatttgctcaacaaatatcacttgcacacctatttttgatttgaagatacagaaatataaagaattaccattgctctcaaggaaatgcagcccagttcaacaaatggcctaaaatggaggaagcagagacaataacagtcagaggagtattcca

SEQ ID NO: 775399 - DNA, 606 bp, Homo sapiens
ttgatttactaattaatttcatttccagacaccaatatatgcatagccttgtttgaagaaaattaaggagaaccattttgtaaatggcaatgagtgtaagacacttaactatcttcctgctctccctggcgtgggcttccgcgctccctgactctgcttttattwaaggtgtctgggaaggcatttgtccttcggcttcccagctggcttcttgctttctcactcactgcctcccgtagcctgtgggcagaatccctcaccgtgcccaccttgccctgctctcgtctgacctcacctctgtttccaggatttgctatggctgtcccctgccagtcatgctctgtgcttgctactctgagtgtgtccctggtcccactctcttgcagcctctgtgtcttagcacatgctgccctgatggcccaagggcccttcccctttgtttctgtctggggaatgttctgtctcctctttcttgaacctccttatattccctcaagaagacttaaggcaaaaacaaacctgaacttactatgtgtggtatttttgtgttataagtgtaggacctagtcatagtaacacatttcaaaaatatggaaccgtataaag

SEQ ID NO: 775400 - DNA, 606 bp, Homo sapiens
ttgatttactaattaatttcatttccagacaccaatatatgcatagccttgtttgaagaaaattaaggagaaccattttgtaaatggcaatgagtgtaagacacttaactatcttcctgctctccctggcgtgggcttccgcgctccctgactctgcttttatttaaggtgtctgggaaggcatttgtccttcggcttcccagctggcttcttgcyttctcactcactgcctcccgtagcctgtgggcagaatccctcaccgtgcccaccttgccctgctctcgtctgacctcacctctgtttccaggatttgctatggctgtcccctgccagtcatgctctgtgcttgctactctgagtgtgtccctggtcccactctcttgcagcctctgtgtcttagcacatgctgccctgatggcccaagggcccttcccctttgtttctgtctggggaatgttctgtctcctctttcttgaacctccttatattccctcaagaagacttaaggcaaaaacaaacctgaacttactatgtgtggtatttttgtgttataagtgtaggacctagtcatagtaacacatttcaaaaatatggaaccgtataaag

SEQ ID NO: 775401 - DNA, 450 bp, Homo sapiens
ataaaaaggtcagtgaatatcttcataaaggttataagatgtgaaggcaaaagtctttctagtctattaagatgctgcatagaccaggtgcagtggctcatacctgtaattccagcactttgggaggccggggtaggaggatcacttgagcctagaagtccgagaccagccyggccaacatagtgagaacatgtttctgtgattaaataaataaataagtaataaataaataaatgctacacgatcatagatttagttttttatgttcaaaaaaatccttattttcagaaattctcctgctaaaagccacataaacttgggaagaaaaatagaacacagtgaaccattattgggcattaatggcttactcaaaattaattttatgtattagtcacccagcaatatcctagaaaaaaaagtaatggaacttagaaaaacatttcaggctag

SEQ ID NO: 775402 - DNA, 450 bp, Homo sapiens
ataaaaaggtcagtgaatatcttcataaaggttataagatgtgaaggcaaaagtctttctagtctattaagatgctgcatagaccaggtgcagtggctcatacctgtaattccagcactttgggaggccggggtaggaggatcacttgagcctagaagtccgagaccagcctggccaacatagtgagaacatgtttctgtgattaaataaataaataagtaataaataaataaatgctacacgatcayagatttagttttttatgttcaaaaaaatccttattttcagaaattctcctgctaaaagccacataaacttgggaagaaaaatagaacacagtgaaccattattgggcattaatggcttactcaaaattaattttatgtattagtcacccagcaatatcctagaaaaaaaagtaatggaacttagaaaaacatttcaggctag

SEQ ID NO: 775403 - DNA, 633 bp, Homo sapiens
aatactcattacacgctctttgggcactagaacttgtagtagcctttagaataaacaatgtatctatccatgcttggtaagtacatttttttttttttcaaaacagcttattgggaaagaacacagctgaaacaagtgtttagaattaccaaaaagcaaaaaggtgattttttttcctaacaaaatgaaaattctggcaagtrtataagatgaaaaaatcattttgttttacatactaagagaattgtactttttgaaagtcatcagcataaggaagttaatatcaaattaagaacaaatgtatcattggtccctacagaagaaatacagtatgtatagatgacaagtatgttataactttggtggggtggagggaatgatttctaaaaaggattcaaagaattaacacattttttatgattccaagataagactttgcactttttttacttactgccatatatgtggattttgttgatctaaaataatcaacacacatctttgttgaaatattatctattattctctaaaactgttcataattatccagaataagtgatagtttgtgtttttgcatgtattactgactcttccaaaaagacatgtctcttagatttcactagtattttaggt

SEQ ID NO: 775404 - DNA, 633 bp, Homo sapiens
aatactcattacacgctctttgggcactagaacttgtagtagcctttagaataaacaatgtatctatccatgcttggtaagtacatttttttttttttcaaaacagcttattgggaaagaacacagctgaaacaagtgtttagaattaccaaaaagcaaaaaggtgattttttttcctaacaaaatgaaaattctggcaagtatataagatgaaaaaatcattttgttttacatactaagagaattgtactttttgaaagtcatcagcataaggaagttaatatcaaattaagaacaaatgtatcattggtccctacagaagaaatacagtatgtatagatgacaagtatgttataactttggtggggtggagggaakgatttctaaaaaggattcaaagaattaacacattttttatgattccaagataagactttgcactttttttacttactgccatatatgtggattttgttgatctaaaataatcaacacacatctttgttgaaatattatctattattctctaaaactgttcataattatccagaataagtgatagtttgtgtttttgcatgtattactgactcttccaaaaagacatgtctcttagatttcactagtattttaggt

SEQ ID NO: 775405 - DNA, 573 bp, Homo sapiens
aaccatgactctttggtaaaatcataacatctaataagttttacagaacataaattttctgagccctatgctattgtgttccattcttctgaagctatagatgaatcttcggtatgggcttacaagaaaatggcctagtacgcaatggaaaggacttatcattatccttctgcttttccccctgtgttttggatatataccatttactatgattaatgtttaatttgtttttgtgatttatgatgtctacaytttttggtaacatttgagaaccactgttgtcacaattttttatttccagaggtttaagacctatcaaagagcatttggctaaagttttcttaagacatagcttgatgatctttcattttagatacaatgaatgttaggaaacaaatgtcccagttatggacagttaagctatttccagtgtctcatcattttaactgattctcaatagacagtatcattgctttttaattttgcataactacgcattcataggctaagtcgtaaaagtggaattattgctccagttgttaaactttgttaaaaaattgccaaatgttttca

SEQ ID NO: 775406 - DNA, 582 bp, Homo sapiens
attaacctctgttcaaatttgctattgtttcttatggcagaaaaaaaattccctgatgagtccctattattgaatttttatttcaattaatatacttttcaactccagaatttttatttgattattttcttaaaaacaaaattcctatctccttattcacattatctgtttggtgagaatcattctcatactttcttctgactctttagacatggcttgctttattttagttctttgtgaatatttaaaatagcaaatttaaagtctttgtaataagcccagtagctgagctcatccgtgacactttctttgattgcgtttttgttgttgttgtttttgtatatcaatcgcactttcttgtttccttgcatgtctcatattttttaataaaacctggatatcataaataatacaatgtgccagatttcaaaatyagaatctgccccttattactatttgttgttgttgttgttgcttatttttcatacttttggtctgtttagtgacttcctaaactaattctatactctttatcatgtggagcctctgaaatctctgctcagttagcttagtggtcaccta

SEQ ID NO: 775407 - DNA, 582 bp, Homo sapiens
tttcaggaagttaattgattttttttaagggtcagaaagggatacatcaatgacattgggtgaattatatgtttactgagggtctagttactgttcctaataattttcttacataaaatgaactcaaggttaattaagaaacataaactttcatgttttgccagagccctacaaactaataaattattatgagatatttttgttttctggcttgacattgaaccatgcagttcatctataagttaaacattatagcagaacctggcttttgtaataatattatttacaaacttaagcacattattttttttctacaatccaacctcagatgaccttttgttttgttttttttttgttttcagtgttctgagtgccaaaatattaatagatcttactaaagatatctaacagtatctttacatctaacaattagatayttaacaatatttaacaatgtatctgtggttttaagccacaaaacaatcaaaataaccctccatgtggtttgttttcttctgtcatcataaaacaaagagcttatgccaggcataggacattgacaggggaccacttccgtggaat

SEQ ID NO: 775408 - DNA, 638 bp, Homo sapiens
agccaatgacatgtgtgtgcatggactcttactgtagtatgcattaagtcccctaagccaattacttagtggagacatttaattcagtttaatctttaattatatgcttttgattaatggttaaaataaccgtaagttatagctgcaacattccatgttaattagtgggaaactttctagacaatttggaagamtttcttatatctcttgctttagtttaaaaaatttgggaagtaggaaagagacaaataatcctctttgaagattgaattattaggaattattaagagaaggtattatctaagggtatagtggttagctacgtaggctctgaatcaaacagacctgccacaaaggtctcccaagctttttagatttgtgtttgaggaattttgtataatctttattagacttgggttcctctactaaaaaacaggataaccgtagggcttctctactagaactatgagcctaacagattcattaaagaatagctcctatgtaccatttaatagattgaatcattttcaaaaatgcttattactgacaaagaatcactaatatatacatatgagaaacttaaatacatattagaatacataactgaaaggatattattgaacacctgctgtatcctg

SEQ ID NO: 775409 - DNA, 488 bp, Homo sapiens
ccaacgtgacgctgggcgcgcggatcctggacacttgttccagggacacttacgcgctcgaacagtcgcttactttcgtccaggcgctcatccagaaggacacctccgacgtgcgctgcaccaacggcgaaccgccggttttcgtcaagccggagaaagtagttggagtgattggggcttcggggagttcggtctccatcatggtagccaacatcctgaggctcttccaggtagggrtgcgctccctccggggcggagcacacagtggctacctgcgcccttaaccctaaaagctggcttggactccggtggtgcgggtcaggtcagccttcgctcatttcctccctggagatcctgccgaatccctcccaccccgctcgaggagataccttccctgcttggtttatttcccttccatctctcccctgtccacgctccactccatccggcttgacatctggatttatggccccatttacaagaagcaa

SEQ ID NO: 775410 - DNA, 593 bp, Homo sapiens
aggaatgaagacatgcacatattatatttgaagacatctccatgtgtatttcgtgtatacatacccatgcaattaagatgtctttgggcatttttctctttaagaataattgaaacaatgaatgcatttacttcaacttcatgaacatttggagattaacaaattacaagtgctatatttcttacatatatacaggttatatcatagatataaaagaccatacttggattttacagtgtgttttagtctcaatcctgccattaactggctaagttaccctaaataaatctcttaatttttctaggcttcatttgccttatctgcttttttttttttctttaaaartgtagtttctaaaagtctgtaatcttttttgtttagcttggaaaaaactttgtcttgtcaaaactgtctttgcatttccagctcccacttttggtgagtttgtgggaacttttaaaatatattttcacacagctctcttggtcattactagtcaagttaatttcctgtattcagactgcttttgtattatcttacaatttacttctcaatcatatatatcaaggctactggtagggaaaatgatctct

SEQ ID NO: 775411 - DNA, 580 bp, Homo sapiens
atatatcatttgtgcattcatttgtgtcaacatcacataaacacacatgcaaacatatgtacataattttacctaaatagaaatatagtgttttaatcttatgttttaagactgattataagtactgagcattattacctgacaataattttagttccacattaaagtttgcaaaactcctgaatgttagctaaaatgcagcccacagatactttctttctaccctccaagacctgcacaacrttttaaaagccaggacattttgcagcttctcctgcgaagaggataatctggtgatattgagtctgtagtcttacaaggatgtgatggaaactgaaaggcaggtgtctcctctacaatgagcaggtgctccccaaacagcttagccattagcttggcctgtttcttgcaaaaagccgatgcaaccacccctcgggttgagttagtgtcccctgaacatcaccattttaataactgtagaactatatgcaagggataaaccaggattgatttcataaatctccttttgataggccttaatgttggttccatattttccgttttgtgaatagagttgcgg

SEQ ID NO: 775412 - DNA, 618 bp, Homo sapiens
  misc_feature 1, 2, 3, 4, 5, 6, 7, 8, 9, 10, 11, 12, 13, 14: n = A,T,C or G
nnnnnnnnnnnnnntatagtgtcattacccccacccctaccaccctatactgatttcatacctcagtgccttaacttctattgtctcccttcctatcattcttctcttggataacatttgctcataatttcagactcaactctggtgacacttctaaaattctttccctaaaacccagattggactagattacccgagtgctcccacagtacccattgcttatctctgacatgacttgcagcatcatattgaaatgatctgacaaagtgattgttttctcctgccatgtatatactttargacaacaaagattatgctctgttcgtcttctctataacttcccttccccacaacccccaatatccctctgctggtgtctatcacaaaacctgttacagaataaactgaggaggacatcaaactgacatcagatgttggaactgatataaaatgtttaagaaaaaacaaacagcaatttggaaaccaattcctttgaaaaagtattttgagttctatatacttggtctgaaaaaggtgaggcttgggggtagggtgtgtaatgtaaatcttcaatactgaaaaggtgctgtgcataagaggggtttacttggttctgga

SEQ ID NO: 775413 - DNA, 382 bp, Homo sapiens
cgatgggggacgagagctgagttggcaaaggggggagtgatttatcctcccacacttagaagtaggatggaaagcagaaaggttctacttttatattacttcttcttttcaaattttcatattaacatcccctatccggtttctctagcttatttttctgtagtgggcatcaacgacactatgtgtgatttgtttattttrtttgtcatctcttacccacattaagctctttgagaagagagatttttgctttgttttgttttgtcagtgatatatccccagtgtctaaaacagtggctggcatcatgataggtgccgatagtaggcatactgtaggtactgaatgaatcttcgttggttcttaactaccacaaagtgcact

SEQ ID NO: 775414 - DNA, 619 bp, Homo sapiens
tcacggttgactttacttaagccctcaggtaatgctgctctgaagaagggtcatttgagttggttcctaaaggctaaacatgataagccaaagaatggggaaagagcactccaaacaaggggaacagcaaggacatgggtcctgagactgggttagctgcaaggtgtttgaagaacagaaagcaaaatgtggccattacggtataactaagtaaggagggaagtggcagggagcaaagctggggacgtaggcaggggctggatcctgaagggcctttgcagagcacagtgaagggtccatattttattctgaaattgaccaggccaaatgccttctgaaacctttgtttctctttgtgttgtgtaagtatgaaaccaaagataaagaatgcagctgcctaaccattaacactcytgagtcaggatgatatgagaaaagagatgagctcccgtagagaaaaatgctggtaataatagcttgcatgttagggcacccgtctccgaaggagaacaacattattaacggtgccatatctcactaattgtagtaacctcatgagttagataggtgtacttttttgtggaacacacagggaaactcagacattttaaattaagtt

SEQ ID NO: 775415 - DNA, 652 bp, Homo sapiens
ctcactgcatcctcttcgtgtgtatctgttagaaaatatctaaatcatcatgttactgaactgcgtattggggcagaagcactacacattctccttgcagccaagtgaccctaatccagttatgatacgtgtctctagtctcttattctatgcctaggcaaatatcaatcacggatcaatgctgctgagcacagcctcatagcattcttttctgctgttccagaaagccagcactaattgactggaactggcacttctctctgcagactgatttgtttttggtgttcatggccatcacagacctcaagtttacataactggggcattgtgagccaattttagatttcaagggaaaaaatatctaagtggctcagctcttatcaagcatccacccaatttwaatcgattctggttaggagtgtgggatgggtacagttagcatgagctacataatttgcagggcccagtgcaaaatgaaaatgcagggtttcttgtccaaaagaagcaggaaaaaggctttcttctttcttccacagtcttgacctgttttggtgtgagtttttatctgctacctaatgtcatactccatgaagcatagaatacttatggggcaagtacagaccctcacaggcaccagggatccttccctgtg

SEQ ID NO: 775416 - DNA, 451 bp, Homo sapiens
aggtatgcagctccacacatggggaggccaggacatccagttaggcctatcgaaacaatatttagaaaaaaaaaacacacaatagtggtcatccttgcttcttagcaatttttactcatttttttattgttaaaggaaaaagtcagctgggcttatctcatttgtccatttgttcgagagacaacttgttttattttcaaagttacaatcgataatcttgaaaacagaaacaatactatagtaactggccaacacatttttttatagaggtaaagaaatccaacaartgcattcaaaatttagttcaggagcagcgaggagtgatgtttacttgtccctttgcttgagagacctggggtttctcccaccacccagggtgcattatgaggctggagtgggaggaccatctgtatttaattgaggaaggaatagtaacctattgcctgatctg

SEQ ID NO: 775417 - DNA, 632 bp, Homo sapiens
ttgatgagtgtgtcctcaaccctgattgtagaaatgggaaaaggttctcgaactctgtgtcatcacccaaatgctctactttctcaaggttttcctcagccctgcatacccctgacaatagtagaaatagaggcccgtgttccatagtctaagtctttaaaaattataaatcgagctaacagactgagaaataaatcatatttcatctccatagattgacaaatagaacttagtctccacctgraaggccaagttcgaaagttttaggagttcatgtgatgtcatggagtgagtaggccccagctcctggctccttccttttagccaatccaccttccagtcccactctggctccatcctgcattgtgaagggtctctgtgttcacagaacactgaagactggtcagtccttcagaggatggactggggaagagcccacacaggcccagggatctggctcagagatgtttcagcaggaaattctgtggccttgatacatatagcgtgctctagaaggggtgtgctgtcttcaagtgagtacaactccatgatcccacctgcccatctcttcgtgtgctgcggtgcaggcagtgaaacacaagagcagagtcctctgctgtgtggtccaggac

SEQ ID NO: 775418 - DNA, 560 bp, Homo sapiens
actatattgcctcctttacacttatttgtcatattaggaaaaatattgaggggcagaagtgtttgcagctgtacatttaaaacatctcatgtagcactaaagtttgatgagatgaactgaacttcatttcattatagtgactttttctttctcttttttcttcctcactttagctgtcaccttcactatggtgtcagtccttgggttctacttatggagactcatattattttgccrgaaagcctaagaacgagtttagctattaaaagtaactctacttctgaagtcatattttattcccctgcaatagtttcaataccagggcaagtaaacagtgattaaacaaaaaatggcggcaattatctttgcgggctttgctgtacacataaaatctcaaagaaggactgaattctttgaccaattgaaatgatccccaaatttgaagagaagccatttatttcctggtgtactttagacttcatcttcagaactgccgtttttattaattgtccaattcagaattcaaagatagtactgttctgcttaggaattcaaagcaa

SEQ ID NO: 775419 - DNA, 608 bp, Homo sapiens
gatattagttcttggtcagatgcatggtttgtgaagatttttcacctgttttgtgggttatctgtttattctgctgattatttattttgctgtgcagaagcttcttagtttcattaagtctcatctattttcttcgtttttgttgcatttgcttttggattcttggtcatgaaggctttgcctaagccaatgtctagaagggttttttcaatgttatcttctaggmtctttatgatttcaggtcttagatttaagtctttgatccatcttgagttgatttttgcataaggtgagagatgaggatccagtttcattcttttacatgtagcttgccaattatcccagtaccatttgttaaataaggtgtcattttccactttatgtttttgtttgctttgtcaaagatcagttggctgtaagtatttggctttatttccgggttctctattctgttccattggtatacgtgcctgtttttataccagtaccatgctgtttttcagtgactatagccttgttagcacagtttgaagttggataaggtgatgcctccagatttgttccttttgtttagtcttgctttggctatgtgggctcttttttagctc

SEQ ID NO: 775420 - DNA, 601 bp, Homo sapiens
atgttactggactaacatatatcactgtgttcctaggaaagccctgatttatgccagttgcctcaagcctaattgctaaacagcagtacttctcactctagaaagtgtcatggtttgcactaaaaactctatcgtgacttcactaaggtctcagaactgagatgcaacacaggaggaaagcgctgaatcagttgaggttaagagttttctacctggaaaaataagaagttaaatctaaaatggaaattaaattcattaatagagaaaataattatgtttttggcactcctgatagtgtgtgctgacatttcaaatctttcctaatttaaaaagcactcaaacctsagaagtttacacactcaagtccatctcactaagattacttcaatataataggatatataaagttttaatattttatgtacttaatttgtccctcaactttttagagtgcctttattctattagcaaatatagaattcactaatttattgttataatatggtggagagcaagggatgctttacaaaaggcttcacaagccctgctaagggaatttggatggtgttcaaggaagtcaaataataggtttgtgttgtag

SEQ ID NO: 775421 - DNA, 533 bp, Homo sapiens
acacctctttagaagtacttaggtgttttggattggtttctttcttctttcttttctttctttctttttctttctctctctctctccctctctctttacttccttccttcgttccttccttccttctttttttcagagtctcactttgttacccaggctggagtgcagtggtgcgatctcattgcaatctccgcctcyggggttcaagtgattcttgtgcctcagcctctggagtagctgagattacaggtgtgcaccactgcacccagctaatttttgtatttttagtagagatagggtttcaccattttggccagtctggtcccgaactcctggcctcaagtgatccaccctcctcggcctgccagagtgctgggattacacgtgtgagccactgcgcccggccctggtttggtttctttcatcacactcacctaaggctacagaaatatcctttgtagtgtcatttgattgtatacatactggcagaagtcaagagggaagctacttgtttttttgtacaaccctgatgg

SEQ ID NO: 775422 - DNA, 533 bp, Homo sapiens
acacctctttagaagtacttaggtgttttggattggtttctttcttctttcttttctttctttctttttctttctctctctctctccctctctctttacttccttccttcgttccttccttccttctttttttcagagtctcactttgttacccaggctggagtgcagtggtgcgatctcattgcaatctccgcctccggggttcaagtgattcttgtgcctcagcctctggagtagctgagattacaggtgtgcaccactgcacccagctaatttttgtatttttagtagagatagggtttcaccattttggccagtctggtcccgaactcctggcctcaagtgatccacyctcctcggcctgccagagtgctgggattacacgtgtgagccactgcgcccggccctggtttggtttctttcatcacactcacctaaggctacagaaatatcctttgtagtgtcatttgattgtatacatactggcagaagtcaagagggaagctacttgtttttttgtacaaccctgatgg

SEQ ID NO: 775423 - DNA, 635 bp, Homo sapiens
aaactctcaacatatactcaatcctctggattcttagatgtttacaaagaaaaaggggacagccttgtattattttcctaaaaaacataggcgataggagactaaagcagatttcttcctttttcttaagagaacggctttagtctgagaaagggtaaagaagtaacatcccagtaaataaaaaaaaacagcaacctactactaccaacatgtatgagggcagactacgacttctgtattaaggggaatgatgaatgttttcacattatgggaaccattttaagcacaaccttaaaatagtgctttagagataggtgaagacatcgagaaatttgtctctacaytttaaaccttttctctcccacaaggattttttagtaagaatatgtttgtactagagctaagagaatgtgaaagaaaatttctagccttgagtgttgctgccacctacatggtgggaagactacaaacaaaatctaacacctttcagacaggcatcagctgcagtatgttttctatgaaaatgtactttagaaatccccaaatttgtttatttacttcactatcctgaaggcatgttagtatttgttagtttcgcctcattttctatctcaaatacttgcagacattggagt

SEQ ID NO: 775424 - DNA, 539 bp, Homo sapiens
ctcaagccctgagccagggaccggtaccagtctgtggcctgttaggaactgggccacacagcagaaggtgagtggtgggtgagccagcattaccgcctgagctccacctcctgtcagatcagtggcagcattagattctcttggagcatgaaccctattgtgaactgtgcatttgagggatctgggttgcatgttccttatgagaatctaatrcttgatggtctgaggtggaacagtttcatccccccacacccccattcatggaaaaattgttttccacaaaactggcccctggtgccaaaaaggtaggcaaacctgtggagacagtaaaaagataagtggtttccaggcattagggagaagggaaggagggatgaataggcgggacacagaggactttttgggcagtgactctgtgtgataccataattgtagatatgtgtcatcataccgctgtcaacatccacagaatgtgcaacacacagagtgaaccctcatgtaaacaaacaactttcgtttaatcgtaatgtatgtatatt

SEQ ID NO: 775425 - DNA, 526 bp, Homo sapiens
ctttcagtgatgtccctgctggggccaccagcacaaaggagtgttgtacctataatgtcatcggagcccttgaaggaagatctaagcactgtctttgtctttataggaaatttggcccccacatgtaaatgtgcgaaaccgaaactgcctttcatttaggccaaggtcattactgaggaaacagcagacagaattttggcaaaatatcaaatattttcaataattcaaccatttgaaaaagaatactgcttgtttcggaatataaatgagagtgagtagtagaaataagaaatccaagytagggaccaaagaaaactaagctaaggactctcacagatatgataaatgggcatgcacaaagatgttcatagaagtattattaagaattggaaataacctactatctagcaataatgaatttaaaaagataaactgtggcatatacatattatgaagctattaaagacaatagttttagaaaagagaaataaaactaaagatacagaaaaaacctttgcagatttaa

SEQ ID NO: 775426 - DNA, 596 bp, Homo sapiens
gcctcggcctttcacagtgctgggattacaggcatgagccaccgtgctcagcctgtttatattttcaggtggtttatttgcctttttgttaagttgtaagaattcttcattttttctgaatacaaattccttatcagatacatgatttgcgaatattttctctcattctttgagtgccttttaactcaaacagaaaaaaataaaacaattacctagaattgctatatgtatacagtggtatttattcactaaaatattttttaaactttcttattgaagtatggcttatatacacaaaggtacaggccaggtaggccaggtgtagtggttaatgcctgtaatctcaacaccttcggaggccaaggcaggaggatcatttgatcccaggaattaaaccagyccggccaacatagcgagaacctgtctctacaaaaaaaaaaaaaaaaaaacctaaaaaaatcacccgtggtggcacacacctatagtcctggctacttgggaagctaagatgggagaatcgcttgagcccaagaggtcgcagctgcagtgagccatgttgttgccactggactccagcctgggcaacagagtgagct

SEQ ID NO: 775427 - DNA, 581 bp, Homo sapiens
taaactatctacaaaaattaacttaaaccctcacctcttactgatacacaaacattaacgtaaaatgaatcattgacttaaatattaagagctaacactggctgggaacagtggctcatgcctgtaagcccaacactttgggaggccgaggtgggtggatcacctgaggtcaggagttctagaccagcctggccaatatggtgaaaccccacctctactaaaaatacaaaaattagccaggcgtggtggcaggcacctgtaatcccagctactcggggggccaaggcaggagaatcgcttgaacctggcaggcggcggttgcagtgagccaagatcgtgccattgcactccagcctggggcacaagatcgagacttcgtctcaaaaaaaaaaaaaaacstaacgctattaatattttcaaagaaaacatccaagaaaattattgccacacttatttaggcaacttttctcaagcagaacacaaaaggcacagatacattttttaaatctatatggtggctttatcaaaattcaaatcctgactcttcaaaagtcctaactaagcaaacaaagatacaagcc

SEQ ID NO: 775428 - DNA, 591 bp, Homo sapiens
ttccattggttagtctccaatggcctaccccacttccattttctgtccttctccatgatgatgggccccaaaagaggaactcccatggactgcatctgcaggctcccttgttagattggatttatccattggaaagcaaaggagattgaagaaaggcagaagagaaagtatgatgtgctaggcagaaaatgccttcccaaagatgtccatgttctaatccccagaacctgtaatatattaccttatatgacaaaagagattgcacagatgtgattaaagaacttcaaatggggagattgtctgggattatctgagtgggcccaatgtcatcagaagggttctcataagaggaaggcaaawgggtcatggttagacaaagggatcagaagatgctacactgctggatttgaaggtggaaaaagggaccatgggtcaaggaatgcaggcggctcctagaaagtggaaaagtgaaggaaatagattctctccccagaacttccagaaggaatgcagccttgccaacaccttgattttagcctagtgaaatctattttgcatttatgatctccagaactacaatataataaattt

SEQ ID NO: 775429 - DNA, 643 bp, Homo sapiens
gagaaggaggcagtggccagttgtaagggttgggggaaagggagagaagtaagtgggtccaggctcccactgggtttgaatgctcactggagagctctggagtcagttctgatccctgaaggtgtgtgagctggaaagggatgctatcctaggatggcattatcatctaatggaagagatgctgtcataggattcattaccatataatgaagtgtatagctactttggaaggggaatycagcatcttggatgaagctgaggcccatctagagttattccagacctaatgacaagttaatggggcctaaaccaagggagctatgatggggacgaaaggaggggatgtgatgaagaactatggatttatggccacgagccttagatgctgcttgtccttagcaaatggcaacttagcagggtaaaggtcagaaaaaatataagatgcctgaggcttcaggattgtgtggctaggagaattttggtgtcattaataaaaaggcagaactcgaggagaaaaactggttgggaaaagatgtactgatagccattgttcaggttacaaatgtgatctgctacagaaagatgcagaaagacatagttcctgcttttaggaaagatgaggcacacacatacacatcaaagc

SEQ ID NO: 775430 - DNA, 537 bp, Homo sapiens
tcaagagagaaatatgttgcaatacaataatagtaaaggacttcaacaccctattttcaacagtggacagattatccagacagtaagtcaataaggaaatactggacttaaactatactttagatgaaatggacctaacagacatatatagaacatctcatccaatagcagtaraatacacattctttttaagcacacaggaaagattccccagaatggatcatattttgggagataaaacaagtgttaaaaattttaagaaaattaaaatcatatcaagtatcttttccaaccacagtggtatgaattagaaagcaataaaagaaataatggaaacttcatgaatttgtggaaattaaacatgttcctgaacaactaattgttcaaagaagaaatgaaagagaaacttaaaaatatcttaagaaaaacaaaaatggaaaaacatgatactaaaactcatgggatgcagtaaaagcagttctgagagaaaagttgatggtaataattgcctacatcaaacaagaagattccaaacaa

SEQ ID NO: 775431 - DNA, 579 bp, Homo sapiens
aataagatttgacatatgtatacacccatgaaaacatcaccacgatcaacataataaacatattatctacagaagtttcctcaagtctctgcaatcctctccctgcccctcccaatcccctccaccacagaaaatcatttatttgcttctatctataagcaaactgtctatagataagtttgaattttatagaattttacataaatagagtcatatagcagtactccttttagtctggtttctttcattcagcrtaattattctatgagcctcaagactgatgagtgattcaatagttattgctttctattgctgagtgatattccattgtatacaaaattccacaatatgtttcccattgacctattgttggagatgtggattattttcagctttggttgttataaatagagctgctatgaacatttatgaataagtatggacatatactttccttgctgttgagtaaatactaaacatagaatgacggggtcatgtggtatatgtttaacttcttaagaaactgaaaagctgtttttcaaagcagttgtatcattttacacattttacatttgtact

SEQ ID NO: 775432 - DNA, 645 bp, Homo sapiens
acaatccttccatatgcaaaacatcagctaatgtttcttaagtgagtgcatcaatcatgaatttttctcatgagtataaggcttttatttgaatagctaagcaaattaagaattttagaacaatagtaattttatttataatgcctaaaataaagcataacaagcattattttaaaaataacatttctaatttttcacagtggaaaataaatctaatgaagaaattcaataaatttcagcttttatagaccacctaaaacaatgagagaaatctaatatagatatatgaattctacgtagatacaaagacatcatgagaaaaactatgtttctgaattggtttgaacacaggaaatattttttgtgtacaggacaaagatgtctgaaagacagaaagatgcatataacagcctttccccagcatcyctactgtgatccagtagaaaagcttatattcatgaccattctcaacagttacttttctcccacgcccccaagcagtgactctccaatctaaaataaagatacacaagaggttggtctcgttctagttttcctttcctgtcatcaaatgatgtcatctacattgagatgtcttggtttgtgtccttgtgactgaagatataagaaagcttgggaggccga

SEQ ID NO: 775433 - DNA, 561 bp, Homo sapiens
tacacataaaagtctaaattagaaatatttatactaatctttagagtaatgcagaaaaaatgaccactttctctggtactcttttgctattctatgtgataaactctttctcttccagtttcctaaaaagttatgtcatgaaaaggctgaatttttctctagaaaaatctgctctgtctttcccaggcagcataaaaattggaaatctcacaaraaagcactctggcttgctaaagaaatttgtgagaaatggaaacagctatagataagtatctaacttttaggaagccattcaaacattgctgaaatactttgtcttttgatatttgcctgaaacttaacttctaggacccagggtgggtggatgagtcgaaggggcatacggtggcatttctttccgtgagtctcttacagtctcctatttaaattgagttaggattacttctggcaaaatcccaacataaaaatcttctaggaagatcagttctgtaaattagacatactagataaatgggcatcaagcagtttttcaaaattatgcagttgttaacttcataaggg

SEQ ID NO: 775434 - DNA, 588 bp, Homo sapiens
cctgctatacaaacaaaatgaaaatgtgaaatagtaattagcaatacattttcctagaatcaggtaaccttacatgtaagatcactgtaagtcacatatttagtggccaaataattttcatcttagatctatggtgcaggcttagactgcttaatgcagtctgaagacatataatgagcaaataagatcatgcctrtgggaaaggaagtcaatcattaagaaatcaggatggttagaaccggtaagacaaagagtaaccagggctgggcagtgggctatataatagggagaatgaacaggtataggaggacagagttgctatctcagtgaaggaaagtgggaaaacaaaaacgatgcaggctacaaagagtgagggtcttagactgacaaaaaagaaattgggattcaggaaagacattttctttcataggaagatatcaaaagtatcaaaaggggaactcgtttctgaaaagcactgaaagtagccctatttgtattcactctgccctgggtccaggtggtagaaaagagtgggtgagcttagatgaaacagtggggagaaaaatggctgaataggataattcagtg

SEQ ID NO: 775435 - DNA, 615 bp, Homo sapiens
cacatgatttatatgaaaatcatggcattatatctctatgtgtatatacatgcatgtgtgaattcagtggtagaattcgttagtgaagtcatcaagtcctggctttctttggtgggaaactttttattactgattcaatatccttactcattattcattttttcagatcttctatttcttcataattcaatattgataaatggtatgtgtcaaggaatttatccatttcttctaagttatgcaatttgtaggcatataattgttcatgatagtcttttatgattctttggatttctgtggtatccgttctaatgtctttatttttatttctgtttttatatatttgmgttttctcttttttttcttatttagtttagctaaaggtttgtcaattttatcttttaaaaataccatctcggtttaattgatcttatctatgttttttctggtctctatttcatttatttctactctagtatttatcatttccttccttccactaactttgagcttagtttgttcttgtttttctagttccttgaggtgcaacattacattgtttatttgagatcattctattttgatgtagactttttatttctatcaactttcctc

SEQ ID NO: 775436 - DNA, 600 bp, Homo sapiens
atttactatttgtattaaaaatataaatgtaaaaatcaaaatgattgttatatttgcacagttttccaaaaaagatttttaatttcacaatcatctattagaattttgagaaaaaggaattataatcaacaaatatttaatatttaaatcaaaattatttaagtaaaactaaatttttaaatatcaaacttacagaaattaaattgtattttattatatcaatatctatctagttgccaatttaaaaaawatcaataacacacttcaaatatgtttggtctagcgtcccagagaaacaaagtaaaagtaatatgaattatttaaaattccaaaatactcttcaactgccatgggcaatacttgtgaatataatgctaatttgttaatgtctccaaatccacaaatggaaacaaaatgaaacacaataaatggatcttagtactgctgggaaagaccgttaggttaggcaagaatctcttatgatactgtactggaagaagatgatacattaattattttgaattttgtcttgtctaagctctgctaccattctaatcctctggacacttctaagcaccgtatgtaggtccccaactttgg

SEQ ID NO: 775437 - DNA, 620 bp, Homo sapiens
ttttttaaggaatctcagggtttgctgaatttattttcaaagcttccatgctcaggataagctatttattttagaggcctaaattaaaaatgcactgttattttggacaaacaccctttatctccacatttgggcaatgttgaacaatttttaagatttggaagtaatatttgcaattggtccatatttgccataatcatagaatttggaacttggaaaaaaaatcttagagttaatgtatcttgcaatgtttagagttttttggtatttgaaagtataagcttaaaaaaytgatagtttcaggcttttaaaaataagtctgaattcatttttataactttccttctttttaacatttttaaaatgaatttttattttattttattttattgttctatttttggagacaaggaatccctctgtcatccaggttgaagtgcagtggtgcgatcttggcttactgcaacctccacctcccagactcaaggattctcccacctcagcctctcgagtagctgggattacaggcacatgctgccatgcccagctaagtttttgtatttttgtaaagactggattttgccatgttgcccagactagtcttgaactcctgggctgaa

SEQ ID NO: 775438 - DNA, 610 bp, Homo sapiens
ctacctggggaaattgaactactacttctcaatggaagtaaagaagagtatatctacaacacaggagatccttcatgatgtctcctagtattaccatgttctatgattaagctcaatgcaaaactaaaacaaccaaatccaggcccatccttttagaaacgaaggtttagttgtgaccaccctgcaagttctacaaccagtggaagttcttgytaaagagaaaggaaatacagaatgggtggtagaggaaggtggttacaaataccagctatgatcatgtgactagttatagaactaaggactaaaattatcctatttcctccttattttgttttgaacatgtctgtgtgtgtgtgtgtgtgttttcatcaaatatgtttgttttctttcttttgtttacatctcagtatttatgttctggatatcaggagaggattaaacaccactcaaagaatgtcttagtgcatctgtgctcctgtaccaaaatacctaagactaagtaatttataaggaacaggaattaatttttcacagttttggaggctgggaagtcccaaatcaatgctcccaaggcatttgcaagccttcttgctgcatcgtcacaaggcgg

SEQ ID NO: 775439 - DNA, 623 bp, Homo sapiens
ccgatgaaattaaacagtgtgtaaatattgtcactcataataaggcattttcctaaaaaactctgaattttcaatttgcctctttaaaatgggaaaacagaatccattaccagaatatttttaatacttaaatatttctcatgtcatttgtaatctagaccttacacaatttctttctatactgaaaaatatcaatattgacataagtatttgtaatgcttcaratatgtgggttaagtgggaaggtcggccagagcttgaacccttttggggcagcgcccaatacctattttagtcactgctgtgttttctatgtgcagcaatgttcctgggaatattgtagaaattccatttgtattcattgaatgaatggatggatgaatctaactacctaattgtgacagataattaacatgaattgttgacaaaaatacctacagtggaagctctttgggaaaatgatcctaaaatacaatactcattacattataaaaaatgagtttctatttagtcattcaaaaataatttttaaaataaatgattttggtttatctttctcttatttgatgattttttatttcatataatcatcaatctttaatcttaatattctattttgtatc

SEQ ID NO: 775440 - DNA, 588 bp, Homo sapiens
aaaaattcaaaatatgaataaaagtaactattcagaccccatcacttaatacatttggaactttaatagtctgtgtcttcggtatctagatgttaagtgtcagcctaacatcatcctttttatggaattctttacacaaaataggttctgtttcaacaaaatagaatatgttttgaaattggcttacaaattcaccgatgaaattaaacagtgtgtaaatattgtcactcataataaggcattttcctaaaaaactctgaattttcaatttgcctctttaaaatgggaaaacagaatccattaccagaatatttttaatacttaaatatttctcatgtcatttgtaatctagaccttacacaatttctttctatactgaaaaatatcaatattgacataagtatttgtaatgcttcaaatatgtgggttaagtgggaaggtcggccagagcttgaaccctttyggggcagcgcccaatacctattttagtcactgctgtgttttctatgtgcagcaatgttcctgggaatattgtagaaattccatttgtattcattgaatgaatggatggatgaatctaactaccta

SEQ ID NO: 775441 - DNA, 559 bp, Homo sapiens
tgaattggaatacatattaatgaaaaagtatcaaaatattacatgtacattgtacaagaacagagtacatgaaatctacatcaacagtgtggcagttgtgatgaaaaaaagtgctaggaaaggagtcttgctgatagcccgaaacsatcttataaaaatgtcctcaggtccatctgcagtgacaacctacttgaggaggggacctgctttgaggtgccaccagagtcacctaattcagtggtgtgttaattaggcacctcctgtctaactactatgtaaagcttaatttgggctattgtgagtaatgttgccatgactcacacatgtatacacatcacacacgtatacacatcttaaatgaacataagcaccagtttcccttcagtatacacccaggaatgaaattgacgtgtcctaaagaatataaatatttttaattttattaaatactggaaacagctttcttgagtagttttacacattgacacacaattctatttgtgcttacacttcatatattttctgtctttttcatcagagccattttcatggtgtctta

SEQ ID NO: 775442 - DNA, 581 bp, Homo sapiens
aaattacaattaagaagtgaatcatgttctattggcagtaattctgtagagaaactggctcatgccgcagttaagaattaatgaacctagtgggaatcatagactattgaattctaatctttgggtttggctaacctgctgcttgatctcaagtcagggatggagcctacctgttcttcagtcttctctggaaaaagaatgatgatgattttatatttacatacacacaaaaatgaattgtgtgagtactcttggtaataaytggtattattctttacaaatcacaaaatatatttattttatcttcagaaatagcacagaataagtcatacttattcccctttgtgtctaaggtaactgaggctgagagattatataattttcacaatgtcaacaagcacaatggttgcagagccagtgccttgaattcatatcttctgatcccagttccaggtttaggataacacgccactgctgtctctacttcggtgagagcaaaggatgatttttacttccaccactgcccccttcaacccatttttgttcagtcccagaagaccaacttgttaggaatttgaaag

SEQ ID NO: 775443 - DNA, 582 bp, Homo sapiens
gaaataataactctgattacatcttgattttgggcatccagcttctagaactgtgagacaatacaatttgttttttggggttttggtttttggtttttttttttttttttttttttttttgggttcctttaaaaaataaaactacagagacagaaaatagaatggtggttgccaaggactgagaggagggaagaatcggaagtcattgtttaatgaatatagagtttcagttttccatgatgaaaaakgtcctgaagatggatgggggggatatttgcacaacagtattaatgtacttaataccagtgaactgtacacttaaaaatggtgaatatggtaattttatgttatgtgcatcttgccacaataaaataaatgaaaaaataaaattaaaaagcatattacataaatttttacacctctaaaaatggtagttttgttatacaggtattacaataaataggctatagctacatgaatcagtatagacatcaataacatgaatgttgaagatgaaaagcaagctgaaaattgatatatttatatctatttatacatcttttaacactgtgaatgaagcta

SEQ ID NO: 775444 - DNA, 582 bp, Homo sapiens
gaaataataactctgattacatcttgattttgggcatccagcttctagaactgtgagacaatacaatttgttttttggggttttggtttttggtttttttttttttttttttttttttttgggttcctttaaaaaataaaactacagagacagaaaatagaatggtggttgccaaggactgagaggagggaagaatcggaagtcattgtttaatgaatatagagtttcagttttccatgatgaaaaaggtcctgaagatggatgggggkgatatttgcacaacagtattaatgtacttaataccagtgaactgtacacttaaaaatggtgaatatggtaattttatgttatgtgcatcttgccacaataaaataaatgaaaaaataaaattaaaaagcatattacataaatttttacacctctaaaaatggtagttttgttatacaggtattacaataaataggctatagctacatgaatcagtatagacatcaataacatgaatgttgaagatgaaaagcaagctgaaaattgatatatttatatctatttatacatcttttaacactgtgaatgaagcta

SEQ ID NO: 775445 - DNA, 543 bp, Homo sapiens
caaaaggctagttctttgaaaagattaagaaaactgataaaactttaactagtttgactgagagaaaaaaaaaaacaggcacaaatatatcaggaatgaataagaaaatatcactactgttttcacagatattaaaagaaaaatatggaaataatataaacaacctattttcataaattgtaaagcttatatgaaaatcgatcaattccttggaattcacgagctatcaatattcacacaagaataaatatgaattattccattcttattagaggaactgaacatatagttttaaatattccatacaagaaaacacraagttaagatagtttcactggaaaatatttaatgaagaaataatactcattctacacaatatttcaagactatagaagaagaaggaggaggaaaaggaagattttaaaataattatgactgatgtgctatgaaagatggatgaaagatcaataaaatagatgaagtggtagaaaatattaactgagttggaattcataaaaaggaaccaatgcatgttctagaaga

SEQ ID NO: 775446 - DNA, 619 bp, Homo sapiens
ttcacttctgctgcttccattcgagccatctgtgtctctctgctgggccatcacaacagccccagattgttggcatctcttatttgccatcagcctctcccactggcatcagttcttctgtctaaaatacaatgtcattatgctgttcccacctttaaaggcccacaatggtgttcaatttccaatatgatcaaaatcagtttttgagcacagcatattagggactttcacagtttgacctgtccccttcatccatacctccagctacagcytacactgtggccacaacccctccctatttagctttagacactgtatttcatctaccccaaacatctcacattttccaatatagtgtgcttgctcttttgcttccatggaatttcatttctaaatctgttctatttctttactagatctagtgacaaaagtttttacaatctagtgagatagcaggaaatgttccttacataaatatttgttgaatgaatacactagatgcctgatataactacaatcattgttggattagtatgtgaggttggtaaatagttacaaaactggaaaataaaataagtaggcttggatatttgcctggatttcacaaaaagattgttaa

SEQ ID NO: 775447 - DNA, 617 bp, Homo sapiens
aacctaacagctatcataaataatcagagcctatttgaaggtggaagatgggacattagaagctatttacactactagagtgatgccatcgatcagtagcggcaacccgtagataaggctcctatgatgtcatggttatttatgatgggcattgacagtaaagctactayggaattttctcctcagacagcttcattcatttttgtttgtgatgcattttgttattaaagaagcaatcaatagcaaaaatcgtggtgataaaagtattacttgttaaatatgtgaaaaatgtgcatgtatgtaagaatgtgggacaaaagatgaagaatttaaaaattcactggcagtgtttacgtgttccagctacaaatacataatagattcatttcacatgtcttgggctttcaaatgtggcccacttgttcttcctcttacatcctattctcttgttagaaagcagagttaaaatgttgtggtgccctcccacttccccccacatcatatatttgactcactttagacaatataaaatttaattagagaaatcacatgtgataaagacaaacacccattactttgtacataacccatctatatgagagcaaatttggtgattt

SEQ ID NO: 775448 - DNA, 617 bp, Homo sapiens
aacctaacagctatcataaataatcagagcctatttgaaggtggaagatgggacattagaagctatttacactactagagtgatgccatcgatcagtagcggcaacccgtagataaggctcctatgatgtcatggttatttatgatgggcattgacagtaaagctactacggaattttctcctcagacagcttcattcatttttgtttgtgatgcattttgttattaaagaagcaatcaatagcaaaaatcgtggtgataaaagtattacttgttaaatatgtgaaaaatgtgcatgtatgtaagaatgtgggacaaaagatgaagaatttaaaaattcactggcagtgtttacgtgttccagctacaaatacataatagattcatttcacatgtcttgggctttcaaatgtggcccacttgttcttcctcttacatcctattctcttgttagaaagcagagttaaaatgttgtggtgccctcccacttccccccacatcatatatttgactcactttagayaatataaaatttaattagagaaatcacatgtgataaagacaaacacccattactttgtacataacccatctatatgagagcaaatttggtgattt

SEQ ID NO: 775449 - DNA, 542 bp, Homo sapiens
agtttcaccttcccttgagggtctgtcacagtcacactgccaccgccaacatgctaggttctgaagatgccacttctctgataaattttggtttcagacaatacctaatctctttacacaatactcagagaaggaccaagtataagtaaaattataactaaatgttataaaatatataattaaaattttagggaggactgtaagaaaatcagcaagggaaatcacaaaagtaacacttactggttttattattttaartcttgctgccttctttgtttttaaaaagctctatagatctcttaggccaacgtgttacatgaagagaaagtaggcttctcgcatagctgttcaactgctttcctagtttatgaataaataagccaagatcaatagagtgctgtttccattccctctctattggcttgtgattgtctatgcagaggctgatgccaggctctggcagaacattaatgtggactcacagttatggatacatgattcacatttaaaaatccaataagaaccagagttggcaggcacga

SEQ ID NO: 775450 - DNA, 378 bp, Homo sapiens
aattcagcatgaatacgacatcactggaacttgttagtgttatttgaaagatgtggctgaagttttacatagggaatgtgtgcttccatcacaagtaacacagtgtatacaaaactaacaaagcagtttgtggccaagaggtttttgttttctaggatgaataagaagkccatgttcttgaaggaacttgaggaacaatgactacttcaagtccaccctgaaatatggacacgatggaaaagcaaaggtgggtcatccacctgggaatctctagttcaatggttagctcagtaaatcttcccaatttaccatgcagatccatctcccttaaccccataaactgggctaaagaataaacatattgcaatttgggtatta

SEQ ID NO: 775451 - DNA, 553 bp, Homo sapiens
ttttatggctttttaatattccatgatgtgtatgtaccacattttctttatttagtccaccattgatgggcacctaggttgattcaatgtatttgctactgtgaaatttcatggcaatgagcatgtaggtgcatgtgtttttttggtataattatctagtttcctttgggtatatacccagtagtgggattgttgggttgaatggtagctctgatttaagtgttttgagaaatttccaaactgctttccacattggctgaacaaatttacattcccaccaacagtgtgtaarcattcccttttctccgcagccttgccagcatctgttgttttttgattttttagtaatagccattctaactggtgtgagacggtatctcattgtggtttaaatttgaatttctctgacgattagtgatgatgagcagtttttcatgtttgttagccacttgtatgtcttcttttgagaagtgtcatttcatgtcttttgtccattttttagtgggattatttgcttgtcaatttttttaagttccttatagatcctagttat

SEQ ID NO: 775452 - DNA, 600 bp, Homo sapiens
aggtttaatgcctgttgaggtcaacccacagcagtggaaggtggcccctagaatagagtagtgctcttacattgggcatttgagcaaacaaaccctgggaaattggaactaagagaagggaatcaagctggaagtttgtagcccaaatattcattctcatctacaaaaatccaccagaacaaataaggttaagctgatgcgtatccgcagatttgcaacagtgtggcattccactctctacttttcttgtcagaaactgagaatgtgtaaaatggaagatgtggcgatatcaagcagccaaagctattttccaaatgaggacaaaagaagtgcggccagtttacacaaagcaagcgaacttgctgagcagttataatctgcattccagattytcagcccagagccatcattcctggcttgctcttctaaacagaaatgtcaatgcaaagattaaagtggattgtagtgaggtagaaagttgtcagcagggactaacatcagagtcttacaaaggcattttacctagttaagcatttatggtatgcacgcaattttggccatcacaggctcaaggagagggattctacaaaatacatcaca

SEQ ID NO: 775453 - DNA, 671 bp, Homo sapiens
atagttgcacttctgtaaggacaacgcttggctgttcaacaggcaggaatctgtgcagtagaggaactcggggcccacttagaggcagggtaagttagtctgtgggaatctccgatcatgttccatgcactggatttatccattcttcatctctgctacaagtcaaacatgccctatatcatctcccaaatcacrtggaaaaatctccagacaagcattaagagtaacctttatttgcattcacaaactaggtggactgaacaaaaaacaacactgaaaaacagttcaaaaaaaaacaaaaaacaaaaaaaaacgacaattgccaggttttcactaaggtagggaattgggtagaaagacagcatggaatttggttagtccaatgctgaaaggagacacaagcaaggaagccaaatatcacagcctgccatggctctaggcctgctctcctacacaggtactaatttcgatgaaaaaaggaaaatccaggctacagtgaatcggtgatacttctgcaattctcaggccatgggggtgcttgtttttgtttcaaaaacaagacccaaaggtccatgggtgtcagagttcccagccactctagttgcagtgaaaaatgtacaggaactaggttgaccagaaatcctatagactccagggttgaagagacaatg

SEQ ID NO: 775454 - DNA, 522 bp, Homo sapiens
ttgcttttactgcttgctaatttcttcatgtcttccatccagttcctcttcccctcaccatcctcctctctcctcacccagtctctttattcctgaagagccaaaaggaaatttctggaaatgaccttctaatcactcaagctttttctctaaaaaaatttaacgaatcttcccaagaccctaattagcttaacctgrgatccaaggactgccctaggcctaaataatccatagatgcgcttcagggaccccatgagctagctgaaattatatgcaaaattgtgggggtgggtgcaaaaaaaatcagaaagaatgaataagacctactatttgatagcacaagagggtgactatagtcaatagtaacttaattgtaccttttaaaattaactgcaagagtgtaattggattgtttgcaacacaaacgataagtgctctaggggatggataccccattctccatgatgtgattattacataataagtgcctgtatcaaaacaggtcatgtatgccacagatat

SEQ ID NO: 775455 - DNA, 522 bp, Homo sapiens
ttgcttttactgcttgctaatttcttcatgtcttccatccagttcctcttcccctcaccatcctcctctctcctcacccagtctctttattcctgaagagccaaaaggaaatttctggaaatgaccttctaatcactcaagctttttctctaaaaaaatttaacgaatcttcccaagaccctaattagcttaacctgggatccaaggactgccctasgcctaaataatccatagatgcgcttcagggaccccatgagctagctgaaattatatgcaaaattgtgggggtgggtgcaaaaaaaatcagaaagaatgaataagacctactatttgatagcacaagagggtgactatagtcaatagtaacttaattgtaccttttaaaattaactgcaagagtgtaattggattgtttgcaacacaaacgataagtgctctaggggatggataccccattctccatgatgtgattattacataataagtgcctgtatcaaaacaggtcatgtatgccacagatat

SEQ ID NO: 775456 - DNA, 479 bp, Homo sapiens
ccatctcattccatcccactccactccacttcatttcattccattctcatttcatttataaaatgacggtcaggactcatgaaactgatctcatggtccactaataggttgcaacctgtgattttaaaaataccagattgggttatattcaaattccctttaacccccaaatcctgtgagtccaatgtaaattgctactmcagtattagggtacaaaattctgtgcacagcaggctcacagataaagtttttgacaaactgaaaaccatgtgttattaattcacttactcattgattcacttcctcatccatcccgttcattacttaccatgtgccaggtactgtgctaggccacattgatataaggtaaataagacacagcccctgttctcaaagagctcttggttacagggacactgattaggtttcctggggttgccaggatcctagcatctgctttccctgagtttccttggaag

SEQ ID NO: 775457 - DNA, 568 bp, Homo sapiens
gctagaaagttcaagattgggcatcttcatctggtgagaacctcagtatgcttccacccatgaaagatggcaaagagaagccagcatgtacacagatcacatgacgagagatgaagcaagagagagaatggggaggtgtcaggctctttttacaactggctcccacaggaactaatatagtgagaactcacttactcaagagggatggcagtaatatattatgagggatccactcccacgacccaaacacctcccattaggccccacttccaacatggggatcaaatttcaacatgagatttggagagaacattcaaaccatagcaagcgatctcccaatttcaagtcccaawatcttctggctggaagccagaagttgtcacattagttgtcacattagggcgcaaaaaagatctgaaacacaaattccttctataaatgtttgctaactgaagataaaagctaaataaaaggtctccaatggattttctttgagttataatgaacttactattcttgagttcctcaaaattaaggagaaaaagaactcttctaactctaatgaaac

SEQ ID NO: 775458 - DNA, 603 bp, Homo sapiens
gagagatgatttagggtgtctggtagaaaaaatttctaagcagcaaagcattcaagaagtgactgggtgctgttaaaggcattcagttgtacaagggaggcagagcataagtttggagagtgtgcagcttggcagcgtgatagaaaagaaaatccccttttctgaggagaaattcaagctggctacagaaatttgcataggtaatgaggagctgaatatgaatccccaagacaatggggaaaatgtctgcagggcgtgtcggaggtcttcatggcagcccctcccatcacaggcgtggaagccttggaggaaaaagtggttttgtgagccagacccaatgtccctgtgctatgtgcagcctagggacttggtacccwgcattccagctgctccagccgtggctgaaaggggccagcgtagagcttgggctgtggcttcagagggtgcaagccccaagccttggtgttgatgctgcaatgtggtgttgatgctgcaagtgcacagaagtcaagaattggggtttgggaacctccacctgcatttcagaagatgtatggaaatgcttggatgcccaggcagaagtttgcagcaggggtagagcat

SEQ ID NO: 775459 - DNA, 660 bp, Homo sapiens
agtcacccaggctggagtgcagtggcactatctcagcttactgcaacctccgcctcctgggttcaagcagttcttgtgcctcagcctcctgagtagctgggactacaggtgcatgccaccatgcctggctgatttgtattttagtaaaaacggggtttcagcatgctgcccaggctggtctcgagctcctgagctcaggcaatctgcccacctcggcctcccagagtgctaagattacaggcgcgagctaycccacctggcctattattcttgatttctagttttattccattcttatctgaggagatacttgatacgatttcaatttttaaaaatttgttgacacttgttttgtgtcctaacttgatctatcctggagaatgttctatatgctgatgaaaagaatgtgttcacagtggggtgctggtgcccactttaatcactcctatttaacacagtactgcaagtcctaaccagaccaatcaggcaagagggaaaaaaagaaaaggcatccaaattagaaaagaggaagtcaaactgtccccctttgctgatgatatgatcttatatttagaaaaacctagactccaccaaaaaacttagttctgctaaataaattcagtaaagttgcaggacaaaatcaacacacataaatcaata

SEQ ID NO: 775460 - DNA, 660 bp, Homo sapiens
agtcacccaggctggagtgcagtggcactatctcagcttactgcaacctccgcctcctgggttcaagcagttcttgtgcctcagcctcctgagtagctgggactacaggtgcatgccaccatgcctggctgatttgtattttagtaaaaacggggtttcagcatgctgcccaggctggtctcgagctcctgagctcaggcaatctgcccacctcggcctcccagagtgctaagattacaggcgcgagctatcccacctggcctattattcttgatttctagttttattccattcttatctgaggagatacttgatacgatttcaatttttaaaaatttgttgacacttgttttgtgtcctaacwtgatctatcctggagaatgttctatatgctgatgaaaagaatgtgttcacagtggggtgctggtgcccactttaatcactcctatttaacacagtactgcaagtcctaaccagaccaatcaggcaagagggaaaaaaagaaaaggcatccaaattagaaaagaggaagtcaaactgtccccctttgctgatgatatgatcttatatttagaaaaacctagactccaccaaaaaacttagttctgctaaataaattcagtaaagttgcaggacaaaatcaacacacataaatcaata

SEQ ID NO: 775461 - DNA, 642 bp, Homo sapiens
ctttctgcaacatgagctcctaggatatgctgatggtagagcttcctaagtggctgaccctgttaattacagggggcctcaaaggctggggatacccagccaggctgtgcgtatggatggagcatatggactgcctgccccatctctgtagaaggcatgggtctggtcaacattgggccctgaggatgcagagatacaattattcaggttctgttacttcctggcctgggatagagcagagtaagtcacttacctctcaatgcctcgctttcctttcatctataaaacaggatgacaacaggacctacctcgtatcgttgtgaggattcagtgttaagggcttagcacggtgcctggcacacagttagcacttgacaaatgtragccgttttggggattagagtgaatagagaatgatctctgtgttttaggcgcctacctgtgccagcaacctgggaggcaccttgcatagcttagctgaaatcctcacagctaaatcctcctgtaaggagagggcgaagctatccatgaggaagatgcaatcagacatgagctgagtgacttgtccaaggttgcatgctggtgagcggccaggcttgactcaaagccaggttcggctgcctgattccaaagcacagaccc

SEQ ID NO: 775462 - DNA, 606 bp, Homo sapiens
ggagagaggcacttgcagataattttggtgagagtgaaggcagacaaaactattagagaagtggggagaaagaggtgttggttgttgaaatagaggtcttagtgatggctacaaagttttcctttgggaatgtattaacagtaagttggaatcagggtgggaagtggttggaaactgagatgtaataattagtgatttggaggtgctagggtgtggtgaagtcaaattcagggtggcatcrtgagattgtgtggctgaagggaaggagagaagtacctagttggagatatttaggtcaaggaactcaggagtcagatgggttgtttgcctcaggcatgcggaccctgcatcaatacctgttagtgattttcttctcacttagtcgtcttcacatcttggaaagcaattattggtatctttcttgtcagaaacttgaaaaagtacaccactttgcttgattcccaagctttttttttctagcctagctatttcttcaggtctcattttctattttcacactgtacatacacatttcttcccctacccccctttttttttgtcagtgtttgcagagcagattgggagtttatatgaatttagtttaaa

SEQ ID NO: 775463 - DNA, 606 bp, Homo sapiens
ggagagaggcacttgcagataattttggtgagagtgaaggcagacaaaactattagagaagtggggagaaagaggtgttggttgttgaaatagaggtcttagtgatggctacaaagttttcctttgggaatgtattaacagtaagttggaatcagggtgggaagtggttggaaactgagatgtaataattagtgatttggaggtgctagggtgtggtgaagtcaaattcagggtggcatcatgagattgtgtggctgaagggaaggagagaagtacctagttggagatatttaggtcaaggaactcaggagtcagatgggttgtttgcctcaggcatgcggaccctgcatcaatacctgttagtgattttcttctcacttagtcgtcttcacatcttggaaagcaattaytggtatctttcttgtcagaaacttgaaaaagtacaccactttgcttgattcccaagctttttttttctagcctagctatttcttcaggtctcattttctattttcacactgtacatacacatttcttcccctacccccctttttttttgtcagtgtttgcagagcagattgggagtttatatgaatttagtttaaa

SEQ ID NO: 775464 - DNA, 626 bp, Homo sapiens
aatacccctcccaacaatgacagaatatccatattcttttcagatgcctgtggaacatatagtaagatagagcatattcctgggccataaaataaatctcaacaattttaaaagaattgaaatcataaacattgtgtattatggacttaattatgtccccccycccccgtgccaaaattcatatgttgaagccctaaccccttagtgtgattttttgaagacggagcctataaaaaggtaattacggttaaatgaagtgaatatggtgaggtgaataaggttacatgaggtgaatatggtggagccctaattcaaaatggcttatgtcttgatgagaagagtaagagacaccagggatatacactcacagagcaaaggccatgtgagggcatagtgagaagatctgccagcaccttgatcttggacgtgtggcctccaaaactgtgaaaaaaaaaataatttctgtggtttaagtcaactagcctatggtactttgttgcggccatgctagaaatcaataatagaaagaaacaggaaaatctccaaacacttgttaactaaacaacacagagttagctctctatatctatgggttctgcatccatggattcaaccaaccacagata

SEQ ID NO: 775465 - DNA, 640 bp, Homo sapiens
ggaaccctaaaatttgcaagtaccgacccaaaactctgagaataatgttagttccaggaagctgattgcatcatttcagtggaccagaacagaaaataatgagttacatttaataactctttttaagttttctaatttaccacctggctgataaagtattaatgctataggaattggaatccttgaagtcttacggccacgccctcatcagtttgacataagattctactaaactrgtttcaacattagaataaggaaaggaaaattcctactttgtaaaaatcatattattctgatttcatcaccaacctcacagttttccaggcatatgtagaagaagtaattataatgccaaagtatgaaatatagccggtttcataaccggaatgaattatggctaattctcctgcagtaaataatttgtttttcaaatctgtattccccagacagctgagccaggccttgcttctcaagtgttttatttaaataggcagtatgtcagtggagttttaccacagagtttctgagcgcagagagcctttccctaggagtggggtgcagggaactggagggcaatggttcttatgagaaggtgatgatgcttctaagaaaaaagattacacgtaagttaatacctaac

SEQ ID NO: 775466 - DNA, 534 bp, Homo sapiens
ttcacttggattcagatatccatatgtgtaatacaggccaggtactgctttatacacattatttaattaatcttgtcagtattatcactttacagatggggaagttagtgctcagaaggtttaaatactcacagtgtatgagatggagttgggaatttgaatacaaactgcctcatttcaagatttatttttaaaaaatgtcatcatcatatatgcaagtattttatttattttgtctgggaattttctatttgcttcattaatcttttttcttatgscttaatagaaaccaaatcatatttaattacagtaaaatttaatactggataatgtatcttattctttttttccaaaaattttgagtaatttcacctattttaaataaatgtcttggctgggcatggtggttcacacctgtaatcccagcactttgggaagctgaggcagttggatcacatgaggcccaaagtttgagaccagcctgtacatcatggtgaaaccccatctctactaaaaatacaaaagttagccagg

SEQ ID NO: 775467 - DNA, 618 bp, Homo sapiens
gtcccaagtagtagtgtcttcctagtatattagtttgatttaatatctgagaagtgtatatagtttgtggtaaaaagattatatatcataaagtatgccttcctgtttaaaaaaagtatatattctacacatatatrtatatgtatatctatatctctaaactgctgttaattgattaaaatctggcaaagttatatttactttaaaataaaataattttattgcaatgtatttatcttcattacttaaaatagatgctaatttattttaaaataagactaccttgaatgagtatgaatatatttttatttaaattttgatacaactgatagtttaatactattggttatagattttttatcctgacattgaaaagttaaagaaaaaacattttgttctactgcatgtcatggaataaacacatcgttttgaatttttcagtttttcacataacaaagaaaaaaattaactcttgctataatgctagaataatacattattttacaagtaatttaataacagaatttttctaattgtatacattatcattgtaggaaagttagaagatatagaataacataaaaataaaagtcatgtttagcttccccggtcaaaaat

SEQ ID NO: 775468 - DNA, 566 bp, Homo sapiens
atctacttaactacactgctattgttggacattgaggctattactttccacactttagatggctgaataggaacagctccagtctacagctcccagcgtgagtgacgcagaagacgggtgatttctgcatttccatctgaggtactgggttcatctcactagggagtgccagacagtgggcgcaagacagtggatgcagcacaccgtgcacgagctgaagcagggcgaggcattgcctcactcaggaagcacaaggrgtcagggagttccctttccgagtcaaagaaaggggtgacagacggcacctggaaaatcgggtcactcccaccctaatactgtgcttttctgacgggcttaaaaaacggtgcaccaggagattatatcccgcacctggctcggagggtcctacgcccacggagtctcgctgattgctagcacagcagtctgagatcaaactgcaaggcagcagcgaggctgggggaggggtgcccaccattgcccaggcttgcttaggtaaacaaagcagccgggaagctcgaattgggtggagcccaccacagctcaag

SEQ ID NO: 775469 - DNA, 583 bp, Homo sapiens
aagaggattctgtttttctcctctagctattctcccggaatactgttttttattctccttatatcagtaacagaataagaaggcgcgtaggaagaaaacatagcaaaggcagagattataaaaaaacgaaaggaaaatgttggctgtgacagatatgttaatacctttattattgtgatggttctgtagttgtacacatatgttaaaacatatcagattgtgcaccttaaatattgctgtacattttatgaaaagtgtacctttataaagctgttaaaatattatttgtaataacacaggaagtcaaaaatctaatttggtaattttagtagaagttactctactaaaatttagttactctatctagaagtgcttagtctttatgaatatttcacattattaaaacaaayagatagctttttcagatttatttattcctctacttttaactcttgtgtaatattataagagacatcttctctgaccctatcttctattatccagacttaacacattatttgcagattcttcaaatatcctacttgctgtccatgtctccaacatgtctctatgctttgaaata

SEQ ID NO: 775470 - DNA, 576 bp, Homo sapiens
aactctctgttgttcaacctagcccgtgggcttccttattcttgtaaaatcatcctgaggcttgaaacaattcctagcacagggtttgctaaagggttaatgaaaaggtttaaacattaagtaagaggaaatttaaaaggttctttctattcagagttaatggattttgttttatttagaataagtagtgactggccaggtgcagtggatcatgcctgtaatcccagcactttgggaggccgaggmgggcaggtcacgaggtcaggagctagagaccagcctggccaacacagtgaagccccgcctctattaaaaatacattagccaggcgtggtggtgggcacctgtaatcccacctacttgggaggctgaggaaggagaatcacttgaacccaggaggtggaggttgcagtgagccaagagtgcgccattgcactccagcccaggtgatagtgtgactccgtctcaaaaataaataacaaataaagaataagtagtgactatttctatgttatttatacttaattacgttacaagagaattaatagatacagccactagtttggaaaggaaaat

SEQ ID NO: 775471 - DNA, 576 bp, Homo sapiens
aactctctgttgttcaacctagcccgtgggcttccttattcttgtaaaatcatcctgaggcttgaaacaattcctagcacagggtttgctaaagggttaatgaaaaggtttaaacattaagtaagaggaaatttaaaaggttctttctattcagagttaatggattttgttttatttagaataagtagtgactggccaggtgcagtggatcatgcctgtaatcccagcactttgggaggccgaggagggcaggtcacgaggtcaggagctagagaccagcctggccaacacagtgaagccmcgcctctattaaaaatacattagccaggcgtggtggtgggcacctgtaatcccacctacttgggaggctgaggaaggagaatcacttgaacccaggaggtggaggttgcagtgagccaagagtgcgccattgcactccagcccaggtgatagtgtgactccgtctcaaaaataaataacaaataaagaataagtagtgactatttctatgttatttatacttaattacgttacaagagaattaatagatacagccactagtttggaaaggaaaat

SEQ ID NO: 775472 - DNA, 563 bp, Homo sapiens
gaaataagagggtatatgcatggatctagaattcttttgtatttccagaacagaattgaaatgatgatacaaggaatgcacaccgttgcctgggcttcacctcctaaaccgcaaccatgaagccctaatgacaatgtccacacttctggaggaagggatraggagcagcctcgagtgggttgctgaagtaccctactattattgtattgcagtatacctctctttctagatttattaatgtttgcttcatatacttgggagctctcgtgttgggtgcgttgttatttataatcattatatcctcttgctgaattgactcctttattattatatagtgatcttctttgtctgtttttatagtctttgatttgtagtgtatttcatctgatctacatatagctactcctgctcttttttggtttccagttgcatggaatatctttttccaccccttcagtttcagaatgtggatttattgtaaggagtatatagttgggtcttgtatctttatccattcagccaccctatgccttttacttggataattgagtccatttacattc

SEQ ID NO: 775473 - DNA, 686 bp, Homo sapiens
atagttcttgtgtccttttagaatttatagcctaatgagtatacgaaaaataaaatagatatgaggccgggtgcagtggctcagggctgtaatctcagcactttgggaggccaaggtgggtggatcacctgaggtcaggaggttgagaccagcctggccaacatggcaaaaccccatctctactaaaaattaaaaaattagccaggtatggtggcgcacrcctgtaatcccagcactttgagaggctgaggcggtggatcacctgaggtcaggagttcgagaccagcctggccaacatggcgaaaacttgtttctactaaaaattagctgggcatggtggtgcatgcctgtaatcccagctactttggagactgagacaggagaattgcctgaacccaggaggcggaggttgcaattagccaagattgtgctactgcactccagcctgagggacagagcaagactctgtctcaaataaataaataaataaaatagatatgaataaaaataagatatgaataagtatacaagtaccattagtgattaggcagaaaacaaacagaataacgtatctgagcatagtggaacaagaaggaagaaacatcttagagggtcaaggagtctggaaggtgatgtttaagttgaaatataaatgatgagaagaaaccagctatgtaaaacgcaga

SEQ ID NO: 775474 - DNA, 614 bp, Homo sapiens
agcactttgggaggccaaggtgggtggatcacctgaggtcaggaggttgagaccagcctggccaacatggcaaaaccccatctctactaaaaattaaaaaattagccaggtatggtggcgcacgcctgtaatcccagcactttgagaggctgaggcggtggatcaccygaggtcaggagttcgagaccagcctggccaacatggcgaaaacttgtttctactaaaaattagctgggcatggtggtgcatgcctgtaatcccagctactttggagactgagacaggagaattgcctgaacccaggaggcggaggttgcaattagccaagattgtgctactgcactccagcctgagggacagagcaagactctgtctcaaataaataaataaataaaatagatatgaataaaaataagatatgaataagtatacaagtaccattagtgattaggcagaaaacaaacagaataacgtatctgagcatagtggaacaagaaggaagaaacatcttagagggtcaaggagtctggaaggtgatgtttaagttgaaatataaatgatgagaagaaaccagctatgtaaaacgcagaggggaaagtgttaggaggaaacag

SEQ ID NO: 775475 - DNA, 572 bp, Homo sapiens
agataaacaagtaagtagacctagctacaatacagaaaaaatcccaaaatgttgcaggttaatgctacatgcaacccacatctaatcagaaattgtattattttaattctgcctcctaaatatctcccaaacaaaaaaataattttttccctcaacttactgtgacattgacctagttcaagctccttcacctggactattaaagcagcttcttawtttttttcctatctagctctcccttatttcttccaatttcttttccatacacagcaattactgtttttctaaatatctaacctgataatttcattgctaagattcaaacctttaatggtacccagtttttttgtataaagccaactttccttaaaatggtctatgaagatgttcataatcttcttgtcatttgcttttccaatttgaattccatatttgagccccaatgaacaacttttagctcccaaatgtcatgctgtctcacctctgagtcttgcactttatgttttctctgtctgtaactttcttcattgcctctttcctacttctctcttctttcagattttatggctaat

SEQ ID NO: 775476 - DNA, 596 bp, Homo sapiens
ctgaaggtacagcccagatcaaccaaattagaatctgagggtgggacccaaaaatcagaattttttaactctctcaagtgacttcaactgcagccaagattgagagccactgctctagaggcaacacatcctggaaatgataagtcgttttcatagaaagtcaaaatttgttactctgcaatattcgtcttaaaagaagtttttttgggaatttgtagctgaaactcagggaaataacctcttctccttgccaagtcaaaaattaaataatagatwattgtttataaagcataggtgaaagactcagaactatatatgacagacatcacatataattccaatttgtttttcagcccttgggagacagatctctttccttaaacttgtacatatctgagcagaaaagaagcctgtctcttaaaaggattggacagaaacattttcgctagagtctcgttctttggacgtgatccaatcactacttctctacctatgagactgttgatcatctctttctcagatgaggtatgataacatccaactaaactttttgttttgggacactgaataaagggtttcctttatacgctagtaaa

SEQ ID NO: 775477 - DNA, 596 bp, Homo sapiens
ctgaaggtacagcccagatcaaccaaattagaatctgagggtgggacccaaaaatcagaattttttaactctctcaagtgacttcaactgcagccaagattgagagccactgctctagaggcaacacatcctggaaatgataagtcgttttcatagaaagtcaaaatttgttactctgcaatattcgtcttaaaagaagtttttttgggaatttgtagctgaaactcagggaaataacctcttctccttgccaagtcaaaaattaaataatagattattgtttataaagcataggtgaaagactcagaactatatatgacagacatcacatataattccaatttgtttttcagcccttgggagacagatctctttccttaaacttgtacatatctgagcagaaaagaagcctgtctcttaaaaggattggacagaaacattttcgctagagtctygttctttggacgtgatccaatcactacttctctacctatgagactgttgatcatctctttctcagatgaggtatgataacatccaactaaactttttgttttgggacactgaataaagggtttcctttatacgctagtaaa

SEQ ID NO: 775478 - DNA, 636 bp, Homo sapiens
tgaaaaataatagtagcaaacatttatggaagtcgtcctatgtgccaggcagtgttgagtgctagcatgaattctctcacttaatctttacaacaatctcatgaggttggtaattttatattcctttggtcgataagaaaattgaagcacagagaagttaagtaacttgcccaacatcacacaccaaaaatgtggcagcctcaaatctacctgaaaccagagattttgctcttaaaaacaaactatcatgtatctgtctcccctcaaggttttgccgctcaaacttaaaaacggccttatggaaaacagtggtatttgttgagaaactggatgttttttcatggtttaggaaaacaataatacagatttttttttttttaatttaaagtcttartatatttagaggtacacaatatttaaatagaaactgttccagaaaattcaagatatttggtctccataattaaagaacattagacacagacatacttaaaaactatgcaaaataaagtaatatttgcattaaataaagaaggattatggctaaagacagtagagaactgggaataatggggaggaggaatgagactgagaaataaaatttgtttttctaaccacggagagctagagggagaa

SEQ ID NO: 775479 - DNA, 603 bp, Homo sapiens
aaagtcatttatgtcttgacatttattatataaagatgaaaagtgaagtctctgattttaggaagttcagagtctagctgtgaaggaagacaagcatgtaaacaagtaactgtaatataaggtgacaagtgcgggaatagaaatatgcatgcagcactctaggaatgcaaaacagattaattttacctgaggtggctagaaaagcttcagggagggtagttgatatttgagctagaaacttgataagaggaagtgggaaatttcaggtacacagcaggaaaagcaaagataagagccgtttacagatacctgccaggacattaggggaccctcagctgctatcccttttctctatctgggaatctgcagctaagggttatgtagcctttgcttttgaactgtcaaaatgcaaagcatctaattataccccccttattytagacagcaactgttgagttcagactctaagaactcctatccacctgcctgtctgaaagaaaccaccttcagattccacagtaatttcccttctgaaggagaggcctaaggtgattccatggtgcttttatggtgcctctctccctaaagaaaagaaaaaaatta

SEQ ID NO: 775480 - DNA, 553 bp, Homo sapiens
gactgtgagctcaatgacagaaaaaaaaaaaaagcatgttttacatttctttgtctctatggcacctaattcaatgtctggcaaataccaggtagccaatccatttttcctgaattcataggtgcttaaacaaacctactcaaaatgaactgtataatggacagatcaaccatgaaagaatacttaagatgtatattttaaatactctgtgcatgaccattattctattcracactttaatactagcaaaaaataaataaaattttacaggtaaatgttctagtgaataagaattggaaaatagaagccataaagaagacagtggctctgtatcctatagtgcccaatataatgctgcatacagaatatatatgttcaatagctttttttttatggtggttaggacatctgaatatccttatttggacccctacctcatactacatctaaaaataactcaaaatgaatcaaagatctaaatctacttttttttcttgttacaaaagctgttttttattatttgaattataaatgttagaatgtacaggtaggg

SEQ ID NO: 775481 - DNA, 594 bp, Homo sapiens
atggtacttgtatacttattcatatcttatttttattcatatctattttatttatttatttatttgagacagagtcttgctctgtccctcaggctggagtgcagtagcacaatcttggctaattgcaacctccgcctcctgggttcaggcaattctcctgtctcagtctccaaagtagctgggattacaggcatgcaccaccatgcccagctaatttttagtagaaacaagttttcgccatgttggccaggctggtctcgaactcctgacctcrggtgatccaccgcctcagcctctcaaagtgctgggattacaggcgtgcgccaccatacctggctaattttttaatttttagtagagatggggttttgccatgttggccaggctggtctcaacctcctgacctcaggtgatccacccaccttggcctcccaaagtgctgagattacagccctgagccactgcacccggcctcatatctattttatttttcgtatactcattaggctataaattctaaaaggacacaagaactatgtttggttagtttgatattaaataaagaggatgctgatttaaataagtatttaaata

SEQ ID NO: 775482 - DNA, 594 bp, Homo sapiens
atggtacttgtatacttattcatatcttatttttattcatatctattttatttatttatttatttgagacagagtcttgctctgtccctcaggctggagtgcagtagcacaatcttggctaattgcaacctccgcctcctgggttcaggcaattctcctgtctcagtctccaaagtagctgggattacaggcatgcaccaccatgcccagctaatttttagtagaaacaagttttcgccatgttggccaggctggtctcgaactcctgacctcaggtgatccaccgcctcagcctctcaaagtgctgggattacaggygtgcgccaccatacctggctaattttttaatttttagtagagatggggttttgccatgttggccaggctggtctcaacctcctgacctcaggtgatccacccaccttggcctcccaaagtgctgagattacagccctgagccactgcacccggcctcatatctattttatttttcgtatactcattaggctataaattctaaaaggacacaagaactatgtttggttagtttgatattaaataaagaggatgctgatttaaataagtatttaaata

SEQ ID NO: 775483 - DNA, 560 bp, Homo sapiens
tgtaaatggactcaattatccaagtaaaaggcatagggtggctgaatggataaagatacaagacccaactatatactccttacaataaatccacattctgaaactgaaggggtggaaaaagatattccatgcaactggaaaccaaaaaagagcaggagtagctatatgtagatcagatgaaatacactacaaatcaaagactataaaaacagacaaagaagatcactatataataataaaggagtcaattcagcaagaggatataatgattataaataacaacgcacccaacacgagagctcccaagtatatgaagcaaacattaataaatctagaaagagaggtatactgcaatacaataatagtagggtacttcagcaacccactcgaggctgctcctyatcccttcctccagaagtgtggacattgtcattagggcttcatggttgcggtttaggaggtgaagcccaggcaacggtgtgcattccttgtatcatcatttcaattctgttctggaaatacaaaagaattctagatccatgcatataccctcttatttc

SEQ ID NO: 775484 - DNA, 561 bp, Homo sapiens
tcccactagactgtgagctcaatgacagaaaaaaaaaaaaagcatgttttacatttctttgtctctatggcacctaattcaatgtctggcaaataccaggtagccaatccatttttcctgaattcataggtgcttaaacaaacctactcaaaatgaactgtataatggacagatcaaccatgaaagaatacttaagatgtatattttaaatactctgtgcatgaccattattctattcracactttaatactagcaaaaaataaataaaattttacaggtaaatgttctagtgaataagaattggaaaatagaagccataaagaagacagtggctctgtatcctatagtgcccaatataatgctgcatacagaatatatatgttcaatagctattttttggtgcgtttaggacatccgaatatccttatttggacccctacctcatactacatctaaaaataactcacaatgaatcaaagatctaaatctacttttttttcttgttacaaaagctgctttttattatttgaattataaatgttagaatgtacaggtaggga

SEQ ID NO: 775485 - DNA, 791 bp, Homo sapiens
accggaatcgaaggggacagcactgccaaaagctcttgtgaccgctgcacgcttaggcccgggacttcctctgctaggcgtgtgcaaacctgctgttgctagggttggctccaaccccggcagcttcctccccacccacttcctggagccttccagcttgcttctccccgacccttccgggctttttgccttttgcctgataggtagagatttcggccctccttgcagacgaatctatgccttacctaagatctgggaagtcacgacttttgttttgatttgttttcgggcccacatctgagtgcttgtaaaaactgactctcggccgggcgcagtggctcagtacagtttatacgcctgtattcccagcactttgggaggccaaggcgggtggatcacgaggtcaggagttcgagaccagcctggccaatatggtgaaactccgtctctactaaaaatgcaaaaattagccggacgtggwggcacgcgcctgtagtcccagctactcgggagactgagacaggagaatcgcttgaacccgggatgtggatgttgcaatgagctgagatcttgccattgcactccagcctgggcgacagcgcaagactccatctcaaaaaaaaaaaaaaaacaaaaaaaaactgactttcaaccctgtccagagactgtaaattgcaaactcgttgtcctgacctttcggttagttgccctgtaaataaagcagcatcaccgctatatcatagatgattttgagaaggagatgagcgatggtgctaaattggtactggcca

SEQ ID NO: 775486 - DNA, 643 bp, Homo sapiens
ctgtagagagtgtgagaatctacacacgatgttaaattgctgatagaaaggtaaggtagtgcaactcttccataggctcatacgtcaatatgtactcaaattgaaaagtggcccttcaatttctaaaaagtcattctaaggaaatgaataaatgcaggaagacatatgcacaaagatgtttttctcatttttctgtagtaccaaagaaaagagagaggtaaacctaaattttgagtggcaggaaactggctacgtaaataatgaaatgctgctgagctatttaagtttgtgatatagccttattaaatgacatggaatcatgctcattatatactaataagcaaaaaagatacaaaacatttttatagtttggtctaataattaaaagtattatatatttgcttgcattgtgcctgtgtgtacmcccacaaacaaaaaaatctcaagaatgttatgaagatcatttattggaaatgggataatgggattttaagttatttatactttttatttttttttggggaaacaaggtcttgctgtgttgtccaggccggggggcagtggtgcaactatagcccatggcagcctggaactcctgggctcaaacaaacatgcagccttaggctctggagtagctgggact

SEQ ID NO: 775487 - DNA, 643 bp, Homo sapiens
ctgtagagagtgtgagaatctacacacgatgttaaattgctgatagaaaggtaaggtagtgcaactcttccataggctcatacgtcaatatgtactcaaattgaaaagtggcccttcaatttctaaaaagtcattctaaggaaatgaataaatgcaggaagacatatgcacaaagatgtttttctcatttttctgtagtaccaaagaaaagagagaggtaaacctaaattttgagtggcaggaaactggctacgtaaataatgaaatgctgctgagctatttaagtttgtgatatagccttattaaatgacatggaatcatgctcattatatactaataagcaaaaaagatacaaaacatttttatagtttggtctaataattaaaagtattatatatttgcttgcattgtgcctgtgtgtacacccacaaacaaaaawatctcaagaatgttatgaagatcatttattggaaatgggataatgggattttaagttatttatactttttatttttttttggggaaacaaggtcttgctgtgttgtccaggccggggggcagtggtgcaactatagcccatggcagcctggaactcctgggctcaaacaaacatgcagccttaggctctggagtagctgggact

SEQ ID NO: 775488 - DNA, 644 bp, Homo sapiens
tggacgttatctcttaggctggtgtgttaagacttgactgtatgagagggaaaaccgaacagagagaccagttaggcagttcctacaaaaaaaccaagagagaggccaggcgcagtggctcacgcctgtaatcccagcactttgggaggccgaggcgggcggatcacgaggtcaggagatcgagaccatcctggctaacacggtgaaaccccgtttctactaaacaaaatacaaaaaattagccgggcgtggtggcgggcgcctgtagtcccagctactcgggaggctgaggcaggagaatggcgtgaacccgggaggctgaggttgcagtgagccaagatcgcacgactacactccagcctgggccacagagygagactctgtctcaaaaacaaacaaacaaacaaacaaacaaaaccgagagagagatgatggcagctcagaccacagtgcaaactttaaatttgaaatgaagtgattggactctagacacatgtttaaggtaaggtttacagtatttaccgagggagaggatgcaaaacatgaaagtaaaactgcagcaaagatgattccacaaaaaaaaaaaaattaaaaataacaacaaagcactttgctaattgattctaatcagaatgcatatttta

SEQ ID NO: 775489 - DNA, 610 bp, Homo sapiens
atacttgtagccagttgaaggagtcggagctgactttcgattgtctccctttaaggagtaggtaagtactttttgtgatgttagacaaggcattaaacatatttatgaacagaaaggagagagtatatgcatggaatagtcaagggttgggaggtagtgaacagcagttgtttaggtctgctcatcagtatatttcacatctaataatagcattccaacttttccttgtagaattgtccttcccattcatagtgccctaagttgcctaaacatataaacttgagaaaattaaggatgggacagttgggggctgtgatcattattgtaaatctcggggaactgaggcattttctacactgggatttgtttatattgagccattttttgggctttttaaaaaaaattcattttcgacaagttatagttgtrtgtgtatctatatatatatatgcaactataacttgtatatgttacatatatagttttgtaaaccatatatataactatatatacagttttgtaaaccatatatataactatatatacagttttgtaaaccatatatataactatatatagttttgtaaaccatatatataactatatatac

SEQ ID NO: 775490 - DNA, 608 bp, Homo sapiens
cactgtctctactaaaaatacaaaaatcagctaggtatgatggcaggcgcctgtaaatcccagccttgggaggctgaggcaggagaattgcttgaatccaggaggcagaggttgcagtgagtcgagattgtgccattgcactccagcctgggtgacaagagtgaaactccatctcaaaaaaaaaaaaaaaaaaactggagatacgtctgttcctttacccaccctgcccccactcctcacctcccaaacatatcccacacattcccaccctgtgttcctttgccagcaatcaccagattgcctrtctggcatgtccctgtgctatcctccctttgtcgcatctgcctagccttaagcacctcaatcaaatcccacctctcccacagagaccttcccagggagccacacctgggaacaggtgtaagcctgtactgtttatatgagggttctcatctgggacacaggtttgccacacctgagaacaggtgtaagcctgtactgtttgtatgagggttttcatctgggacataggttctttctctccaactagacttttcctgaccttctgaagtccccttcccagcacctaagccagtgctttgcacata

SEQ ID NO: 775491 - DNA, 580 bp, Homo sapiens
caaactttatcataatcccttatttaaaaggaatatgtctatcttgcctgatgggctataagctacatacggacaagagtctgtcctcagccttgagcactgcctgggaatctaaagggactaagatagcacaagggtcaatgattctttaatggagatccacagtgcctggcactcaaaaatatttgtttttttaaaatgttgaagaaaaaaaggcattggaacaggaatgcttttatctctgtgtgtgtgtgtgtgtgtgtgtgtgtgtgtgtgtgtgtgtgtgtgtttccagctgggcgtggtggctcacgcctgtaattccagcactttgggaggccgagacaggcagatcacgaggtcaggagttcaagaccagcctggtcaacatgatgaaaacccatctctactaaaaatacaaaaattagctgggcatgrtggcgtgtgcctgtaatcccagctactcaggaggctgaggcagaagaaaccccagaggcagaggtttcagtgagccaagatcacgccactacactctagcctggggtacagaccaagactctgtctcaaaaaaaaaaaaaaa

SEQ ID NO: 775492 - DNA, 611 bp, Homo sapiens
aaatggatactatactactgcatccacctagaaccaaggccaatgaactccactgagtcaatacctatgaaaatgaataagtctttccttacaaaacctactctataaaattgtaagaggcaacttttctaccagatatatagaaatcaatgtagggacacatcaaccatgaaaaascaaggaaacatgttacctcaaaaggaaaacaataattcttccataacagaccctaagcataaggaaatatatgacatgctaaaaaagaattaaaaataataatcttaaggaaactcagtgagatataagagaatgcagatagatgagtcaacaaaattaggaacagaattcattatttgaatgagaaattcaatgaagagatagatatcataaagagagccaaacagaaaccttagagctgaagaattcaatgaatgaaataaaaaacacaattgagagcttcaacaacagactagcccaagcagaagaaaagaatttctgaacttgaagacaggacttttgaaataacataggcagattaaaaaagaaaagagaaaaaaagaatgaagaaagcctacaggatttgtggaattccattttccattaagtgcaca

SEQ ID NO: 775493 - DNA, 621 bp, Homo sapiens
ttgaaaacttgcacagaatgtggtagagaaagcccgtgattctgggatcccacagggctgtgcagttctggcaagaggtgccaagccttacgtataagtgcaaaaaaccatgtgtggaacacacatgcactgctattcttctaatctacttcgatgctctcgtgactgataaaatacaaaatcatctaagagggtgagtgagtttatgatttcctccattattccctcaaacagtggggaccaaaacatagctgctctcagaagaggagtaccctctttgaaaaggcacaggaccctgccttgctccaaactctattttttttttttttttttttgagatggagttttgctctgttgcccaggctggagtgcaatggtgagatcttggctcactgcaacctctgcctcctgggtttaagcgattctcctgcctcagcctcctgaatagctgggataacaggcaygcgccatcatgcccagctaatttttgtatttttagtagagacggggtttctccatgttggtcaggctggtctcgaactcccgacttcaggtgatccgccagcctcagcctcccaaagtgctgggattacaggcgtgagccactgtgccagaccccag

SEQ ID NO: 775494 - DNA, 625 bp, Homo sapiens
tactatattagtaaaagtactagtactttattggtcccaacaataggaatactcttaatgcttacttgtgtcaaaagaaagtaactgacagacacctcactcaaaagtcttcagtgtatataattattaattcttatggaatgatwctatgcaagataaattcccttcatgaaggtcaaatgatcatttaaaatattaaaggaaagtccaggcctcccagttgtcattttactgcctgttgataacactctttctgttaatgtttcttttagtggctatgaatgtgaataatttacaaattataactagggagaatatgcaaaagaacaatagtgtctcccgaagttaaattagaaaatagctgagttgattgtgtaactctcctaaaacaattaatgcagtgttctattaaatcgcttttcattttagaatgtctaaaatgggaagaaaattgaaacagatatgaaatcttaagtaactcaattttatgtaaatttatgtatgaaacaaaaagcagaatggcaatgaaatcttctgggctttaatttgatttgaggtctgatacatattttgaccatctttctttcatgcaaaatacgaaaatactccagatagaacaagtcat

SEQ ID NO: 775495 - DNA, 625 bp, Homo sapiens
tactatattagtaaaagtactagtactttattggtcccaacaataggaatactcttaatgcttacttgtgtcaaaagaaagtaactgacagacacctcactcaaaagtcttcagtgtatataattattaattcttatggaatgatactatgcaagataaattcccttcatgaaggtcaaatgatcatttaaaatattaaaggaaagtccaggcctcccagttgtcattttactgcctgttgataacactctttctgttmatgtttcttttagtggctatgaatgtgaataatttacaaattataactagggagaatatgcaaaagaacaatagtgtctcccgaagttaaattagaaaatagctgagttgattgtgtaactctcctaaaacaattaatgcagtgttctattaaatcgcttttcattttagaatgtctaaaatgggaagaaaattgaaacagatatgaaatcttaagtaactcaattttatgtaaatttatgtatgaaacaaaaagcagaatggcaatgaaatcttctgggctttaatttgatttgaggtctgatacatattttgaccatctttctttcatgcaaaatacgaaaatactccagatagaacaagtcat

SEQ ID NO: 775496 - DNA, 597 bp, Homo sapiens
tgaaaagatagtattaggacttcattaataaaattatcttattgcaaaactggataaaactaaaataaattgtattagaaaatattggtggtagcgcacgaatctcagaggggcatgaaaaatcaactgtcattagtgcaaggacttcagaaaccttcaggtgtgttggcttaattctatcagcaaattctctcagcaacaaaatasaatccctggaagtctgtatgtgatatttttacagagttgtgtaaatgtatattgtgtggaagactcttctggttctattttgagaaactctgggaaattattccactggtctgattaggataaggtgtgtttcatcaatgaatcaatctcactttgaccagaaaagtgagggtggtgatgacaaggctcatataaagagactgtcactcccttttggacaacttagctagatcacagaaagtatccattctccaaataatgagaggctattttagaagtagtgattgcaccaaattgagaaattaattaatgtacggttaaaatttgcatgaagtttcacatacatactaacaatagttttgaattatattactatcaggttggtgcaaa

SEQ ID NO: 775497 - DNA, 456 bp, Homo sapiens
gggtcctaaggccaggaacaataccaggaactaagcagctcttgtggcaaagtctgcacaccaagggcccatttaagggaacagtcttaaatggcaggtatattgaaatcaacttcccggtctccagatttcttagtctgagtaagccaactctctgctaagttaccaaaagagggaagtaagtgagccttcagagtccccaggtttacctgccatcatgttgccaatagatgakttcatttagtttcagtatcgcatagtattctattgtatgaatagcccagactttatttaccaattctactcctaatggacccataagtggtttccagattttggctatgaagaatatagcttctctttgagtattctcatacatgtctcttggtacaaatgtgcttatttcttttgggtctaaatctactaggggattcctggctcaaagaagatgtatat

SEQ ID NO: 775498 - DNA, 602 bp, Homo sapiens
tggcccaggatgaaaggggggtagtgtatgaaagtgtattaatgacacacgattatctatcaactttttaaaaagtgggccaggtgcggtggttcatccagtaatcccagcactttgggaggccaaggtgggtggatcgcctgaggtcaggagttcgagaccarcctggccaacacgatgaaacccccgtctctactaaaaatacaaaagttagccaggcgtggtggtgggcacctgtaatcccagctacttgggaggctgagggaggagaatcgcttgaacccgggaagcggaggttccagtaagccaagatcacaccactgcactccagcctgggcgacagagcgagactccatctcaaagaaaaggaaccaggaggcaaggtaagcatcaatagcctgtggcagtaagtggaataaaatattttgtatgaaagagccatgtgtggtcatacgagaaagggcatgagtccagtataatacagtgcttaagaacgtaggctggggagtcacacagacctgggttcaaatcttggctcagacctcagataacttaccaacaggtaagagttactgatcattgaccacacaccaggcactgag

SEQ ID NO: 775499 - DNA, 602 bp, Homo sapiens
tggcccaggatgaaaggggggtagtgtatgaaagtgtattaatgacacacgattatctatcaactttttaaaaagtgggccaggtgcggtggttcatccagtaatcccagcactttgggaggccaaggtgggtggatcgcctgaggtcaggagttcgagaccaacctggccaacacgatgaaacccccgtctctactaaaaatacaaaagttagccaggcgtggtggtgggcacctgtaatcccagctacttgggaggctgagggaggagaatcgcttgaacccgggaagcggaggttccagtaagccaagatcacaccactgcactccagcctgggcgacagagygagactccatctcaaagaaaaggaaccaggaggcaaggtaagcatcaatagcctgtggcagtaagtggaataaaatattttgtatgaaagagccatgtgtggtcatacgagaaagggcatgagtccagtataatacagtgcttaagaacgtaggctggggagtcacacagacctgggttcaaatcttggctcagacctcagataacttaccaacaggtaagagttactgatcattgaccacacaccaggcactgag

SEQ ID NO: 775500 - DNA, 602 bp, Homo sapiens
tggcccaggatgaaaggggggtagtgtatgaaagtgtattaatgacacacgattatctatcaactttttaaaaagtgggccaggtgcggtggttcatccagtaatcccagcactttgggaggccaaggtgggtggatcgcctgaggtcaggagttcgagaccaacctggccaacacgatgaaacccccgtctctactaaaaatacaaaagttagccaggcgtggtggtgggcacctgtaatcccagctacttgggaggctgagggaggagaatcgcttgaacccgggaagcggaggttccagtaagccaagatcacaccactgcactccagcctgggcgacagagcgagactccatctcaaaraaaaggaaccaggaggcaaggtaagcatcaatagcctgtggcagtaagtggaataaaatattttgtatgaaagagccatgtgtggtcatacgagaaagggcatgagtccagtataatacagtgcttaagaacgtaggctggggagtcacacagacctgggttcaaatcttggctcagacctcagataacttaccaacaggtaagagttactgatcattgaccacacaccaggcactgag

SEQ ID NO: 775501 - DNA, 464 bp, Homo sapiens
tccctcctgggtatagccgggcctcagctgtggcagcctttcacacccttcaaagcctgccatcaccctgcaggcccctggcccctacccttctcactgttcttcacaggggttcttcctgcctctctcatccccagcagccccacagcaaagaacctgacactcctgtgctgaccagccagaggctggttgcaaaacccctctctgctgcagtcctactcctgcctccccatgcccctcacactgtgcctctccagatatggtctccaaaacgcgggacaagaagccgaagcctcgggcaggcatcggcwttctgagtcgccatgcttcccagctgcaggaattgctgggtcaggtgtgaaaccacatttctgtccctcctcatctctgtctcacctcccctgctccccacacctgggctttgctgggagttggggctgaggctggagcagtcctcactgagc

SEQ ID NO: 775502 - DNA, 617 bp, Homo sapiens
gaccatcctggctaacacggtgaaacctcgtctttactaaaaacacaaaaaattaaattagccgggtgtggtggcctgtgcctgaaatcccagctacttgggaggctgaggcaggagaatggtgtgaaccggggaggcagagcttgcagtgagccaagttcacgccactgcactccagcctgggcaaaagagcaagactccatcaaaaaaaaattaatcaacaaatatttaataaagtttgccatatatgtgtgctatatttcttgttattcaataaagccaatatctcatgtatatctcaatatgtatttctctacacagagtcatattgggaagaggaaaaaatatttaaaacaaatgaacatggaaaatatttattttccccttaatatatggcagcctaattaataattaagcactttgctgtcatattaaattctgtaaacagacagacttggcctcagattatctctgataatgayactccctctctctatatattgtatagaatatactcatgtaacaggagaaaatttaagttgaaacaaagagaaattaaaaaatagagagagcctttgcagtccagaggcatttttgccaacatatttcctttgtat

SEQ ID NO: 775503 - DNA, 567 bp, Homo sapiens
aaatatgtagctaaataagtgtgcaggacatatatcatatatcccccaaataaaaaataagctaatataagaaaactagactcaaaattagaagtaaaattcattttgtttgctatttttcaaggggttaatcatttccaaattaaaaaaaaaatgtatgacagctctgagcaatcttttaaatcctctttatcagatgsataaaaatgtatgtaccaccaccaagtatctatgcatctccacaacaatcaatgttacagttatatacaatctaaatgtggaaagaaaattacaaattgttatgattcatacgaaataagctgtttcttcttcatgtgattttcccttctttctgaaataagcacagttttttaaccttgtttccaatggacagatttgtgtgattttgatgatgaaagaaactgatttgctcttccaataatacattcaattgatctctattgacatattttggccacataataagacgtttggtatgcaatattcgacatgttccctgccccctctggatcttacagtatagcactcattcaccagggtgagcac

SEQ ID NO: 775504 - DNA, 567 bp, Homo sapiens
aaatatgtagctaaataagtgtgcaggacatatatcatatatcccccaaataaaaaataagctaatataagaaaactagactcaaaattagaagtaaaattcattttgtttgctatttttcaaggggttaatcatttccaaattaaaaaaaaaatgtatgacagctctgagcaatcttttaaatcctctttatcagatgcataaaaatgtatgtaccaccaccaagtatctatgcatctccacaacaatcaatgttacagttatatacaatctaaatgtggaaagaaaattacaaattgttatgattcatacgaaataagctgtttcttcttcatgtgattttcccttctttctgaaataagcrcagttttttaaccttgtttccaatggacagatttgtgtgattttgatgatgaaagaaactgatttgctcttccaataatacattcaattgatctctattgacatattttggccacataataagacgtttggtatgcaatattcgacatgttccctgccccctctggatcttacagtatagcactcattcaccagggtgagcac

SEQ ID NO: 775505 - DNA, 644 bp, Homo sapiens
atattttattcaatttgttcattttgtcaaaatataatgtattgtttaaagaaaaataataataacgtagtgtatagttagcaaaaacgtataaacatgacaatgacacaaaaaacagagaggacacaaaaataatttatgtaaacttaatctacatccaaaattcaatatcactttaaggtagaccgttgagggaagtcagggaccctgaacggagggactggctgaaatatcgggggtgaatttcgcccgataatagactgtgataaattaaagatgcatgctataaataatataactactaaaatagcaaagagttatagctaatacataaggaaatattgtaataacaagggataaaaaattctcaaattacccaaatgatggaatataaagaggatatgaagaagcaagatcatatgagacatarcaacaaacagtatgatgaaaaatttaaacctaatcaaacagtaatcatatgaaaaatggtataaataccacaattaaaaagtataagttatatgattggatataaaacaacaaccaactaactggatgttgccagcaagaaaaatgatacaaatataatcaatgaaaaataaatgaaataaaaataaaaataatggaaaagcatatataaattt

SEQ ID NO: 775506 - DNA, 644 bp, Homo sapiens
atattttattcaatttgttcattttgtcaaaatataatgtattgtttaaagaaaaataataataacgtagtgtatagttagcaaaaacgtataaacatgacaatgacacaaaaaacagagaggacacaaaaataatttatgtaaacttaatctacatccaaaattcaatatcactttaaggtagaccgttgagggaagtcagggaccctgaacggagggactggctgaaatatcgggggtgaatttcgcccgataatagactgtgataaattaaagatgcatgctataaataatataactactaaaatagcaaagagttatagctaatacataaggaaatattgtaataacaagggataaaaaattctcaaattacccaaatgatggaatataaagaggatatgaagaagcaagatcatatgagacatagcaacaaacrgtatgatgaaaaatttaaacctaatcaaacagtaatcatatgaaaaatggtataaataccacaattaaaaagtataagttatatgattggatataaaacaacaaccaactaactggatgttgccagcaagaaaaatgatacaaatataatcaatgaaaaataaatgaaataaaaataaaaataatggaaaagcatatataaattt

SEQ ID NO: 775507 - DNA, 455 bp, Homo sapiens
aatggattcattgaatggaatcagatggaatcatcgaatggactggaatggaatcattgaatggactcgaaagggatcattattgaatggaattgaatggaatcatcgaatggtctcgattggaatcattatcaaatggaatcgaatggaatcaccgaatagaatcgaatggaacaatcatcgaatggactcaaatggaattatcctcaaatggaatcgaatgtaattgtcgaatgcaatcgcatggaatwatcgaatgcaattgaatagaatcatcgaatggactcgaatggaatcatcgaatggaatggaatggaacagtcaatgaactcgaatggaatcatcattgaatggaatcgaatggaatcatcgagtggaatcgaatggaattatgatcaaatggaatcgaatgtaatcatcatcaaatggaatcaaaaataaccatcatcaattgg

SEQ ID NO: 775508 - DNA, 581 bp, Homo sapiens
gaatggaatcgaagagaatcatcgaatggactcgaatggaatcatctaatggaatggagtggaataatccatggacccgaatgcaatcatcatcgtataaaatcgaatggaatcatcgaatggactcgaatggaataatcattgaacggaatcgaatggaatcatcatcggatggaaccgaatggaatcatcatcgaatggaaatgamaggagtcatcatctaatggaatcagatggaatcatcatcaaatggaatcgaatggaatcaacatcaaatagaatcaaatggaatcattgaacggaattgaatggaatcgtcatcgaatgaattgaatgcaatcatcgaatggtctcgaatggaatcatcttcaaatggaatggaatggaatcatcgcatagaatcgaatggaattatcatcgaatggaatcgaatggaatcatcttctaatggaaaggaatggaatcatcgcatagaatcgagtgtaattaacattgaatggactcgaatggaatcaacatcaaacggaatcaagcggaattatcgaatggaatcgaagagaatcatcgaatggactcgaatg

SEQ ID NO: 775509 - DNA, 548 bp, Homo sapiens
tccatttgaagatgattccattcgagaccattcgatgattgcattcaattcattcgatgacgattccattcaattccgttcaatgattccatttgattccatttgatgttgattccattcgattccattttatgatgattccatgcaattccattagatgatgactcctttcatttccattcgatgatgattccattcgtttccatccgatgatgattccattcgattccgttcaatgattattccattcgagtccattcgatkattccattcgattccattcgatgatgattgcattcgagtccctggattattccattccattccattagatgattccattcgggtccgttcgaagattctcttcgattccattcgaaaattccgtttttttccgtttggtgttgataccattcgattccattcgatgataattccattcgattctatgcgatgattccattcctttccattagaagatgattccattcgagaccattcgatgattgcattcaattcattcgatgacgattccattcaattctttt

SEQ ID NO: 775510 - DNA, 516 bp, Homo sapiens
cattcgatgatgattccattcgtttccatccgatgattccattcgattccgttcaatgattattccattcgagtccattcgatgattccattcgattccattcgatgatgattgcattcgagtccatggattattccattccattccattagatgattccattcgggtccgttcgatgattctcttcgattccattcgataattccgtttttttccgtttgatgttgattccattcgattccattcgatgataattccattcgattcwatgcgatgattccattccattccatttgaagatgattccattcgagaccattcgatgattgcattcaattcattcgatgacgattccattcaattccgttcaatgattccatttgattccatttgatgttgattccattcgattccatttgatgatgattccatgcaattccattagatgatgactcctttcatttccattcgatgatgattccattcgtttccatccgatgatgattccattcgatt

SEQ ID NO: 775511 - DNA, 449 bp, Homo sapiens
atggaatcatcatcgaatggaaatgaaaggagtcatcatctaatggaattgcatggaatcatcataaaatggaatcgaatggaatcaacatcaaatggaatcaaatggaatcattgaacggaattgaatggaatcgtcatcgaatgaattgaatgcaatcatcsaatggtctcgaatggaatcatcttcaaatggaatggaatggaatcatcgcatagaatcgaatggaattatcatcgaatggaatcaaatggaatcaacatcaaacggaaaaaaacggaattatcgaatggaatcgaagagaatcatcgaacggacccgaatggaatcatctaatggaatggaatggaataatccatggactcgaatgcaatcatcatcgaatggaatcgaatggaatcatcgaatggactcgaatggaataatcattgaacggaatcgaatggaat

SEQ ID NO: 775512 - DNA, 613 bp, Homo sapiens
caagcaaacaactaaagtatatctttaacaagtccatggcatagaaacaaagtatgttctaggttaaaagaggtttaagagatgcgatgaaatgcaatgtatgaaccttatttggcttgttgttcaactaccaaaataaaaagacattttgaggataatttagtaaatgtgaagctaagctggatattagaagataataagaaatktttattaattgtattagatgtgatgttatgattatgcaagaaaatgcacttatttttaagaaagaaactgaaatagaagtaaaatgttattacatctgatatttggtttaaaatgctacagcaaaaactgaaaaagtaatgaagaaaatacaacctaaagttaacatggtctctatgatgagtatatgggggatcattgtacaatgttatttttgtgtgtgtttgaaattttttcattatgaaagttacaaaacaggtgtacagtgaaggggagcagagaaataggacagcagctagaggggaatgtaagtcaaaaaaagcttttaaattgttgttaaagaagaaacacacgatcatttccatgatgacgatgatctgagagagggagaaattgatcatacaggaaa

SEQ ID NO: 775513 - DNA, 651 bp, Homo sapiens
taaaataatttttacaagaagcaaataaaaaagagggaaaataaaataaatgggcttccccaagtgcagatggatgatttctgcaagtctcttcaaagaagacagctgataacgaactgtgtcccaagcctcctctcgctggaaacaggagggaattctgtggcttacacgcaaccatatgttgaggatrtgaatattgcttcgcacattctagcagtttcaaaatgcatgagggcttttttccctttaagaatcaataactcatcaagaaaaaagaaagctatatgcacaaaaatgttaattaacaacattatcaatactagcaagaagaaattacaagcaagctctatgtgcaacattctggaaattaagtaaattatggtgcatggacgatgatgaagataatgcattcaatgaaattataattagaaagattttgtaggtacatagaaaatatttaagctaaagtgccaaatgagagaaaaatgaccaaattatatgtgcattgtgattgcaactgtatcagtataactgtgtagatgggcacaggctggaagaggaaaataaaaaatgataatacataatagttgtatagaattcgttggattaattgtaattaatcactatttttaaaaattatttttgaaaagg

SEQ ID NO: 775514 - DNA, 651 bp, Homo sapiens
taaaataatttttacaagaagcaaataaaaaagagggaaaataaaataaatgggcttccccaagtgcagatggatgatttctgcaagtctcttcaaagaagacagctgataacgaactgtgtcccaagcctcctctcgctggaaacaggagggaattctgtggcttacacgcaaccatatgttgaggatgtgaatattgcttcgcacattctagcagtttcaaaatgcatgagggcttttttccctttaagaatcaataactcatcaagaaaaaagaaagctatatgcacaaaaatgttaattaacaacattatcaatactagcaagaagaaattacaagcaagctctatgtgcaacattctggaaattaagtaaattatggtgcatggacgatgatgaagataatgcattcaatgaaattataattagaaagattttgtaggtacrtagaaaatatttaagctaaagtgccaaatgagagaaaaatgaccaaattatatgtgcattgtgattgcaactgtatcagtataactgtgtagatgggcacaggctggaagaggaaaataaaaaatgataatacataatagttgtatagaattcgttggattaattgtaattaatcactatttttaaaaattatttttgaaaagg

SEQ ID NO: 775515 - DNA, 607 bp, Homo sapiens
atttccagctttgtgaattttgctgctttgttattaattgtatatatattttaaaattatgtcaggctgagcatggtggttcacacctgtaatcccagcactttgggaggccgaggcggatcacgaggtcaggagttcgagaccatcctggctaacacagtgaaaccccgtctctactaaatatgcaaaaaaaaaaaaaagaaaaaaaattagctgagtgtggtggcgggtggcgggtgcctgtggtccyagctacttgggaggctgaggcaggagaatggccagaacctgggaggcagagcttgcagtgagccaatattgtgccactgcactccagcctgggcgacagagcgagactccgtctcaaaaaataaataaataaaaataaataaaattatgtcttcctcatgaattgtaccttttattgttatgaaatgtccatcatctttatccattttcttgcaatatttagtctctttctggttatatatttagattgtaatatagccatacttgcttccttatgtttgcttttggccaggtatggctttttttgttcttcatatttcaactttgttttgtttatttatattgaaaatatgtttct

SEQ ID NO: 775516 - DNA, 521 bp, Homo sapiens
cactttcatcattggctaatgtctggcctacttttttattatttagttgatttaaaaaattttaacgaacatgcacgagtctaccaccaaacataaaagcgaggatctttcaataacctacatctaaccatatggtatttcccagcagcacatctgcttccttcaatccaaattttgtgcacatcattcttttcccttcctttttatattgttctattaaatatttatgtatgcctaaacacatatcttttatttagaatgtttttaagtttaaagaatgtcatgctgtacataatcttttgagagttattttttgttgatatattcctatgatkcattcagaccgctgcatgctgtaactcaattattttcacttctgtataatatatttcattgtgtgactataggccatttattcaggcactctcccatggatgagcatttgggccaataatattaccctcacacagctacaattttgaggtcgtcattgacctctggaattcggctaagccaatgtc

SEQ ID NO: 775517 - DNA, 697 bp, Homo sapiens
agctagtgtcaagaaaggctgagggatccaaggatgaactcaggcagggcttgaggccactactcccggttcccctcctctcttccccatgaatcaccttcaaggacacttccatcaaacctgactcacacagaaggcccaracctgagaaatgaccagcccctgggccagagcagagagccagaaggcaattccctcccccatcactgctgcactgggtggaaattgggtcagagctggccagcccattcatttaatccaaacgccccctttccattcagctcttagtcctcagagctttcagtccaaggaagcactatttcctctgcaaaataaacaaaataaattaagcccatgctctttgatctcagggcttttgtgtggctgatgaattgaacagaaatgatctgccatcctcctggcatctcaaagacactgcaaaaattcagctgtagcttccagccacctgccaggcactgtgctgacaaggaagcatggctaaggaaggcactctttgccacccattctcccagggaagcaagaagagtctgcaggaggcacgacaggggaagtcaaaagagtcaaagactgtgaggcaggattcgtctttggccacataggcatggattcttcttcctctgctcattcccaccccagggactttgcactggcttttgtccccatgtggcatactttc

SEQ ID NO: 775518 - DNA, 697 bp, Homo sapiens
agctagtgtcaagaaaggctgagggatccaaggatgaactcaggcagggcttgaggccactactcccggttcccctcctctcttccccatgaatcaccttcaaggacacttccatcaaacctgactcacacagaaggcccagacctgagaaatgaccagcccctgggccagagcagagagccagaaggcaattccctcccccatcactgctgcactgggtggaaattgggtcagagctggccagcccattcatttaatccaaacgycccctttccattcagctcttagtcctcagagctttcagtccaaggaagcactatttcctctgcaaaataaacaaaataaattaagcccatgctctttgatctcagggcttttgtgtggctgatgaattgaacagaaatgatctgccatcctcctggcatctcaaagacactgcaaaaattcagctgtagcttccagccacctgccaggcactgtgctgacaaggaagcatggctaaggaaggcactctttgccacccattctcccagggaagcaagaagagtctgcaggaggcacgacaggggaagtcaaaagagtcaaagactgtgaggcaggattcgtctttggccacataggcatggattcttcttcctctgctcattcccaccccagggactttgcactggcttttgtccccatgtggcatactttc

SEQ ID NO: 775519 - DNA, 697 bp, Homo sapiens
agctagtgtcaagaaaggctgagggatccaaggatgaactcaggcagggcttgaggccactactcccggttcccctcctctcttccccatgaatcaccttcaaggacacttccatcaaacctgactcacacagaaggcccagacctgagaaatgaccagcccctgggccagagcagagagccagaaggcaattccctcccccatcactgctgcactgggtggaaattgggtcagagctggccagcccattcatttaatccaaacgccccctttccattcagctcttagtcctcagagctttcagtccaaggaagcactatttcctctgcaaaataaacaaaataaattaagcccatgctctttgatctcagggcttttgtgtggctgatgrattgaacagaaatgatctgccatcctcctggcatctcaaagacactgcaaaaattcagctgtagcttccagccacctgccaggcactgtgctgacaaggaagcatggctaaggaaggcactctttgccacccattctcccagggaagcaagaagagtctgcaggaggcacgacaggggaagtcaaaagagtcaaagactgtgaggcaggattcgtctttggccacataggcatggattcttcttcctctgctcattcccaccccagggactttgcactggcttttgtccccatgtggcatactttc

SEQ ID NO: 775520 - DNA, 550 bp, Homo sapiens
ggtatcatcatcatctagattttcgagatgatgaaatggaggtatagggaagttacccaaggcttctttgcaagtagtgctctaagcaagactacagatgcaagagcctcacggtctaggtctaaccctggttctgcaccttggaaccatggacaagttcstcagtctgtgcctcagtctttccctgagttcctgtaaagattaaatgagttaatgcttatatgatccctttacagatgtctggcacatgacaggcactgtctaagagtcctcgcttgtatgggagtggagaggagaggccagagtattgtaaggtaagatgtattagtgcctacaatgtgttatgcaatgtactaaagcattctgcatgtattatcatatttaatgctcataataccttgtgaaattttacaaagaaattaagcttagagaagtgaaatcattctcctgtggtcaaagccagtgaatggggatttgaaccaggtagctgaacacaagtctaagtttattaacctgaatcctctgctggttgtcttgactctctggaaac

SEQ ID NO: 775521 - DNA, 668 bp, Homo sapiens
ggtcaggtgtgtcctagttaaatcaaaatgtcctgtggggcaggaaacagtttttccactcataaagatgcagttcaaatttgagatgtgtcagggatttcactgtggctgactgtgtgtcatcatgattagatcatacactcgagcattttagagctgtaagtccctatggaaatcaccctgtgtatccccctcctctgccaggtgagacccatgaaggacagagaggccctaakgcagccccaaggtcacacaacataaaaatctaacagcaagaatggaaaagaaactgccttctaccacattgggttgccatgaaacctaacagctgggggcgcctgggaagagagaaaaagtcacgaagtttcttcctgacactcccactgacaatcgtgattctgacaccagaaatgccttttcttcatagcatttcccttacatggagaaatacacctcttgtcttgcttcattcacagttaaatatgcttaggaagacgaggagacggaggcccgtactcttgagccacccacctctgaatccacctgcctctggatccaccaaaatacctgcccttcctatttgcccgaatgctctcatgtttcagagccctctcctccaggaagccctccctgcaaacttcatcttaccatccccttttccatcctgg

SEQ ID NO: 775522 - DNA, 668 bp, Homo sapiens
ggtcaggtgtgtcctagttaaatcaaaatgtcctgtggggcaggaaacagtttttccactcataaagatgcagttcaaatttgagatgtgtcagggatttcactgtggctgactgtgtgtcatcatgattagatcatacactcgagcattttagagctgtaagtccctatggaaatcaccctgtgtatccccctcctctgccaggtgagacccatgaaggacagagaggccctaaggcagccccaaggtcacacaacataaaaatctaacagcaagaatggaaaagaaactgccttctaccacattgggttgccatgaaacctaacagctgggggcgcctgggaagagagaaaaagtcacgaagtttcttcctgacactcccactgacaatcgtgattctgacaccagaaatgccttttcttcrtagcatttcccttacatggagaaatacacctcttgtcttgcttcattcacagttaaatatgcttaggaagacgaggagacggaggcccgtactcttgagccacccacctctgaatccacctgcctctggatccaccaaaatacctgcccttcctatttgcccgaatgctctcatgtttcagagccctctcctccaggaagccctccctgcaaacttcatcttaccatccccttttccatcctgg

SEQ ID NO: 775523 - DNA, 616 bp, Homo sapiens
  misc_feature 587, 588, 589, 590, 591, 592, 593, 594, 595, 596, 597, 598,599, 600, 601, 602, 603, 604, 605, 606, 607, 608, 609, 610,611, 612, 613, 614, 615, 616: n = A,T,C or G
gaataacagcactgacccctccattggcagctggtgatatccacacaccatctctatccagagatgaaaggctccttctccatccttgacttgcaaaacagggattatttcccacctcacgctttctgaaatatcaccaaagatgcagctgtgtttgaaggccagcctcataaaaggcgtaggacccacgtgtcagtcaacactccactgagaagataattgattttttttttgttttatgattatttgcgggcactggttctctttccattagcctggataatygagggaagactgtaaagagtattaatatcacggccaaggtcactcagctggctcctgctgccattccaacccaaaggctgaattactatggcttttactaataataacaagaacaataaataacatgagtgattataaagccagggaactctgcaattacctcaacaattaacacatcccttcgtgaaacacagaacagaaaaaattttcaaaggttcaagttagaaaacttctgcattctgtttggtgcaagtgacagtcagaaaagggccttgtttgagggtatgcagtgtgagtcttcnnnnnnnnnnnnnnnnnnnnnnnnnnnnnn

SEQ ID NO: 775524 - DNA, 616 bp, Homo sapiens
aattaacaaagcagaaattgtacatctcttcacaatataacataacccaagattatttataaacattttaaaatgcccaagtgtgtggaagtatgtgaactctccaaaataatcattggcttgagaaagaaataaaaaatgaaagactacatagaaaatgacaaacaggaaatgctgtgtatcaaaacctgtgagatgtgatgaaactcaactccctggtaaaatctttaagatttaaaagaagagaaccaaaataattgggaaagcaggagagcagaagctgaggcaggaaggtctgtcctccgtctgaaccttttctttcaccaccttcccctgcatccttccctctacttctccctccccgctacactcctgcttcagcctaagcagccctcccrcatctcctgcatgtctttagatgaatgcaaattcacaaaggacctccttttgtgacttcttaggcattgagatgattccactatgagcttgggattgggtgggggagagccaggacttgtggaatgcatgaggcacttgcttccctcaagtggacctgctgctcagagtctcatggctgcaattcacagactacacacctaaatgtcagaaaaagaat

SEQ ID NO: 775525 - DNA, 669 bp, Homo sapiens
ctcccaccagttgttccagaataatcacattcatgtaagcaagataaagggaaactacccatcattattgccccaaaatgtcattaattcaggttcctccacctgagacctaatcacacttaacattctcccacagacaagttgcattagagatatgcaagacaattgtatttcccctccaggagtacagtgagtaagcaagaacaagtgacgacagataatttcctctaaatatttgatttactggccaaagctctctgtgtgtgggtcaatgagtctgtctrttctgtcaactcagggatactgggtcattgctttcatttgatgtcctttttttagcttagtaagtttcattactgggtctgaaatattaatagaccaatgctatactcctccccgctctctttatccctcttttctgcctttcctgttgtctcccttctgtctgtcttattcccttcctctctaccttcctttccacttgtggaaatattttggcagactacagagaagcatacttttctatacttttggagttaaacataatctttggtgttaaatgtcactgtgaattccttcaataaagtaaagccttgattgcttgctgtttaaaatagagtaaaatcaaatatctggcgaatgcccattcctttgagagctacacacaga

SEQ ID NO: 775526 - DNA, 489 bp, Homo sapiens
ggacccctggcctatatgtaaagccaatgctgccccagaatttagccaaaccaatgaagtgaagaatcctccccatacatttccacattgtcgtttcaactcttgtcttcygatatgtactcctgtctcccaacaccacatcagaattaacctctattgttcccattagcctgatttgtatctctcttagggcttagagcaatctgtctcatattaccattttctatacagtagtccccacttatctgaggttttgcttttctaggtttcagttacccatggtcaaccatggcccaaaaatagatgaatacagtacaataaggtattttaagagagagagagagaccacgctgacataacttttattacactatattgttgtaattgttctattttattattagccattgttgttcatctcttcctgtgcctaatttataaactaaactttatcacaggtatgtatttataagaaaaaacatgtaagag

SEQ ID NO: 775527 - DNA, 522 bp, Homo sapiens
aatggttgttgcacggattcaggaagaaattgttttaattaagatagtaaatgttcactgcagaaaattagaaagtctagataaatcagaagcaaagaaaaaaaaacatgaagcacatgtaataccacctctcagtaacatcaacaccttggtatatgtccacaagctagattagaggttctcaagctttcttggttcatggcactctcagtgtytccgtaaatttgtctagcattttagaccaaaataaattatgtttattatgtagtttagtccaaacaccttaatggtagtatgtagttcccagtgtccaaaggtgtcactgtgtttccctagaaattttagaatatattgggatgggtgttgctgtgaattcaccatagtgccccaggattccttggcacacagtttgggaattactggtctagaccttctaaaaggatcttttaaaatacaatacattgtcatattgtacagacttttgttaaccaatgatttgtatttaataagaagtaatacatg

SEQ ID NO: 775528 - DNA, 607 bp, Homo sapiens
caagcaatccttccacctcagcctcccaaaatgctgagattgcaggtgtgagtcactgcacccagcctacactcttttctgtgcttacatttgaattatctgaactggaaatctttaacataaattacccaaataattacattagttgcctcattcactttggcaatgagtagatctggtcagtcaagatttattgttcaaatgtacagtacagttcaaatgttctacaaaaaaaaawaaaaatgaaccaggctaagactagtgcaaaaaagttgaccaactgggaagatttggagattgaggaactactttgaggggaaggtgcaaaagaaaaagatgatagtgacaattttgagatgattgtcatttactgccagtgtggacagatctcagaatgagagcctatataaaatgtccatcctttatagagaagctagagcttacagaagaatttttttaattcaaatattatattgtaaaatgttccaatggtacagaaaaatacactcataataaacccaccccatagctttatcaaatcttaacaatctttacatatttgctccagattgtaagatttgtattgtaaaatataaaatacaaacat

SEQ ID NO: 775529 - DNA, 614 bp, Homo sapiens
cagagcccatgttcacagggccacggcttgcaggtttaacctgcatccactcatgaacaatactgctggaagtctcaagtggcagacaaatcacagtaaaccagactaaaaaatagcttaaacatcttccaacactttatttttacagatgtgaaagctgggatcccaaaaagtgatttgcccatgctcacagtatgtttttgtgaccaactgtaagttacctcaggtctctcattcttctttcaataccaaaccctgcctttgtcagttttggatytcaatatcactattggagtttctatttgcattgggtactttaaaaaaaaaaaggcaaacaaacaaacaaacaaaaacccaaatgctatttaaacctctctacttaaaatggcagactggagaacttatcagatggctgtttttaggaaaatctttcttaaaataatacccattcttatcctattcttatatccagaagctcatcctctgtcttgctttgtctttgtcaacaaaagattattttgttgtgcaaacccttttgcctagaggctcatcataaacattcactcccagaaatatactgagatctgcatcgtggcattggttggaaccatcaa

SEQ ID NO: 775530 - DNA, 559 bp, Homo sapiens
cctggtttaaatggaggctgggaagctcccatggagaactaaaaccctgtccagaactaacgttggcacacattggcttatctagttggagatagaggccaaaggcacaaggagatgaagaactcagaggtgtgctagagccagctcccatcagctagcgagtgcctactgcgtgcctctcattccaactctgtttagtgactgcacactgatagcctgaaattggccacagtgtaagcatttatcccaagaaaagcagtaaatgctataaatcagtctacatcacccccacttctcccctctcccaagcgagctgttaaatatttactagcataccactgggagagcccctgaaaaagaacatatctagggaaggagtctagagtgacaagccacrttcagtgtcaagtgggatttttactcagtatggggttgttaattgaatgggtttcaccccaccaaccctagatgcccccctccagccttagatgcctcagtgtgccctagaaggagctcctctatggacctgtattagtccgctctcatgctgctgtaaaga

SEQ ID NO: 775531 - DNA, 452 bp, Homo sapiens
gtaagtggcacagttgagacatgaaaacaatcctgactgactttaaatccccggaaccattctgcaatcctgccttgacgataggtcaaagtctctgcttccgtggtattaaaattgaaaaaaagcagcagttgctgagaaagtttcactcagtgcgacatytgtagctatcttttccctctccctaggctcctacttattagctttctaatgacactgacattttctatttggcaaatatgcttttgtattgtatgggttttggggtttttttgttttttgggttcttcttgattcagtctcactctatggcccatctctgcttactgcaacctccgccttccaggttcaagtgattctcctgcctcagcctcctgtgtagctgggattacaggtgcctgccatcgcgcacggctaacttttgtatttttagtagagacggggtttcacca

SEQ ID NO: 775532 - DNA, 616 bp, Homo sapiens
acaagaaagagcaaaatttacccaattgtgtcacatattatcatgctgtcaaacctggaggacattatattaggtgaaataagccaggcacagaaaggcagataccacacgataccactttcttgtggaatctaaagaagtcgaactcgtraaagcagagagcaaatagaggtgaccagcaactggtaaggaaggggagactggggagatggtcaaaggatcaacatttcagtgagacagaaggaacaggttcaagagatctaacattcaacatggcaagtatagtttacaacaatgtattgtgttcttgaaaattgctgagagtacattttaagagttctcacaaccacagaaaaatgataaatatgtgaggtaatgcatatgttaattagcctaatttagccatttcacaaactacacatatttcaaaacacatgttggacatgataaatatatgtaatttttatttgtcaattaaaaacaattaattttaaaaacaggttctcaaaataaaaacaaaatacgggattgctgcaggacttctcagaggctttaatatgccattttgcattgagacctcccaagaggaggtgggcaatgtttcctaaagttattt

SEQ ID NO: 775533 - DNA, 600 bp, Homo sapiens
cagcagccttgccttctacctctcccatcctgattttgctggggagcagatggggtaagaagggaaccttcatgatgaaggtcatgtggtagataagacacccaatgggagggagaggattgtgttgttagaagtattctgagtcacaaaaggagctgataagttagcatctattcttgactccctcatctctgttagcttctttttwtatatatatatatagtagttttcgtatttattagtgattattttatggatgaatgattactttggaagttgtaaaaaggtggtcttctaggctgggcatggtggctcacgcctgtaatcccagcactttgggaggctgaggcaggcagatcacttaaagtcaggagttcaagactagtctggcctacatggtaaaaaccccatctctactaaaaatacaaaaattagctgggctttgtggtgcgtgactgttgtcccagctacttgggaggctgaggcacgagaatctcttgaacccgggaggcagaggttgcagtgagccaagatcacatggcactccagccagtgagcaccatggcactccagcctgggtaacagagtgagacccagtct

SEQ ID NO: 775534 - DNA, 609 bp, Homo sapiens
ataaagaagattatcactgaaatgagtatcacttttaaataatactttgtaccttaatattaagtttacacagcactatctacagtattagtttatataatctccacaaatcaatgtgaggaaaattatcatcttcattttacatatgagaaaatccaagactgaagaagttaaagagtttgcccaagattacacaactagtaaatgtcaactggaattgttctccatrtgttcagagttcaaacttcctgctctcctccctctactagagtcttccaattcctgtactccatagacacacttactcattagttttttacattagctacctatctttttctttttatgctattttacattatcgcttgacttttgattttcaggtgaccaaaggaccatggatcctcaacaaatctctaaaagtccaaggttgactctaaattgaagaagatggtgtgttttcaaacgaaaattatatcagaatacatgtatctctgggcttaatgacaaaagaagagattcagttatgtcttttattcctttgtaagatttatatcaaacccttcttattctttgaaatccatcctattcatcccaaatcatagtgag

SEQ ID NO: 775535 - DNA, 609 bp, Homo sapiens
ataaagaagattatcactgaaatgagtatcacttttaaataatactttgtaccttaatattaagtttacacagcactatctacagtattagtttatataatctccacaaatcaatgtgaggaaaattatcatcttcattttacatatgagaaaatccaagactgaagaagttaaagagtttgcccaagattacacaactagtaaatgtcaactggaattgttctccatatgttcagagttcaaacttcctgctctcctccctctactagagtcttccaattcctgtactccatagacacacttactcattagttttttacattagctacctatctttttctttttatgctattttacattatcgcttgacttttgattttcaggtraccaaaggaccatggatcctcaacaaatctctaaaagtccaaggttgactctaaattgaagaagatggtgtgttttcaaacgaaaattatatcagaatacatgtatctctgggcttaatgacaaaagaagagattcagttatgtcttttattcctttgtaagatttatatcaaacccttcttattctttgaaatccatcctattcatcccaaatcatagtgag

SEQ ID NO: 775536 - DNA, 609 bp, Homo sapiens
ataaagaagattatcactgaaatgagtatcacttttaaataatactttgtaccttaatattaagtttacacagcactatctacagtattagtttatataatctccacaaatcaatgtgaggaaaattatcatcttcattttacatatgagaaaatccaagactgaagaagttaaagagtttgcccaagattacacaactagtaaatgtcaactggaattgttctccatatgttcagagttcaaacttcctgctctcctccctctactagagtcttccaattcctgtactccatagacacacttactcattagttttttacattagctacctatctttttctttttatgctattttacattatcgcttgacttttgattttcaggtgaccaaaggaccatgratcctcaacaaatctctaaaagtccaaggttgactctaaattgaagaagatggtgtgttttcaaacgaaaattatatcagaatacatgtatctctgggcttaatgacaaaagaagagattcagttatgtcttttattcctttgtaagatttatatcaaacccttcttattctttgaaatccatcctattcatcccaaatcatagtgag

SEQ ID NO: 775537 - DNA, 567 bp, Homo sapiens
gtaacgttttctctgaaggacacacattttcatctcttccaggttgtttaattctatttgtcatgcaaaaatatcaactatgtccatttccttcattgtcctagaaagaaaactcaaaaatataagtccacatttcagttgcttattccttgagagcactagtctctctctcttagatactgacacacacacacaagagaacccactacgtgggccaccgctgtgttgcacagctccaaaatgcaccattcacgtcctaatctatggaattgtgcagaggcatggggctgttcccagtggccctactcacaatacttctcctggattttcctactgacatggttaaagtagaatgtacttttaggtcaaartcaccaccaggaggtacaaaatcccatcattagtcctgtgtccctttcttaaaatgctctcaaccttatgaaaatgtgagcatacctcaacgggatggcagattttaatctgccattagtcgttttcattttagtaaagtgaagaagcaaggcactgatgggagtgagagtgggtaagggaaacaggtcactgagt

SEQ ID NO: 775538 - DNA, 667 bp, Homo sapiens
tcccacagttgagtcaggacccataatttcttcctgctttcccatgctattcctttccttattgacaaatgccatcatcttttctctcactgcctacatcatccatccatttgtttgttaggtctatcaatcacctaatatgtgtcagcaattttcccttttttttttttttgactcttgctctgttgcccaggctggagtgcagtggcatgatctcggctcattgcaacctccgcctcccaggtacaagcaattctctgcctcagcctcccgagtagctgggattacaagcacctgccaccatgcccrgctaattgttttgtatttttagtagagacggggtttcaccatcttggtcaggctggtcttgagctcctgacctcgtgatccaccaccttggcctcccaaagtgctgggatgggattacaggcgtgagccactgcgcctggcctatgtcagcaatttttctacaaataagattatagtggtgtacaaaacaaacacagtttctgttcttgtagaattatgttttagtggggaacaaagaaataataatgcttaaataaaggagagacatgagaagataagagttgtatgcatactttggatttgaataatttgggaaggcctctctgaggacttgacatttaagctgagtcgtgaatga

SEQ ID NO: 775539 - DNA, 667 bp, Homo sapiens
tcccacagttgagtcaggacccataatttcttcctgctttcccatgctattcctttccttattgacaaatgccatcatcttttctctcactgcctacatcatccatccatttgtttgttaggtctatcaatcacctaatatgtgtcagcaattttcccttttttttttttttgactcttgctctgttgcccaggctggagtgcagtggcatgatctcggctcattgcaacctccgcctcccaggtacaagcaattctctgcctcagcctcccgagtagctgggattacaagcacctgccaccatgcccggctaattgttttgtatttttagtagagacggggtttcaccatcttggtcaggctggtcttgagctcctgacctcgtgatccamcaccttggcctcccaaagtgctgggatgggattacaggcgtgagccactgcgcctggcctatgtcagcaatttttctacaaataagattatagtggtgtacaaaacaaacacagtttctgttcttgtagaattatgttttagtggggaacaaagaaataataatgcttaaataaaggagagacatgagaagataagagttgtatgcatactttggatttgaataatttgggaaggcctctctgaggacttgacatttaagctgagtcgtgaatga

SEQ ID NO: 775540 - DNA, 625 bp, Homo sapiens
aggtgggataagctggcttgctgagtcttccggctttcatctttctcccatgctggattggacttcagactccaggttcttcggcctttggactcttggacttatatcagtggtttgctggtggctatcgggtcttcagtcacagactgaaggctgcactgtcggcttccctgcttttgaggcttttgaacttggactgagccactgctggcttctttcttcctcagcttgcacacagcctattgtgggactttgctttgtgattggtatgagtcaatactccttaatacactcctatatatatatcctatttgttctgtccctctkgaaaaccctgactaatacacaaggattgaccttaaacccccttttgaagcaggtgacatctacctctggcactcttttcacatttcttgcttcagctcctggcactttttgtccagggggtgttgagcgtccttccctcagagctgggtacaagtcaaaatgttttttcccagtccaggtagtggtttttactctgactgtacattagactcactgaggaaggctttgaaaaatgccgatgcttgcttgagcctaaaccaagaccaattagatcaggatctctaggggtgagtccagg

SEQ ID NO: 775541 - DNA, 625 bp, Homo sapiens
aggtgggataagctggcttgctgagtcttccggctttcatctttctcccatgctggattggacttcagactccaggttcttcggcctttggactcttggacttatatcagtggtttgctggtggctatcgggtcttcagtcacagactgaaggctgcactgtcggcttccctgcttttgaggcttttgaacttggactgagccactgctggcttctttcttcctcagcttgcacacagcctattgtgggactttgctttgtgattggtatgagtcaatactccttaatacactcctatatatatatcctatttgttctgtccctcttgaaaaccctgactaatacacaaggattgaccttaaacccccttttgaagcaggtgacatctacctctggcactcttttcacatttcttgcttcagctcctggcactttttgtccaggrggtgttgagcgtccttccctcagagctgggtacaagtcaaaatgttttttcccagtccaggtagtggtttttactctgactgtacattagactcactgaggaaggctttgaaaaatgccgatgcttgcttgagcctaaaccaagaccaattagatcaggatctctaggggtgagtccagg

SEQ ID NO: 775542 - DNA, 618 bp, Homo sapiens
catttgcctctggaaaggaagggaggattctcaggggaggtggcacaaattgaattttaagggatgtgtctgcagcaaggcagaggttaaaaaaatagaaaataaaatcacgtgcaaaaacctagaagcattttgttaacactgctaagagtaagaagtatcttcagctactcagaaagctttctttcatctaggagarggcactttatgttaccttacaaggtcatttagtgacacacttaatggcagaattttctagtacaaattctagtagcattttcacattggtaaaacagctgccctgaaaggggttggccagcctttacaagtagcacttaaaaggaaactaaatgaccaccttcagggaaattcttcaaggaatcctttatggaataaatagtttgtctaactaaccccaccaaaaatgtctcccaaatccagaagtatatgagtatcaaaaagaaaaacaaaaagtagttttacttataaacagatctaagggaacccatcctttcaagttaactggtttgtgatgatactgctattgtactttctcaccagggcaggcctaactccatagggacagccatgtaccactgtttggcacaaaagacaccc

SEQ ID NO: 775543 - DNA, 588 bp, Homo sapiens
tcctctaaaagcagaatttgggaaatatttcctttaaaaggcaaaatagtaaatatttcagggtttgccagcacatattatatctgtttcctctgttgcatactccatgaagcagctgaaagaggtcaagaatcgaagaggttctaagagaggagaggctttattttatagtataatatgaattctaatcatcataattatttgctccgttacctgccacagtgagaattgttaattgttattttaggcgttttcctcaggtgttcagttattgtccgagggcatgagtaacacacagtgatgctrgcggtaaaatgtgtgtgtgcccagaaaggaagcaggtccttccccttagcgtagaggaagggccacgtgcaccgaatgcacacaggccccgtgcctgacattcccaccaccttactaatgcccggtcctcatgtttactcttcgtttaggtcaaggaagctgatccgctgagtaatggctcagtcatgatttttaacacctctgccttaccacatctgtaccaaatcaagcagctgcaagccctggctaattacagcattggtgtttcctgcatgaatgaaa

SEQ ID NO: 775544 - DNA, 654 bp, Homo sapiens
atagccactgtagccagactttctctctagattcctcctctctgggcagggcatctctgaaagaaaggcagcagccccaatcaagagcttatagataaaactctctccctgggacagagcacctgggggaaggggcagctgcaggtrcagcttcagaagacttaaatattcctgcctgccagctctgaagagagcggtggatctcccagcacagtgctccagctctgctcaggacagactgcttcctcaagtgggtcactgatccccgtgcctcctaactgggagacacctcccagcaggggtcgacagacacctcatgcaggagagctctggctggcatctggcgggtgcccctcttggatgaagtttccagaggaagaacacacagcaatctttgctgttctgcagcctccactggtgatacccaggcaaacagggtctggagtggacctccagcaagctccagcagacctgcagcagagggggctgactcttagaaggaaacctaacaaacagaaaggaatagtatcaacatcaataaaaaggacgtccacacaaaaaccccatttgaaggtcaccaacatcaaagacaaaaggtagataaatccacgaagatgaagaaaaaccagcacaaaaaggctgaaaattgcataa

SEQ ID NO: 775545 - DNA, 654 bp, Homo sapiens
atagccactgtagccagactttctctctagattcctcctctctgggcagggcatctctgaaagaaaggcagcagccccaatcaagagcttatagataaaactctctccctgggacagagcacctgggggaaggggcagctgcaggtgcagcttcagaagacttaaatattcctgcctgccagctctgaagagagcggtggatctcccagcacagtgctccagctctgctcaggacagactgcttcctcaagtgggtcactgatccccgtgcctcctaactgggagacacctcccagcaggggtcgacagacacctcatgcaggagagctctggctggcatctggygggtgcccctcttggatgaagtttccagaggaagaacacacagcaatctttgctgttctgcagcctccactggtgatacccaggcaaacagggtctggagtggacctccagcaagctccagcagacctgcagcagagggggctgactcttagaaggaaacctaacaaacagaaaggaatagtatcaacatcaataaaaaggacgtccacacaaaaaccccatttgaaggtcaccaacatcaaagacaaaaggtagataaatccacgaagatgaagaaaaaccagcacaaaaaggctgaaaattgcataa

SEQ ID NO: 775546 - DNA, 654 bp, Homo sapiens
atagccactgtagccagactttctctctagattcctcctctctgggcagggcatctctgaaagaaaggcagcagccccaatcaagagcttatagataaaactctctccctgggacagagcacctgggggaaggggcagctgcaggtgcagcttcagaagacttaaatattcctgcctgccagctctgaagagagcggtggatctcccagcacagtgctccagctctgctcaggacagactgcttcctcaagtgggtcactgatccccgtgcctcctaactgggagacacctcccagcaggggtcgacagacacctcatgcaggagagctctggctggcatctggcgggtgcccctcttggatgaagtttccagaggaagaacacacagcaatctttgctgttctgcagcctccactggtgatacccaggcaaacaggktctggagtggacctccagcaagctccagcagacctgcagcagagggggctgactcttagaaggaaacctaacaaacagaaaggaatagtatcaacatcaataaaaaggacgtccacacaaaaaccccatttgaaggtcaccaacatcaaagacaaaaggtagataaatccacgaagatgaagaaaaaccagcacaaaaaggctgaaaattgcataa

SEQ ID NO: 775547 - DNA, 696 bp, Homo sapiens
catcaaagacaaaaggtagataaatccacgaagatgaagaaaaaccagcacaaaaaggctgaaaattgcataaaccagaacgcgcctcttctcctccaaaggatcacaactcctcaccagcaagggaacaaaagtggttggagaatgagtttgatgaatgagcctgttggaagcaggcttcagaaggtgggtaataacaaactcctccgagctaaagcagcatgttctagcccaatgcaaggaagctaagaaccttgaaaaaatgttacatgaattgctaactagaataaccagtttagagaagaatacaaatgacctgatggagctgaaaaacacagcacgagaactttgtgaagcatatacaagtatcaatagccaaatcgatcaagcagaagaaaggatatcagagactgaatatcaacttaatgaaataaagtgtgaggacaagattagagaaaaaagaatgagaaggaacaaacaaagcctccaagaaatatgggagtaygtgaaaagaccaaacctatgtttgattggtgcacctgaaagtgatggggagaatggaaccacgttggaaaacactcttcaggatattaccagaagaacttccctgacctagcaagacaggccaacattcaaattcaggaaatactgagaacaccacaaagatattcctcgagaagagcaaccccaagatgc

SEQ ID NO: 775548 - DNA, 558 bp, Homo sapiens
atctaagcagttacctaatccaacctattcattcaacaggtgggattacacaaaccaaagattaacagatcccttttaagtagaagagaagagcccaggtcctatggtgtgtaatagggcttttgttgtcatcattctcaggttccttcttcctctactttcattgttcttttctttcatccaaatttcttcctttcccattcttaatgtctccttctccaagttctatttcttatcttccttttctgcttttctttctatccttccctctctctatcctgctcctctccytcttttcctcctcatagaatcatcttttctggctccatggcttgtagtcagtgttataacaagtgaacaacattcgttgctctctgagaatagttctaacataagatggttttaaatcttgacattcaagaacctagaaataccactccccaagtcctctctcttttccctttgaaaactacttgttattttggctgaaaatctctttttctagtgtctgatgcacagccacatccaagatcacagatgctgcatatatgtacccca

SEQ ID NO: 775549 - DNA, 626 bp, Homo sapiens
  misc_feature 4: n = A,T,C or G
atcnattctgtaacttagaatgccttactgtctataatgcagcccagtagatctcacctattttacccagctcctatttaagatgaagtttctctgattcacacacctctgaattttccccctcccttttaaaagagaacccttaatcctaarggttgcaaagggatgaagatccattttctgtaacttcttcaggcggaataggggcgataatatttctgcctagctattagggtctcttgtgttcagagtagagaggagctcagtcagaaagcaacagtatgctgggggccattcatgactcttgagttctgaaaagaggtgacagctggaagagttcaatttaagaaaacattgagtaagcttattctgtgttcctataaaatgagtacaacaacagtatattccacaagagtaaagcaaaataagtaaaattatcccaagtaaactaaataagaaggctttccatgaactgggcaactgctggaaccaagctgatatggtattgctagctgattgtaatgtgcccataataagaatattcatccagatatttacattacctatcccttttgtttcttctaagcaacagtcggagattaccggttggttcacaggaataagca

SEQ ID NO: 775550 - DNA, 668 bp, Homo sapiens
gtgtgcttttatctcacataattcaacatttcctttcattgagcagttttggaacactttttttgtggaatccgcaattggatatttggaaagctttgcctcctatagtgaaaaaggaaatatcttcacataaaaactagacagaagcattctgggaatcttctctgtgacgagtgcattcatctcactgggttgaacctttcttttgattaaatagttttgaaacactctttttctagaatctgcaggtagatatatggaacactttgaggcctatggtggaaaaggaaatatcttcacataaaaactacacagaagcattctgagaaacttctttatgatgtgtgcaatgatctcacagagttgaaactttgttttgattgagcagttttgaaacaccgcttttgtagaatctgtaagtggatatttggagtgctttgttccctattgtagaggaaatatytgcacataaaactagacagaagcattctgagaaacttctttgtgatgtgtgcattcatctcacacagttgaacttttcttttgattcatcacttttgaaacactctttttgaagaatatgcaagtggatatttgaagcgctttgtggcctatagtggaaaattttatatcttcacataaaaactagacagaagcattctgagaaa

SEQ ID NO: 775551 - DNA, 621 bp, Homo sapiens
ttcacatggaacaaaaaagagcctgcatcgccaagtcaatcctgagccaaaagaacaaagccggaggcatcacgctacctgacttcaaactatactacaaggctacagtaaccaaaacagcatggtactggtaccaaaacagagatatagatcaatggaacagaacagagccctcagaaataacgctgcatatctacaactctctgatctttgataatcctgaacaaaacaagcaatggggaaaggattccctatttaataaatggtgctgggaaaactggctagtcatatgtagaaagctgaaactwgatcccttcctttcaccttatacaaaaatcaattcaagatggattaaagacttaaacattagacctaaaaccataaaaaccctagaagaaaacctaggcattaccattcaggacataggcatgggcaaggacttcatgtctaaaacaccaaaagcaatggcaacaaaaaccacaattgacaaatgggatctaattaaactaaagagcttctgcacaggaaaagaaactaccgtcagagtgaacaggcaacctacaaaatgggagaaaattttcgcaacctactcatctgacaaagggctaatatccagaatct

SEQ ID NO: 775552 - DNA, 610 bp, Homo sapiens
caccccatagacctcaatcggctcacaagtatccttctgcagattgtaaaaaactactgtttccaaaccgctcaatcacaggaaaggtttaactctgtgaaatgaatgcatccatcacagagaagtttctcagaatgcttccgtctcgttttyatgtgaagaagattccttttccaccatattcctcatgcgctccaaataaacacttgcagattccgctaaaagagtgtttcaaaactgctcaatcaaaagaaaggttctagtcggtgagatgaatgcacacatcacaaagaagtttctatgaatgcttctgtctgatttatattgaagatatttcctttttcaccgtaggcctcagagtgcttaaaatatccatttgcagatactagaaaagactgtttccaaactgctcaatcaaagtaaagttcaactcagtgagatgaatgcacacatcaccaagacgtttctgagaaagattctgtctcgtttttatgtgaagatatttcctgtttccccagaggcatcaatgggctcacaaatattcctttgcatattctacaaaatgactgttcagaaggtgctcaatcaaaaaaaaagttcaacagtgtga

SEQ ID NO: 775553 - DNA, 635 bp, Homo sapiens
gacagttacaggttgcaaatatctatataacctttgtttcctgactctatgtgccatgtttctgcaatgggaatcttagatgtttaaaatgactgataggatatggaggtgctaaaagcattactgccaattcctaatctttgggggctcaaagaattctttttacttccgcttgcatgtctgcacagtgatccccacaactgccaccctatcggggttctgtctctgtacgtcttcatcagtcctattagcatgttttactcacatgttaaaagttcaaaataaaattwaataatgctaataacattttcaaatttgtggatttttaaaattatttagaatgcattttaaaattatggtaaaatacctctctgcttcacataactttgaaactgtttttttcttaaaatttgcagcctccaggatttgtaaaaaataaaattttttatgtcttttgtgacaaagaacaaaggctaaaaacctgcagttcccttctattgtgggttgaaatgtgtccccccaaaaagatttaagtcctaacccctgatacctgtgaatgtgaccttattttaaaacaggatctttgaaagttaaataaagttaaaatgaggttgtcttggattaaggtaggcact

SEQ ID NO: 775554 - DNA, 635 bp, Homo sapiens
gacagttacaggttgcaaatatctatataacctttgtttcctgactctatgtgccatgtttctgcaatgggaatcttagatgtttaaaatgactgataggatatggaggtgctaaaagcattactgccaattcctaatctttgggggctcaaagaattctttttacttccgcttgcatgtctgcacagtgatccccacaactgccaccctatcggggttctgtctctgtacgtcttcatcagtcctattagcatgttttactcacatgttaaaagttcaaaataaaatttaataatgctaataacattttcaaatttgtggatttttaaaattatttagaatgcattttaaaattatggtaaaatacctctctgcttcacrtaactttgaaactgtttttttcttaaaatttgcagcctccaggatttgtaaaaaataaaattttttatgtcttttgtgacaaagaacaaaggctaaaaacctgcagttcccttctattgtgggttgaaatgtgtccccccaaaaagatttaagtcctaacccctgatacctgtgaatgtgaccttattttaaaacaggatctttgaaagttaaataaagttaaaatgaggttgtcttggattaaggtaggcact

SEQ ID NO: 775555 - DNA, 612 bp, Homo sapiens
aaaaaaaaaaagtgttgattacacaaggataataatgattccttcctaggactggctatagggataaatgagaaaacatatttcaagtgcctgactgtgtctagcatgttgtcagcagtcaataaacaactgataaatagagtaagaatgaatgtgcctagtccagtgtctgcctcatggwtgtcacttaccagaaggcagcaggcagctcttaggagaagagagaaacggaaaatccgagtttgaaggaggtgggtcaagaacagcaaagaactgtagagcagagggttcttgacaatatctgtaaaaataaatttttataaaataaattcatctggggaatctctttattttgataaagtgatttcttacttgataaaaaagtcattatagaattgctttaaaaagtaaatctttttcaagatatcattccacgtatcacaattttacttacacgccacttccctgagcaaatttatttcttgcagtgactcacatctatattaatattttaaatatcttaataatataaaaatggtgaatggacgctcactacttccctggggaagattagaagaaattagcttaattctagtaagaagggcttagcat

SEQ ID NO: 775556 - DNA, 546 bp, Homo sapiens
caatctaaatctttatagatacagttgaagtcctcactttcaacccatttatctccttcccttcctttctatccagaagtgatgatcctgaaactggtatgtgccttttaccaatggttttataaattcaaaatatatactgttgttcagtgtttttataaacacatatatagtttatatatatccatcatgtgccttttatacctattttgcagtattttcaaatctatctatattgatacatgtacatctactttgttcatttgtatgacattccaatatatgaatatcaccacgatttatttaaccagtttcctactgattagcactttccattttccatgyttgctgtttagatgacaaattgctctcccacgtgatggtgccatttatattcccgccagagctcaatgaggctccacatttacccacatccttgccaatactgtgcttggttttaggtttttaacatttttgccagttcgatagggatgaaatgccatctcatggttatgctgatttgcgtttccttgattactaatgagg

SEQ ID NO: 775557 - DNA, 546 bp, Homo sapiens
caatctaaatctttatagatacagttgaagtcctcactttcaacccatttatctccttcccttcctttctatccagaagtgatgatcctgaaactggtatgtgccttttaccaatggttttataaattcaaaatatatactgttgttcagtgtttttataaacacatatatagtttatatatatccatcatgtgccttttatacctattttgcagtattttcaaatctatctatattgatacatgtacatctactttgttcatttgtatgacattccaatatatgaatatcaccacgatttatttaaccagtttcctactgattagcactttccattttccatgtttgctgtttagatgacaaattgctctcccacgtgatggygccatttatattcccgccagagctcaatgaggctccacatttacccacatccttgccaatactgtgcttggttttaggtttttaacatttttgccagttcgatagggatgaaatgccatctcatggttatgctgatttgcgtttccttgattactaatgagg

SEQ ID NO: 775558 - DNA, 555 bp, Homo sapiens
gaatccaggagtttgaggctacagtgagctgagatcacatcattgcacaccagcctgggagacagagcaagactccatctctgaaaaataaaaataaaaaggaggagggctggagagggtggaacaggctaagagtgaaaggaaagttcacgttgaagtagcactcagcttctgcaacagtccagacttctggcctagcaaggccatcctaagagctgacacattagtgtagacaaaatggcagacaccattttaggcatttcaactgatttaatcccatcaacatccctattcaacaggtcttgctataatcctcactttacagattagtacattgaggcacagagaggttaaatcacttgcccaaggtcacacagctagcaaatggcagagctgggatttgcayccaggcagcctggctccagagctcatgttcttagccactacctccgctcagcatgagaaacacggcagacaatgctcagcttcaggggccatctttgagaatcctggggaaacagagggaagcagaagactgcagagagacatgatgtg

SEQ ID NO: 775559 - DNA, 620 bp, Homo sapiens
gatgtaattgaatcatgggggcaggtctttcccaggctgttcttgtgatagtgaacaagtctcacgagatctgatggttttaaaaacggaaatttccctgcacaagctctcttctcttgtctgctgccatgtgagacgtgcctttccccttcygccatgattctgaggccttcccagccacttggaactgtaagtccattaaacctctttcttttgtaaattgtgcagtctcgggtatgtctttattggcaatgtgaaaacggactaatacaatggcggttcctgaaaaagttaaaaataggattactattgatccagcaactctacctctggatacctatccaaaagaattgaaagcagggtcttgaagagatgtttgtacacccatgtttatagcagcattattcacaatagtgaaaaggttgaagcaactcaagtgcccatggacaaataaaatgtagaatatacatacagtagaatattattcagccttaaaaagaaatacagttcttacacatgctacaacatggatgaaccttgaagaaattatgctaagtgaaatgaaccagtcacaaaaaaaaataaaacttctgtatgatttcacttatatgaggtaccta

SEQ ID NO: 775560 - DNA, 535 bp, Homo sapiens
ggaatcgcccattgccaccaatggctcatgtacagcatggcgagtcttcaagtgctgatgctgggcaatgtcccatttccacactgttccttgtatgtatttctatgaaaatgtacaagttgcatgttcagtaagcctggggcagcttgtcaggtgtttatygaagctagcttgggttgttctgtgagagtgtctaaacacagggacaagcactgggtaaaacaggaactgaagaaacgtggcccgactctaatcaagcctgcagctctaaccaggaatttacaggaaacaccggggagagaggaacaggttaaacaacaccatgcaggcacagtcataaaatccaaacaggataaatgccccaatttctcaaggggaaaactgcaaagagaaaaacaagaaagaaaggaagcaattaaaagagactgaagaaatatcaatggattgcattatacagactctatctgaatctcttttaaaacacactgtggggagggggtgtttgagccaatatttgatcatgttaagagattat

SEQ ID NO: 775561 - DNA, 607 bp, Homo sapiens
aaagagatgttataacctctgttgttaacaatgtcacaaaatgaagggccttcacagaaatacttaaaatttctaaagtgatatccttcaacgtagtggaaacatttcacaatttaagagacatatgaccttgaggtgaaactcaatttaaacaaattaccaagtggatgacagggaaagttatttcacatgtcctgtttcttcacatgggtgttcttaaagatgaaatagagtaatgaaaaggcrgtttgtaaaacataggcattcctccaatgttagatttgttgttgttcaatatggcagtgactttatataggtgattttgtcattctaacatggaaaacacaaacaaattcaaaggctagcagaaggcaagaagtaactaagatcagagcagaactgaaggacatagagacacaacaaaacccttcaaaaatcaatgaaaccaggagctggttttttgtaaagatgaacaaaattgatagactgctagcaagactaataaagaagaaaagagagaagaatcaaatggacgcaataaaaataataaaggggatatcaccatcgatcccacagacatacaaactaccatcagagaataccagaa

SEQ ID NO: 775562 - DNA, 607 bp, Homo sapiens
aaagagatgttataacctctgttgttaacaatgtcacaaaatgaagggccttcacagaaatacttaaaatttctaaagtgatatccttcaacgtagtggaaacatttcacaatttaagagacatatgaccttgaggtgaaactcaatttaaacaaattaccaagtggatgacagggaaagttatttcacatgtcctgtttcttcacatgggtgttcttaaagatgaaatagagtaatgaaaaggcagtttgtaaaacataggcattcctccaatgttagatttgttgttgttcaatatggcagtgactttatataggtgattttgtcattctaacatggaaaacacaaacaaattcaaaggctagcagaaggcaagaartaactaagatcagagcagaactgaaggacatagagacacaacaaaacccttcaaaaatcaatgaaaccaggagctggttttttgtaaagatgaacaaaattgatagactgctagcaagactaataaagaagaaaagagagaagaatcaaatggacgcaataaaaataataaaggggatatcaccatcgatcccacagacatacaaactaccatcagagaataccagaa

SEQ ID NO: 775563 - DNA, 607 bp, Homo sapiens
aaagagatgttataacctctgttgttaacaatgtcacaaaatgaagggccttcacagaaatacttaaaatttctaaagtgatatccttcaacgtagtggaaacatttcacaatttaagagacatatgaccttgaggtgaaactcaatttaaacaaattaccaagtggatgacagggaaagttatttcacatgtcctgtttcttcacatgggtgttcttaaagatgaaatagagtaatgaaaaggcagtttgtaaaacataggcattcctccaatgttagatttgttgttgttcaatatggcagtgactttatataggtgattttgtcattctaacatggaaaacacaaacaaattcaaaggctagcagaaggcaagaagtaactaagatcagagcagaactgaaggacatagagacacaacaaaacccttcaaaaatcaatgaaaccaggagctggttttttgtaaagatkaacaaaattgatagactgctagcaagactaataaagaagaaaagagagaagaatcaaatggacgcaataaaaataataaaggggatatcaccatcgatcccacagacatacaaactaccatcagagaataccagaa

SEQ ID NO: 775564 - DNA, 561 bp, Homo sapiens
gtgtggcggtgcatgcctgtaatcccagctacttgggaggctgaggcaggagaatcactggaaccttggaggcagaggttgcagtgagccgaaattgcaccattacactccagactgggcaacaagagtgagactttgtgttaaaaaaaaaaaaaaaaaaaaaagagtatctggtagatatacaattaaggcttatttttcatttcatttttcamttctttctttaaatgttattctctcttagaataagtgggagaatacaaatctaacctttgtgtgattcatagttctattgaatgtcaactagcagaaaggtcagttgttcacttgaatcaaaaggtaatcaattttctatttgttcttttttaatttgcttattcattaatttactgagcacctttatgtgctgagtggtataaacagacaaaatcactgatgtcataaagattatttaagaagattcatagctatagagatgtgtaagtattaatcatcagtctgctactatgaatagtcttagaaatttcctgaatctcgcctctcttgaaagtaaatgtatta

SEQ ID NO: 775565 - DNA, 551 bp, Homo sapiens
tccaaaactgaatcagtgataaaaaacctaccaaccaaaaaaagccctggaccagatggattcacagctgaattctaccagaagtccaaataagagctgttactgatcctactgaaactattcaaaaaaactgatgaggaggggcttctccctaactcattctacaaagccagcatcactatgatatcaaaacctggcaaagactcatgggaaaaggaaaaccacaggctaatatccctgmtgaacacagatgtaaaaattctcaacaatatactagcaaaccaaatccagtagcatgtcaaaaagttaattcaccatgataacatggcttcattcctggaatataaggttgggatgcaaataaaaaattgtgattcaccatataagcagaattaaaaactaaaattaaaaattatcatctccatagatgcataaaaagctctcattaaaatccaaaatccctccatgataaaaaccctaaagaaactaggcattgaaagaacatacctcaaaatattaataataagagccatctgtgacaaatgcacagc

SEQ ID NO: 775566 - DNA, 630 bp, Homo sapiens
ttgtaaatatcttgttttttaagtatgtataaggcaatacaaacaggaatttgatgatgtctgtatcaatgtcctatgaaggaaagatataagacaatctgataactagtttatttttcatttactgtatgctttcctttwgttagacacttcattggccctctactttaaaaaatataaaatcatttcttagcattttttctaattgctttcaagagaagaaaattagaatgtcagtttttctgggaggtaaccttgaaatagaagagatgccctctgaaaattctgtatttattaaatgtcaataattgttttaaaactgcttttcaatgaacagtattttgatttcctaaaatagatcattgcttaattttttgtccctagcaatatcaatggaagtttaggagtaaaggagattgaagcagcacatgtttgtttaaatcactctgcctccttaggagagatcctattctggagataagcatgatataaatggaaagttcaagggttattaaatccaatttaattaaaaatgcatgttgtgtgtcctggacaagttacctaatgtctctgatctaatctacaaaagagtaaaacaataattacctaactagttattgaagtatgtga

SEQ ID NO: 775567 - DNA, 625 bp, Homo sapiens
agtcttgctagtggtctattttgctgatcttttcaaaaaagaaacagctcctggattcatggattttttgaaggatttttcgtgtctctatttccttcagttctgctctaatcttaattatttcttgccttctgctagcttttgaatttgtttgctcttgcttctctagttcctttaattctgatgttagggtgtcaattttagatcttkcctgctttaccttgtgggcatttagtgctataaatttccctctacatactgctttaaatgtgtcccagagattctggtacgttgtgtctttgttctcattggtttcaaagaacatctgtatttctgccttcattttgttatttacccaatagtcattcagaagcaagttgtttggtttccatgtagttgtgtggttttaatcctgagttctaatttgattgcactgtggtctgagagagagtttgttgtgatttctgatcttttacatttgctgaggagtgctttacttccaactgtgtggtccattttggaataagtgtgatgtggtgctgagaagaatgtatattctgttgattttgggtagagagttctgtagatgtctattaggtctgcttggtgcagagctgagttcaag

SEQ ID NO: 775568 - DNA, 621 bp, Homo sapiens
aatatatgagaattaaaaatatgtatccatctgttttaaaagatatagaaatactacatgtagattctgcatgtgcaaagctaactagaacagttctccatcctggagataaaaacagatacagtaaaatatgttaartgataaaagagtacttagcctattataggagttcagggaagccatgctggggagatgatgacaagctgaaatcttaaagaatgtgtgagaccgtaaaaacacacaatatgaagtttataatataacagtatgaagtatttgggaaattcataacaaaaacaatattaaagaatacatgaaagtacagacataggtaattatgtgtcattttctcctcttatataaagaaaatctaaacttgtggcaggacaaaagcttatctcatgtctagatgctggtgtgctcacctcttaaatatttgtaatatttattttaagtgtagtcagagaatctagaggcaggaggattggcaagaatacagtcgttgctgaaattgtacacagtatagagtaatcaaaagttatcccaaagaaagggctagtaaaaatcattccgtctgtgactttctacagttgattattgaaccattctaagaaagcaccc

SEQ ID NO: 775569 - DNA, 621 bp, Homo sapiens
aatatatgagaattaaaaatatgtatccatctgttttaaaagatatagaaatactacatgtagattctgcatgtgcaaagctaactagaacagttctccatcctggagataaaaacagatacagtaaaatatgttaagtgataaaagagtacttagcctattataggagttcagggaagccatgctggggagatgatgacaagctgaaatcttaaagaatgtgtgagaccrtaaaaacacacaatatgaagtttataatataacagtatgaagtatttgggaaattcataacaaaaacaatattaaagaatacatgaaagtacagacataggtaattatgtgtcattttctcctcttatataaagaaaatctaaacttgtggcaggacaaaagcttatctcatgtctagatgctggtgtgctcacctcttaaatatttgtaatatttattttaagtgtagtcagagaatctagaggcaggaggattggcaagaatacagtcgttgctgaaattgtacacagtatagagtaatcaaaagttatcccaaagaaagggctagtaaaaatcattccgtctgtgactttctacagttgattattgaaccattctaagaaagcaccc

SEQ ID NO: 775570 - DNA, 588 bp, Homo sapiens
tgtacaactagaattcagttcaattattcagggaaacaataacaatagtaatatgtttatgagcacatgtatctggcaaattacattcttcaaaccaagttagaaaagacttggaaaagttaactgtagttatgaattacattataatttacctaagtatgggtaatggtatttatattttaaatttttatataacaattatctaaacataatttttaatagcatatactttaacaatgttaaattaacaaaaattcatggcaaaatgttagtaacagttgcaagaaaacattaggratacagtaacaaaatttatttttcaacattaataggacatgtactgcttgacatttggatggggactttttttttaacatgaattatgtatagttgaacaaaaccttcaaacagcttttaagatatgctcaatttatctaacattcttcttatgaaactgtttcataaaaagtatcaaatattttctaacagaataagctaaatctagcatatattataatgtgcaagatatttatgaataagtaacattatcaggaaacatagctaggtttacgaattcatttttaattc

SEQ ID NO: 775571 - DNA, 600 bp, Homo sapiens
tctgctctgggcccatcaggaccccagacatgagaggtgattacagacttctcttcctatcatgctatgtacttagaagtgctgaacctgccgtttgaaaacacacagacacacacaccagaaatctttacttcatgcccatgtttaactaatgaaggagaagtcccagctcccagcaatgcgtgtgttgaaccacgtcttgtctgcctcgctggccagctgaactagccttttgcccactcaagtaccacacaccgtggaccctgtgtgcctacattttaacaaacatgcagaatggatgggagaagtgaggaagagaaaaacaaaaattcccagtcgcagaaaattaggaggatatctttgtattttgtttgtctcctactaaggaattcttagaagttcagaaccktccataataagctgtcatcggatacacttgtttccgcatagggcctcgggtttgattgcagggtttttaagcttctggcagaggaatgcaatgtttcaacgttgccttagcccaaccccgtcccttttcacaggctggggcaaaaaaaaaaaaaaaaaaaaaatagtgttgaactgtccagtgtgcaaatt

SEQ ID NO: 775572 - DNA, 757 bp, Homo sapiens
caccagaattggccttgcgagagaagtccagtgctgagtggagggagatgagcacatttccctggacgaggatgtgtgggtaggaagtgccctcaggatgtggcttcgaagctcaggaaagagaatgagaatggccacagctaaggcctgcgtcttccttccctggccctgcctcagagccccaggcctggagtgactgacgcggcagaagggagccgggcacggcaaagggcctcatgcgtttcctttcctttcgtcagtggcagtaggagaaacaaatcctgtcatacaaccgtcccttctcytcttgggagccatgcaaaatatccactgaatttgaaagttgggttcatgaatggcttttccttgctttttctctttcctcgtttctctgagttcctgagtgtggtttccaaaagtttctcttctcctttaagaaaatggagtctgggaatggatgggacttctcaccaagtcagtcggaggcaggatggatttcttgcagatgacctacctttgagactatctgacagatttccctaaatgtccttttatttcccctttgggggaagatgggaattctcatcgattaggttggtgcaaaggtaattacagtttttgccattaagagtataagcaaaacagcaattacttttgctccaacctaatattttgtctttccctctgccctagtccctgctcacaaacatctcagaaaggaccttcgagctggagtcctccgaaatgtcacacaggc

SEQ ID NO: 775573 - DNA, 632 bp, Homo sapiens
aaagtcagttgaaaatcttctggaaaggactcactattctagatgccattaagaacatttgtgagtcatgggaggaggtcaaaatatcagtgttaacaggagttggaagaattgatttcaacattcgtggatgattttgagaggtggaaatagcaagagaactagaatgagaaatggagcctgaagacgtgactgaattgctgcaatctcatgatcaaacctgaaaggatgaggagttccttcttacgcacgggtaaagaaggtagtttcttaagatggaatcaattcctggtgaagatgctgtgaacactgtcgaaattacaacaaaggatttagaatattacataaactgagttgataaagcagtggcagggtttgagaggattgactccaatttcgaaagaagttctactgtgggtaaaatgctgtcaaatwgcatcgcatgctacagcgaaatctttcctgaaaggaagagtcaaccaatgtggcaaactgcattgtcttattttaagaaattgccacagccaccctaactttcagcaaccatcaccctgctaaccatcagttagcagccatcatcaaggcaagaccctctgccagcaaaaagatgacaactcacagaaagctcagat

SEQ ID NO: 775574 - DNA, 567 bp, Homo sapiens
ctttacgtgggggaagtaatgccttcccccaaggccctgctgtgcttgagtgtcctcagggtgggatgaacaggccatcattctgatgagatcacccttttcccttttaaaactgtgccgtgttacagggaggctgaggcaggagaatcacttgaaccggggaggcggaggttgcagtgagccaagatcatgccactgcactccagcctgggcaacagagcgagactctccctgtctcaaaataaataaataaataaataaataaataaataaataaataaataaataaaaaatagtgctgggtcatgtcttgaaaaggcacgtraaagcagcaatgtgccaatggagtagaggaaataaagtattaggaataattgttattgttccctgtcttaggtgttcagccacatcccgaacacagacacatacttgttacagggcataccaaaatagcaaaagtgagcttcttccctggagttacctgtgattcatgaatttgatttctaaagcattttcctgcctcggagtccagctttatctcatttgcaggtaaacactatggctaaa

SEQ ID NO: 775575 - DNA, 567 bp, Homo sapiens
ctttacgtgggggaagtaatgccttcccccaaggccctgctgtgcttgagtgtcctcagggtgggatgaacaggccatcattctgatgagatcacccttttcccttttaaaactgtgccgtgttacagggaggctgaggcaggagaatcacttgaaccggggaggcggaggttgcagtgagccaagatcatgccactgcactccagcctgggcaacagagcgagactctccctgtctcaaaataaataaataaataaataaataaataaataaataaataaataaataaaaaatagtgctgggtcatgtcttgaaaaggcacgtgaragcagcaatgtgccaatggagtagaggaaataaagtattaggaataattgttattgttccctgtcttaggtgttcagccacatcccgaacacagacacatacttgttacagggcataccaaaatagcaaaagtgagcttcttccctggagttacctgtgattcatgaatttgatttctaaagcattttcctgcctcggagtccagctttatctcatttgcaggtaaacactatggctaaa

SEQ ID NO: 775576 - DNA, 598 bp, Homo sapiens
aggacagatgaacacatgaactcccaggaattacagtgcaatatggtgggtgccaggaaagaggtaccaggagaaagcaccaagagtgactgcctgaggaaggtttccctagaggcagtggtgtctgactttggtcttaaatagtaagaagggcactttgagtgtgtggagtaagaaaaatcatggtgtgttttgggatcaacaagaagtttgctctggctggagtgtgagagtgtctgtggttttgaggttagggttggggaagggcaggaagatgaagttaaagagttatgaatggccatcgagaccatcctggctaacacagtgaaaccccgtctctactaaaaaatacaaaaaattagccrggcattatggcgggtgcctgtagtctcagctactcaggaggctgaggcaggagaatggtgtgaacccgggaggtggagcttgcagtgagcggagattgcaccactgcactccagactgggcaacagagcgagattccatctcaaaaaaaaaaaaaaaaaagagttaggaatggccaagaacattgtgatgaagagaccaggctctactgtatgggtaacggagagccattgaa

SEQ ID NO: 775577 - DNA, 626 bp, Homo sapiens
atcttgattgccagtctgaatagtgccatggatggtataggcaggcctggggcatagatgggaacaaacctaaaagataagcaaagaatgggtggagagaagataagggtgcagagaaaacagaggctcatctggtagaaagaaataaagtgccctctgaaagtgtctcaagtgcttcctagtggcactggtgccataaggcagctgtgttgagtctaagccaagtatcttcctgatctccactgcttcctgcggctgaacggggcacaggtctttcatacacatttattgtaatttagggagtgaacatggtccaggtatttgaaaagaagactggttgtcaggaagcattccttctgcttctctgcattgtgtgtctgtgattatgtgtgtgactttatgagaagtatctgaccttctctctacacaattcctcctgcttgtgagataaggtgtgccctggctggggtgttggcaagccyggtgaacatgtctaaactactctgggggagagaattgtgagagtggggagggggtgcccttgggtccagccttcccagagcataaaaagaagtgacaccctgggacccagccactctgaggctcagggagggcttggtaaatga

SEQ ID NO: 775578 - DNA, 632 bp, Homo sapiens
tttcttcatgcagtttgaataataattatttcagcttatgggaaacattgacaattcacaagtattttccctgttaagagtaagatcttgtttgaggttttatcatgatgtttattaggacactttagatttgaaaacacattaagttcagattctgaagaagttctgttatatwgataaggccaatcataagatccagaactcagggaagactttccctagaggagaattgaatgaaattttcaggaagtgggttttgttattattattattttaataagattttcaatggataacttttctacaaaagtcattggaattaggtttgctttttttcttcagaaaaaaaaacacttctcccatgaaaaataaatattttgtctattcttagctgagagtttctagtttttcatagcccttttagtctttttgcacccaatttcagaaaatcttgttccaaaaataggagaaacctggatttctgactaatcaatgataatgtgcctcaatgctgcagccctcatctaatcaaaaataaggagctaaaacctcaccgtatgattcgagcaagtaatttagtaaatgcctttcctcaccaaatatgagaaagaatcctccaggtttcattgcac

SEQ ID NO: 775579 - DNA, 640 bp, Homo sapiens
ttgttagatgggaatattgcatgatgctgggatttggagaacagatcccatcacccaggtagtgagcatagtatctgataggtagttttttaaaactgccccccaccttctaatagtctgctgtgtccattgttcacacatatttatatccatgtgtgctcaatgtttagctcccrcttataagtgagaatacgtggtatttggtttcctgtgcctttttggtagaatgatttgttttctttggggtatatacccagtaatgggattgctgggtcgaatggttgctctgttttaagttctttgagaaattttcagacagctttccatggtggttgaactaatttacattcctatcaacagtgtgtaagcgttcccttttctccacagcctcgccagcatctattgtatcttgaccttttaagaatagccattctgactggtgtgaggtgctatctcactgtggtattgatttgcatttctctggtaattagtgatgctggcattttttatatgtttgttggccgcttggtgtatcttcttttgagaagtgtccgttcacgtcctttgccctttttaaatgaggttattgttttttgcttattaagttccctagagattctagatattatgcctttgttgg

SEQ ID NO: 775580 - DNA, 633 bp, Homo sapiens
tgtttctgattgtgcttatttgtatcttttatttctttttctttgttaagatagctagggggtctatccttttttttttttttttttttttttgagaaccaactcttggtttcattgatcttttgtatggattttctatttcttaatctgggtggtggttagaagggtgtttgcctgataatagttaaggcatgtatttattccgtgtggtttactgtgtcttatttcacaatacaacatgtcttttgttttttaaaaaaaaaaaagccatttcagtagtaccggagagagaaaaagagggagccccagcctgaatgagagtggaaaatggtgagcaaatacggggtcattccagagaagtgactgtacgtagaatgtaaaatagaggcagagtaagagatagccatttggaaatttacatttgaggtggcartagaatagatatgtgacagtaactacaagaggttagaaataaaagttcagatctcagaaaaaatattgtgctagaagatttggagatcaaaatcaagtgatcagaacataactacgggaattggaaagtcagaagagaagatgaccaaggacagaatcttagaaaatgtctgtgtgtcaggagtagtaaaaagagccaga

SEQ ID NO: 775581 - DNA, 666 bp, Homo sapiens
aacaaattttgagattcatccattttattgcatttatcaataatttattgctttttattactgttgtttgaaacatattgatacttatactgtagtagtattcaatttcattatatggacgcatcacaaaatttgtttcttcctttacctgttgatagttgtatgggttgtttctagttttcagttatcttgaataaaaataytataaataataatttaaaagtcttatttcttttctattgagtaaacacccagtaatagaatgaatggtttatatatatggtaagtgatgggtaatttaacaaaatgactgccaaactgtttaccaaagttatcgtactattttatatttccaatagcagcatttgagagttttgtttctgtcctttatatttacccacatattcaccatttcagtagctcttcgtttatttgtgtcaattcagttacttctggtacttttttcctcttgcctgtgaagcaacattttaacatttcatgtagtgtaaatctgacgatgttaaattttttcagcttttatacatctaaaaatgtatctatttttatcttgtttttaaaatattttttgctgggttatatatttaagttgacaggtttttaaaatttttttctttcagtactttaaatatgtcactccctacactc

SEQ ID NO: 775582 - DNA, 598 bp, Homo sapiens
  misc_feature 575, 577: n = A,T,C or G
aataatttcctttattgaagcaatttttaagttcttaaattctgctttatgatcttttctccgagttcatttttttcttaaaatattctttctgaacatataaaacataactgaacaagattcaaaggatgcatgttacaaataggcagattttagttcaaatagcaggaattttytaatagtcaaagatattcaaagatgtgatgtattgttgtggaaaggagcaattaagctagagaaactttgaaatcacttccaactttaaggttatagcaataaagaaaagctgggctgggtgctgtggctcacgcctgtaatcccagcactttgggaggccgaggaggcggatcactagatcagggattcaagatcggcctggccaacacattgaaacctcgtctctatcaaaaatacaaaaattagccaggagtgtgtgcgtgcctgtaatcccagctacttgggagaatgaggcaggaaaattgcttgaatctgggaggcagaggttgcagtgaatggagatcataacacactgcactccaccctgggcgacagagggcaactccttctcaaaaaananaaaaaaaaaaaaaaaaaaagc

SEQ ID NO: 775583 - DNA, 667 bp, Homo sapiens
acctcgctaatgatttttttaaaaattcagttattgtgttcaagtccagaatttctatctagttctttcttattgtttcaatttctttcttcgtattgtcattttgttcacacatcgtttttgtgatccctttggttgcttctctgtgtttcttgtaattcattgagcttctttaagatgactattttgaattctttttcaggtgattgatacatctctgtttcttttagagtcatgcatcccaagcagttgggatgccataactaaatgccgcagactgggtggctaaaacaacaaaaatttattccctcacattctggaggctgagatatttaatattaaggtgccagccaatttggtttctattgaggtcctcttcctggcttgcagatgtccaccttcttgctgtgtccttacatggtagagagggagaaagaaagaaagacagactctctggtgtttcttcttataagaacactagtcctgtaggaatggggtcccatccttwtggactcatttaactttaatttcctttttataggaaattactcagatataggatctgagtaccatcagactaggtattagggcttcaacatacgaagtttgggaaggacaaaattcagtctgtatcaggtcagtttttggaaatgtactttgttccttt

SEQ ID NO: 775584 - DNA, 535 bp, Homo sapiens
ccttccttatataagaatgatgctcttaacttctcaaaataaggcatatactttgacatattgtagtgtttggtttaaactgagtgtttcattgacccccatttattttacatggcagtaaaagtcagtgaccagggaacggaataaaaataacttattgctttgctcagaattattgtcatgcaaagacttcttcattagggacacactcaacatcccttcttcacttcttcttattaagagacctctaatccactttgggaggccaaggtgggtggatcacgaggtcaggagatggagaccatcctggctgacatggtgaaacctcgtctctgctaaaaaatacaaaaaattagccaggcatggtggcaggtgcctgtagtcccagctactcrggaggctgaggcaggagaatggcatgaacctgggaggcagagcttgcagtgagccaagattttgccactgcattccagcctgggtgacagggcaaggctccatctcaaaaaaaaaaaaaaaagaaaaagagacctctaat

SEQ ID NO: 775585 - DNA, 485 bp, Homo sapiens
cctataactatctgatctttcacaaacgtgacaaaaacaagcaatggaggaaggattcccacttcaataaatggtgctggataactgggaagccatgggcagaagaatgaagctagatcccctccttacaccatatataaaaattaactcaagattarttaaagacttaaatgtaaaacccaaatctataaaaacccgcaaggcaacgtaggcaacaccattctggacataggaatgggcaaaggtttcataatgaagacaccaaaagcaactgcaataaaaacaaaaattgacaaactgaatctaataaaactaaagtgctcaacatcactgatcattaaagaaatgcaaatcaaaaccacaatgagataccatctcatgtcagtcaaaatggctatcattaaaaagtccaaaaaacaacagatgctggcgaggttgtggagaaaaaggaatgcttatacagggttagtagaagttaaatcagt

SEQ ID NO: 775586 - DNA, 485 bp, Homo sapiens
cctataactatctgatctttcacaaacgtgacaaaaacaagcaatggaggaaggattcccacttcaataaatggtgctggataactgggaagccatgggcagaagaatgaagctagatcccctccttacaccatatataaaaattaactcaagattaattaaagacttaaatgtaaaacccaaatctataaaaacccgcaaggcaacgtaggcaacaccattctggacataggaatgggcaaaggtttcataatgaagacaccaaaagcaactgcaataaaaacaaaaaytgacaaactgaatctaataaaactaaagtgctcaacatcactgatcattaaagaaatgcaaatcaaaaccacaatgagataccatctcatgtcagtcaaaatggctatcattaaaaagtccaaaaaacaacagatgctggcgaggttgtggagaaaaaggaatgcttatacagggttagtagaagttaaatcagt

SEQ ID NO: 775587 - DNA, 560 bp, Homo sapiens
gtaatatgttatttatttatgttacagtatgggaattttaattcttctttttttttttttcctgagacagagtctcactctgtcgcccaggctgaagtgcggtgatgcaatcttggctcactgcaacctccgtctcccargttcaagtgattcttgtgcttcagcctcccgagtagctgggattacaggcacgtgccaccacgccagggtaatttttgtatttttagtagagacagggtttcaccatgttggccaggctggtctcgaactcctgacctcaagtgatccacctgcctcgccctcccaaagtgctgtgattacaggcgtgagccaccattcctggccctaattctgctcttgaattttcaatattcttgtggtggtttcttcctctcagtcaagatgcctatcatctcagattattgactttttatggcttattggctttttatagcattctgatatctctttgtgatatatatctttatttcctatcataatgagatagcatcttaaattgccttttgttgcctgtaaagcatcatttacaagagtatgca

SEQ ID NO: 775588 - DNA, 642 bp, Homo sapiens
aggctcatgaaagctgactctgcacatgtcttcccaaatccacagtcagtgatttcacattggcctgttgatggaaatatttacaccaaagaaatcaataaactacaaatcgggcttttcctcctcccacccctgaaccaatggtaaacattcagtagctctccactgcctgcctagccctgttcctgttgctcacagaaaacaagacttgtataccagactccaagctgactcttctctgctctgatcccgccagaccacctagaagagaattgtctgttcacctagatttctgckttcatctgcatctagattctcctttacatgctatcatcctagagctatccctaggccttctaggtcccaaagcctcccaactacttcccatcagcaagttctctagctctcaggtctccacataatattaaccatagataagtagactttgatgtagattcagcttctgtaccttgctatgtaataacattgcacacattcattttgtctgtttccttttctacaaatggctattttgtagaaataccctcactggatttttttgacagcaaattgatcaggtatgtaaatttcctagagctgtacctaaaatgcagatgggcctcaatttttctcctctctagg

SEQ ID NO: 775589 - DNA, 642 bp, Homo sapiens
aggctcatgaaagctgactctgcacatgtcttcccaaatccacagtcagtgatttcacattggcctgttgatggaaatatttacaccaaagaaatcaataaactacaaatcgggcttttcctcctcccacccctgaaccaatggtaaacattcagtagctctccactgcctgcctagccctgttcctgttgctcacagaaaacaagacttgtataccagactccaagctgactcttctctgctctgatcccgccagaccacctagaagagaattgtctgttcacctagatttctgcgttcatctgcatctagattctcctttacatgctatcatcctagagctatccctaggccttctaggtcccaaagcctcccaactacttcccatcagcaagttctctagctctcaggtctccacataatattaaccatagataagtagaytttgatgtagattcagcttctgtaccttgctatgtaataacattgcacacattcattttgtctgtttccttttctacaaatggctattttgtagaaataccctcactggatttttttgacagcaaattgatcaggtatgtaaatttcctagagctgtacctaaaatgcagatgggcctcaatttttctcctctctagg

SEQ ID NO: 775590 - DNA, 566 bp, Homo sapiens
cagcagaaccctgttcctaaaccagaaataaaaccttttttaaaattaagaatgataatagaatacatgcatagtaaaaccctggaaggaaatatgccaaatatcaatagtaattatagctacgatggaggggttcaaattattggtgatttttgtctttattctctaaatgaacacattgctactgtaatctaaatttaaaaaaattaacaaataagttttagaacatcttttttgcaaaagcattgccaactttgaatatctccctcccctacaaggttaaataagtaaaaaaaaaaaaaaaaaaaatmcaagaaaataacataagaaaataaatcaaagatgaaaataaaacatctctgaaattgaattatatgaggcaatggcctggttagttctcattgtcactgggtcctaatcaaataagttaactggcctccaatatgtaactgaaaatcaaatacaagactccagttacccaagtttctggtttaacagcattagctgaatatcaaaaaggctgcccaaggaaggcacctcagccaagacatttcatgtataactgc

SEQ ID NO: 775591 - DNA, 566 bp, Homo sapiens
cagcagaaccctgttcctaaaccagaaataaaaccttttttaaaattaagaatgataatagaatacatgcatagtaaaaccctggaaggaaatatgccaaatatcaatagtaattatagctacgatggaggggttcaaattattggtgatttttgtctttattctctaaatgaacacattgctactgtaatctaaatttaaaaaaattaacaaataagttttagaacatcttttttgcaaaagcattgccaactttgaatatctccctcccctacaaggttaaataagtaaaaaaaaaaaaaaaaaaaatacaagaaaataacataagaaaataaatcaaagatgaaaataaaacrtctctgaaattgaattatatgaggcaatggcctggttagttctcattgtcactgggtcctaatcaaataagttaactggcctccaatatgtaactgaaaatcaaatacaagactccagttacccaagtttctggtttaacagcattagctgaatatcaaaaaggctgcccaaggaaggcacctcagccaagacatttcatgtataactgc

SEQ ID NO: 775592 - DNA, 616 bp, Homo sapiens
aactcccaggtggaatagtctgaaagctcaatagtaaacacactaagtgacccagaatcacgctaattctgacttgccatttttcgtgtccactccaaattccatatattctaggtgtatgataagaccagtagctagcagttttgcgtatactgtatctaaagcaaccttgtcccaaatagaaaacacaagcaaggaaagtaaaacaaacaataaaacagagctcttttytttttcaaagcatgcacaggtaaaaagcaaaaaaaaaaaaaaaaaatctttcaaacaaacaaaaaaacccatgaggagttttaaaaatcgtattttattaaaaatgtaagaagctataaagaattccaagaaaaaatggggcaatttggacccacttgctaagaaaattacccatgcagaggcagtggttgagatacatatctgtagttgcctaagatggcttagttcacagtgtaaaccttgtggtggaattattcttccctttagatctaaacctttggtttctttataggttgaaagttcttatcttaaaaaaaaaaagtctcagcaaattttggggcaaattagctaaatagtcttattaagttgccgtctactgaccccg

SEQ ID NO: 775593 - DNA, 616 bp, Homo sapiens
aactcccaggtggaatagtctgaaagctcaatagtaaacacactaagtgacccagaatcacgctaattctgacttgccatttttcgtgtccactccaaattccatatattctaggtgtatgataagaccagtagctagcagttttgcgtatactgtatctaaagcaaccttgtcccaaatagaaaacacaagcaaggaaagtaaaacaaacaataaaacagagctctttttttyttcaaagcatgcacaggtaaaaagcaaaaaaaaaaaaaaaaaatctttcaaacaaacaaaaaaacccatgaggagttttaaaaatcgtattttattaaaaatgtaagaagctataaagaattccaagaaaaaatggggcaatttggacccacttgctaagaaaattacccatgcagaggcagtggttgagatacatatctgtagttgcctaagatggcttagttcacagtgtaaaccttgtggtggaattattcttccctttagatctaaacctttggtttctttataggttgaaagttcttatcttaaaaaaaaaaagtctcagcaaattttggggcaaattagctaaatagtcttattaagttgccgtctactgaccccg

SEQ ID NO: 775594 - DNA, 614 bp, Homo sapiens
gaaagtagaattatataaaatgctcaatgaaaactacaaaaagcagaaaaagagtggaagacaaaaataagaaggacaagggcaatgaccagaaaacagtaacaaatatggtagacattaatcctattatttgaataatcaatttaaatatcaatggtcttagtacaccaatgagcaggcagggattatcatagtgggtcaaaatacaatccaactataagctgcttagaataaatccactttaaataaacaaacaaatacattaaaggttaagggacaggaatagaaatagcatgctgacattaataaaaaagctgaaatgattatattaattgtagacagaacaaacttcaagaaaaattattggggcaaaactggaatactacaaaattataaagggattaattctccaaagaaacacaaggactcttgatgtgtattttccttacaacagagtctcaaaatacatgagcaaaawaactgatagaaatgcaaggagaaacagatgaatctcttaatacagtcagagacttgaacactcctctaccactaatagatatagccaggaggcagcaaattagtaagtacctactagaacttaacagcaccatcaa

SEQ ID NO: 775595 - DNA, 594 bp, Homo sapiens
ctttgcagaaatctcaagggctgacatttttaccatctggaggcgtggaaccaggacagcacccataggaacaggagctaaagtcagagataacatgagggcatggtgtctagggaaatggtggaaattctgaggagtactttggatttctagaaggcattgaatttggagtgcaagccaagcttatgtctaaataagcctagagcccacagtggtcactgggtttcacaagcaaaggtcatgaatatagaatgttcttgcatgagtggtggcgaggttggtytgcatcactggtcatctgctgtgaattttttcaggggaagctcacatcctcggaggccttcgcctcaccctagaaagatacaaaatgccctggagaaatgctgtattcacagcacatttgcacaggacactgtgtcagtcactgatctggaacactttgcttgcttacctccttgagctattggtgcaataaccatatgcagatgggctagcacaggctcctgggctccctgagtcagttccacagaacccgggatcaacaaggagttacgagagttccatggaacaaatagaagacatgattaaatacat

SEQ ID NO: 775596 - DNA, 631 bp, Homo sapiens
ctagcaaactgaatgtggggacccctctcacccccttgggactgctcacactctgtgacctctaggcccttcctctgaacctatccagcactcagggacctgccctcgcacgcatgcacacacccagcccggcacccccactggatgcccgcacggtgtccccccacccgacccctgctggggtctaaggagactgtcctggcactcggaggctctgtgcctcccctgggtcacctagctatttttgtaccaggcacatggatgggagcagttgtgagctgcaagtcatcaacttcaccaagagagagatccaggtgrgagctgggtggcgagggaagggacaggcccagcaggggcggagccgggttcacttccccactgcttgcctgtcggctttgtcctcggtgccaaaggcccagttaccccattctcctcagcctcgcctgggctccacctgccttgtcagccagcgccctctgctggccgacattccaaagggcagcggtaccctcttgaagggctgagttgagcctgatttgcaggctttgcctccagtcccacagtctttgccaatcaccctgcccgggaagtgcctgcgtgctagctgggcccttattgactgactagccag

SEQ ID NO: 775597 - DNA, 631 bp, Homo sapiens
ctagcaaactgaatgtggggacccctctcacccccttgggactgctcacactctgtgacctctaggcccttcctctgaacctatccagcactcagggacctgccctcgcacgcatgcacacacccagcccggcacccccactggatgcccgcacggtgtccccccacccgacccctgctggggtctaaggagactgtcctggcactcggaggctctgtgcctcccctgggtcacctagctatttttgtaccaggcacatggatgggagcagttgtgagctgcaagtcatcaacttcaccaagagagagatccaggtgggagctgggtggcgagggaagggacaggcccagcrggggcggagccgggttcacttccccactgcttgcctgtcggctttgtcctcggtgccaaaggcccagttaccccattctcctcagcctcgcctgggctccacctgccttgtcagccagcgccctctgctggccgacattccaaagggcagcggtaccctcttgaagggctgagttgagcctgatttgcaggctttgcctccagtcccacagtctttgccaatcaccctgcccgggaagtgcctgcgtgctagctgggcccttattgactgactagccag

SEQ ID NO: 775598 - DNA, 631 bp, Homo sapiens
ctagcaaactgaatgtggggacccctctcacccccttgggactgctcacactctgtgacctctaggcccttcctctgaacctatccagcactcagggacctgccctcgcacgcatgcacacacccagcccggcacccccactggatgcccgcacggtgtccccccacccgacccctgctggggtctaaggagactgtcctggcactcggaggctctgtgcctcccctgggtcacctagctatttttgtaccaggcacatggatgggagcagttgtgagctgcaagtcatcaacttcaccaagagagagatccaggtgggagctgggtggcgagggaagggacaggcccagcaggggcggagccgggttcacttccccactgcttgcctgtcggctttgtcctcggtgccaaaggcccagttaccccattctcctcagcckcgcctgggctccacctgccttgtcagccagcgccctctgctggccgacattccaaagggcagcggtaccctcttgaagggctgagttgagcctgatttgcaggctttgcctccagtcccacagtctttgccaatcaccctgcccgggaagtgcctgcgtgctagctgggcccttattgactgactagccag

SEQ ID NO: 775599 - DNA, 636 bp, Homo sapiens
tggtctcaaacttttgggctcaagcaatcctcccaccttggccttccaaagtgttggcattacaggtgtgagccactgcactcaggccaaagttctcttcagttgtaaggtttttggtactctattgccaaattgtcctccaaaaaggttatgtctttttaccctcctgccaacattatataaaagtgtccacttttgtagacttttaccaatgctgactacttttggtttcaaaaaagctttcagtaattttctattaattacttttacccttttttattgagggtgttcaactttttattgttagcatattctctctgggctccattggacgccttggcagctttttggtagtaggtgcctttaraaaagtccttctcgtctggccctttctaagcaaatctagtgaacagaattggctctatgctcagcattgcttaatacggttgatccagggcctaggactcattccttcattaccatccacttgcattgtcttaaagcaaggctctattaatttaatttggcatttcctgtcccagctctttagtttcattaaacaaaggctttagaaaactcccagtagatgcctatgttgcttccttttaaaaaattttggagctgtttccctagcct

SEQ ID NO: 775600 - DNA, 610 bp, Homo sapiens
agtaagctggagtagaaaaaaaaattttttttttttgagtcagggtctcgctccagtgcccaggctggagtgcagtggcgtgatcttggctcactacagcctctaccccttgggctcaagtgatcctctcacctcagcctcctgagtagctgggactcgggcacatgccatcacgtccggctaatttttgtattttgtaatttttgtgttagcagagatgtgttttcgccgtgttgcccaggctggcttcaaactcctggactcaagtgacccgtctgcctyggcctccaaaagtgctggaattataggcatgaaccattgtgctcaaccaagaaaaacaatttttttaagtgtaattcagtaagtgttgattgtaagaagtgaactcagaagaaaaacaggtagaattttagaatactcagactaattttaaacgttcctgtagaaaatgtattcaacatttttcagccacagcactgttaatgacattcctttatctaccggataattagaaataatttttgtcttaaagttatttgtaatctaaaaatctaacaatgttacttgcggaaaatttaggaagacaaagtgaagaaaataaagtgaaaaa

SEQ ID NO: 775601 - DNA, 544 bp, Homo sapiens
ctgaggtactggaggttagggttttgacggatacattttgcagggacgcatttgacccataatacccactcaaaaccagaagtgttctgactcactactaaatgagttgaagcagtattcacaagtgtggtggatatggtctccmaaatctgaagaggtccactgggcattgtaccactttcttagtggtaggaggtacaaagtgcacacatttgttcgccccttggaggagtgacctggcatgtctcaaaccacggggcccctgaaagctttattgaccgcagcaaagccttgattgtgtgtaagcttcctcttccactctctgatccagatatacctgaccagaatgcttaccattcctgtcccccaggcacaattaaatgatgttgccagcacagtgaaaccttgagatttcctatagaatatcccgatgatcccaatcccgttaagctttattgcaatctagccatgagggcatgacagtgaatgtatgtatctgtctgttctaagtgacagcaaactgcttttgatgctcctttctaga

SEQ ID NO: 775602 - DNA, 615 bp, Homo sapiens
gtgaaaactgaaaaaacagcgccttgacttcatttccccctcaaagttgcaacatcagcccaggagtcagagcactgaaaaggctttagtctgtaggattaaaacctaaaatatgtgcaacaatgaaatacatgatctgcacacttaggtcagtttccctatgagcaaacattccacattgtttctaaagcactatcatcattaataaactctcataggctctttttatgtataagaattggtattaggaagataaatagatacttgcctatttctacaggaattctgccatcagagtaggggattatttcccatacattcttcatgtttcaagttttattcacctgcaatatttagggatattttcatgaacatagaattctatcttgctaattttaccccrgtattttatagatggcatttctttgtcttctggcttgcatttttttaaatgttactggtaattcttaccttgtctcttgtatataatgtgtcttttttcatgggttgtttgaatttttaaaaaatcattgatgtggctttctttatgcttctgatgtttgaagtttgagtttcttggatctatggatttataattttcataaattttggaaa

SEQ ID NO: 775603 - DNA, 662 bp, Homo sapiens
cccagctcaagagttttctgggtgttcctgacttgcattgtgtctccagtgttgtgaaggttctttccctgaggaaagcccaggcccagagcatcctggaagtcctgaagataactcagcactgtgcagaatcccttgggcagccccactgcttccatccacctttcatacttttcctgttggaacttctgacctgycagaaagattttaccaagtaagtacaaaggacaggtccagaaggaaaacagcaaagatcattgtaaataaatcctgattatcttctctgattaatagcagcatcatttctatgtaggatacaaatgtacgtttttggttaattcattctctcattccaaggaaagatgggttatatccttttaatatgtaactgccgggaacatatttattcctcctggtgagttgatgagctttactttccagatggtgagaattgcattcctcatatactcatgcatcatttggctcctggaagctgtgagctaaatataaggcttacagaaaagatattaatctgagtacctcaaaaggtggttcttaggattaactcaataaataccttttgagcatctagtgtgctagaatgtcttctgggtgttatgcagcagtagacaaggcagattttatattatattgaggagaga

SEQ ID NO: 775604 - DNA, 662 bp, Homo sapiens
cccagctcaagagttttctgggtgttcctgacttgcattgtgtctccagtgttgtgaaggttctttccctgaggaaagcccaggcccagagcatcctggaagtcctgaagataactcagcactgtgcagaatcccttgggcagccccactgcttccatccacctttcatacttttcctgttggaacttctgacctgtcagaaagattttaccaagtaagtacaaaggacaggtccagaaggaaaacagcaaagatcattgtaaataaatcctgattatcttctctgattaatagcagcatcatttctatgtaggatacaaatgtacgtttttggttaattcattctctcattccaaggaaagatgggttatatccttttaatatgtaactgccgggaacatatttattcctcctggtgagttgatgagctttactttccagatggtgagaatygcattcctcatatactcatgcatcatttggctcctggaagctgtgagctaaatataaggcttacagaaaagatattaatctgagtacctcaaaaggtggttcttaggattaactcaataaataccttttgagcatctagtgtgctagaatgtcttctgggtgttatgcagcagtagacaaggcagattttatattatattgaggagaga

SEQ ID NO: 775605 - DNA, 457 bp, Homo sapiens
accatattgtgttatctttactaagaaaacattgcaagtccgtaaaagagagagaaaacatatcttaatgggaaaccaagcttcatgtttgtctttgcactaggccttacaacttaagtgtttcatccttcataaagcttttcccctttgccatatttttttttctttctggcagcaagtatttcagcaatgggcagaagacaaaagaaccaatttcagaattatarcagtgaaaagtcaggaaggtttgagtacctcgtgcataaagcagacaattctgaccaagaccaagacatttatgttcctgccaatgttgtagtatctacaagtatgactattgactattccatctttatcagtgataaatgtgtgaatctgaataaaaagatgtcagtataaaattcatcagtgactgctggatccagatatgttgatgccattctgagaacatttttgc

SEQ ID NO: 775606 - DNA, 591 bp, Homo sapiens
agctactcgggaggccgaggcaggagaatcacttgaacctgggaggtggaggttgcagtgagccgagatcatgccattgcactccagcttaggtaacagagcaagagtctgcctcaaaaataaaaataaaaatataagaaaataattattattcagatgaattgaacaggcaagaccattttaacaagtaggattagtatataggaagacacagaggcataggaaatgtgccttcaggcagccataaattattctgcatggagatagggctggaaatgtgatgaggggagcttggtaagaagtgaacctggagggctgggcgcggtggctcacgcctgtaattccagcactttgggaggctgaggcaggtggatcatgagatccggagatcgagaccatcctggccaayatagtgaaacaacttctctactaaagatacaaaaatgagttgggtgtggtggtgtgagcctgtaatcccagctactagggaggctgaggcaggataattgcttgaacccgggaggtggagattgcagtgagccgagattgttccactgcactccagcctggagacagagcgagactccatct

SEQ ID NO: 775607 - DNA, 550 bp, Homo sapiens
ggattatcatggtcttgggatccacccctgtgattttgcagggtaccgcctccctcccagctgctttgatgggctggcattgagtgtctgcagcttttccaggcccactgtgcaagctgtcagtggatctaccattctggggtctggaggatggtggccctcttctcacagctccactagtcagtgtcccagtagggattctgtgtggggactccaaccccacatttcctttctccactgtctagcagaggttctccatgagagctccacccctgcagcaaatttctgcctgaacatccaagtgtttccatacatcctctgaaatctaggcagaggttcccaaaccccarttcttgacttctgtgcactttcaggctcaacaccacatggaagctgccgaggcttggggctggcaccctctgaagccactgctcaagctctacattggacactttcagccacagctggagcagctgggacacagggcaccaagtctctaggctgcacactgcatggggaccctgggcctggcctaggaaaccattttctc

SEQ ID NO: 775608 - DNA, 550 bp, Homo sapiens
ggattatcatggtcttgggatccacccctgtgattttgcagggtaccgcctccctcccagctgctttgatgggctggcattgagtgtctgcagcttttccaggcccactgtgcaagctgtcagtggatctaccattctggggtctggaggatggtggccctcttctcacagctccactagtcagtgtcccagtagggattctgtgtggggactccaaccccacatttcctttctccactgtctagcagaggttctccatgagagctccacccctgcagcaaatttctgcctgaacatccaagtgtttccatacatcctctgaaatctaggcagaggttcccaaaccccagttcttgacttctgtgcactttsaggctcaacaccacatggaagctgccgaggcttggggctggcaccctctgaagccactgctcaagctctacattggacactttcagccacagctggagcagctgggacacagggcaccaagtctctaggctgcacactgcatggggaccctgggcctggcctaggaaaccattttctc

SEQ ID NO: 775609 - DNA, 629 bp, Homo sapiens
aataataataataaataaactgaactgagattctaaagcctaccaattggccaagatgtcacgtcggagacagtcaatatctgtcccccacctcaactgatgtaggtccctcttaggggtcccaacaataatagatagccatttttccccagggatatcatgtgcayccccaagaatatttactgtgtggaagccagttactacctttcctccctcccaaaaacatgtgacttgcactctaagggtagcaataaagatcttcaagtgtttaagaaaacacgaccaatagatcatgtacatctaatatgattgtgcagatctcaaaaatgagactaactttgcatacgcatggaggatatttagatgtttcacttacttgtatatgactataatttgtgcttacactgtgagaacttattcttacatgggagtcctctaattaaaaagagtatgaatacaggtatttctgacattatctaacgtaatgaattatgccaccttgacaatggaaggctaccagactatcctcaagtcacaggtcagggaggttatggatggtagaattgtcttatgcaatctctaatacttcctaccgcacctggtttatatttcaggccaagtagaattat

SEQ ID NO: 775610 - DNA, 596 bp, Homo sapiens
taggaatgaatcaagctggcatggcctttgcatcagaaggttcaggcacctagactggtctgtggcaggggttctcagcactactggcactccggatctgatcattctttgcaaggggaggggacccgtctgtgaatggtaggatgtccagcagcatccctggcctctacccattagaagccagtagcatctcccagttgtgacaacaaaaaccatttccagatattgctaaatgctcccttgggaatgaaaatgcctctgcttgagaaagcactgctatagaggcttattatggaaggcttcccaggggacaaaccatttaagataaaacctagcagacagagtctcgtgtgggtagccaggaaagcaagacagagtgcatgatatgacaaaggtgtgtgctttgtgatgctggctgttgaggatgagaaaggaaagagtgaaagcyggtgatggaaactctgcaagagccaggtgatgagtgcctgtgtgagtcgcattaaggaacttcaactgtgtcctaatgatagtaatagattgagaaaaggattcttaacaaggagaccaatagcaaacatagatctggattttagctt

SEQ ID NO: 775611 - DNA, 552 bp, Homo sapiens
tcttgtgtttatatgtaaagaaaagttggcgtctggattcagataactacaggttttattgtttttcagtgacatgatagttcagtgggacatttgaaagctatacagggcatgaggcgattcttcactgtgtagggcaacttgtggaaaactttgcttaaagagcagtaggcatattttctttgcccgtgttttcttaatcccttcctcccctaccctgttggccgaaatgtagacgtgatgactggagctgcagctgccatcttggagcaggtagacagaaccatgctacaccctagggtgacagagcagtagccggaaggaacctattccctgaggacttcgtggagcaaggctgccctattagccctggattctctctgtctctgaactttcacaygaacaagatataaactactctgctaagccaaaattattctgggtttctacttcttgaaactaaatctacctaaagcaataccaaaaataaacattaaaataagcatttcaaactagttttcaaagactggtattaaatctgatagggttaag

SEQ ID NO: 775612 - DNA, 596 bp, Homo sapiens
caaataggagcagctcccgtctgcagttcccagtgtgagtgacacagaagacaggtgattcctgcatttccaactgaggtactgggttcatctcactggggcttgtcagacagtgggtgcagcccacggagcagggtggggcatcgcctcacccaggaagcacagagggttggggaattccctttcctagcaaagggaagctgtgacagacggcacctggaaaatcgggacactcccaccctaatactgcacttttccaatggccttagcaaacggcacaccaggacattatatcccaygcctggcttggaaggtcccacgcccacggagctttgctccctgctagcacagcagtctgagatccaactgcaaggcagcagcaaggctgggggaggggcatcctccattgctgaggcttgagtaggtaaacaaagcagctgggaagctcaaactgggtggagcccacctcagctcaaggaggcctgcctgcctctgtagactccacctctggggggcagggcatagctgaacaaaaggcagcagaaacttctacagacttaaacatccctgtctgacagctttgaagagagcagtgc

SEQ ID NO: 775613 - DNA, 569 bp, Homo sapiens
attatgttataaagctattgtaataaaaacagcatggcactggcacaaagacacataaaccaatggaacaggtagacaacccagtaataaacccaagtattcagtatttataattagttgatatttgacaaagatgccaaaaacacaaaagggaaagaacagactctttaataaatgatgttgggaaaaatagatatggcccagaagataaaattggacacttatctcacaccatacacaaaaatcatctcaaaatgtataaaagacttatatgtaagatgtggaaatgtggaattgtaaagttaatagaggaaaacataagggaaaatctccacaatactggtctatgcaatgatttcttggataggactccaaaaatgcaggcacsaaaagcaaaaataagacaaatggagttgcatcaaatcaaaagcttctgtacagaaaaggaaacaatgaacagagtgaagagacaaaacatgaactggaagaaaatatctgcaaaccatacagctgataaggggctaatattcaaaatatataaggtacacaaacaacccaaaagcaagaaa

SEQ ID NO: 775614 - DNA, 603 bp, Homo sapiens
gcaaagtttgggatccacagtctacaaaaccccacagctcctaagaattctctaacctgccttctactcttaggctccgctagattgcaaattacctgctttctttctgatcccgggctccgttccgacccctgtyggatagtaaatcgcaagtaacgtacctgctgtcggcagatctgagctttcttcttggacaccttctacccacagccctccaggtgccagtgtagggcatctgttcccttggcacacctgactgccgtggggtgtcccagcagaaggtcatcaacctactgaagcaacacgcagcctaggtctctggtgggaaacttctggaggtctcgagccaacgcctccccaaagatggtgggagagttcttgaacccttggggaagcccggtccaagtgtactgagtagtgacacctgactctggatcttcccactgaaaggcaaacagcttctgcctctcaggggctaatctgataggaaagaaagcgtctttcaggtccaagcaggtgaaccagctgtcctcagctggcagcaaccccaacaatgtggacgggttaggtactattggaagtaaagtcagtgtagcttgatta

SEQ ID NO: 775615 - DNA, 603 bp, Homo sapiens
gcaaagtttgggatccacagtctacaaaaccccacagctcctaagaattctctaacctgccttctactcttaggctccgctagattgcaaattacctgctttctttctgatcccgggctccgttccgacccctgttggatagtaaatcgcaagtaacgtacctgctgtcrgcagatctgagctttcttcttggacaccttctacccacagccctccaggtgccagtgtagggcatctgttcccttggcacacctgactgccgtggggtgtcccagcagaaggtcatcaacctactgaagcaacacgcagcctaggtctctggtgggaaacttctggaggtctcgagccaacgcctccccaaagatggtgggagagttcttgaacccttggggaagcccggtccaagtgtactgagtagtgacacctgactctggatcttcccactgaaaggcaaacagcttctgcctctcaggggctaatctgataggaaagaaagcgtctttcaggtccaagcaggtgaaccagctgtcctcagctggcagcaaccccaacaatgtggacgggttaggtactattggaagtaaagtcagtgtagcttgatta

SEQ ID NO: 775616 - DNA, 621 bp, Homo sapiens
ggacatatattctctctctaaagaatgcaggtgacttaacaacgtttcccccagaactttactgaaacagcgctggaacaagcagcgatagttaaccaggtagtctggaactgccatagtattcactgcaagtaaagggaaactgaaattaatgaagcagacaaacctctccccaggtcatggcaccagaaatgttgatggctgatgtaataccttggttcttatcttcttagtttaaaagaatttaaacaagagacacacagcaaaagaagtacagcataatttattgcaaaaaaaaaagagaatattttgaaaattaagtgcagaatagacggtacagtctgagaaagagattccagggcagcctgctcataaaagtgagacagcattaattattgctggagaaaccctctttatgggagttttgcatgattatttcataagaaggtggaaagaagtgttayagtaagcatgttctgactggtcttctgggtacacatgtgcagtagctgtacatatttgtgcatacattgcatgcctcactagcatcttaaatctccacccaggaatgtgttttttactattaaaatgaacaaaggtcagcttgaggacagataaaat

SEQ ID NO: 775617 - DNA, 621 bp, Homo sapiens
ggacatatattctctctctaaagaatgcaggtgacttaacaacgtttcccccagaactttactgaaacagcgctggaacaagcagcgatagttaaccaggtagtctggaactgccatagtattcactgcaagtaaagggaaactgaaattaatgaagcagacaaacctctccccaggtcatggcaccagaaatgttgatggctgatgtaataccttggttcttatcttcttagtttaaaagaatttaaacaagagacacacagcaaaagaagtacagcataatttattgcaaaaaaaaaagagaatattttgaaaattaagtgcagaatagacggtacagtctgagaaagagattccagggcagcctgctcataaaagtgagacagcattaattattgctggagaaaccctctttatgggagttttgcatgattatttcataagaaggtggaaagaagtgttatrgtaagcatgttctgactggtcttctgggtacacatgtgcagtagctgtacatatttgtgcatacattgcatgcctcactagcatcttaaatctccacccaggaatgtgttttttactattaaaatgaacaaaggtcagcttgaggacagataaaat

SEQ ID NO: 775618 - DNA, 568 bp, Homo sapiens
acgactgtcatcagacatccaaaaggtatcaaatgtctaacatgaaatataaaatttgtctatagccttagcggtctgcaaaattcagggctcaccattctgagtataccgctcaagtttctttcctatgacttcttcaggttctgtcatttattaacacagtgcatctaaaattgtcactgctggtcgtctggaagaatctgagaagaagcaggtccttgttctcattcccagagctgcatctctgctgaatagggtcagggtgctcccagcttagcctcatctgatccactgacaggctcagttatctcctgcccagggaagggatgggcttctctatccagggctgawtccccaggaccaggcagtgtggctgggacaagccagctctcagcagggaagacataagctgcctgagtggccatggaatacaaggtctgcacctgggcacacagaggcccccggagccgagtgagcagtgtcagctgctcacaggtcagtggagaatggatctgctgtgcccacacctgggctaggtcttgataaacagcctccgacatagctcgca

SEQ ID NO: 775619 - DNA, 576 bp, Homo sapiens
tgaagtttgagacaagttgagatttgtttactgccatattcctagctcatagcatactgtagtcacttaaaaaatgtttgttgaataagtgagtgaattgattcaattgtcatacttagctatatattttctgagtaaaactgataaatttaatagtttacttctagtataattttactttacttattcagtgaacctgacaattcaactaggtgccaggcacactgctgctgaagaaaaagaggtataagatacaacttctgtctatgagaaagccacagtctaaaaagtagaaacatatgaacaaattataacaataaataggctaaattcaaaatcagaggggtttgtttctattttaaacagctctagtcaggaagtgttagaaagttctaaacaggaaatgttccaacacaccatctaagyatgaagcagaagtcacccataattgagtttgctgccaccaaccccaatagcaagaattccagtcctgctgctgcaaagtaagtgtcactctgattttattactgctgtgtaacccagttttagacactctggttgtcacttaatgttcta

SEQ ID NO: 775620 - DNA, 615 bp, Homo sapiens
aatgatgatattgagatataacaggcaacttctcttgggaaccatttaatcagtgctcacttttacacccttttccgaaatgtcaatggctttaaaatatagaagtatattatacaactaaacttaacacttattcagtattgtgcaatatttagtacttgttctagctatctcttgctgaatagtaagccattccaaaacttaaggaattatttattgtttaatattgtttattgttattatttgtttagtaattttaaataacwttatttctcatggttttgtgggttgatgggcactacaaaagttctcttttggagtgtttcttgcagttgcggttggttggctgctgctgaagtcacctgaaagctcaactaggctaaagagcctagacaggtcactcacatggctggcagtgcatattggctgctgagtgtgatgcctatctgtcctctccatgttacctggagtcctcacaacgtggtagttggtcccaagacacacaggcaaataccacaaagcttcttatgacctggccttggaggtcctagaatatgacctctgctgcatcctattggtaaagcaagtcattgtgaccagcacagattcaagaaa

SEQ ID NO: 775621 - DNA, 615 bp, Homo sapiens
aatgatgatattgagatataacaggcaacttctcttgggaaccatttaatcagtgctcacttttacacccttttccgaaatgtcaatggctttaaaatatagaagtatattatacaactaaacttaacacttattcagtattgtgcaatatttagtacttgttctagctatctcttgctgaatagtaagccattccaaaacttaaggaattatttattgtttaatattgtttattgttattatttgtttagtaattttaaataactttatttctcatggttttgtgggttgatgggcactacaaaagttctcttttggagtgtttcttgcagttgyggttggttggctgctgctgaagtcacctgaaagctcaactaggctaaagagcctagacaggtcactcacatggctggcagtgcatattggctgctgagtgtgatgcctatctgtcctctccatgttacctggagtcctcacaacgtggtagttggtcccaagacacacaggcaaataccacaaagcttcttatgacctggccttggaggtcctagaatatgacctctgctgcatcctattggtaaagcaagtcattgtgaccagcacagattcaagaaa

SEQ ID NO: 775622 - DNA, 683 bp, Homo sapiens
tcaattacatcaatataattcccttcttgtaacactaaatatggtgaaacagaattgaattctacaaaagtctttcatctgttttcctatggaataattaacaaaccaaataaatgtataaatagtatgaagtccaatttatcttagatttttacctcttaatttcaaagctgatagaaatcagagaactaatcatcataatccataatgcctggaccagaagtccttattctaagactatyttgtggcatgctaaaaatgtattactaactaggaaatttaaaacttttttgttagcgattttaagagagctgactaactcatcagcacaattcacacagattaaaaatggaagttaatctgctgagtggattcatagtgatcagaaaaaaaatcacaaagaggaaaggagatagagaaggaggggaaacatactgtcaatccctacaattaaagtgatttttcaaatgatttgattttgtatttgcaaaggaaaggcagcttattgtgatagagtaaggatcccacttctatatctttttttttttttttttttttgggacggaatctcactctgtcgtccacgctggagtgcagtggtgcgatctcggctcactgcaagctctgcctccccgattcacgctattctcctgcctcagcctcctgagtagctgggactacag

SEQ ID NO: 775623 - DNA, 683 bp, Homo sapiens
tcaattacatcaatataattcccttcttgtaacactaaatatggtgaaacagaattgaattctacaaaagtctttcatctgttttcctatggaataattaacaaaccaaataaatgtataaatagtatgaagtccaatttatcttagatttttacctcttaatttcaaagctgatagaaatcagagaactaatcatcataatccataatgcctggaccagaagtccttattctaagactatcttgtggcatgctaaaaatgtattactaactaggaaatttaaaacttttttgttagcgattttaagagagctgactaactcatcagcacaattcacacagatkaaaaatggaagttaatctgctgagtggattcatagtgatcagaaaaaaaatcacaaagaggaaaggagatagagaaggaggggaaacatactgtcaatccctacaattaaagtgatttttcaaatgatttgattttgtatttgcaaaggaaaggcagcttattgtgatagagtaaggatcccacttctatatctttttttttttttttttttttgggacggaatctcactctgtcgtccacgctggagtgcagtggtgcgatctcggctcactgcaagctctgcctccccgattcacgctattctcctgcctcagcctcctgagtagctgggactacag

SEQ ID NO: 775624 - DNA, 450 bp, Homo sapiens
actttgattaatttctttttcttcttcttaaaccatgaccctgcgaggagattattggtatctgccagttctgagaaagaggtggatggttagagctggggatttatagattgagtgtaggaagcaggcttccttctcccacagtacatctccaggaagaaccaactgtgatggagctattgtgaagttggagagatgatgaagagtaagaaccaacttcaatccacatcttccacccctgacacmtagggtttgtgagcacctggaaacagaaaatttggctattctgtaagaatagcaaacaaactggctgggcatggtggctcacacctgtaatcccagcactttgggaggccaaggcgggcagatcacttgaggtcagaacttcgagaccagcctggccaacattgtgaaaccccgtctttatcaaaaatagaaaaatttgccagg

SEQ ID NO: 775625 - DNA, 555 bp, Homo sapiens
ctataaatgagcataatggatccaattcggggacaaaaatgttataaaactgatttatggtgatggtggtaccacttggtaaagttactaaaaatcattaaatggtatgtttggaataggtgaatatgtaaaatatacctcaataaagttgctaaaaaaaaaaccctaaattttaaaataaattattaaaagctaacttatctttgattttagatctaatgtacattatytgctcaagttcaaaccttacttatttttatattttatttttagagacaggattgccctctgtcatcaaggctggaatgcagtgggtgatcatggttcacggtagccttgacctcctgggctcaaggggtcctcccacctcagcttcccaagtagctggactacaggcacatatcacactcgactaatttcttttttatttttttgcagtaacaggggtcctgatatgttgcccagaatggtctcaaactcttggactcaagcaatcctaccaccacggcctcccaaagtgctgggattacaggcatgagccactgtgcctggcca

SEQ ID NO: 775626 - DNA, 647 bp, Homo sapiens
aagtacataagaaaatctgtccccaaagagaagcatcattgaagaaaggagtgttttcagataattgtggatagtctttaatactactacaaaatccttcaaatgataatttcaaaaaagttaattgcaatggggaatttaagtgcatatcaataaacttttcatattctgttacattaaaacccactggtctattgcttggatgttttacgcaaatcataatacagtgagtgatttgtaacagcatgtaatggtcactgggaamttattccttcactgaattatgcagctcttccaaatgtctatttcattgtacaatatcaaaaatatcatattcattagttgtatttcatcaggaaatattttacatattaggatatgaattttccaatattttaatttttacttgtaagttcaaataattttatcattggttaaaaaaaatcttgtcaattgttttcctagaagtgacaggctcactttgtttatttctgagaaaaaaaatctgccaaatattcgagtctgaataaccacaatttgtcttgtcagtcagttgttctttcaaataaaaatgctattctataaaaaaagtgactagttcaacttgaaactcaattgcactagtgcttctcctagacagccctcgt

SEQ ID NO: 775627 - DNA, 593 bp, Homo sapiens
cctaggaaatcccggccaggctggctgcctcacttgcctcttctttcatgcctcaggtgttccctgtcatatctctgctgaattccagggttcttagattctctattcaaattatgattatccacttgctgttttggtccttctgggtggagaaggggagtcctggatgtggctagtcagctctctcgaacactccctcaaccataactttttatttaaaatccatagtgatttgaattgttattgccttaggagtagtgtttcagtttctgtcttggtctatgttgtgttgctataaaggaatacctgaggctggttaatttaaaaagaaaaggtttatttggctcatggttctgtaggctctatgggaagcatggcgccagcatctgtttctggtaaagacctcagaagatttcattagtggtggaagaagaaggaagaaygggcatgtcacatggcgagagagaaagaacaagagggaaggaggtgcttggctctttgtaacaatcagatgtcatgggaactaagagagcaggaagtcctcattaccagggaaatagcaccaagccattcatgagggatctgcccccatg

SEQ ID NO: 775628 - DNA, 629 bp, Homo sapiens
aactaaataaataaggtaccagggaccagtcctggagaaatagagatatcaaacctttcagatagagaattcaaaatagctgttttgaggaaactcaaagaaattcaagataacacaaaggaattcagaattttatcagataaatttaacaaagaaattgaaataataaaaaagaagcagaaattctgcagctgaaaaaatgcacttgcattactgaagaatgcatcagagtcttttaatagcagaagtgatcaagcagaagagaattagcaaactttaaggcaggctatttgaaaatacattgcragaagagacaaaagaaaaaaatttaaaaaatgaagcacacctacaggatctaaaataaaaaaaaaaaaaagcctcaaaagggcaaatctaagcattattggccctaaagaggaggtagtgaaagagatagggataaaaaggttattcaaagcaataataatagagaacttctcaaacctacagaaagatatcactatccaaacacatgaaggttatagaataccaagcagatttaacccaaagaagactacctccaggcatttaataatcaaatccccaaacatcaaggatcaagaaaggatcctaaaagcagcaaaagaaaa

SEQ ID NO: 775629 - DNA, 629 bp, Homo sapiens
aactaaataaataaggtaccagggaccagtcctggagaaatagagatatcaaacctttcagatagagaattcaaaatagctgttttgaggaaactcaaagaaattcaagataacacaaaggaattcagaattttatcagataaatttaacaaagaaattgaaataataaaaaagaagcagaaattctgcagctgaaaaaatgcacttgcattactgaagaatgcatcagagtcttttaatagcagaagtgatcaagcagaagagaattagcaaactttaaggcaggctatttgaaaatacattgcaagaagagacaaaagaaaaaaatttaaaaaatgaagcacacctacaggatctaaaataaaaaaaaaaaaaagcctcaaaaggrcaaatctaagcattattggccctaaagaggaggtagtgaaagagatagggataaaaaggttattcaaagcaataataatagagaacttctcaaacctacagaaagatatcactatccaaacacatgaaggttatagaataccaagcagatttaacccaaagaagactacctccaggcatttaataatcaaatccccaaacatcaaggatcaagaaaggatcctaaaagcagcaaaagaaaa

SEQ ID NO: 775630 - DNA, 496 bp, Homo sapiens
atagtatatccagtgaaaatatctttcaaacaaggagaaataaagactttcctagacaatcaaaagctgagggatttcatcaacaccagacctctcctgcaaaaaatgctgaagggagtacttcagtcataaagaaagggatatcagtgagcaataggtaatcacctaaaagtataaaagtcattggtaatagtaagtacacagaaaaaaacacaggatattacaacactgtgagtgtagtatgtawattactcttatccctagcagaatgactaaaggatgaacgagtaacaacaaaacaacaaaaagaactacaacaacttttcgagacatagacagtacaataacgtataaatagaaacaaaaaagttaaagagcagggggacaaagttaagatgtagagtatttgtcagttttctttttgcttatttgcttgtttatttgtttaagcaaacagttttaagttgttattagcttaaaataatgggttataaga

SEQ ID NO: 775631 - DNA, 496 bp, Homo sapiens
atagtatatccagtgaaaatatctttcaaacaaggagaaataaagactttcctagacaatcaaaagctgagggatttcatcaacaccagacctctcctgcaaaaaatgctgaagggagtacttcagtcataaagaaagggatatcagtgagcaataggtaatcacctaaaagtataaaagtcattggtaatagtaagtacacagaaaaaaacacaggatattacaacactgtgagtgtagtatgtatattactcttatccctagcagaatgactaaaggatgaacsagtaacaacaaaacaacaaaaagaactacaacaacttttcgagacatagacagtacaataacgtataaatagaaacaaaaaagttaaagagcagggggacaaagttaagatgtagagtatttgtcagttttctttttgcttatttgcttgtttatttgtttaagcaaacagttttaagttgttattagcttaaaataatgggttataaga

SEQ ID NO: 775632 - DNA, 643 bp, Homo sapiens
agcccatttctgctggcaccacagggatccattgggagggtggccagaggagcagggggtaaaactccacagagagaaggaattttctagctgaactttgtgacaaattgaacagggtgagaaggaaagtacatgcatwtgaaagtattttgaagccgtaattcgtgcctcgggggaggacacgaatcaggtgtgcagactacaaaggcgggggaagaactaaagcccttttctctcgcagctgagaggaggatagcctcgggcaagttttcaagcctgtctcgccctctgcctggaaatactctgggctgttgagaagagggcacggtggaagtaaggcccttcggtgtgtgtgggagcagggtgaggcctgtgactgccagcttaaccccacttccctgacaacctgcatgactcagcagagacagccgtaatcctcctaggtacacacctccagtgacctgggaatcttacccccatcccccacagcagccacagcaagacccacccaaggagagtctgagctcagacatgcctagccccgcccccacctgatggtccttacctatccacctggtagcagaatacaagaggcatttaatcttgggagttctagggccccacccactgctggtccctctcc

SEQ ID NO: 775633 - DNA, 643 bp, Homo sapiens
agcccatttctgctggcaccacagggatccattgggagggtggccagaggagcagggggtaaaactccacagagagaaggaattttctagctgaactttgtgacaaattgaacagggtgagaaggaaagtacatgcatatgaaagtattttgaagccgtaattcgtgcctcgggggaggacacgaatcaggtgtgcagactacaaaggcrggggaagaactaaagcccttttctctcgcagctgagaggaggatagcctcgggcaagttttcaagcctgtctcgccctctgcctggaaatactctgggctgttgagaagagggcacggtggaagtaaggcccttcggtgtgtgtgggagcagggtgaggcctgtgactgccagcttaaccccacttccctgacaacctgcatgactcagcagagacagccgtaatcctcctaggtacacacctccagtgacctgggaatcttacccccatcccccacagcagccacagcaagacccacccaaggagagtctgagctcagacatgcctagccccgcccccacctgatggtccttacctatccacctggtagcagaatacaagaggcatttaatcttgggagttctagggccccacccactgctggtccctctcc

SEQ ID NO: 775634 - DNA, 511 bp, Homo sapiens
tctatcatgtgacatgggcatggtcctgaaagagtcttttcctaaagtccttagatagttaaatataatggataccattatcccccatgatgctcatatattttttaattacattattttgctttatcaaaataaatctctctcaaagttggcaggaaattgtttcatccatgacctggagaccaagagtctctctgtgattcacaggagaatacattaatgcttatgcaatgcagaacatttgggaggaaagggcctttggatagctatccattctggtgacctaraaaaatgctggtgttaaagtttgtgtgatctgcgtgaggactgatgttccacttctacactgtccatagaaaccactttctccatgccacttagcctcgtccttaaaactcccaaggcataaaatttttaactcttcagtttccaggaatcattgtatcacttgatccaagttaatgtctcctgtgtagtcacatgtctttggggatgtgctgctcctaccgcc

SEQ ID NO: 775635 - DNA, 574 bp, Homo sapiens
aactaccggagcatgccacaacagtggctaattttttaatttttttttttttgtagagataggggtctcgctatgttgcccaggctggtcttgaactcctagcctcaagtgatcctcccaccctgcctcccaaagtgctaggattacaggtatgagccattgtgcctggcctccattcagttttttttttttttttttttttttttgaaacggagtctcgctttgtcgcccaggccggattgcggactgcagkggcgcaatctcggttcactgcaagctccgcttcccgggttcacgccattttcctgcctcagcctcccgagtagctgggactacaggcgcccgccaccgggcccgggtaattttttgtatttttagtagagacggggtttcaccttgttagccaggatggtctcgatctcctgacctcatgatccacccgcctcggcctcccaaagtgctgggattacaggcgtgagccaccgcgcccggccgcctccattcagttttaatgtcaacaaattgttaagctctaaaatttctatttgcttatttttcagatatgtctgatcaa

SEQ ID NO: 775636 - DNA, 430 bp, Homo sapiens
aggcagtggctctgcctttgcgccactaagtctccaaaacagacttggattattttgcacacaccattccgtctcttacacgcaccccctgctcggtacagagagggagtttccttaggctgtgactcccggaggtagtgtcccagcttccgtgggaccagaaaagcgtctttccgtgtctcagcatcaagcccctacccccaccaagagaccacagaggccagatgtgatgcggcgctcgcactcacctcgcgcggagcagggttcgtcccgcagaaygcagcgcagcttcctttctccctatgagcccaagcctgggcgccgggaagacccgaagagccgatcaggagcggaagaggcggccgcgcgggcgagctcggggcgcgttccggcggagccagcctggatccgggttttcactcgtgccctg

SEQ ID NO: 775637 - DNA, 568 bp, Homo sapiens
aacctataactagtagggatagtgaatcggaaatcagaaacctcccaacaaccttctagatgacatcactggtgaattctacccaatttttttttttaattaacaccaacacttctcaaactcttctaaaatgtaaaagagggagaagcacttccaaactcattctatgaggccagacttaccctaatcstaaagccagacaaagacattatagataagaaaacttgccacttgccattggctagtaacaagatcccccctcctacagtgtcaatggagaccacatgaaaagtgtggacttccacttctataggcaaaaatgaaacaccctttctcctggctggagaggttttagaagaggtctaatgaagagtcatgatgttcaccattgcccagcagcaatgaaatcacccccattgcagtatcagtagagaccatatgggaagctgaacttccacagacactgcccatcagtagtgaagagttccctcctcgggtgtcatcaaaagccaagtgaggtgtcagtatttcacctccaattggcagaaatgatgcagtacacacttcc

SEQ ID NO: 775638 - DNA, 584 bp, Homo sapiens
aagacagaaaagtggtgaactatatcagaaaagtgcagcaggtttctgaaggcgcaccctacaatggaacttaagacttgtattactttcccaagaggaaaggattttcttcccatcccaatttgtatgaatggagttatttaagaaaaaaagatatttttacacgaaactttgtaagtgaaagctgctttttccttccttcctttccttttacctccataagaatagggaaagtagaacaagaaaaaattgaactccttccatttctaaataaagtttgggagaaaaaaggacaccaagtaatgtagcatttaaaatttagaaatatttacatccgtcatttcatcccagattcaagaactcatctgttaagtttytcgggcacaagctgttacttcaacacatatgctataaaaacacttttgttcacaacttagcttttttcactcactccagatttcttgccccactgacgtggcataaataataaaaacacaaatattgtgttcagttcaacacaaaagagcaaaaactggaggtgtgtatgtgtttaagataaaaaaaaaaaaaaaacagttctgcat

SEQ ID NO: 775639 - DNA, 660 bp, Homo sapiens
cttcctcttcacttcatatttatcttgctttcaaaatccattatgcaattgtcatttcattgaaatcaaaaactgtctcttaattacataagaatggattataaatcagttattcatctctctatatgttccttttataatgattatagctaaatacctatttttatacacaaaaaaacaaagtggattttaccaggttaaaattaggacttgcaaaattctgcagcctagaagacaaaacaaagccatatacaatgcatcyagtttgtgataataatgcgatcttgcactgatgaaatactgcaaagcttgttaagtcaatggctttggagaagacaatggaatctgcatttcctccctcgactgagttaaatttagaagggaaaggtaagccatacttccaacaggaattagaaaacactgcagttggtgatgttacagggacgatcctcttgcagcctaacttgcaataaatggaccttcataagactcgagtctgctgcatatcctggtaattaatcatacggaggcaccaagccttaagtattaaacactctctaaatgggaaaaaaattgctgtattgctaagcactaggacttgattcatttagtattaactttcagtctttattaaagtggctttaattttatttgtgtgat

SEQ ID NO: 775640 - DNA, 660 bp, Homo sapiens
cttcctcttcacttcatatttatcttgctttcaaaatccattatgcaattgtcatttcattgaaatcaaaaactgtctcttaattacataagaatggattataaatcagttattcatctctctatatgttccttttataatgattatagctaaatacctatttttatacacaaaaaaacaaagtggattttaccaggttaaaattaggacttgcaaaattctgcagcctagaagacaaaacaaagccatatacaatgcatctagtttgtgataataatgcgatcttgcactgatgaaatactgcaaagcttgttaagtcaatggctttggagaagacaatggaatctgcatttcctccctcgactgagttaaatttagaagggaaaggtaagccatacttccaacaggaattagaaaacactgcagttggtgatgttacagggacgatyctcttgcagcctaacttgcaataaatggaccttcataagactcgagtctgctgcatatcctggtaattaatcatacggaggcaccaagccttaagtattaaacactctctaaatgggaaaaaaattgctgtattgctaagcactaggacttgattcatttagtattaactttcagtctttattaaagtggctttaattttatttgtgtgat

SEQ ID NO: 775641 - DNA, 660 bp, Homo sapiens
cttcctcttcacttcatatttatcttgctttcaaaatccattatgcaattgtcatttcattgaaatcaaaaactgtctcttaattacataagaatggattataaatcagttattcatctctctatatgttccttttataatgattatagctaaatacctatttttatacacaaaaaaacaaagtggattttaccaggttaaaattaggacttgcaaaattctgcagcctagaagacaaaacaaagccatatacaatgcatctagtttgtgataataatgcgatcttgcactgatgaaatactgcaaagcttgttaagtcaatggctttggagaagacaatggaatctgcatttcctccctcgactgagttaaatttagaagggaaaggtaagccatacttccaacaggaattagaaaacactgcagttggtgatgttacagggacgatcctcttgcagcctaacttgcaataaatggaccttcataagactygagtctgctgcatatcctggtaattaatcatacggaggcaccaagccttaagtattaaacactctctaaatgggaaaaaaattgctgtattgctaagcactaggacttgattcatttagtattaactttcagtctttattaaagtggctttaattttatttgtgtgat

SEQ ID NO: 775642 - DNA, 607 bp, Homo sapiens
tgttttcaaagaataattccatctattttaacattttcgagtgtaattccgtgggtaaccgctcttcctttgattgtgagcgatggtaattgaaaggtgtggcttggcgtctgttttggcagttagttagactcagatcttttgttgaagagctcaaagtgctggctttcctggccagcctccctccgtgtttctgttttggtgatgtgatgacagacttacagtgtgtttccttgtgtgtatggtaacagatgtttatgtgaataacagacttttttatgaagscatacactttatagccaaatactaattaaaaataattgcatgtaagcatttttgtttattccccgttgtgcatctttaatcatttggaatcacctgcagttgaaaattgaggcaaagatttgatactgcaattataagaggccatctgactatatattaggtagaaatagcaacatatttgagaaaaaaatattaaacaagctgagtgccaggtcattctgaagtctcttgtatatcgggtcaaaatactaatacattactttgttaaactaataggattttaaggcatcattcagccaccaaaacaactgcttcatgaata

SEQ ID NO: 775643 - DNA, 567 bp, Homo sapiens
taatattttaatattcgaggctgcctagtgattccataatggctaaacccagttaaactcccattgatgatgctgattactctaggatctaattttctcctctggcttcatctaaaatcatgtttctcaacagctatcctttattgttttttaatcttactgcctggatattagtgaatctctagagttccaaaaactacatttgagtgttttaacaagtcagcccaacaatatatgtggtgagctcattaaacttaggttakagttcagactattcacctggaatattaatattcatcaatactcttaaaatcataggccaacttgacagcatatatgccagcatcagggttaccaacacctctgcccttcatgcaacagtagcacccgggatgagaccagtgtgtgcagagccagctcctggccccgggctctgtaattagcacccttagctgataccctccaagcagaaggaaaacgacacacacgaagtacgtcagtgaattgtcttaagtttttcccttatgaagtttttaaaaagcaataaacatctaactctaaattgtc

SEQ ID NO: 775644 - DNA, 544 bp, Homo sapiens
gcagactcaggtagggtggggtttgttttttcttaatctttagtaaaggaccaggcagaaagatcaacagttcatcctatgcttatatttgggagggaatcaaaggaggaaagaagcttagtctcctactgaggaaaatatctgaacttaattacttggagcccaattaatattggagaagatgctctggttctcagaggacggttacgtcatccctcacgcagatgcactgtgtcctcccgcggggatttctaagatcagaagaacatttaacttacatgttayaggaattttgcagtttgggacagcttataaatgaaaatataacagcttaaacaggtcactcactcttttactcatcaggaaagtttcaggcagtggcctggactgaaggacgctatcccctctccccgggagaaacagcctagagtggtcaacaaggtaccaactgcaggccagatccagcccactgccttctttatgtgacctgtgagctaagaatggtgtttaccattttaaatagttgaaaaaaaaaatccaaaga

SEQ ID NO: 775645 - DNA, 611 bp, Homo sapiens
tgaatcatctggtgaccatagcttaggtccatgcagggactacttccatccatgtattattacaatgatactctggcttctggatttcaaagaccagtaacagttcagaaacaatttgcagaaataacattgaattgccaaatgtttattttgccacctgaggaaaataacaaaatagagaaaacccaaaacaatagccatttactaaaatcatacagaaagagatggactttcgccagctctttaataacatagaatcttaacacaagaaaagttggaaagactttaacactcaaataargggttagtctcttattggatgaatagctttattaagaatctgcaagtctttattctcctattttgcttcagactataaaatatgtgttgcagtctggcattttagaaatggtatattgcttcatttgctattcacaacagtgaagtaagttttatgattgttcccgttttacaagtgtagaagctcgggatcagaggagttgggcatcttacctaaagtcacagacataataaggagagcagctaggacttaaatacaagtcctgcattgccaaacatatccttgctaggttgataaagctgctaaacat

SEQ ID NO: 775646 - DNA, 611 bp, Homo sapiens
tgaatcatctggtgaccatagcttaggtccatgcagggactacttccatccatgtattattacaatgatactctggcttctggatttcaaagaccagtaacagttcagaaacaatttgcagaaataacattgaattgccaaatgtttattttgccacctgaggaaaataacaaaatagagaaaacccaaaacaatagccatttactaaaatcatacagaaagagatggactttcgccagctctttaataacatagaatcttaacacaagaaaagttggaaagactttaacactcaaataaagggttagtctcttattggatgaatagctttattaagaatctgcaagtctttattctcctattttgcttcagactataaaatatgtgttgcagtctggcattttagaaatggtatattgcttcatttgctattcacaacagtgaagtaagttttatgrttgttcccgttttacaagtgtagaagctcgggatcagaggagttgggcatcttacctaaagtcacagacataataaggagagcagctaggacttaaatacaagtcctgcattgccaaacatatccttgctaggttgataaagctgctaaacat

SEQ ID NO: 775647 - DNA, 484 bp, Homo sapiens
tttggaacatggtatgtagtaggcacccaataagtggtttctattaaaacaaacaaaaatgattctattttaggagggattatattgttgaagcacagtgatacaacaagctattgcctgttactagaaatagactctcagttcatacagtaatgtaattaaactccttttcaataagagtccatatgaacttttcttccaaaaaaaaataagaaatggaaaagagagggtggcattattttctttttccttgttcaaattctgacttaatcacttactagtagtatgaccttggacaagtttctgyagctaatattaactaccatgtaaagttttaagtagtggagctgtgaattcttgggaaagctacatactatctctgagcatcaatttcttcatctgacttgttcaaggtcacacagttattaagtgatggagccagcagttgaacccaggcagtctgaagctaaagcctactacacat

SEQ ID NO: 775648 - DNA, 651 bp, Homo sapiens
actcataaatggacaattgatttccacaaagatgctaaagcaattaaatgagaaaagaaaggattttctgcaattgttgctggaacaactttaaaaaaaaatggggataaaaagaacttcaaaatttacttcacaccatacacaaaattaatttragatggattataaactcaaatataaagccaaagtgttacacagctagaagaaaacacaaaataatatggttaccaacttggagtataaaaatatttcttagagaacaaagtaaccccaaagttagcagaagaaaataactaaaatcagagcagaactaaatgaaattaagactcagaaatctatacgaaggatcaacaaaacaaaaaggtagttttttctttgaaaagataaaaaaaatcaatacactgctagctaaattgacaaagaaaaaagagagaagatccaaataagcacaatcagaaatgacaaaggtgacatgacaaccaaatccacagaaatacaaaagatccttagtgactactatgaatacctctatgcatacaaactagaaaatctagaggaaatggacaaattcctggaaagatacaagctcccaaatctgaattaggaccaataatgaatctgaaacagaccaataatgagttttgaaattca

SEQ ID NO: 775649 - DNA, 651 bp, Homo sapiens
actcataaatggacaattgatttccacaaagatgctaaagcaattaaatgagaaaagaaaggattttctgcaattgttgctggaacaactttaaaaaaaaatggggataaaaagaacttcaaaatttacttcacaccatacacaaaattaatttaagatggatyataaactcaaatataaagccaaagtgttacacagctagaagaaaacacaaaataatatggttaccaacttggagtataaaaatatttcttagagaacaaagtaaccccaaagttagcagaagaaaataactaaaatcagagcagaactaaatgaaattaagactcagaaatctatacgaaggatcaacaaaacaaaaaggtagttttttctttgaaaagataaaaaaaatcaatacactgctagctaaattgacaaagaaaaaagagagaagatccaaataagcacaatcagaaatgacaaaggtgacatgacaaccaaatccacagaaatacaaaagatccttagtgactactatgaatacctctatgcatacaaactagaaaatctagaggaaatggacaaattcctggaaagatacaagctcccaaatctgaattaggaccaataatgaatctgaaacagaccaataatgagttttgaaattca

SEQ ID NO: 775650 - DNA, 651 bp, Homo sapiens
actcataaatggacaattgatttccacaaagatgctaaagcaattaaatgagaaaagaaaggattttctgcaattgttgctggaacaactttaaaaaaaaatggggataaaaagaacttcaaaatttacttcacaccatacacaaaattaatttaagatggattataaactcaaatataaagccaaagtgttacayagctagaagaaaacacaaaataatatggttaccaacttggagtataaaaatatttcttagagaacaaagtaaccccaaagttagcagaagaaaataactaaaatcagagcagaactaaatgaaattaagactcagaaatctatacgaaggatcaacaaaacaaaaaggtagttttttctttgaaaagataaaaaaaatcaatacactgctagctaaattgacaaagaaaaaagagagaagatccaaataagcacaatcagaaatgacaaaggtgacatgacaaccaaatccacagaaatacaaaagatccttagtgactactatgaatacctctatgcatacaaactagaaaatctagaggaaatggacaaattcctggaaagatacaagctcccaaatctgaattaggaccaataatgaatctgaaacagaccaataatgagttttgaaattca

SEQ ID NO: 775651 - DNA, 651 bp, Homo sapiens
actcataaatggacaattgatttccacaaagatgctaaagcaattaaatgagaaaagaaaggattttctgcaattgttgctggaacaactttaaaaaaaaatggggataaaaagaacttcaaaatttacttcacaccatacacaaaattaatttaagatggattataaactcaaatataaagccaaagtgttacacagctagaagaaaacacaaaataatatggttaccaacttggagtataaaaatatttcttagagaacaaagtaaccccaaagttagcagaagaaaataactaaaatcagagcagaactaaatgaaattaagactcagaaatctatacgaaggatcaacaaaacaaaaaggtagttttttctttgaaaagataaaaaaaatcaatacactgctagctaaattracaaagaaaaaagagagaagatccaaataagcacaatcagaaatgacaaaggtgacatgacaaccaaatccacagaaatacaaaagatccttagtgactactatgaatacctctatgcatacaaactagaaaatctagaggaaatggacaaattcctggaaagatacaagctcccaaatctgaattaggaccaataatgaatctgaaacagaccaataatgagttttgaaattca

SEQ ID NO: 775652 - DNA, 597 bp, Homo sapiens
tgtgagtgttccagtttcttcacatgcttgccaatagttattactgtctttgtgtcttattatagccaccttagtggtgtgaagtgatacctcattgtggtttgatttgcatttccctttgatagctaatgatgttaaacagctttacttgtcatttgcatatctctttggaaaaatgtctgttcaaatcctttgcccgttttttatttggatgatttgtctcttgaaagtgtatacatatattctaraaacaatttctttatcagacttattatttgcaaatattttcttatattctatgggttgattttcattttctttatggtgtcctttgaagcccaaaagttttcaatgttgaagaagtctaatttaccattttttggagggtagaggatcatctgtgcttttggtgttaaatttaagaaggctttgcctaacccaaggtcacaaaaatttactcaacactttctgctaagagttttataactttgactcatatttaggtctatgatgcattttgagttaatttttgtgtatagtgtaatgaggaggtccaacttcattcagttgatatagttgtattagtttatttgtgaa

SEQ ID NO: 775653 - DNA, 525 bp, Homo sapiens
caaggagggactagaagagaaagaggatcttaaaaagggggtaacttggctgggaagttttcagcacatacacaagggaggagaaaacattctaatcacagatggcatcatgagcagagatacagaggtaggagacagctttgcataataccagaatcagaagtcatccagtggcggaacagaaattgtgagatgtagaaagggaacagtatgagatgagacccaagagttggtcacatggcaragtagaggggcctgggaacatggtgccagaacagaatccatgggctttttcctaatgaaaagagggagctagtgagggtttttagtggggaagagacatcatcagatccatgtcactaaaatattctttctatggcagcgtgggggataggttgtagaatggaaggagcagatagggagatataagagagtgtctatggaaaacgtgatgaccctgaatttcagtgttgttagtggagatagataaaagggttgagtttaaggaatagatagttgatgact

SEQ ID NO: 775654 - DNA, 590 bp, Homo sapiens
caataaaaaatgataaaggggatatcaccaccgatcccacagaaatacaaactaccatcagagaatactataaacacctctacgcaaataaactagaaaatctagaagaaatggataaatttctcgacacatacactctcccaagactaaaccaggaagaagttgactctctgaatagaccaataacaggctctgaaattgtggcaatagtcaatagtttaccaaccaaaaagagtccaggaccagatggattcacagccgaattctaccagaggcagwtacctgtttaaagcagcacaatttgcaactgcaaaaatatggaaccagtccaaatgtccatcaatcaatgagtggataaagaaaatgtggtacatatatactgtgaaatgctattcagccataaaaaggaatagaataatggcatttgcggcaacctggatggaattggagaccattattgttagtgaaataactcaggaatggaaaaccaaacatcgtatgttctaactcataagtgggagctaagctatgaggacaaaaaggcataataacaatacaatggactttggggactcagggaaaaggatcca

SEQ ID NO: 775655 - DNA, 590 bp, Homo sapiens
caataaaaaatgataaaggggatatcaccaccgatcccacagaaatacaaactaccatcagagaatactataaacacctctacgcaaataaactagaaaatctagaagaaatggataaatttctcgacacatacactctcccaagactaaaccaggaagaagttgactctctgaatagaccaataacaggctctgaaattgtggcaatagtcaatagtttaccaaccaaaaagagtccaggaccagatggattcacagccgaattctaccagaggcagttacctgtttaaagcagcacaatttgcaactgcaaaaatatggaaccagtccaaatgtccatcaatcaatgagtggataaagaaaatgtggtacatatatactgtgaaatgctattcagccataaaaaggaatagaataatggcatttgcrgcaacctggatggaattggagaccattattgttagtgaaataactcaggaatggaaaaccaaacatcgtatgttctaactcataagtgggagctaagctatgaggacaaaaaggcataataacaatacaatggactttggggactcagggaaaaggatcca

SEQ ID NO: 775656 - DNA, 565 bp, Homo sapiens
atttgatataaggctaagtcaaacaaagcatgattctgaatttaatatatggaaatctcaaatattcaaaatgtagttggctctaggtcctgaaaaaactgagaagtaactagtgcaactggctctttcccagctcccaagatcaaccccagagaaactattaaataagagaggaactaataaataagaaaggaaatcaagcctctgaggcactgcctaaatactgtcagaaccctgtggggagcctggaaaatgaagtaatcttgggaaggagaaggctggaggatgatgccatgttkggctagatagcccaggtatggcagagagtaagatagaagacagcttttacattctgctccagcctttcctcagaattgtcttgacagaatcatggctgccctgagagataaaaatcacagtgtctgtaggactatatcaggggagccccaaagccctgctgggataaagaaccaaggaaacaaggtagagatggatcatcagccttccctgccccaacccaaagattggtagattaaatctaacgcaatagctttcaaaatgtttg

SEQ ID NO: 775657 - DNA, 608 bp, Homo sapiens
aactcagcccaagtgccaatgacagagaaccaggagctccgttatcttgcacagacacacccagaaaaagtgtgttaccaactattagacatcccttaatccagtcaaattgatacatacaattaactagcacaaaaggtgaccctgtccctgcttgatacatcagtaagtccattacaccttaatgcagacgaacatgtcagagactttccaggaagctggtttgcaggacattgcagcaggagggccccagaagaaagagagattgaagcactcaggaagaagaaagagagaaggtggagaatctaggtaattcttttaaggaggtattcaggatgtcttcgtactgaaatgtctatatagggaaatcrtcagtcaacaaaaggtgctgcctctgaaaccttttggtaaacacttgtgagtggataatatagtttggatatttgtcccttccaaatctcatgttaaaatgtgatcctcaacgttggaggcagggcctagtgggaggtgtttgggtcatgggggtggatcagccatgaatggctcagtgccatctccttggtgatgaggttgctctctccggttgtttaaaagaggctggcacctcc

SEQ ID NO: 775658 - DNA, 672 bp, Homo sapiens
aaatttttcagcaagtgaaaactatatacactcaggccatctcagtcaccaaaagaagccccaattcaccactcatcgttgtaaaccacattcttgtatagctctgttcatttctttatatgacccaatctcacaccctttcccacaatacactcttccaccctgttccttggagttcactgtgggtcattagcaaaatttcctatatccttgaagtagtctctacatcaccttcgtctctttattmtaaatgaaacctgatctttctgcagctatgaatagtcactgccaatttcagcttatcctcctttccttctccctaaacacatccttgcttcctctgaagttcagccatgggtcacctcactgctccatatgtccaatcatctacagacttcatagtcacttcgcattattccttgaagattctcatgccttacccactgtcatctccccaacagcagttttctcctaattcttggtgatttcaatatcattgaaaagatccttacaataatctagcccctcaggctcttggtgctctctcctgccatcatcttgtcctccacatcactccagctacctgttcttatggttgcactctaaaccttacgagtatcaataactgcaccccctttcatgtcaatttcagatgtcatatactcccaccac

SEQ ID NO: 775659 - DNA, 616 bp, Homo sapiens
aatttgagtctcattttgcattgaaactcattcctgagtgtattaaatctgaagcaaattctcactctgatttagaataaataatttggagaggggagttggtgaggagtgggattagatactgatcttgcagctattacagtcaattcatagcattgaagcttcttgtggatcagcaaaatgaactatttgtgtttttaatagacatatgagaaagtaattaggacgtgaactactgataatgaatttaataaacattacctaatgtatgctatatgaaaagctttaaactagatattttggtatgtgacaacaattttaaagcattgaacttctttcacagtaaaatatattatgcattccattttgaaacacctattaaggaaagaaagacaaaaaagctttaccacaaagatcaggaactaagcaagaatgttccctctcactactcattttcaacattataytggaagtcttgactaatgcaataagtcaagaaaaataaattaaaaaatgtatagagaaggaagaaataaaactttctttgttgacagatgacataattgtctacatagaaaattcaggctgggcgcggtggctcacatctgtaatccca

SEQ ID NO: 775660 - DNA, 575 bp, Homo sapiens
tcttctctccacaacattccttttcctgctccatgtgtgcaaacacactacaaaatgaatatccttcttttaaacgggaaagataaaaccatcctatgacacagaacatgtcatagtctaggttgggggttagtgaacatttcatataaagggccagacttagcttgaaggatatagaaacataggggtagttggatttgtcatgcaggccattctttgacaacacctaacctgggtagtaataaattaaataacgatagtggcaatatgaaagtataggcttttgattasgatgtaaaaaggagtaagaatctgtcaatctcactagaagcagaataaactgcaaaattatagctgttaagatcaaagaacccattagaaatctgaggatgagaatgtctaaatgaactaaattccagagaataacaagcccttctaaataagaagagcgcctctgttgcttttatctgtattgtctggcaaaaggcagaattcaccatagatggagaaggagaaatcatctcaaggtttaatgaagttttaatggcagagtgagctgatgtggagatttgcaa

SEQ ID NO: 775661 - DNA, 620 bp, Homo sapiens
tattgtatacatattatctcagttcaatctcaaaataactccataatgtaggtattatttttactattttaccaataaggaagcagaagttctgagagagtactttatgtcagttaatatgacttgtaagtggtataggcagggagctggtgcacctgcctccaaatcccaacagtaagcacggctactgtgaagcctcttccttcttccctgttccctgggttttggattcttggtcctgtacccctttctcaatctgttttttatacctgtttggggatgcctcattgggcttcttggtcttcagcttctaatatggctgcattttacttcctcctctagttttgccatacatgygcatgcacagacatgcacaccacacatgcatgcacacacacacacacacacaatctcagatgacaaaactttgttccagaatgcttcctacgggagaggagacacagccttaagcagtaagctctttctatgtagaacttcttcagtagaagaactcaagcattaaaatattgaaaattatcttcttctagataatttacataaataagatgggtccagatttaaacattaacagggtgagatcagattatgtgattttcata

SEQ ID NO: 775662 - DNA, 614 bp, Homo sapiens
tagattacttaatagtttaggtattttgtgcgggtaactattttcccaatgctacaaataaggaaaatgagaataactgaagacactggctcaaaagcacacattcagcaagtgttaaaattagatgtcaagttcagacatgtgcactgtcaatagcaagctctttcccctaaaccaragtcctcaactgtggctatacattgcaatcacctgaggaacactaaatacatattgagagagtctgatttaattctttcagggcacagcttgggcattgggattttagaaaccacccaggcaattctaatatataaccaatttaagaagcactaggtacatctctgagcctcccaaattttgttcatgtccaatggtacttaattacactctgtgtttgtcacctgattcttgaatttgaaaccaagccacttgaattctttctgaaaagaacagactttcaccaggacagaagaatctgttgagtacacattgtggggagaagcatttttaggtgaggaagaaacagaaggggaggaatcaactctgaccttgagttagttacacagtcattgaatgaggaagattttattacagaccaggacactggtcagcag

SEQ ID NO: 775663 - DNA, 614 bp, Homo sapiens
tagattacttaatagtttaggtattttgtgcgggtaactattttcccaatgctacaaataaggaaaatgagaataactgaagacactggctcaaaagcacacattcagcaagtgttaaaattagatgtcaagttcagacatgtgcactgtcaatagcaagctctttcccctaaaccagagtcctcaactgtggctatacattgcaatcacctgaggaacactaaatacatattgagagagtctgatttaattctttcagggcacagcttgggcattgggattttagaaaccacccaggcaattctaatatatarccaatttaagaagcactaggtacatctctgagcctcccaaattttgttcatgtccaatggtacttaattacactctgtgtttgtcacctgattcttgaatttgaaaccaagccacttgaattctttctgaaaagaacagactttcaccaggacagaagaatctgttgagtacacattgtggggagaagcatttttaggtgaggaagaaacagaaggggaggaatcaactctgaccttgagttagttacacagtcattgaatgaggaagattttattacagaccaggacactggtcagcag

SEQ ID NO: 775664 - DNA, 589 bp, Homo sapiens
ggaacagcaaccatcccccagcactcccttctctttgctctattttttctattgcttttatcatcagccagaatgtattttgttcaattatttatttctgtctcctccgctcaccttactagactgtaaactgcataagtaaagggtctttgtctggttctttttctactgtacccctgaggccaccctgaaggaggccctcaataaacattagttggttaaatgtataactaatagtaagatcttcaaatatgaaccatcctgagaatgaataaattcaatgtcaagagacacattcaagtacaggttcagttaccacctaacagagatcgagaaagtggtcttcagacacaaatgagaaatcaagtctgaagacttctaaaatcccttccaaaacggagagtctataatgtaaaagattacttctccaaacagratactcatggtttgctggaattttcatggattctttatataagcacttaattcattcaatatttttttgttcattcaagggatattcagtgagaagctgctttatatgtgttagatacaatttttgcatgaaaaatgcaagaatcaagtggtg

SEQ ID NO: 775665 - DNA, 600 bp, Homo sapiens
tatctcattatcactcagggtactctttgtggaaccaagatccgagcagcttttttgataccctgttttgatcccctagaaccaattgattttctcatagtggaaataatcgtttttttgtttctcttaaatttttaaaaatgcatttcagcaaagtaaaggatgtacactattttatacaatgtggattgtttctttcacattggtttctcattgtgtttcatgggtgggttcatggcaggagacggctttaagctaraaaatgaatttttgagtaagataaaaataatagaacttagagccagaggctagagatgggaagatgtgtcagtgtccaagtccatgttagccaacaagatttagctgagatattggggaaagaaaaaggaaactgactaagtgaacattttatgaaaactctttctaaagaaattctttatctcactcacctccagcacagtgacactatgagtccctttttgtttccagttcaatcaacccttctttttcatacctgcagacacatgaggttttctgaggcctttgaagcagtagaaagccactttgagttgtttgcaaaacattttgaaacttccaggt

SEQ ID NO: 775666 - DNA, 582 bp, Homo sapiens
cttttctgaggccatattgatcttgcccaggattcaattttagacaaacaggcgacataatttatgtaaactgggcaggtaattaaactcttctcccaggcaaaaaggtcagagcagaatatttaaagtttcatttctaagtggaagcagttagctaaaaaaaagagaaagaaatctcactgggattgtcatgttgccaactgttaccctataaattatttggtccggattatcttgctaggaataggtttgagttctctttgctgaaagagctacaaaaggtgagatactcattaagcacaaagtttcatgtttaaaatgactgtggagtagaayacttagtgttagactgtgaaaaaaagttcaataactttttcagagtgattttaagataatatcagacttaaaccatttgagagtaatttactaacatgatgatgtcctatcaccctcaaataattcagtgttcattttctataaacaaaaacattctcctgtgtaatcactaaacaactatcaagatcagaagttaacattactatcatctaatcctcagaccccatttaaatttaagtgttgtaa

SEQ ID NO: 775667 - DNA, 584 bp, Homo sapiens
cttaataggtgcatttatctatctgtatattgaaaatcccaagcttacatcaattcctccaattccacttcagtgccacagggttcattctggttttctctttttttctatttctatctcccttttccaatttctagaatcctgactcccatgatccttaattcatttacttatttgagcattcctcttgtatatgaccagtcccttgtcacaggtctgctcacatttgcagagaccactggctcaccctgcatgggttgtcaattctcccctgggcctctcataccactgatctcaaactaccactgccaaccccatgatcactcatgaacaccctcctcaaccctcccaggctctgacacacttgcccgccaccattgctgcccgttccccactgcacagatgccctcctctcctcacttgrgctccaacactccaggctgggttgctgctgctcttgctgctgggttttccattccctacacggatgccttctccactgtgcccaggctctggtaacctgcatcaggctgctcccttctccccatgtagaaactttccttaacttctcaggttcttatacc

SEQ ID NO: 775668 - DNA, 581 bp, Homo sapiens
accttatactttgttataagcaatagggtataacatcagaaaggcttgacagagcagaatcctggggcatctttctgctgtgtccttcagtagcttggcaaatttgggaaacaaccctgcattctcacatgtcagtttcctcataagaaatgggactactcaatcctcaagttccctcctaaactgaaaattcatttttttctcattttttaaagtatgtctattggagaattacttctatgttcttttaatggtccttacaggtactacagaatattggagaaaatgctccsttagaattatatccatacagaatactcagcaccttctaaattccctgatcctctcttcctcttggagaattgtccatttgtgagcagaccccactgtcaaagagcagctgattcctgttggtttagggaagcgtctagtgtgacttgtgttcagcaaccccttgtctcttttccagagcaccctgggaatataacttgccaaatcgctttcaccctaaaattggcatgaaatgtgcccattcgggcttcagagaggcttaactaataaagcaggaggttgctgaggaa

SEQ ID NO: 775669 - DNA, 581 bp, Homo sapiens
accttatactttgttataagcaatagggtataacatcagaaaggcttgacagagcagaatcctggggcatctttctgctgtgtccttcagtagcttggcaaatttgggaaacaaccctgcattctcacatgtcagtttcctcataagaaatgggactactcaatcctcaagttccctcctaaactgaaaattcatttttttctcattttttaaagtatgtctattggagaattacttctatgttcttttaatggtccttacaggtactacagaatattggagaaaatgctcccttagaattatatccrtacagaatactcagcaccttctaaattccctgatcctctcttcctcttggagaattgtccatttgtgagcagaccccactgtcaaagagcagctgattcctgttggtttagggaagcgtctagtgtgacttgtgttcagcaaccccttgtctcttttccagagcaccctgggaatataacttgccaaatcgctttcaccctaaaattggcatgaaatgtgcccattcgggcttcagagaggcttaactaataaagcaggaggttgctgaggaa

SEQ ID NO: 775670 - DNA, 666 bp, Homo sapiens
gaactaagttgacgatggtaacaaaactaataagtagaagtggggtcaataaacctatgcttatctagctacaatgctgaattgtcttcaattaaatcacagtaacttccacactgggaaaaacttggttttccagcaactggaaagcagcataatatagttcttacatatatgagacaatattgtctttgcagtattgtgaaaattaagtgacatagtaaaaataaaacactttgcatactgggcatataatattcactttgtattacattttctctagtatttccattgctggcacagagcctagtacagagatagtgttcagtaaatgcttgttaaataattgatggcatatgttttgcatttggggagcatcacagaaaatgtctacttccaccttacggttgtgagtgaatgtttgtcctgtctctttccaatctgttctcaaggctacatgtcaccagtttcctcaccttcctcccagctgtttttcatgtctttagacagaggtcacatggagtggctgcyggggtcattgtgggaaaaacccaaaggagaaagtcacaggcctgttccaagtcctgactcctcccaccccctggtcaccaaacctcattttcatttcccaaatgaggcacactttataagatactactctgattttcc

SEQ ID NO: 775671 - DNA, 572 bp, Homo sapiens
tttatataggtgatttcatttaagtttactacatacaaagccaatgaaagaagtgttacaattcgtctattacatattaagaaccaagtttcagagaggttaagtaatttgccctaggtgttgtaggttgtggacaggcctgctgtagtccctgagatgcagaaagaaaattagcaattggaagtatgtgaattctgaaaccacagggtttaccttatttgttggtagtcaggctggaagggtggtctgcccttcctctaaattaacattataaacaccagcaacccccaccctacctttyttagtgctctgacattataactttctcaccttctcccacacaaccactcaatctcaggcccatttccatggataactaggaagcacaaggaattatgtctgttcatctgtatctttgtcttgtgtgcccttcacaaggattgtttgcttctttagtagtgaaagcaaatttgacctaagttccaggcaacattcttagcaatttgggactcaaaccagctacctatggcttttcttaggcatacactctatgtggaagaaccagaatcctt

SEQ ID NO: 775672 - DNA, 642 bp, Homo sapiens
  misc_feature 626, 627, 628, 629, 630, 631, 632, 633, 634, 635, 636, 637,638, 639, 640, 641, 642: n = A,T,C or G
ggtctggagtttccactcatgaagcttgattgttccctctggtcctgcttgggtttgattctggatggaccatttccatcttaagatggattgccatgggcttgtataactttaggacttggagggtctgatagaactcagctcatgatggagagtttcatacttggggtcatttgataccccagggtcaggtgttctatgtccactggggtctaggaacattccagtattcactcttcaaaaagcatagaattctctgctgcagatggcatgaccttggtccagaacatcaggggcttaagttgattctcccactggggcttgcatagatccataatgcaccttttgcccccattgacatctccaacacaaaatcttttgccaggtcatatgttccatgtggccaagctacttgcattacagcygggactgactatagatccctttcttgctccaggccctatgcagtcagctaccttttaggtctcctgggttgaagtggcattgagaggtgtgaaatgtattgtctccagagcccaaccaaagaagggttctggaggcaaccaatgccagacattgtacttcattctttgtaatagaggatgcaagatgcagcattttatctnnnnnnnnnnnnnnnnn

SEQ ID NO: 775673 - DNA, 510 bp, Homo sapiens
gatgaagacactcaggcacagagggataaataacttttctgctgtcatacaacttgtaagtggcagagccaagatgaaaattcagaagccagccccagagccccttcttttatcctctccacgaaaccatctcttgatgtgagagcccttagggtcttcatcatctaatccttggctctgctatcactgtctgggatgctaaacctgttgggtttagggttctagccagtgaagagatgaggctctcatgagccctggagcagtgggtcaraacctgagctgtcccctgtgattcctggaccaaaacaatcagtgcctcagatccagacaagactcgagaaaaataataatatttgttgccacttattgagcatttttatgtaccaggtgctgtgctaagtgctttacatacaatatctcatttaatccctaagacaagtgagaaaaacacattgttgcaggtacaaatattctcatttccaaatgagagaccttggctcagaaaatata

SEQ ID NO: 775674 - DNA, 559 bp, Homo sapiens
tatttatgttgctgaattcaccatcgtggggatcacaggaagaggaaaactttttccagtagctcaggagctgcttatgtcgctgaattcaccatgacggggatcataggaagaggaaaactttttccagtagcctgtagttgcaaaagataataagctttccaacctgtgatcacctggagcaaacggagaggaaaggagataaacgaggagtgttgcgtgcggagtggagggaggctccctttctcctcccatcaccaactcctccttctcaggccaggcttttaatcaggctccccgcgtgcagtcagagagggcaargccagctcccgtctcagcctcccgtaggaagatctcccggcctcacctgagcgccccgcagccctgggtacctctgctcccgcccagggtcctatggcccctcctcccagcacccaacactgggaccccacctgtacccaggctggcctccctgccccgcagcttcctttgcagccgccgtccgcgggtctccaggcgtggccacacctcccggggccccgcaagggttaaggcagca

SEQ ID NO: 775675 - DNA, 590 bp, Homo sapiens
atacctttttattgaattctcaaaggattctttaacactgcaaacgataaagttacactgatatgaagcctcccttgatccttccattttctccaggcccttttcatattctttcttgtttaaagagttgatgatgtacttcgatgccagctgctctggccttctttgtgctctgcaaraacactaagcccattcccagctcaggccttttgcattagctgttccctctgcctaaagtgtcctttcctcaaaggctctcatggatggttttcttttttttgttaacctcagttttcagtttaaatgtcaccttctcatagaggcctgccctgattccacaaaatagtcactttctagcatattctcctgtttcatttctaacactatcatcatctggttttctttctttattgcatatttttgtctggcagtaagtgaactccataaaaatgggaatcattcatcttgctcaccatgttatccccactgtctagaatagtgcctggcgtatagcagacactcaaaatggtttctgaaataaatcgataaatgcttgttttctttatccgtctgaaaatggtttcctatgt

SEQ ID NO: 775676 - DNA, 597 bp, Homo sapiens
tattctatgtgtgcaagtgctcccctgatcccctctttaaaatcagaataaaaaaatattaagacagttgcaaagtattttggcatcataagtccaaacacttctctcaacttccatggttatgggcagccatcctggcatctcctatctaaagtgggaagtccagttatattagtccagccctgttcctttcagaattcactttggcaaatgtaagacatttaacctcttggtcctgtttcatcaatgagaatagcaagtcattgaaaacaatgctgaccaactggcacaggttcagctttcatatatttagtmaacaaatgaatgaatgagtgagtgaaagaaagctgtcataatcatcatcatcttgcacagcccctcaccaggctgacaaaatgtgctttacaactatccaatactggtccgtttctactgctgatagatggagaagcatgtaatccctcaaacagcaggggcttagctatgcagaaggacaggagcagcaaatgtgcccctcaggcatcgtctgcaagtgcaatgtcttcaacattatattttaagaaaatatgttgccatgatggctgttaaggtcaacct

SEQ ID NO: 775677 - DNA, 623 bp, Homo sapiens
tgtgtttgtgtgtttctgggtgtgtgtgtatgcatgtgtgtgtgtacgtgtgtatatgtggtatgtctgggtgtgtgtgtgtgtggtggtgtgcctttttcctggatggtccacatctttcataagattctgaaaagaatctgcaatgtccctacaatatcaagttctcacaacaaagggcagaagtgggtctgggaacaggcataccgacccttgggtacaggaaaccctaaagctacgcggcgggggttgagaagagctctctttatgggtcactacaccacaccacacttctcagctggaaaatcacaagcactagcatcctctccaaggggcctggggaaacttcacccaatttctaaacagacctagcctgtgaagcagagacccactttctccaactagcttccatcmggaggccagctgggaagccaggttacccctagctggctacagactgactcatcctagcgcaagtagccccgatcttcactcgcagcacatctgcctacaccagaaaatgctttgcttcagtgcgtgccaggtccacatacaacctggaaggtaaaaaagggctaaaatgcccaaaacatcctctcacccaaccacgttgtgggaaatgt

SEQ ID NO: 775678 - DNA, 559 bp, Homo sapiens
accactctcccatgctctcatcataataatttcatttcctcatttaatctattctcagttactaattcagaaaacatttaatggtgagccccatatcttaaacctaagtgggcacaggagagtgagaaagcaaaaccccagtgcagcatcaagcagacttttagttacagctgctctagctggaggggattctgtatggtgagaaactgaaaataaaactaaaggaattctgagtagtgctgagtagatatttttttctcttgccttcaaaatcgctmcaaaaaaagtcactgaaagaatactctggcacacaaaggcagcttcaaaaggcataactgcaaattagtagaaattgtatttgggatacttttatagatttgtgatgtaaataagaatatttgaaaatatagagccacataattattgctggtgtgtacttacttatttaaccacatgactaagctcagctggcaccatcatagaggtgagctgtccaggtgagccctgactgaatcaccactctgtagaatcacattgtcttgtaacacctggatccaag

SEQ ID NO: 775679 - DNA, 576 bp, Homo sapiens
ttcattggtgtgtctacatggccccagtgtgagtgagtgggatgtgggtgtgagtgcaccctgatgggacagtgtcctgctcagggctggttcccacctcatgccctaggctgcagaaacacactctggtcacccagccctgagctagaacaagaagcttataaaatgaataaatgaatgaatacaaatgattgtaaggcaaaaatgtgtaaagtctaygctaatcacacaaatgcatgacaataaatgatgcagtctgaaagcactccacaagcctcccatgtttgtgattgtttttgaactttttggtaaaaggaggtgctcctgacaatttttctttgtaaacatttattttctaacttaacccctcatccctatgagtgctgtcactgcttcaccaaaaattgggtaaataatatcttactttttaagttaatgtctcttaaattggtggatagctcacaattattttcatgttgaatattaaaagtgtttctcgtctttatttagaagttttgtgatgcttttgtgaccagaaatatgtcataggaacttaacttttgtttatatcaatta

SEQ ID NO: 775680 - DNA, 484 bp, Homo sapiens
agagataattgaataatggggatgatttcccccattctgatctcgtgatgatgagttagttctcacaagatctgatggttttataaggggttcccccttttctgagcactaattcacctccttgctgctaccatgtgaagaaggacatgtttgcttcccctygtaccatgattatcaacttcctgaggcctccccagacatgctgaactgtgattcaattaacatctttcctttataaattacccagtctcgggtatgcctttattagcagcagtgtgagaacggactaaaacagtaaattcgtactgcagagagtggggtgctgctataaagatacatggaaatgtgaaaatgactttggaactgggtaacaggcagagattgggacagtttggaggtctcagaagaagacaggaaattgtgggaaagtttggaacttcctagagacttggaagtctcagaaggcaggaagatgtgggaaagt

SEQ ID NO: 775681 - DNA, 565 bp, Homo sapiens
ctgttttcttttcttgaacctctgatgtactattgagaatctatttggatccacaggagaggagtgaaagtttgtgtttaatatttgaggtatgctgattctggaccctcatttctgtaggatatttatgcaaaagtaacagattacagaaccagttcagaatgagcttaatgattttctggttttaggttagatgatagtttggaggacaaaatggattttgtcatttacaggctattactgagatacaactattttatccatgatattggccaatgattccatttatctcataaattgaaaggcatagaaaaccggcattttaatacactgatcacgaragaataaactataaagactttcctcaatcttaaaaatgtgaatcagggtttctagattcatattgaagttgataatgtatgtttgtaacctttccttccatggccctctccaaaaactaatgtaggaattgaaaagctatactatgataacagtgaagagaatgacaggggtgcctatatgtacatgagaaattttgtcaaataacttgaaaacagagcagata

SEQ ID NO: 775682 - DNA, 596 bp, Homo sapiens
ctcactctgtcacccaggctggagtgcagtggtgcaatgttggctcactgcaacctccacctcctgggttcaagcaattctggtgtctcagcctcccaagcatctgggattataggtgcctgccaccaaatctcgttaatttttgtatttttagtagagatgatgtttcaccatgttggccaggctggtcttgaactcctgacctcaagtgatccacctgcttggcctcccaaagttctgggattacaggcrtgaggcaccatgcctctagccccaggtggctacaatccctccttaatggattccggtcttctttacagtactggttagctcctttattagtcccccttttgctcatgtgttttctactaatatttggaccttgtatactcaatacaataacttgaattgtttcctcttacctagaagctattaaagtccaaatggtgctgcaaatggaagcacacatggatatgtcgttcttctgaggacccttagattgaccccaggaggaaacctagttgctgttctccacacaacgcgcctctccagcaggaagtatttagaagagtcattgttcaacaccccctaacagc

SEQ ID NO: 775683 - DNA, 623 bp, Homo sapiens
cagttctctgatgaaaatgagaaatattattattaagttgatcaatactttgttgaaaactttctctgtacctggtactaagatactctgttgtttaaatagcttcttatagtcactgtggattacagtaatttctttttacaagatgtaagatttgcccatctgcataaatacccatattttaattctatgatttgtctttacttctagctactcactaaacatacatttcctgaaagcagaagagattcaattgctgttattcacatgattactatcgtgccaggagggagtgtcagggaagttaayaaaacaggccaggtgtggtggctcacaactgtaatcccggcactttgggaggccgaggtgggctgattgcttgaggtcagcagtttgagacaagcctgagcaacatggtgagaccccagctccaaaaaaaaaaaatacaaaaattagccagccattgtggtatgtgcccgtagtctcttgactgtaggcaactagaagtctttccccaggtacggggggcagtggtataggacagcttttaagggggtagaatgtgactcaggctttcgtggactgggtagtatttggataagcctggtgacagtctgcacact

SEQ ID NO: 775684 - DNA, 622 bp, Homo sapiens
accccagctccaaaaaaaaaaaatacaaaaattagccagccattgtggtatgtgcccgtagtctcttgactgtaggcaactagaagtctttccccaggtacggggggcagtggtataggacagcttttaagggggtagaatgtgactcaggctttcgtggactgggtagtatttggataagcctggtgacagtctgcacactatagactagagcactctgctgtgacaggtatgcctgaatagaactcacgaagatcctgctctggcaatttagtcactgcctatccacggatagaaccctgactattcagtagtcacaatagacaaatgatagcttagcagattttggttattattactattttaaaatttaagtataggagattttgcatcaatcatatagaatcacatatggaatttcttagaatgggatcttagtrccttatcttgtatatgtcctgtataaaacgcacagctgatcctatgaagcctggcaagttttaaagggaaggagtatgcaagcagaaacccagagggctttagcagggtaaatgtagatggagaggcctagagaaaaacttttccttctttataattttcctgcttctattctgtttcacct

SEQ ID NO: 775685 - DNA, 612 bp, Homo sapiens
cagtgactaagacagaagccagtccaagggaaggtaatccatgttcccctcacctcccaccctaggagctgtttaaaaagaaccaagtgtgaaattgtagttctgcacacttggaatatagcaaacccaattcctgttgctcattcatttccaagagggagggacataaggactggaaaggttttactggcaacccttcagttggttattactaataaaatccccaaacagaagcacaattttacctgcatctaataataaacattaatcacagataattaccaataataagtagttaaccattgatcgcaaacttgctataaggtagctattattcccattttatggatgaggagactggtacatataggctaaattatttgtccaatatgcagccaaaactgataaaactagatttcaaaccgaggactaactccaaagcccattctactagttttagatcygtgaacttggacaaaccactatccaatgacatgaaggatgctacaaagttattctccatccctatcagacctatcaataaacaaacaaaagaaaattaattggaaatgcagcatgtgagattgtcagcatagatttcctggataatta

SEQ ID NO: 775686 - DNA, 539 bp, Homo sapiens
cttatgtaatttcagaacattttcatcactccaaaagaaacccatacccattagtattctttctccatttcccccagccctggaaaagcttcttaagtggcttaaaatatgttaccaaactacttgctagaaaggctgtccaatttatgttcctatcagccatatgcccatttttccatattttccccagaattaattatgatcattaaaaatacttaaggccaggtgtggaggctcacacctgtaatcccagcactttgggaggccaaggtgggtggactgctggagcccaggagttcaagaccagcctgggcaacatggtgaaaccttgtttytacgaaaaatacaaaacaattaaccaggtgtggtgacacacacctgtagtccccactacctgagaggctgaggtgggaggatggcttgagcccagaggttgaggttgcaataagccatgatcacaccactgctctcgagcctgggcgacagtgagatcctgtcccccgccaaaaaaaaaacttaagatagaaattagtaaataa

SEQ ID NO: 775687 - DNA, 656 bp, Homo sapiens
  misc_feature 616, 617, 618, 619, 620, 621, 622, 623, 624, 625, 626, 627,628, 629, 630, 631, 632, 633, 634, 635, 636, 637, 638, 639,640, 641, 642, 643, 644, 645, 646, 647, 648, 649, 650, 651,652, 653, 654, 655, 656: n = A,T,C or G
ctgtaatcccagctactcaggaggctgaggcaggaggattgcttgaacccaggaggcagaggttgcagtgagctgagattgtgtcactgcactccagcctgggtgacagagcgagactccacctcaaaaaaaaaaaaaaaaaagttttaaaattagccaggcatggtggtgcatacctgtggtccctgctactccacaagctgaggtgggaggatcgcttgacccgggaggtcaaggacagtgagctgtgatcacgctactgttctccggcctgggcaagagagtgagaccccggccactccaaaaaaaaaaaagaaacattccatgatggggacaaaaaattaaataaaataagaacaacccccccgcccccagaaatcttcacattcccttagtcctagsaaaaccaggacagttggtcaccctaaatgaaaaaccaccacggagaatgattagaaaatcgcaaagcagtacatataaataatcagggctgaattaaggcctggtagatatttgttcatgaattaagcaaggatttattaaaaacggagattgagttgctcagcactaagcttcacaatggaccctacctaaaggggttcccacttttactagnnnnnnnnnnnnnnnnnnnnnnnnnnnnnnnnnnnnnnnnn

SEQ ID NO: 775688 - DNA, 639 bp, Homo sapiens
catcatttgtgcacgtcaacctttagatcgtgttttcacatattggacacattttgtccttaccaagtctgatggctctagatgacacagcatgcaaattactacccacagagcaaaatgggctacataaacaaggtttcattgaaagcacaatatttttctttctttcttttgttttcttttgttttgtttggcggagtttcacycttgttgcccaggctggagtacagtggcacaatctcagctcactgccacctccacctcccgggttcaagtgattctcctgcctcagcctcctgagtagctgggattacaggtacctgccaccacacctggctaatttttgtatttttagtagagacaggatttcaccatgttggccaggctggtctcgaactcctgacctcaagtgatctgcccacctcagcctcccaaagtggtgggattataggcataagccaacgtgccaggccaaaagcataatatttttccataagtcagtgtttgtggcatgagagcaattcaattccaaaattatatataatcaaaaatctcttgtactttctttaccctttttaaattagtattcattttggtggctaattttcatagtttttgtacctaatattcgtaatttta

SEQ ID NO: 775689 - DNA, 467 bp, Homo sapiens
ttaatttaatcagacctgtaaagtcctttgccacttagactaacatatctacttgtttcagggattaggatgtgggcatcttaggggaccattattctttctactgtggcaaggaagggggacatgaagtgttggggaacagggatgccattttagagaagatgttagggaaagtcgcattgagaaggtggctttggascaaatacataaggaaacaaaagtcctggtgaaggggtcagggagacagagaagcagatgacaagggtgggggtgtgatgggtatatttagggggcaacaaggaggccagtgtggccgaagaggagagaacaggctagaagtagagatgctgtggcgagagagacagtcataggctgaattatgtccccaaaattcatatattaaagtcctaactcccagtaccccagaatatgactatattcagaaattggaccttgaaagagatgac

SEQ ID NO: 775690 - DNA, 453 bp, Homo sapiens
tctcttagcagtcacacatcgtaattcagcttgccagcagcaggaccgtgatgtgagtgatagcccagccagctcattcagccaggcggcccgattcccaggttcccacgcatcgccgggaaggttggccttcctctgaggttgagccctcakccagcccacaagcctccatccccaccaggtggccgatgagaggaaacccaggctctccactggcctggcacttggcaggagaaccctgccctgcacttcttaagggcatttccacagggagattccaggaccccttagtagtatctcagccccagtgtttgggggacctgggaagatgggtcagggttccccactttgtcccatgatacagctgctctgttgagcatgtgtgtcccacagagtgcggagtgtctgaggtgcatcatctcagttcgtcctgcagcgatcttgtacacagac

SEQ ID NO: 775691 - DNA, 634 bp, Homo sapiens
atggcaccagggcagcctgaccaattccccggaccaaatccctcttggactttctgcccttccccgtagctcaggctactgagttgtgttcaaggggaaaatgctgctgcgtctgtttagctgggagctggctcctctcactgggtgaattagtggctgatggacagcaagagaaggggacatttggagtgcaaagtggacactgtcccatccctctggggggattttcccctgaataaaagagcacactactagtatctgtgtaggtacatagataayggcaacttattaaagtcctgagtgccttgaagacaaagttcagagattctcatattacagatgaaaagagacctccactttgtattgtccaagaatcttggggctttcttggctgagggccagctctgcttctgaacgcttctaggggagggaggatgtaggatgtcagcccctgcacagcccccagctctgctgccagtgctcctgcctccctgcgtggctggaggaagcagccctgccttgcgtggtgtgcttggctctgctgcaagggtgcccgttggtgtcccagagccctgcccaccttggtagggcccattcctgggcttgtgagtttccagctctctttatttctgac

SEQ ID NO: 775692 - DNA, 517 bp, Homo sapiens
gcaagcaaaggcagagaactggcaagtcatggacataggtcaggcagtgaacagtcagtcagcagagatgagtgggagacgaagctgggatggaaggtgggcagaacctcgtaggtacctgcatgtgtcttacaaaagtctggaatttcttctatgggaaatacaaggcatcacaggctgatgtgcagggggactgagtgttgaaggaagtagctagagatcaaatgaagaaaggtaggtgagcaggagggaagaaagcaggaaaggatgcccccatgaactcccatactcaccatccctcggtcaatagcaattggacgaggcatcagatttcagatgttcacatttgtcctttggtggtccctgtatgagacctctctmaaggttccgtattttgtggcacttgggcacctggcagggtttggaggctctgctgagaaagctaggatcaactccatcctgaagcaggacccaactgtcgtgccaggtggatggcagcaggtaacccttggcacaa

SEQ ID NO: 775693 - DNA, 536 bp, Homo sapiens
gtagggaaggaccatcaggtgggggcagggctaggcgtgtctgagctcagactctccttgggtgggtcttgctgtggctgctgtgggggatgggggtaaggttcccaggtcagtggagctgtggctaggaggattatggctgcctttgyttagtcatgcaggttgtcgcagaagtgggagaaaaccggcagtcacaggcctcacccagctcccacacaatctgaagggttggtctcactcccactgtgccacccctaacagcacagagtctgtttccaggcagtgggcgagcagtgctgagaacttgtcccaggctacctgcctcccagctgcaaaagagaagggctttagttcttctcccacctgtagagtctgtaagctggattcatgccctcccccaagttctggccaggaggcttctcgacctcggttcaaattgttacaaagttcagctggagatttccttctccctgtggcgttttctccgtgcccctggctgccctcccaaaggatccctgtgatgctgggcaggaacg

SEQ ID NO: 775694 - DNA, 616 bp, Homo sapiens
gagaggaaccggcggtgggcggggccctagaactcccaagatatgccctttgccttcagctaccagggtgggtagggaaggaccatcaggtgggggcagggctaggcgtgtctgagctcagactctccttgggtgggtcttgctgtggctgctgtgggggatgggggtaaggttcccaggtcagtggagctgtggctaggaggattatggctgcctttgcttagtcatgcaggttgtcgcagaagtgggagaaaaccggcagtcacaggcctcacccagctcccacacaatctgaagggttggtctcactcccactgtgccacccctaacagcacagagtctgtttccaggcagtgggcgagcagtgctgagaacttgtcccaggctacctgcctcccagctgcaaaagagaagggctttagttcttctcccmcctgtagagtctgtaagctggattcatgccctcccccaagttctggccaggaggcttctcgacctcggttcaaattgttacaaagttcagctggagatttccttctccctgtggcgttttctccgtgcccctggctgccctcccaaaggatccctgtgatgctgggcaggaacggcctgtttg

SEQ ID NO: 775695 - DNA, 606 bp, Homo sapiens
ttaaaatttgaacattacttcattaaaaataacaataataaatccattatgtattaacacaaataacacttttatgaaaaataactacatattcagaactagcagcaaaatctagtgagaagcctggcacggacttcagtttttgaaaatcttttaaatgtctgatttattagaagccggcttgattctcatatatgcttctgcatccagggtgttgtgatataacacatcatatsagctgtggaaaatgccagtgtacactcatgagagaatgagaatgaaaaaggcaaatcatgtcttagtactgttatgaagatagttttgactcatggacccctttgggaaccactgctttatagtgttagagttgttaggcttcccaacaccaaccacttcacccatgtgcgtgaccacacacacacatgcacacttgcatgtgcttgcctactatttttgttttggcaatatcatcatgttcttgggataactgaaaactgcactgagaatcaacattctgctctgctaactagtatcagaagagaagttatggacctcattttagagcctcatagtcctggatttggatcctgtctctgtcactactaa

SEQ ID NO: 775696 - DNA, 542 bp, Homo sapiens
gattgcctgaggtcaggagttcgagactagactggccaatatgatgaaaccctgtctctactaaagaaaaacacaaaaatttagctgggcatggtgatgggtgcctgtaatcccagctacttggaaggctgaggtaggagaatcacttgaacctrggaggcagaggttgcagtgagccaagattgcaccattgcactccagtgcaatggttacccagttactgggtaacaagagcgaaactccgtctccaaaaaaaaaaaaagtcaaattctgtccaatctactttttctaattctctgtttgactattaccaggggtaacctctgagaaatagggtagatgtggcaagtgggggcaaagagattgttgcacaatctttgaaaacagtttactacagctgggaacattcctttaatggaatcaagttgtaaatgggaaaccagattatctgaacagcatatggaaaatagcaaataaattctaagtccaacagggtgagttatcaaagaaaactgaagattgggtctgagttctctcatcca

SEQ ID NO: 775697 - DNA, 644 bp, Homo sapiens
taaaagaatgaggtagatttgtaagtcctgattgaaaggatgtcaacatcattgtatttggtgaaaagagaacatttttgtaaaactgaagagtgcattttaaaacatcactggcctccttttgactcctctaacatttcactgtgcaaagtgggcaccagcagcatgagcatcctctgggagcatgttagaagtgcgtagtcaggctcaccccaaacctcctgagtccacatcagcagtgaagaagacaggtggctgtgtactccttaaagtgtgagaaccctctagcccgccaacagcgctcccttttcggggcctctgcacttggctataatgcgcttcccgggatttacgtgctccactccctctcatttctttgaactctgcttaatgtcacctccttggaggggtcycctctgacttccatctgaaaagcagtgtcctctgtcaccctctatctgcttaacatgctttatctttcttcacagcaatgaccagtacctgaaatcacaggctcgtgtgttatctgttcctcctattccagtgtgagctccgtcagggctgggactttgtacctccagcacatcagacagtggctgggtaaaagtgcttgataaatacttgaaagagggtctactttctct

SEQ ID NO: 775698 - DNA, 506 bp, Homo sapiens
aataaatatttgttgtttaagccacccatctgtggtattttattatgacagcctgagtagactacttcagaccctatgttacttctgaggctgtgttacaaaaggccatgcaaataaaaaggccaggcagcttcccagaactgggagttctctgggaacactggctttagggccctgagcccgccatgcttggaggccactgcagacaccccaaatggaagtcctggctgggcccagtcttcagctgcccagccccarggctggcgtgtgagtgggagggccattgaggacaagctgtgcccaacattggcaatcgtggggcagacaagagctgctctgctatgccccttcttatttcctgaccacgggcggaatcgatgggcgtgaaaaatgctggttgtatttcaccaacgtggggggatttttctagtcacactggataaactggaacaatgttgtatgagcattcttagagaagtttcttttgggaacctattcatttctct

SEQ ID NO: 775699 - DNA, 636 bp, Homo sapiens
  misc_feature 1, 2, 3, 4, 5, 6, 7, 8, 9, 10, 11, 12, 13, 14, 15, 16, 17,18, 19, 20, 21, 22, 23, 24, 25, 26, 27: n = A,T,C or G
nnnnnnnnnnnnnnnnnnnnnnnnnnnatctattagaagaagtttggtagccactctccagggttcttaacatttctatagaaattaattaaccgccaggtggggggatcacatgagaccaggagttccagacagcctggccaacatggagaaacccagtctctacaaaaatacaaaaattagccgggtctgttggcacatgcctgtaatcccagctactcaggaggctagagcaagagaatcacttgggcccgagaggaggagattgcgttgagtggagagagcaccactgcactccagcatgggcgacagtgtgagaccctgtctcaaaaacacacacaaaaaatttattaacgatgaaggccrtggagccactctaagaacagctgctatactctgttgctgccacaactgtgagagggatttctgggactctggatctcccatcaagatctggaataagaagtccagccacatgattcagaagaatgaattactggaaggacctgagcataccctcttccatcctggacagatattaggttcaatttatatgaagtaaccggcctattttctcaagagcagatccactctaccaagtgatgacataagaatgactcagagctttataaatct

SEQ ID NO: 775700 - DNA, 627 bp, Homo sapiens
atgatgatgctgtgatgataatcactcagctaaacatagcctgtccttcatcctccaccaacggcaacacctcatccttccaggctccacatccttctaatgccacctccttcatgggccctctcagtttccctatcaagattagccctgcttccgctccactccatcataccactggctctcagattcatgtctcttttgcttgcattgtagttaactaactacttatttgtcttgcccaataaataactgacttgataaaggtcttattccccttggaatctccccagcagcctgcggagtgccttggtatggaagtgctgggggaatctggtttctgagactgggctaagggcaggctagtgtcctccagccataagtgtataacccatgctaagggcagggctcatggatcagcttgcaggtgggtcrctggaggctccagtgtctttggggatgtcctgccttggcttacctctccttttccatcctccctgtctttgccttgcctgaccagaagcgctccaggcactgtgccagtgttatcaaagctaaccactgatcatgacaatgagttaaaatgtaacaaccttgtttactctgatttactcaatataatttaaaata

SEQ ID NO: 775701 - DNA, 629 bp, Homo sapiens
acgtggcttgaggcattacacattttcagataagcttttgagatctgcatgccagtctcatatactctgacttcagaatagacccaaccagcgaaagataataattagccccctctacacaatagtgcatacatagagggctacttctcatcctatacttttctctttccttcatcaatctgccaaacttcactataatctaaagataatggtggaatatatgtatcgtttaaaaaaaactagagagattttaactgttcctgttttatattgtgctaattaaacgcaaagacttggcaatcatggtcataggttataaggttatattaagatatatatactaacaggcactgctattgggaactgaacagatgttgctctttcagaagaggaagggcacatcagtcaccttgggacacttcaraaaataaggctcaatattacagaatagcagtaggaaggaaactggtgacagaaaaacacttctttgcatatatattattttggactgcattcttatttaattttagtgttaatttccacttttctttctttatacaagttgcttttgattatttcaaggaaggaacctgagatcctccatggttaacaataagaagcagttttcc

SEQ ID NO: 775702 - DNA, 629 bp, Homo sapiens
acgtggcttgaggcattacacattttcagataagcttttgagatctgcatgccagtctcatatactctgacttcagaatagacccaaccagcgaaagataataattagccccctctacacaatagtgcatacatagagggctacttctcatcctatacttttctctttccttcatcaatctgccaaacttcactataatctaaagataatggtggaatatatgtatcgtttaaaaaaaactagagagattttaactgttcctgttttatattgtgctaattaaacgcaaagacttggcaatcatggtcataggttataaggttatattaagatatatatactaacaggcactgctattgggaactgaacagatgttgctctttcagaagaggaagggcacatcagtcaccttgggacacttcaaaaaatraggctcaatattacagaatagcagtaggaaggaaactggtgacagaaaaacacttctttgcatatatattattttggactgcattcttatttaattttagtgttaatttccacttttctttctttatacaagttgcttttgattatttcaaggaaggaacctgagatcctccatggttaacaataagaagcagttttcc

SEQ ID NO: 775703 - DNA, 567 bp, Homo sapiens
ttggcaagttgacttagatgaatatcaatttcttttgcataaagcgaaattggaaaagcacatttgctgagctttatttggatgtatctagtaaaagcattgcttcatcgccttcttcagtttaaagtatttgtttgaaagagccagctttttctagataaatgatgcatatgaaaaagaagcaggattaaattgctttataaacattcatatcttgaacactagcattcccttgctgcctcgtgttcttttatcttctcattcttattctgaacagcagcagtacattggagctattctgccacaaattttaccagaggaatttaacaaatttwtagtttaacaaaaagtgaattaatttggtctctttttaaaacatttatcttagatgattcttttaaatgcttttagtggtctgctttcagctaaaaaaaaatctaacttgtatttgcttttatgctaaggaaacacatggtttacttttaacttctttaatatttagattttttaacttccttcatacttaagtaagttgtaactttctttggtcaagtttttttttttttt

SEQ ID NO: 775704 - DNA, 663 bp, Homo sapiens
aaaatgcaaaagtaaaacatcatatcttccccagaacttatcagattaggtagcatgtctctccccaaaatgtatatctttaaaacatgtatataaaccaattaacatgtaaagaatcaaatacttactggtaacccctgcaatcctgcatcaccaggaggcccaggttttcctggttcaccctgcaaaaaaagcttttatcacatgattgaacctgtatgagctgctgtatttcttttaagaaacrgaggagcacagacgttttaagtaaaaggattgtcccaacagctgactttacatgcacttttataaagtgacttaatttagggtgggggagtagggtgggaaataggacataattcaaccaaaatgcacagtctctctcaacttactttcatcaacagggcaattttactgagttcctgaaaccaagcaaataattatactattctagtaagtatttcatatttgacacttgattcaaaaattaaaggaagggaaaaagccaaagctagctaaataaatcttttggtgatttagtaatggaaatgccacactcagctggccagggcagagacagccccactcactcttggagtaaattacacagcctacctttgttccaggcattccagggatcccatcacggccatccacacctgg

SEQ ID NO: 775705 - DNA, 579 bp, Homo sapiens
ggattatatttattgatttacataagttgaaccagcctcatatcccagggatgaagctgacttgatcgtggaggacaagccttttgatgtcttgctggattcagtttgccagtatttttttgaggattttcacatcaatgttcatcagggatattggcctgaaattttctttttttgttgtgtctctgccaggttttgatatcaagatgatgctggcwtcataaaacgagtgagggaggagtacttctttttctattgtttggaacagtttcacaaggaatggtaccagctgctctttttacctctggtaaaattcgactgtgaatctgtctggtctggggctttttttggttggtaggctattaattactgcctcaatttcagaccttgttattggtctattcagggactcgacttctttctggtttagatttgggagggtgtacgcttccaggaatttattcatttcttctagattttctagtttatttgcataaaggtgtttatagtattctctgatggtagtttgtatgtctgtgggatcagtggtgatatcccctttatcattttttattgtat

SEQ ID NO: 775706 - DNA, 591 bp, Homo sapiens
ctattgtttggaacagtttcacaaggaatggtaccagctgctctttttacctctggtaaaattcgactgtgaatctgtctggtctggggctttttttggttggtaggctattaattactgcctcaatttcagaccttgttattggtctattcagggactcgacttctttctggtttagatttgggagggtgtacgyttccaggaatttattcatttcttctagattttctagtttatttgcataaaggtgtttatagtattctctgatggtagtttgtatgtctgtgggatcagtggtgatatcccctttatcattttttattgtatctctttgattcttctctcttttcttctttattagtccggctagtggtctattttgttaatcttttcaaaaaatcagctcgtggattcactgattttttgaagggtttttcctgtctctatctccttcagttctgatcttggttattccttgtcttctgctagcttttgaatttgtttcctcctgcttctgtggttcttttaattgtgatgttagggtgtcgattttagatctttcctgctttctcctgttggcattcagtgcta

SEQ ID NO: 775707 - DNA, 591 bp, Homo sapiens
ctattgtttggaacagtttcacaaggaatggtaccagctgctctttttacctctggtaaaattcgactgtgaatctgtctggtctggggctttttttggttggtaggctattaattactgcctcaatttcagaccttgttattggtctattcagggactcgacttctttctggtttagatttgggagggtgtacgcttccaggaatttattcatttcttctagattttctagtttatttgcataaaggtgtttatagtattctctgatggtagtttgtatgtctgtgggatcagtggtgatatccyctttatcattttttattgtatctctttgattcttctctcttttcttctttattagtccggctagtggtctattttgttaatcttttcaaaaaatcagctcgtggattcactgattttttgaagggtttttcctgtctctatctccttcagttctgatcttggttattccttgtcttctgctagcttttgaatttgtttcctcctgcttctgtggttcttttaattgtgatgttagggtgtcgattttagatctttcctgctttctcctgttggcattcagtgcta

SEQ ID NO: 775708 - DNA, 591 bp, Homo sapiens
ctattgtttggaacagtttcacaaggaatggtaccagctgctctttttacctctggtaaaattcgactgtgaatctgtctggtctggggctttttttggttggtaggctattaattactgcctcaatttcagaccttgttattggtctattcagggactcgacttctttctggtttagatttgggagggtgtacgcttccaggaatttattcatttcttctagattttctagtttatttgcataaaggtgtttatagtattctctgatggtagtttgtatgtctgtgggatcagtggtgatatcccctttatcattttttattgtrtctctttgattcttctctcttttcttctttattagtccggctagtggtctattttgttaatcttttcaaaaaatcagctcgtggattcactgattttttgaagggtttttcctgtctctatctccttcagttctgatcttggttattccttgtcttctgctagcttttgaatttgtttcctcctgcttctgtggttcttttaattgtgatgttagggtgtcgattttagatctttcctgctttctcctgttggcattcagtgcta

SEQ ID NO: 775709 - DNA, 655 bp, Homo sapiens
gaatcgcagccgagccgagctgagatatcacgcaaaacacccttttctaccccacctcacaggaatactttaagaaaccaaactcaccatagaaagggcagaattgaccgtgactttccgaagacaatgaggattattatcagtctgcgtgcagttgcatgctttgtacacgtaaatgaagagattagcactctatttcctaaacttgtttcctaaatctgttcatctgtgttactgaccttttcccttgacaagaaagcaggacgaaaagtatttagggttcaaatcctaaaattcactccttcccccgtgggcagaacagcaaatataacatgagttcatgaaagggacctataattttataatgcacttaagatgtctttgtcttccctctgaattctccaaaaccatccatccttcaaaacacagwttaaatgttttcttccctgggaaacctcttttggaaatctcagatgaaaatatcctttgtctctccaggacgtagcacactaaaatatggcagacattcagtcgctgtcagataaatgagttaaataatagagtaataaatggatggagcgtttgtcttccatcactagtgtttggaagatgcatgcaaattgtcttcacagaacactactggccaccatcatac

SEQ ID NO: 775710 - DNA, 438 bp, Homo sapiens
cagtgcttatattctacataaaacaaaaatgtaagcagttaaaaacaataggtggaaaaaatgttaagggataaaatatagctttgcttgagaagaaaagagataaaaggtgaataacatagagattggtggctattagagtaccaggctgcagctccccagtcacagtggtctgcagcgtcttgagctgcacatgagattgatggtggagagggcatctccagacatgtgctttccctagagcttgctgacggggctttctcagtagcatatmctatttccccatgttggttggattcttaatagtttcaatagtttaatgtgaggtagaaagactcaaataattatattggaggtggaaatggtaaaggaaagacatatattattaatattgtgaagaaagaaaaatcctctaattgaagaggatccccttaactg

SEQ ID NO: 775711 - DNA, 631 bp, Homo sapiens
tccattaacctccctgttttacttctcatttcggctttactcagatcttgtgctcaagtcaggctggactccatgctaattctcaaatactctccgtacctctttcctgtaggccagaccctgcatttaaatggctttttccttcatttctctggctcaacattccataagccatctcagatgtaattggaatgttaattgcatcatgaaaacatttcaattatgccctgtcccccagatagaagtgatctttccttattctgaactcttgtgtcctttgtaccccatgccgtggtaactgcagaaggtgccagtcatgtcgttttcaccgctgtgtttcccacctygctttcctcagggcttgccataaggtagcactcaatcaatatttcttgaaacgaattgaatcggaggcgtaataaatcctgccatgctgcttttgttggtaataactgacttctcacctgctataaaattttctgaaaaatgtcatgataggttataaatgttatagttctggagcagagttttaacaccaaatccacttactgaaagacacatttgttctttcactttacatcattaaattcagttttgtagataacttcatacatttttaacaatgcctcac

SEQ ID NO: 775712 - DNA, 596 bp, Homo sapiens
caaatacaacataaatgcatacagattcctggatcttaccccagacctgcagaattagaatcagagggcaaggggctaaataaagataaggaatggggagatggggttggggggaggacatctagtgcaatatatttctaaagaactcaggggattctgatgcatagctatcactgggaatcagtgatagaaggtctgcatctttttcaaagccctgattggcggctgcttcttctttgtcttcttttttktttgtttgtttgtttctttgagatgaagtcacactctgttgcccaggctggaatgcagtgatgcaatctcgggtcactgcaacctccatctcccagtttcaagaaattctcccccctcagcctcccgagtagttgggattacaggcgcccgccatgatgcctagctaatttttgtagagacaggggtttgaccatgttggccaggctggtcccaaactcttgacctcaggtgatccgtccgcatcagcctcttaaagtgctgggattataaggcatgagcccctgcgcctagccctgaatggcttcttaaaaagagatgagttggcagatgtgtctcaatttgtt

SEQ ID NO: 775713 - DNA, 579 bp, Homo sapiens
cccatctcccagagtttctgtgtgaatatttaaccatgggactttctttagaggtcaagtgttcttacaactaagcagggccctggtcctcagctttctcttcctacccaatgtagaagatgagatctactttgtacaataataagaagacttggttttacctttacagttagcattagttgccaattaattgctctgttttttgttatttttcccaaagtaattaaactgagcaattctattgkactcaatgttattatttcccctatacttctccaaggactgatggaatacctagctcgcatatccccaccaattatatcatcccagtttatcacaggtgagcatgttaacaattgcactgctacctttgtcgggagctctctctgctccacaccatgcttatggaatcctcatttccagatgggaggtatttaatccagttcaaaatctcacctaagtgttttctttctgacaaaaatgctgtgttaacatttccaagttggcttcccctgcaagcagagtgtaaaatgaagttttgcatatagtcgttatattttggagtgtgcttgaattaat

SEQ ID NO: 775714 - DNA, 579 bp, Homo sapiens
cccatctcccagagtttctgtgtgaatatttaaccatgggactttctttagaggtcaagtgttcttacaactaagcagggccctggtcctcagctttctcttcctacccaatgtagaagatgagatctactttgtacaataataagaagacttggttttacctttacagttagcattagttgccaattaattgctctgttttttgttatttttcccaaagtaattaaactgagcaattctattgtactcaatgktattatttcccctatacttctccaaggactgatggaatacctagctcgcatatccccaccaattatatcatcccagtttatcacaggtgagcatgttaacaattgcactgctacctttgtcgggagctctctctgctccacaccatgcttatggaatcctcatttccagatgggaggtatttaatccagttcaaaatctcacctaagtgttttctttctgacaaaaatgctgtgttaacatttccaagttggcttcccctgcaagcagagtgtaaaatgaagttttgcatatagtcgttatattttggagtgtgcttgaattaat

SEQ ID NO: 775715 - DNA, 616 bp, Homo sapiens
gtttaataatttaaaatatattattactttctgctgccagctgcaaacagtccaagaatgactagggagagcaatgccttaaggtcagttgaatttctctttatagtgatctaatcaaagaaaaattgatctaaagaaatactgagtctgtgtatcctgaaacacatagaaaacagttctgttatagaaaatgaagaatttggaaagcataatacttcacaaattttgaattattttgttgataatttcaattttaatgtcctctacaaaattgcaaaatgtctcaaaatttttagtttattcatatattctgaattatattaaatgataaaataaagtagaatgttcacaaacaacaaatgctctttatataattaaggcactcaaaagrcactttattaataattccaaattatttatcagggttaacatatttatcctttaagaaataagatccttacattttacagtgaaaatgggaaacacattaacacaaaaggacctcagatttatgtcagttaatgtatttatttaattctcattatgctttactgaaaaatgattaaatgggtaatttatataatctgtatagttaaacaataaaattacagtcaat

SEQ ID NO: 775716 - DNA, 566 bp, Homo sapiens
aaactaaaatatttttatatgaacattttaattatcactgaaacataaacccaaatacaaaacttaccatacccaaatatttctccaatagtgtctttttaatacaaattgaccttaacaaaatagattaattctgaaatagaatttactttacagagaccaatattagtcattayctgataattgagaacatccatgaaacaaaaggagaaaagtccagcttagtcacacacaaccactttcaaagtctgagtaatcaaactgtatattcatggtttttgtctgcctttgtgagtgtgaattctgctgtactttgactttttgttgtattaaaagatattatcatatctttgtgctttaatggtaataaaaatgtatgtatgtaatggtgtgtttatgcttgtgatagggtaactgtaaaagcccattacattaaaaataattttaattgtgataaaaacatacttaccataaaatttaccatcctaatcatttttaggcatacagttcagtgacattaagtacatttgcattgttatgctaccatcattacaatccatcttaca

SEQ ID NO: 775717 - DNA, 448 bp, Homo sapiens
caaatgcttccctgaatttctcatgagaagaggaaacagggcattcataccctgtttcctgccacaccttttctgagggtcacccttggagttctaagttctccacatttctgggcttcacttacacaatgactgagtgagttctcaggacttcagagagggcagagaaaagcacggctcacactgaaggtagtattacgtcaatgtgtgtctgagcttgcacagagctcttggcactcagtggctgaaattggatgtgggccaatgggayggacgtgactccacacaatgaagcactgactacagtccaccttttgcacaactcttctccactagtgtcctacattaaaaccaccctgtcactgaattttcaaattgatgaccagccagtctttaaaaaaaaaaggctgattcagacggtttagtggaataagctacagtaaccaga

SEQ ID NO: 775718 - DNA, 578 bp, Homo sapiens
actacataaaatagccatttttgaagattacagatagttgatggtgacaattccatgtgtttaaactctctaaaatatcataccaacatcagaattaactagaatggtgtcactttctagctgtttatttctagaaaaaaaaagttcagatacctgtatcctattcttgtccctaaacagatgctaacataattgtacagctgtaactctgtaactcctatgctgtgatattaagaaagtcttaattttaaaaagacaaaattagaaagtttataaaattgcatgcaaaattcaagcttcaaagtttgctttttctcagttccttgaaatcttccagtggacttgtcttccatcctatcatagctattcctattcttagctatacctgaggcattcactcccatctttctaattcattccctttaatatcccaactcctacaatayttccatccaattgggatttccaatccattgactttaaatctcacccactgaataggcctccttctctccttgctcggcttaaattccatggacatccactacaatcattttctggcattttcacattttctt

SEQ ID NO: 775719 - DNA, 602 bp, Homo sapiens
tttagttatagttttgtttggtgtgctggttatgctaacagtgatattgttgtgtggacagactcaggacctctggttagccagtatgttgaaggtggtgtgattagatgttattttctttttcctgggatcagtattattctgtcgtgagttgctgtaatggcctgagttcattggcctccagtggcactgtcgtgagtgcaccagctgtagtagtagtagtagaaggatctaagcttgccttaaattggccaggataagtattttgttttctcaggtgatgggcagggccataaagctcccaaaaatttctgtcttttttgttcagctacaagaatgggtagagaaatrccatcaggtgggggcagggttagggaggtccgggctcacgctttcctttggcagggcttgctgtggccactgggctgggcggtggttctcaggctaatgggatcagttccagaggggatctttgctgcctctcctatgtcatatagtttgccatggtagtagaggatagctggtagtgagaggtttcaacacagttggtggggctggtctctccttcagtgcccctactcagaccttgccccaggccatga

SEQ ID NO: 775720 - DNA, 590 bp, Homo sapiens
gatatgggcagatttactctttaagttcagcaccagttacaatcagagaatggattagaaaagaggatagaatatgactgtgccactaagtcaacatctgggaatacacaaataaatgacttatagttccatttctccaagaggtyacaattcagtgacaaatgttaaattttgtcattgagagaacaaaaaaatactataggtgtatctgttttttacttttacaagatgtatgactcaacagcatgttaggcaattgattctcagaaacaaacataaaaattttgccatggtatactcatgtctttgtacatatttgtacacattggtatttggtttgtctaatgaatagaaaactaaaaggacaatgtctgctcaagaaaacataatttactctaggtatatcaaacagagggaaaacattataggaaaactgttgccttttagaaaagttaaaaagaaaaaaaaaacagaaaaggagaagtgaaatagagcctaccaaaacttctaggctggaacccactagcctgcacctgttaccccactttggagatgctattgcagcttattccagatccgtcaaatatggg

SEQ ID NO: 775721 - DNA, 519 bp, Homo sapiens
acagtttcctccacttccatggccttagcataagtagacctagatttttttttcttcaacttttaagttcaggggtacatgtgcaggatgtgcaggtttgttacataggtagatgtgtgccatggtggtttgctacacagatcgtcctatcacctatgtattaagcccagcatccattagctcttcttcctgatgctctctctccctctaccccaccctgacaggcccgagtgtgttgtccccaccacgtgtccatgtgttgtcatcattcagctcctacttgtaagtgagaacataccgtatytggttttctgttcctgcattagtttgctgaggataatggcttccagctctatccatgtgtctgcaaaggacatgatcttgttcctttttatgactgcatagtattccatggtgtataggtaccacattttctttatccagtctatcatcaatgggcatttaggatgattccatgtccttgctattgtgaatagtgctgcagtggagatacgcatg

SEQ ID NO: 775722 - DNA, 617 bp, Homo sapiens
aaaaagacttgaggccctattttttcagttcttcaaggagaactaggtacataactagtaccattccagatgcaggggagagacgctcattcattccagactgtgaagccttggggctttcaggcttacttctccagtgggaccccagttgaagcaggctcctcaaccccatgccccaccctgtctttccttcctaaggaaatggtacctgtacctaccttgttgcccaagccagaaacctgacagttcattctaggacccccctctttcctctcctccttcctccaaaatcartttccattatctaatcattctatctacttttgaatctcttcccttctcattctcctcactgccaccaacttggtcagcccacaccattttgcccaattattattcagaagctgcctgagtggcttccttgcctcttgcctccaccagtccctccccagctgcttcctagaaaagcctcacagcacacaagtcttattctatcatttcttccttcctggctcaccaaagcctttctgataaagctccacattggccttgtggactgccggatcttgcatttacaccatgccctcccttctcctgcccttctctcccacctgctc

SEQ ID NO: 775723 - DNA, 617 bp, Homo sapiens
aaaaagacttgaggccctattttttcagttcttcaaggagaactaggtacataactagtaccattccagatgcaggggagagacgctcattcattccagactgtgaagccttggggctttcaggcttacttctccagtgggaccccagttgaagcaggctcctcaaccccatgccccaccctgtctttccttcctaaggaaatggtacctgtacctaccttgttgcccaagccagaaacctgacagttcattctaggacccccctctttcctctcctccttcctccaaaatcagtttccattatctaatcattctatctacttttgaatctcttcccttctcattctcctcactgccaccaacttggtcagcccacaccattttgcycaattattattcagaagctgcctgagtggcttccttgcctcttgcctccaccagtccctccccagctgcttcctagaaaagcctcacagcacacaagtcttattctatcatttcttccttcctggctcaccaaagcctttctgataaagctccacattggccttgtggactgccggatcttgcatttacaccatgccctcccttctcctgcccttctctcccacctgctc

SEQ ID NO: 775724 - DNA, 617 bp, Homo sapiens
aaaaagacttgaggccctattttttcagttcttcaaggagaactaggtacataactagtaccattccagatgcaggggagagacgctcattcattccagactgtgaagccttggggctttcaggcttacttctccagtgggaccccagttgaagcaggctcctcaaccccatgccccaccctgtctttccttcctaaggaaatggtacctgtacctaccttgttgcccaagccagaaacctgacagttcattctaggacccccctctttcctctcctccttcctccaaaatcagtttccattatctaatcattctatctacttttgaatctcttcccttctcattctcctcactgccaccaacttggtcagcccacaccattttgcccaattattattcagaagctgcctgagtggcttccttgcctcttgcctccaccagtccctccccagctgcytcctagaaaagcctcacagcacacaagtcttattctatcatttcttccttcctggctcaccaaagcctttctgataaagctccacattggccttgtggactgccggatcttgcatttacaccatgccctcccttctcctgcccttctctcccacctgctc

SEQ ID NO: 775725 - DNA, 633 bp, Homo sapiens
agaaaccatctttctcagcaaactaacacaggaacagaaaaccaaacactgcatgttctcactcataactgggagctgaaaaatgagaacacatggacacaggtaggggaacaacacacactggagcctattgcagggtggagggctaggggagggatagcattaggagaaatacctaatgtagatgatgggttgatgggtgcagcaaactactatggcacacgtatacctrtgtaacaaacctgcacattctgcatatgtatcccagaacttaaagtatagtaatttaaaaaaagatgtaaataaaaccatgaagtaaatacttggaaatacatcaaatactatactatatcatagggaacatatcttcttctagaaaacatgtagaatgattccctaaattgatcatatcatagagcaaaaagtaataaaaagtttccataaaatacacatttacaaacaaaacaatgcaatgaaacgagaaatgaaaaaataaaaccttttaatttttaaccttttaataatttaaaaatatttcattaacgaattttttttggtaaaataggaaacaaaaacagtagttacagagtttctaaaaattaatgataataaaaacaagatatcaaatttatg

SEQ ID NO: 775726 - DNA, 613 bp, Homo sapiens
aatttatagatgcttttaatttttcttgctttttaaatttctaaatactgcttgtatgcattttaatttgcttattgatctatctcattattcttgctttagtctgcattattatttatcttattgctaatactgatatgcctgtagcatctttttcccaatcctacttttaaacaatcatgtcaatggcaagtgatgattacttgctgtctttataatcctcatgcttgtatatttttctttgttctagctattgcctcctacaatgttgaatatacatactgataatgggcctccccctgattatgaaggagatacgtctctcaatactcattcagagttacgtttattgaaaacatttttactttatgattattaggttaaataatttttggcatattccaaatatcctaaggacttctgtctaagcattttttaaaagtaacaggcatcaaattrtatcatttttaacagagtgagacaattcttttttcccataatttagcaattgattcaaccatccattgatttttttagtgtaacaaagttattttttatttctagaggcttccatttcagttttatttccaagtgtttttctcacaccttgtgg

SEQ ID NO: 775727 - DNA, 643 bp, Homo sapiens
ttcctagatggtcccccagaccttgtgcttgagtcctagagtgtctggactggactggactggaggacttgtcctcaggtcctcatgatccaggtgctgactgtgataaagatgggcaggttggctccaagagtgctggccgaatgctgaggcagctaaagcctgaaggtggtaacagccaggacagattgaaggcttctggggcctgagatcccaggagggtgctgggctgcagcttaaatgattarataggggcagggcagctgcactaggatctgtccagagggaatacagacaccccatctaccaactccccagtcactgggagtagtgggaacagcagctgtgagatgcatggcccactcacacctccctcttgcaggatcagtggtggtacatgtcatgggggtacgagaaggtgtctggtctcccctctccctctctaccccagtggtgggagacccttggcagagttcaggtctctgtgggctgggccctctgaagggcacccagccacagctaaaatgcttaggcaggggcaagatggttgtgtgtcaatggggagggcaggcccccacagcactagcaatggaagctgacaactgtggagcatgcggcccattcacagataatttgtttttaa

SEQ ID NO: 775728 - DNA, 643 bp, Homo sapiens
ttcctagatggtcccccagaccttgtgcttgagtcctagagtgtctggactggactggactggaggacttgtcctcaggtcctcatgatccaggtgctgactgtgataaagatgggcaggttggctccaagagtgctggccgaatgctgaggcagctaaagcctgaaggtggtaacagccaggacagattgaaggcttctggggcctgagatcccaggagggtgctgggctgcagcttaaatgattagataggggcagggcagctgcactaggatctgtccagagggaatacagacaccccatctaccaactccccagtcactgggagtagtgggarcagcagctgtgagatgcatggcccactcacacctccctcttgcaggatcagtggtggtacatgtcatgggggtacgagaaggtgtctggtctcccctctccctctctaccccagtggtgggagacccttggcagagttcaggtctctgtgggctgggccctctgaagggcacccagccacagctaaaatgcttaggcaggggcaagatggttgtgtgtcaatggggagggcaggcccccacagcactagcaatggaagctgacaactgtggagcatgcggcccattcacagataatttgtttttaa

SEQ ID NO: 775729 - DNA, 643 bp, Homo sapiens
ttcctagatggtcccccagaccttgtgcttgagtcctagagtgtctggactggactggactggaggacttgtcctcaggtcctcatgatccaggtgctgactgtgataaagatgggcaggttggctccaagagtgctggccgaatgctgaggcagctaaagcctgaaggtggtaacagccaggacagattgaaggcttctggggcctgagatcccaggagggtgctgggctgcagcttaaatgattagataggggcagggcagctgcactaggatctgtccagagggaatacagacaccccatctaccaactccccagtcactgggagtagtgggaacagcagctgtgagatgcatggcccactcacacctccctcttgcaggatcagtggtggtacatgtcatgggggtaygagaaggtgtctggtctcccctctccctctctaccccagtggtgggagacccttggcagagttcaggtctctgtgggctgggccctctgaagggcacccagccacagctaaaatgcttaggcaggggcaagatggttgtgtgtcaatggggagggcaggcccccacagcactagcaatggaagctgacaactgtggagcatgcggcccattcacagataatttgtttttaa

SEQ ID NO: 775730 - DNA, 603 bp, Homo sapiens
ggagtagtgggaacagcagctgtgagatgcatggcccactcacacctccctcttgcaggatcagtggtggtacatgtcatgggggtacgagaaggtgtctggtctcccctctccctctctaccmcagtggtgggagacccttggcagagttcaggtctctgtgggctgggccctctgaagggcacccagccacagctaaaatgcttaggcaggggcaagatggttgtgtgtcaatggggagggcaggcccccacagcactagcaatggaagctgacaactgtggagcatgcggcccattcacagataatttgtttttaatttaaaagatatctcaaagatcaagtgtatatttcctccaaagttaaaatataaaatattttgaaatattctgaactttttttggttaaaatgctgacacattccttaatgtggagcccttctcactatgctgggccacagtaatgaactgtaaatcccaagttataaaaaatgaaattgtgctggaagtatctatcctagtagatgaggcaaaagacatgccctgacaatgcatgctgacttgtaaagtcctttttaattgcactgagcatcatttaatatat

SEQ ID NO: 775731 - DNA, 603 bp, Homo sapiens
ggagtagtgggaacagcagctgtgagatgcatggcccactcacacctccctcttgcaggatcagtggtggtacatgtcatgggggtacgagaaggtgtctggtctcccctctccctctctaccccagtggtgggagacccttggcagagttcaggtctctgtgggctgggccctctgaagggcacccagccacagctaaaatgcttaggcaggggcaagatggttgtgtgtcaatggggagggcaggcccccacagcactagcaatggaagctgacaactgtggagcatgcggcccrttcacagataatttgtttttaatttaaaagatatctcaaagatcaagtgtatatttcctccaaagttaaaatataaaatattttgaaatattctgaactttttttggttaaaatgctgacacattccttaatgtggagcccttctcactatgctgggccacagtaatgaactgtaaatcccaagttataaaaaatgaaattgtgctggaagtatctatcctagtagatgaggcaaaagacatgccctgacaatgcatgctgacttgtaaagtcctttttaattgcactgagcatcatttaatatat

SEQ ID NO: 775732 - DNA, 620 bp, Homo sapiens
ttgtcttattattttccccagtgctgaattatttgaacttctaaggcctttttatgtgggtgtagaaagataaaatacatcaaactgaaccttttaataaaatttcaatgaagtgataaatcagatagctattgcaaacaatgtagaagtacacttgtgccattaaatgatgcaagaagctcatctagcataaatgagttgtttggaaatcaaagaaacatccctctgtttaatatttcctgcaaattgatccttcaaactctattttttagcaaaataacttgttgtctttgaattgggatatttgcaggtatttatcagcaataaccatgttttcaattacactaaagtctcaaagtttgaaagtacaaacctgttattgtgtatttattgacttttattttaaagtttaatttgtaccagtgaagaactccagtgccttctatattagaaagtaatattaatactttttttgagaacatayatatcagataactgaaatcaataagttgacaatattcttataaaacaaagattgatagaactatgtcatacatgctcaccttttcaaagggggtaagtttgagcttctgcattcccttggtgttttcaagattgtt

SEQ ID NO: 775733 - DNA, 637 bp, Homo sapiens
tacagagttagaagaaaatcctaaaattcatatacaaccacaaagagcccaagtagtcaaagcaattgtaagtaaaagaataaagctggaggcatcgtgttatctcacttcaaactataccataaggctatagtaatgaacataacaagattctactgcaaaaaaagaaaacgggtcattggaacagaataaatatctcagaaataaagccacrtatgtacaacaaactttttttcgacaaagttgacaaaaataaacaatggtaaaagggcatcctatttaataaatggtgacagaaaaattatacagccatatgcagaagaatgaaactggacccctatctctcagcatatacaaaaattaacttaaggtagattaaaaatttaaatgtatccagtctatcattgatgggcatttgtgttgattacatcatggaatactatgcagccataaaaaagaatgagatcatgtcttttgcagggacatggatggagctggaagccattatcctcagcaaactaatgcaggaacagaaaaccaaacactacatgttctcacttataagtgggagctgatcaatgagaacacatagacacagggaggagaacaacacacactggagcttgttgggcaggtg

SEQ ID NO: 775734 - DNA, 582 bp, Homo sapiens
atttacaaggaactcaaaccactcaaaagataaaaagaaaatctcaattaaaaaatctgccaaagacatgaacagacacttctaaaaggaagacataaaagtgtaaagcaaacatatgaaaaaattttgtacattgctaatcatcagagaaatacaaattaaaatcacaatgagatacctactcacagccatcagaattgctctgattaacaagtcaaaaaaygacagatgtcagtgaggatgaagaaaaaaagggagcactttatactgtgcatgggaatgtaaattagcacaaccacggtgaaaaacaatatggagatttctcaaatcactgaaaatatagctaccattcgacccagcaatcccactactgatatctactcaaagaaaaagaaattgttatatcaaaaagacacctacactcatatgtttatcacaaaacagttcactactcacaattgcaaagtcatggaatctaagtatatatcagtagacgactgaataaacaaagtgtgatacatgtacacaatggaacactaagtaaccataaaaataatgaagtcatgtcctgagagacaacat

SEQ ID NO: 775735 - DNA, 582 bp, Homo sapiens
atttacaaggaactcaaaccactcaaaagataaaaagaaaatctcaattaaaaaatctgccaaagacatgaacagacacttctaaaaggaagacataaaagtgtaaagcaaacatatgaaaaaattttgtacattgctaatcatcagagaaatacaaattaaaatcacaatgagatacctactcacagccatcagaattgctctgattaacaagtcaaaaaacgacagatgtcagtgaggatgaagaaaaaaagggagcactttatactgtgcatgggaatgtaaattagcacaaccacggtgaaaaacaatatggagatttctcaaatcactgaaaatatagctaccattcgacccagcaatcccactactgatatctactcaaagaaaaagaaattgttatatcaaaaagacacctacactcatatgtttatcacaaaacagttcactactcacaattgcaaagtcatggaatctaagtatatatcagtagacgaytgaataaacaaagtgtgatacatgtacacaatggaacactaagtaaccataaaaataatgaagtcatgtcctgagagacaacat

SEQ ID NO: 775736 - DNA, 629 bp, Homo sapiens
gtggttcatccaataagtcaaaatttcttaatataaaactgcccacatagttataacaagggtatggtaaagagtgtggactacaaggtaactgaaatcggagaccattaaaagattttaaggatatttctcagaaggggcatctaccactttgtttttctaataaaacatataaacaaatatatatgcatatgtatacacacactcatgcacatacacacacgttcttcrtaaaaattaaaattgtctaaacatatatatgtgtgtatgcatgtacatgtctctctgtgtatgtttatctgtatctacatagatatgtgtgtacatatgcatctataatttctctatatatctatatctctacataaagaaactatagatatataaaatgatatgtagagatatattgtgagaaactcttagaaattttctcctaaagaatatgaactcaaataattaaagctacattttgttttctctaaaacttgctgcagagctggtcaagttcacaagatacctagtaattctaaccttttcaacttacaaatgaactaagagatgatctgagatgttaatttaatttactcccatgcatattgaaaagtagtaaataaggacaaaaacttgaa

SEQ ID NO: 775737 - DNA, 609 bp, Homo sapiens
gcgagatggaatatagggttggataagagagagtttattgatatgagtgtactctcctatagtattaaaggacttaacaccctagaaaggcccttagaggtggtgctaacagtggttagagtggctcttgaaagcttagaaagagtgatggcacacactaagtgaagtgaaaatgccagaatcgatatggccatatgactatagaataagtgaacaaaaggctcagaaaaaagaacattctagagtggatttattaktaaagctggaaaactctccagtcagatcaatttctcagaaggtcccagaagatactctaagcagtgtgcattagaatactgaattagggtactgagagatcacttcctagcagggtgctgtaaaacatagagcatgtggtgactgtggagagggccacagtgaggtggccactaggctagggtaaggaatgtgggcttgcaaggacctacaagctctggacaagcagctgcagtggagcaccactggattttttccatgtctacttctggaagcgctgtggtaggagcaggaagactacaacacagcagcaccccagaagcaatatccctccacaccctctactgataaagc

SEQ ID NO: 775738 - DNA, 599 bp, Homo sapiens
acatatgcagtagcaaagtcttgcaattcttttggtttgtaagctacaatgtcatgagttatagtgtgtcccggccccttggagcatggtgaaatttcaccctagttatgggtctagtggcgacaaagtgtggttatggtaagtcttgagagaaatgagcatccattttcaaggctcttgccccaggtgaggttatcacaggatttccaagcaaggtaggcaacaaagaggaacctaattctctagataaggaagactcaaaatcacatgggaattcccaattttcagctttctctggatccaaccagatgccgacattytaagtttaaggatttcatcattttctaatcaatgtcttcaacttcacattgggaaacttgacaagactgtggatttaacttttggaattcagcagtccatgcaactaaatggttgctttttattttcagcaatattagcactgtggctacaagaaaaaggaaatcctttcaaagctgtcacggaagttctctagttctcagatagtcacttaagctaaaagttgaagaatctgagcatgtcattttcttttttgtaagtactcaagtgcatttaaaaaa

SEQ ID NO: 775739 - DNA, 581 bp, Homo sapiens
gctgctctttttgtttttagttctgcagatgattctgttgcacactacactgtaagaatcacctcagtttcacagatgaagaagctgagccacgaaaggctaattaacacctcctgattccttatactcttgtcactttgccagggagagcctttgtctacattgattacccatcatctggaaaatgacaataatgaccaccaccactcccctcagaaatcmcaactaaccatctaggtcctccgttggtggacctgtaagctagaacagcactttaagtgatggagttaggaccacttcagaaaagtcttcatgtgaaagggaccccagacaattgaagagaggcctaattcagaaatctacttagaaggtcctcccaaaaactgaagcagacctttgttgttgttgtttaaccaggccagatcttaggggtaaacaatagatttacagtgacaataaacagacatgcaaacacacacacacacacacacacacacacacacacacacacacagaagttccttgactttgtccccactcactctatagccactccagcctattctcaacccccaactcta

SEQ ID NO: 775740 - DNA, 581 bp, Homo sapiens
gctgctctttttgtttttagttctgcagatgattctgttgcacactacactgtaagaatcacctcagtttcacagatgaagaagctgagccacgaaaggctaattaacacctcctgattccttatactcttgtcactttgccagggagagcctttgtctacattgattacccatcatctggaaaatgacaataatgaccaccaccactcccctcagaaatcacaactaaccatctaggwcctccgttggtggacctgtaagctagaacagcactttaagtgatggagttaggaccacttcagaaaagtcttcatgtgaaagggaccccagacaattgaagagaggcctaattcagaaatctacttagaaggtcctcccaaaaactgaagcagacctttgttgttgttgtttaaccaggccagatcttaggggtaaacaatagatttacagtgacaataaacagacatgcaaacacacacacacacacacacacacacacacacacacacacacagaagttccttgactttgtccccactcactctatagccactccagcctattctcaacccccaactcta

SEQ ID NO: 775741 - DNA, 604 bp, Homo sapiens
gctagcttgttgaatctaggagaaagatgagaaacatggtgagcagagctgccccagaggacatgcagcttcaagcagaccacctagtctagcccagtctaaatcacttgacccccagccagcctggagaggcatgacaaacaaatgcttattgttgcatgcactgatattttgtggtggtttgttgcacagcacggtacctcactttagccattaaaatgagagtggaagtgagatgtgtcaagtctrggtgggagtaaaatctttaagagtcactgcatattgcctagtccccttctccctattacagagaggatggaagtacatgtcaaggcagagcctctactaccctagttcgctgagtgactgtgtttagcagagcccttcattacccacactaaacatattgcctgagaaagaaagaaaaaatctgtggtgttagctaacgttgtttctatttttgatactgcagcataatgttgtttgactgatacatgaaatctccatatgattttgaggtaaggaatgacatgatttgtctcatatgtaaacgactttggctatgttgagaatagactgaagtgggtaggggcagaggctagga

SEQ ID NO: 775742 - DNA, 634 bp, Homo sapiens
ttattagtcttttattgctattatgaaagcaatgttgtttttttttgggtgctttaagtaattggtccttgtccttggctttcaggagttcactatgagccaaaatgggatttattttgcatgtatcttttctagtttcttcagaatttcttgattttgtgggttagttttagaaagtttttggttattatctcttcaaatattccttcttcccctattccttgtctccattctttctgatacttcaattacatgcatgttacacatttttaaaactatgtcatatatattttatgctcttttttgcatttatcttttctttttttgtgtgcttcagttagcatatttactcctgggaggggaatacctgaaggcttgtgccttatttctcctgaacttcaccccatgtgccttttctctttgtttattgtkatctgtgtctttttgttataataaactgtgaccatcaatataaccacttctaagtcctgagagtccttctagtgggtcatcaagcttgaggaggttctcagagactcccaacatgacaacacttacaaaagcaacaaaactaaaaagtatcctagaatatatctaaaaaaagatgtgtgatacctctagataaaaaatcatg

SEQ ID NO: 775743 - DNA, 613 bp, Homo sapiens
tctttagaaaatttaggagataaatttatttttaaattttgaaacacaaaacaattttgaatcttgctctcttaaagaaagcatcttgtatattaaaaatcaaaagatgaggctttcttacatatacatcttagttgattattaaaaaaggaaaaatatggtttccagagaaaaggccaatacctaagcattttttccatgagaagcactgcatacttacctatgtggactataataacctgtctccaaaaccatgccataataatataagtgctttagaaattaaatcattgtgttttttatgcattttgctgaggcatgcttattcatttaacacctatctcaaaaacttacttagaaggttttttattatagtcctacaaaagacaatgtataagctgtaacagaattttgaattgtttttctttgcaaaacccctccacaaaagcaaatcctttcaagaatgrcatgggcattctgtatgaacctttccagatggtgttcagtgaaagatgtgggtagttgagaacttaaaaagtgaacattgaaacatcgacgtaactggaaattaggtgggatatttgataggatccatatctaataatggattcga

SEQ ID NO: 775744 - DNA, 654 bp, Homo sapiens
actttttccttgagagaattaaccctttttaaagagaccaccgagaggcaaagtgatgctttttatagcttcccagggagaagggcaacagttggagactagggactgtcaggagtaaggataccagcaactgccctgctctttggactgggacccagaagaacatcagactaataataaagatacagtacattaattctcacaaaagctacattctatatttgggtcatctggaattccagaaaaaaaaatgtaaattttttgaaattgattcaaaatgattgtrgattttgtggattgttagcatccacaggtaccaggcgctactttctactttctggaggaaggtagcatcctcctaggccacaaatcattccccaaaactaattatgaaatgcaacatgtggcacacacacacacacacatacacaaaaccaggtacaacatcaagagaagccagtagaaataataaacaatagaattaaacaaggacagtctagggatataagaattatcagacacagacattaaaataagtcagcttactatgttcaggggatagaggcaatattaaaacttcaacagataatttctgtataaaatctaaaataaaaaatacattaacagaaatcaagaactcaaaatacgggctta

SEQ ID NO: 775745 - DNA, 631 bp, Homo sapiens
acaccatgattgagtgaaatttatttcagacatgtaaggctggttcaatatttgaaaatcatttaatataattcaacatatcaataggctaaggcagaaaagtcacatcatattaattgatgcaaaaataaaatcattggacagtacccaatagccattaatgaggaaaactatcagtacattcaaaatagaggggaacttccttaacytcataaatgcatctacagaaatcctacagctaacattatacttaattgtgaaaaactgaatgcttttcctctaagtttgagttctagacaaggatgttcactctaaccattgctattcaacatatttctgggagttcttgccattatagtaaggcaataaaaagtaatagaaggcatacagatttgaatgggataaataaaactatttctatttgcaaatgacatgattgtctacagagatgatcccaacaaactcctacaactaagtgagttcaatatagatacatgatcgatacataaaatcaattgaatttctgtatactgacaaaagtgaaagccagactagaaatataatataacttacaattgtttcaaacaaaataaaatcattataaaactaaagaaaaatcatgtaccagatc

SEQ ID NO: 775746 - DNA, 587 bp, Homo sapiens
tcagaaaataaatttctgcttatttcatctcattttcctctggctttgttcactcagcataattcaggattcatttgtgttactgcgtgcatcattaattcatgtttttatttaagaatagtattatattatatgtatgtatgcaaattttttatccaataacgtatcaatccacctattttcaatttggggctactagaaataaacctcacttgccaaacttttttccaaartggttggaccattttgcattcccactgtcagtatataaaagttctaattgcttcaaatcttcaccaatgcttattaaagtcagtctttttaacttcagacattctaataaatgggtagtgggtttagctatatttccctaatgatattgagcagctattcattcccttactttgccacctatacatcttcttatgaaaagtttttattcaattatgttgtttatttattgaattgttttttctcttcttatcatagtgttttaagaaaagtattgtttatatataataggcaggagtcctttttcagatatatagtctatctttggtttgccttttcattttcttaacaattgc

SEQ ID NO: 775747 - DNA, 641 bp, Homo sapiens
acatatctttttaaaatttaattcctaagtatttcatattttaataccattataaatggtacttttactattttaacttctgatggttgtttgcttgaacataaatatgtaattgattacctattacataaacaggtaattgtaaaagataccttgcatctaaaaccttaataaacttacttattatttattgtctcttttttgtagataccctctaattttctacgtagactaaaagttgttaagatgtcaattctgcctaacagcacctataaattcaacacaatctgaatcaaaattccagcaggtatttttatatgaaaattaacaaaatgatcctaaaatttatatgaaaatgaaaaggatctagaacatataattcttaaacccccaaaacaacccaaawaaaaatgggcaacatatttggacagacacatcaccaaagatatacggaaggcaaataatcacaagaaaagaaaattcattgcattagagatcagagaagtataaattaatataacaatgagatatcattacaaacctattagaatggctaatgggtttctggctaaaaagactgacaataccaagattaggtgaggatatggaacaactggaactcctatacactgttcacagaa

SEQ ID NO: 775748 - DNA, 455 bp, Homo sapiens
  misc_feature 455: n = A,T,C or G
agaggtctaggtctactcagtggacctcagtaagctgccccttgatttcatgtcaaaacactcctatgaccattccttctccatgatgcattgtgctaactgcacataaatttgtctttgtctattaacaactcccacctaccctctacctatctggaatcccattttctcgttgtaattgggacatgccatttttrcagcatttccattgtcttctctggaagtcagaggacagctaccaaggaaggccccttccccagtgcttggtgaagaggtgttctccaaacctcctgataggtagtagcagagctggttgctaataacagggctttaaagagacaaatttaaaagccactgccacaagtttctgaatgctgaaccctagcattccaccggaagaccacaactgtgctggatacctcattctgccttccagcataccaagagagtgcatn

SEQ ID NO: 775749 - DNA, 585 bp, Homo sapiens
aacctctctgtttaatacaagaagagcagattgatgttgaacatgagacaaactttttttttttaacactaaaacaatttattctcatactatgtaaggccaaaggtaaccattaaagatgcttgctgaagtacaccaaaagaataataaacttagcaaatcaatagatttctcttggttttytaaggtttaagttttcttataccttaaatatctgatatcagtcaatattcatagaaactactcagatatttcaaacaagaaatttaatacagataattaattacaaaagagggagaaggataacaggaacaaagaggagaagggaaagcttctcagtgtaataactgtagcagctcctatacaaccttaggtgtgaaagagaagtagaaaaaactgatgtcaccagaactcatgattgctctgctgttgaggctgcttgagcatctactgaagctatcattgctaatgtacaagccattgatacttccattgtgtgagaattctgcactgtactgctagtctatatatatacaattaccagtgcattgctagtatatacatacatatatatatacatgtata

SEQ ID NO: 775750 - DNA, 616 bp, Homo sapiens
aaatttaatacagataattaattacaaaagagggagaaggataacaggaacaaagaggagaagggaaagcttctcagtgtaataactgtagcagctcctatacaaccttaggtgtgaaagagaagtagaaaaaactgatgtcaccagaactcatgattgctctgctgttgaggctgcttgagcatctactgaagctatcattgctaatgtacaagccattgatacttccattgtgtgagaattctgcrctgtactgctagtctatatatatacaattaccagtgcattgctagtatatacatacatatatatatacatgtatagataaaatagtgttataattttattttctaattgtttattgctgtgtaaagaaatgtaattagtaacaataagtacctgataaacccgataaaccttttctcaacatcctaatgattaatctgtggttttccttcgattttctatacaaacatttcacctgaatgtaattacaactcttccattttttagatagtttctttttttgttgttgttctaggtatttttcctttttgtatagctctttaaatttcttggcttaaaactattttttaatatccacttctaatcttct

SEQ ID NO: 775751 - DNA, 638 bp, Homo sapiens
cccaaactctgactagttacatctctttttcattcagatctcagataaaacccggcctcctgaatgaggacttggtggaccacacaatcacaagtagccacccagttattctctgttacttctatttattttaagtctctgtgtagaatttattttgcttagcatataacactgtggtataattttctytcttgtttgcttctttgtatttatattttttttatataataaccaacttccccattccctagaatagaagttccataagagcaagacttggtcttgttcactcttggatttctttcacctagaaaaataccgaacatattaaatggttaataatgcttaataagtatttgttaaaagataaatgaaaagaaaatatggttattgaggtccaagtaatttcaaaactgttgtcaacactatccttgtgcatatatcctgtacatgtccgattaaatgccaaaagtttaattattgagtcaaaagtatgtgcaattttgatagttatttccaaattgcctatgaaaaaagtcatactaatttacattttaagtgaattcctcgagtcttcttttaagtgaaattatgacatgatatttgagacacattctctcaacttagaagcactgtgt

SEQ ID NO: 775752 - DNA, 323 bp, Homo sapiens
atgacaaaataatatacaaaaggaaatttttcatctctgcaggatatgatcagcttggggcaatcaatgtcaatgaaggtcaggatgccaaatactgtggctggagttgtaaagaagctgactaattttcagatcaacgataacaatgacaatagaatacytaagtgagcagtgctcaaacccaaactcaagatacaggaaaatatcatatcttaagtgatatgttatcattaacatcatattcatattatattcatattataacatattatatgatgttaatgataatatcatatattaaataatattatttgtgatatggt

SEQ ID NO: 775753 - DNA, 323 bp, Homo sapiens
atgacaaaataatatacaaaaggaaatttttcatctctgcaggatatgatcagcttggggcaatcaatgtcaatgaaggtcaggatgccaaatactgtggctggagttgtaaagaagctgactaattttcagatcaacgataacaatgacaatagaatacttaagtgagyagtgctcaaacccaaactcaagatacaggaaaatatcatatcttaagtgatatgttatcattaacatcatattcatattatattcatattataacatattatatgatgttaatgataatatcatatattaaataatattatttgtgatatggt

SEQ ID NO: 775754 - DNA, 632 bp, Homo sapiens
atgatggggtttttctggttgttgttcatccagtattgttctgcctttaggctgcctcttcattttggatccatccacatcaaaatgaaaaagaactgccatcaagggtctgcttatatagtgagtgggctttgagagggatctacagaaaactttttttttgaaatggcatctatttagtagaaacagggctatgttcccaccttctttgcrtctcctccccatcttagccaaagaaaaagcaaaagggaagcttacttgctcaaatatatcaattcaggaaaagaaaattagtcttggtttgtgtttagtaatttaatgtcaagcaaaatcattttctgtataatctaaattaaagccttgctatcatgggaaactgatttaaaaaaaatctccacccttctgcataaaaatacttcagaatgataagcgtttggatgtgcaaccattgattttattcagatgaatacaaaatatacttagagtgtagaattaatgatgtcaaatttaaaataaggttttgttttcagcatttactagagtgggctttatctgtccaattctttgagtccctgctgctagccactcagaaaccagtttttcccatattacccactgagctgactttcatt

SEQ ID NO: 775755 - DNA, 586 bp, Homo sapiens
tgatttggtaagcaattatgaacacacctgaaacattttttaaattcccctaagaaatagaggatataaaaaagaaccaaaggtaaatattaaattgaaaagtgcaataatagaaattaaaatcccaatggatgagctcagcaaaagaatcagagggaaaagtaaatttaaaactagaaaaacaaaaattatttaatttgaggagcacagagaaaattaactgaaaaaacakgaatagagcctcaggacctgtggaactataaaaaataggtttaacaatcatgtcattgaagtattgaaacaaaaaagaaagatggtggagctaaaaatttgctcaaagaaataattgcttaaaacttactaaatttggaaaaaacataaacatgtagattcaagaagaagctgagctaaccctaagcagagtcgattcagtaaaatccacaccaagacacattatagtcaaaattttgaaaaatgaaaacaaagaataaatcttgaaagaaacatgttatatgtagcaaaataaataaataaataaagctagaatgatggtgaatttcttatcacctatcatgtaaacctacag

SEQ ID NO: 775756 - DNA, 621 bp, Homo sapiens
tacatatagttagagccttcaacattgctctttcaaaacataagagaactagaaaaatcagcaaggatgtggaaaaactcaacaacacgatcaacaatcaggatctaatcacatttatgtgaaggattttcaagtttctagggaacatataccaatatmactatatccagagacataaaataaacctcaacaaatttaaaagaatgaagataacatagattatattttctgactaccatggaaccaaactagaaatcagtaacagaaagataagaaaatctccaaaaactggaaagctaaataacacacttttaaataattcatagatcaaagaagtttcaaggtaaattaaaaaaaatacattgagctggaaaaaatgacaatacaacataacaatagttgtaggacacagctgaaatactggggaaaaataaattcatagcattaggttcacacattagaaaagtgaaaatgtctcacatgaataatctgggttcccatctcaagacctagaaaaggcaaaataaatccaaagcaaagagaggaagaacataataaatttaacagcagaaatgaataaaattgaaaacagaatgatgacaaagaaaagtcaatgacaca

SEQ ID NO: 775757 - DNA, 561 bp, Homo sapiens
tttcaactacataacaaccatctacaaaaaacctatagttaacgtcattcttaatgttgacagtagttctctgtaagatcaggaattaggcaagaatgttactctcgtgactcatttaaacatagtactaaaagttatcctagtataataaggcaaaaaaataaagcatgtagatcagaagtgaaaaaataaaactatccttatttgtatatcacatgactgtttacatagaaaatcccagrctgggcgtggtggctcatgcctgtaatcccaacactatgggaggccgaggcaggcggatcacttgaggtcaggagttcaaaaccagcctggccaacatggcgaaaccctgtttctactaaaactacaaaaattagctgggagtggtgttgtgcgcctgtagtcccagctattctgggggctgaggcaggcgaattgcttgaccctgggaggcggaggttgcagtgagcggagatctcgccgttgtactccagcctgggcaacagtgtgagactccatctcaaaagaaaaaaaaaaaacccaaggaatcttaaaataaaa

SEQ ID NO: 775758 - DNA, 608 bp, Homo sapiens
atcatttacaaatacttcaaaaagtaaaaaagtcagtctaccaaaacatgtgcagtgcttgcatgctaaaactacaccttgcttattattattattttttaatttaacctaaataaatggagagacataccacatttgtggataggaagattcaacatagtaaatatatcaattattctcaatttcatatgtaacatattgaaattccaatcaatatctcaacaagacttttacrgacaaaggggaacagttttcaaaaatttatatggacaggcaaaagaactagaatagctaagaccatttttataaataagagtaaattgggaggaatcactctacttgatttcaaaatcatacagttacagtaatcaaggctgtacgatactggcaaagggaaagacacatagatggatggaatagaatactcagaaataatcctatgtaaatatacccaacttatttttgacaaaggaattaaaaagagtcaatggagaaaaaatagtcttctcaacaaacattgataaaacaaatggacactactgacaaaagaaaaaataaacccaacctaaacctcacaccttatataaaaattaactctatatggttca

SEQ ID NO: 775759 - DNA, 637 bp, Homo sapiens
gggtgtggctgatgtgggatcatccctcaagcctgggaggtccaggctgtactgagctgtgatcatgccactgcactctagcctggatcacaaagtgagaccctatcttaaagaaaaaggaaaaaaaagttcagtgtcattagtcactggggaaatgaaaatgatgaaaacatgattatagtgagatattactacctattagaatagctaaaataaaaaatggtggtaacaccaaatgaaggtgagaatggggagaaactggatcactcatacattattggtgagaatgtaaaatagtacagatactctgaaaaagtttttcagtttctttacaaaaagtaaatgtgcagcaaccacatgaccaagtaactgcaaacctcggcattttctttwtttccccagaagaagtgaagacttacggtcacacaaaaacctgtatatgaatgctcctgtcagctttattcataatagccagaaactggaaacaacttaaccactgaaggacatacagagtcaatgactatcattttacagtagggaaagtgatgcttaaagagatcaagattagaaaaagaaagaaaaaagctcacgccagaatcacacagcaagtgatcagtagtgtcaggattcacaccca

SEQ ID NO: 775760 - DNA, 634 bp, Homo sapiens; identical to SEQ ID NO: 764507

SEQ ID NO: 775761 - DNA, 571 bp, Homo sapiens
tttaggacatttttctagtggagtgctaacatcttatcaagaagtgtatgcccaaaacttttcttgttgattttgaagagttgagatgaattttctttgttgatttttttcattcacttctctttgaataattttcttcwttcccttcattttcttcattcgcttctctttgaataatttttaaattaggttttggatattctgaatctgtctaccatgtctctaaatgtttctctaaaatttcccttctctttatctttttggactatgttctacttttctttgcatttatgtaacctattattaacatgtccttcagctgtgtccattccattattcagtctctagttgatctgttattttgtgatcattttattcattttcaggatctcatttattcttttaagtgatcctttttaatagttgcctttttgtagatgactatttcctcatatttctctaaggaaagaagcattttttttaaagctttttgtgtttgttttttacattacatttactatcttctgggacaatgtttctattgcctacttttgtttttctctttgaattt

SEQ ID NO: 775762 - DNA, 571 bp, Homo sapiens
tttaggacatttttctagtggagtgctaacatcttatcaagaagtgtatgcccaaaacttttcttgttgattttgaagagttgagatgaattttctttgttgatttttttcattcacttctctttgaataattttcttcattcccttcattttcttcattcgcttctctttgaataatttttaaattaggttttggatattctgaatctgtctaccatgtctctaaatgtttctctaaaatttcccttctctttatctttttrgactatgttctacttttctttgcatttatgtaacctattattaacatgtccttcagctgtgtccattccattattcagtctctagttgatctgttattttgtgatcattttattcattttcaggatctcatttattcttttaagtgatcctttttaatagttgcctttttgtagatgactatttcctcatatttctctaaggaaagaagcattttttttaaagctttttgtgtttgttttttacattacatttactatcttctgggacaatgtttctattgcctacttttgtttttctctttgaattt

SEQ ID NO: 775763 - DNA, 542 bp, Homo sapiens
tctttattttgggttgccagtcttttaattgttttttaattgttttgaagcaaccttttatatattctatacaccaataatgggtaaactctggactatgggccaaatctgatttgccatattttggtgaatgcagtattattaaaactcagccacacttacttccatgctacaagggcagagtttagtagttgagacagaagctgtatggcttgcaaagtctgaattatttactatctggccttttacagaaaaggttttctgacctctggcacccactaatcttttgctggtcatatatttagcaaacatcttttatctttgtatggcttgccttttcamgttcttgatgctatttatttgataagcatgatttcttaattttaatgtgctcatgatgattgctctgtgcatttcaattataaataaactgcccttatcctaaattcatgagaatattctctggcattattttctaagaaaacattttgatttgcttttcacatatatttccataatctaattggagtttttatgaatag

SEQ ID NO: 775764 - DNA, 584 bp, Homo sapiens
aggatctttttaacagccagctctcaagtaacaaatacagcaagaactccctcattcttgacagagggcattaatcttttcataattaatccacccacatgacccaaatacctcctaccaggccctgccttccaacattgccaccttgggaatcaaattggaacatgaggtttgaagaggacaaacatccaaatcatagcacatggaccctgaatgataatgcattaacgtatagaaatgtgaaaggaaagagcattcttaaaaaaaaataaataaaataggataagccaaaggggaaggttggggtaagtgagaagaaaagcatgtagaatatgtattgaggtactgctgctatgtgaatttattagcagagaaaggggtacagtgtgatttttttaaaaaaagactgggcattttcagagggcctggtggyataggaaggccatttttggattaagtagtctgatttgattctgaaatttatgagtcttaaatattcctaaaaaagaagtgcattatcagaagataattccaagttcattatgaaggagctagtggaagtagagtggcatatttggctatga

SEQ ID NO: 775765 - DNA, 687 bp, Homo sapiens
aattaatagggtcagaaatgggcccctgatcccaagtcaatcataggtactgggacagtggcccatgaagtggtctggcccaaaatgctgtcctgtcctgcatggtgtctaaccactccaatcctcacttgtggagaatgtggccttcagatctacccagggattccaaagatggtagacagtayggagctgagaaccacactaaagtaagcagagaaagagatcagtggatctctcggacacccagtcttggactcagtggatgtgctggggtgggagcaatggatatcagccgctgaaagagtgagaagatgacctggtatccccatgcaatgaacacaggctgcacacccactagagctactgaatgcccccaaatattccagttctttctgatccctagctgtgtgcagaaggacttcttctcatttccctgggtattattaaaacagtgcctattaactgaggcaagctcagtcttggctccttgtagcctaaaagtgcctccctgattcaccaacatgataactctaaccacgatggcaatccctgttcatggtgcatccactggtgtgccatgtggcttcgtgatgggatgatcagtcccattatgttgtgctcactcggaactgcaggccccctttccagctctctcaggggctgctctaatcagagctagatgatgca

SEQ ID NO: 775766 - DNA, 608 bp, Homo sapiens
aaaaaaatttaaagttgaatagaaattattactactcttttaaaaatgttatctaaacaagggacccctacatttttttaaaaaaagaaatatttgggatagaagaataatccgatgctacattagaagacagaatagccatttttgttttctttttcaawtttattcaattaaaatatctgctaattaaatatcaaaacaaagtttgtttttgcaaaagtgatatgagtagtaatggggttttacaatgaaaacatttgcctccatcctaggtgggaattcgtaaaggatgaaaccctccaataagaaggagctttcctcaacagaccaaggtacatattgggtagaatgaaagatttttaaaaattgagtgttgaatatgtaagtatcttccccaaagagaacttgaggtccagaaacagaaataatgtgttatgcaatttttagtgttctgcagactttgaggcttaggaaatatctgcttatcaaaaagtttgttgcctgaatatttaccttaaacactaattggtgtgaactttttctgatgccatgatgcctaaacaaatactatgaacagaagaagaaagagtccttattttgaatttcta

SEQ ID NO: 775767 - DNA, 416 bp, Homo sapiens
aaatagtattttaatgcattcagtaatcaaaagctactttaattttctatcaccatcccattttattggcaagttgtcttggtattagaaatacttagagttttaggaggattaattgggataaatcaagataggataatattggaggaagaagattagttttagtgtgttgctataattcaggctataagaaatagggcctaatttagacttaraaaaaggaatagaaaggaggtgacatgatatggtgtggaatattctggcgttaatatgttagttctattaaaagattgtgcattagctaaaaatctttgaaaaaatcaagtttcatttttgatagaaaagtaaaaaggaactttattagataggcagttcaaacatctaggaaaatacttattcatcctttcacccattta

SEQ ID NO: 775768 - DNA, 446 bp, Homo sapiens
acatgtgattttaaacaaatacactctgatacatactgccatttaatagatgattttaattaacttgattgtgtcatgtgcactatatatttggcataattttataacatatatctgatttttatttacccaggttatttttatttgtccttttctccttttaagtatattacttttgattagcagaggttttttttttccttttttatttctgatttggaaataatgcatagtgtgtcgagtctaataattgattctgattaccacctaccctattgtwtattatttaaaatatttaattttcacatttctcctcaaattagatattatattttatactgttcaatgtttatttatatttataaatatatatctaattaatataaaatatatatttaattagtatatatatttattcatgtatatttcaggttatttgtttgtca

SEQ ID NO: 775769 - DNA, 446 bp, Homo sapiens
acatgtgattttaaacaaatacactctgatacatactgccatttaatagatgattttaattaacttgattgtgtcatgtgcactatatatttggcataattttataacatatatctgatttttatttacccaggttatttttatttgtccttttctccttttaagtatattacttttgattagcagaggttttttttttccttttttatttctgatttggaaataatgcatagtgtgtcgagtctaataattgattctgattaccacctaccctattgtatwttatttaaaatatttaattttcacatttctcctcaaattagatattatattttatactgttcaatgtttatttatatttataaatatatatctaattaatataaaatatatatttaattagtatatatatttattcatgtatatttcaggttatttgtttgtca

SEQ ID NO: 775770 - DNA, 469 bp, Homo sapiens
atcttacaggagaaaatcaaggtcagctgggctgcattccttctggagattgtaaggggtaaatctgttcttcaccttttccagcttcttaaagactgcccacactccttgggtggcagtacccttctagtaattgccttactctgcctccattatcgcatcaccttctctccttctgcttctgtcatcacatctcctgctgtgactgttgtcttcttgcatctttmtaatgaacactttgaattacactgagtcatccagattatccaggataatctccccaggatatttaatttaataatacctgcgaagtcccttttgctatggaaggaaacatattagcagattctgaggactaggatattaacatctttggaggtgtgattatttagcatctcacatagaaaaaggacttttgtattaataagaaaataacacacaactgcatataaatgtatgcaaaaaagat

SEQ ID NO: 775771 - DNA, 382 bp, Homo sapiens
cccaaccctcagcttttttccccaacccattctgctccatccagtggctactaggtggctgtttttcacagctaccatggttatatgtctgcttatttcccagggtgccatggagctggggagaggagggtgtgatttcagcaagttaaaatgcaacggtactcattgctcttactgaaattcagcttttttttttcttagtaaaactygacattgttgcaattctttagttaatctctagtgttctgaaaaagttgacttttgacatttttttttccagtgtttttattgatttcatggagtaggtttccaccattctcaaaggcaagtcttgactcttattttttaccagaaagtaagcgtaatgtttcagtgatctgta

SEQ ID NO: 775772 - DNA, 651 bp, Homo sapiens
aacattgtgattattgtatctgacattgtgtggcttaatttttgtttatttattttatttatttttatttatttatttacttttttgagacagagtcttgcctgtcacccaggctggagcacaatggtgcgatctcagctcactgcgacctctgccttctgggttcaagtggttctcctgcctcagcctcccaagtagctggaattacaggtgcctgccaccatgcccgactaatttttttgtatttttagtagagatgggatttcgccatgttggccaggctggtcttgaactcctggcctcaggtgattcgcctacctcggcctcccaaagggctgggattacaggcatgaaccactatgcccggccggcttaattttttataagatatgtgtatcctcttaaatcgtctttttaaaatatgctatttatccccttattattcttccagtcaacttgagaatcactttgttacaacycttccacctctagtccacacccctaaaaattgagatataatttggttgtgcagtaaatctgtagattaattgacacatttcaggctctggtatttttcaccaaagaagatatgtatttttgttacttatttgcctttcatgtcttttggtaaaatatttaataatacttccc

SEQ ID NO: 775773 - DNA, 692 bp, Homo sapiens
aatttgctaaagagattgataccaaaaatataaccaaacataaattatggaactgaagaatttattaaatgaaatgcaaaatatgttcaaaatcttcaacagtagactagatcaagcagaagaaagaatttcagatctagaagataattctttatataaaataaaagaaaaaacaactaaaaaaagaatgagcaaagcctttattacatacggggcatcataagagaccaaattttcaaattataagggttccagaaggcaaaaagaaataaaaaagagtyggaaaacttacttaatgcagtaagagatgaaaatttctcaagtccaatgagtgatttagacattcagatacaggatgtgctgagatccccaaaaggacacaatgcaaaaagagtattctctccacggcacattatagttaaactatctaaatgtaaacacaaagatttctataaacagcaagagaaaagcatctagttacctataaaggaatcatcatcagactaacagtggatttctcagaagaaaccttacaggccaggaggtgatgggatgatattttgaaagagctgaaacaagaaaaaaaaaaaacctgttgggcaaacatactatatccagcgaaattattcttcataaatgaaggagaaatacaatctttctcatacaagcaaaagctgaaagaattcatcacc

SEQ ID NO: 775774 - DNA, 629 bp, Homo sapiens
tgtaaacacaaagatttctataaacagcaagagaaaagcatctagttacctataaaggaatcatcatcagactaacagtggatttctcagaagaaaccttacaggccaggaggtgatgggatgatattttgaaagagctgaaacaagaaaaaaaaaaaacmtgttgggcaaacatactatatccagcgaaattattcttcataaatgaaggagaaatacaatctttctcatacaagcaaaagctgaaagaattcatcaccactacactggccttacaataaattcctcaagggaattctaaacttggaaatagtgagtgacatttgctatcatgaaaacacacaaaagtataaaactcactggtaaagcaaacaaacaaatgaagaagagaaaggactcaaatagtactactgcagaaaaccaccaaaccgcagtaacaaacagtaagagaaaaggaaaggaacaaagaatacacaaaataaccagaagataattaatatgataaagggaagacctcacatatcaataataattttgggtgtaaattgatttaattctttacttaaaatatatagactggttgaatggatgaaaaaaacatgatctagccatatgctgcctacaagaaa

SEQ ID NO: 775775 - DNA, 575 bp, Homo sapiens
aggaggaggctgagggtttccatcagcacaggttggtgattcatgattgtttattttcccgggagccacattaaggtggtttagaaagcaaattcatttgctgcttccccagacagaagctggttcagcgtgagaccatttggggcagcttttatgattttgtagaaaataaayatttagaggtgcttatggaaccaggtatagcttggtctgtttcctgtgaccaacgaattgctctctgcatatgtcttttcatatttttgccaatacatctttggaattcttgtgtcaaatgtaattttgctaggtattgctaaattcctcctctacacagcattcctatcagcaacgcctgagagaatgttcatgtctgatcttaatctttttctttctcaaaggccatacggagcaccctatgaaaagcacccattactcttgagcccataaccttttctgtttccttcatagcatttacagtagaacaatagaaatgacatcccatattttagttgctttttgtttgcattttatgtcttccgttggaccgtaaactccctgtgtgtggaaaaagtatc

SEQ ID NO: 775776 - DNA, 349 bp, Homo sapiens
atgtttattgtagcactattcataatagccaagatttggaaacaacttctgtgtccatcaacaaacaaatggatttttaaaaatgtggtacatatacagttgagtactatttagccgtaaaaaaagaatgagattctgtcatttacaacaacatggatggaactggaggttattatgttaagcgacatgarccaggcacagaaagacaaacttcacatgttctcactttcactcatttgtaggagctaaaaattaaaacaattgaactcatggtgatagagagtagaaggatgattagcagaggctgcaaaaggtaatagggagtgtggggggaggaaatggggaagct

SEQ ID NO: 775777 - DNA, 587 bp, Homo sapiens
  misc_feature 1, 2, 3, 4, 5, 6, 7, 8, 9, 10, 11, 12, 13, 14, 15, 16, 17,18, 19, 20, 21, 22, 23, 24, 25, 26, 27, 28, 29, 30, 31,32, 33, 34, 35, 36, 37, 38, 39, 40, 41: n = A,T,C or G
nnnnnnnnnnnnnnnnnnnnnnnnnnnnnnnnnnnnnnnnngtaaattgccagtgtgaatataacgtggtgcagccacttgggaagaacagtatggcggttccttgggaaaagtaagcatgattcctaacttgcacttgtgggtatacgtcccagataattgaaagtggggctagaatggayattcaatacccatgtacacaatagcgttattcacaacagccaaaaggtagaaacaacccaagtgtccatcagtgcacgaatggatatccatacaatggactggaattctggtttgtgcataatggaggcattaggctaagtgagatgagccggccatgaaaggacaaatcctgtgtgattccacttgcatgagggactgagagttgtcaaattcgtagagaccaaaagcaaaatagaggttaccaggaggagaagtgggagttcgtgtttaatggggacagagtttcagtttggaagatgaaatggttctatgggtggatggtgaggtgttggcacaacactgagaaggtgcttaacatgatggaactgtacactaaaaagtggtaaattttgtattatgtgtat

SEQ ID NO: 775778 - DNA, 587 bp, Homo sapiens
  misc_feature 1, 2, 3, 4, 5, 6, 7, 8, 9, 10, 11, 12, 13, 14, 15, 16, 17,18, 19, 20, 21, 22, 23, 24, 25, 26, 27, 28, 29, 30, 31,32, 33, 34, 35, 36, 37, 38, 39, 40, 41: n = A,T,C or G
nnnnnnnnnnnnnnnnnnnnnnnnnnnnnnnnnnnnnnnnngtaaattgccagtgtgaatataacgtggtgcagccacttgggaagaacagtatggcggttccttgggaaaagtaagcatgattcctaacttgcacttgtgggtatacgtcccagataattgaaagtggggctagaatggatattcaatacccatgtacacaatagcgttattcacaacagccaaraggtagaaacaacccaagtgtccatcagtgcacgaatggatatccatacaatggactggaattctggtttgtgcataatggaggcattaggctaagtgagatgagccggccatgaaaggacaaatcctgtgtgattccacttgcatgagggactgagagttgtcaaattcgtagagaccaaaagcaaaatagaggttaccaggaggagaagtgggagttcgtgtttaatggggacagagtttcagtttggaagatgaaatggttctatgggtggatggtgaggtgttggcacaacactgagaaggtgcttaacatgatggaactgtacactaaaaagtggtaaattttgtattatgtgtat

SEQ ID NO: 775779 - DNA, 587 bp, Homo sapiens
  misc_feature 1, 2, 3, 4, 5, 6, 7, 8, 9, 10, 11, 12, 13, 14, 15, 16, 17,18, 19, 20, 21, 22, 23, 24, 25, 26, 27, 28, 29, 30, 31,32, 33, 34, 35, 36, 37, 38, 39, 40, 41: n = A,T,C or G
nnnnnnnnnnnnnnnnnnnnnnnnnnnnnnnnnnnnnnnnngtaaattgccagtgtgaatataacgtggtgcagccacttgggaagaacagtatggcggttccttgggaaaagtaagcatgattcctaacttgcacttgtgggtatacgtcccagataattgaaagtggggctagaatggatattcaatacccatgtacacaatagcgttattcacaacagccaaaaggtagaaacaacccaagtgtccatcagtgcacgaatggatatccatacaatggactggaattctggtttgtgcataatggaggcattaggctaagtgagatgagccggccatgaaaggacaaatcctgtgtgattccacttgcatgagggactgagagttgtcaaattcgtagagaccaaaagcaaaatagaggttaccaggagragaagtgggagttcgtgtttaatggggacagagtttcagtttggaagatgaaatggttctatgggtggatggtgaggtgttggcacaacactgagaaggtgcttaacatgatggaactgtacactaaaaagtggtaaattttgtattatgtgtat

SEQ ID NO: 775780 - DNA, 507 bp, Homo sapiens
taactcatcctggtattcccaagggcagcatcttttgtggcaaaggcaagaacccactgctcacccttgggaggcatcgcagagtcgggacgtggcatggccttgagtccctaaacagccccacagtgctcccagcgtagccttggtttcctagggggactcgcacgtggcaatgccagggtcacacctctcaggatcgtgattaaaakgtgatgtttggtcgtgattaaaaggtggtagtggctcactcctgtaatcccaggactttgggaggccaaggcaggcagatcacgaggtcaggagtttgagaccagcctggccaacatagtgaaaccccatctctactaaaaatacaaaaaaaaaaaaaagaatgagccaggcatggtggcgcatgcctgtagtcccagctactcgggaggctgagtcaggagaatcgctcgaaccagggaggcagaggttgcagtgagccgagatcgccccactgcactccagcctgggcaatggagc

SEQ ID NO: 775781 - DNA, 595 bp, Homo sapiens
tccaggcatgcatcaccacacctaatttttgtattttttttctagaaatggagtttcaccatgttgccctggctggtctcaaacacttgggctccagagatctgagcacctaggcctcccaaagtgctgggattacagacatgtgccactgtgcccggcctgtgaaataatttgatgacaacaatwgcttctactttttaaaaagtcatgaggactccacgtgacaatgccaggttcacctgagggtaggccacatgtggtataaatagtgcagaaatgggagtggtgggaaaagcaaatctgctggcagggagaagctgcagcctcagatgggcccattaggtgtttgcctgggatggggtgctgaggcctggctacacttagggaaactggcattggcaataccttatcccagaaactgctggccttcattgcccgggtccaatcctattgttaacacctgatagaggatggatattaagattcaagcaggaggccgggcacagtggctcacgcctataatcccgacactttgggaagctgaggtggggggatcatctgaggtcaggagtttgagaccagcctggtcaacatg

SEQ ID NO: 775782 - DNA, 586 bp, Homo sapiens
ctcactccacagcggctggtgccattttctccatgccatggtctggtctgatgcaaacccatcgaccagtgctgtgtgcctggcttccaaggctacagaaaggggacattgggcctgttggtgttgaagtgcaagtaacctctccgggactaggctacctatggtggtctcatttctctcaaacaggaaaygaaacacaactggcaaggtagagggtacaccggaaattggggaggcccacccatggtgtttggaaccctgaagttgcccaggagagctagttattgccttcactttgcgagggaatttaaagcggcatgctcctgtttgacaatttcacttttatttacaggggctggatcaaacgtatattttatgtgataagtggaaagtgtcaaaatgagccacacataaagtggtgacaaaataattcacttcaatgaaattacataatgtaaaacaaaatcttagaaacagcccccgttaaatatgatttgcatgcaacataacattatacaatttttgacactctgcaaagaggtattgggtcggaagtagctatgtttagaaggcaatttgcagaatt

SEQ ID NO: 775783 - DNA, 594 bp, Homo sapiens
taacaatcccaaaaagagtttttctaatgctatgaaaaaactggatcgaacacattaaacttttttagagaaagaaacagcaatacctccaacttagctctggccagagcttaactttccataaagacacatcaaattgttttctttttaatctttttaatcttytgttttctctatttttttatttttgttcatttagatctagctgcttcatccatgatacataagtaattcaatatcatcatagtctgaatagcctggctccctaacttaggaagtctgtatttcctaattattttgctcatcataattgttttaaattaacattttaaattcagagagtgactatttttaaagacatttcaaatgattacatttcttccaggtggcgcttgatttgcacctggcaaaagaacagggaagcgtgtggtccttaacaaagttcctcctctcacctgcaatccatcctcactaaagccagctgccaactattcataagtgtaagcaggatgtggcgttgcctgtaaataaactgtacctgggaaaatcacgttgttcagtgacaaggtatccactctttccactgagggggaa

SEQ ID NO: 775784 - DNA, 628 bp, Homo sapiens
cagcatttaaaataatcttaatttatttactgtcttagtcaaaatatacttaagctccctgggaccagggattgtgtctgtgttgttcattgcctcaagcccagtatatattttttctgactttttaaatatttctgccactaattgggacatcacatagacatattctgagaattacacttctttttattytcatacacaatagttccatgtcctatagatcattcttacgtaaagtcaaagcatttagttgacaaaaacatgccagtcataagcttccatatttgtggataaggtcataaaagcattgaatgcattccattgatttattcttgattgttcatataggaaaagatgagtgtaaggaaattatgaatttttttctatttttggattgaaaaagttaatattgtttttatttatttacttttttaaaaacttttattttaggttcttgggtacatgtgcaggtttgttatataggtaaaattgtgttataggggtttgttgtacagattatttcatcacccaggtactaagcctagcaccaaatagttattttttctgaccctctccctcctcccaccctctaccctcaagtgggccccaatgtctgttgttcccctct

SEQ ID NO: 775785 - DNA, 628 bp, Homo sapiens
cagcatttaaaataatcttaatttatttactgtcttagtcaaaatatacttaagctccctgggaccagggattgtgtctgtgttgttcattgcctcaagcccagtatatattttttctgactttttaaatatttctgccactaattgggacatcacatagacatattctgagaattacacttctttttattctcatacacaatagttccatgtcctatagatcattcttacgtaaagtcaaagcatttagttgacaaaaacatgccagtcataagcttccatatttgtggataaggtcataaaagcattgaatgcattccattgatttattcttgattgttcatataggaaaagatgagtgtaaggaaattatgaatttttttctatttttggattgaaaaagttaatattgtttttatttatttacttttttaaaaacttttattttaggttyttgggtacatgtgcaggtttgttatataggtaaaattgtgttataggggtttgttgtacagattatttcatcacccaggtactaagcctagcaccaaatagttattttttctgaccctctccctcctcccaccctctaccctcaagtgggccccaatgtctgttgttcccctct

SEQ ID NO: 775786 - DNA, 529 bp, Homo sapiens
agggaaacgagatggagggaggacagacagaatgactcagtatccccagactcaaacacagcacctgcacaaagtaggtgcttactgatttttttgcggggggaggggkgggcggtgaactacaaaaatcctaggagaggttttcctccaagagaaactgtatttagtgtttgctttttttgttgtctagatgtccagtgcccagaaatcccttctgcctatgggcagcaaggttctgttaatgtttggccttctggtgtcactggaagaaaatagaggagggaaaggtgggacatgatgtcaggttgggaccaggatactgaagttaggctcagggagcaaaatcaggagattttggttggggatgttgaatgtgaggtgcctctaagtctattaagaggtgatgttaagtagacatttagatatctcgctgttcagagatgagttctagactggagatattagcctgggagccattcatgctgggtggtattagaaagcatgggtattagaaggcatggatttcaca

SEQ ID NO: 775787 - DNA, 660 bp, Homo sapiens
cacccccaatacccctgtttgcttctagacctataaccacactcaagtcccagagggtccctggaggtgaggttgagagtgtgacccatgaggaggtgcactacactctaaaagaactgtttgagttctccaatttatataaacagcaatctagagaacaggcatgggaatggatattaagggtgtgggataatgggggaaggaacacagagttggatcaggctgaatttattgatttgggcccactaagtagggactctgcatttaatgttgcatattggggagttaaaaaaaggttctaatagtttatttgcttggttagccgaaatatggattaaaagatggcccactgtgagtgagttggaaatgcctgatctcccttggtttaatgtagaggaagagatccaaaggctcagggagattgggatggtggagtagattagtcactttagacctactcatcccagctgggagggtccagaagatatacccttgaccaatgtcttaygaaatagatttgggagggcagcacctacatctttgaagagccctgtaattgctcttctctgtatgtcagatctaatggtaggaaccacagtcactcaactacaaaatttacatacaaggggaataattggatcccaaggtggcaagggccaa

SEQ ID NO: 775788 - DNA, 532 bp, Homo sapiens
acctgtaccccaataacttatggaaaaaataaaaataataataatttaaaaaagaatactctgactcatgtagatctctggcattggctaattaatcacagtgttcctagaagtgaaattgataggaagcctactgcattcctacttaaattatacaaatggaaaatttctaggtaggatggacaaaaggctaatttgaattataaaaacagagaatcacagcccctcagtcaatttccagacttgagccagtttacagaaccagaaccctttgaatgaagggsaggctgggtcccttgaggaaggaccccactacattacagacaatttatgcagtgaatctttctcccatccttccccaaggacacctccagccttttaacggggtaactgtgcactggggaaagggaaatgatcagacatttcaaggactactggacactgactctgagctgacacattccaggggacccaaaaacatcactgtggtcctccagttaaggtaggagcttatggaggtcaggtaattaat

SEQ ID NO: 775789 - DNA, 612 bp, Homo sapiens; identical to SEQ ID NO: 767748

SEQ ID NO: 775790 - DNA, 612 bp, Homo sapiens; identical to SEQ ID NO: 767749

SEQ ID NO: 775791 - DNA, 578 bp, Homo sapiens
atctagacttgtcatcacatatcccctccgtactactctcaccaaggtcactgataacttctctattgttaaatcagacaactttccatctgtattttgcttggcttctaggcagcaattaattctatcgacctctcccttcttccaacacttatttaccttgtcttcatgatactacactgtattgatcagggttttgaattgcaaacaacagaatccactctgacgttttaagcagaaaaggaatatgttgaaggacgttaggtagctcacaatgcatgtgggaggactggaagacaggttaagatgatattcagccamgaaaatacctattacatcttggtacaaatcccactacctctaccttttggtatcaacaccacaactcacataaatgttgtgaacgttcactgatgccatccaagactggactccagaagtgaatgccatggcgaccatgctaaatgctgatatgccttctctattatgcttgctaaattttgcaacctgcaaggttataaagttatcttctggattgaatttttgcatgagtgctcccatttggtagtaccaggtca

SEQ ID NO: 775792 - DNA, 487 bp, Homo sapiens
catgacagggcagctggcttccctcagagcaaaagagccaagagagcaaggcagagctacaatgtcttttatgacctagcctcagaagtcacgcactgtcatttatgcagtatcctattggttacacaggtcagtcctatttagcttggaagaggtctgtwcaaggaaatgaatactgggagatggggatcattgtaggctatcttggaggctggttcttcatcttgatcacttagttttctaactattaccaattcattgcttacttgtttcttgtttggcttccctcattcattaactcgctatcctctgtacccagcccagtgcctaatatatagttgatgctcagtaaatatttatggaataagtaggaaactcttatcttttgatagctgattctttaaaacaggaggtagaaataggtataaaatcaacattactggttgatgttgactttacccaagaaagtttaattgaataattggat

SEQ ID NO: 775793 - DNA, 655 bp, Homo sapiens
aaatattaatttttgcaaatgaaggaagagggacctgagagatgaggcagatagtacagaagaatcaaagaactctcaacttcttatcctgcccaagttgaatagatgaatacctgttaacaggttaaccatctatacaatggaggggggaaaagtaagtttctgggtatgtatatctcttattcatttgaccgtagtgaatcaaatcctaatagtaagatagactgacacatacaaacctagaacataaaaaaattttcaaagagaaaattctgacccagaggccatgtcttaytaagacaaggaacagtttccatttaattcttagaaaagtacaaggaaaggctcacaataaattcctttaataatggtctttatgtacaaaatcagaactgtgcacaaggcaaaatttattttgaacatttttaggtaatgaaataatacttcaaagggaatgagtgaggtcccactgaccaaggtttaaaactcagctctgatacatagtcatgcactgcacaaggacattgaggtcaacaatggactacatataaaatggtcatcccataagatacaatattgtgtttttaccataccttttctatgcttagatatacaaatataattgtgttgcaactgcctacagtactcagtacag

SEQ ID NO: 775794 - DNA, 655 bp, Homo sapiens
aaatattaatttttgcaaatgaaggaagagggacctgagagatgaggcagatagtacagaagaatcaaagaactctcaacttcttatcctgcccaagttgaatagatgaatacctgttaacaggttaaccatctatacaatggaggggggaaaagtaagtttctgggtatgtatatctcttattcatttgaccgtagtgaatcaaatcctaatagtaagatagactgacacatacaaacctagaacataaaaaaattttcaaagagaaaattctgacccagaggccatgtcttactaagacaaggaacagtttccatttaattcttagaaaagtacaaggaaaggctcamaataaattcctttaataatggtctttatgtacaaaatcagaactgtgcacaaggcaaaatttattttgaacatttttaggtaatgaaataatacttcaaagggaatgagtgaggtcccactgaccaaggtttaaaactcagctctgatacatagtcatgcactgcacaaggacattgaggtcaacaatggactacatataaaatggtcatcccataagatacaatattgtgtttttaccataccttttctatgcttagatatacaaatataattgtgttgcaactgcctacagtactcagtacag

SEQ ID NO: 775795 - DNA, 598 bp, Homo sapiens
cagtgaaatagacagctgcagtccaagccacagtggaatttctagtgtcctctgcccttctggggcaggttaggtccgggtggagcagggagacggcttcaggcctttctaatttaaaaggacaagcaccaggggctgggatgcctttccgtttcacacccgcggcttcccacttcaggagtgttcctgtgcttcccaccttggcctgtcttcagacgggcacctggacgtggggcttggagatccaactagtccccaagttcacccaagacagtttgttcccaggagctcatttaacactaggctgtttgcaagtcaaagtgcgtcccgtgcaaacaacatccyaagagcactgagcgtggccagctgacccacgaagtctatgacccatccctgtaccttgaagtcctgaaagctctggacctaccaccatgttgccacgagcacacactctagatctgaactgctcattcggtggacgctgggaagtggggaccctgtgtccaccagtgttccttcagcacacagccactgagtgcctgctcggggccaggtccttatttagggaaaccagagagatgcctcgtatacctcaaag

SEQ ID NO: 775796 - DNA, 598 bp, Homo sapiens
cagtgaaatagacagctgcagtccaagccacagtggaatttctagtgtcctctgcccttctggggcaggttaggtccgggtggagcagggagacggcttcaggcctttctaatttaaaaggacaagcaccaggggctgggatgcctttccgtttcacacccgcggcttcccacttcaggagtgttcctgtgcttcccaccttggcctgtcttcagacgggcacctggacgtggggcttggagatccaactagtccccaagttcacccaagacagtttgttcccaggagctcatttaacactaggctgtttgcaagtcaaagtgcgtcccgtgcaaacaacatcccmagagcactgagcgtggccagctgacccacgaagtctatgacccatccctgtaccttgaagtcctgaaagctctggacctaccaccatgttgccacgagcacacactctagatctgaactgctcattcggtggacgctgggaagtggggaccctgtgtccaccagtgttccttcagcacacagccactgagtgcctgctcggggccaggtccttatttagggaaaccagagagatgcctcgtatacctcaaag

SEQ ID NO: 775797 - DNA, 598 bp, Homo sapiens
cagtgaaatagacagctgcagtccaagccacagtggaatttctagtgtcctctgcccttctggggcaggttaggtccgggtggagcagggagacggcttcaggcctttctaatttaaaaggacaagcaccaggggctgggatgcctttccgtttcacacccgcggcttcccacttcaggagtgttcctgtgcttcccaccttggcctgtcttcagacgggcacctggacgtggggcttggagatccaactagtccccaagttcacccaagacagtttgttcccaggagctcatttaacactaggctgtttgcaagtcaaagtgcgtcccgtgcaaacaacatcccaagagcactgagcrtggccagctgacccacgaagtctatgacccatccctgtaccttgaagtcctgaaagctctggacctaccaccatgttgccacgagcacacactctagatctgaactgctcattcggtggacgctgggaagtggggaccctgtgtccaccagtgttccttcagcacacagccactgagtgcctgctcggggccaggtccttatttagggaaaccagagagatgcctcgtatacctcaaag

SEQ ID NO: 775798 - DNA, 441 bp, Homo sapiens
ttgggtagaactccacagggaaccatctaggccaaagttttctttgggaaagattttcattaatacatttcattgctaatggaaatagaattactagattttctacttcttcttgagttaatttgggtacttttttttttttttcaagaaatttgtccattttagccaggtatggtggcccatgcctgtaatcccagcactttgggtggctgaggcaggaraattgcttgagtccagaagtttgagaccagcctgggcaacatagcaagaccacatctttacaaaaaagattttttttttaattagccaggcatggtggcacgtgcttgtagtcccagctagttgggaggctgtggtgggaggatcacttgagccctagggaggttgaggctgtagtgatttatgactgtgccattgcatttcagcctgggcaacagaaca

SEQ ID NO: 775799 - DNA, 623 bp, Homo sapiens
ccccattctatcggtaacctcgagatggtatacaagcttttgtacatcactgggaggttgggtcttcattctgaaggctcccatgtatacacattaaataaatctgtatgccttttctcccattaaccaatctgcctcatgtcaatgatggttttcagcaagtctttagggggccaagggccttgcttcaaattcctattgtccttatttttgtctcctctttagaaagaatttgtgtcttcaactctctcagctgtaatacactgtactgaattacactggagcccttttggaatggtggtggaggaaaccagaataatttcacaccaaaatacrttgccccggtatgatgagtattttgaattaaggctcttagagatcagcagatgctggaatgggttttttcttagctacataaaaactggacccaccaaggagaacaattgcttcccatcccctccctgaaatctcaatgtctatgacagagatgaaggctgaggaatgtaaccacaccaggatggaccttttcatcagatatctgtctctcagggtcattcacattccaaagagaatcatttacagattaacttttgatccactcattctccctaataataatttat

SEQ ID NO: 775800 - DNA, 625 bp, Homo sapiens
ccattccttggactgtgtaagcctggttgacttgccttcgagtgccattgggttgagccacgtggtataattaaaaactatatcaggtctctgtcctcagttcctggcacagagctcctaaaacccttggcatttcctgcatgacaggagtgtcttctgttacccaacacagccccttgccaccattcctgagttcatgctaatgagatgattcagggtggagctccgagatggctttaggatggggactagtcaccccatgtaattagatcaaacatgtaattagagggcggcaccttcagccccatcccctgacctytggggaggggagaagggttagagattaacagcaacgtggggagcttccgggttggtgaacacactgatgggaaggtgatgtacccagccagggcctgggagctctgggtcacacccctccctccaccagctcactgcccagggcatctctcccattcgcctgtccctgtcttctctccttcctgaggagctggtaaacgtaagcgaagtatcttcctgagttctgtcagtcattctagcaaatgattaaacctaagcgggaaacccctgaatttgtagccaagggggacagaagtttgggtagcct

SEQ ID NO: 775801 - DNA, 627 bp, Homo sapiens
gggaaagtcaataatggcagtgccagtgctgctgccttgcatatgttgtccagtcatgcctggacatagattgacagtgggatttgtccaaggtctcagtccttggccttagtgcttctatgggatgtccatttccctcttattttctgtggtctttataaaagaatgtttgcaatacaaaaatgtcattcatgctgttgaatattttgagtgcaatattaaatatattttgtcaaaaccaataaagtgtctgcaytcattaggaggctactgctattggataatgaagaaacaggataatttcagacttttaattcagactgataatgtttaataatgagaatttttactaggcatgtaggttctattatgattcatgtgccttcaaatctttatgaagtttgggaattgtgaaagcttctaagccactctcctttcagccacatgggataaggctgtctctgttatgcaatctgatgctagatttggataatgtttaaataaaggcatttggtttatcacttatccatgtgaataaaattaagaactgtcttaatagataaaagaactttaagtataagcttggaagacccttaaaaacgaactgcttttcataagatacaacgc

SEQ ID NO: 775802 - DNA, 633 bp, Homo sapiens
tccaaaataaagctttacatctaaagagaagttttgaatagtgattttgttatgtatctagtatttgggccaaaaatagtaacatatgttaaaattacaaacaacaacaacaaaaaatatatttcagagcagagctgaggaaaagrtaagatgtaaagcaattgagaaataaggagataattcaatgtgattactagcatcttagtataacgtaaacagtaatttctaagagctctgttggaaaaaaatgtatagcagaattgattacaaggaaatatctataagaaaattgaagttatggaaattgatttttaaaacatcaatttaacctttccaagaaaaataatgaaagataaacaatagggcactgatggaggataaagggaaaaaaaatctatcacatcttcaatacttaatcatagagcttgtaaatcataaaggtgtaagcccaaaattcatctgtcttgcttttaacaatttaagtagctttgttcccattttacagacaagatcattaaagtctaaagagatttctgagtgaaaaaaagctagtgcagtttttcaatgtagtaatttttacttctacctctaatttgaattttatttaaaaatttgttatcaaaatataattgt

SEQ ID NO: 775803 - DNA, 633 bp, Homo sapiens
tccaaaataaagctttacatctaaagagaagttttgaatagtgattttgttatgtatctagtatttgggccaaaaatagtaacatatgttaaaattacaaacaacaacaacaaaaaatatatttcagagcagagctgaggaaaagataagatgtaaagcaattgagaaataaggagataattcaatgtgattactagcatcttagtataacgtaaacagtaatttctaagagctctgttggaaaaaaatgtatagcagaattgattacaaggaaatatctataagaaaattgaagttatggaaattgatttttaaaacatcaatttaacctttccaagaaaaataatgaaagataaacaatagggcactgatggaggataaagggaaaaaaaatctatcacatcttcaatacttaatcrtagagcttgtaaatcataaaggtgtaagcccaaaattcatctgtcttgcttttaacaatttaagtagctttgttcccattttacagacaagatcattaaagtctaaagagatttctgagtgaaaaaaagctagtgcagtttttcaatgtagtaatttttacttctacctctaatttgaattttatttaaaaatttgttatcaaaatataattgt

SEQ ID NO: 775804 - DNA, 473 bp, Homo sapiens
tggccactttagtggccactgttgcttggccactgttagtcatgggaaactaggacagaaatccaaatctaagaaaccccagtctagtgcttatgctgattcatacatgcagcagtaaatccggggcatgtatattatgagaatcacagatattattccaagcagtcctgtagctaatgatgtgactgagtagcatgtcatttaaagtttccaattatgtttaccaatctgtaaaaatggctctgagatggaatacaggaatatgacgatccacatactaatattcacacaaaaaacggctyccgattttcaaactcccaagtcatatgacttccaaaacaatctattaaatttggatagagacttgtttttcaagacccacattctggagtatgattcagtgtgtcttaagaaaagaccacactcaactgtgatttcagaaataaattacattctaagcttctaccagacag

SEQ ID NO: 775805 - DNA, 616 bp, Homo sapiens
atccctttccatatgcttacatatgttttcattttatttttaatatttttctccagaatgaattttggactttcccctccccatttgcacacggcgtaacacttagtaatgagctaaaagaatttatgtactaaatacaataacagatccaagttaatgatcctgtaatgctcttgacctgtctgatgtgatctgaagaagtgtgttttcactcgttgcacactttttctccagcagctcagagagtagcaccacagaacttttaatatgagggacttagtcttctcttcaattggctatgaacttataagtggatagaaatgacttaaagaagtcatttcatgctttctttgccataatgatacataatcatcagatgaatcctcaagaaacctcttcaagaatacagtatatagatagatagatgatagatagatagatagatagatatakatagatagatagacagatagatagttagatttaaagccgaaaaagacagaggtaatactaaatgaccttgtaaaatctattgcatcttctaatctgatctcactagccagaccccgggagcctcaacaaacaggccatagagataattctctaatgacctgat

SEQ ID NO: 775806 - DNA, 625 bp, Homo sapiens
tttaagtgtatacttgttttttccaattatgtttgtatttaggccgcagcaatcctcttttggtggcaccattatattctttttgtaggaaagtataatacctaggaaaagatgtctgttattagtgaaatgattgtgatctctgaatctgaagatgtcactaaggagagcratgccctaacagaaagaatgaatgctatcacgaatttcaagataacttggagacacttgaaaatctggcaagcaaataggtgtatatagtggattagttataaaaaccactctgcaaattatcatcaaagccaggttagattaggtgtgttcatttgttctcacttgtttatgaagttaagacattgataccaaaattgtatttactccagagcaattgcattagtgcatctcactactgtttaacatatactaagaaaatgctcttttaccaccaagaacattaagcttaattagaacatatactcattgcttaagtcaagttggttgtcaattttaacacaatactctgactaatctagcagtatcacagcctaaaaatatatctttttaaagttataacctgcaatttagagttaacattttattatccttcttctttgaaatttataac

SEQ ID NO: 775807 - DNA, 625 bp, Homo sapiens
tttaagtgtatacttgttttttccaattatgtttgtatttaggccgcagcaatcctcttttggtggcaccattatattctttttgtaggaaagtataatacctaggaaaagatgtctgttattagtgaaatgattgtgatctctgaatctgaagatgtcactaaggagagcaatgccctaacagaaagaatgaatgctatcacgaatttcaagataacttggagacacttgaaaatctggcaagcaaataggtgtatatagtggattagttataaaaaccactctgcaaattatcatcaaagccaggttagattaggtgtgttcatttgttctcacttgtttatgaagttaagacattgataccaaaattgtatttactccagagcaattgcattagtgcatctcactactgtttaacatatactaagaaaatgctcttttaccaccaagaacattaagcttaattagaacatataytcattgcttaagtcaagttggttgtcaattttaacacaatactctgactaatctagcagtatcacagcctaaaaatatatctttttaaagttataacctgcaatttagagttaacattttattatccttcttctttgaaatttataac

SEQ ID NO: 775808 - DNA, 631 bp, Homo sapiens
agtgctgcagctgtccactttcgggtgatgcctgaatatcgtgcagaaccatctgtgaaccaggccctagtcttctcttcctatgtcaactgataatggggaactctccttaaggccattggtgtaggctgggagagagaaggcagggtagtaggagtggagaccatgggcatttgagccacttcctcatgtaacttatttgagttcaggacctactcaagcctgatcacatatataccacttccatttgatgatgaaatgcttctgtgcatgacccagtatatggctagatgggtcataaagcacccagttcatgataggcagtggaggtctcatggtgaattgatgacttatagtcaaacattcagtttccaccaaagcccagtaatagtcaaaragctgtctctcaaaaggaaagcagttatctgcagaagatggcagggccttgctcctaaagcctagaggcctcctctgtgattcacctatgggggccttccaaaggctccaaacagcatctctatctgccactgacacctcaagcatcattggatctgctggctcatatggcccaagtggcagagcaacttgcacagcagactggacctgttgcagggccttcttctgttctgga

SEQ ID NO: 775809 - DNA, 460 bp, Homo sapiens
tgatgtaattatagaataatataagctgcaaagctaaaattattaaatagatgacatccataccacagtaagtgaatattgcttaaattagatgaaatatatagttaagtaaattgtgaagtctctcaaagtttcacatttttaggggtatgcaatactaatttctaacagaaagttattacgtgttattcctatgtcataaattactggtgtgaaattaaataaaagttgttggaactttaaattattctgagcctttagaggaatgtggttatgcagtttgaatcacgcagcatgcagctgcaactactgccttatttycctctaaatatttaagacactctcagatcactaggcctcctcaaaaagtaacaaaatgatttttctgggaatgtagcagtccgtaaccaatcaaattactgtagtatattcactggtcttgtatggaatgtgttataat

SEQ ID NO: 775810 - DNA, 575 bp, Homo sapiens
atctcttttcctagatgatattattatatacctagaaaacactgaagactctaccaaagggtccctggaactgataaatggcttcagtaaagcttcagggtacaaaatcaatgtacaaaattggtagcatttctatacatcaataacattcaagctgagatccagatcaggaacacattcctatttataatagccacaaaaacattacatacctaggaatacatctaacaaaagaggtgaaagatctctacaaggataactgtgaaacgctcctaaaagaaatagtaaacaacacaaacaagtgaaaaaatatttcatgctcatcaattagaggaatcaatattgttaaaatrgccatactgcccaaagcaatctagaaatgcaatgctatttccatcaaaataacaatgtaattttttatataattagaaaaaaaactattctaaaatttgtatggaacacaaaagaccctgactaatcaaaataattgtaagcaaaaagaacaaaggtggaaatatcacattacctgacttcaaactatactatcatgatatagtaactaaaacagcatggta

SEQ ID NO: 775811 - DNA, 607 bp, Homo sapiens
gataaaagtgggcagaggaacgtggaagaactagactggcttaagcttccggcctccatctttctcccgtgctgggtgcttcctgcccttgaacatcagacttcaagttcttcatctttgagactctcggaacttcaactgaagactgaaggctgcatttttggcttttctacttttgaggttttgagacttagactggcatccttgctcctcatccttgctcataatgtgggacttcagcttgtgatcatrtgagtcaatactctttagtaaactcccctttatatatccatcgatcctattagttctgtccctttagataaccctgggtaatacatatttatttttgaataattcaacttggtgcacaaattgacagttgtagtaatgaaatcacactgaaaacattactatctgcctgagtctagtccttaaattgatagttctataaatacaggagcagtattaaatattgctcatgtgatgaggctgccatcttaagactaaattgtattcttccctagattttaaaaatactagaaaactgtcattatttctatgccaaccactagtctccccattacctagagcaggatttctaaaatat

SEQ ID NO: 775812 - DNA, 607 bp, Homo sapiens
gataaaagtgggcagaggaacgtggaagaactagactggcttaagcttccggcctccatctttctcccgtgctgggtgcttcctgcccttgaacatcagacttcaagttcttcatctttgagactctcggaacttcaactgaagactgaaggctgcatttttggcttttctacttttgaggttttgagacttagactggcatccttgctcctcatccttgctcataatgtgggacttcagcttgtgatcatatgagtcaatactctttagtaaactcccctttatatatccatcgatcctattagttctgtccctttagataaccctgggtaatacatatttatttttgaataattcaacttggtgcacaaattgacagttgtagtaaygaaatcacactgaaaacattactatctgcctgagtctagtccttaaattgatagttctataaatacaggagcagtattaaatattgctcatgtgatgaggctgccatcttaagactaaattgtattcttccctagattttaaaaatactagaaaactgtcattatttctatgccaaccactagtctccccattacctagagcaggatttctaaaatat

SEQ ID NO: 775813 - DNA, 572 bp, Homo sapiens
tatttttgatatcattgcaataaaattgttttaattctcttttctggttattgattgctagtgtgtgaaaaccaaactgttattttcatgttgactttatattctataactttactaaattaattctattaattaacacttttgmaaagtcttaagattatctatatgtaagatcttgtcatctgcaaactgaaaattttacttctttctttgtaatttggatggctttgttgttttcagagacccaggaaagctgatgatgtagatgaagttcaaaggcagtctgctgaataaattttcttttgctcaggaagcccatcttttggttctattcaggcctgccattgattgagtaaggcccactcacattatggagagcaatctacttactcagggttcactaatttaaatgttaatctcatccaaaaacactgtccccattgacatgcaatattaaccatcacagcagagagtattgaaacctactactattatagtagcactgtctatttctcctttcaacctgtcagtgttttaattcatatatttaggagctctgatgtttggtgcac

SEQ ID NO: 775814 - DNA, 603 bp, Homo sapiens
acaatggagttccaatacatctggcagcagacttcctaataaaagtgttacaggctaggagagagagagagaacatatttaaagtgctgaaggaagaaaacttttaccctaaaataatatatctggtgaacatatcctactgtgaacccagaaaatccgagacaggtctcagttaatttagaaagtttattttgcaaaggatgaggatgcacccatgacacaacctcaggaagtgctgacaacatctgcccaagrtggtcagggcactgcttggttttatacattttacggagacatgagacatcaatcaatatatgtaaaaagtacattggtacagtctgaaaaggagggacgacttgaagcaaaggcaaaaagactccaagtagggagggagcttccaggtcacagataggtggtacacaaacagttacattcttttgagtttctggttagcctttccaaaggaggcaatccaatatgcaactatctcagagagcagaggggtggctttgaatagaatgataggtaggtttgccctaagcagtttccagcttgagttttccttcatgattttgggatcccgaactattttcctttcacatt

SEQ ID NO: 775815 - DNA, 597 bp, Homo sapiens
ctgacattgctgaggcttgagtaggtagttttaccctcacagtgtaaataaagcttccaggaagttcaaactaggcagagcccactgcagctcagcaaggctgctgtggccagactgcttctctagattcctcctctctgggcagggcatctctgaaaaaaagggagcagccccagttaggggcttatagataaaacccccatctccmtgggacggagcacctggggggaagggtggcttcatcagacttatacgtccctgcttgacagctctgaagagagcagaagatctcccagcatagcattcgagctctgctaagtatcagactgcctcctcaagttggtgcctgacacccgtgtctcctgtttgggagacacctcccagtaggggctgacaggcacctcatacaggatagctctggctggcatctggcaggtgtccctctgggaggaagcttccagaggaaggaacaaatgaaaatgttatagcctttctcataaagccacaggaaacccttattaagtacatcgacttaaacccagaatccccgaaggaacaagcagtcataaaagatcgtttatttacccaagccacccc

SEQ ID NO: 775816 - DNA, 597 bp, Homo sapiens
ctgacattgctgaggcttgagtaggtagttttaccctcacagtgtaaataaagcttccaggaagttcaaactaggcagagcccactgcagctcagcaaggctgctgtggccagactgcttctctagattcctcctctctgggcagggcatctctgaaaaaaagggagcagccccagttaggggcttatagataaaacccccatctccctgggacggagcacctggggggaagggtggcttcatcagacttatacgtccctgcttgacagctctgaagagagcagaagatctcccagcatagcattcgagctctgctaagtatcagactgcctcctcaagttggtgcctgacacccgtgtctcctgtttgggagacacctcccagtaggggctgacaggcacctcatacaggatagctctggctggcatctggcaggtgtccctctgrgaggaagcttccagaggaaggaacaaatgaaaatgttatagcctttctcataaagccacaggaaacccttattaagtacatcgacttaaacccagaatccccgaaggaacaagcagtcataaaagatcgtttatttacccaagccacccc

SEQ ID NO: 775817 - DNA, 606 bp, Homo sapiens
agtggttatgggatgaggctcccatgcctttggaaagcagagggaaaagtgggaaggactgcatcttgtggtttgagtgccagatgagctgtagtgcaatataataccaggtagattttaatgtttttgattcaaatttctgagtcctggacagaacttttggacctgcccagggactggacattgctactttaaagggaaggaaacagggctagctggctttgccacctgctaattgtagagcctcrgggctttgaataaacatattcatcagaaagtgagtggttacagcaggccttgggtgaagccgagtgctgtgttggcttcaggtatgaaccagtgcagtcatggtggtggtgtccactgcagtgcttgtgtcactccactcttagctttaggtggctaagaacagagagaagactctgcatgtttaaaagacagtaagaaaatagaacaagagtctcttcctggtaatccagagaattctcccagacctgtccaagatcatcaaggtggtattgttccgagtctgcaaggaccacagcattactggaattcaggtgcaccctaaagcagaaacagattatatcaaaatactaaagtcct

SEQ ID NO: 775818 - DNA, 606 bp, Homo sapiens
agtggttatgggatgaggctcccatgcctttggaaagcagagggaaaagtgggaaggactgcatcttgtggtttgagtgccagatgagctgtagtgcaatataataccaggtagattttaatgtttttgattcaaatttctgagtcctggacagaacttttggacctgcccagggactggacattgctactttaaagggaaggaaacagggctagctggctttgccacctgctaattgtagagcctcagggctttgaataaacatattcatcagaaagtgagtggttacagcaggccttgggtgaagccgagtgctgtgttggcttcaggtatgaaccagtgcagtcatggtggtggtgtccactgcagtgcttgtgtcactccactcttagctttaggtggctaagaacagagagaagactctgcatgtttaaaagacagtaagaaaatagaacaagagtctctkcctggtaatccagagaattctcccagacctgtccaagatcatcaaggtggtattgttccgagtctgcaaggaccacagcattactggaattcaggtgcaccctaaagcagaaacagattatatcaaaatactaaagtcct

SEQ ID NO: 775819 - DNA, 603 bp, Homo sapiens
acatgccttcctcagaatctgcccccaccttttctccactagaccaataactacggttaaatcacagcatgtccccactggggaagtgctagatttgctaagggaagaaaggaactataccccaaaagaaaagaaggatccagaaatcaggtattggcaggaaccaggagagtacacatagaccttgacgctggggcagggtgtgmggggtagacaagagatcagagaggctgggcacgggggctcatgcctgtaatcccagcactttgggaggccaaggcaggtggatcaccggaggtcaggagttcgagaccagcctggtcaacatggtgaaaccctgtctctactaaaatacaaaaatcagccaggcgtggtggcaggtgcctgtaatcccagctacttgggaggctgaggcaggagagtcacttgagcttgggaggcagaggttgcagtgaaccgagactgcaccactgcactccagcctggtcgacagagtgagactccatctcaaaaaaaaaaaagaaaaaaagaaaaaagcagaacacaaagttggatagagcagtaattgataagggaggattctcttgggttagaggatctgac

SEQ ID NO: 775820 - DNA, 610 bp, Homo sapiens
gggaagtccctgccaggcctctgcccttgagtggctgagacctcctggatgggagccccactctctgagtggtgacgagaacagacgtcccaaagcctagggtccctcctggggcttgggagccccaaaggccttgagtatcctggggagataggattcaaggtccacacagatggtcaggtgggaaactcgggcagttctggytccccccagctccccctcctccctgctgtctcgacagggtttggtggcccatacagggcctgtccaaggggcccaggacaaagtcaggcaggcagtggacagggggtcccccatcatctccccctactctcaggcagggtttgccaatttcatcctcagggctgagccccttggtgggggacaggagcctgtggagcccatggttctgaggcctggaggcggcctcacctcactgcccctatctcttcttggccccttcctcttcagggagcactcgtggtgaacccagcgaacatcctgctggcgtccctcactcctccactgctctacaagcccaggggacccagagctgggcacaagaggctgtgttgaaccacgggatccagaaatgggcaaaggtgaaagt

SEQ ID NO: 775821 - DNA, 647 bp, Homo sapiens
acccacttaacctctttgagactcagtgagtgccctcatgccaaacagggatagtaaaacctatcgtgctgaagcccccacgggagcgggatcatttctctgtccagcctttaacacccctcagcatggggcctgcggcaccagctcccaaatgaacaatgacagaatgagtgttttccctccaacggcgccaggaggggtcagggatcggggtagcatcgtggtgtttcccccttctgggcagcggaggggccctgcttggccagccattcagaccccaccaaccctgcacctaggattggatgagatttcctgcccaggggttggagtgagatttgctgccacagctgcctgagccccaggacgaaggggaggctccgcctagcgggtmttggacgccccagctgcctgagcccgggagccctgggatgaagtaggggctgcccatgccaaccgcagttcccccaacctgcccgccgcctagggggaagcaccaccccctgcccggggagaggaattcactcccacagggattctcctgctcattactcgacccacgcgtgagccaggcttcgctctctgccaagatgacacgtctaagaggcttagtcttctttatgctgtggatcctgaggaaatccacttag

SEQ ID NO: 775822 - DNA, 597 bp, Homo sapiens
tggagggaatgtaaaatgtttcaatgactttgaagaacattttggtaatttctgtaaagttaaatgtatagttaccatatgactcagcaaatctactgcttaatatttacccaagaggaaaaaaaaaacaaaacacctatgtttacaaaacggttcaccgaaacttcattcatcactgcccaaaactggaaataacccaaacgtatacagataggtgaacgaataaacaaactgcatattcatacagtgaaattctactcagcaataaaaggaataaactattcatatatacaacaacatggatgaatctcaaaaatattatgcttacctaaagaagccagacacaagggagtatgtactgtatgactccttttatatgacatttgtgaamtaatctccagtgatagacttcaggtcacttgttaccctaagtgagagacagttagactgactagttaaaggcacaagataacttccttgggagatagaaatactttgtatctttttgggatcatggttatttcaaaagactttggattttacatgtatcatggatactttttatttcatgaaaattatacttacaatgttgattta

SEQ ID NO: 775823 - DNA, 465 bp, Homo sapiens
atacccagtacaaaaccaattgacaatatctaaaattttataatgaagaaagaggaatgataacacactcttctagttacttctaaatccaaacatttagttttgctttttctcttgccccatcttattctggaaactgcttcygtaagaatcttcatgattattaatgacaactaatggagactcttttatctttatcataattatgacttatgacactgctgatcactccatctttctttttttaaataaaacctttatgaattatttacttaatatctgacaaatgctcattacaattagaaaaacagtgcaaagtctttcctaatagaatatttgattttttttttagtaatagaagcatttaaagctagtaatttttcttttggaacatcctttgttctgcattagtttttgttctcctttttatttctacctgtgattccggtttactctcctaggttt

SEQ ID NO: 775824 - DNA, 573 bp, Homo sapiens
taataacaacattgtattaaagatcagttcataaatttccacataattattgtagccatgagaataaagcatagcctactacattaaaagggccttacaaaatccaggataaattgtgtagaaatgcaactgtaccgatattttgtggcatttattttacttttccaaacaacacagttagagttgggtgggaagtgctggcacagaaccagggaagacagaaaactatgcatttgcaattggcaaaaatatacttttaaaattatctttttgcctaatatttctgggaaccaaaggaaaaaaactggggtggcaacaagtagaggatggggacactagagatgacggcaaatgctctacayccccaaattctgaaatatttgtaaggatggtcattgcataaaaggaatttggtctgtgtactttcagggttctatgatatatatcgtttggatattgatcttcagcaaattaagttaattcttggtgctcaataaaatcacaccaaattctgtgtaacctattttataaataaaactgttagtaaaagccctatccatttaaacatctgag

SEQ ID NO: 775825 - DNA, 599 bp, Homo sapiens
gtttctcttgagtgatgagattggtgacgacagttggcgaactggtgaaagttcgcttccttttgagtcctgtaagaagcacactggagttgtaagtgctttatttttgttttggaagttgtgaatagaggacagtctcagcagaatggacagattaatacaactgagttagaagagattataagctttagtttttaacccatgtgaagaaaaatcacgacttgcttctctacaacctcacaagtctaaaatcaatagacgaatgtataaggcttgtctttataaatccagaaaaaattatcytaagagacaagacgtgtttaattcaaaaggaaattgagagtttgcttactccaaatgtatataaaaataacaccaaataagcttactcatgcaccattttcttataataccatttagctatactacactttatagtttaaaacatattttctgatgcattttatcttttgatccacttaatatattacattgtctctttttattttccagttgaattacattacattgtctcttttttattttctagctctttttattttgcatgtcatgaggctcaaataaagtcataagattac

SEQ ID NO: 775826 - DNA, 586 bp, Homo sapiens
agtatagcaggcaaatctgaggatccgtcaccacaaatgcggaagaaagaagattccaggggcactcaaagaagagcctggtacctcagtgaaaagtacagaaaagacgcagaatgcagccccgtatggaacaataggaatcagagcagcctcaacctcacgtatttctcgcagagcttgtacaaatctacgggcaatttcttgcccagttttcattctttttcccaggtaatttgggaatataaaaaggaaaatgcgcctctcttgactatgctctgtttttctaactctctgagttttttattccttgtatttgagctagaatgagaggatgttgatttacacatgtccrtaatgtttttgttttgttttaagctgtgaaaaggggatgatctccatctgtttgtgctgctataaccaaatacctgaaccttggtaatttataaatagtaggaatttatttctcacagtcctggagactgggagtctgagatcaaggcttggcaaggtcagaacctggtgaaactgctctctgcttccaaggtggcaccatgacaagcgctgtgtcctcagaggggacgagtgc

SEQ ID NO: 775827 - DNA, 579 bp, Homo sapiens
ggagaggatcaggagcccggaccccctgagacatgccttggacttaggaaaggtgaacagctggtgaaaactcacgggcctcatgtggctaagaagcgtggcactgtggcttctcccagtccaccttcagtggagaggcttcaggaactgccctcggtggcccctcatgctgagcattccaggcacagcaagcagcctgagttgytggagcagcaagcagttatcctcctggagcccggcatggcagagtgaagcacgccttccaggagagggacccgctgacagcattccagagttttcagaacattttaccattaaagccaacagcaaaccacacagggcctttcagccacattaccaattttactcaatggtaactcaaaacttctagtgagagtttgggattttccttgggaacccaattccactgaaccaaagtagttgaagaaacactttttagcaaatagtctcttatttgattaaagatggctacaaatactccaagaaatgtgcccagtggagggcttagttgagggatcccatccttataaccaaatttttgggaggaaaaaaagggaa

SEQ ID NO: 775828 - DNA, 579 bp, Homo sapiens
ggagaggatcaggagcccggaccccctgagacatgccttggacttaggaaaggtgaacagctggtgaaaactcacgggcctcatgtggctaagaagcgtggcactgtggcttctcccagtccaccttcagtggagaggcttcaggaactgccctcggtggcccctcatgctgagcattccaggcacagcaagcagcctgagttgttggagcagcaagcagttatcctcctggagcccggcatggcagagtgaagcacgccttccaggagagggacccgctgacagcattccagagttttcagaacattttaccattaaagccaacagcaaaccacacagggcctttcagccacattaccaattttactcaatggtaactcaaaacttctagtgagagtttgggattttccytgggaacccaattccactgaaccaaagtagttgaagaaacactttttagcaaatagtctcttatttgattaaagatggctacaaatactccaagaaatgtgcccagtggagggcttagttgagggatcccatccttataaccaaatttttgggaggaaaaaaagggaa

SEQ ID NO: 775829 - DNA, 548 bp, Homo sapiens
agaaaaacatgttttagagcattaatgaaaacagaaatattacaatgcagtggaaacaacaaatggctaagcaagtgttactatggtcatatgagcactattgtccctgaaacttgcctctctccagccatcagattgatttagtattaccagtccctgatccagattactcttctaaactaaaaacaaaaggtggccatgcactgtagctcacrcctttaaccccaacattttgggaggccatggagggaaaattgcttgatcccaggagttcaagactagcctgggcaacatagagagattccatctctacaaaaaaatctaaaaattagccaggtgtagtcgcatatgcctgtggtcccagctacttgggaggctgaggtgggaggatcagatgagcctgagagtttgaggctgcagtgagctggattatgccactacactccagccttggcaacagagcaagaccctatctcaaaaaaaaaaaaaaaaaaaaaaaaaagagcaagaggagactcagaaaatacaaattacattgtagattttga

SEQ ID NO: 775830 - DNA, 583 bp, Homo sapiens
catggtaaaaatataagacatcatccttgatctcgaggaggttagagtctagtatactcattaaacaattgttgactcaaaggaatttcatttcaccttatatgccaggtagtagagtggttaagagaactctctggagttggactgcctagggtttaaattcctacgcttccatgtcttaccaacattactttgggcaagtcatgtaaatggcctcagcttccatgttcctgtaacccataacagctaatgggaattttccaagtctttttttatttttactaattcttcacatcaatgagataggggctattattacctgcatcttacaggtgagaaaactgaggacccgagattttaggcaagtaaaaggggtagaatttgaatgctctgctcatatatacttttcagttctgttatactgcctsatataggtatattcagagagctacagaaggtggctgatgatgagaaataaatagttatatcaaatgcactgtgcctagttatgtggtaagcagtcaataacattaatgatgatgatgattatgatgattatggaagactttggtgttaattggac

SEQ ID NO: 775831 - DNA, 570 bp, Homo sapiens
attgcccagaaaaaattagctcaaagccaataaacttccttctaaagtacaaaataaattattacattgtaatgatttctaaaaatacaccttttataggtaatttattaattaggttcctgtttaattaataaccagttcttagtcgttggttttggaaacttcctagtccttttgattcagaggggactgcagtgtttcttacatgtgacaccattaagctcccgctaaatcacacaggctgsgtgtcactcaaccacccacagtaaatacgccaagccatcgcccttttcccaatagtgccttcatttattggaaaagccacgggcaaaacaattaggtttgttgatgtaggtccttaggctccagaaacctcatctgtcctgtcagaacaagttcaggtaacgtatgactgccaactgcctatataaatcacatttattgaagattaacatgcacacaatgcctttaaagttttatagagagaattacaaacatgtgactgcagtttgacaccaatgttttcctccacctgggttaaaatgtcaccatttgaagtgttaagattaa

SEQ ID NO: 775832 - DNA, 570 bp, Homo sapiens
attgcccagaaaaaattagctcaaagccaataaacttccttctaaagtacaaaataaattattacattgtaatgatttctaaaaatacaccttttataggtaatttattaattaggttcctgtttaattaataaccagttcttagtcgttggttttggaaacttcctagtccttttgattcagaggggactgcagtgtttcttacatgtgacaccattaagctcccgctaaatcacacaggctgggtgtcactcaaccacccacagtaaatacgccaagccatcgcccttttcccaatagtgccttcatttattggaaaagccaygggcaaaacaattaggtttgttgatgtaggtccttaggctccagaaacctcatctgtcctgtcagaacaagttcaggtaacgtatgactgccaactgcctatataaatcacatttattgaagattaacatgcacacaatgcctttaaagttttatagagagaattacaaacatgtgactgcagtttgacaccaatgttttcctccacctgggttaaaatgtcaccatttgaagtgttaagattaa

SEQ ID NO: 775833 - DNA, 535 bp, Homo sapiens
gatcagagaaaaaagaatgaaaaggaatgaacaaagcctccaagaaatatgggactatgtgaaaagaccaaatctacgtttgattggtgtacctgaaagtgacagggagaatggaaccaagttagaaaacactcttcaggatattatctaggagaacttctccawcctagcaaggcaggctgacattcaaattcaggaagtaatggagaacaccacaaagatactcctggagaagagcagccccaagacacataattgtcagattcatcaaggttgaaataaaggaaaaaatgttaagggcagccagagagatgtagggaaaagacagagagatcagactgtcactgtgtctatgtagaaagggaagacataagagactccattttgaaaaagacccgtactttgaacaattgctttgctgagatgttgttaatttgtagctttgctccagccactttgacccaacctggagctcacaaaaacatgtgttgtatgaaatcaaggtttaagggatccagggctgtgcaggacgtgc

SEQ ID NO: 775834 - DNA, 450 bp, Homo sapiens
aatacccacttgctattccccaaatcccagagtccttaagaattgtgctaaatgcactctgcctgtgctctgtaaatggaacaacaaagcctggataacagcacatctgtttatggcatggtttattgaatattttaagcctaatgttgagatctactgcttgggggaaaaaatccttccaaaatattgctcattgacaacactgatggtgatgtacaagaagataaatgttgttctcatgtctgctaacacaacatccactctgcagcccatggatcaaggagtaattatgactttttagtcttattatttacraaatgtatttcattaggctacatctgccatagatagtgattcctctgatggatctgggcaagtcaattgaaaaccttctggaaaggattcactcttctagatgccattcagaacattcatgactcatgggaagag

SEQ ID NO: 775835 - DNA, 706 bp, Homo sapiens
ttcccaggaagtccctgacccagtgggaaaggaagaagggagaggtggcagccaatgggaaagaaggggcaggagccaagcagggccacaggacccgaagcagaaatgattcagaaagcaaagactaataaacagccaatagcaagacacttaaaaaaaaaaaaagagagaaatgacctacatgaccaagaaagggtgaataaatttcactatggccatctgaaggctagaaagttatgcagccattgctgtttaatgatgaataatggtgtggtatcttgcaaatgtgtagggaacacagaaggatgaaaattgagtttagactgagttctttttcttttctttgagacaagktcttgctctgttgcccaggctggagtgcagtgatgcaatcatagcttatttcaagcttgaattccttggattcaggcgatcctcctgcctcggcgccccacccagagtagctgggaccacaagtgtgcaccaccatgcctggctgagttttattttactttttgtaaagatgggatctcactatgttgcccaagctggtctcaaattcctggattcaaaccattctccctccaccatgagccaccgccctggtgtgatcagtgatgtggagcttcttttcatgtgtgcttgtcttctttggggaaatgtctaagccttttgcccagttttgaattggcttccttgtttttgt

SEQ ID NO: 775836 - DNA, 509 bp, Homo sapiens
aaaaaaagatatgcttatacatcttactacaattaagtacagtctagcaagataaagatagtaagccctacaacaaccactaagaaaataacccaagaaaaatcgttttaaaaatcataaagaaggccaggccagtgagccaaacacctgtacttcccagcactttgggagactgaagcaggaggatagcttgagcccaggagtttgacaccagcctgggcaacataacccgtcactgcaaacaagaaaaaacttakgcatgatggcatgttgttgcgggaattcagggaccccgaacggagggaccggctgaagccatggcagaagaacataaattgtgaagatttcatggacatttattagttccccaaattaatacttttataatttcttacgcctgtctttactgcaatctctgaacataaattgtgaagatttaatggacatttatcacttccccaatcaatactcttgtgatttcctatgcctgtctttacttaatctcttaa

SEQ ID NO: 775837 - DNA, 633 bp, Homo sapiens
ttttgacaagcccttgagtcttgtttctttctgcaccccagtaaaaaagaaagaacaggccgggcatggtggctcacacctgcaattccagcacattgggaggccaaggtgggcagatcacgaggtcaggagatcgagaccatcctggctaacacagtgaaaccccrtctctactaaaaagacaaaaaattagctgggtgtggtggcaggcgcctgtagtcccagctactcgggaggctgaggcgggagaatcacttgaacctgggaggcggagcttgcagtgagccgagatcgcaccactgcactccagcctgggtgacagagcgagactccgtctcaacaacaacaacaacaacaaaagacaaccaaaaacaaaaaacaaacaaaaaactgatcctatacttactgctcccagtctactaaagcagaaagaaaactggacccatgaccttcagcaggagggacctcatatgactcattcaatcatatacagatcctctctatcttctagtgctcctggtccagccacctcattttatagaagtgacttggtcccagagaggaagcgtgacttgcttcagatcactcagctcgtagatggcagtgttaggcttagaatgcaagtaaaaccca

SEQ ID NO: 775838 - DNA, 632 bp, Homo sapiens
tgtgcgcctacaagtcctttgcgtttccacttctgatctgccaagactgcagtgcttagttgggtagatttctttcccccgctaagctcacttttgtgatcaagagccctctgctgagtcctttctgtatctgtgacagtttccagccagagctgcccagtatttttaggtacttgaaactagattaaaaaaatattcacttccttctgggtggctcaggaagtcaaaaagcagttttcatttttttttgtttagtagcacttagctttgagtagtcaggtcacctgggggtcttactggggccttgatgaccttaaaggctagatctaaggacctatgaagcactcccgcttgaaaggaggaagaagaaaacacacaaccatttgtaggaggaatagtggagatrgaccaacccagaaactgtatttcagaataaattcattcctttgtgcttcaaggcccctcatactgatatgatgtcaccaaagctgctccagggctgtgacctgctagtcatggccctggggcacatccctttgctctccttctcagcatactgcagcagcagaggtagggtgttagggggtgtgcagattcatccctttctctagattatgagttcttgggatagg

SEQ ID NO: 775839 - DNA, 588 bp, Homo sapiens
ttctcatttgtcttcgttaatgacttgtatgtatatatatttccattgaagacatagatatgcatttgatcacctacacttgtttgtattttgagtcataaattaaggcatttcctgtccagaaagcacctgacaatcttatgataaaaaacatggaattttaaaatcacaaatgyaaataacaagccaggcacagtggctcacgcctgtaatcttagctctttgggagaccaaggtgggtagattgtttgagctcaagagtttgagaccagcctgggtaacatggagaaaccctgtctttacaaaaaataaaaaattagtggggcacggtggcatgtgcctgtagtcccagatactcaggaggctaaggtgggaggagtgcttgagctcaggaggtcgaggctgctgtgagctgtggtggcaacactgcactccagcctgggtgacagagtgagaccctatctcaaaaaaaaaaaggagtgcaaataacagatgaccttacaaacatcaaaagttatgtctttataataagttttgtctacatttaatgaaatatattggacaaggaaaaaatgtagcagtatgcgt

SEQ ID NO: 775840 - DNA, 588 bp, Homo sapiens
ttctcatttgtcttcgttaatgacttgtatgtatatatatttccattgaagacatagatatgcatttgatcacctacacttgtttgtattttgagtcataaattaaggcatttcctgtccagaaagcacctgacaatcttatgataaaaaacatggaattttaaaatcacaaatgtaaataacaagccaggcacagtggctcacgcctrtaatcttagctctttgggagaccaaggtgggtagattgtttgagctcaagagtttgagaccagcctgggtaacatggagaaaccctgtctttacaaaaaataaaaaattagtggggcacggtggcatgtgcctgtagtcccagatactcaggaggctaaggtgggaggagtgcttgagctcaggaggtcgaggctgctgtgagctgtggtggcaacactgcactccagcctgggtgacagagtgagaccctatctcaaaaaaaaaaaggagtgcaaataacagatgaccttacaaacatcaaaagttatgtctttataataagttttgtctacatttaatgaaatatattggacaaggaaaaaatgtagcagtatgcgt

SEQ ID NO: 775841 - DNA, 588 bp, Homo sapiens
ttctcatttgtcttcgttaatgacttgtatgtatatatatttccattgaagacatagatatgcatttgatcacctacacttgtttgtattttgagtcataaattaaggcatttcctgtccagaaagcacctgacaatcttatgataaaaaacatggaattttaaaatcacaaatgtaaataacaagccaggcacagtggctcacgcctgtaatcttagctctttgggagaccaaggtgggtagattgtttgagctcaagagtttgagaccagcctgggtaacatggagaaaccctgtctttacaaaaaataaaaaattagtggggcacggtggcatgtgcctgtagtcccagatactcaggaggctaaggtgggaggagtgcttgagcycaggaggtcgaggctgctgtgagctgtggtggcaacactgcactccagcctgggtgacagagtgagaccctatctcaaaaaaaaaaaggagtgcaaataacagatgaccttacaaacatcaaaagttatgtctttataataagttttgtctacatttaatgaaatatattggacaaggaaaaaatgtagcagtatgcgt

SEQ ID NO: 775842 - DNA, 417 bp, Homo sapiens
cacaatcctcaaagcataacggttctggaggaagctgagcattcctacttgggaagggagggtaggaatcaagattgattgaagtgagtcatcctaactcccctgctgagaggttcccatccccaggaactctgcctgtctgcacggattcattcctcacacactgtcgagcatcttgtgtgccaggtgctgcagatgaaaatatcgcatagttttgcaagtgagaaaaccaagactcagagrgttcccaagataacacagcaagtgatgcagctgagattttaacccaggcagtctggctgcagagaagctggagtacttagccattatagaaacttcaacaacaatcaaaacgcagttcctgggccgggcgtggtggctcatgcctgtaatcccagcactttgggaggccgagac

SEQ ID NO: 775843 - DNA, 417 bp, Homo sapiens
cacaatcctcaaagcataacggttctggaggaagctgagcattcctacttgggaagggagggtaggaatcaagattgattgaagtgagtcatcctaactcccctgctgagaggttcccatccccaggaactctgcctgtctgcacggattcattcctcacacactgtcgagcatcttgtgtgccaggtgctgcagatgaaaatatcgcatagttttgcaagtgagaaaaccaagactcagagagttcccaagataacayagcaagtgatgcagctgagattttaacccaggcagtctggctgcagagaagctggagtacttagccattatagaaacttcaacaacaatcaaaacgcagttcctgggccgggcgtggtggctcatgcctgtaatcccagcactttgggaggccgagac

SEQ ID NO: 775844 - DNA, 477 bp, Homo sapiens
agctttattgctgatatgcagaaagcttgggtgatggcaatagagaatcaaaccagccactatattcccttaagccaaagacttagccagggccagagaaaggcccttattctcttcaaatttatgaaggcagagagaggtgaggaggctgcaaaatattttcttttaagctagcagaggttggttgmtgagatttaaggaaagaaatcatctctataacataaaagtgcaagagaagcagtaagtgctgatgtagaagctgaagcaagttatccaggatatttagctaagatcgctgaggaaggcggctacactaagcaacagattttcggtgtagaccaagcagccttctattagaagaagatgctacctgggactttcatagctagaaagaagtcaatacctggcctcaaagcttcaaaggacaggctgactctcttgttagaggctaatggagttggtgactttaagttgaag

SEQ ID NO: 775845 - DNA, 646 bp, Homo sapiens
gctttattgctgatatgcagaaagcttgggtgatggcaatagagaatcaaaccagccactatattcccttaagccaaagacttagccagggccagagaaaggcccttattctcttcaaatttatgaaggcagagagaggtgaggaggctgcaaaatattttcttttaagctagcagaggttggttgctgagatttaaggaaagaaatcatctctataacataaaagtgcaagagaagcagtaagtgctgatgtagaagctgaagcaagttatccaggatatttagctaagatcgctgaggaaggcggctacactaagcaacagattttcggtgtagaccaagcagccttctattagaagaagatgctacctgggactttcatagctagaaagaagtcaatacctggcctcaaagcttcaaaggacaggctgactctcttgttagaggctaatggagttggtgactttaagttgaagccaatgctcattgactmtttttttttctttctttctttttttttttttgtgacagagtctcactctgttgcccaggctggagtgtagcggtgcaatctcggctcactgcaacctctgccacccaggttcaagcaattctcctgcctcaggctcctgagtagctgggatta

SEQ ID NO: 775846 - DNA, 569 bp, Homo sapiens
gctattaagcctggccagatgtccatgctgtccaaacggacaaacaagagaactgaggcccactgcttccattgccctggggcgaagaagcagacttgagagcagagtacgcatctgaaacatacttcaaaatgtaccctaaagatatktagcaaaaataatcccttcttgttgcaaagtgttaaaaacataagttccatcttgactctcacccgatcacacctttggttcatttagtgattgcttcacgattctgacatagcactttctaatacctggaaaaaattatattattttggatttataaatctgtgagcagaatactgttcccttttgtaccatttcagttgataattagcagtgatgtgctggtaggtagtattatcactgtaaaaatagattaacaaattcccatgattcctgacaattactcagtactcctctggtatagaattttactgttcttgcttctataaaagttaaaaaaacccacaggttacttttcagtttccgagcaaatttaagttaatctctttatgcaactcatttctgttatacggtaggtcttt

SEQ ID NO: 775847 - DNA, 628 bp, Homo sapiens
gaggcggaacttgcagtgagctgagatcacgccactggactccagtctgggaaacagagcgatactccatctcaaaaaaaaaaaaaagaaaagagaaacaaagactgatggaactagcgtcctctggaatggctcagaaagaagaagctatttttgctggacacccctactaccctgttaggtcgggagaggtttgagattcccctgggtttacagaataaaagacctcgatgtcccctgggaaatggctaagctggattcctaagggaactcatgaaaatctactaaatgaaatctgagaccactggcaccactgtctaatgattcatctccgaaaagcagataggttaagtagtttactgttatgcattaawttgtcctctccaccaccaccaaatgcatatgttgaaatcctaacctccagtacccagaatgggacctgatttggaaatagggctcttgcagatgaaattagttatgatgagatcataccggggtagggtgagcccctaatccaacatgactggcgctcttttaaaaaggggtgattggacatagacagcacacagggagagctccatgtgaagatgaaggcagagatgtgggtgacgcaacagagaagccaaag

SEQ ID NO: 775848 - DNA, 593 bp, Homo sapiens
atgctcccacttcagggcctttgcactgtttgtctctgcttctattcccccagatggctgaacaactcattccctcacttccttcacctatgtagtaaaacatcactttttcaatgaagagtttcatggacgcttaacatttcagccccttaacatttatattcactatttcttgctttatcttttcctgttgcatttctactatatatccgtataaatttgggatggcggaaagatgaataggaasaaagggaaaatgagaacaaggaaggaggcaagggtcaaggaataaagggatttgtatgccttgtgatattatcttgatttatcctgaagccaagaaggaactataaaggattttaatcaaagaagtggcctgagctgtgttttagaacaaaatcatgagcagcaatgtggaagatagaatgggaaaagtgaggagctagtggaatggggtcaaaactgagtgtagggagtacattagacaggaaatgagtgcctaaggaggatgtcagtgtgagccagagacaagaggcctgagatgagctgtgtgcagtatgcagaattgcacaaacacccaataagataaaata

SEQ ID NO: 775849 - DNA, 563 bp, Homo sapiens
ataaagtcaacaataacctccttgatgtattatctaatgcattattcttagtccttatcttaatttcgctgtggaattttggatcttgaactctcttcagctttgatgatcactaccattctattttgctctccttctaacctccttgttcacttcttctcactctctgatgttatctctttttattctgttwatctttaaatttttatttcccgtcaccagtctgaggacctgtaccatctcatcatctagtttttattgctttatacagaaatgacagtgcaaaattgtcaacatcccagacctcctgcctgaactccaaatagaatgatcttttagacatatcctccttggttcctcagtgatttacagccaaatcaaagtcaacatgcttaacatagaacatttttactgttcctcctaacaatgccttttctctaaattgcctacactgtatctaaccaattactgaagccagaggcttgtaagtcattctagatttctccttattcatccaccacacccaatcaatcaccagatcttacagatttacctactaaagg

SEQ ID NO: 775850 - DNA, 456 bp, Homo sapiens; identical to SEQ ID NO: 748264

SEQ ID NO: 775851 - DNA, 549 bp, Homo sapiens
ggggaaagctggtgctgtcacctttcaggatgaagagcaaacgctaaattttaattacaaaataccaggatgtctttgagaacattgttcttaacttcagtaagacttttcagttcttttaaaaatcctttgtatggtatctcagaatcacaaagtttaattttaaaagggatcatcatgatgagcttattcaacactttcatttcataggcaacagaatggaagtctagaaggattaattgacttacttaaggtcagttttatagaaacgaaaaaaaaatcttgaacaaattctctagcttttagattgggggaataagactatttactcattcacttcccaacaaatcactcacccactgtcccgaagcccarggcctgctctcttccatggatacccactttcccttgattcagaacttgacagtaagtggagtggggaggaaagcctattaaaggctatgctctttaaacagagtgcttacattttagacacagtaggaataacagtagagaaagcaattagcagggggaatgtcaggaagtcag

SEQ ID NO: 775852 - DNA, 601 bp, Homo sapiens
atttcttttttgactatgagtaatttagaaatagatttcttaatttctaaacatatgggaaagttctactatcatttttattattttgtttttaatattttaagataattttaaatctatagaaaagaagaataatataaagaactcccacttacccttcccagacttatagttgttagcttttatatcttctctctgtctgtatgggtgtctatgtgcatatatgtattgagggtatatatatatatatatatatatatatatatatatayatacacctatatacatatatatatacatgtatgcctatatacatatacatatattttgtgtgcattgatatatatatctatatatatatacaaaatacattttatataatatataatacatatgatatatactattatatacacacacatgctcatatgtgcctttaaaattagccttgttgagggtgtgcaggtagtaaacttacactttctcagtttttgtttggaattctttatttcatctcaatactttaaaaaaatcgaattttagatcgagaagtttgggggtgctttttcactatgcataatgaatatattattatatatta

SEQ ID NO: 775853 - DNA, 614 bp, Homo sapiens
acctaaaaccgattgtatatcaatcgtttgcctgtgagctgtgtaacatacacatgtcttgccttccaggagtttgtgatctagtgaaatgtataaaaatatacatgtcaaaggagtggcttaagtaccgttagagtttagagggggyaaacaattttttcttcctgtaagactttatgtctgaagcgggatttgagttgaggaataaaggtgatacataatagtaattcgtgataaaaataatattgaatgacaaattcaaatgcaatatttgttttattaaatctaagcaacttaggttggatataaaaaataagggtggaagatacaaaataatccaattacagcagatgcctttttatagctatattttgtttcatgctaattgaaaaattagaagcagaaaaactctgttaattagtactttctttagtttttttatatttagttttacctcctctatgagtcagcatttatgtttatccatatgaagagattgccaaaaaatcgtgacttaaacatacagggattgattttctcacttaaggcaaatcccaaggcatagcagctccatgatgtcactggggtttctttctagccctttaaccacccac

SEQ ID NO: 775854 - DNA, 614 bp, Homo sapiens
acctaaaaccgattgtatatcaatcgtttgcctgtgagctgtgtaacatacacatgtcttgccttccaggagtttgtgatctagtgaaatgtataaaaatatacatgtcaaaggagtggcttaagtaccgttagagtttagagggggcaaacaattttttcttcctgtaagactttatgtctgaagcgggatttgagttgaggaataaaggtgatacataatagtaattcgtgataaaaataatattgaatgacaaattcaaatgcaatatttgttttattaaatctaagcaacttaggttggatataaaaaataagggtggaagatacaaaataatccaattacagcagatgcctttttatagctatattttgtttcatgctaattgaaaaattagaagcagaaaaactctgttaattagtactttctttagtttttttatatttagttttacctcytctatgagtcagcatttatgtttatccatatgaagagattgccaaaaaatcgtgacttaaacatacagggattgattttctcacttaaggcaaatcccaaggcatagcagctccatgatgtcactggggtttctttctagccctttaaccacccac

SEQ ID NO: 775855 - DNA, 601 bp, Homo sapiens
aaaggacttgacagagggaattcaaccttcttaccctttgacgttctgccatgtgaggacatagcatttgtccaggatagactggaggctcaccagacaccaaacctgccaatgccttgatcttggacttcccagcctccaaaactgtgaaaaataaatttctattctttgcaaattacatagtttgtgggattttgttgttgcagcccaacacagactaagacacttcctacttcaatgaatgtctccttgcttctatgaattgcatattctgaagtcaactttattgcatctctctcccatcccacactcaggtagccactgagtcctagtatatatgcttcgcaaagtttctsgtttacttctccttcccgtgtcatactatggttactctaatttaccatcatgactttacttctcatttttaatagtagactacctagtttctgagtgtcaccattttatttaatggtggctatacaatagagtaattttcaccatgtattccatttgttaaaaatctatattagcttcttttgcatatttgaataaatttgaaagtttcaaccccacattaagggtccgtatgaactggtcccag

SEQ ID NO: 775856 - DNA, 606 bp, Homo sapiens
cagacccaagccacactcactggcagggggtaagggacagggggcagggtgggggccaggagcaacacagtcccatctgtccaggcacggtgccatccccataagcaatgggcagtcagtgcacacatgttggcccccacctcataatgcacatacatggaaataraaatggtgtggggcggccggagggtggccctccggctagtgtcatgtctcctgatcacatgttggcttgttctcgctgaagccaggagttgtgggcacaagacacggtgttccaggtgtccatgtagcagtctattcacatgaggatgcacttctgcttgaaattgtcctgggaggccccaacccaccttcccaatgtgcttccagaagcacctttctgcaggtgccatgcaatctgcaccttcacttgctccacaacgagccctgggtcaagccttctgctgcttgaacccctgaaatccaagcagaagctgccctccatagctctgcaaagtcaaccagactgaggctgcctgcgcccacctgatctttttactgtttccatacttttgcctttcccagaatgttacatggttggggccatacagtatacagtcttct

SEQ ID NO: 775857 - DNA, 666 bp, Homo sapiens
atttatgaacaggtctttttttttttactaagttagaaacatctaaaagtattcacttctccttgcacaaggtactatttaagtaaaatatgtaagtacttttgacaactttgctttaatacataatgaaaacaatcctagtttttcwcaaactaaaagataacacaatggaaaggagaatacaatctcagtcatctaaatctaaagtaattcaatcttgtgttagtcagtttccgctgctgtaacataaacttatttctcacactcctggaggctggaagtccaagatcaaggcaccaggagatgccaggtctggtgagggcctgtttcctggttcatagggggctgactttttgctgtgtccttacatggtggagtggggaggcagctctttggggtctctttcacaagggtaccaaccccattcatgagggctccaccctcatgacccaatcacctccaagggccccaactcccaataccctcacagcagggattaggtttcaacatatgaatttttagagaacacaaatattcagaccatagtaaacccacttttccttcctaacaagtgagtaaaagtacactgcaggagggcctggatttcagtcagttggagaagggagaagtgcgtgcgcccgtgcccaggcgtccagcagagggcag

SEQ ID NO: 775858 - DNA, 573 bp, Homo sapiens
gggaccattgtaacaaggtcttgcatagcaatggggagagagattgggtttaactccaaatacatcatgggcaagtgggagttgatagccaaggagtagggttggggtcaatgaatagaaaattagtaagaggtagcataagggaaaggggaattctggctaaactgacctacaggattcttgttgaaggcaggcagggtgatcaggcatcacctggcagctggtggggatgaggaacctgatcaagatattgaggatgatccagtattgagaataggagcttcttgttaaactacctaagcagtgcactttgctaaaactggattttataagaaagcacagagatgggccttagcagaagattcagaagcctgactaaagtttggccaagcaaggactytatgtcagtggacaaggtggactttgttactcaaacatcctttgacctagtcttgggtacaattgtttcacatatcttgacagcagaatgcaatatgctatgctcccttaggaggaaactatagcattaatctcaagtgcttgcttaaagcagttctcagtctctgcacctct

SEQ ID NO: 775859 - DNA, 561 bp, Homo sapiens
acattttaagggaatagccagactattttccaaagtggctgcactattgtaaatttccaatttctatatgagaattccaatttctccatatcctaatcaaacttcttccttctggtgggtgtgacttggtgtctcattctattttgacttgcatttccctaatgattaatgttatcgatcatctttttgtgtgttttagccatttgttcatcttatttgaagaattacgtattcaaatyctttgcccatttttttaaaattggattgtatttttattgttgacttgtaagagttcttatatatgctgaatactttaccctttcaatatatatgttttgtatattttctaccactctttgggttgtcatttttactttcttaacagtaacctttgaagcacaatacggttgtgctatgtggttcaaatgcagtgtcttggtcattttgtctgtcttaggctctgggtagccagggttatagtgctgcaggcacccatgtgaatgtgatggaataacaatggggcctcagggatggaaaaaattagtgactactggcccccag

SEQ ID NO: 775860 - DNA, 561 bp, Homo sapiens
acattttaagggaatagccagactattttccaaagtggctgcactattgtaaatttccaatttctatatgagaattccaatttctccatatcctaatcaaacttcttccttctggtgggtgtgacttggtgtctcattctattttgacttgcatttccctaatgattaatgttatcgatcatctttttgtgtgttttagccatttgttcatcttatttgaagaattacgtattcaaatcctttgcccatttttttaaaattggattgtatttttattgttgacttgtaagagttcttatatatgctgaatacttkaccctttcaatatatatgttttgtatattttctaccactctttgggttgtcatttttactttcttaacagtaacctttgaagcacaatacggttgtgctatgtggttcaaatgcagtgtcttggtcattttgtctgtcttaggctctgggtagccagggttatagtgctgcaggcacccatgtgaatgtgatggaataacaatggggcctcagggatggaaaaaattagtgactactggcccccag

SEQ ID NO: 775861 - DNA, 657 bp, Homo sapiens
tttaagttctgggatacatgtgcagaatgtgcaattttgttacataggtgtacacttgccatggtggtttgctgcaagcatcaacccatcatctacattaggtatttctcctaatgctatccctcctctagctccccaccccttgacaggccccgatgtgtgatgctcccctctttgtgtccatgtgttctcattgttcaactcccaccaaacatgtggtgtttggttttctgttcctgtgtagtttgctgagaatgctggtttccagcttcatccatgtccctgcaaaagacataaactcattctttctatggctgcatagtattccatggtgtatatgtgccacatattctttatccagtctatcattgatgggcatttgggttggttccaagtctttggtattgtgaacagtgctgcagtaaacatatgtgtgcatgtgtctttataatagaatgatttataagcctttgggtgtataccccctartgggattgctgagtcagatggtatttctgattctagatccttgaggaatcaccacactatcttctacagtggttgaactaatttacactcccaccaacagtgtaaaagcattcctgtttctccacatcctctccagaatctgttgtttcctgactttttaatgatcgt

SEQ ID NO: 775862 - DNA, 566 bp, Homo sapiens
taggtccttgaccagagctggcaaattctacaagcattctttccagagtgaggccagtttttttctttcttcttctttttttttgggacagagtttcactctgttgttcaggttggagttcagtggcgcaatctcagctcactgcaacctccrtctcgggttcaagtaattctcgtgcctcagcctcctgaggttgctaaattggagatactaaggaccaacagtactcgtggtcatcttgcctgagagggatgttacagggcagtcaacagagccaagagctggggattacaggcatgcgccaccaaacctgcttaatttttgtatctttagtagagatggggttttgctgtgctagccaggctggtctcgaactcctggcctcaagtgatctgcccgccttggccccccaaattgatgggtggcctaagccactatgcccggcccattgtctttcaaagctccatcactatgtatttccgggccagcaaaatcttctaaattcaagatcctttgcagcctgctgattggtggcttgaaatctgagggttagtggactctggtct

SEQ ID NO: 775863 - DNA, 566 bp, Homo sapiens
taggtccttgaccagagctggcaaattctacaagcattctttccagagtgaggccagtttttttctttcttcttctttttttttgggacagagtttcactctgttgttcaggttggagttcagtggcgcaatctcagctcactgcaacctccatctcgggttcaagtaattctcgtgcctcagcctcctgaggttgctaaattggagatactaaggaccaacagtactcgtgktcatcttgcctgagagggatgttacagggcagtcaacagagccaagagctggggattacaggcatgcgccaccaaacctgcttaatttttgtatctttagtagagatggggttttgctgtgctagccaggctggtctcgaactcctggcctcaagtgatctgcccgccttggccccccaaattgatgggtggcctaagccactatgcccggcccattgtctttcaaagctccatcactatgtatttccgggccagcaaaatcttctaaattcaagatcctttgcagcctgctgattggtggcttgaaatctgagggttagtggactctggtct

SEQ ID NO: 775864 - DNA, 566 bp, Homo sapiens
taggtccttgaccagagctggcaaattctacaagcattctttccagagtgaggccagtttttttctttcttcttctttttttttgggacagagtttcactctgttgttcaggttggagttcagtggcgcaatctcagctcactgcaacctccatctcgggttcaagtaattctcgtgcctcagcctcctgaggttgctaaattggagatactaaggaccaacagtactcgtggtcatcttgcctgagagggatgttacagggcagtcaacagagccaagagctggggattacaggcatgcgccaccaaacctgcttaatttttgtatctttagtagagatggggttttgctgtgctagccaggctggtctcgaactcctggcctcaagtgatctgcccgccttggccccccaaaktgatgggtggcctaagccactatgcccggcccattgtctttcaaagctccatcactatgtatttccgggccagcaaaatcttctaaattcaagatcctttgcagcctgctgattggtggcttgaaatctgagggttagtggactctggtct

SEQ ID NO: 775865 - DNA, 524 bp, Homo sapiens
cctgaaacatataaaaccaagttataatccaatcatcatgggcacatgttctcagaacctcttgagactgtgccttgggccttggtcactcatgtttggctcagaataaacctctttaaatattttacagagtttgactctctttgtcgacactgccctaatgtcttgaaggaaaccaaaatattccagtccaaaatacacttctttggcatatttcctttttttttttttttttttgaggkggagtttcactcttgttgcccaggctggagtgcaatggtgccatcccggctcactgcaacctccgcctcctgggttcaagcgattctcctgcctcagcctcctgagtagctgggattacaggtgcccaccgccacgcccagctgaattttttcatttttagtagagagggggtttcaccaggttggccaggctggtctcgaactcctgacctcaggtgatccacctgcctcggcctcccaaagtactgggattacaggcgtaagcaccgcacctggccctct

SEQ ID NO: 775866 - DNA, 452 bp, Homo sapiens
agggtttttttggtttttattttctcatttatctatttttattttatgccatagcaactgccaatgcctggctaatgtggaaccaccagtacagcctaccttttagctgagtactacagaagaaaattctgcaagcacagtcacgtcttacatggccactagcaaacatcaaacaattcagcataatgtaagtacaaacagttttatgagaaatgctaaaatgttaccagcaaccaaaataatggtccaggctttgaacaatgattcaattttaaatccttaaaaacaatgcagcagtctgcaagtaacmacattctcagaagaaaatctcttaaaggattcagctaatgcatatggatgaaccaaagtccactgagacttaaaataattttcaaaagattcaagatgaatatgatatagtttaaatagttctaacaatttgcattaataag

SEQ ID NO: 775867 - DNA, 538 bp, Homo sapiens
cttcaggcttcaggcaatgtttaaaagaaaaatcctatattccttataccctgatacttagggggttacaccattcggtggacatgagttaaaaccactgaggtttgctctcagcttcaaaagaaagccagcagcagcctctctatgaaaactctcaaacagccctggagcagcacgtcacctcttccctgtttttatttgctaaccttaacttgtgagtcccaaccttttaggagaacatctgaagaagaaaaagaagtggctatctacagatcagacaccatcacaggagaaactggactccatcctggaaaactgggaaaatcgttccgttttgcaaaattgtattgtatttcacagccacaaatgaagaagtgccacttcaaggaattccatgataawttactttgtaaaaggaaatggtaatcctgcattttaactttttttttttttttagacagagtctcgctctgttgccgagactggagtgcagtggcacgatctcggctcactgcaacctttgcctcccaggttcaag

SEQ ID NO: 775868 - DNA, 605 bp, Homo sapiens
tttattcttcaggaacttaaaaagctaccagacgaaataagctataattatgcccaagctgctacattacacagctacaggtcattttccctaagaatcatatgaatcaagaatttggggtgggcatttaggtggaaccttgaaagattcacataatttgtatattaaggaagaaaaagtgagatgatagcactctaaaaagtaggcagagggtcaggcgcggtggctcatgcctgtaatcccagctactcgggaggctgaggcaggagaatcgcttgaactcaggaggtggaggttgcagtgagccaagattgagccactgcactccagcctgggtgacagagtgagactcttgtttcaaaaaaaaaaaaaatcttcagatattttcggtgtgttcagatactttccacatacacttaactctcaatttattgctcaaaagcctagcagaayacagataagtcaggcactatggggacttcctaccctggacggaagaggtctctatctctgtccacttcctcagggagaaggaggcttttctgtgacttcttttacttccttgcctcctactaaatcatagagagttgtgtgtaggtctcctc

SEQ ID NO: 775869 - DNA, 583 bp, Homo sapiens
ccacttgggccatatgacccaccagatccaatggtgcttgaggtgtcagtggcagataggaaagctctttggagcccttggcaggcccccataggtgaatcacagcaaaggcctctaggattttagagcaaggccctgccatcttctgcagataactactctccttttgagagacagctctgcctgttactgggctttggtggacacggaacgtttgactatggatcatmaagtcaccattggacctgaactgcctatcatgaactgggtgctttttgacccatctagccataaagtgggtcatggacagcagcattccatcatcaaatggaagtggtatatacgtgatcaggcttgagcaggtcctgaaggcacaagtaagttacatgaggaagtggctcaaatgcccatggtttccactcctgccatcctgccttctctcccccagcctgcgcagatggcctcatagggagttccctatgatcaattgacagaggaagagaagactagggcctggttcacagatggctctgcacaatatgcaggcaccacctgaaagtggacagctgcagcactacagccc

SEQ ID NO: 775870 - DNA, 583 bp, Homo sapiens
ccacttgggccatatgacccaccagatccaatggtgcttgaggtgtcagtggcagataggaaagctctttggagcccttggcaggcccccataggtgaatcacagcaaaggcctctaggattttagagcaaggccctgccatcttctgcagataactactctccttttgagagacagctctgcctgttactgggctttggtggacacggaacgtttgactatggatcatcaagtcaccattggacctgaactgcctatcatgaactgggtgctttttgacccatctagccataaagtgggtcatggacagcagcattccatcatcaaatggaagtggtatataygtgatcaggcttgagcaggtcctgaaggcacaagtaagttacatgaggaagtggctcaaatgcccatggtttccactcctgccatcctgccttctctcccccagcctgcgcagatggcctcatagggagttccctatgatcaattgacagaggaagagaagactagggcctggttcacagatggctctgcacaatatgcaggcaccacctgaaagtggacagctgcagcactacagccc

SEQ ID NO: 775871 - DNA, 641 bp, Homo sapiens
tccctgtcccctcaggaaaaagtcaaaatccttcagcataacacgtaaacctatatcactactctcagattcagacagtaagctccagcctactgaatgacttactttttattccctgatcccatcacctccttggcctcaccagcattgcccttgcacatgatgctttgtcgtctaggtacatcaaccctccatgctgaacaggtgcaccagcagaaggctttctgcatgaccttgttaatgacacagcatctccggcaccctggctcttggtgagtartttgatgtgcattcatcacctttgcgtaatttgatttcagtaacattggtcatggtctagttttgatgtgtgaatgctactaagccttgaggaggatctgcaggtatggttatctgatttggagagtggcagatctactaggaaacattacaggactaatgggcaagatctgagtgttaacagtgattaggcctaaggctagactattacccaactgtatgactcccgaaaggacttaaactttctgggccttattgggcttcttatttaggcctatttttatttatttattttatttttttgaaacagagtctcgctctgtcgcccaaggtggaacatagtggcatgatcatggctcact

SEQ ID NO: 775872 - DNA, 626 bp, Homo sapiens
tccaaagtcaacacatcaatcctccccagccacagcgcagaaaccagcccaccccacataattcttctggtccaggagagaagctcagataccttcacagaatgggacatttcttaaagtccacttgaaaatctgtttaaaacaattctaaagcatcagctaatgcattttctacagaatattttagaaaaggcagtatctggaatttaatattcagctatgtataccttggcaagatgagatacaatccctaaagcacatttctttgccatttttatttacagcacagacaacacagattcatgtcarctttctctgtaactgtaaatgggggtgaagaacctcctttttaaaatatgtgactatatacatatttttaattataaatatctaatataatttaaaaaccaaactaaaccaaaccagaggttaaattgtattaggtttcataccacaatgaaatctgtaattacaaataaataagtctctggaaaaatacataaataaataaatacatacatacatgccattttagaaatctaaaacctaaaatggaagattgttcagctaatcattaccataattcagttaacataaggtaaactaaaaaagggaccataggtctt

SEQ ID NO: 775873 - DNA, 547 bp, Homo sapiens
gagtaaagaaataacttattaaatgaagatgattgcattcctattacaggcctcatgttaaatcggaattggagaaaaccctgttggcagatagaaaactttaaaatctatttcattcctgttttcccttttccttttcttttctttttttttttttttttttttgagacagagtctcgctctgtcacccaggctggagtgcagtggcgcgatctctgttcactgcaagctcctcctcctgggttcatgccattctcctgcctcagcctcccaagtagctgggactacaggcaccygccaccaaacccggctaatttttttgtatttttagtacagacagtgtttcaccatgtcagccaggatggtctcgatctcttgacctcgtgatccgcccacctctgcctcccaaagtgctgggattacaggcgtgagccaccgtgcccggccctctttttctttgtcctaactacagatttgcagaatccctgagagactgtaactacctatggctcttctccccctattaatatttttttaatctaaaacc

SEQ ID NO: 775874 - DNA, 518 bp, Homo sapiens
tatgtcatttgtatgtcttcctttgagagatgtctattcaaatctttggcccattttaaaaatcagattattatattttttcctatagagttgttttagctccttatatattctggttgttaatcccttgtcaaatgagtagtttgcaaatattttctcccattctgtgggttgtctctttactttgttgattgtttcctttgctgtgcaaaagttttttaacttgatgtgatcccatttgtccattttgctttggttgcctgtgcmtgtggggaattacttcagaatttttttcccagtccaatgtcctggagagtttctaaaatgttttcttgtagtagtttcatagtttgaggtattagagttaaatctttatgatggttaatattgagtgtcaacttgattggattgaaggatgcaaagtattgttgctgggtgtgtctgtcagggtgttgccaaaggaaattaacatttgagttagtggacagggagaggcagactcaccctcattctgggtg

SEQ ID NO: 775875 - DNA, 645 bp, Homo sapiens
ccaagagctctctctttgaaagacactgttgagagaatgaaaagaaaagccatgaactcagaaaaaaaatttgtcaattgcctatattaattttacttttttttttttttttgagacggagtctcgctctgtcacccaagctggagtgcagtggcgtgatctcggctcacccttctaagctccgcctcccgggttcacaccgttctcctgcctctgcctcccaagtagctgggactacaggcatgtgccaccacagctggctaattttttgtgtttttattagagacggggttttacygtgttagccaggatggtctcgatctcctgacctcgtgatccgcctgcctcagcctcccaaagtcaatcacatgtcttataaaggacttatatctaaagcatatgaagagcttttgaaatttaataataaggaaacagactaccaatttaaagatgggtaaaagacatgagcacaagataaaaaataggtaaaatatatacagcaaaaaagatatacagatggcaaataagcatctgagaagatattcaacatcattgatcattagggaaatgtaaatgagaactacaatgagatgtcattacatactttttaaaatgtctgaagttaaaatgactgtaccaagttct

SEQ ID NO: 775876 - DNA, 560 bp, Homo sapiens
acttttttttttttttttgagacggagtctcgctctgtcacccaagctggagtgcagtggcgtgatctcggctcacccttctaagctccgcctcccgggttcacaccgttctcctgcctctgcctcccaagtagctgggactacaggcatgtgccaccacagctggctaattttttgtgtttttattagagacggggttttaccgtgttagccaggatggtctcgatctcctgacctcgtgatccgcctgcctcagcctcccaaagtcaatyacatgtcttataaaggacttatatctaaagcatatgaagagcttttgaaatttaataataaggaaacagactaccaatttaaagatgggtaaaagacatgagcacaagataaaaaataggtaaaatatatacagcaaaaaagatatacagatggcaaataagcatctgagaagatattcaacatcattgatcattagggaaatgtaaatgagaactacaatgagatgtcattacatactttttaaaatgtctgaagttaaaatgactgtaccaagttctggtgacaat

SEQ ID NO: 775877 - DNA, 613 bp, Homo sapiens
caaatcaccagtttccaaatgctagttaatacaaaagtgagtcttatttctgaaatacctttattgaggtttgagttcaagatcatgattgcctaaaacaaatttaatacattaatgtgtgcatgtttcagaaaaattattttttaatacaagagtcctttgagtcctttgtaccttgaatatttgaaagacttagctggcattttatcagatgcctcctgggagaggttagcatcagatacattttgtaaattctttctcagtcccaacttgctctgccctattcaagtgcctacatctgtacatcgatttattattwttttttttcagttaaaaaatgtgtgtctttatttaaagctcaaaacctgattggcattcaatggtatgttttcatgtttacatttccttcatagctattgtcaaatacacattcccatttctaattctgttatatctttggcattcattcattgaccaagaaactcaaagcgactattgtacggcaagaaccaggcatgaaaaatggccaagacgtagttactgcttttgtgcaagtcatggtctagtgtgagagacagatgcgccaacgaataattacaacccgctgtaatga

SEQ ID NO: 775878 - DNA, 611 bp, Homo sapiens
gatcacaaattttcacgtggagtgatatccactagtgtaacactctggatctctatatttcctcgctcacttctctgattagtaaatggagaaaggaaaaggactgttagatacaatcctcttgttctctctcctcagctctcccttcccrcagagagcactgactttgacattgtacttagccatcactccctgtggctggccaagtggtacatgtcctaattctgggtgcaacataccagaactggcactgtgatccccgtcaacctgaccccaacttcggagagagaagaaaagcgcaatttgtgaattcccctcaagcccatcggggcaaagtcaacaaagatagatgtaaaaataacattggcggccaggcgcggtggctcacacctgtaattccagcactttgggaggcggaggcaagcagatcacgaggttaggagttcgagacaagcgtggccaacatggtgaaactccgtctctactaaaaatacaaaaattagctgggcatggtggcgggcacctataatgcctgtaatcccagctactcggtaggctgaggcaggagaatcgtttgaacccaggaggcggaggttgcagtgaggtgaggt

SEQ ID NO: 775879 - DNA, 592 bp, Homo sapiens
  misc_feature 562, 563, 564, 565, 566, 567, 568, 569, 570, 571, 572, 573,574, 575, 576, 577, 578, 579, 580, 581, 582, 583, 584, 585,586, 587, 588, 589, 590, 591, 592: n = A,T,C or G
caatagttaaaaattgaatacaacccaaatgtccatcaactgatgaatggataaacagaagatgatataatccataaagtggatattaactagccaactaaaggaataaaatacaaatatggctaaaccttaaaaacattatgctaggcaaagaaactggacacagaaggctgtatatggtatgattctaattatgagatatatctagaataggcaaacccatcaaggtgaaatgtarataagtgtttgggatggggagaaggggaaaatgggaagaatgaggtttctgtttggggtggtggaaatgttctagtatcagatagttgtaatagttatacaacatggtaaatatactaacaaacaattatatacttaaaaagaagtaaaattatatattttagaccaggcacagtgagtcatgcttgtaatctcagtgctttgggaggccaaggcaggaggattgcttgaggccaggagttcaagaccagcctgggcaatatagcaagacactgtctcaaaatgtttaaagtctatatttttatatgtgcctaattttgtattnnnnnnnnnnnnnnnnnnnnnnnnnnnnnnn

SEQ ID NO: 775880 - DNA, 592 bp, Homo sapiens
  misc_feature 562, 563, 564, 565, 566, 567, 568, 569, 570, 571, 572, 573,574, 575, 576, 577, 578, 579, 580, 581, 582, 583, 584, 585,586, 587, 588, 589, 590, 591, 592: n = A,T,C or G
caatagttaaaaattgaatacaacccaaatgtccatcaactgatgaatggataaacagaagatgatataatccataaagtggatattaactagccaactaaaggaataaaatacaaatatggctaaaccttaaaaacattatgctaggcaaagaaactggacacagaaggctgtatatggtatgattctaattatgagatatatctagaataggcaaacccatcaaggtgaaatgtagataagtgtttgggatggggagaaggggaaaatgggaagaatgaggtttctgtttggggtggtggaaatgttctagtatcagatagttgtaatagttatacaacatggtaaatatactaacaaacaattatatacttaaaaagaagtaaaattatatattttagaccaggcacagtgagtcaygcttgtaatctcagtgctttgggaggccaaggcaggaggattgcttgaggccaggagttcaagaccagcctgggcaatatagcaagacactgtctcaaaatgtttaaagtctatatttttatatgtgcctaattttgtattnnnnnnnnnnnnnnnnnnnnnnnnnnnnnnn

SEQ ID NO: 775881 - DNA, 629 bp, Homo sapiens
caacatttttggcaccaaggaccagtttcgtggaagacagtttttcccatggaccgggggcaggagaggatggtttggggatgattcaagcacattccatttatcgtgcactttatttctattattattagattgtaatatacaatgaaataattctacaactcaccatcatgtagaatcagtgggagccctgagcttatttttctgcaactggatggtcccatccgggggtgctgggagatagtgacagatcatcaggcattagactctcataaggaggttgcaacctagatcccttgcatgcacagttcacaataggsttcctatgagaatctaacactgccgctgatctgacaggaggcggagctcaggtttacggtaatgtaagcaatggggagtggctgtaaatacagaagcagcaccgctcccttccccaccgctcacctccttctgggtagcctggttcctaacaggccatggaccagtcagtacccatccatggccaaggggttggggacttgtttagactagataattcctaagttcctttccatttctccaagcttccaattctgacactataaattctgaccaggagtgaaataaaccaggcacagaaagacaaactt

SEQ ID NO: 775882 - DNA, 629 bp, Homo sapiens
caacatttttggcaccaaggaccagtttcgtggaagacagtttttcccatggaccgggggcaggagaggatggtttggggatgattcaagcacattccatttatcgtgcactttatttctattattattagattgtaatatacaatgaaataattctacaactcaccatcatgtagaatcagtgggagccctgagcttatttttctgcaactggatggtcccatccgggggtgctgggagatagtgacagatcatcaggcattagactctcataaggaggttgcaacctagatcccttgcatgcacagttcacaataggcttcctatgagaatctaacactgccgctgatctgacaggaggcggagctcaggtttacggtaatgtaagcaatggggagtggctgtaaatacagaagcagcaccgctcccttscccaccgctcacctccttctgggtagcctggttcctaacaggccatggaccagtcagtacccatccatggccaaggggttggggacttgtttagactagataattcctaagttcctttccatttctccaagcttccaattctgacactataaattctgaccaggagtgaaataaaccaggcacagaaagacaaactt

SEQ ID NO: 775883 - DNA, 614 bp, Homo sapiens
gggacctcctcagccaatgggtgtcctggattcttcctttcttaggacctctagcagttataatattgttacttctctttggaccctgcatctttaacctgcttgttaagtttgtctcttccagaattgaagctgtaaagctacaaatgattcttcaaatggagccccagaggcagtccatgactaaaatctactgcggacccttagaccggcctgccagcccatgctccaatgttgatgacatccaaggtacccctccggaggaaatctcaactgcacaactcctactgtgccccaattcagcaggaagcagttagagcggtcatcgacagacctccccaacagcacttaggttttcctgatgagagggggaactgagagacgggactagttggatttcctaggccractaagaatccataagcctagctgggaaggtgacagcatccacctttaaacacggggcttgcaacttagctcacaccagaccaatcaggtagtaaagagagctcactaaactgctaactaggctaaaacaggaggtaaagaaatagccaatcatctatctcctgagagcacagcgggagggacaatgatcgggatataaacccagg

SEQ ID NO: 775884 - DNA, 584 bp, Homo sapiens
gaccttgagtgtcagcgcagcctggatccagcaggtcaatgtgccaaatccaaaggtcaaggaagttccgacgttatggatttcttcatcatttgtgagcttagggatgaatggataatgacacatgaaggcccattcagcaaagaagacaggcaagttgaaggaatgaatatatgaggggaraagataggaaaagaaatatcccaataatgggatgatagattgcagaaagattagctcttcgttctattctcaaatggtttgaactctgaggggatgaaggagataaataatacccccaacccttaaaaacatttgtgtagaaaaagtaaaagaaaacagaaggagagttacagaaaaagaaatgtttctacaagcatacaccccaaacttttccaggataagaaaattagaccaggaatttggacatggttttttttgtttgtttgtttttgttttggtttgtttgtttgttttgagacagggtctttactctgtctcccaggctaaaatacagtggcgtgatcacggctccctggctcaaagcgatcctcccacctcagcctctggagtagctgggacca

SEQ ID NO: 775885 - DNA, 461 bp, Homo sapiens
acagaaagtagctctgggagttatttcccaaacctatccaaggtggccttagactgatacattgtttgaaagtttcagtttaagataaaaaaatggtccccccatgtccagtctttaatctcctcatcctcacaaggcttatttcagaagcacccacccctgcatctaggtgargggagcccagggaaagcaattccaatagcatgtgtcccacaggcgtcatggcagagtcatggagccagcctgggacagtggagccaactcaagttcacctcgagtccccaactctgctactggccagctctgtggccttgagaaacgtcagcctttctggattcagtttccttctctgaaaagagaggactcttctctaaggtccccttcagccctaacattcgaccacagcaacagagatgagtcgggcgtgttctcatatgcctgacttcaaattcgaaacacct

SEQ ID NO: 775886 - DNA, 461 bp, Homo sapiens
acagaaagtagctctgggagttatttcccaaacctatccaaggtggccttagactgatacattgtttgaaagtttcagtttaagataaaaaaatggtccccccatgtccagtctttaatctcctcatcctcacaaggcttatttcagaagcacccacccctgcatctaggtgaagggagcccagggaaagcaattccaatagcatgtgtcccacaggcgtcatggcagagtcatggagccagcctgggacagtggagccaactcaagttcacctcgagtccccaactctgctactggccagctctgtggccttgagaaacrtcagcctttctggattcagtttccttctctgaaaagagaggactcttctctaaggtccccttcagccctaacattcgaccacagcaacagagatgagtcgggcgtgttctcatatgcctgacttcaaattcgaaacacct

SEQ ID NO: 775887 - DNA, 671 bp, Homo sapiens
ttaaaaggctgggatgagagggccagctttcttcgcagggctacgtaagtgacatgcctagtcaaaccaatcccctgagccctatgcaaatcaaacaccgcctcctccaacctctgtatatacacctgactggtatccatgacaggtgggacctcctcttttggttttgagcacccccccgcccccatccctctggctgtgtacggggagcctcttccttctgcctttctcttttctttccggcctattaaactccttaaaaccactcctcatgtgtccgtgtcattttatctaaactggcatgaggacaaagmaccctggtgttcctccactcatcaaagctgtatcatttggaccctaccctctgacaaagattcttcatgtgactaaactttggtcagggctcctgaaccttctactgggcccacctgtgaatgccttgtaaaatcccgttttagcaaaaaaaccccagccttcaatacctgatcattctccatgtcgggtttctattctccaccatcccccaggtgacatctgatcaccctggtgtctttggcaagaatcccgttaggttggtttagccagaatcccctcttaccccttatatttcctcttagtaattttctgtccacagccccccacccagctccttggctatagattcccacttg

SEQ ID NO: 775888 - DNA, 670 bp, Homo sapiens
aaaagccctgatgtggaaacaaaacaggaaagaaatgagctggagacagcctgggatgtgggctgctttagaaaatgccctgtatgtgtagctctgtgtctcttagagacagcagggacctgctgagaagggttgtcaggtgtagatgtgcagaacgtcccagctagaatctagctcacactccacatgttagagcagcacctggcgtaaagtatgccaccttctcattctcatactaaagaccccaagttgctagccaactgaatgctgtctccttccagaggaggtgctttttgtaattctcacaaaggtgtcctatggattagttaggtgtcctttggttaggacagggaggagggaakgggccatccacagtggtgaagatggcacctcacaagtgtccagtgcattcccttttacaaagttcttttagacacatggtcttggcaaacctacaagacaggtgggccgtctcccattttatagatgagaaagctgaggcccaacgaagggaaagcattttggcccaaggtcacccatggagcactgaggttttttgactcaaattccgtatgccttcctgtcactcttccctcctagacacaggtatgtccagccaatttgttctgtgcctcagtttacctttttgcaaaactaggagaggagatca

SEQ ID NO: 775889 - DNA, 624 bp, Homo sapiens
tctgtgctccgatcatcatgcagaaaaatactgggacgcaatgcatgtgcgtgccatattagaaattccagatttgcagacccatatcagaatctgggctttgctatttaccaccagtcttgggcaaatcaatgaacccttctgagtctcacttttccactactaaaatgggagcagtatttagcttatatggctgttttatgggttggagctaatggcgacatgggcagggcacatggtgagccatcactaaatattactaggtggtaggaacatttaygttatgtcagtagctttgactctgactatgctgaatctatataattcctacactttgttccatgtcacatctcttagctaccatggtatccaggcttatggtggctttgaccaaggagaggagaagaacttgcaggcttttgagaaaagatgggagatgaggaggtggacagaaatttcaaagttcgattgggggagatgatggaattagtcttgtttaaaacacttgtgactgcagaactttacacccactttctatttataaatagccctgtctctcagctcagctcctcctgcacaaggcttccgtggaagacaacagacacagagagcagctgccagtgc

SEQ ID NO: 775890 - DNA, 585 bp, Homo sapiens
gttgttcagtttcaacttaattctgtttgaattggacaatatacttcagatggtttcaattattattaatttatttagacttgttggatcctgtttttattttaaatcaaatctgacagcctctgtgttttgattccacttgcatttaatgaacatattgatatggtaggacttaaatttgctatttaactatatcttttctatatgtcatctttcttcgttcttttattcctattcccttcttttgagctgaatatatattttccagtgtactatgtacattcatttccacaatatatttagcttcattttagagattgttgtaatgtttacaatatgcatcttaaaacaatctacctcaaattaataacttaattcatgttatatatagaagctttattctaatatagtttccttgtcatccccttytttgtgttattattgtctttctaattatggctctctattatataaataacacaatttttaaaatttgtgttctacagttctcttttaaatcatttagatgaagaaatgttttaaatatatatacatttatttgtaaagtttttttatatttaccta

SEQ ID NO: 775891 - DNA, 623 bp, Homo sapiens
agcagccttcagagaaaatagatggtaaatacctcttttcaaagtttaaaggtgtcagactctcatttaatctcttctagatttgggaaagaactatgatatagtttggatacttgccctcactcaaatctcacgttgaaacctgatccccagtgttggaggtaaagcctagtgggaggtgtttttgtcgtgggagcagatycctcatggcgtggtgctgtccttatgatagagagtgagttcttgtgagatctggtcacttaaaaatatatgacaccttctttcccattctctcttttgctcttggtctcatcatgtgacatgcctgctctgcttcaccttccaccatgaggtaaatctccctgaggcctcctcagaagctgagcagatgccgtcaccatgcttcctattcagccagaagatcagttagccaagtaaacctctttcctctataaatcacccagtctcagatatttctttatggcaatgaaagaacaacctaacacagcctagaaaggaaaagcctggctgcattaatggagattctccacagctgcaaaattattttacaaaagacagctttgcagggccatttcaaaatatttcaaagaaatatattttgg

SEQ ID NO: 775892 - DNA, 623 bp, Homo sapiens
agcagccttcagagaaaatagatggtaaatacctcttttcaaagtttaaaggtgtcagactctcatttaatctcttctagatttgggaaagaactatgatatagtttggatacttgccctcactcaaatctcacgttgaaacctgatccccagtgttggaggtaaagcctagtgggaggtgtttttgtcgtgggagcagatccctcatggcgtggtgctgtccttatgatagagagtgagttcttgtgagatctggtcacttaaaaatatatgacaccttctttcccattctctcttttgctcttggtctcatcatgtgacatgcctgctctgcttcaccttccaccatgaggtaaatctccctgaggcctcctcagaagctgagcagatgccgtcaccatgcttcctattyagccagaagatcagttagccaagtaaacctctttcctctataaatcacccagtctcagatatttctttatggcaatgaaagaacaacctaacacagcctagaaaggaaaagcctggctgcattaatggagattctccacagctgcaaaattattttacaaaagacagctttgcagggccatttcaaaatatttcaaagaaatatattttgg

SEQ ID NO: 775893 - DNA, 518 bp, Homo sapiens
aaataaaacttcagtgaggctttaaaatttttcttcattttagtttattgcaggaggcagtaaataggaaagttccttatacagtcatttgcaaattgtaggtgacatggtcacaataaaaatattactatattcatcctgctgatacacatcaractaaatgttcttgctgttctgtgtcctgtcagatgacacattatctctcggaatatcaatggtcataatgttgccaaacacaatgataaaatagcctcaggaagttgctgttcagctcttgcatctttggggtctaaaaactgtcattagtgaataaaggctgtttattcgtatcacattaaagattacaatattttcaagtttcaaatttttcaaggtttagtttcaaaagcaatattgtccttcctaaatttatatgcagtttaacctatcttcacattgttgagtattaaattattcaaacctatgaatagtacatttagtttgtgagactaagcctacacaaaaattaatcataaata

SEQ ID NO: 775894 - DNA, 552 bp, Homo sapiens
gaataatgccacaatgaacatgggagtgcaggtatctctttgacatactgattttaattcttttggataaatatccagaagtggtactgctagattactggctaattgtatttttagttttttgagaaacctgcacaatgttcaccataacaattttacarttgcattctcaccaacagtgtatcagggttcccttttcttcacatcctcaccaacacttgttaactttcatctttttgctaggagccattctaacaggtgtgaagtgataccttgttttgcaactttaatttgcttgtccctggtgattagtgatggtaagcattttttaataaactttggtcacttgtatgttgccttttttttttcttttttttttggagatggagttttgctcttattgcccaggctggagtgcaatggtgccatcttggctcactgcaacctccacctccttggttcaggtgattctcctgcctcagcctcctgagtagctgggattacaggcatgtgcaccatgcctggctaattttctatttttagtagggacag

SEQ ID NO: 775895 - DNA, 667 bp, Homo sapiens
ggagttacagctgttaagtctatctacatgtccacaaatggatggcaaagggacaattttctttcaaattagaagcagtgttttcacaattattcctttctgatttctcttttttttaaccctgacaaaaaaaaaaaamaaaaaacacacagtaggtgtgtaaggggtgtggaagtttttggtacttatacttatttagggacagctgcactatagtacattacaactatctgctgccattgcccaagccgtaaacctgagagtgagcctcttccttctcccgcaaacctcacatttactcaatcaacagctcctgtgtattctgcttcctcattttctccaccctcacttgtacagtctgagtaatggctttagtcaactctcttccagactatgcacagcctcctaattattctctcagcctctcttgcccagtctgcatctgcacatttttcatacctactttgactttttgaaaatataaatattattgtattactaccctgcttaaagttcttcaggaagattctggaaagatagtggggtatcaccaggaatcagttttccttctggagagcaattgcactgactgaatctgtctaacatagctattttggaaatatggagtatattgaaggattgcaatctccaagggaaggcttgcaca

SEQ ID NO: 775896 - DNA, 728 bp, Homo sapiens
ggctgaggccctataaagaaaaaccaggtctgagggatccaaagacaggcaataggcacaatgtaaatgggcaggaccaatttcctgcaagtaagtcccctgccccatgaaaggaggccatgcttcatggcataaacaggccactggacctcaaaggttgcagacagcaggaaaaagggaggcataggtgagagctgttaattcctgttctccagattttccctgtttcattggtacacactgcatcggtacctatgggtggtgcctgccaaggttgccaggacttggggtaaaagacgtggaagggaaagggaggacactcactttctctctccatcatacactgagtattcactaaaggaaggaatggaaagagggatgcctgtatcccttgtctttcagaatgggcaaccagctctcttcaccacccccagcttatacttctctggagtgtatcctgaaccattgggactgctttgatccttagaatctggaggaaaaatgcctcacagccctctacccaaaggtttggccaaattatcattcatagcaaggactggcttggtctcaggaaggaaygattcatttcaatacgatccagtagttgggctttttctgtagatgtgaggacagatggtctgaagccccatatgtgcaggctttctataccttgcaaggcaacccagacctctgccaacaatgtgggattgatccagccctcctgtttg

SEQ ID NO: 775897 - DNA, 620 bp, Homo sapiens
tatatgaatatgcattgtttatgaaatatatacagtctacattatatttcaaatccttctgtaatgttctatgtcaggataatgtcttcagagctgccattatacacatcctaattaagagacagacattttatttcagaagagtatgcaatacaaggcattattagatgtatttatagaagaatgaagattaagaatattaatgtgttttctaagcaatatttatctgtgtttatcaaattgtaggtaattgcaaaaataaatctattctgcttattcgatctcaagaaacagcacacattttttttgcgatgtaaataatcaccattgtgattgtctggaagactccattagaaaattttcactgcttttgacaccttcttatatgttattcacagcagaggaaacktaggggactcttcattggcaggtatctaacatcagaccaaaagagaacagtttctcttatcctgcatttgcaacatgagagttgatcataacttatgaaaatgtgtctgacaaaggtctctatatttagtactgaagagtagggaaaaggaaaagaaagaaccttttcatattaaaatatatgtttaaaagccttaacccaatggatgctg

SEQ ID NO: 775898 - DNA, 557 bp, Homo sapiens
ctactggggtataatgtaataaatttgtgttgttttaccaaactaagtttgtggtcatttgctatggcagtgatagaaagtgaatacacccaatttcataacatttgtaaaagtttttattaaaacacacacagtcagtgaataattaagcaatgataatgaaaagacgtgttttttggaggaaaaatatctctggatttagaaagcttggggttttatcctakccatgctgcttactctataagtggcctaggattaaggactcctgggaagctcagttcttcatacatgatatgggaatacaactaactttcttacagaattatttaatacatggaaaatacaagatttataatcaaaagcagaaatctcataatcttaaagatttgtaccatagctttgagattcaaatataaagacagtaaaatatttttgactaagtattttattaaactaaattaagaaatgtcctatctggaacacagatctgtaaaagcagcatgtttgccagaatgtttgtaggcagatagatgaaggttagtaatacttagatcagg

SEQ ID NO: 775899 - DNA, 557 bp, Homo sapiens
ctactggggtataatgtaataaatttgtgttgttttaccaaactaagtttgtggtcatttgctatggcagtgatagaaagtgaatacacccaatttcataacatttgtaaaagtttttattaaaacacacacagtcagtgaataattaagcaatgataatgaaaagacgtgttttttggaggaaaaatatctctggatttagaaagcttggggttttatcctagccatgctgcttactctataagtggcctargattaaggactcctgggaagctcagttcttcatacatgatatgggaatacaactaactttcttacagaattatttaatacatggaaaatacaagatttataatcaaaagcagaaatctcataatcttaaagatttgtaccatagctttgagattcaaatataaagacagtaaaatatttttgactaagtattttattaaactaaattaagaaatgtcctatctggaacacagatctgtaaaagcagcatgtttgccagaatgtttgtaggcagatagatgaaggttagtaatacttagatcagg

SEQ ID NO: 775900 - DNA, 557 bp, Homo sapiens
ctactggggtataatgtaataaatttgtgttgttttaccaaactaagtttgtggtcatttgctatggcagtgatagaaagtgaatacacccaatttcataacatttgtaaaagtttttattaaaacacacacagtcagtgaataattaagcaatgataatgaaaagacgtgttttttggaggaaaaatatctctggatttagaaagcttggggttttatcctagccatgctgcttactctataagtggcctaggattaargactcctgggaagctcagttcttcatacatgatatgggaatacaactaactttcttacagaattatttaatacatggaaaatacaagatttataatcaaaagcagaaatctcataatcttaaagatttgtaccatagctttgagattcaaatataaagacagtaaaatatttttgactaagtattttattaaactaaattaagaaatgtcctatctggaacacagatctgtaaaagcagcatgtttgccagaatgtttgtaggcagatagatgaaggttagtaatacttagatcagg

SEQ ID NO: 775901 - DNA, 614 bp, Homo sapiens
acacacaagatttcctggtacgtactagccattcaataaatattagaaagaaagaatgaataattaagattaccatctatctcagctgcatctcagtctgtgctaaaactacaatccgaaaatccatcattccattcacctaaatgggtatagaaaccaacatttttaattggtgatctatagcagtctttagcattggtaagaatttttttttttttttttttttttttttaagacrgagtcttgctctgtcacccaggctggagtgcagtggcatgatctcggctcactcggctcactgcaagctccgcctcctgggtttatgccattctcctgcctcagactcctgactagctgggactacaggcgcccgccaccacgcccagctaatttctatttttagtagagacagggtttcaccatgataaccaggatggtctcaatttcctgcccttgtgatctgcccacctcagcctcccaaagtgctgggattacaggtgtgagccaccgtgcccggcctagcattggcaagaaatcttagccaatccctagtcaaaaaatcctgtgtgttagtcacaatggtcagagtgatgagattgaccaaaaaaaaaaaa

SEQ ID NO: 775902 - DNA, 529 bp, Homo sapiens
  misc_feature 300: n = A,T,C or G
gattagttaatttcacttaacataatggcttctagttccatccatgtttctgcaaatgacaagattttattctttttatggctgactaatatttctatacacatgcacacatatatatatatatatatatatgtatcacatttctgtattcattcatctgttattccatatattggctattgtgtatagtgctgtaataaacctaagagtgcagatatctcttcaacatgctgatttcctttcttaggctgtgtacccagcagcgagattgaataatatggtagttttatttttagtttnctggggaaggaacactatattgcttgtttttcatagtggctgtactaatttacattcccaccaacagtgtgcaacagtgtgcgagagttaccctttctccacatcctcsttaccattcataatttttgtctatttgataacagctcttttaactgtgatgagatggtgtctcattgtggtttgattctaatttccctgatgattagtgatgttcaacattttttcatat

SEQ ID NO: 775903 - DNA, 592 bp, Homo sapiens
ttaataaacttgacttattgctaagagaatgaaaagtcagggagaatgtatttgcaaaccttatattttatgaagatcttatatctaaaatgtattttaaaaaatcaaaacaaatcaggcgagagattttaacaaattttttaccaaagaattcatgtgattgggtaatacatacatggaaaggtgctcaccatcattatctttcaggaagtgcaaattaaaaacataatgaaatacctctatatatctacaagaatacctataatcaaaacggcaataccaaacattggcaaaatgcrgagagactagaacctttatgcattgctggtggaaatacaacacttggggagacaacgtgacagtttcctaaaaagtaaaatgtgtacttattacataacccagtaattccactgttatttatatgccaatgcaaaacgagacatacagctatgcaaaatcttgtacaggaatgtttatgacaacattctttatatacttaaacactgcaaacaatacagaattctattaactagtaagtggataaaaatgtatatatatacagtggaatatgaatgattaacagtaaaaagaa

SEQ ID NO: 775904 - DNA, 635 bp, Homo sapiens
tttctcctatggctttttcctaaaaaatgttatagttttatttcacatattcctccctgctctattttgagttactttttgtatatcttcacacatggcatgaggcttaatatgaagttttgtttgtctgctggtttattttgttttgtgtctatggatgactaattgttccaacttcatttttgaaaagcatttgtttaattctattgaattatttcattagcttgaatgtgaaaaatgatactgagctgggcaaggtggctcatgtctataatcccagctgcttggsaggctgaggcaggaggatcatttgagttgaggagttagttcaaggttagagtgagctatgactgtgccactgcgccacttcactccagcctgggcaagagagtgaggcctaatccctaaaactaaaaaaaattaatttattttaaaaaaatgttgaatgatcatagtgtcagtgacattgctttttttccattatgaaataatcattatttctttccagactcttttatataaacatatttttctcctttaacacattgatataaaaattacataaatacaatctcctgtttacaaccacccgatatgtctgtaacaaaatccaaccaagcacgttgaattcttat

SEQ ID NO: 775905 - DNA, 661 bp, Homo sapiens
aactttctcctatggctttttcctaaaaaatgttatagttttatttcacatattcctccctgctctattttgagttactttttgtatatcttcacacatggcatgaggcttaatatgaagttttgtttgtctgctggtttattttgttttgtgtctatggatgactaattgttccaacttcatttttgaaaagcatttgtttaattctattgaattatttcattagcttgaatgtgaaaaatgatactgagctgggcaaggtggctcatgtctataatcccagctgcttgggaggctgaggcaggaggatcakttgagttgaggagttagttcaaggttagagtgagctatgactgtgccactgcgccacttcactccagcctgggcaagagagtgaggcctaatccctaaaactaaaaaaaattaatttattttaaaaaaatgttgaatgatcatagtgtcagtgacattgctttttttccattatgaaataatcattatttctttccagactcttttatataaacatatttttctcctttaacacattgatataaaaattacataaatacaatctcctgtttacaaccacccgatatgtctgtaacaaaatccaaccaagcacgttgaattcttatttttatactattagattaatatg

SEQ ID NO: 775906 - DNA, 712 bp, Homo sapiens
cctcctcctcaattttttgtaatagtttcagtaggaatggtatcagctcttctttatacatctggtagaattcaactgtgaattcgcctggtccagggctcttttttggtttgtagactttttattactgattccattttggaactcattgttggtctattcagggattctattctgattcagtcttgggaggttgtatatttccagaaatttatccatttattctggattttctagtttgtgggcatagaggtgttcrtggtagtttctgaggatgttttctatttctgtgggtcagtggtaatgtcctttttgtcatttctaattgtgtttatccagatgttctctctttttgtctttgttagtctagccactcgaccctcaatcttattaatttttttcacaaagaaaaactcctggcttcatcgatcttttgtatgtttttgtgtctcaatttccttccattcagctctgatttttgttatttcttatcctctgctagctctgcggttggtttattcttgcttctctaattcctctagttgtaatattaaaattgttaatttgagatctttctaactttttgatgtgagtgtttagtgccataaacttccctcttaacaacagcatacctatgaatacagctaaccagataggtaaaagatctctacaatgataattacaaaacactgctcaaagaaatcagacatga

SEQ ID NO: 775907 - DNA, 712 bp, Homo sapiens
cctcctcctcaattttttgtaatagtttcagtaggaatggtatcagctcttctttatacatctggtagaattcaactgtgaattcgcctggtccagggctcttttttggtttgtagactttttattactgattccattttggaactcattgttggtctattcagggattctattctgattcagtcttgggaggttgtatatttccagaaatttatccatttattctggattttctagtttgtgggcatagaggtgttcatggtagtttctgaggatgttttctatttctgtgggtcagtggtaatgtcctttttgtcatttctaattgtgtttatccagatgttctctctttttgtctttgttagtctagccactcgaccctcaatcttattaatttttttcacaaagaaaaactcctggcttcatcgatcttttgtatgtttttgtgtctcaatttccttccattcagctctgatttttgttatttcttatcctctgctagctytgcggttggtttattcttgcttctctaattcctctagttgtaatattaaaattgttaatttgagatctttctaactttttgatgtgagtgtttagtgccataaacttccctcttaacaacagcatacctatgaatacagctaaccagataggtaaaagatctctacaatgataattacaaaacactgctcaaagaaatcagacatga

SEQ ID NO: 775908 - DNA, 712 bp, Homo sapiens
cctcctcctcaattttttgtaatagtttcagtaggaatggtatcagctcttctttatacatctggtagaattcaactgtgaattcgcctggtccagggctcttttttggtttgtagactttttattactgattccattttggaactcattgttggtctattcagggattctattctgattcagtcttgggaggttgtatatttccagaaatttatccatttattctggattttctagtttgtgggcatagaggtgttcatggtagtttctgaggatgttttctatttctgtgggtcagtggtaatgtcctttttgtcatttctaattgtgtttatccagatgttctctctttttgtctttgttagtctagccactcgaccctcaatcttattaatttttttcacaaagaaaaactcctggcttcatcgatcttttgtatgtttttgtgtctcaatttccttccattcagctctgatttttgttatttcttatcctctgctagctctgsggttggtttattcttgcttctctaattcctctagttgtaatattaaaattgttaatttgagatctttctaactttttgatgtgagtgtttagtgccataaacttccctcttaacaacagcatacctatgaatacagctaaccagataggtaaaagatctctacaatgataattacaaaacactgctcaaagaaatcagacatga

SEQ ID NO: 775909 - DNA, 601 bp, Homo sapiens
gaacaaatactgtgtcatctcatttatgatgagatgatattttgaaattttaaaaagtcaaactcataaaagcaaaaaataaaatggaagttgccagggactgggggttaggggaagtgggagatgttggtcacagggtacagagtttcagttaaaagatgaataacttatgggaatctaagtatacctaatctaatggtgactacagttaaaaataccgattgtgtacttgaaatttgatgatagtaaatcttaagtgttttcaccacacacaggmacacaaatgacaactatgtgaggtgacagagatgttaattattttcattgtggtaatcattacaccatgtataaatatatcaaatcactacattgtatgccttatatatagacaatttatgtttatcaattataccttaacaaagctagaaaggttaaataaataaccatttgaaaaatcccttaattacagcttcttataattccaaaataggagtgacacaataaattcgaagtttgcttcaacatctactaacttaatagaccatttaagtatgtgatacatttgcttcctttatatttgtcattttgaaatgaattatgc

SEQ ID NO: 775910 - DNA, 637 bp, Homo sapiens
ggacttgccttgactcaggcgagactttgaacttggatttttggttaatgcttgagagacctaagaatttgggggactgtgtggctggaaagatggccaaatagtaagagctctgatctgcagcttccaacaagataaacacaaaaggcaggtgatttctgcatttccaactgaggtacgtggctcatctcattgaaactggttagacagtgggtgcagctcatggtgggcgagccaaagcagggtggggcggtgyttcacccaggaagcacaagggggcagggaaccccctcccctagccaagggaagccgtgagagaccgtgccctgagtaatggtgcatttcagcccagatgctatgcttttcccatggtttttgcaacctgcagaccaggagattccctcgtgtgcctacaccactagggccctggatttgaagcacaaaactgagtggccatttgggcagacaccgagctagctgcaggagttgtttttatatcccagtggcatctggcatgccaaagaaacagaactgttcactcccctggaaaggaggttgaagccagggagctaagtggtctagctcagtggatcccacccccatggaggacaactacctaagatccatgggcttgaaa

SEQ ID NO: 775911 - DNA, 502 bp, Homo sapiens
gagttgaacaatgagaacacctggacacaggatggggaacatcacacaccggggcctgttgtggggttgggggatgggggagggacagcattaggagatatacctaatgtaaatgatgagttaatgggtgcagcacaccaacatggcacacgtatacgtatgtaacaaacctgcacrttgtgcacatgtaccctagaacttaaagtataataaaaaaattaaattaaaatttttaaaaaaagaaaataatttcaccaaaggcagcaacatgtgtctcagaaggtttcacttacggtaaaatatgaagtggcagtttctgagttcagacacagctgaagaaacctcagtacacaagtgcagaaagaaaccttctttgcctttaggttttctgaaagaaaataaaaagtcaccctgtatttcccccagcattcagggtagtgccatgtgtgaaaagagatagcaatgctctatcagccatgatggccttagtgacagaatcctg

SEQ ID NO: 775912 - DNA, 630 bp, Homo sapiens
gctaccaactgcaggtctcctctgagctgtactgtggctcaataaagcacctcttcaccttgctcaccttctacttgtccacatacctcatttttcctggactcaggacaagaactcgggacctgccaactagcagggctgaaagaggtgtaacataaacagggctgaaacgygctccttgcttgccaaattgcaggcaagaagaagagaagagagaaggagagaagagctgtgtcccttcaggaacacagacctaggagctcccccagccagggctgtgacaccttctttggggatctgcaggtcctgcatctccaagcttctgggtgccactgcattccctgatacccacagtggaagctgtttgcagtcggcctggtccagctgcagcctcacagggagctggcatctgtgcctggagctgcccaccccactgcagctggcatgcttggctgtgtgcagtggccagatcccatgctcgcttgctcacacacccctcactgctctgtacccagctcgcccttggcaggtgtgggatccagaccactagcatgagctgagtggacagaactaacccagtgggcccaagcaaaacacaggtaaaggctccacaagccagaggtttcaggc

SEQ ID NO: 775913 - DNA, 574 bp, Homo sapiens
tttctactttttttgatgtaggtgctttttgctataaacttactccttagtactgtttttactgtatcccataggtttgttttttgtttttttgtttttgtttatttttggagacggagtctctctctgttgcccaggctggagtgcagtggtgtaatcttggcttactacaagctctgccttctgggttcatgccattctcscgcctcagctgagtagctgggactacaggtgcccaccaccatgcccagctaatttttgttttttgtattttaatagagacggggtttcaccatgttagccaggatggtctcaatctcctgaacttgtgattcacccaactcggcctcccaaagtgctgggattacaggcatgagccactgcatctggcctgtatcccataggttttggtttgattttaaagtttttctcttctcaaaaacttagtgtgatgttactggcttctagagctttgggtagtgagacccttttacttgataacagtggtagctgggacaacttggcaatgtaaataaataaatggcatctagattggaaaggaagaagtacagtt

SEQ ID NO: 775914 - DNA, 586 bp, Homo sapiens
aacttttgttattaaaagttctgcattccataactcatcatggaaagagaaaatgatccaaattaaatatattgctgtggtgatctctaaattgctaaaatagtttataatcaatgtttggtttgtcgaacctatattcctaggaaaacaatcaaaacttcaggtgcatttggctacctgatgggccatttaaacattttataaagggatttcattcagttgtcattttcagtgcatgttttctgattgtaaaaaagctcttccatgcaagagggttgatgttaaaacagtagattattatgctgaagtgtattttcaccagctaaagaaagcctttgttggttcacagaggacagccaaccccttcacaatctagaatctgatgactggatcttctgagaacatcagaggactgcccttgccatccacatgacagcamaactttaaaaccttaaactttgggttcatagtcttacaactcagaagggtccctccacactcggaaccatacaccccttggaacccttaaggtaaagctaacaaggacagttcccccccagaagaagatggcatccttaatgtgaac

SEQ ID NO: 775915 - DNA, 562 bp, Homo sapiens
aatgcttgcccttaacataggatttcagaacactgctcctggggtctgaaagtttgtccctcacataggattccagaactctcctgctgtggtctgaaagtttgtaccgcacataggattccagaacactgctgctgtggtcggaatgtttttctgtcacataggattccagaacactgcagctgggttctgaatgtttgtccctcacataggatttccgaacaatggcaagaaggtctgattgttgggtccctcacataggattcctgaacactgctgctgggctctgaatgtctgtccctcacattcgattgcagaacactactgctatggtctgaacgtttktctgtcacataggattccagaacgatcctgctgtggtctgaatgtttgtctgtcacataggattccagaacactgcggctggggtctgaatgtccctgacataggattccagaacattgctatgagagtctgaatggttgtctttcacatagcattccagaacactgctacgagggtctgaatgttggtccctcacacaggattccagaaccctcct

SEQ ID NO: 775916 - DNA, 618 bp, Homo sapiens
ctgctgcctgatcgttcctctggaggttttgtctcagagggttacctggccatgtgaagtgtcagtctgcgcctactggggggtgcctcccagttaggctatcggggttcagggaccactaggtgggggttgtctgcccgttctcagatctcaagctgcgtgctgggagaaccactactctcttcaaagctgtcagacagggacatttaagtctgcagaggttattgctgtcttttgttggtctgtgccctgmcccccgaggtggagcctacagaggcaggctggcctccttgagctgtggtgggctccaaccagttcgaacttcctggctgctttgtttacttactcaagcccgagcagatgcggcgcccctcccccagccccactgttaccttgcagtttgatctcagactgctgtgctagcaaacagcgaggctccgggggtgtaggaccctccaagccaggtgctggatataatctcctggtgtgccatttgataagcctgttggaaaagcgcagtattagggtgggagtgacctgattttccaggtgccatctgtcacccctttctttgactaggaaagggaattccctgacccctagtgcttcccaggtgag

SEQ ID NO: 775917 - DNA, 561 bp, Homo sapiens
agtggctgtgctgggtatgcctcagtttgttgaggggcttgaggcggttccctcttcctatttcatgaaagaggttgtccatctttgctaaatttagaatgacacggacttgcccagtgattgcctttcttacatcagggacgtacattgggacttttctgttgattgatggtagtagttttcgtcttttgaattcctttctacattcctttcttgtgtccaatttgcccacaattaaggcaagagcctgagaaatgaagcatattttttcttactcttaatctagccacagcctgagctaaaagaataaccttatgtaagttatctccaatgccatcgcaagccttaatatatttagttamatgggccctctctgtctgggatctaatagcagtttgacactctgcattagcattattgtatgcaagaagctgtattacaacatcctgagctgttttgatcatttacggctttatacacagcctcttggagctgagcaataaaattaatatatggttctttaggtccttgtcagacagaactgaaataaggacacttttc

SEQ ID NO: 775918 - DNA, 511 bp, Homo sapiens
tcacaggtgtttagacccttgatgtgggtaagggcccaagagtcagaaaaccagagggttttgttgttgtttttgttgttgctgctgttgttttggtttttgtttttgtttttctaactcttttgtgactttggcatatggtgtcaaacagtggttcacaactttgggtgcacagttgaaatcatctggggtgttttaraaaatggtgatgtctgggtcccagcccccagattctcatttaattggtctggggtgtggcctgggccgtgggattttaaagctttctctaggtgatgctaatgagcagccaagaatgagaccagtgtcctcagacttcaacatgtttatgaagtgcctgggaggctactgagctccgggttcttgctcagcaggtctggcgtgggcttgagaggctgcatcactcctagtgatgctgaggcttctgattcaaggaccacacttagagcatcaacgaactagaatctacgtgccttggtaaaactctgatttt

SEQ ID NO: 775919 - DNA, 623 bp, Homo sapiens
atcccagagaaagtagccgggggtaaaatttacgttccctgaaagtctgaaagcttgtctcccactggttccgcccctcccccaggccaccgtgcttggttccccaagcctgccaggccccaggattctcttcagtgcccccacttccatggggccatgtgccaataggccccccagggggagtcgccctgcctctgcctctctccccacccgccgtggtcctcargagatctgaggggctagttatggcagctgatgggactcagacttctcaccctgcccagtgcattcaccccagagaaaggaagagctaccaggagtctctgccaccacagccagacagacggtttttgggaacaaggcagtttccttgtgatacgccagcccctcctcagggtccagcaagtcttgctttattccactcctgcagctccactttgttcacactgggcagagggtcaggagagggagtgccttgttcccaggaagtcaggagagcgtggctgggataaggtctacctcaaggagggctgtgctgctgaggtggacccttgggtggggtggacagagcagagcttccctacgccggaagcacacagactaccaggagctctgtgtgggga

SEQ ID NO: 775920 - DNA, 612 bp, Homo sapiens
atataggatattgcaaagaatacagatgaacagccagatggaagagatgcgtagggcaataaatgtgggaagggacattaagctgccatgttctctacaggcatgccatcccccaggcacctccacgtgttcagctatccagaagctctctgtacttttggggttttatggaggctttcttatgtaggcatgactgattacatcaatagccactggagatccactcaaccttcactcccctcccatccccagaagttgggtgatggagcaccatgacagtgtacaaatgccatggcaacgtctgaaacgtggaggaaccttcagttctgggaactccctgcccctttcccggaaaattcatgagtaatccacctgtttagcatataatcaagaagtaaycataggcatagtatatcaagcagcccacactgctgctttgcctatggggtagccacttttattcctttactttttattaaacttgctttcacttaaaaaaaaaaaagaaaagaaatttggaggggtggaagtggggctgaaagtctcaaccttctaatcatgcttagtctttccaatgatcagcccccattctgaagctatcaagggtgcccc

SEQ ID NO: 775921 - DNA, 570 bp, Homo sapiens
gaaggtcagaaaatccctcctaggttttatgactgttaaggacaaacttccccaacagcttcttggtactgctgacacttcccccaaacctctccatgctgcccacccctccacctaatgctctgcaactcttgtctgtgccgtccacccttccccctgagcccctttacatttctaagcccttatctaggcaccaggcgccagggtgaagccagcagacttcacctatcagggcttgctgcgataagcaaaccccaattacaaaccacccggaccgcacgggggaggtcrtgggaagcataaacaaactttacctacacctgtaaattcctgctgttcatctagttgctaccataaacgtcacaaagtgatatgtgacaaaattaaacagcaaacaaccccggaatgtggccataccaaagaactccttcaaacacccctcctcaatataaactcctcactttgtaagctcagggctgcttcctctgagtgtgatggagcagccggcaggttcaataaacgtactcgcctgactttgggtctattctttctttctctcagctgacctta

SEQ ID NO: 775922 - DNA, 560 bp, Homo sapiens
taggtccaaattcccagaaggaatggctcctcagggaacaaaatccgggacagtgctgggaaggcatgcactagtggcccccaggatcatgtctggtgttgatggattttcaattggggtactgaggaagagcagtggtttctgtagcaatcagaaagaccaggtaccagagaatctcagaaccagaagagattttggaatttacagggcagaggtcgtcagacttaagcatgcttcagaatcacctagaagctttgttataacagatggctagatcttgtcatactcagagtatcagagtaacagtccaaaattttgcatttctaacagtttcccaggtggaaggacaatggccgcactgcagtcaagtataggccgaggtacacatccggcatagcatgacacagcaggattrgagcacaggcacacaatcctgtgtattaaaccaccacagctatgtagccataacatgggagggctcatcacatgactctgagccactgttgtctgtgaggtgcataaatgcagcactgacagtgtgaaagagctgctgaacaaag

SEQ ID NO: 775923 - DNA, 646 bp, Homo sapiens
ttggcatattaaaaaatataaacatgaagatgtcatatcagagataaaataatctctaagattccaattctaagaggctctgaaaagaaagtatatgtagcagcaactacccaagtatcagcaattgttaattgttartatcaattgtggctgataatctatgttgagtcattcaacatccattcccaattgttcttttccttttcttcctttactgtgaaagctggaaaaccaaaagcttcatctctgatttttcccaggtgacataattctggccagtgaactacagactaaagacaccggggaggcatgcacctgtaatcccagttattcaggaggctgaggcacaagaatcgctcgaacccaggaggtagaggtggaggttgcagtgagcagagattgcaccactgcactcctgcctgggtgacagagtgagaccctgtctcaaaaaaaaaaaaaaaaaaaaagacagtggtgaggggagcccttcaccgagtacaagtcaatgtcttgctaaagaaaaaaaaaatcctttttcccaagaacataaatatgaggcctgtctgaaaatacagcattcatcttgggaacatgagagagagggcaggagaatgagccatcactctgacatggtcaagagcagaca

SEQ ID NO: 775924 - DNA, 517 bp, Homo sapiens
aaaaaatgctcttgcccaggtctttcattaccctttgcatcatttaaagcattattaatggtgtacatgttctcaattttaaagttttctctctgaaaatacatcctaagattaactgtttaaggaaaatagtaaagctaagtttstagtaagaaactcaccatcctttaaaatgcccaattctctgcatggtccaatagcatatctatttgaagatcaagaattaggaagtaatatagtgcagtgctatatggtcttagaaacacagagaagctattttgagcagtgtaagttctgaagcagactaatacattagcattaaaatacccaaagaggccggacacagtggctcacgcctgtaatcccagcactttgggaggctaaggtgggcggatcatgaggtcaggagtttgagaccagcctggccaatatggtgaaacctcatctctactaaaaatacaaaaattagccgcgcatggtggcgcatgcctgtaatcccagatacttgggaggctga

SEQ ID NO: 775925 - DNA, 612 bp, Homo sapiens
ttctgaccccttaatcacgggatgatgagacctaagagttccaagtaggtaactcttttctacatatgagctgagcctcttgggaccctttacaaaaagattctgagttaggtactgttctgagctccattgtacaggtagggaaattgagacccaaagtcacagtactagtatgwgatatgattccaggcacatcagatttaaaagcgctcacagttttgactccatcttattgagttcatgcacatggcaacatatagccttatgtttttttgtttgtttgtttgagacagagtctcactctgtagcccaggcaggagtgcagtggcacgatctcacctcactgcaacctccgtctcccaggttcaagtgattctcccgcctcagcctgccgtgtagctgggattacaagcgcatgctaccacgcccagctaattttttgtacttctagtagagacagggtttcaccgagttaaccagggtggtcttgatctcctgacatgatctgcatgcctcggcctcccaaagtgctgggattacaggcctgagccaccgcacccagccagcattatggtttttaatgctataaaaggcttttcacttagtaagact

SEQ ID NO: 775926 - DNA, 612 bp, Homo sapiens
ttctgaccccttaatcacgggatgatgagacctaagagttccaagtaggtaactcttttctacatatgagctgagcctcttgggaccctttacaaaaagattctgagttaggtactgttctgagctccattgtacaggtagggaaattgagacccaaagtcacagtactagtatgagatatgattccaggcacatcagatttaaaagcgctcacagttttgactccatcttattgagttcatgcacatggcaacatatagccttatgtttttttgtttgtttgtttgagacagagtctcactctgtagcccaggcaggagtgcagtggcacgatctcasctcactgcaacctccgtctcccaggttcaagtgattctcccgcctcagcctgccgtgtagctgggattacaagcgcatgctaccacgcccagctaattttttgtacttctagtagagacagggtttcaccgagttaaccagggtggtcttgatctcctgacatgatctgcatgcctcggcctcccaaagtgctgggattacaggcctgagccaccgcacccagccagcattatggtttttaatgctataaaaggcttttcacttagtaagact

SEQ ID NO: 775927 - DNA, 616 bp, Homo sapiens
aattgcaacacttgaccaattggacctgatagacatataagagaatactccacccaacaaccacagaacatacattcttctcatctgcacaagggacacactgaaaaactgacaacctccttagccataaagcaagtatcaataaatttttttaaaaatcaaaatcataccaactatacacttggactacattgcaataaaaatagaaatcaataccaaaagttctcccaaaaccacaaaattacatggaaattaaacaacttactcctgaatgacttttgagtaaacaatgaaattaaggcagaaattttaaaattttttgaaatcaacgaaaacagagacacaacatacaaaatctctgggtgaaaggaatgttaasaggaaaatttcccgcagtaaatgcctacatcacgaagttagaaagctctcaaattaacaatctaacattgcacctagaggaactagtaaaaaaataacaaatgaaccccaaaggtagcagtagaaaagaaagccaaaatcagagaacagaacaaaattgaaacacaaaaatccatacaaaagatcaatgagaccaaaagttgttttctgagagaataaacaagattaatagagtgct

SEQ ID NO: 775928 - DNA, 574 bp, Homo sapiens
gatgcccacattgcatctacaccacctggaaatcaacaggtagacaagcctagcctacattctcctcctcaaggaagtgcccacaaaagatgtggcttactggctacataaaaagacaggacattggggaccacataccttttgggacatagwgaaaattgaggactaccactatgatataaagatatagtactcatctatcagcaatgtcctacctgtgcacagcaacacctcaggccctttccacacaatactgaacagataggccagggctgcagccaagtgcaacagtggcaggtagactacataggacctttgcctctatgtaatggctgccaaggaacccagtaatggctcagcccaagtcccaaaacctcaaaagtaaggaagtcaacattgtggcctcacagctgtggctgaaggcccgagagcccctggcaaaccactgatgtaagtccaagagtccaaaagctgaagaacttggagtcttgagagcaggaagcatccagcatgggagaaagataaaggcaagaagactcagcaagtcagcttcttccaccttcttctgcttgct

SEQ ID NO: 775929 - DNA, 499 bp, Homo sapiens
agcaccatttattaaataggggatcctctccccattgcttgtttttgtgtcaggtttgttgaagatcagatagttgtagatgtgtggtgttatttctgaggtgtctcttctttctcttccattggtctatatatcagttttsgtaccagtaccatgctgctatggttactgtagcctttagtatagtttgaagtcaggtagtgtgatgcctccagcgtgttcttttggcttaggattgtcttggctatatgggctcctttttggttccatatgaaatttaaagtaattttttctaagtctgtgaagaatgtcaatggtagttttatgggaatagcattgaatctgtaaattactctggctttgcctactttttaacgggtttgtttttctcttgtaaatttgtttaagttccttatagatgctggatattagacctttgtcagatatacagtttacaaatattttctcccattctgtaggttgtctgtttactctattc

SEQ ID NO: 775930 - DNA, 499 bp, Homo sapiens
agcaccatttattaaataggggatcctctccccattgcttgtttttgtgtcaggtttgttgaagatcagatagttgtagatgtgtggtgttatttctgaggtgtctcttctttctcttccattggtctatatatcagttttggtaccagtaccatgctgctatggttactgtagcctttagtatagtttgaagtcaggtagtgtgatgcctccagcgtgttcttttggcttaggattgtcttggctatatgggctcctttttggttccatatgaaatttaaagtaattttttctaaktctgtgaagaatgtcaatggtagttttatgggaatagcattgaatctgtaaattactctggctttgcctactttttaacgggtttgtttttctcttgtaaatttgtttaagttccttatagatgctggatattagacctttgtcagatatacagtttacaaatattttctcccattctgtaggttgtctgtttactctattc

SEQ ID NO: 775931 - DNA, 603 bp, Homo sapiens
ttgattccaagtctttgctattgtgagtaatgctgtgacaaacatacgtgtgcatgtgtctttatagtagaacaatttatatttctttgagtatatacccagtaatgagattgttgggttgaatggcaattctgtttcaagttctttgaaaaatgcccaaactgctttccaccatgtctgagctaatttacgttcccactagcagtgtataagcatcctcttttctctgcaccctcaccagcatctgtttttttttttagcttattaataatagccattctgactggtatgagatggyatctcattgtggttttgatttgcatttctctgataattagtgatgttgagcattttttcatatggttgtaggctgcatgtatgtcttcttttgaaatgtctatgttctttcccaattgttaatggggttgtttgtgttttggttgttcatttgtttaagttccttaagattctggatactaaacctttgtcagatgcataatttgcaaatatcttctcctattctgtaggttgtctgtttactctgttgattgtttctttagtctcatttgtcaatgtttggttttgtcacaactgtttttggcg

SEQ ID NO: 775932 - DNA, 481 bp, Homo sapiens
aagattcacctggttttccatgttttgtgataggcgtcttcactcgaggacagctgggcctgatagacatcatcttccagtacattcactgtgatgagatctatgaggcaataaacatcctgagcagcatgaactgggacactctgggccaccagtgctttatcagcatgagcgccattgtaaaccatcttcttagacagaagctcactccagagagagaaggtcagacttgaaatatttttcatwgatgagttttgtatatacatgaaatagattttattgagttattttttgaggttgtttttgagtcatggtattggagattaaatgataaaaatgttagtgctctattaaaactgaaaggatcagatatcaaataattgctcccatatagtacttactgtatagtatttgtcaacataaagaacagcttttctgtatatgcttatgttggagcttacagtgcagtcattgtacaatt

SEQ ID NO: 775933 - DNA, 484 bp, Homo sapiens
attttaattttatctttcctgcaacaagttcatgtttcatccaagtctgcaaaacctgactgactgcaaacatgagtattttgttgtaattgaaggagttttcacttgttttagtgctgctatgtttgaattccacagcacagcttgagacaagccttggaaccttctatgctccaacaagaccacttytggattccactatattggaatatagagatcaaatcagcaaatatgcaaggagattcttccatcacttgctcaggtgaatgatatgtttggattgattagcgtcagactaattacttatttcaggagacatcctctttaattaaaatattccatagtaaggctatgtgtttcctaacagtccatctcctcaaagaaatatacatcttcttttggtcttatttaatttgttattgttttcattttaaggaaatatttgaatattatttgggggttttatataaccaatactttttaa

SEQ ID NO: 775934 - DNA, 570 bp, Homo sapiens
aaaagaaaatatatcggatagatacttggaatgatataaaggaatgaagagtaccaaaatggtaaatacatgggtacatataaaagacttttttttttacattaaaaactaggagcaaaaacagtttcaatgtattatggcatgtattatatataaaagtgaaattaataacaatagcacagaagataggaggaatgaatatatactgttgtcatgttcttacactatccatgaagtggtatattatttgaaagcagatggttataacttaaacatgcataaagtagtccccccttacctgtggggkgtccccagtggatgcctgaaagcatggataatactgaatcctatatatactgtgcatggttttatttttccttcttcacaatttcatggacagaaaatgttctaaccatatatcttagcaacctcagcatatgattttttaatctttccttattatgttgagaacttgcacattttcttttaaattaagcactttaaaaaggtttctctttggtatatccgaattgtcagaattactacttttgagctttggggccataattt

SEQ ID NO: 775935 - DNA, 616 bp, Homo sapiens
aaatctttaaaagtaaataataattacaggttgcaaagttttgggaaaacaggcatgtaacatttactgggaatataattggttaagactttatttattaatttattttttgagacagagtctcactctgttgccaggctggagtgcagtggcatgatctcagctcactgaaacctctgcctcttcagttcaagtgattctcttgcctctgcctcttgagtagcygggattacaggcacgcaccaccacgcctggctagcttttgtatttttagtagagacggggtttcaccatgatgatcaggctagtctcaaactcctgaccttgtgatctgcccgcctcggcctccaaaagtgctgggattacaggcgtgacgaccagcacccggccggtaaagactttatagagccaaggatcagtaagctatggcccatgagtactcctagcctgcttttgatacagtcctcaagttaagaatggtttttacatttttaatggttggagaactgtgctcaatcactgctattgaatgctgagtggctttgaaattagctttgctgcagatttgaaaaggtttcaagctaaagttacaatgtaaaacagtgcttatacgtga

SEQ ID NO: 775936 - DNA, 513 bp, Homo sapiens
ctctacacaaaatacaaacattagctggatgcggtagtacatgcttgtagtcccagctgcttgggaggctgaagtgggaagattgcttgagcttgggacatcaaggctgcagtgagccattatcatgccacagtactccagcctgggtgacagagcaagatgctgtctggaaaaaaaaaaacaacaaaactcacattaaaattatttgattgataaaatgcaagggataacattatagcaggtcattttaaaaatggcagtcatggctgggcacagtgactcatgcctgtaatcctagcactttgggaggcccaggagggcakatcatctgaggtcaggagtttgagaccagcctggccaatatggtgaaacccgtatctactgaaaatacagaaattagccaggtgtggtggtgggtgcctgtaatcccagctactcaagaggctgaagcagggtaatcactggaacctgggaggcagaggctgcagtgagccgagatcacaccactgcact

SEQ ID NO: 775937 - DNA, 614 bp, Homo sapiens
caatgtttattgttacaacctcgatccagtgcccagaactatgcttcatgagatcatcacaactctttaaattgtatatttacagtgtgtagtgatgctgacgaaatacacggtagtaaaccaaaaagaaacatttggaaagtcccctagcatgatgccagacacactagatgcttggggaaggttggttctgcattcccctcctgttttctatttccgtatcaatttattggtgaatttgtgccctcatgagagtaggcttatgctggcttagatcattcaaatgttttcttaattcaaaaatgcatgacatttatagatttgtgttgtcaacaaaaatactacataagtatattccactcaatccctaggcacccactatgctcagcagcactgtgcttttgtatataaatggtgggttataaaagactgcatggaggcattatggaatagcacmggctttgggatcagatctgggtgaaaaccccagctctgtcatgcagtaatagcaactaacctgtatacagcatatgtgctaaattgttatgttctctattttgtgatgcccttgctgtatgggtctatgactatattaccttttatttttttttttt

SEQ ID NO: 775938 - DNA, 567 bp, Homo sapiens
agacatattcgtgcatatttatgaagataatgtggtgttgtgatacatgtatacactgtgtaattatccagtcaaggtactttggatatccattacttctttatagtagaaacaaacaaaaccctcttttctagctattctgagatatacaatgttattgttgattacagttaccttactgtacagtagggaaccagaactgattcttcctttttaattgtaactttgtacccattgcccatagtcaccgcatcttctcttccccagtccttagtaaccactattgtaatcactcttcctacgagatcaaattttttagattctgaatatgaatgagaatatgcagtatttgtctttctgtgtctgacttatttcatttaaaaaaawgtcctctaggctcatccatgttgtcacaaatggcaggattttattcccttttatggctgtataatattccattttgtatatatgtcacattttctttattctttagttgttaaacacctaggttaattcaatatcttggatattgtgaatatgctgtgatgaatatgggagtgaagatat

SEQ ID NO: 775939 - DNA, 642 bp, Homo sapiens
tcactaccgtgtgtctagctctgggtttgtgaatgcaccagtcgatactgtatctagctactctggtggggccttggagaaactttatgtctagctcaaggattgtaaatacaccaattggcactctgtatctagctcaaggtttgtaaacacaccaatcagcaccctgtgtctagctcagggtttgtgaatgcaccaatcgacactctgtatctagctactctggtggggccttggagaacctttgtgtccacactctctatctagctaatctggtggggacgtggagaacctttgtgtctagctccgggattgtaaacgcaccaatcagcrctctgtcaaaacagaccactgggctctaccaatcagcaggatgtgggtggggccagataagagaataaaagcaggctgcccgagctagcagtggcaacccgctagggtatccttccctactgtggaagctttgttctttcgttctttgcaataaatcctgctgctgctcactgtttgggtccacactgcctttatgagctgttaaactcaccccgaaggtctgcagcttcactgctgaggccagcgagaccacgaacccaccgggaggaacgaacaactccagacgcgccgccttaagagctgtaacac

SEQ ID NO: 775940 - DNA, 647 bp, Homo sapiens
ttcattcctgaagtcagcgagaccacgaacccaccaggaggaacaaacaactctggatgtgccacttttaagaggtgtaacattcactgtgaaggtctgtggcttcacttctgaagtcagcaagaccatgaccccaccggaaggaataaactctggacacatctgaacttctgaaggaacraactcgggacacaccattttaagaactgtaacactcaccgtgagagtcctcagcttcattcttgaagtcagctagaccaagaacccaccggaaagcaccaattccagacataaaatgaccacatcacctctccagcaatgatccaaaaccaggctgagccaaagatagcttaaatgacagaagtagatttcagagtgtggaaacgaacttcactgtgcaaaatgagtgtgttgtaacccaatgcaaggaagctaaaatttatgataaaacattgcaagtgctggcagacaaaatagccagtatagagaaaaacgttatcaacctgatagagctgaaaaacacactacaagaatttcataattcagtcataagtattaatagcagaatagactaagaggattagataatttcagagcttgaaggctggttttctgaaataaaaaaggcagacaagagtagagaaaaa

SEQ ID NO: 775941 - DNA, 647 bp, Homo sapiens
ttcattcctgaagtcagcgagaccacgaacccaccaggaggaacaaacaactctggatgtgccacttttaagaggtgtaacattcactgtgaaggtctgtggcttcacttctgaagtcagcaagaccatgaccccaccggaaggaataaactctggacacatctgaacttctgaaggaacgaactcgggacacaccattttaagaactgtaacactcaccgtgagagtcctcagcttcattcttgaagtcagctagaccaagaacccaccggaargcaccaattccagacataaaatgaccacatcacctctccagcaatgatccaaaaccaggctgagccaaagatagcttaaatgacagaagtagatttcagagtgtggaaacgaacttcactgtgcaaaatgagtgtgttgtaacccaatgcaaggaagctaaaatttatgataaaacattgcaagtgctggcagacaaaatagccagtatagagaaaaacgttatcaacctgatagagctgaaaaacacactacaagaatttcataattcagtcataagtattaatagcagaatagactaagaggattagataatttcagagcttgaaggctggttttctgaaataaaaaaggcagacaagagtagagaaaaa

SEQ ID NO: 775942 - DNA, 648 bp, Homo sapiens
tggaggcagcaagaaacagatgaggacatctttggtgcagacccctctgtcctctaccagccctgggtgcacaggaagctgggcaatgctcctgcagcttccgggtgaggtagacagctgtgggaaaagataggagcagctccactgccctacacacagccagcccctctgccctttcctcccagagaygctggcaacatacctggcagtgattacagagggtgaaaaccacaatgtgctctccaaggaaaaaagtaggtttccctattgcttattcttgagagtcaaatagtttcatgaggggcctgggcatggtggctcacgcctgtaatctcagcattttgggaggccaaggcaggtggatcgcttgaggacaggagttcaagaccagcttggccaacatggtgaaactccatctctacaaaaaacgcaaaaattagccaggcatggtagcaggcacctgtaatcccaactactcaggtggctgaggcacaagaattgcctgaacctgggaggctcaggctgcagtgagcagagattacaccactacactccagcctgggcaacagagtgagagtccatttccaaaaaaaatagtttaatgaggtttatgaaaatagcattctttttattcattccctggtcatc

SEQ ID NO: 775943 - DNA, 542 bp, Homo sapiens
aagccatgtaggtactgttggtgagagaagggaactgacatggtgtgcaaaagggagtgatgaggactgtggagaactgcagagacccgctttgggtgagagggtagatgtcatgtctcttaggtccagccagtgttccctgtaggatgtccagaactgcctttttagaagttggaaatctgtattttaatgtaaaatatcctgcttttatttttatgttttaaaatattagttcaatgttaagcatgatgcttgccaaaccaagcatatctatattctaaattaagtcttccggcttcaagtttgcaacttctcacctataccaagggcctatgagcagtcaatcatcaatcacaattacccaacagagttgacytgcaactctgcgactcccaacccagacaaaacattcgcctcatctggagagcattttgcaacaagcagggcctgaatcccacctgcagtgattctgattcaatcagtcttgggttggtctctgacttccgtaagctttcaaaattcctcagatgattccaatacgc

SEQ ID NO: 775944 - DNA, 631 bp, Homo sapiens
attccgttgtaacttttaaattttatctattaaatactgattttcgtttttaaataaaaaacttcctactttatgtttttaaaaatttttaaataaaaaacataaaaatgtttatgggctcttttgtactttacagtggatatgaaaaaatgagaatataccttgttgaatttaatgaaaggttgctatttcctagtctgtgcagttcttttaaaaatggaggtgaaatttacataacatcamattaaacattttaaaatgtacaattcagtgttatttagtacattcacaatgtttatctgtagtttactttctagttataattttagttacagaatcaccaacaagtatttgtagagttgttattaaatattaatattcattcaacaaacatttattgagcaaattgttacaagaatggcactaggctaagccatatggggtttataaaaatgaaaaaggactatcatatcctcatattttttttaatctacgagaggttgtgctaaaggcatcaacaactttattctggaaatatttattgaatttattaataaacattatttggccccacagagtcttatcattctaaaacatcacaatattgctaaacatttctcagcaacaatag

SEQ ID NO: 775945 - DNA, 631 bp, Homo sapiens
attccgttgtaacttttaaattttatctattaaatactgattttcgtttttaaataaaaaacttcctactttatgtttttaaaaatttttaaataaaaaacataaaaatgtttatgggctcttttgtactttacagtggatatgaaaaaatgagaatataccttgttgaatttaatgaaaggttgctatttcctagtctgtgcagttcttttaaaaatggaggtgaaatttacataacatcaaattaaacattttaaaatgtacaattcagtgttatttagtacattcacaatgtttatctgtagtttactttctagttataattttagttacagaatcaccaacaagtatttgtagarttgttattaaatattaatattcattcaacaaacatttattgagcaaattgttacaagaatggcactaggctaagccatatggggtttataaaaatgaaaaaggactatcatatcctcatattttttttaatctacgagaggttgtgctaaaggcatcaacaactttattctggaaatatttattgaatttattaataaacattatttggccccacagagtcttatcattctaaaacatcacaatattgctaaacatttctcagcaacaatag

SEQ ID NO: 775946 - DNA, 629 bp, Homo sapiens
tgggtgagaccaaccttgatcactgtaggatcccaagccctcagagtggggccaggcctctggggtaggccctcggtcatgggcccaagttgcaggaggactcacttgttataggacgcatctgattcttctgcaagggagattcgtgtccagaggagagccataacttgctagggctggagtcgattccccgtccacacccacctcctcttatatgtgtgtgattcttcagccactgktacatggaagcagagatgaaacattgcctctggtatgagaatacaggccttcttacactgctgcaaaagtatgaattggtaaactctggtgggggttaatttggcaatacatgacaaaagccttaaacaggcaatgctttcccccaacaactgcatttccaaaaatatattcacaggaaataatcaaacagcatttgaaagtgaatgtacaagggtgcttttgtattgttgattatcacagcatcagaacactgggaaagctctcgacatccaccaatagcgttggttagtaactgagggtataaccatgccttggagtagtagataaccattcagaatgatgctgtggtgccatatgtgttaacacggacgcatatttacagcatgttg

SEQ ID NO: 775947 - DNA, 633 bp, Homo sapiens
ttatctgagctttctgtgagttgtcatctttttgctggcagagggtcttgccttgatgatggctgctaactgatggttagcagggtgatggttgctgaaagttagggtggctgtggcaatttcttaaaataagacaatgcagtttgccacattggttgactcttcctttcaggaaagatttcgctgtagcatgcgatgcwatttgacagcattttacccacagtagaacttctttcgaaattggagtcaatcctctcaaaccctgccactgctttatcaactcagtttatgtaatattctaaatcctttgttgtaatttcgacagtgttcacagcatcttcaccaggaattgattccatcttaagaaactaccttctttacccgtgcgtaagaaggaactcctcatcctttcaggtttgatcatgagattgcagcaattcagtcacgtcttcaggctccatttctcattctagttctcttgctatttccacctctcaaaatcatccacgaatgttgaaatcaattcttccaactcctgttaacactgatattttgacctcctcccatgactcacaaatgttcttaatggcatctagaatagtgagtcctttccagaagattttcaactgactt

SEQ ID NO: 775948 - DNA, 588 bp, Homo sapiens
tttggttgttactgttttggctatcttgtgatcaaaatttagtataatttatttaggatatttttctattatccttgggaaagagttataaatctcaccactataaaaataacaacaataaaagacacccgtgacatgacatattataagtaataacaatgttgtttgattgaagttgaaatagcttgtactgaacattatttttaaaagccgtttcttaaaagaatgacttctataatcaaaaggtttatcctcttgtgttttctaggcatctggccatctgaagaggttttggcttactactgcctcaagcacaataatatattcaggtacagagctgcacttaagatattttttagcccatcayggatattgaatcaacatattaaaaattgccatgattatattcttcaaattaaattgttagaaaaaaatataagaaaagaaaaacaggaagaaaaggaaaacagaaagaggggaaaaagttcacagtgaacacatgttgcttctcaagtgaaatctgaattgccttgggtactaatattgcacagcaaggtttttgctatatgtcaaaggcttttgatttcc

SEQ ID NO: 775949 - DNA, 630 bp, Homo sapiens
ttctgattgtgcttatttgtatcttttatttctttttctttgttaagatagctagggggtctatccttttttttttttttttttttttgagaaccaactcttggtttcattgatcttttgtatggattttctatttcttaatctgggtggtggttagaagggtgtttgcctgataatagttaaggcatgtatttattccgtgtggtttactgtgtcttatttcacaatacaacatgtcttttgttttttwaaaaaaaaaaagccatttcagtagtaccggagagagaaaaagagggagccccagcctgaatgagagtggaaaatggtgagcaaatacggggtcattccagagaagtgactgtacgtagaatgtaaaatagaggcagagtaagagatagccatttggaaatttacatttgaggtggcagtagaatagatatgtgacagtaactacaagaggttagaaataaaagttcagatctcagaaaaaatattgtgctagaagatttggagatcaaaatcaagtgatcagaacataactacgggaattggaaagtcagaagagaagatgaccaaggacagaatcttagaaaatgtctgtgtgtcaggagtagtaaaaagagccagaaa

SEQ ID NO: 775950 - DNA, 514 bp, Homo sapiens
taatttccaggtttctcttttctagttctgcattttgaaaaatcttaattattattctatttagaacttcaatcacttaaatttacaacttgagtgactttagttaaaccaaaaaagcctgatgtattctgtatccaaattttctgttctatttttctttaatcttttattacgaacatgtctaacaactaaggtcttaaatattcagctcctctttgctctatgttgaaaataaacagggaacgcattagagttgtagttattttagagagaggataagrtccctaatgaattctggaagctagggaagttgatttgtgagggatgtggatatgcgtgagagatgtacagatataattcagtgaggaaatttgaatcacgcctcaaggcacaggatgcctgtgaaccaatcactacataaagacttttttgttgtcccatgctttggcctcttggtgaggttattcttttggcaaatgatctatcttaatattacacaaggaagctttgtgtg

SEQ ID NO: 775951 - DNA, 570 bp, Homo sapiens
ttgatcagcaattgatattttcagtcctaattttagctcttctagtgattttatagtagaatctcactgcagttttaatgtgaattttcctgattgctaatgacgttgaacactgtttcttgtattcatcattcatttgtgtaccatcctttgtgaaaaataaaatcattttcccaattttaattgagttgtcttcttgtaactgatatgtaaacatgctttttatattctgaatataagcttttcatcagtttatgcattgtgaatattttttcccagtttttggcttccctttccatttatttaagagctgaaagattcttagataaattttgatraagtaaaatgtatcaatattttccttttatggactcagctttttgtggcttgcctagtaaatcattgcgtagtccaagtgtgcaaagatttcctactgtgttctcttctagaaattttatatttataattttaatttttaggtctatgttctatttcatgctaaattttgtttgttgtgtgaattaagaattgaagttcatatgcatatccagctgttctaaggctatttgt

SEQ ID NO: 775952 - DNA, 606 bp, Homo sapiens
taaaaaaaaacttgccatctcaaacccttcatttttccaactagaaagacaatgccttcactaaaacatatattgacacaaaatcccattaacactataaccaggtaaaatattatccagtataggaataccagagcacatcaaaattatagtttctagcattttgatacatggtaatgattttggtgtgaaataatatattactctatgaaaggaaaaatatattaytttgattgaacccaaactttaaagtgtttctcattttgaattacctatctttttcaatttagaaagagtttggttcagttatgtcctatttttgcaatatcttaggattttaaaatatcactctgttttgaaatgtaaattagcacatattggtaagagaggaatggattttgagttatatatgggccaaaacgctaatattcaaaccatatggttctaataatccaaattggaatattcgtgttttagtggaaataactggatttacttagaatcatagagacatatcaatttagggctcccagggaacttagataatatcataatctagatgatgaaatagattaggtcatttgcctatgttaaatacttaatgaa

SEQ ID NO: 775953 - DNA, 631 bp, Homo sapiens
aatacaggtttaaaacattccaacatataagaagaatgtagaggagaaggaggtgccagcaaaagacaatgaggagttgtcaaagattttggaagattgggagaatgttctgacatagaatgcaatgaaagagtagttactaaagaatgttttcaagagggtcaaatgcttctcagaaaataagaaatctcaaatatatccttggaattattaatatgaagattaatgacaacattggcaataggaataaacaacaaactacaaagaatgaggaatgtaaacaaatggattttgtgaatagagaatttattccagaagtgttaacgtatcaagaagatagatcaaatcttacactaaacaaatatgggaaagagtgaaggatyttttcactttatttgtttttgcaggagaaacaaaacctgtttaaaaactaatcagaaggaaccaatagagtaagacaagtacacaggaaatagaaagaatagcagatggcaataacttcctatgaaaatgtaaaaaacaaagtctagaatagagtcataaagactgattttacatgagatattgagttccttctggttgtagcaggaaataaaaaatactttggatcacttaaagatacgtgtataaa

SEQ ID NO: 775954 - DNA, 615 bp, Homo sapiens
aatttcagccattctagtggatgtgaagtattatcttagtgcgatttaatttgcattttcttgataacaatgatattaagcatctttttcaaatgcgaattttccatcaataaatcttctttggtaaagtggctgctaaatcttttacctatttttaaattggattttttttttattattgagttgtaaaagttctttatatattttagagacaggttctaggctatatgttttgtaagtattttctcactctctcaggcttgcctttagtctttttattgtgtctttggaggagcaaaatattttaattttgataaactttgatgtattgattttgtccctctttagcagtttgaattttttgtgtcctatttaagatgtctttgccacgtcaaggtacctatgattttctgtttttttctgagaagttttatacatttagttcttatatgtgrgtttatattccatttagaataaatttttgcatatggtcagtttttttccctcttttaagcgtatggctatccagctgttacagcatcatttgtcgaattgctggcaccttggttgaaaatcattttatcttttattgactttatctaggtcttatttctg

SEQ ID NO: 775955 - DNA, 522 bp, Homo sapiens
ttttttttctgcctagaagcaagcttccttgtttatttacttggttttgggatactaagtcatgtgactgtatctgagtttctagatagttgatgtgtcactgtatattactttgcactggtttatttataacattctgcttaatttgcattttgttctctcctacttggttaaaaactcaataaatgtaatgattctttcagtttgcctccatattttatacataatacatgagataaatatatattgattaattgaatttaaaattttatcatctcttcaaagggcrtatttcatgagcttttaaaaataatgtgaaaacactacggatatcttagtaaatagggactataggttccctatttattaagggattaattaaccaatattccctttattaataaggcttatagtctgacttttaaggaactgtatttctcttttggtaatctgtacttctaatttgaatttgaatattgtacaagtcaaatatactaagaggtaaagattgcagataaaaga

SEQ ID NO: 775956 - DNA, 550 bp, Homo sapiens
tatatatatatgcacacacatttttttccttatccatttgagagtaagtacctacactatctcacaacacttcagcatgtatgtcctataaataatgctttctgcataatgatgctacatcaattgaaataaagaaatcaacattgataacactcctaccatccaatacctagagctcattcacatttgcatttgacatggtggctataggatcaggtttcctctactcactgtggtgactatgtttccattgtagtttttataaacatttcttagattacagattagaagaaactttgacttattgggaatttagatgctgcttttgaaaattttctattcctttcttttgtcctctcccttcctatttggattcttgtctttttttttttctattgattctrgatatttgcaaatatcctctagattcattggttttcttgaatctgtgtattggtatcattcataagtctggaacattcttaccacaatatctttcaatattcctctgccccattcacttttgaaaacttcatttagatgtaaatta

SEQ ID NO: 775957 - DNA, 615 bp, Homo sapiens
cagatctatttctggaaaacaggtattaggaggtatgcaaggagcctctttctattatttcaacttaaaagttccctaattggattgagttcaagttctgtgtcatggttctgttttgctgggagaagctaataaagaaggaagctgcggattcttcrttgtaggacaaatggagtgcagcaattaggcagtactgtccctccactggacaaaagccttaagcagctcaggcaaacaccaaacaaaaacctgtcacatgcacacagatgtagatgcctggtgaaatcttagaaaatgtattcacatttattctctggcagtaatattcttttcacaaagcattccacactatgatagctgtatcattagtctgataatctcaagttaattctctgttgctttttatatggtgtgctcagtgtattggtttagagaaaaaggctgaagagcttaaagagattggtctaagaaattgcaggttagctgggaaaggagaatagactaccgttagaaaaacgtatagttaaatccaaagggagcgattgtctttggataaatggatttctacacgtgttcagtagatggtgagtaattcccacgtgttccaccctgtgc

SEQ ID NO: 775958 - DNA, 614 bp, Homo sapiens
ctttgtccttcactcatgtcaggtgaatgagtaaggaacaaagccaaccccacagtatataagtattcctttttctccacaaccttgccagtatctgttattttttgactttttaataatagctattctgactgatatgagatggtatctcattatggttttgatttgcatttctctaatgatcaatgatgttaagcacttttctcacgtgcttgttggccacattgttgtcttttttttttttttttgacggtgtctcgctctgtcgcccaggctggagtgcagtggtgtgatctcagctcactgcaagctctgccttccagtttcatgccattctcctgcctcagctgggactgcaggtgcccgccaccacgcctggctaattttttgtatttttagtargggcggggtttcaccgtgttagccaggatggtttcgatctgacctcgtgatccgcctgccttggcctcccaaagtgctgggattacaggcgtgagtcaccgcgcctggtgggccacatgtatgtcttcttttgacaagcatctgttcatgtcctttgcctacttttaatggggttgctttttttttttaaatttgtttaagtcccttgtaga

SEQ ID NO: 775959 - DNA, 620 bp, Homo sapiens
tgtaactgatgactgtgcttctatgttaacagccaagggtgattttttggcaatagttgctcagttccagtcagaagagccaaagcgaatgtgggtgaatttcagagcaatgataaaggtgaacagtgactggcacttccccacagaggccaagggccatgcagccatgagggttgtaggtgcagctgggactcccagaagatgagcaagaggtgtggggaggacagggcaccctgcaagtggtcagctgttgctgtgccgtggactccccactcaactctcttcccatgctcaggaagtaaagtgcaggtaaagacacagagggaggggctaggaatcaggatgaccctggcccaccccttggggctggctctctgtgccctcttccaaggtggcaaggagagctgggagaaaagccagcagggaaggagatcagctataaaaaggacagacaggagagcagggctgctgccccctgtcaccckgggggactgcagaggcccccgagcttctgtgcaggggaagagagcagagagcactgtcagccacatccttgcagctcggcagctctggcagtgggaagagagggtggtagaccgtcggccaccctagacctcctg

SEQ ID NO: 775960 - DNA, 531 bp, Homo sapiens
cctgcatgaaatctctttgtctgctgccatccatgtaagatgtgacttgttcctccttgccttccaccatgattgtgaggcctccccagccacatggaactgtgagtccattaaacctctttttcttcccagcattggctgagtctttatcagcagtgtgaaaatggactaatacartagggcagggtggttccttctggaagctccaagggacagtctgctccatgccactcttctggcttctggcacttaccggccacccagatgtcccttggcttggggctgcgatattccactctctgtctttccactgtgtctgggtcacaaatttccccctcctttctcttacaggaatgccagtcattgggtttagggcctccctaaattcaggatgatcccatctggagatccttacctcaattccattgataaagacctatttccaaataagtgcacgttcacagatactggggtgttcagacttggacatggatttttgggggccactattcaatccactaaacccttgga

SEQ ID NO: 775961 - DNA, 531 bp, Homo sapiens
cctgcatgaaatctctttgtctgctgccatccatgtaagatgtgacttgttcctccttgccttccaccatgattgtgaggcctccccagccacatggaactgtgagtccattaaacctctttttcttcccagcattggctgagtctttatcagcagtgtgaaaatggactaatacagtagggcagggtggttccttctggaagctccaagggacagtctgctccatgccactcttctggcttctggcacttaccggccacccagatgtcccttggcttggggctgcgatattccactctctgtctttccactgtgtctgggtcacaaatttccccytcctttctcttacaggaatgccagtcattgggtttagggcctccctaaattcaggatgatcccatctggagatccttacctcaattccattgataaagacctatttccaaataagtgcacgttcacagatactggggtgttcagacttggacatggatttttgggggccactattcaatccactaaacccttgga

SEQ ID NO: 775962 - DNA, 610 bp, Homo sapiens
atttaaaatctttttctagtaagtctaatgcctgggcctctcatggacagtttctatacatttattttttcctataaatgtaccatactttcttgtactttcaatgccttataggttttttgaaaactggacattttgaatattataataggttaattctggaaaccagatcctccccattctcagaattagttgtttcagcttgttgtgggttgttgtgtgcttgtttagtatatttttwaaactatttttgtaaagtctgaattccttgtcatgtgtggccactgatacttgtgttccattaccttagtgattaaccaatgttttcatagcatttctttaaatgcctgaagccaagaaaaagcataaagtatagtaatagttgtagagaagatccaccaatggatactaaagtttgaagaaaaagagggtttgtataaactcaaagtatatctccaaatataataattacaaagggaaagatattaactttacagtggaaaaacctggcagacgccagcataaccaaatgatcaaggttaacgtgaccagtaataagacatgtcaatatcatgaatctcttgatatgacacactgagagagggacacg

SEQ ID NO: 775963 - DNA, 597 bp, Homo sapiens
agttctctgccttgctcagtccacaccagtccaatacacatatctaagaccctcctatgtgtcagtgcctcagtgcctacctaacaaagacagggccctgccagcaagagacttccggtctaacggggagatgaactctcggcagaccccttccgtgctcaggtagctaactctcacttattcaagcattcattccacaaccagagactgagtctggccatggtgcyggctgaggtcaggtagcctaggaatgcagtcaaatgaaacatggccccactctccaggagcacagagtctacagggaagtcagactgaaaacgggcatttcagtaaaatgttgtaaattctctcatgggagatgttaccatttgttctgctgagagctagacctacccagggagaaaggaatccatgtggatttgacaggactgaccacccctggtcacctgccccttcctccaaaacctcattgtcagtatgtgttgcaaaggccatatccagaaggaaatgagtcactttatttcatttcattttggtagtcagcctataatggagcttttcttgtttttcaaaacaagtcaggcagatgaaactgag

SEQ ID NO: 775964 - DNA, 539 bp, Homo sapiens
tctatctaatggggccacagacctgggtggtttaaacaacgaacatttatttctcacagttctggaggttggaaatccaagatcagggtgccagcacggttctagataaaggccctcctcctggtttacagacagacatcttcttcttgtatcttcacatgatagagagaggagagagaagaggcaagctctctcctgtctcttcttgcaagggtactaatcctttccatgagagcttcaccttcatgacctcatcacctcccaaaggccccrcctcctaaaaccatcacctttgggagttagggtttcagcatgtagactgatggcggaggggcacattcagttcatagcacccaataaggtcacattctgaggtgccagtggatatgaattttgggggacactgttcctccagttgcctggaggtacaggatggccgcagtggcaagtcaggatgcacgtcctgcctgacatccaagtctctttcccgactgtggaagaaagctctagggtggttattgtgggtgttctacctcacg

SEQ ID NO: 775965 - DNA, 615 bp, Homo sapiens
ctcctggcagggtgcaataacttaaaaaggattttgatttatatgactgctgttctcatgatttaagcagcatcctatggataaaaccccacagccagcatcccagcctccacccccaactcgtctttactagagggaccctcccagcatcacctcacctggccggaggggaggccacctgtgggcccccaggcctagtgacagacaggccttcccatgtatgcagacactcctttgggccagggcggcatccttgcttcatcaygtaggctctgttgtggcggccccaggccccttccgcttctcttgcagaaatcctatcctcttctccagaaggttcctcttctgtttgaggcccctgcctcccaggcggatgctgcccctggcaggaaggcatgctgcttggtgacacaggcaccaaggtgtggcccactagtttatctgagacaagggcatgacatggtcccaggtatggcccacggttaatctgagccatagtggatattctctccgtctgcgttacactcagggctccacgcgtttcaactctttctgtctatactcaagcagctgctttcctagaacctacggcaggaggtatgggaaggttgggag

SEQ ID NO: 775966 - DNA, 615 bp, Homo sapiens
ctcctggcagggtgcaataacttaaaaaggattttgatttatatgactgctgttctcatgatttaagcagcatcctatggataaaaccccacagccagcatcccagcctccacccccaactcgtctttactagagggaccctcccagcatcacctcacctggccggaggggaggccacctgtgggcccccaggcctagtgacagacaggccttcccatgtatgcagacactcctttgggccagggcggcatccttgcttcatcatgtaggctctgttgtggcggccccaggccccttccgcttctcttgcagaaatcctatcctcttctccagaaggttcctcttctgtttgaggcccctgcctcccaggcggatgctgcccctggcaggaaggcatgctgcttggtgacacaggcaycaaggtgtggcccactagtttatctgagacaagggcatgacatggtcccaggtatggcccacggttaatctgagccatagtggatattctctccgtctgcgttacactcagggctccacgcgtttcaactctttctgtctatactcaagcagctgctttcctagaacctacggcaggaggtatgggaaggttgggag

SEQ ID NO: 775967 - DNA, 617 bp, Homo sapiens
tttcagagggcaagggagttttctcttggcccctatggtggtttcccatctatctgccttgcatggtgacagccagcctttagcaacttctaaaagaaagaggatctatcagctcagtctgagcaggcatgataaggtctcctyccttgcctggaggcactcatctgagcctccaaaccaccccattagtgaattctcagaaagaacattctgctgagaaagaggaggataggttcccagtcaaggctgggagcttgtagccactaatctcttggtgtctagatcaggtacaaggctgtctctctgtccccaccctctctggtcccctcctcttactgtccactcctttagaaggagcctgtggcagcatgaacaaaataaacttctccttcttgtccacatccatcataaaatatgcatagctggacttgggttttcttaaaagctaccaacttgccaatcatgtaaatcaacctatgtttctgcattaattgaaagaaccagaaaaaggccaaaagagaagatatttgcaatacacatgaaaaggtgatgtttccttttttgtataaaaggttcacataaatcaaaaagaaaaacatttgccactccttccactc

SEQ ID NO: 775968 - DNA, 598 bp, Homo sapiens
taggtcccacctcccatcactgccaccttgggaatcagatttcaacatgagcttttgcagcggtcaaaccacatccaaaccatagcaccatggtgttgctttaactgccttctatctactctatcatgcagtcttcacatccatcctatgacggtgcctgcgtgttaatggcccatctcacaggaagaacaccaaggttcagagacgtgatgtgcccwtgatcacacagctcatccgatatcaggtcaggacttggccagtgctcttgcctctggagtgcactttctctcttggagaagcccttcccaggcctcctgtctgaggagtcattcctgaagccctcccatacgtctttacattgactctgctgtgggaaggaccactctatgacactatccaagttactgagtgtgttttttcacagcttaatgacctggccaaagagggtaggatgtctaggacattggggaccgggatgtttcctagagctgctgcacagaatgccttctctcctctgggagatgattgtgaagaaggatttattggatcacagaaatatcagtgttaacataggaaatcccacgttcccattacaatg

SEQ ID NO: 775969 - DNA, 598 bp, Homo sapiens
taggtcccacctcccatcactgccaccttgggaatcagatttcaacatgagcttttgcagcggtcaaaccacatccaaaccatagcaccatggtgttgctttaactgccttctatctactctatcatgcagtcttcacatccatcctatgacggtgcctgcgtgttaatggcccatctcacaggaagaacaccaaggttcagagacgtgatgtgcccttgatcacacagctcatccgatatcaggtcaggacttggccagtgctcttgcctctggagtgcactttctctcttggagaagcccttcccaggcctcctgtctgaggagtcattcctgaagccctcccatacgtctttacattgactctgctgtgggaaggaccactctatgacaytatccaagttactgagtgtgttttttcacagcttaatgacctggccaaagagggtaggatgtctaggacattggggaccgggatgtttcctagagctgctgcacagaatgccttctctcctctgggagatgattgtgaagaaggatttattggatcacagaaatatcagtgttaacataggaaatcccacgttcccattacaatg

SEQ ID NO: 775970 - DNA, 625 bp, Homo sapiens
ttccagtttcagaggcatttttctggcttactatatagatttgataacatagtagtctcttaaagattgctggggaggcagtgacaaaaaaagaaaaggattaatcaaaagacagttaagctggctaaaagcaactgggtcacagggcttctgagcccagtctccaaccacataagcagcagctactgaaagcccagcatatatgtgtatcagatcctcaagttggacaacttaaacccatgtgatgtttaactatcaactatatctcagtaaagttggggaaaaataaaagaaaattaatttacyatgtttttttaaaaaacaagtggaagcatacattaaaggccccaccccctccaaaaaaagtttctccaacagcaaccaaaggaagagcaggccacaagctggtgctctacacacccagacaggaagccgcccacctcaccgaggctaacctgccccaccccaaagaacacactggcaagtctgaaaaacgctgagcattctcacgagcaccctcaagcccagagtgaagaaaactggagttgaaggagtgggggtcttgtcctttcttactgaaaaaaatggaagtggttgctggctactgggacatgagtaaaggtct

SEQ ID NO: 775971 - DNA, 455 bp, Homo sapiens
ccccgagtcttccatctacattcttaattacattttacattttacataattttagtaaaatatcaaaaccaggaattcaacattggtacaatgtgtgtgtataccacttttatttgtcgtatttcatgtagatttaatggaatcaccaaggcagtgatgatacagaaagaactattccatcaccacaaagatctctcttgaagtatccctttatagtcaacccaacttgtgtccctaccattcattacccctagcaactactcatctgatgtccatctctacattttgtcattttgggaatgwcatatagatggaatcatgtattatgtactttttcagattgtctttttactcagcataacaccctttagctcaacttgtccagccagtggcacacatgcagcccaggacggctttgaatgtggcccaccacaaatttgtaagctttttaaaaa

SEQ ID NO: 775972 - DNA, 543 bp, Homo sapiens
attatgtactttttcagattgtctttttactcagcataacaccctttagctcaacttgtccagccagtggcacacatgcagcccaggacggctttgaatgtggcccaccacaaatttgtaagctttttaaaaacatcatgagatttttttttttttgctattttctttttagctcatcacctatcattartcttagtgtattttatttaatgctgtgagtatctgtttctgtgttcaaataccatccataactcttcttaagtgaattgggtctttgtgttttttgctccttttcttcttagactattttatggttgagttgtgagagttgtttatatattgtagatataaatttttcgtcagatatgagatctgcaaacactgacaaagctctaggtactgacagttttcctacactgtcttcttaaaattttatgattttacattgatatttcacatttaaatctatgatccaatttgacttaattttgaaataaagtctcagattctttttcttttatgcacatggatgttcagttttcc

SEQ ID NO: 775973 - DNA, 595 bp, Homo sapiens
ctcaatcccaacaaggaccctgagacactgtgtaaaacacacttcagattcacccaccaagggcaaggaaggtgggacatttatccccataaattgaaggtcactcctgattcattaattcctcagggcccattcccgagaatggctgcaggtagagaggctaaggaagcggtgggctcggccagagctgtccacaggtgaccccaacatgggccatagcaccactcgctacagcctgctacagtcaagcacaaatgcaaatgaattaagaagaagaagaaaaaaatcacagcctctgtgtgggagaagtaggtggggaatttgggaagtggccaaagtccaaaactacatggtaacacttgatcacacagaaggaactcccactcaatggcaagacagaaacataactttcccaaatgcgtaatgaaccagraaaaggggaaggccaaaggagaagtgagaatgctgggggtgtagcggaggaagacagagaccctcagaaaaggtagacggtgctgacagctttcccggcttgatcctccccagggggccagactgaagccagagacagaaataaatttctcaggaaaaggaa

SEQ ID NO: 775974 - DNA, 446 bp, Homo sapiens
cccccaagaagaggaagcatatttgtagctctgcttatttccttcaaatagattcctggaagtagaattaatgaatgaagggatattaacttttcaaaggcttggcagaggctgccaagttgtttaccaaaaagggtgcgtagtcctttttaactagacgaccacatttagattttatgaagatcaatatttggctagatctaggggccacgactcttacagttctgtcttaccctagtatagacactttcctctttttcagaaagtyatttgaccgtgtacttatggctaaagtaaatcctgcttctcattcttgcatttataacctttactgagccagtctcacattcatcatggtggtgggcatgcgatgtattcatcagggttcatccccggctgccagctctcctccactctacactccccttggtgacttcctctactca

SEQ ID NO: 775975 - DNA, 566 bp, Homo sapiens
caaggcaggaggattcactgagctcaggagttcgagaccagcctgggcaacacaatgaaactctatctatactaaaatacaaaaaattagctgggcgtggcagggtatggctgtaatcccagctacttgggaggctgaggcaggagaatcgcttgaaccggggaggtggaggttgcagtgagccgagatagcaccactgtacttcagcctgggtgacagcgagattctgtctccaaaaaaaaaaaaaaaraaaagaaatactgaacagagtccttgaccctatagaatacactaagggaagcaccttttgcccctttgtttggggcatggctcctaaatgtcctaggttcattttgataagggatttgggggaagaagactgacttaaaagcaagtggtttgaagctaggctctatcatgaaaggtgatgtgactctttcaagggctaggtctctcatctatgggattatggacaatctctcttggttcccagacttgatgctataaacactgctcaatcataatattatggactgaattgtttcctcccaaaattcgtatgttga

SEQ ID NO: 775976 - DNA, 556 bp, Homo sapiens
ttagttttccagtttagtttgcaaatgtcaaataactaaaagttataggaaccaaaaaatgataaacttctctcaaaacttattgtatataaatcttattttttttctagcatttaaataaacaacaatggccaataattctataatatgttcctttttcaacttttttctataacatgatgatattgactagatataagtgatggcttatttaagcaagtgaattctgcacatggactagaatttttaagaaaaattttaagaaaattttgaatgtagagttgagttttatttgtaattttcatttatttacttattattattattattttaraaacacagggtctcactctgtcacccaggctgagtgcagtggcacgatcacagctcactgtagccttgaactcctgagcttaagcagtgccccaccttagtctccaagtagctgggataaaggcacacgctgctattcctggctcatttttaaatttttaaagtagagactcccgcttcagcctcccaaagtgctaggatttgtaattttcaatcttttgag

SEQ ID NO: 775977 - DNA, 539 bp, Homo sapiens
caatacagagaggggcacagggctgtgtgcaggcacagcagggagatgaacctgtgtacaatcagggagggcttctgggaggaggtgacataaactagaagctcagaggatggacaggcaccttctgggacaggagcaagcacacatcacagtgctcagctcaccttcattgcggcacagccctgacacatgggtggctgctgtccactggcctgcctgcctcccctggcctggaagccctcatgggcgrgggctgtgcccgagggatttgtctccctagggccaggtgctgaggagaccagagctgatgctggccctgtgctgatgtgtgctcagccagtccttgccgggagacaggcatggctctcacacaccatggggccacacacaccctgtgccagctctgccctggggcacagggctttctttgggctaattttatgaatatggaattaaagcgtacaggcacgcacactttgcatcctcatggatcctgccacactgtcttttcggggacttacaaacccccgcccgtgcct

SEQ ID NO: 775978 - DNA, 421 bp, Homo sapiens
atatggaattaaagcgtacaggcacgcacactttgcatcctcatggatcctgccacactgtcttttcggggacttacaaacccccgcccgtgccttacagtgtgtcccctccctcaggttctcactttataggtcrtgcctcggtttaagagcaggtccaggcctccctactgccccgcccaagtgttacttgttagaaaatcatgccggatcacaggcgggcacttccttcctaacctacttaagggctggctgctgattataaccatgaaccgaggacgctgctctctggagccggccccattctcaccacggccatcactgcctgggcttggcaagggagctctgcaggtccagacagggcggccctctgttcaatcccccattaagcaaagatgcactgggcactctctccttgcca

SEQ ID NO: 775979 - DNA, 536 bp, Homo sapiens
aagcatgtgcatgggcggccctgcctccaggtgcgagggctctgccctgccacacctgtgcctcagccctcaaggtgccccccctggggcccacccacatcagcccacaggccagctcacccggtagaaggacacagctttctcccgctcccaggccccgtcgaagaagatgtctccagccgcctcaaacagctccagccccaggttggggtcgcctgtgtacagggccacgttctgtgccacctgaaaggaggcagaagttccctcaagacccacacctggtgaggtggccacgcccacccaggtsggactcccccgcccagcctccttcctctcacacactgcaggtgcaactgagcctttttcagaccctgtgcattagggccgcccccaccgctggcatggggacaatgatctcatgcacccgagtgccaggaggtgactgtgcagctgcagcccaggagcccgacatctgtgaatcctgccaccagggctagccctagcccactccccctgcactcaaaccagcctccatg

SEQ ID NO: 775980 - DNA, 606 bp, Homo sapiens
ggtgcctgattccttattatcagagctccgctcactggcaagtccctcttcggaccccaggagaggggcttgggggataccaaggaggggtaactgcttaatgaggacgggaggtttcttctggggagatgaatgccttttgaaactagacggtgtgggtgggtgcacagcactgtgagtgcacaaatgccaccacattattcacgttgaaatagttaatttcatgcgatgtgaatgtcacctcattttaaaagtgtttaaaagaggggcctgggagagtgcagtgtttgtgagaatcacgtggggcacccacaatctctgaacctyggtttccttgccgtaaactggcgaagagaccgtgtgagccgtgtttcctggggccaagagattccaagaaggaaaacctgggattcctggggactgagatgagggccgggggccggaaggggaggggtacatggggagggctgaggggcagcccagaaaaggctttcaacactgggcagcagcgtctacacaggcagagatccctgcatctcacttcccacaggactgaccagtggctggaggtgggactggtcaggctcagcccagccaagtctggga

SEQ ID NO: 775981 - DNA, 652 bp, Homo sapiens
ggcctccccagctcacaccagccactccttccggcagccggcaaccccagatccttgtatgtgacaggatcctttggcaggcacatcccacagaagggtgcattcccagccctctccttacccgcaaggaagagatttcttaagtgttgctttaacaggttgatgcaaaataaataaacagaaagggagggagagggagatggatggttttcagtaaataatggtgcagcrgccagcagttggaagggagctggtgggaggaagtttcccacctaagcagttgtgacaggagtattaactgggagcccaaaagcagcacaaacgcagcacagtgaggactgccagagcacataccggggctggaaaatgtgtgtctgtcaagataaaatggtgcattatgtttgcaccttcccatgaacggagccaagggtatctttgaggtgcctgcttcccagccctggccagtttgactctgcttcaaatgagcacaggcctccacttcaggagggcagcctgccctgcctctcactgaggctaatagttgtgtgcacgtagacggtgggcccctggagactcacccctgcttttggagaaaggtttttatcgccttatctaacatgaggctgattccttttaagaacacatgttgact

SEQ ID NO: 775982 - DNA, 565 bp, Homo sapiens
aactgctctttactgccttggatccttcccacatgctgttcccattaccccaaatgcttttcccttcagtcacccccagactaacattttcttacccccaagctcaagtgtcaaatccacagaaaagctgttcccaaattttcaatcctcactaaattggtttccctcagagcaccctgttcttttccttcatgtgcacattctagtttatccagtacttgcatttgtttattatctatcttgctcagtagcctgaaagttctacgatgtcagagaccccatctattttgttcctgtctctatgtcccattcccagtgtgtgcctggcacatcagatgtgtggaacaaatgattgagtggagaatgcatgaataaatgatgtcaggcaaggcagggtctatagtcaatgtgcatttcatacttgcaaactgagctatggataaaaragatcctccaggttgttccccttcttcaaaatcactggttctctcctttcaatcttccagagaatgacctctacctaaatctttgctgattatcctggaacagcaacagggaagggaca

SEQ ID NO: 775983 - DNA, 565 bp, Homo sapiens
aactgctctttactgccttggatccttcccacatgctgttcccattaccccaaatgcttttcccttcagtcacccccagactaacattttcttacccccaagctcaagtgtcaaatccacagaaaagctgttcccaaattttcaatcctcactaaattggtttccctcagagcaccctgttcttttccttcatgtgcacattctagtttatccagtacttgcatttgtttattatctatcttgctcagtagcctgaaagttctacgatgtcagagaccccatctattttgttcctgtctctatgtcccattcccagtgtgtgcctggcacatcagatgtgtggaacaaatgattgagtggagaatgcatgaataaatgatgtcaggcaaggcagggtctatagtcaatgtgcatttcatacttgcaaactgagctatggataaaagagatcctccasgttgttccccttcttcaaaatcactggttctctcctttcaatcttccagagaatgacctctacctaaatctttgctgattatcctggaacagcaacagggaagggaca

SEQ ID NO: 775984 - DNA, 600 bp, Homo sapiens
tttttcttttttcttttttttttttgagacgaagtttccctcttttcacccaggctggagtgcaacagtgtgatctcagctcactgcaacctccgcctcccaggttcaagagactctcctgcctcagcctcccgagtagctgcgattacaagcatgtgccaccatgcccagctaattttgtatttttagtagaggtggggtttcttcatgttggtcaggctggtctcacctcaggtgatccgcccgcctcggcctcccaaagtgctgggattataggcatgagccacaatgcccagcccatgctttctttttaataactccttgctgcctagttttttcacgtccactgtgtaastactagtcttaatgggtatttcttttcttactattctgcaccaatgtttccctgattgacaatagttttcctgaaatgtattcttggaatggaattctatgatacgcttagaaaattctgcataccttatacttcagaatgtgtatgtaaaagactccagtaaatgatccagggaagcaaaaatatttgtgtgttttgcgagttgtattcatatgtgtataaaattcccacagcactttggataa

SEQ ID NO: 775985 - DNA, 611 bp, Homo sapiens
ttcttttgatagaacagttttgaaacactctttttgtagagtctacaagtggatatttggaacgcgttgaggcattcgttggaaatgggaatatcttcacataaacactagatagaagttttttccgaaacttctttggctgtgtgcattcacctcacagaattgaacctttyttttgatagagcaggtttcaaacactctttttgtagaatctgcaagtggacagttggagtgctttgaggcgtacggtggaaaaggaaatatcttcacataaaaactagacagtagcattctcagaaacttctttgtgatagtgatgtgtgcattcaactcacagagttgaacctttcttttgatagagaaggtttgaaacactctttttgcagaatctgcaagtggacatttggagccctttgaggcctatgttggaaaaggaagtatcttcacataaaaactagacagaagcattttcaaaaacttatttgtgatgtctgcattcaactcacagggttggacatactttatcatagagcagttatgaaacactcttttagtggaatctgcaaggggatattttgaccgcttagaggccttcgttggaaacgggaata

SEQ ID NO: 775986 - DNA, 660 bp, Homo sapiens
gatgggttgacaggttcagcaaactaccgtgacacacgtttacctttgtaacaaatctgcacatcctgcacatataccccagaacttagaaacaaaaggaaacaaaacaaaacgaaaaaactataacaaaacgctagtggcaaaataaagtttcaaactgagaaagtgacagaccaattttttgttcaaatcatggttctcaacccaggtgccataaggtcaggatgaagaatttgattacatattgtaaataagacatacagcaaatgactrgaaaaattattctcaacatatgtgtgtcttctaattcaatgatgacgctatctactgggacatagcatgagattccaaagggctcagtcccgcaagactggcctcccactctaacaacaatgggaagccctacgttattttacctgtgcttcttagcaactggctataaatcaggtttccaccactcccagttttagttgcattaatttgctggaagagctcacggcactcagggaaagacttccatttaccattttattatagtggatattgcaaaaaattcagaaaaaagattttgggcccaccatgtggggaggggagcactaccatccaggaagtgttatccagaagctctctaaacccagtccttttgggtttttatggaga

SEQ ID NO: 775987 - DNA, 660 bp, Homo sapiens
gatgggttgacaggttcagcaaactaccgtgacacacgtttacctttgtaacaaatctgcacatcctgcacatataccccagaacttagaaacaaaaggaaacaaaacaaaacgaaaaaactataacaaaacgctagtggcaaaataaagtttcaaactgagaaagtgacagaccaattttttgttcaaatcatggttctcaacccaggtgccataaggtcaggatgaagaatttgattacatattgtaaataagacatacagcaaatgactggaaaaattattctcaacatatgtgtgtcttctaattcaatgatgacgctatctactgggacatagcatgagattccaaagggctcagtccckcaagactggcctcccactctaacaacaatgggaagccctacgttattttacctgtgcttcttagcaactggctataaatcaggtttccaccactcccagttttagttgcattaatttgctggaagagctcacggcactcagggaaagacttccatttaccattttattatagtggatattgcaaaaaattcagaaaaaagattttgggcccaccatgtggggaggggagcactaccatccaggaagtgttatccagaagctctctaaacccagtccttttgggtttttatggaga

SEQ ID NO: 775988 - DNA, 626 bp, Homo sapiens
ttaatttgcactcttctgattagtggcaactttttatatgcagatcactattatcaaataaagacacataatgttacaaaaaaagtttttcccctaaattaagaaccaccaccaaaaactcagatagaaatacacttaataagaayatgtgtgtggctgcatacagtggctcaagcctgtaatcccagcccttcgggaggctgaggtgggaggatcatttgagcccaggagcttgggaccagcctgggcaacaaaggatattttataagacagggtctttacaaaaagtttttaaaaaaattagcagggcatggtcaggcatggtggctcatgcctgtaattccagcactttgggaggctgaggcaggtggatcacctgaggtcaggagttcgagaccagcctggccaacatggtaaaaccctgtctctactaaaaatacaaaaatttagatgggcatggtggtgggcacctgtaatcccagttactcaggaagctgagacaggagaatcacttgaacccaggaggtggtggttgcagtgagccaagatcgcaccattgcaccccagcctgggtgacagagggagactccgtctcaaaaaaaaaaaaaaaaaaaagctgacagaca

SEQ ID NO: 775989 - DNA, 476 bp, Homo sapiens
agtgactgcaggcctttttattagagaacactgcagtgcaatgtccttgtatgacttccccaggcaaaggtagtttttcataaaactcatgcctttgtgatccctgtttaacatcttgtatattattattctctctatcccatagaaaatctgcattttctcctgtgctttctgtcccagttaatggtgacacgtcccatccacttacctaagcccatcaattcagagtcaatatcaattcttctgactttcttaaaagtcacatctgataggtcactcagaatattctctaacctttcccctccccttctctttatggtcaccgtttsaaccagcatacccacccactgctatatacacacatatctcagccctccgccactaatttatctctccaagaccttgtagagatttcctaattgctatttctgcctctactcttttccctgaactatgtgttattcacactattgctg

SEQ ID NO: 775990 - DNA, 563 bp, Homo sapiens
acttctgttgtttttcattttgtagtatctggttctttgaaaataaccaatcaggtgctacatgcccgaatggctgactgggcccacctgatccaggtgtgcttgccttaaaacttctgaggtgttctaaactcttgtacttggaaaacaaagattaactagtaacaacataaataactaactgtaaacaattttttaaccgacacacttggtacatagtcacataatgcacaraggtgtgtgtgtgtgtgtgtgtgtgtgtgtgtgtgtgtgtgtactatacatctggttgtatatcatcagtacttccaatacttctttttaatgaggatttcatttgctttttgcaagatacttataaagaagatttgtagctgcaaattaaaggctctaaggaagtcattgccttccttcattttctttgtcctctgtcactttggaatttccttctggttttatatattgtatttacaggtactcaggctctagcattttgctagattatcacagaatgaacattttgtttacagtaaaaatgggctacaactcattaccaggttatg

SEQ ID NO: 775991 - DNA, 538 bp, Homo sapiens
ggagctcccttcagcatcattttggatattaacttgcttttatgttggatcctcaatttcctggttccaacttcttcctttttgttggtttattctttcattctggtgagacgtatcctctagtacctcactctcaccgtgtggtctacagatcagcagcactgrtgtcacttgagagcttgtcagagtgctcaggcctcactctagacctgctgaaccagaatttgcattgtaacaggttcccaggtgatccatggcactttaatatctagaaagcactgttctggtagctcatgagaaaggctaaaaaaaatttgagtccttgcatttctgtatatgcctatacactactctcacttttgactagcggattgattgggaaaaaaacttctaagttgtaaataattttctgtaagaaatttcaagacatttttccattgtctcctaacttccaatgttgctgttaataagttcaatcccattatgatttttagtccttggtgtgtgacctttttatttccagatttctaaaatttaa

SEQ ID NO: 775992 - DNA, 475 bp, Homo sapiens
aaatcactgagagcctcccagaagctcacacgcccgcccagaggagaaactgcacgaggcagacctggatcacctgataattaccttcagatgctgtttgatttctgtagcccactcaatttaccagatgggaattgcgtatttgctcatagrtggggtttgcgaggtaagccagatctatgtgttccctccaactctctctgactcgcatggaattacacttacgaccctgccaggccactatgctagactgcatggttcgagagcctatgtgacaggcactctgccaggggcttcacatgcatggtcttgttcactcttctcagcatcgtgttgacaaatatcttccatctcaggtgcccatgaaactagctatgtggccttgggcaggttccttgacctgtctgtgcttcagtttcttcatcaaatgcagatactgattcctgcctagcaatatcagtgcatagaatgcact

SEQ ID NO: 775993 - DNA, 669 bp, Homo sapiens
tagtaatgtgtatgtccgcagttccagaacttcgctgaacattggaatcatatggagatctttaaaaatagtattgttgcctggctctcagatactctgatgtaattggtatggtgtataacttgggcactggaatttttagaagcttctctgatgattctaaagttcaagaaaggttgggaatcaatggactatgcaataagtctatataaaagattattgctaataatttaaagactgtaaattaaaacaaaaaagagatgccacgtttcatttatcagattggcaaggataaaaaattgataagacgtagtgttggtgagggtgtgaggaagagtcagtaaaatgttggtgataggatgtagattagagcaaagtttttggagggcaatktggtaatcttatgaatatgcaaaccttgcactgcctttgactcagcaactgtatttctaggaatttattttacacaaacacttgctcaaatcctcaaagatatttgatttggtattattcccataatattttaatttttgttgttgttatttgcctgtttggtttaacgagggatagggcttagaagtggttgatgggtaaaaggaaaaaaaaagttgttgatgaatggaaatagcagtgcccccattccactcgcacccaccgatgtatccatgg

SEQ ID NO: 775994 - DNA, 619 bp, Homo sapiens
acacccaacagaaatgaaaacatattctacacaaaaacttgtacacaaatgttcacagcagtattatctgtaatagctaaaagatggaaacaaaccaaatgtccaccaactgatgaacggataaacaaaatgtggcatgtctatataacrgaatattagctaacaatgaaaagaaaggaagtatggatatatgctacaacacagatgaacctaaaaacatgatgctaactgaaggaagccagacaaaaggccacgtgattccatttatatgaaatgtccagagtaggcaaatccacagaggtagaaagattagcggttgcccagggctggtgggcttgggggaaaatagaaagtaaatactaatgggtactgagtttcttctgaaagtgatgaatatgttctaaaatttattgtgctgatagttgcataactctgtgaatgtactaaaaaccatttaattgtacacttttttttaacttttatttttttaagatagggttctactctgttgcccaggctagagagcagtggtgtgatcatggctcattgcagcctccacctccctagctcaagtgatcctcccacctcagcctcctgagtggcgagaaatacaggcatg

SEQ ID NO: 775995 - DNA, 622 bp, Homo sapiens
cattcatacaatggaatagtattcagtgacaacaagaactgagctatcagaatctcgacttgtggaggtggagcaaggtggcggcagagaaagctccacagatcaccagcccccacccctaggaaaccaaattatcaactatccgcacagaagaaaacaccttcataagaaccgaaaagcagggagcactcatagtacctggttttaacttcatagcgctgaaagagggactgtagagacagaaaaaacaacactgagcctggcgyggtggctcacacctgtaatcacagcactatgggaggccaaggtggcggatcatttaagctcaggagttcaacatcctgggcaacatggcaaaatccccatctctactaaaaataaaaattaaaaaatagccccaggtggtaatgtgtgcctgtggtcccagctactcaggaggctgaggagggaggatcacttgagtctagggggcggaggttatagtgagccaggactgcaccactgcactccagcctgggtgtcagagtaagaacctgtctcaaaaagaaaaaagaaaagaaaaaacaatcctgaatctctgacactactatgtagcagcagtggcagccatgtggtgccaaga

SEQ ID NO: 775996 - DNA, 610 bp, Homo sapiens
aattcaggccaggtacggtggctcatgcctgtaatcccagcactttgagacgccaaggagggcagatcatgaggtcaggggatcgagaccatcctggctaacacgatgaaaccccctgtctaccaaaaatacaaaaaattagccaggcatggtggcacacgcctgtagtcccagctaatcgggaggctgaggcaggagaattgcttgaacctgagaggcagagaytgcagtgagctgagatcacaccactgcactccagtctgggtgacagagcaagactacatctcaaaaaaaaaaaaagttaattcaaagggataatatcaggaaatttcccaaacctagagaaagatattaatgtccaagtacaagaaggttatagaacaccaagcagatttaacccaaagaagactacctcaaggcatttaataatcaaatcctcaaaggtcaaggataaagaaatgatccaaaaagcagcaagagaaaagaaacaaataacatacaagggagctccaaaatgtctggcagcagactttttagtaaaaatgtcacaggccagaagagagtggcatgatatatgtaaagtgctgaaggaaaaaaacttttaccctag

SEQ ID NO: 775997 - DNA, 586 bp, Homo sapiens
acttgaggagcccttcagcccactgctgcactgtgggcgcccctttctgggctggccaaggccggagccggctctctcagcttgcagggaggtgtggagggagaggcgcgagcggcaaccggggctgcgcgtggcgcttgcgggccatctggagttccgggtgggcgtgggcttggcgggccccgcactcggagcagccggcaggccctgccggccccgggcaatgagggacttagcacccgggccagcggctgcggagggtgtactgggtccctcagcagtgccagcccaccggcgctgcgctcgatttctcgccggaccttagctgccttcccgcggggcaggcctcgggactgcagcccgccatgcctgagcctcccccsgctccgtgggctcctgtgcagccggagcctccccgaccagcgccgccccctgctccacggcgcccagtcccatcgatcacccaagggctgaggagtgcgagcgcatgtcacgggactggcaggcagctccacctgcagccctggtgcgggatccactaggtaaagccagctgggctcctgagtctggtggggccttggagaac

SEQ ID NO: 775998 - DNA, 543 bp, Homo sapiens
atatctttcataaatatgtctattcagattttctatttcttcttgtatgagctttgttaatttgtatctttcaaggaatttgttcattttatctacgctgttgaatttactgacaaatttgtacataataatctcttttyatcccttgaatgcctgtaggccctgtaataattgcttcatcaattccttacatgggtgattttcattttctttcttttttccaaagtctatatcatccagtgttttattaaaaaaaaaaaaaaatttgagacaggttcccattctgtcacccaggctgaagtgcagaggcatgaaaccggctcacaacagcctcaacatcccgggctcaggtgattgtcccacctcagtcttccgagtagctgggactacaggcacgcaccactatgcccagctaatttttgtattctttatagagacagcgtttttccgtgtttcccaggctggtctcaaactgcagcgctcaactgatccacacaccttggtctcccaaagtgctgggatccaccgtgcccagcctcaaat

SEQ ID NO: 775999 - DNA, 550 bp, Homo sapiens
ctccgccttgggggttcatgccattctcctgcctcaacctcctgagtagctgggactgcaggcgcctgccaccacgcccagctaattttttgtatttttagtagagacggggtttcaccgtgttagccaggatggkctcatctcctgaccttgggatccgcctgactcggcctcccaaagtgctgggaactattagttctttgaaaaatctccaaactgctctcgacaggggctggactaatttacattcccaccaagagtgtatgtgttcccttttctccacaacctttggcaacatcggttatttttctgactttttaacaaaagccattctgactagtgtgagatagtatctcattgtggttttgatgtgcattttctctgattattagtgatgaacatttttttcctgttttttggatgcttgtatgccttctttttacaagtatctgttcatgtaatttgctcactttttaataaggttatttcttttttgcttgttgatttgtttaagttccctatagattctagattattagacctttgtcag

SEQ ID NO: 776000 - DNA, 558 bp, Homo sapiens
gctggaatgcagtggcgccatctcggctcactgaaagctccgccttgggggttcatgccattctcctgcctcaacctcctgagtagctgggactgcaggcgcctgccaccacgcccagctaattttttgtatttttagtagagacggggtttcaccgtgttagccaggatgggctcatctcctgaccttgkgatccgcctgactcggcctcccaaagtgctgggaactattagttctttgaaaaatctccaaactgctctcgacaggggctggactaatttacattcccaccaagagtgtatgtgttcccttttctccacaacctttggcaacatcggttatttttctgactttttaacaaaagccattctgactagtgtgagatagtatctcattgtggttttgatgtgcattttctctgattattagtgatgaacatttttttcctgttttttggatgcttgtatgccttctttttacaagtatctgttcatgtaatttgctcactttttaataaggttatttcttttttgcttgttgatttgtttaagttcccta

SEQ ID NO: 776001 - DNA, 550 bp, Homo sapiens
ctccgccttgggggttcatgccattctcctgcctcaacctcctgagtagctgggactgcaggcgcctgccaccacgcccagctaattttttgtatttttagtagagacggggtttcaccgtgttagccaggatgggctcatctcctgaccttgggatccgcctgactcggcctcccaaagtgctgggaactattagttctttgaraaatctccaaactgctctcgacaggggctggactaatttacattcccaccaagagtgtatgtgttcccttttctccacaacctttggcaacatcggttatttttctgactttttaacaaaagccattctgactagtgtgagatagtatctcattgtggttttgatgtgcattttctctgattattagtgatgaacatttttttcctgttttttggatgcttgtatgccttctttttacaagtatctgttcatgtaatttgctcactttttaataaggttatttcttttttgcttgttgatttgtttaagttccctatagattctagattattagacctttgtcag

SEQ ID NO: 776002 - DNA, 550 bp, Homo sapiens
ctccgccttgggggttcatgccattctcctgcctcaacctcctgagtagctgggactgcaggcgcctgccaccacgcccagctaattttttgtatttttagtagagacggggtttcaccgtgttagccaggatgggctcatctcctgaccttgggatccgcctgactcggcctcccaaagtgctgggaactattagttctttgaaaaatctccaractgctctcgacaggggctggactaatttacattcccaccaagagtgtatgtgttcccttttctccacaacctttggcaacatcggttatttttctgactttttaacaaaagccattctgactagtgtgagatagtatctcattgtggttttgatgtgcattttctctgattattagtgatgaacatttttttcctgttttttggatgcttgtatgccttctttttacaagtatctgttcatgtaatttgctcactttttaataaggttatttcttttttgcttgttgatttgtttaagttccctatagattctagattattagacctttgtcag

SEQ ID NO: 776003 - DNA, 550 bp, Homo sapiens
ctccgccttgggggttcatgccattctcctgcctcaacctcctgagtagctgggactgcaggcgcctgccaccacgcccagctaattttttgtatttttagtagagacggggtttcaccgtgttagccaggatgggctcatctcctgaccttgggatccgcctgactcggcctcccaaagtgctgggaactattagttctttgaaaaatctccaaactgctctcgacagkggctggactaatttacattcccaccaagagtgtatgtgttcccttttctccacaacctttggcaacatcggttatttttctgactttttaacaaaagccattctgactagtgtgagatagtatctcattgtggttttgatgtgcattttctctgattattagtgatgaacatttttttcctgttttttggatgcttgtatgccttctttttacaagtatctgttcatgtaatttgctcactttttaataaggttatttcttttttgcttgttgatttgtttaagttccctatagattctagattattagacctttgtcag

SEQ ID NO: 776004 - DNA, 625 bp, Homo sapiens
taaatgaccagatatttttctttttaattacatttgttgggacagtttgcactggggagaaaagacctactgggatgatagaatagcttaatggttaagaataggctttggaagcctgtagacctgggttggtcatcaatacctctgttgccttgagctcattgccattagattcctgagttgtcaatggagataatagtccttagctcacagatttttgtaaaggttaaatgaattaatgtatgtaaagtatatgcaaaatgtcaaataaaggaagtgacaaaatgttaattattatataatagttaaggtagaaataaaatgacctttacrtgcaaaaacatgtgcaccttgacagccactgctacaaaccttaagagatttgccattgcctgccattaaacccagtaagggcttaaatgctttgtcaaactgacaggcatcactctgtggtggttttagattctgtactgaattatatcttttaacaagacttgttcttctcattttggtataatatagaagaccagtatagttacatgggtgattatacagaaataaatgcagagttttcacatggtccagattgttcaatcatggttacattaggattcaagtgaagggg

SEQ ID NO: 776005 - DNA, 619 bp, Homo sapiens
tcttcattctttttttcttactggtttttactttttaaatttgaaagctttgcagggatcataaggatctgttcaggcaaagaacatgaaagggtttacatttttatcattttagtgtttcttattctctatatcaaaaacattcacagataagttaacaagatcctcatcaggaggaaaagtaaattgttcactaccatcctctagtatcctaatctggtcttgttgttggctaacttcagcagttactattctgtgactggtgtaatattaaccaaataaattactggatttgttcyacaaatattatgtcttagattggttctttcctgtctctgaaaataaagtcttgcaatgaaaataaattattttacaacagttaattagcaatgtaaaatttattgaaaatgtatttgctttttctgtaaatcatctgtgaatccagaggggaaaaatatgacaaagaaagctatataagatattattttattttacagagtaacagactagctagagacaatgaattaagggaaaatgacaaagaacagctcaaagcaatttctacacgagatcctctctctgaaatcactgagcaggagaaagattttctatggagtca

SEQ ID NO: 776006 - DNA, 627 bp, Homo sapiens
gtaacaacagcagggaatatgcgctgaatgtgggtaccatagcttctcagccttctgtaacacaagcagctgtggcaagtgtcattgatgaaagtaccacggcatccatattagagtcacaggcactgaatgtggagattaagagtaatcatgacaaaaatgttattccagatgaggtactgcagactctgttggatcattattcccacaaagctaatggacagcatgagatatccttcagtgttgcagatactgaagtgacttctagcatatcaataaattcttcagaagtaccagaggtcaccccrtcagagaatgttggatcaagctcccaagcatcctcatcagataaagccaacatgttgcaggaatactccaagtttctgcagcaggctttggacagaactagccaaaatgatgcctatttgaatagcccgagccttaactttgtgactgataaccagaccctcccaaatcagccagcattctcttccatagacaagcaggtctatgccaccatgcccatcaatagctttcgatcaggaatgaattctccactaagaacaactccagataagtcccactttggactaatagttggtgattcacagcactcatttccctttt

SEQ ID NO: 776007 - DNA, 534 bp, Homo sapiens
  misc_feature 280: n = A,T,C or G
aggacctgtctggggaatgcaggagtgtttcccaggatcctcatctcgaaattcaggatgggtcccaacttcctgtctctgcttgtgttccacttcctatcgtggcttgctacaggccgactgttcctcagtaataacagtgactctcagcaacaaaaagactaatactgtagagagtgccatcagcttccacaggagctctctgctctgctcctcacggcagccccgtgaggcaggccgggagggggccccactgagggctgaggagatggaggctganagaagaaacctgacggcccagtctcacagccagggcttcccccagcacttgtaagatctgtgcttttccctgccccacactcacctaaacattacttgccctttttgcccctaaatttaagtctttcaggtttcaaatyctaacactctggactttgcataactgcgaatacatctgccttacccatgaatgcctttgtgatgacagaaaccttattcctctttcacgcgtgccttcattttcccattctgaag

SEQ ID NO: 776008 - DNA, 575 bp, Homo sapiens
aattggagccgtcaaagtctgatttccctgggttaggatctgggcagcacccttggtctgtatagatttagtcattcctagaaatgtgaggtcttcgtggctgtgtcagtctcttctaccacagagctggtatgaaagctggggttgaaatctagtcattcccacagactcaatctgttgttttttttttttttctccatatctgtgcatcttcacacttgttcaaggctgggattctcacaagggcatgacctggtcacacatggctcagcccgcagagtggcaagaccatcagaggctgtgaaaactttgatgccgaagttctgcctcccaggaccacacagcagcctcaaaactcagagcccagagatgagctctggaaatctgrtgtcgtctggcaaatgacaaaaccccacagcagccatgtcaaggccacctaaacaagggcttcctctgcccttcccaacctccttagcaaaagggcagagcttttcctgctggacacaggctgccgctaggaagtctacctggatttaacacaaggaggagcaaaatagaccctaatgccctccccc

SEQ ID NO: 776009 - DNA, 588 bp, Homo sapiens
ggcagataataccaaaccctatatatactatgttttttcctatatatacatacctgtgatcaagtttaacttataaattaggctcagtaagagactagcaacaatgacataataaaatacaattatattataataaaagttttatgaatgtggtctctctccctcatctcaaaatatcttttttattcttttctttctttcttttttgagactgggtcttgctctgtcaccccatctggagtgcagtggcacgatcacggctcactgcagcctccacctcccacggctcaagtgatcctcccacttcagcctcctgactagctgagacaacaggctggcrccaccatgctcagctaattttttatattttttgtagagacagggtctcactttgttgcccaggctggtctcaagcccctgagcagaagcaattctcccacctcagcctcccaaagtgctgagattataggcatgagccactgcgcctggcccaaaataccttattgtactatactatttttatctatttttggaccactgttgaccgtggatagctgcaactgcagaaaacaaaactgtacataaggg

SEQ ID NO: 776010 - DNA, 588 bp, Homo sapiens
ttgaaaggactaagagcagggtaacagttgatgaaccacttttcttaatcattattgcttactcttgccaaaaaaaaaaaaaaacccaacttcgtaactccaattatttttaatttttcagaaaagtggcacatattctcagagaagcaagggaaatttcccttcacatccctagaccgtatgctcagggtgaaagagactattgtttgggycacagacttgtgagccagacgtgattttcacatgcaaatggtggccacatacagagataatccaggccccgggccaggcagagaccccagccggctgcctcatcatgctctcacggggcatgtggctgagctgtagtgctgtgatgagggagtgtgccatccaatgggagaggccatgtgtggaaaaggactaaaaatacaaagcacgctagaaaccgtgcaaatgaatttagttcagagtgagaaggcatttcgtcactgaatcatggatggggctggccaaggttcaccagaggaagtgaagtgtttgagttcatgtgccagacatggtgccggctgctttgtctccagtatctcagggccaggccatcagtgt

SEQ ID NO: 776011 - DNA, 617 bp, Homo sapiens; identical to SEQ ID NO: 747465

SEQ ID NO: 776012 - DNA, 667 bp, Homo sapiens
agggaactcagaggccaggatggatcctccgtacgctgaacgctggtcccctgggcccccttatttctttctctatactttgtctctgtgtctttttcttttccaagtctctcgttccacctaacgagaaacacccacaggtgtggaggggcaacccaccccttcaattaaccatgcggccaagagtcaaacccactagtttgccttcaaagtccaagatctaactatgacatcaagacactgtcccttcagtgccctccctctcaggctctagtacgagccactggggccycagcaatccagtacatgcttatatgcttatttcttctccaagtgtgtgttgttctctttgccgctggagatatatcttactctgccttatattctacttatttactcactaatctcatttcaaacatccccctctccacctcaccccgaatccaaagtagaagggcatggcctcaagtctagggaccacaccgtttgaggctggacacatgtgcaacactggaacctgtctttctaataagcttaccaagtaatcctgatggaaatcttcaccctaagtcaccacctctacaactaggggtctcagagatgaaagccagggcagagggagactcttacctaccccttgggagacggagaaagacacaagaatcct

SEQ ID NO: 776013 - DNA, 667 bp, Homo sapiens
agggaactcagaggccaggatggatcctccgtacgctgaacgctggtcccctgggcccccttatttctttctctatactttgtctctgtgtctttttcttttccaagtctctcgttccacctaacgagaaacacccacaggtgtggaggggcaacccaccccttcaattaaccatgcggccaagagtcaaacccactagtttgccttcaaagtccaagatctaactatgacatcaagacactgtcccttcagtgccctccctctcaggctctagtacgagccactggggccccagcaatccagkacatgcttatatgcttatttcttctccaagtgtgtgttgttctctttgccgctggagatatatcttactctgccttatattctacttatttactcactaatctcatttcaaacatccccctctccacctcaccccgaatccaaagtagaagggcatggcctcaagtctagggaccacaccgtttgaggctggacacatgtgcaacactggaacctgtctttctaataagcttaccaagtaatcctgatggaaatcttcaccctaagtcaccacctctacaactaggggtctcagagatgaaagccagggcagagggagactcttacctaccccttgggagacggagaaagacacaagaatcct

SEQ ID NO: 776014 - DNA, 667 bp, Homo sapiens
agggaactcagaggccaggatggatcctccgtacgctgaacgctggtcccctgggcccccttatttctttctctatactttgtctctgtgtctttttcttttccaagtctctcgttccacctaacgagaaacacccacaggtgtggaggggcaacccaccccttcaattaaccatgcggccaagagtcaaacccactagtttgccttcaaagtccaagatctaactatgacatcaagacactgtcccttcagtgccctccctctcaggctctagtacgagccactggggccccagcaatccagtacatgcttatatgcttatttcttctccaagtgtgtgttgttctctttgccgctggagatatatcttactctgccttatattctacttatttactcactaatctcatttcaaacatccccctctccacctcaccccgaatccaaagtagaagggcatggcctcaagtctagggaccacaccgtttgaggctggacacatgtgcracactggaacctgtctttctaataagcttaccaagtaatcctgatggaaatcttcaccctaagtcaccacctctacaactaggggtctcagagatgaaagccagggcagagggagactcttacctaccccttgggagacggagaaagacacaagaatcct

SEQ ID NO: 776015 - DNA, 667 bp, Homo sapiens
agggaactcagaggccaggatggatcctccgtacgctgaacgctggtcccctgggcccccttatttctttctctatactttgtctctgtgtctttttcttttccaagtctctcgttccacctaacgagaaacacccacaggtgtggaggggcaacccaccccttcaattaaccatgcggccaagagtcaaacccactagtttgccttcaaagtccaagatctaactatgacatcaagacactgtcccttcagtgccctccctctcaggctctagtacgagccactggggccccagcaatccagtacatgcttatatgcttatttcttctccaagtgtgtgttgttctctttgccgctggagatatatcttactctgccttatattctacttatttactcactaatctcatttcaaacatccccctctccacctcaccccgaatccaaagtagaagggcatggcctcaagtctagggaccacaccgtttgaggctggacacatgtgcaacwctggaacctgtctttctaataagcttaccaagtaatcctgatggaaatcttcaccctaagtcaccacctctacaactaggggtctcagagatgaaagccagggcagagggagactcttacctaccccttgggagacggagaaagacacaagaatcct

SEQ ID NO: 776016 - DNA, 649 bp, Homo sapiens
agggaccacaccgtttgaggctggacacatgtgcaacactggaacctgtctttctaataagcttaccaagtaatcctgatggaaatcttcaccctaagtcaccacctctacaactaggggtctcagagatgaaagccagggcagagggagactcttacctaccccttgggagayggagaaagacacaagaatcctaaaagcagctgtggctccagcatctgggaagggaatgggacagaaagtgcctccaagatggactctgtcctactcttctttcaatccccagaccttaacactgggcatggcacgtagtcggtgtttagtaagtgcctgctgagcagcttgtttcactcatggcaccatccctggcagggaaagaaatagcagcagagtcaccaatgcatgtaacctgcctgcagcaagaagtgccccagacaggaggctgcaaagctttagagcagggccttcagcctaatccaggtaggtgggtggaaaccaaacacagcctgctccagagctacagggcaagtgctggcgtagaagccaaaatatgttatttccttgtgcggtttcatgagactaggcaaatcagcacagaacctggaaggatcccaagtgtaccactcttcctctctgtattaagtgtcct

SEQ ID NO: 776017 - DNA, 567 bp, Homo sapiens
acttcctaagatgtctcaatttgtatcagtcaggtaaaattttaacaaaaatatcacccagagtcacttgtgtttttctgtttgtttgtttgttttttaaatgggccttgagaattactctgttcctgaagacttttttttttttttttttttttgagagcgagtcttgctatgtcacccaggctggagtacaatgaatggcacaatcttggctcactgaaacctctgcctcccaggttcaagtgattyttctgcctcagcctcccgagttacaggcatgcgccaccacagctgggtaatttttgtatttttagtagagatggggttttgccatgttggtcaggctggtctcgaacttctgacctcaggtgatcctcccacctcagactcccaaagtgctgggattacaggtgtgagccactgtgcccggccctgaataccatttcttagagggagaaattattattattatttattttcccaaaagcatgtaagggggacgttagagtcagatacacccgaatttcaatcccgttaccagagctttctttaaaagacccatgggca

SEQ ID NO: 776018 - DNA, 558 bp, Homo sapiens
agagaggagagaagagccgcggctggaggcgctggttaacaaaaaaccctggagtctttaatgttaattttagggaacgcccctcatttatgtccctgccccagcccttcaaacaaagaagcccttaaatttatttgaggttcgaaaacccaactctgcctgtctgtcagcaagcgggcctacacacaccggcgacccggagaacagtgccccacccaaagtaagactgagcccaacggggcaggttacgtgggcggtgctgtctcggctatctggcttgtttggttgactttgaaaagctttctgtgcgccctagaagwtatttatggagtatggtctgcttcagggctgaaggaagaatgcgatcctgaactgggaagagtcctatcccattttcttgactttcgcgctccaaaaagtagagattgggagccaacaagctgagcgatgcttgagctagtagtaaccaccctgctctacccacctccccaacacacacacacacacgattcccttgtccaccagcacacacacacacacacacacacacacacacga

SEQ ID NO: 776019 - DNA, 506 bp, Homo sapiens
catctgcccaccttggcctcccaaagtgctaagattacagtaatggcttgagccactgtgcctggccaaatgtatattaactttataagaaactactaaagtgtttttccagagtatgtgtaccattttacatccccaccagcttttctggcgggaataaattagagatccagctgttctccatccttgtaagcacttastattgtcagtattttgtgtttaagccactttagtaggtatgtagtgtcacataattgtgctttgaatttgatttcctgatggctagttatgttgaacatattttcatctacttatttgccatttgtatattccctctggtaaaatgcctattcaagtcatttgcccattttctaattggaatgttcatttcctttctgttatgtttagacagttctttttttttttttttttttttgagatggaatctcgctctgtcactcaggctgaagtgcagtggcgtgatctcggctcactgcaacctccgc

SEQ ID NO: 776020 - DNA, 671 bp, Homo sapiens
agcttgatatttgaggaggcaattgtctgttagccagactttccttagaggacagtagtcttgttatattgcgtggagctaaacagttaagttattccccattgttaacccattggctgtagagctggacctccagtcttagtcaaaactcccagggctattttcttcctttccaatatacataaagattaaataccttccctatgggaaggctgagaactggtgctttaagcaaggcttgctttagctggtttaaggcttttgtgttttaggttcccaagttagggagctgcttgagtttcttttaagagttggtataaaggatgagctatttcaccataccctggtgcccacattttgcaaaattcagtaatgcccacattttgcaaaattcagtaatrcccaataattttcttaactcttaaaggaaacggggttaatcctttcctcacctggtactctggttccttctgtgctgtgtctgtcccacagaccttggccgatgggtgaaatgagtactcagacacaggtatgcagtgtaagagcagctaggtgactgcctggctccagtggccagacagcagtcccgagaagctggagctgtttgcttttattcagtgcaggcacaatgccgaaaacctggagccaacacaacctgcaggtaattaaca

SEQ ID NO: 776021 - DNA, 640 bp, Homo sapiens
ttctaaataattcatataggtcaaagatgaaataataaggaaaatcagaaaataactttttattgaatcaaaatgaaaatacaaaatatcaaaatacgtggaaggcaaccaaagcagtgatttagagggaaacttacagctttaagtgcttaagttagaaaagaaaaaaagatgtaagttaaccgacataacattccactttaagaaaatacccaagaaaattaaaaattaaaaaagttagaaaaagaagagcaaagtaaaccaaaagaaataataaaaaaaaacacagaagtcaataaaatggaaaacacagagacagtaaggaaaattaactaaattaaaagcttgttctttgaatatttgtaaatcatrtatctgatagggggttaatatccagaatatacaaagaacttctaaaactcaacaagaaaaaaaacaaacagcccagaagatgaacaaaggatacaaacagacatttctctcaagaaaatatacaaatggccaacaagcacataaaaagatgctcaacattactaaccattaggtaaatacaaatcaaaaccacaatgagatactactccacacctactaggatagctattatcaaaaacaaaagtgtcggcaaggatgtggagaaact

SEQ ID NO: 776022 - DNA, 618 bp, Homo sapiens
aaacttttaaagaacaaattatcccaattatttttctattgctccagaaaattggaaagtaaaaagaaggaaaacttctagcttccaacacgagagggctaataagttctccagcgtgcaaacatcctacatatttacatatataattatatataaggcmgaagaagtaaatatatcagaccaatctctcttatgactgtcccaaataaaacattagcaaataaaatccagaagaggccgggcgcagtggctcacgcctataattccagcactttgggaggccgaggcgggcagatcatgaggtcaggagattgagatcatcctggctaacacagtgaaaccccgtgtctactaaaaaaatacaaaaaattagctgggcgtagtggcgggcgcctgtaatcccagctactcgggaggctgaggcaagagaatggcatgaacccaggaggcagagtttgcagtgagcggagatgggccactgcactccagcctgggcgacagagcgagactctgtctcaaaaaagaaaatccagtagaacattttaaaaatagtaacatcatgatcatttggaatatattctgcaaatgcaaggatggttaattgaggaagaatcatag

SEQ ID NO: 776023 - DNA, 568 bp, Homo sapiens
gcatacaattgatggcttaggttgacagagcctgtttttatgtgtcattttacatctttgagtccttagtttcttcatctgtaaaaatgaagcagttgtgctaaacagttgtgaacatccttagcacctctgactttcttttctttctttttttttttttttttttttttttttttttttgagatagcctcactctgtcacccaggcagtagtgcaatggcgygatctcggctcactgcaaactcgcctcccaggttcaagggattctcctgcctcagcctcccaagtagctgggattacaggcatgtgccaccatgcccggccagtatttgtatttttagtggagacagagtttcaccatgttggccaggctggtctcaaactcctgacctcaagtgatctgcccacctcagcctcccaaagttctgggattgcaggcatgagccactcgcctggcagtgattttctattatctgcagctctattgtctgtcctttgttaattcagtagtaacttatcactagggatttgtgtgaagtaatcacagttatcaatgttttaatcagtt

SEQ ID NO: 776024 - DNA, 568 bp, Homo sapiens
gcatacaattgatggcttaggttgacagagcctgtttttatgtgtcattttacatctttgagtccttagtttcttcatctgtaaaaatgaagcagttgtgctaaacagttgtgaacatccttagcacctctgactttcttttctttctttttttttttttttttttttttttttttttttgagatagcctcactctgtcacccaggcagtagtgcaatggcgcgatctcrgctcactgcaaactcgcctcccaggttcaagggattctcctgcctcagcctcccaagtagctgggattacaggcatgtgccaccatgcccggccagtatttgtatttttagtggagacagagtttcaccatgttggccaggctggtctcaaactcctgacctcaagtgatctgcccacctcagcctcccaaagttctgggattgcaggcatgagccactcgcctggcagtgattttctattatctgcagctctattgtctgtcctttgttaattcagtagtaacttatcactagggatttgtgtgaagtaatcacagttatcaatgttttaatcagtt

SEQ ID NO: 776025 - DNA, 568 bp, Homo sapiens
gcatacaattgatggcttaggttgacagagcctgtttttatgtgtcattttacatctttgagtccttagtttcttcatctgtaaaaatgaagcagttgtgctaaacagttgtgaacatccttagcacctctgactttcttttctttctttttttttttttttttttttttttttttttttgagatagcctcactctgtcacccaggcagtagtgcaatggcgcgatctcggctcactgcaaactcgcctcccaggttcaagggattctcctgcctcagcctcccaagtagctgggattacaggcatgtgccaccatgcccggccagtatttgtatttttagtggagacagagtttcaccatgttggccaggctggtctcaaactcctgacctcaagtgatctrcccacctcagcctcccaaagttctgggattgcaggcatgagccactcgcctggcagtgattttctattatctgcagctctattgtctgtcctttgttaattcagtagtaacttatcactagggatttgtgtgaagtaatcacagttatcaatgttttaatcagtt

SEQ ID NO: 776026 - DNA, 607 bp, Homo sapiens
aagacacctattacacagataatcccatatgaaataaattaaacccgttttacagatggattaattgttttgtccttgttctgttgacttccagaccttgttatctctcctgttttcctggatcatattgtctctcaaatatcaatagcacagtttttggctgtgttgttttcaaacagcctacttttggggaaccacgaggacgtagtggcaggactaaaggtcaaggtcacttcagtgttctcccaaatcccgctggcataggctctttccttgtctgctttgtctgcaggattcakcaccaagagctctcaagagcaaatccacaggcagctaaatcaagaaggtggctctcttccctcctctttgctcccctcttcctgcagagatgcaagatggctttgaaatgtccctatcttccttcccttctgattgccttacttgttcagatgcttccatcctgaacattttctagagtcccctgcctagtcgccctggaaagtacccagggaagccacttacggcctatccatcaaagcacagtgcgtgtctcctttctcagacagaggacgtaatcatccatgcccacagaggagagcgtgtgccc

SEQ ID NO: 776027 - DNA, 594 bp, Homo sapiens
ttcaaaatttattgctattgtttcttctttatcctttattttttggttcatgttggttcttaaaacagtttttacaacctcattttttttttctgaagtgggtggtataaaaaagttgcaattaattcaggaattaaaaatgtggctcctaagacatttctttctttctttctttctctctccttctttctttctttccctttctttttttctctttctttctcttttttcctttatttctttctttttctttcttttcttttcttctctttcttcttttttttgatagagtctcactcttgttacccaagctggartgcagtggtatgatcttggctcaccgtaacctccacctcctgggttcaagtgattctcctgcttcagcctcctgagtagctgggattacaggcatgcacacccacctaatttttgtatttttagtagagacagggtttctccatgttggccaggctggtctcaagctcctgaccttaggtgattgacatgtcttggcctcccaaattgctgggattacaggcatgagccaccacgctgggccttattttctaatggcactgcattcccctgtcagaa

SEQ ID NO: 776028 - DNA, 563 bp, Homo sapiens
tcttctttcttagagaaaggatacactgtcatctggctggggtggcttaactatgttcactaaggttctcaagactgctaaactgttatttttgcaaaaacacaataactttaaaaattggctgtaagcatgcctgcttaagcactctaaatgcaaacaattactgcttatataacagtgactcataccctatggtgtcacctaaaacctgactattctccaaagctttctagttatagatggaaattctcatacttaaaaacttgtaacttacaagccatcacaggtgcaaagctattttccagagcaaaagcatatcaactccgtctggcaacaagacatgcagtaacaattatgcaccatccttttrgttcaaatatacttttgcccgaggcattagccattattctagtgtgtatttgctatgtttacacttagttttgagatactttatgaacatttactccagtgtctcaaataaatgcaaaaacaataaagcttgtaaaaaaaaatactagattgaagaagcggacaatcacaaatgaaacaaaagtagaaatatg

SEQ ID NO: 776029 - DNA, 578 bp, Homo sapiens
aggaaagcacaatcttctgtatactttagcttctccccaaaaagagtatactgtctggaggatggcagtcagtaaaagccatatggctgtgtcaccaggaattcatcccaaacagaaatctcactcacctccctggtgaattttattcaggtacaggcagctcctgctgttccctcactttctgaggagcccaaagactctttttgtccctacagggcaccattaatacttaacattttcagtgctgaacagttgctagcttcagacctctcctctggtcacttactcagatctctcttagacrtaggcaattaggaagaagaaaccatgctggaaagctcctaggtaagccttcctgtttgttctggtctttgttgcttgtgtatgggtcatgccaagagttgtctggattaaccctatatcaatacttaaacacccagctccaccccgctccccaaacaaccccagccttccctcaaagaactttcctttttatttggctcctaatcattcactaatagacagccccccaactttgtcttttgggtgccatggcaactcaaagaaacggttgacac

SEQ ID NO: 776030 - DNA, 660 bp, Homo sapiens
ggattgcctgagctcagggctttgagaccagcctagctaacatggtgaaaccccatctctactaaaaatgcaaaaattagctgggtgtggtggcaggtgcctgtaatcccatctacttgggaggctgaggcaggagaattgcttgaacccaggaggcaaaggttgcagtgagccgagatcgtgccattgcactccagcctgggtgacaagagcgaaacgctgtctcaaaataaataaataaataaataggccagacgcggtggctcacacctrtaatcctagcactttgggaggctgaggggggtgaatcacgaggtcagtagttcgagatcagcctgaccaccatagtgaaaccctgtctctactaaaactacaaaaattagccaggcatggtggcacgcacctgtaatcccagctattcaggaggctgaggcaggagactcgcttgaacttgggaggcagaggttgcagtgagccgagattgcgtcactgcactccagcctgggtgtcagagcaagactccgtctcaaaaaaaataaaataaaataaaaataaaataaataaagagaatctgggccaggcgcagtggctcacatctgtaatcccagcactttgggaggccaaggtggggaggatcccttgagcccaggggttcgagac

SEQ ID NO: 776031 - DNA, 660 bp, Homo sapiens
ggattgcctgagctcagggctttgagaccagcctagctaacatggtgaaaccccatctctactaaaaatgcaaaaattagctgggtgtggtggcaggtgcctgtaatcccatctacttgggaggctgaggcaggagaattgcttgaacccaggaggcaaaggttgcagtgagccgagatcgtgccattgcactccagcctgggtgacaagagcgaaacgctgtctcaaaataaataaataaataaataggccagacgcggtggctcacacctgtaatcctagcactttgggaggctgaggggggtgaatcacgaggtcagtagttcgagatcagcctgaccaccatagtgaaaccctgtctctactaaaactacaaaaattagccaggcatggtggcacgcacctgtaatcccagctattcaggaggctgaggcaggagactcgcttgaacttgggaggcagaggttgcagtgagccgagattgcgtcactgcactccagcctgggtgtcagagcaagactccrtctcaaaaaaaataaaataaaataaaaataaaataaataaagagaatctgggccaggcgcagtggctcacatctgtaatcccagcactttgggaggccaaggtggggaggatcccttgagcccaggggttcgagac

SEQ ID NO: 776032 - DNA, 586 bp, Homo sapiens
gaggatgcatttgaggggagtgtcttgtagtacagaaacacaattatctattagtgaagagagaactgaggagaaagggaaaaagcctccttttaaaggagtcccagaggttcaggatgcatttgaaaggggtacagattgaagatgaatggctaccaatctagaaagagggaagcaggcctccctggttcccttattttcctagcatatactcaggatacgtgagagtgagaggaaagagtgtcctctttcagtcttctgtccttgcatccccgagttctggcgaccttggcaggtgccaccatgagtaccaaagtggcttgcacccatgaaacaggggtgtcgagacaataggaattatttgtctcacctatgtctstttcccacctacagtcagtagctttggagttccctaggcctcatttatgccatggatattaatgtggcctttatccatgaaacaggaagcttggagttggcttaatcagcaggagtcagccacgctcacctgcaatgtgccttttaacctctgttgtcatttgcctctggatccctcagatccagtttttttcctagggctttgacc

SEQ ID NO: 776033 - DNA, 487 bp, Homo sapiens
acatcaaagaaagctggacaaattaaaaatcaatgactgtctttgacctaatacatatgtgagtttgcagggcaagctgtcaccctgaaatgtgaagagacagcacatacagagagtaacaggtgagatctgcctacctgacatgcaagacactgaagccaaagatgctggaatcagaaactccttgtaatagcacatacaatatgtccaacttttaaccaaaaattataagacatgtaaaaaggcaagaaagaaattctaaagagaaaaagcaaggcagactcatatatgacacaaayattggaaatatcagacaggaaatttaaaatggctataattaatatgccaagggatttaatgaattagtgggtaacattcaagaacaggtgggtaatataagcagcaagaggaaaactccaggaataagttttaaaatgctagaaatcaacaacacagtcacaaaaagaatgccttcaataaggttatc

SEQ ID NO: 776034 - DNA, 522 bp, Homo sapiens
aatagcctttaaagaagtaagtactatgaacacctcagtgtttatggtttgtcctgtgagattaaaaattgcatttgtctgggattcctgggcccaggattgatttgggagatgcttggggattcagagttccgggaagggaggaggagctcgattctggagcatccaggtgttgtcttggaaacccaagcaccagaggggctcmaggtggaagcgctgagcaacaatgtgcacacctctatgaacctggatgaaatgggaagcctggagctcactctccgaagctgggaaacatgaatggacttggagactcttatagtgcagatccaccgaaaccacagagcccgacaggtggggctgagatgaagtgtccatgaaaggagcgaggaacatggcaggagctcacccaggacaggcaggggcagaagcacagaagcagttgccgaggctctttggtgatttgttctgtgttaagatgggagctacttgagcaccttggattgctggtggaaatgatctagc

SEQ ID NO: 776035 - DNA, 617 bp, Homo sapiens
  misc_feature 244: n = A,T,C or G
gaaggaacttagagttggatcaggctgaatttattgatttgggcccactaagtagggactctgcatttaatgttgcagctcagggagtttaaaaatgttctgatagtttatttgcttggttagctgaaatatggattaaaagatggcctactgtgaaagagttggaaatgcctgatctcccttggtttaatgtaaagaaagggatccaaaggcttagggagattgggagggtrgagtggattantcactttaaacctactcatcccatatggaggggtccagaagatatacctttggccaatgccttgagaaatagatttgcaagggcagcaactgcatctttgaagagccttgtaattgctcttctctgtatgacagatctaacagtgggaactgcagtcactcaactgcaaaatttaaagacaatgggaattattggacctggaggtggcaggggccaatgacaccactcaactgtcaaaagcaaggtgggtgtagctgccatcatggacagaataggcaaagtggcaatcagaataaactgactcttgtagagttctggcactggctaattaatcacggtgttcctagaagtgaaattgataggaagtctactg

SEQ ID NO: 776036 - DNA, 396 bp, Homo sapiens
ccagtctggcctggaactcctgacctcaagtgatctgcccgcctcggcctcccaaagccctgggattacatgcatgaaccactatgcctggtgggaatctcaatagataataaaagctatgaaacaaatagaaattgtagagctgaaaataaacatcttaawtttaaaatatgtcattggaaggacttccagtttcagttcttacacataaaggacttggaagtcattatttccatacgtacaaagaaagaaatagaaaaactgaaaatcagtgaatattcttagacccatcaaaaacctgaggctgcaggtgaaagtgacaccttaaagtctacaaagagaggctcatccagaaagacaaatctcagatctgctaacctgaagcagaagtcacag

SEQ ID NO: 776037 - DNA, 613 bp, Homo sapiens
tgcctggtgggaatctcaatagataataaaagctatgaaacaaatagaaattgtagagctgaaaataaacatcttaaatttaaaatatgtcattggaaggacttccagtttcagttcttacacataaaggacttggaagtcattatttccatacgtacaaagaaagaaatagaaaaactgaaaatcagtgaatattcttagacccatcaaaaacctgaggctgcaggtgaaagtgacaccttaaagtctacaaagagaggctcatccagaaagacaaatctcagatctgctaacctgaagcagaagtcacagatgcaaaaactgttaattttggtgaattgttggaggatgaacatgggccagatttagaacaaacaactcccagagtccgaaatcatagggggctgcccacaattttatgcactttacttccaggaaattcaccagatcctgatggtgaagatctgagaaagrtcccctggttggtagaggggcagattaatcatagtgaaatatactcaaagccttcaccatagcacaggcctatactccaggaaaaaagaatactccagagacttttatcctattggagagaagcacagtgcttctcttc

SEQ ID NO: 776038 - DNA, 621 bp, Homo sapiens
agctcagttaaaaatggtttgaatatgtgctaaatcaagatagtgcttcataaccatgggtgatgaaggaaaatccccaagtgagaagccagatgcagctaggttcagctcaatggcaaggcctcctccttgagcagactcaggaacactgcttgacaatgctttgtcatttctctcctcacatctatttcttaataagatagatagtatggagtggcactgtcctgtcggatgtgctgcaktaatggaaatgccttctaattagcactgtccaatatggtagccgttggccacatgaagctactgagtgcttgaaatgtggctggtgtgactaaggaacttcatttttaattttgtttaatttgtattaaatttaaatggtcacctgtggcccgtggctaccatattgaacagcacaggcctagaccacaaggggatcttgtccatttttgaaaatggggtgaggaataaaagagaaacagcactctcttctttcagagctaaagacttctgctgcttttgggtcgtgatgctgatggaaacacagaccattggatttgagtctcaaacctgtattcaaattttcttatatattctttgaaaggaaggttttatctatgg

SEQ ID NO: 776039 - DNA, 621 bp, Homo sapiens
agctcagttaaaaatggtttgaatatgtgctaaatcaagatagtgcttcataaccatgggtgatgaaggaaaatccccaagtgagaagccagatgcagctaggttcagctcaatggcaaggcctcctccttgagcagactcaggaacactgcttgacaatgctttgtcatttctctcctcacatctatttcttaataagatagatagtatggagtggcactgtcctgtcggatgtgctgcagtaatggaaatgcyttctaattagcactgtccaatatggtagccgttggccacatgaagctactgagtgcttgaaatgtggctggtgtgactaaggaacttcatttttaattttgtttaatttgtattaaatttaaatggtcacctgtggcccgtggctaccatattgaacagcacaggcctagaccacaaggggatcttgtccatttttgaaaatggggtgaggaataaaagagaaacagcactctcttctttcagagctaaagacttctgctgcttttgggtcgtgatgctgatggaaacacagaccattggatttgagtctcaaacctgtattcaaattttcttatatattctttgaaaggaaggttttatctatgg

SEQ ID NO: 776040 - DNA, 624 bp, Homo sapiens
gaacattaaaataacatcgaagcatcagataaaatgccatgggattctagggattcttccctgggttctttcttttgaaagttgttttccctcttgattacagtctcaaaagtaaatttcgttgtgttaatttttgatgatttttcatttgctttattgtgaatggaaagtataataygtacagagttgaattattttgtgtgtttttttttaatttaaaaaagtaccctaagaaaggaacaggtgaaaaaaaacatgtagggaaatattttaggtcagtggtcatctccttacctatataaggatacagaaacttaaatgtactaaagtgctcactcaaagaaacacatctgtttcaactactttgctttgtagcaaattaccaccgacgtatagtagtttaaacaacttgtttatgattttgtgtgccagcaattcaggaaggattcagcgtagtggttctcactcagtatctctcttgctgttggagttagatatcagctgacattgcagtcatctgaaagtgccactgagctagaaatctaagatggcacaggtggctggcagctagtgctggctgtggtctgggagctcagctgggtctatgggctgcagcacctgcat

SEQ ID NO: 776041 - DNA, 648 bp, Homo sapiens
caaaacagctcaaatgcaagcagccacatgggcacttttctcatgaaccttttgtgagaatcaaattctgaatgacagatcagctcagagacctcttctctgcctaatgaacaacaactttgtagtcctaatagctactgctgtttagaacaagataagagaataatttccccatccgattggatacccatttgttgcatgtcctttctatttcaattgagaggcatcttatctgtcattattttaactttgtataggagggagttgaggtctgattaaatcaaagaagcacatcagaaaatttcctttcattattataaaatgagtttgagtcacatgaccatttgtaaaagaaatccgtgacatagaacttaactttctccagggcgtatgttatatatacaggatttatatacactaatgttagaataaagaaaaccatagttattacttatttagcacctgtaaaaaccaggtactaagctatgtagttttcattcaaacmtttaaaagacaagtaataggcaatgaggccaagattttcacccagatctgtctgactctgtagtccaagattgcacaaagaacatgctttttattaagttgacactgaacttaacttaaagattaggactgtgccatgggctg

SEQ ID NO: 776042 - DNA, 607 bp, Homo sapiens
ccagctaatttttgtaattttgctctgttagacaggctagtctcgaactcctgacctcaagtgatccgcctgcctcagcctcccaaagcactgggattacaggagtgagccatcacgcctagcctcattttagattttttaatgtagctaaataatgaccttgcaaagatatcaacwtccaaattcttgaaacctatgtatatgttaccttatatggcaaaagagactttgcatacgtgattaagctaaggatatcgagatgcaggggatatcccgtagtatctggatgggtccaatataatcacaggggtccttacaagaaggaggcagagggagatttaactgcagaagatactatcccactggcttgaagatggaagatggggccacaaaccaagggatgtaagtggcttccaaaagctggagttgtcaatgaaacagattctcctctgaagattccagaaggaaaacagccaagccaacatcttcattttagatttttgacctccaaaactgtaatagaacaaatttgtgcttttttaagcccctaggtttggggtaacttgttatagtagcaataggctactaatacatgtggctactggga

SEQ ID NO: 776043 - DNA, 500 bp, Homo sapiens
ccatgttggcaggccagtctccaacccctgacctcaagtgatccacctacctctgcctcccaaagtgctggtattataggcgttgagccaccatgcccggcccaggtgctttcattttttttttttaaatgaggataaaattattttttttaacttttattttaggtttgggggcacacgtgaaagtttgttacataggcaaacatgtgtcatgggaatttgttgtacggattatttcatcaccygggcattaagcccagtatataatagttatcttttctgcttctctccctcctctcacggctcaagtggacctcagcctctgctgttttcttctttgtgttcataagttcttatcatttagctcccacttataagtgataacatgcggtatttggttttctgttcaacttcaggtgctttttgacttgacacgttagactcttcattcccgcctttgtcgtcagcatttatggagctaggcactgtgtgagtgagga

SEQ ID NO: 776044 - DNA, 561 bp, Homo sapiens
tggttctttttatgttttctatctctttgttgaattttttattttgttcacgtattgtttttctgatattgtttatttgcttgtatgtcttctcttgcagcttactgagcttctttgcaactattactttgaattctttacaggggatttcatagatctccatttatttggggtcagctactggagttttgttttgctcctttggtgttatgtttccttgattcttcatgttccttgacatcttggattgctatcttcacatttgaaaaacagttctttcttctagtctttactgagactgctttaggagagaaagaccttaactcaagaaagcccagccagacattttggggtttttgcagggcttttctatggatgcaccctycccgctcctttttttccctcttggagaggaagtcttaggattgtgtgccttctcttaatcctgcaaaattgagccaggtgtggagaactttctgtttattttcctcatggcagtgcttgaaagtgttcaaggttgcactccttcttccgatctcacaagttgagctagctgctgct

SEQ ID NO: 776045 - DNA, 528 bp, Homo sapiens
atggagtagtatttatccataaaaaggatgaaattctgtcactcatgacaacatgatgggcctggaggacattatgttaagtgaaataagtcaggcacagaaagacaaataccacaggttctcactcatatgtgggagctaaaaaactgatctcatagaagtagaaaatagaactgtagttattagaggstgggaagggtagaggggaggggaggacagggagaggttggttaacaggtacaacattatagctagtgaggaggaataagttctagtgctctattgcactgtaaggtgaacatagttaatgataatttattgtatgttttaaaaaagctagaagagaggattttgaatgtttgcaacacaaataaatcataaatgtttgaggggatgtgtatgctaattacctcaatttgattattacatattgtatacgtgcatcaaaaatatcattctatatcttatgtacaattattatgtgtaaactaaaaatgaaagaaaaaaaatcaagttgcagaaaaatac

SEQ ID NO: 776046 - DNA, 464 bp, Homo sapiens
ctaccccttccaaaatataacatagttttcaaataacaagctgcttaaattaacttagggagcagtcatacagaagaaatcattggcttttaaaagcagatttcccttgagtactacactgactttttcttttctcttgagcttcataaaatggaaacggaagcacgtattttcttccagtgacctstacgttataattttaaaatattggttaaagactgaaaggtaaccatcattaaactttgtaaagaaaaatcagaaaatctaactaagtaacttcaaattagctacttaaagttccttctcaactgtgatgatcctcctggaacatgagataaagataaagctttatcttgctggctgctaccatagctttcagctatcaaggatcctttctgttggttccatagaaatccactaaattgggtctgttccctcaatgtcccctgtccacgcctcaaccc

SEQ ID NO: 776047 - DNA, 627 bp, Homo sapiens
agtatttaacttgatttagtcagtaattacaattctcccaatattttaactatgtatattcacttaaaaactttcctagaactaagataattttctgccatctggcacaacagtatctccatatggaagaattacttatagataaaaaataaaagaaatatagggattgtaaatgcagtatatttggctgcatttacaaacctcctcaaaccatattcaataagactttatcttaagagggtttttgttctcatgtcaatattttcactttcatattatttgcttaaaaaacaaaactacactaaataaatattttggtaaagagttaacctggaaaaatgtaaatttaatttctgatattttatwcattagtttgcttaggcaccagcagcacagttgggagcaaaaacaaccaggttctattccaattctttgccactgtatgaccttggaaaagtcacaatttttctatacttcaattttctttgaccaaaacaaacatgataatagaacctgtgtttacttaattcatgagtttgatattgtattatgatacttttggcaaaaaagtaaacagactatggtaagtgttttgagatctttaaaggaaaaagtgtgattgaaata

SEQ ID NO: 776048 - DNA, 646 bp, Homo sapiens
caaccccacaagagggcaggcaaaggaagggagagaactttcagttttcaaagtcttttgtaggtattcctttattgtactctcttgttatacttctgaattacatcaaagcagtaggattggctacttttgctatttccaaatattttgtagggtgctcagttattttgaaaaacatataatgttgatgactgtgtttattgaatttaagaatttatactttcagtacttcagctttatgtttttagatccatatatttaaaattatcaatttttttggttattcatgctgaagttttcaccattactattgataagtatcattgattgtaatagggagtttttttggtgtttaaaagtaactttagaatgtttgtaatatagaataaagttttaaatgactccttttcatgttttataaaagttgacattcctgaggtctgttagtgaattttcaaaatgataagaattatcttttgaatacaagttgcygttttacacgtcagctctaagtttatttaaaaggaagacacacctcaggccaaagtaaatttctctttacatgatcacagtgaaagttttcaaaatctaaatgttaaactagatggacgctcaatattttatggtctcagtattgtcgttaaca

SEQ ID NO: 776049 - DNA, 605 bp, Homo sapiens
ctatgaattgtacctttttttttttctttgagacagagactcgctgtgtcacccaggctggagtgcaatggcgcactcaacatccacctcctgggttcaagtgattctcctaccctagccttctgagtagctgggattacaggcgcccgccaccacacccggctaatttttgtatttttagtagagacagggtttcaccatgttggtcaggctagtctcaaactcctgaccttgttatctgcctacctcagccttccagagtgctgggattacaggcgtgagctactgcarccggctgaattgtactttttgtgtcaagtctatggactcttcaccaagtcctaggtcctgaagattttcgcctctgttttcttctgaaagttttatgttttacaaaataatcacttttttaccttatatttttgataaagcactaatattggtaacagagcaactgccagtgctacgattttcgttttgtttgcttgtattttgatgtattaatattatgcgtaatctgtccttctttgtaaaaatcttttaagaatccatttgtgcgtttgtgagtgctatcgcaattcagatgagatctgtaaatctactta

SEQ ID NO: 776050 - DNA, 605 bp, Homo sapiens
ctatgaattgtacctttttttttttctttgagacagagactcgctgtgtcacccaggctggagtgcaatggcgcactcaacatccacctcctgggttcaagtgattctcctaccctagccttctgagtagctgggattacaggcgcccgccaccacacccggctaatttttgtatttttagtagagacagggtttcaccatgttggtcaggctagtctcaaactcctgaccttgttatctgcctacctcagccttccagagtgctgggattacaggcgtgagctactgcagccggctgaatkgtactttttgtgtcaagtctatggactcttcaccaagtcctaggtcctgaagattttcgcctctgttttcttctgaaagttttatgttttacaaaataatcacttttttaccttatatttttgataaagcactaatattggtaacagagcaactgccagtgctacgattttcgttttgtttgcttgtattttgatgtattaatattatgcgtaatctgtccttctttgtaaaaatcttttaagaatccatttgtgcgtttgtgagtgctatcgcaattcagatgagatctgtaaatctactta

SEQ ID NO: 776051 - DNA, 645 bp, Homo sapiens
tatctttactgtgtatctatcccattcaagtgcaagctcatgagtttattgcctaaaacagtgccagcacacagtaggcattctaatactcattgaatgaataaacattcctaacttattatctgaagtattctcacttgactgaaaaacatttgcacatgacaattcagtacccttatcaaatcaccccatgcctctactaaaagtgcacaattattacatgttggaatgcaggcttgggggcttagaggagaaataaagtggaataagggactgaagtagctgaatggcaggcaaactacatttacagctaaargtcaatattaacacaatttccattcagctccattttgctaacaagattttatatcttggataagcatacaaaggtaaaaaatagaggagataacagataggtacagggcaggaaagccccaggcaactgaaagaagtataatgaaattacaggaatttaatttatgtgggctaaaattctagacacagcatcttaaagtaactgaaacacgaaggcacagtaagcaaagaataaggaatacagactttgcagaaataaaagagcttacctgctttagaacttcaactaaaactaaacaaaaaatgaagtctactgctaagtccctcctt

SEQ ID NO: 776052 - DNA, 545 bp, Homo sapiens
tgtgcacactcacgcacacacgcatactcatggacacacatgcacactcacactcatggacacacatgcacactggcacacatacgcatactcatggacacatgcacactcacactcatggacacacgcacactggcacacatactcatgctcacacatgactgactygcacacatttgcacacacatgcacacactcacaattgcacacacgcacacacactcgcacaatgtgcacactcgcatgcacgcacactcacactcagacacgtgcacactcactggcacacactcatgctcacgacattcacacttgcacagatgtgcactctcacactcatatgcacacgcatacactcacacacatgcacactcacacacactcatgcacacatgcatatagagttccttgatggaagctttgagaaccatatctttcattccattgttagcacacaaactttggtttggtaaaggagagggattcttagaagcaggtggctcactccctcctgcccacagctctgccatcaggaccccctgcag

SEQ ID NO: 776053 - DNA, 545 bp, Homo sapiens
tgtgcacactcacgcacacacgcatactcatggacacacatgcacactcacactcatggacacacatgcacactggcacacatacgcatactcatggacacatgcacactcacactcatggacacacgcacactggcacacatactcatgctcacacatgactgactcgcacacatttgcacacacaygcacacactcacaattgcacacacgcacacacactcgcacaatgtgcacactcgcatgcacgcacactcacactcagacacgtgcacactcactggcacacactcatgctcacgacattcacacttgcacagatgtgcactctcacactcatatgcacacgcatacactcacacacatgcacactcacacacactcatgcacacatgcatatagagttccttgatggaagctttgagaaccatatctttcattccattgttagcacacaaactttggtttggtaaaggagagggattcttagaagcaggtggctcactccctcctgcccacagctctgccatcaggaccccctgcag

SEQ ID NO: 776054 - DNA, 602 bp, Homo sapiens
gggtgggacctgccatgttggccctatctgctagtcccctgcctgttttgggccccaggcccagctgcctcctcacttgattccagggcctcatccccatgaactgtctactggggcccgtcctcctgccttctccgtcagctccccaaatcccatcagcctcyagtgccctgccatctgcttccttggcccatggtgacttcagggaccctggcacctgagagcccctctcttctgactcctagggggaccttccttcatctctttggccaagaggcccaccctagttctttgggtttcctcagggggcccctgctcctcctcccgtccctgtcttctccaagatccaagagtccacgcatccggcctcctcctgtccccccctcccctctgtgacaccaggggccatcttcccacccaccctgtcccatccttggttaatgagcactccttccccatcaaagacattaagtcccttcctttgtgggcctttttgggtggtgaccccagcaggtgctgtccctcaaaccctgcctgattcctgggcagtccccacccacataccttgctctgctataattcatggccagaagcagcccaga

SEQ ID NO: 776055 - DNA, 572 bp, Homo sapiens
acagcaagctgtgatcctgccactatgctccagcctgggcaacatagtgagaccctgtctcagaaaaaaaaaaaaattaaaaagaataaaacagagtcattaaaaaaacaagcgccaaggtggagtgtttgcctagctaggtagtggaatggtgtgggcttctgacaaagctgagggaggtgttctttgagacctcagtcattgggacaagctgcccctgggtaatgattttctactcctgtggaaacctgccactaaaatattttgtctgctatttaggacatggggaatgaggagagaagatttgggtttcttttccccctgctctagagtagttacttttccttcaccactgcctatagctttttacctggcactgcggggactctcagctgatgtaaaaacttaagagggtagatyttgtgtgtttttaccatagtaagagattaattaattttaaaaactctgaatctatataagaaatgccagaaagttcttagttttcagaatactatcattacccagttattaactctaggactgcaggattcaccatgctttcacaagctttg

SEQ ID NO: 776056 - DNA, 611 bp, Homo sapiens
cagggttttctttctggtttcactaattactttttttttcctggctgtaatctgtaaggcacaatcccagtgaatgatttatttaatttgagggaagttttttaattttagaaaccctataaatatcagtttaatgatacaaagtaaacctaacactaatctttaaatgtgacgaggcaaatgaaaagaatgctaattctaaggggaacggggtcaaacccatgtatgtttgaactcttattttccttatctgaacaaaacaaaaaacaaaacacaaatataaatctagttatctcataaaaatattctataggctgggtgtggtggctcatgcctgtaatcccagcactttgggaggccgaggcaggtggatcacctgaggtcacgagttcaagaccagcctgcccaacatggcaaaaccttgtctctactaaaaawacaaaaattagccagttgtggtggtgcacgcctgtaatcccaattactcggggaggctgaggcaggagaatctcttgaacccagaaggcagaggttgcagtaagccgagatcacgccattgcactccagcctgggcaacacagccagactccatctcaaaaaatatatatata

SEQ ID NO: 776057 - DNA, 600 bp, Homo sapiens
aaagccaaaaaggaagccaatgtacatgacaggacccccaaaagattcaattrttagctgcattggtacctctggaagtgatggtgaaggtggagctgaaaacaaggggcttagctggatatctgtttaagaagcagttagttacccctgccttactccaaataaggcctccaccctttcccaaccttggcagaagactagaggtctactgtctgaggagtttaacagaggatctctgaaccagcatagaccacacacagttgagagggagaatactacagtgaaaaaaggtagtaaactgaaagtccttctgcaaaattgaacactgagacctccaactacttattactcagcaaccaaaacatcaaaagccagatctaatattccagattggagactagacaatttttccctgattccctaatccgaaataaaagacctagcctaggcaacatggcaaaaccccatctctacaaaaaatacaaaaaattaggcaggcatggtggcacacgcctgtagtaccagctattcaggaggccgaggtgaaaggatccctggaacctggggaagtcaaggctacagtgagccatgatcctgtca

SEQ ID NO: 776058 - DNA, 605 bp, Homo sapiens
ctctacaaaaagtaaaaataaaaaattagctgggcatggtggcacacacctgtaatcccaacaactcaggaggctgaggtgggaggattgcttgagcccaggaagtagaggctgtaataagccatgatcatgctaccgcactccagcctgggcgacagaccagactctgtctcaataaataattaaattaaaataaaacttttagaggcagggcacagtagctcacgcctgtaatgccagcactttgggaggctgaggcaggcagatcacttgagctcaggagttcaagagcagcttaggcaatatggtgaaaccccatctctacaaaaaatacaaaaattagccaggtgtggtggtgtgyacctgtagtaccaactacttgggaggctgaagtgggaggacagtttaagcccaggaggcagaggttgcagtgagccaagattgtgccactgtactccagcctgggtaacagagccagaccctgtttaaaaaaaaattttttttaaataaaaatgttaaaaggaaaaatcaaaacaaaaaaggtgggagccaggtgcaatgtcatgaacctgtagtcccagctactcaaaaggatgaggcatgag

SEQ ID NO: 776059 - DNA, 645 bp, Homo sapiens
actaaatgaaaaaaaaaaaaaaggctggcaatccaaaattctatacctacttagaatatccttaaaaagatatgagaagtaaaaaccttctcaggcagacagagactgaggaaattcattgccagtaaacctactctaccataaatactaaaggtagatctttaggccgggtgcggtggctcacgcctgtaatcccagcactttgggaggccaagatgggcagatcacaacgtcaggagatcaagaccttcctggccaacatggtgaaaccctgtctctactaaaaatmcaaaaaaaaaaaaaaaaaaaattagctgggcatggtggcgggtgcctgtagtcccagctacttgggaggctgaggcaggagaatggtgtgaacccaggaggtggagcttgcagtgagcagagatcgcatcactgcactccagcctgggtgacagagcgagactctgtctcaaaaaaataaataaataaataaaaaataaaggtagatctttagggagaaggaatatgataaaggtcaaaaaagcaccaaaataaaataaataaaagcaaagtaaaacattttttctttatttatatttcctctaaaagataactgttaaaagcaaacatggtaacaatagaatatgtgtttataac

SEQ ID NO: 776060 - DNA, 645 bp, Homo sapiens
actaaatgaaaaaaaaaaaaaaggctggcaatccaaaattctatacctacttagaatatccttaaaaagatatgagaagtaaaaaccttctcaggcagacagagactgaggaaattcattgccagtaaacctactctaccataaatactaaaggtagatctttaggccgggtgcggtggctcacgcctgtaatcccagcactttgggaggccaagatgggcagatcacaacgtcaggagatcaagaccttcctggccaacatggtgaaaccctgtctctactaaaaatacaaaaaaaaaaaaaaaaaaaattagctgggcatggtggcgggtgcctrtagtcccagctacttgggaggctgaggcaggagaatggtgtgaacccaggaggtggagcttgcagtgagcagagatcgcatcactgcactccagcctgggtgacagagcgagactctgtctcaaaaaaataaataaataaataaaaaataaaggtagatctttagggagaaggaatatgataaaggtcaaaaaagcaccaaaataaaataaataaaagcaaagtaaaacattttttctttatttatatttcctctaaaagataactgttaaaagcaaacatggtaacaatagaatatgtgtttataac

SEQ ID NO: 776061 - DNA, 644 bp, Homo sapiens
tgataaacattgctcctatagattatagattaactaaaagtattccttacaggaaacaaagggatggggtgaaacaaagagatgggctctggctagttatctgcagcaggaacatgtccttaaggcacagattgctcatgctattgtttgtggttcaggaatgcctttgagcggttttccgccctgggtgggccaggtgttccttgccctcattccggtaaacycacaaccttcagcatgggcatcatggcccatcacaaacatgtcacagcactgcagagattttgtttatggccagttttggggccagtttatggccagatttgggggcctatccccagcatgaaaaggtagagagagagactggggtagaaattgtattcaaagagataacacagagctttccaaacctacagaaagatatcagtatttaagtacaagaagattgtagaacaccaaacagggttaactcaaataagactacctcaggacatgtaacaatcaaacttccaaatatcaaggataaagaaatgatcctagaagcagcaagataaaaacaaaaacaagaacaagtaacatataatggaattgctccactatgtctggctgtagacttttcagtggaaaccttacaggccaggaga

SEQ ID NO: 776062 - DNA, 644 bp, Homo sapiens
tgataaacattgctcctatagattatagattaactaaaagtattccttacaggaaacaaagggatggggtgaaacaaagagatgggctctggctagttatctgcagcaggaacatgtccttaaggcacagattgctcatgctattgtttgtggttcaggaatgcctttgagcggttttccgccctgggtgggccaggtgttccttgccctcattccggtaaacccacaaccttcagcmtgggcatcatggcccatcacaaacatgtcacagcactgcagagattttgtttatggccagttttggggccagtttatggccagatttgggggcctatccccagcatgaaaaggtagagagagagactggggtagaaattgtattcaaagagataacacagagctttccaaacctacagaaagatatcagtatttaagtacaagaagattgtagaacaccaaacagggttaactcaaataagactacctcaggacatgtaacaatcaaacttccaaatatcaaggataaagaaatgatcctagaagcagcaagataaaaacaaaaacaagaacaagtaacatataatggaattgctccactatgtctggctgtagacttttcagtggaaaccttacaggccaggaga

SEQ ID NO: 776063 - DNA, 563 bp, Homo sapiens
tttgtttacctaagcaagcctgggcaatggtgggcacccctcccccagcctcactgccgcctttcagtttgatctcagactgctgtgcgagcaatcagcgagactctgtgggcataggaccctccgagccaggtgcaggatataatctccyggtgcaccgttccttaagcccgtcggaaaagtgcagtattagggtgggagtgacccgattttccaggtgccgtctgttacccctttctttgattaggaaagggaactccctgaccccttgcgcttcctgagtgaggcaatgccatgctctgcttcggctcatgcacgctgcgctgcccccactgtcctgtgcccactgtctggcactccctagtgagatgaacctggtacctcaggtggaaatgcagaaattagctgtcttctgcatcgctcaggccgggagctgtagactggagctgttcctattcggccatcttggctgccccacctatgtaacatattacatataatttatttatatataatttacttgtattatatatgtaatatattgtatctattctataatatat

SEQ ID NO: 776064 - DNA, 563 bp, Homo sapiens
tttgtttacctaagcaagcctgggcaatggtgggcacccctcccccagcctcactgccgcctttcagtttgatctcagactgctgtgcgagcaatcagcgagactctgtgggcataggaccctccgagccaggtgcaggatataatctcctggtgcaccgttccttaagcccgtcggaaaagtrcagtattagggtgggagtgacccgattttccaggtgccgtctgttacccctttctttgattaggaaagggaactccctgaccccttgcgcttcctgagtgaggcaatgccatgctctgcttcggctcatgcacgctgcgctgcccccactgtcctgtgcccactgtctggcactccctagtgagatgaacctggtacctcaggtggaaatgcagaaattagctgtcttctgcatcgctcaggccgggagctgtagactggagctgttcctattcggccatcttggctgccccacctatgtaacatattacatataatttatttatatataatttacttgtattatatatgtaatatattgtatctattctataatatat

SEQ ID NO: 776065 - DNA, 563 bp, Homo sapiens
tttgtttacctaagcaagcctgggcaatggtgggcacccctcccccagcctcactgccgcctttcagtttgatctcagactgctgtgcgagcaatcagcgagactctgtgggcataggaccctccgagccaggtgcaggatataatctcctggtgcaccgttccttaagcccgtcggaaaagtgcagtattagggtgggagtgacccgattttccaggtgccgtctgttacccctttctttgattaggaaagggaactccctgaccccttgcgcttcctgagtgaggcaatgccatgctctgcttcggctcatgcacgctgcgctgcccccactgtcctgtgcccactgtctggcactccctagtgagatgaaccyggtacctcaggtggaaatgcagaaattagctgtcttctgcatcgctcaggccgggagctgtagactggagctgttcctattcggccatcttggctgccccacctatgtaacatattacatataatttatttatatataatttacttgtattatatatgtaatatattgtatctattctataatatat

SEQ ID NO: 776066 - DNA, 664 bp, Homo sapiens
gttctttaaggaatctccacattgtttttcttagtggttacactagtttacattcccaccaacagtgtaaaagtgttccctttttactgcatccacaccaacattattgattttttttgaatatggcctttcttacaggactgaggtggtatcacattgtggttttgatttgcatttccctgatagtgatattgagcatttttccatatgtttgttcaccatctgtatatcttctttggagaattgtctattcatgtctatagcccactttttgatgggactttttttttcttgctgatttctttgagttctttgtagattctggatatgagccctttgttgactgtataaattgtgaaggttttctcccactctgtgagttgtctgttaactctgctgattatatctttagctatgcagaagtttttagtttaattaagtcccatccatttatgtttgtttttgttgcatttgcttttgggtccttggtcataaagtttttgcctaagccartgtctagaagggtttttctaatgttatcttctagaatcttcatggcttcaggtcttaaatttaagtctttgatccatctggagttgatttttgtataaggtaagagatgaggatccactttcattcttttatatgtggcttgccaattatc

SEQ ID NO: 776067 - DNA, 483 bp, Homo sapiens
catacaccagggaaaagggagtctcttcagtaaatggtgttgggaaaactcgttatccatatgcagaagaatgaaaccagaccccatctcttgccatatataaaaatgaaatcaaaatggattaaagacttaaatctaagacctcaaactataaaactgctacaagactaacaatggggaaaatctccaggacaytggtcttggcaaagatttgttgaacaataccccacaagcacaggcaaccaaagcaaaaatggacaaatgggatcacatcaagttaagcttctgcacagaagaaacaatcaataaagtgaagagacaacccatagaatgggataaaacatctgcaaactacctatctgacaagggattaataactagaatacataaggatctcaaacaactctataggaagaaatcaaataacccaatcaaaaaatgggcaaaagatttgaatagacatttcttaaaagaagacttaca

SEQ ID NO: 776068 - DNA, 555 bp, Homo sapiens
cctggaaccctctcatctataaggatccctcagattgaatttgcaatcttacagaactcataaagcagcaaaataattcagtaatcttaatatttggaattactcagtttcttgcgatgaaaattaaagttattacatactaaaatctttccttgcttcaagcatttcatatgaatttgatctaaaagaatctgatctgtttcagccattgacagcattctctcatattactaataatgtcccttatactaatgtccctcataaacccttaaatttatatagaactttacagtttacaaagtgctatcacttacattgtcttattagctctcacagaamacttgtgaaataggtaaggctcaaaatgattattcctatcttaaagatgaggaaactgagccttttcaaaattaaataatgtcccacagattagtaagtggcataaatgagcatgatgttttctctaactgatcagtctgtggtacactaatatttcagcacaaaaggaggacttaatatatcactagtgatataaaagtacacaacagtcaccct

SEQ ID NO: 776069 - DNA, 589 bp, Homo sapiens
tctccagccatgtggaactgtaaatccattaaatgtctttcatttataaattgcctttatcagcagcatgaaaatggactaatacagaatattacaggcacgtcttgtagagaaccagataaataagtctgctttgatgtgattctttaatggttgtgtagcaggcctagagtatgycatccttgtagcagctacagaagctctgaaaccagagtagaggtcactcttttgtaagagaagtatatatctattaaaaaaacctcttatctgttggggtgtctccctcactctaccaagaaaagaaggaatgactctagcctccagacactcttagtaaatggagaaggcactgatttaaatccacttaacaaaccttacccttgtttactgtgtttttcctagttacttcctcattactggcctccctacacccttctttgttatagcttaagattgtatttaagcctgaattcaaagtcacctcttggagatttactcatttctctgggtacctcccatcaatacatgaggtatacatgttaataaacttctttgttttcatgttaatctgtcttttgttacagggatc

SEQ ID NO: 776070 - DNA, 589 bp, Homo sapiens
tctccagccatgtggaactgtaaatccattaaatgtctttcatttataaattgcctttatcagcagcatgaaaatggactaatacagaatattacaggcacgtcttgtagagaaccagataaataagtctgctttgatgtgattctttaatggttgtgtagcaggcctagagtatgtcatccttgtagcagctacagaagctctgaaaccagagtagaggtcactcttttgtaagagaagtatatatctattaaaaaaacctcttatctgttggggtgtctccctcactctaccaagaaaagaaggaatgactctagcctccagacactcttagtaaatggagaaggcactgatttaaatccacttaacaaaccttacccttgtttactgtgtttttcctagttacttcctcatwactggcctccctacacccttctttgttatagcttaagattgtatttaagcctgaattcaaagtcacctcttggagatttactcatttctctgggtacctcccatcaatacatgaggtatacatgttaataaacttctttgttttcatgttaatctgtcttttgttacagggatc

SEQ ID NO: 776071 - DNA, 573 bp, Homo sapiens
aattaggtgtctcaagacaacataaattccacctggactcagcctacacctcattttaaggtttattgcctgtcatatcccattttcgtatacttatttatctgttagccatggctctttcagttgaaatcttaaaaattctactcaaactatttaagggaaatttattattattattattttgggagatgctctgtcacccaggctggagtgtagtggcatgatctctgttcactgcaacctccgcctcccattttcaattgattctcctgcatcagcgtcccaagtagctgggattataggcatctgacaccatgcccggctattttttttctttgtattttyagtagggatggggtttcaccatgctggccagctggtctcaaacccctgacatcatgtgatctgcctgccttggtctcccatagtgctgggattacaagcatgagccaccacgccctgcctaagggaaaattatttttagctcatttaactaaaagttcaggactaacaatttctgttagtccatttaatataaattgttttatgtgtggataagattgcgggggggtg

SEQ ID NO: 776072 - DNA, 663 bp, Homo sapiens
ccaaaaaatatcaaagccatgccctcatcattagatcaactaaatcctaatctaaaatgatgagcccctggcattgacaggaaaacaaagagactccccaggtgaccttcatgagcagacctaacaatcatcaaaaggcttgaaaccctctgttattcagagcagaagaaggaccacaaatataaagcccagaggcatttggtgccccagatcacttctatttgagagcaaaatgtgtctcccaagctcaggggaaaaaataaataaacctggtaagtaggtgtgtgagtggtgggagaggagaatagattttgattaaatgatttttgcttttcttaatcagattatcttccaattttacccatgtgtgggcttccagaccattcttatttggcgttgtgtccatgaggacttggaaagaagaacatttttattaattactaaactgatggaaaagaataaactctaggaactagtctgctaaaatgatttatataaacataaaattcytaaagtggtacagagtaatctgtcccaccattgatggcagtacaacaaaaaaaattaattaactcccacaattgacacattcctatatggttggctccaaaaattaccagaggaatttttaagaatatcttattgtaaatcaacaatttataa

SEQ ID NO: 776073 - DNA, 603 bp, Homo sapiens
acatcttttttactccatttaatctcttgtgaaataatttaatatggtcaacaaatttgaatttgtgatggccaacttaagggcatcctttagttgtgtgctgagatactgtttaaagctgatactcattgagatgtcatttgaaactattcttttctcccacttgtaccagtcatatgtctccaagtgtcttaagtagtttattttgctcataaatagaatccatccaatagttcaacttatttatggaacccaccgactcttccatgaaggtaagatggctaagcacctataaagtgacatttaagggtcactaagaagctgcctatttcaaataggtcscactaaccacctcatccttctatcggcatcagtgtttctttctcttcctattttgtctgaaacaaacactgtgactgctttggtgactaaggtataacttactgctttggggcaatagggaaggtactgcttctagaaagtacaagcactgtacacacaacatttacttttcaaggcattttaatgtgattattctcatatgcaccttccaatgcacctgaaggaccaggtaatcttatcacaatctacagatgaggaaac

SEQ ID NO: 776074 - DNA, 632 bp, Homo sapiens
agtctacttctgtgacttggataggctcaagcacttgtaagtaaatcatagaacattcagctattcattttttaataaacatcaagccagaatcagtatcctttctcaatagagctgtttttagagtatctcaaaattccttgatacttccaaggacaccaacatcatctaatttgtgaattgcaaagattatctccctttcagtcattacggggaatataataaaaataaccataattatgcccaatgaatgatagacaattccatgggtagcatggtttggaattgaacctggattttagttgtctctggcactcattagctatgtgactttgacaaattacttacattattttttttagttaaacaagataacayataatttataagctactgtgtgaaaaacatctaacccaatatctagcacataatacatatttcttctccttagggccctgagataaaagattctataaccttggtgcaatcctagagccctcaggttttcaggttattctcttgagggttaaactgagtttataagaacataggagagtggtaattttcctatctgctcctgagatctccaacggaattaacaggaactcctgaaactgttttctttctcaaat

SEQ ID NO: 776075 - DNA, 633 bp, Homo sapiens
ccactagagggttatgagcagagaagtgatgtaaaccaatttatattttaaaataattacctttttttctgggtaagaatatagcatggaacattaaataagtagaagtagagagacatttgaggaaattatagtgagagttggtggtctcttgaatcagagaggaatcaatcaatatggtgagaagtagacacacttctgatgtattttaaaggtagagccaacactatttcctaacagattagatatggtgcatgtaaaagagaagcataaaatatgactccaaatgatttgttctgagagactagagagatgagctagccatgaaataacttggaaaacctgtgggtgacatagttttgttttgttttgagggggtttgggggggatgcttgttattgtctgtcytttttattttagctatcctgatgttgtggcatggttctgacttgcgtttcttaattattaatggtgttgaacatcttttctcatgctaattgaggaatgagttaaccatgttaagcccaaattttctattaaatggtctgatgatttattaagtatgtagttgcatacatgagcttagagttcagatgacagatctggtctgggggtatacatttgaaggccatt

SEQ ID NO: 776076 - DNA, 606 bp, Homo sapiens
actgaagttgtccaaattatgaatcaatgtattttgcctgtagaattgcctgtcatcgatataaacaccccactgtcaggagaatgcagcatcagtagaaatgttgtggacacagactggagaaagaaaacttgataatagaaaatcaggcacttgaatgctctgaggaattgcaggaccgaagatagggtagcccattatttccattctggaactttgctagggccagagtatgggcaactgaaaaaagtaaatgttgatgctgtgtcctcagttagtgtgattacatcaaccgttctggagaatgagatgggcatgcccatcttccttttctttctcttattcttctcttcttctccctattcctcctcctcctgtttccttttccttctcctcctcctcttttttyttctgccttcctcattccctccttttccatttcttccctctcctttgtcttttctccctttaaaggaacaccaaaatgtctaacttcatattttcaggaataaatataataatataagaaatgataacagagttaacattttctaagattgacttgaaaataaaatatttttgttaattttctcaggctttgacaca

SEQ ID NO: 776077 - DNA, 541 bp, Homo sapiens
taaggatcccatatgaattttagaattattttttctatttctgtaaaaaacactggagttttgatagagattgcattgaatctgtagattgctttatgtagatagtataaacattttaacaattcttccaatctgtaaacatagggtatctttccattattggtgtcttcgatttctttcatcagtgttttataattttaactgtacagatctttcatgtcagttaaatttattcctgtttatttatatttttatttttatttttatttttttgagacaggatcttgctctgttgcccaggctggaatgaagtggtgcaatcacagctcactgyagcctcaatttcctgggctcaagcaatcctcccacctcagctccccaagaagctgtatctacaagtgtacaccatcacacccggccaaattttaaaatttttgtagagacaaggtctcactatgttgcccaggctggtctcctgggctcaagcaatcctcctacctcagcctcccaaagtgctgagattacaggtgtgacccactcc

SEQ ID NO: 776078 - DNA, 541 bp, Homo sapiens
taaggatcccatatgaattttagaattattttttctatttctgtaaaaaacactggagttttgatagagattgcattgaatctgtagattgctttatgtagatagtataaacattttaacaattcttccaatctgtaaacatagggtatctttccattattggtgtcttcgatttctttcatcagtgttttataattttaactgtacagatctttcatgtcagttaaatttattcctgtttatttatatttttatttttatttttatttttttgagacaggatcttgctctgttgcccaggctggaatgaagtggtgcaatcacagctcactgtagcctcaatttcytgggctcaagcaatcctcccacctcagctccccaagaagctgtatctacaagtgtacaccatcacacccggccaaattttaaaatttttgtagagacaaggtctcactatgttgcccaggctggtctcctgggctcaagcaatcctcctacctcagcctcccaaagtgctgagattacaggtgtgacccactcc

SEQ ID NO: 776079 - DNA, 638 bp, Homo sapiens
cagctaggctctgaactcttatcttccacttcaaccacaacacctgtgctagtatctgctttaatattggtgtttacagtaagatatatttttaaaatatatttaagtcagagagagagagaggttggacatctttattatggattatttccctaaacatcttcacagagtctctcaaatgaacctgcggcttttgaactcactgctccttcaaactgctagtaccactcttagactggggcaagtagggcgcctatctaaggcctgaagcaaagggagccttgtgtttcagagtgctttcctcaacattttctttctttcttttttttttgtttttttttgagataaggtcttactctgtcacccaggctggagtggagtggtacaattatagcccactgcagccacacytcctgggctcaagtgatccttctgccccagcctctcaggtagctgggactacagcacgtgccatcatgccccgctaatttttgatttcttgtagagacaaggtctcactaggttgcctgggctggtctcaaactcctgagctcaagtgacccccctgcctcaacctcccaaagtgctgggattacaggcatgagcccctacatttggcccactcctcgacattttct

SEQ ID NO: 776080 - DNA, 565 bp, Homo sapiens
ctcaaagaacttaaaagagaactactgttcaacccagcaattccactgctggttatatagccaaaggaatataaatcgttctaccataaagacacatgcacgtgtatgttcattgcaacactattcacgatagcacagacatgaagtcaacctagatgctyatcagtggtggactggataaagaaaatgtggtatacatatacgacatggaatattacacagctgtaaaaaatgagctcatgatctttgcagaaacatagatggagctggaggccattatcttaagtgatttaaagcaggaacagaaaaccaaataccacatgttctcatatcataactgggagttaaacattgaatccacatggacacaaagaatggaacgatagacactggggcctgtttgagggtggagggtgacaagaagatgaggattgaaaaactacctattgggtattatttgggtattatttgggtgacaaaatcatctgtatatcaaacccctgcaacacacaatttacccatttaacaaacccgcacatgtaccccttgaacctaaaagttggaa

SEQ ID NO: 776081 - DNA, 565 bp, Homo sapiens
ctcaaagaacttaaaagagaactactgttcaacccagcaattccactgctggttatatagccaaaggaatataaatcgttctaccataaagacacatgcacgtgtatgttcattgcaacactattcacgatagcacagacatgaagtcaacctagatgctcatcagtggtggactggataaagaaaatgtggtatacatatacgacatggaatattacacagctgtaaaaaatgagctcatgatytttgcagaaacatagatggagctggaggccattatcttaagtgatttaaagcaggaacagaaaaccaaataccacatgttctcatatcataactgggagttaaacattgaatccacatggacacaaagaatggaacgatagacactggggcctgtttgagggtggagggtgacaagaagatgaggattgaaaaactacctattgggtattatttgggtattatttgggtgacaaaatcatctgtatatcaaacccctgcaacacacaatttacccatttaacaaacccgcacatgtaccccttgaacctaaaagttggaa

SEQ ID NO: 776082 - DNA, 653 bp, Homo sapiens
ttatttgggtgacaaaatcatctgtatatcaaacccctgcaacacacaatttacccatttaacaaacccgcacatgtaccccttgaacctaaaagttggaaagaaaaagtgtttaaaaataaaaattaaactattcttggaaacagctggcaatctaccttcatgacccaaatttgctgtattataaaaatttaaaccagccacagaaattaacatgaatcagacaaagcaaaaaaggaatcargttagactttctgtaggtgagaatttgactaaaaaagaagaatatcaagttttgaattatttttaatttcagcctgctactatcgtataagtgccttccttaactttttaatctctagggcaagcatattttcaacgatggtttttaaaaaattgccttatttctgacttaatgaaattatatatacattaaattaaaaaataaatttaataaatttattttttgtagagatggggtcttgctatgttgcccaagctggtcttgaactcctgggctcaagcagtcctcctgcttcagcctcccaaagcactaggattacagacatgagccactgcacccagcctcaaaaacttaacttttaatttcagaacactgaccccatttctcttgagtctgtgttttccagatg

SEQ ID NO: 776083 - DNA, 653 bp, Homo sapiens
ttatttgggtgacaaaatcatctgtatatcaaacccctgcaacacacaatttacccatttaacaaacccgcacatgtaccccttgaacctaaaagttggaaagaaaaagtgtttaaaaataaaaattaaactattcttggaaacagctggcaatctaccttcatgacccaaatttgctgtattataaaaatttaaaccagccacagaaattaacatgaatcagacaaagcaaaaaaggaatcaggttagactttctgtaggtgagaatttgactaaaaaagaagaatatcaagttttgaattatttttaatttcagcctgctactatcgtataagtgccttccttaactttttaatctctagggcaagcatattttcaacgatggtttttaaaaaattgccttatttmtgacttaatgaaattatatatacattaaattaaaaaataaatttaataaatttattttttgtagagatggggtcttgctatgttgcccaagctggtcttgaactcctgggctcaagcagtcctcctgcttcagcctcccaaagcactaggattacagacatgagccactgcacccagcctcaaaaacttaacttttaatttcagaacactgaccccatttctcttgagtctgtgttttccagatg

SEQ ID NO: 776084 - DNA, 625 bp, Homo sapiens
ctttacattcttcttcctttcttcagctttcccatgaccaatgataaagcacagattttggatactagtcaaataaactggacagaaagtaataaagttttttctgccatcgtctcccagaagagtgaagaaatgaggaaaacacagtgaaacctcattatacagcatcttcctacagatgtagtgggaccaatcccctccccacacgcatagcaccccgttataacacaaagcagagatccccctggcattctatcagagttctgatggatgtatttttctgaaggatgtctaggcagtgtgacttggcattctgcccagggagtgagggatgtatgtgtgtgtgtgtgtgtgtgtgtgtgtgggtgkgtgggtgtgtgggtgtatacatgcatttgaagaagtttccccagatgattctgacctccctgcaatatactatgggaccaagaagccatagcttttaaaaagtgtaaaatcacatttacagaagcatcacaccccaggaaaggaatgtcatttctgatttgcaaagctcacaggaagggagagaagactttcatctgtcattccttgagattctgaggcaagggaccttgctacatctgctgagagaaagccactt

SEQ ID NO: 776085 - DNA, 610 bp, Homo sapiens
ctgaatattttaaattacttaaagcctatctccatgttcttgctttaaaaacaaatagaattgctcctaaagaaaactgctccctcattttggctctccatatatcagaattgttaaagtttggaaattttgaagtatagcagtatgatactaaattgttaattagtggggctttaaacctaacagtttatcaatatttgaaattactagggcctgatatattttcttaaggaaagtttgcctctagctttaagttggaaagtcactacaattactgtttagaaaagaatggaataattaatactttagaaaacttacattaggacttgtttacaaattatccataatggctatgtactgattgaataaaatstcaattatgaaagaaaaaatttaaatgaaaacatacgagccttgaaaaaacccaaatattcattttcctgtcaatagacaggaaaattaaaacaaaacataaatgcaaattaaatatattactaatttaactctcatttagtcaatagacaggaaaatgaatagaaaaaatttggtattttgtgatagcggaatgttatacagtggcaaaaaacaaatgaatataattgcatacagt

SEQ ID NO: 776086 - DNA, 656 bp, Homo sapiens
attgcgggccaccacttcatttacatggggtgaaccaatgtaaagtgtccaatgggaaacctctagtgggtatttggacccaagaagattctgtatctggagcccttgagccactgctcatgcctgttgccacattgtggagtgtactttcattttcaataaaaatctctgcttttgttgcttcattctttccttgctttatttgtgtgtttttttttttccaattctttgttcaaaataccaagaacatggacaccctccaccggtaacagtagcactgctrtataccaacatcaaccaagatgagaatcaaatcaagaactcaaccccattacaatagctgcaaaaaataaaatacttaggaatatacctaaccaaggaggtgaaagatctctacaaggaaaactaaaaaacactgatgaaagaaatcatagatgacacaaacaaatggaagcaaatcccatgctcatagatgggtagaatcactattgtgaaaatgactatactgccaaaagcagtctacaaactcaatgcaattcccatcaaaataccattatcattcttcacagaactagaaaaaacaaccctcaaattcatataaaaccaaaaaggagcctgcagagccaaaggaaaactaagcaagaagaacaaatctg

SEQ ID NO: 776087 - DNA, 606 bp, Homo sapiens
cttccagtattatgtttaatagcagtagtgaaagcaggcatccttgctttgtacctgattttagatgaaaagctttcagtccttcactattgaatatgatgtttgctgtgggtttttcatacatggctttattattattttacctagcgtaatgtcttcaaaggttcatcccattgtagcatatgttagaatttccttcctttwaaaggctgaataatattccattgtgcatatatactacatttgcttatccattcatctgtcaatggtcacttgggttgcttcaacattttagcaattgtgaagaatgcttctatgaacatgactgtacaaatatttttttcaagatcctgcttgtgattattttgggtatatgctcggaaatgggattgctggatcatatggtaattcaatttttaattttttgaggaattgccatactgttttccatagcagttgtaccattttacattcccactaacagtgcataagggtttcaatttatccacatccttgccaatatttattttgtcttaatagtaatcttcctaatgagggtggtatctcatagtggttttgatttgcatgtctctaataattagtgat

SEQ ID NO: 776088 - DNA, 606 bp, Homo sapiens
cttccagtattatgtttaatagcagtagtgaaagcaggcatccttgctttgtacctgattttagatgaaaagctttcagtccttcactattgaatatgatgtttgctgtgggtttttcatacatggctttattattattttacctagcgtaatgtcttcaaaggttcatcccattgtagcatatgttagaatttccttcctttaaaaggctgaataatattccattgtgcatatatactacatttgcttatccattcatctgtcartggtcacttgggttgcttcaacattttagcaattgtgaagaatgcttctatgaacatgactgtacaaatatttttttcaagatcctgcttgtgattattttgggtatatgctcggaaatgggattgctggatcatatggtaattcaatttttaattttttgaggaattgccatactgttttccatagcagttgtaccattttacattcccactaacagtgcataagggtttcaatttatccacatccttgccaatatttattttgtcttaatagtaatcttcctaatgagggtggtatctcatagtggttttgatttgcatgtctctaataattagtgat

SEQ ID NO: 776089 - DNA, 618 bp, Homo sapiens
gttatatcttcttggtaaattgaatcttttattactatgaagagaccatcttcatctctagcaatgccttttactttaaactgtactttctctgatattactatagctgcactggctttcttttagttaacattcgcatggtataccttttccattctttttactttagattttcagtattctcttctatgtgtgcctttcattagtttttgtttttgtttgtttgttttttatatctttttttttctttaagttccgggatacgtgtgcagaatgtacaggtttattacataggtatacatgtgccatggtggtttgctgcacctttcaacctatcatctargctttaaaatccaatcagattatctttttaaaaaaatttttttataaatacagttttataatctgcatctactgtagagcacttatttgtaacgtaactactaatatacttggctttaactctgacatcttatcctgagctttcttctcctgcctgttttattatcttatttttgattgttcggattgcttgaggatttttttcatctattttttttctatatacagttagtatttacactagaaactacaacatatgtacttaacttgataaag

SEQ ID NO: 776090 - DNA, 613 bp, Homo sapiens
ggaatcatttgacatttgactttttgtgtctgacttatttcacttagtataatattctaaaggttcatctacattgtagcatcaaatttcattccttaaggctgaatagtatttcttcacatgtatataccagattttgtttatctattcatccatcgatggacactgtgttacatccaccttttggctattgtgaataatgcagctgtgaacactgttgtacaaatacctattctagtttctgctttcttttgggaatctacctagaagcagaattgctaggccatatggtaactstatgtttaatattttgaggatctgccacactgttttcaacattttacattcccacaaacaatgcataggggttccaatttctccacatctttgacatttataatttgcttttttgataactgccatcctaatggatgtgaagtggtattaatttgcatttccttaatgagtagttatgctgagcatcttttgatgtgcttattggccatctatatatcctttttggagaaatgtctattcaggtcctttgctaattttttttgtttttgtttttttttgagaggaagtttcactcttgttgcccaggctggagtgt

SEQ ID NO: 776091 - DNA, 604 bp, Homo sapiens
cctttttttttttaaatatattaatcaaacccttgcagaggagacaaccagttacacttacacttacaaacacacccacaaacagactcacacagagagaccagaaactcgtgtggtaagaatttcttaccctttctgccggcatactaggttttcaggttccctttctctgcagcttccataagaatggagcagtttttgatgaccctgcttgctgtgccatagctgtgagggtcaagccacttaaaaaaagaaaatcatccttttctgttttatgaagccatagsgaaaagattctcagttttgcaagatgctgcccaatggtctgcatggggaaccgaattaacatttttcatcccagcaaaatacatacaacaaaacagacactagtcaccttgttcagcacccaatatcaacctgacaaagctcaaactttctcctgttggtccctgttgtctttgatccactccagatgggaagggatcacctccagatggtaattcacattgggatctctggtcaaggtgaagagcgaatagccaccctgagacaggcctgttgagctttctttagggatcaccaaatgtgaccagataaataaggg

SEQ ID NO: 776092 - DNA, 604 bp, Homo sapiens
cctttttttttttaaatatattaatcaaacccttgcagaggagacaaccagttacacttacacttacaaacacacccacaaacagactcacacagagagaccagaaactcgtgtggtaagaatttcttaccctttctgccggcatactaggttttcaggttccctttctctgcagcttccataagaatggagcagtttttgatgaccctgcttgctgtgccatagctgtgagggtcaagccacttaaaaaaagaaaatcatccttttctgttttatgaagccatagcsaaaagattctcagttttgcaagatgctgcccaatggtctgcatggggaaccgaattaacatttttcatcccagcaaaatacatacaacaaaacagacactagtcaccttgttcagcacccaatatcaacctgacaaagctcaaactttctcctgttggtccctgttgtctttgatccactccagatgggaagggatcacctccagatggtaattcacattgggatctctggtcaaggtgaagagcgaatagccaccctgagacaggcctgttgagctttctttagggatcaccaaatgtgaccagataaataaggg

SEQ ID NO: 776093 - DNA, 598 bp, Homo sapiens
caggcttgaccaccactgatacagcccatgtcaagtgtgcccagggtgacccagggctcagcttgtgtgtagaaggccctcgtgtattttgccaagtttcccatggtgggagtgaacacaccaagtgccttcctgaagtcacaccacaaagagcatgagatgcctaagttcattgccatttccacgtcgggtctgagacctttccctgcagggatggtaaccatactctattctacaaccctccatgaacctgcttccaattggctattatgatgaataaagagaacctggaccactccgtggacaccaggagccacatcactgtttttgaccattactctgcaggtggmcaaaaaaaaaaaaaaaaaaaaaagtgtgtcaaatgataactatccctttgcttttgacagaaagtagcctaaataaacaacagattttttaagtactaaaacttttaattaactgatttatttattcattctgaaaatgggtacagatcactgacattttcgctttgtaaacatccttaattttggagagattgcacacaaactttgagggtcttacagatcatttactgaatttattaaacactcca

SEQ ID NO: 776094 - DNA, 557 bp, Homo sapiens
tgggccagggtcggtggctcacgcctgtaatcccaacacttttggaggccaaggctggtggatcacaagatcaggcgttcaagaccagcctggccaagatggtgaaaccccgtctctactaaaaatacaaaaatcagccaggtrcggtggcaggcgcctgtaatcctaactactcgggaggctgaggaggcagaatcgcttgaactcagggggcagaggttgcagtgagccgagattgtgccactgcactctagcctgagcgacagagtgagactccatctcaaaaaaaaaaaaaagtacagtgtttggtaaaagtgtgcattcaaaaataattggtgaatgaatgaatgaattcatatcacattttaagtcagtctaaatgatacagtggaaacagaaaagaaatttattgagtgttaaggattacagataaatgcagaatcctcattcatttttcccaagatcaaaagcgcttattataaataaaataaaatataataaatgtgccatccaactaattataatgctttcatattattttgtttgtttcatattac

SEQ ID NO: 776095 - DNA, 607 bp, Homo sapiens
aatagtacagttatcattacattaaaaagttatcattacattaaatgtcagcacttaatgtttgtaatgataatagtacagttgtcccttggcatccatggaggattggattgaggacccttggcaataacaaaatctgtgaatgctcaagtcccttatataaaatgttgtagtatatgcatataaccaatgcatagcctaccatatacttttaatcatctctagattatttataatatctaataaaatgtgcatgttctttaaatagttgttatactatatgttttatttgtattattataatttatgttttgttattttttattttttgaatattttttatctggggtttattgactccacgaatgcagaamccacaaagtcagagagccaactgtatgtttaaacatgctaatttgaaacattgtattgtaactttcttgtgtggcctttaaaattgtcacagattttgtcttattccacaataagattgacattaatatgcaaataagaccaaagaatgaatatcagattgtcaatgtatctatttactgtatacacacatgtgcaggcatgtgtgcacatatacatttctgttagagatcta

SEQ ID NO: 776096 - DNA, 564 bp, Homo sapiens
caataattagtaaaaatgaatttgcataaaaagcaatcagccatgaatacataatcatgtagaaatcatgaacacatacaatgagacaaacctttgttactcattatttatacctaacacacacatacaaacacattaaaacagtgagttattcctctgagtatacaagcaaaattacatttttattaatgcagtaaggataagtcatttgttggagagcatttagttaattatcaagaaaatatttagttcaatcctgacaatttctgtatcaaaataatttccacgtgaatcacagcattatatgtaatagaataaaaaatttgacaaaccacaataaatatttgtaagtgttcttccgttcattgagaatgagagtcaagttcttcaacaacaataarcaaaataaaagcataagagaggggattcactgattgttttagtgatatacacattaagtcttctagatatcaaaaaataaaagtcaaagagcagagaaaatgttggagaatgtttgccatgtatatgttacaaatattgttaaatttagataaaatagcactt

SEQ ID NO: 776097 - DNA, 564 bp, Homo sapiens
caataattagtaaaaatgaatttgcataaaaagcaatcagccatgaatacataatcatgtagaaatcatgaacacatacaatgagacaaacctttgttactcattatttatacctaacacacacatacaaacacattaaaacagtgagttattcctctgagtatacaagcaaaattacatttttattaatgcagtaaggataagtcatttgttggagagcatttagttaattatcaagaaaatatttagttcaatcctgacaatttctgtatcaaaataatttccacgtgaatcacagcattatatgtaatagaataaaaaatttgacaaaccacaataaatatttgtaagtgttcttccgttcattgagaatgagagtcaagttcttcaacaacaataaacaaaataaaagcataagaraggggattcactgattgttttagtgatatacacattaagtcttctagatatcaaaaaataaaagtcaaagagcagagaaaatgttggagaatgtttgccatgtatatgttacaaatattgttaaatttagataaaatagcactt

SEQ ID NO: 776098 - DNA, 505 bp, Homo sapiens
taataaagcttgacactattaagggcaacactgaggtactccctaaggatttaaggatttggaaagtaggagaatcaattgtctttgaaatataaattgctacatagaaaaaatacatatatatgcaaagagtggattttgaaatttatctgtaagtgacaggatagctaaaaagccagaaggatttaggactactttaaatgaacgacattaagctacttaaggaaaaaataataaaaacactttgtgccattcagaagaaaggtttggtcagccataaaagcagaaataaaaggaaagtcaccaggaaatatgggcatcacwctgattcaagtactatacagcagagtgtacattaaccatcctctcaaaatatcttcatctcctaaggaaagcccatctctggaataaaaataactgtaaagttctgtagccaaagggatggagatttccatttgtggagggaaactcatcacaatcatgagagtggcttccagccatctca

SEQ ID NO: 776099 - DNA, 633 bp, Homo sapiens
tgtactagactaacacagccagtgatggcagcatttcaactactcaactactccctcttataattatgcaaacaatatctaagtatttaagcatcaactcattgaatgagtttaaagaatttttctaggcgaagacaggccaaaatgatgaagacacagaaattattatagaaactcctggccacagtgaggaccagattgtttcactggacatttttggttcacagagacaaaaaagacggaattcaatgattgtagtaacccacaatggtctagcaactgttagttagttggtgaaatggtacatgtcttaataagagaaatatgattttccatggtatccatgacaaattgtgcttgcggtgctgaagatttcatggtgattgactggtagattagcattwaggaaggacagctttacaaatgtttacatttgagattgaaatacattttattgattgacttccaagtaacagaaaatgttttgaaattccttttttcacttactaagatctttcttgttttctctctagaaatgactagaaatttatctttcaccaaatactgaacagattttaactgtggatgtggtataataaaaaaaatgaactgtgtatttggtctttgccttga

SEQ ID NO: 776100 - DNA, 633 bp, Homo sapiens
tgtactagactaacacagccagtgatggcagcatttcaactactcaactactccctcttataattatgcaaacaatatctaagtatttaagcatcaactcattgaatgagtttaaagaatttttctaggcgaagacaggccaaaatgatgaagacacagaaattattatagaaactcctggccacagtgaggaccagattgtttcactggacatttttggttcacagagacaaaaaagacggaattcaatgattgtagtaacccacaatggtctagcaactgttagttagttggtgaaatggtacatgtcttaataagagaaatatgattttccatggtatccatgacaaattgtgcttgcggtgctgaagatttcatggtgattgactggtagattagcatttwggaaggacagctttacaaatgtttacatttgagattgaaatacattttattgattgacttccaagtaacagaaaatgttttgaaattccttttttcacttactaagatctttcttgttttctctctagaaatgactagaaatttatctttcaccaaatactgaacagattttaactgtggatgtggtataataaaaaaaatgaactgtgtatttggtctttgccttga

SEQ ID NO: 776101 - DNA, 647 bp, Homo sapiens
ctactctttgattcattgcaactggagaagtgatgcaaccagtgatgatttgcactccaaagctcttggtgctgcagtgagtcctccctgtttggttttttttttgttttgttttgttttttcttctactaattacccaagccacagtaatttatcaaatttcttaaaacttttcagaaatgtttattataatatgttagatccaaaataaagagctttgcaagattctgttaaacctcatccttttataatatttttaaatatttaccaggtttttttttttttttttttttagcacagattcaaaccggtaatagcaaaatgatacaaaactgtcttaaaaatgtggaatgcttcacaaatttgcatgtcattcttgcacaggggccatggtaatcttctctgtgtcattccaattttagtatatatgctgccgtgaacacaatatttaccagtcttgttctttaycattttttatggttcttagctttagccaacaaagtaatgcaaggatcaaatcttaattcagatataattttaaagatacttccccaattttttatagttaattacagaaagaactattctcattgagtggtgttttcactgagtaatctgttttttgtttgttttttgccgctttgttg

SEQ ID NO: 776102 - DNA, 538 bp, Homo sapiens
ggctcataaaatatatgtgtatgtgctggcctactgtcttacagagggctaaataagcattatacttaggtctgcctgactcaagttctgtgagatttggaggaagatgttgcttggacgatcaggggaggcttcacaatggaaataatgttttagattgaggttgaaagatgaatggaagtccaggaaagtagctaaatgaaaataattccaggcatcagtaagatttcatacccagctgtaaatcccaraagccttaaagtggtcaaagcaaggcagaaataagcagaagcagtgaacagaataaactgtaggctgttaccttttaggctaacagacacacacacacacatactcacacacgcatgcacctgcacgcacacacacacacacacacacacacacacattttaaatagacagggtattgctatgttacccaggctggagcgcagtggttattcacaggtgtaatcatagtgcactacagcctcaaactcctgggcttacatgaccctcctgcctcagcctctcgagta

SEQ ID NO: 776103 - DNA, 538 bp, Homo sapiens
ggctcataaaatatatgtgtatgtgctggcctactgtcttacagagggctaaataagcattatacttaggtctgcctgactcaagttctgtgagatttggaggaagatgttgcttggacgatcaggggaggcttcacaatggaaataatgttttagattgaggttgaaagatgaatggaagtccaggaaagtagctaaatgaaaataattccaggcatcagtaagatttcatacccagctgtaaatcccagaasccttaaagtggtcaaagcaaggcagaaataagcagaagcagtgaacagaataaactgtaggctgttaccttttaggctaacagacacacacacacacatactcacacacgcatgcacctgcacgcacacacacacacacacacacacacacacattttaaatagacagggtattgctatgttacccaggctggagcgcagtggttattcacaggtgtaatcatagtgcactacagcctcaaactcctgggcttacatgaccctcctgcctcagcctctcgagta

SEQ ID NO: 776104 - DNA, 538 bp, Homo sapiens
ggctcataaaatatatgtgtatgtgctggcctactgtcttacagagggctaaataagcattatacttaggtctgcctgactcaagttctgtgagatttggaggaagatgttgcttggacgatcaggggaggcttcacaatggaaataatgttttagattgaggttgaaagatgaatggaagtccaggaaagtagctaaatgaaaataattccaggcatcagtaagatttcatacccagctgtaaatcccagaagccttaaagtggtcaaagcaaggcagaaataagcagaagcagtgaacaraataaactgtaggctgttaccttttaggctaacagacacacacacacacatactcacacacgcatgcacctgcacgcacacacacacacacacacacacacacacattttaaatagacagggtattgctatgttacccaggctggagcgcagtggttattcacaggtgtaatcatagtgcactacagcctcaaactcctgggcttacatgaccctcctgcctcagcctctcgagta

SEQ ID NO: 776105 - DNA, 605 bp, Homo sapiens
acagagtaacatgcatactaggattgtattcagaaaagattgaaccttatgtatgttccttttatttgattatgcatgaatgagataggagaaagtgatggaaggatccacactaatctgttgacttcactagctgggagaccagagacagaatagggtaggaaaagagagctttggggttatatacatttgcattcattggtcttcttatgacaagcatatattggyttctaaatttgaaaccacccaatgaaatggatgatttataataaatacatatttttcccaaagttacacgtttttcagtttgaacagtaaagaatgatctatgctctggtgattccccttcacccagaactgcccaagatggtttggaaattcataaagcaccttcagagtccattcacatctgacatattctcagcttcactggcacataaggccatttatattttaattttaactttttagagtttatgtctaaggccacacaacagacactaagagagaagactaaattgtggcccagagctttggactacaaatctagtggtcttgtgttaacagtgtaaaattgtgtaatatagaaacaccttttaaaatat

SEQ ID NO: 776106 - DNA, 605 bp, Homo sapiens
acagagtaacatgcatactaggattgtattcagaaaagattgaaccttatgtatgttccttttatttgattatgcatgaatgagataggagaaagtgatggaaggatccacactaatctgttgacttcactagctgggagaccagagacagaatagggtaggaaaagagagctttggggttatatacatttgcattcattggtcttcttatgacaagcatatattggtttctaaatttgaaaccacccaatgaaatggatgatttataataaatacatatttttcccaaagttacacgtttttcagtttgaacagtaargaatgatctatgctctggtgattccccttcacccagaactgcccaagatggtttggaaattcataaagcaccttcagagtccattcacatctgacatattctcagcttcactggcacataaggccatttatattttaattttaactttttagagtttatgtctaaggccacacaacagacactaagagagaagactaaattgtggcccagagctttggactacaaatctagtggtcttgtgttaacagtgtaaaattgtgtaatatagaaacaccttttaaaatat

SEQ ID NO: 776107 - DNA, 623 bp, Homo sapiens
ctattaggacagcagtcccaacctttttggcagcagggaccagtttcgtgaaagacatttttttttcccatggactggagtggggtatggtttccacaagaaactgttgcacctcagatcaccaggcattagattcgcataaagagcgcacaacctagatccttcacacgcgcagtcacaatagggtttgtgctcctatgagaatctaatgccaccactgatctgacaggaggcggagtttaagtagtaatgcctatttgcacaccactcacagggttggggaaatgcagctccagaaatcttgaatgtttaccttacaggyacaggagttggcagtctatagcacagttaaaccagattgatgacattctataatgaggaagtgttcatcatctgaacttggcacagaagtcacagttctgtttaatataatatatgacatacttttactcacacatagatttattctactttaaaataagttattttcaaaatggtttcaaaatacttttctgtatgaagggtatgttgccttgcagagtctgacccccctgggatcccaagagggatcaggtcaatcagctcatctaaattggccacccatgtgagcactcaatatgcaa

SEQ ID NO: 776108 - DNA, 538 bp, Homo sapiens
tggcaatatccataaagtggaccttcctgtaaactgtgatgctagtttacaagatcatttcacatgcattttttatggtcaaccttcagttagcagtaacccttaacacgagtttgttaacttccctgctgggactgtaaacatggccatctgagaagwcagagttgaagggaatcaacttataatccccagtaatttaatgtaaacagtcactcctcgattatgggttttcatggttaagtgttgttgttgttttaattagtaacagggcaacctggattccagcgactctttaagtgaacatgcaaacctgagctgtcgttgctcagcctcctgttggtcttctcatccccactgtggtttccatctagatgttataatttagaaaatgtcctatttcttaaaaaactgtttttctagtcattaaaggggtaggactgttccctgtagggatagcttcagcgcttccctccacactgcgacacccctgcccacccatcagcctcggcccactgcaatttactttcccacctcccaa

SEQ ID NO: 776109 - DNA, 538 bp, Homo sapiens
tggcaatatccataaagtggaccttcctgtaaactgtgatgctagtttacaagatcatttcacatgcattttttatggtcaaccttcagttagcagtaacccttaacacgagtttgttaacttccctgctgggactgtaaacatggccatctgagaagtcagagttgaagggaatcaacttataatccccagtaatttaatgtaaacagtcactcctcgattatgkgttttcatggttaagtgttgttgttgttttaattagtaacagggcaacctggattccagcgactctttaagtgaacatgcaaacctgagctgtcgttgctcagcctcctgttggtcttctcatccccactgtggtttccatctagatgttataatttagaaaatgtcctatttcttaaaaaactgtttttctagtcattaaaggggtaggactgttccctgtagggatagcttcagcgcttccctccacactgcgacacccctgcccacccatcagcctcggcccactgcaatttactttcccacctcccaa

SEQ ID NO: 776110 - DNA, 538 bp, Homo sapiens
tggcaatatccataaagtggaccttcctgtaaactgtgatgctagtttacaagatcatttcacatgcattttttatggtcaaccttcagttagcagtaacccttaacacgagtttgttaacttccctgctgggactgtaaacatggccatctgagaagtcagagttgaagggaatcaacttataatccccagtaatttaatgtaaacagtcactcctcgattatgggttttcatggttaagtgttgttgttgttttaattagtaacagggcaacctggattccagcgactctttaagtgaacatgcaaacctgagctgtcgttsctcagcctcctgttggtcttctcatccccactgtggtttccatctagatgttataatttagaaaatgtcctatttcttaaaaaactgtttttctagtcattaaaggggtaggactgttccctgtagggatagcttcagcgcttccctccacactgcgacacccctgcccacccatcagcctcggcccactgcaatttactttcccacctcccaa

SEQ ID NO: 776111 - DNA, 602 bp, Homo sapiens
gagttcttataagaacaatggcactttgtcattttcatctacccccagaacagagaggaaatgagtctgaatgagcatatgagagattgagtcagatataacaggacaatgaagatgaagaaccttgtcaacggatatttcaagggagctataacagattatagaggtaaattaaagaactttctccatgggatacttattttcccacttactattctcctcatatcatctagtctaccctccaaaatttacacgtctcattccctatttccactaaaaagcatcaccttttcccctcattgctctatcaaaaacttaggtatgtcttcaactcctttttcytccccctcctcatcaagactgtaacacatcattgattgtattaccactttcctttcaaatctgtctcttcctttaactttcccctgcctttgctctggttcagagcctaatgtcctctcacttgagccactgtgaaagacttcttatcagttctactcctccctccctctaacatgcactgaatataatcagaagcctaatcacccaaaagtgtggcacttagcaaaaccttcattagctctctgttactgacatgataa

SEQ ID NO: 776112 - DNA, 603 bp, Homo sapiens
ttttttaaaaaacattctacagcccatttatcaagattattcatgagccatcattaatgtagtatagtgattaagagcacagatgttggagccagactacctgagtttaatccctataaactctgcctagggttaaattcaacttcaattgagcaaacagtcatcaagctcctagtatttttttttttttttttgagatggaatcttgctctgtcgcccaggctggagtacagtggcaygatctcggctcactgcaagctccgcctcccaggttcatgccattctcctgcctcagcctcccaagtagctaggactacaagcacccgccaccacgcccggccaattttttgtatttttagtagagacggggtttcaccgtgttagccaggatggtctcgatctcctgacctcgtgatccacccgccttggcctcccaaagtgctgggattataggcatgagccactgtgcccggcccaagctcctagtatttataatgcatggtatcagttgctatgggcattcaaaataagtggctatccagaatgagcgtataacccaaggatggagaaaggtgtataaatgaaataaatccatgacagagg

SEQ ID NO: 776113 - DNA, 633 bp, Homo sapiens
cacacagcaggaaccctagccgcacagcaggagatgagtgtgcaggcaagcatgaccgcctgagccccacctcctgtcagatcagcagcagcattagattctcataggaaggtgaaccctattgtgaactgcgcattgtagggatctagggtgcacactccttatgagaatctagtgtctgatgatctgaagtggagcagtttcatctcaaaaccatctccaccccatcccccaacccctgtccgtggaaaaattgtattccatgaaaccggtccctgttgccaaaaagggtggggatcgccggtatagacccttcataggatgtcatgagaatggcattttacttctgtggtcttcatcccccaaacacataatccctgtttagccatgagaaaaatatcagttaaamccactgcaggacattctgcaaaatacctgaccagtactcttcaaaactgtcaaggtcatcgaaaacaaagaaagtctaagaaactgtcacagcctagaggggcctaaggaaatctgatgactgagagtaatgtgttatcctagatgggatcctggaacagaaaaagaacatgagctaaaacccaggtaaatccaaataaagtctggacttccaagttaataata

SEQ ID NO: 776114 - DNA, 578 bp, Homo sapiens
ggctgaaccctgcaaagccacaggggcagagctgcacaaggccttgggaactcatcccttgcaccagtgtgccctggatgtgggacatgcagtcaaaggagattattttggagcattaagatttgatcactgccctgctggggtctgaacttgcatggggcctgtagtccctttcatttgactgagttctctttttttggaatgggaatgtttacgcaatgcctatacctcctttgtayagaaaactatacaagggagtaactacttgcttttttattttacttggaagtaaccagcttgttttttattttacaggcttattggtggaagagatttgacttatgtcagatgagattatgaactgtagacttttgagttaagctggaatgagttaagattttgggagaccattgagaaggcatgattatgttttgcagtgtgagaaggacatgaaatttgggggacccagaggcagaatactacagtttggatatttgtcccacacaaatctcatgttgaaatgtaatccccaatgttggaagtggggcttgttgcgaggtgtttgggaaatgggggtg

SEQ ID NO: 776115 - DNA, 641 bp, Homo sapiens
ctaacggtcatctgagctttcagatagtagtaatctttttttgctggtaaagcatcttggctcacattaatagctgctgacccatcagggtgatatttgctgaaggctgggctggctgtggcagtttcttcaaataagacaacaatgaagtttgctgcatggattaattcttcctttcacaaaagatttctctgtagcatgcaatcgtgtttgatagcattttaccaacagtagaacttcatttaatatttgagtcagtcctcttaaactgctccactgctttgtcaaataaatttatgttatattctaagtcctttgttatcatatcagcagtgtttacagcatcttccccrggaacagatttcatgttaagaaaccactttatttgctcatccatcagaagcaactcctcatccattcaagttttttcctgggcttataataattcaattacatcttcagggtccagttctaattctaattctcttgttctttttaccatttctgcagttcctcctccactgaaattttgacccctcgaagtcatccatgagggttggaattaacttcttcctaactcttgttaaggttgatattttgacctcttcccatgaatcatgaatgttgtgaatggcatctgg

SEQ ID NO: 776116 - DNA, 483 bp, Homo sapiens
agtaaacaagcatggaataagaagatgaacaagttcttcatgggccgattatggcatagagtgcgagaatcgaaatagctttttttttttttttttttttttttgagactgagtttctctcttgttgcccaggctgaatggagtgcaatggcrcgatctcggctcaccgcaacctccgcctcccagattcaagcaattctcctgcctcagcctcccgagtagctgggattacaggcatgcaccaccacgcctggctaatttttttttttttttttgtatttttagtagagacggggtttctccatgttgaggctggtcttgaactcctgacgtcaggtgatccgcctactttggcctcccaaagtgctgggattacaggtgtgagccaccgtgcccagccaagaatcgaaatagctttgaggcaatgcagtgaagacatactgggcctgtaactggggtgtctgcacacctacactgctgacc

SEQ ID NO: 776117 - DNA, 585 bp, Homo sapiens
acgtctctcaagatgtttgctttctaccacctgactctaggatgcagtcttcattagggtacaaatgtattataatggaatggtctgatttctgtttccatattttatgattctcatagtctaccacttgttaaatttaaaagtacattttaaacagatgaaaataagtgttagttgcttgctgataagaagatttaatttcccatatgttgcagcaygcttaattcatttaagaggtgatattcaaaaatattacttagtatgtattaaatttttatctttaataacctaggaagtttgctagcctattatttcctgatacatgaatttataaataatctggttatttgaatttggaatacaaagcaccctactgttgaggaaaggacctcgagggcatgtatagacacaacaaagagggaggtgaccaaaataaaagtatgtattattgatgcacaacctaaatacatctttgaggctttatccagtggaaaaaaaactcaaataaatttttctcttggatgttcaaacagcatgtaattatgttgtatcatatgaataactttccatcaaacatttactgaa

SEQ ID NO: 776118 - DNA, 543 bp, Homo sapiens
  misc_feature 128: n = A,T,C or G
aacaacaacaacaacaacaacaacaccacatagaaacagagacttactgaggagctcttcagaggcaccagagagcagctgatagaacacatggaagtttctttcacctcttggctgtttaacaaccncgagatttctctaaaagatctaaagagaagagttaaatcatagtatggcatttgtttcacttccaaatccaccatgcttttyttccttctcactttcttttttctttctattctgcagtaataaaatgaaataataaaggaagctgtattttcagttctagcttcaggaagaaccacaactctaatgaaaatcaccaaattacacaggtcacgttctttttaaataatgaatatataaataagttacattcaaaacactgattaaatatcatttttatactaataaatgctcttggttttttatgatgacattaaattcctgaaaatgtgacgttacaaatgtaagcaatgaaatacagccattcaattatgagtctacctagtaattttaataaaaattagttaatactttgag

SEQ ID NO: 776119 - DNA, 512 bp, Homo sapiens
ctagtaattttaataaaaattagttaatactttgagatcttattatgtgcttagtgttttacagatggtatctcactgaatcctcccaacccttttataaggtatcattctacagttgaaaacactgatagtccaggagtttacataactcagttggcagcttgtggaactaggatttgaaattaggactcttgcacccacatgccccactaccygggagaagcaacgtagagtttgtggatatcttgaagtcttagagaaagatggttctcattgaatggaatttggtgttatttgatattatattttcattgactccagataatttttcaacccataaatctgaggtcttcccaaattttcaaatgggaaaggaggaaggaagggagggatgacgaggatattcttgtctggagccctgcttatcactcaatagtgatacaaaaggctgtgggcaaaggcaaacttcaactataaaattccaaattagtaatgtcattattgagcactaa

SEQ ID NO: 776120 - DNA, 616 bp, Homo sapiens
gttaaaatttgaaaaaagcaaaagaataaaatacaattccatgatgccaatttgactatatccaccctactcatccgaagtcccagatgtcaggccccgaggggtcactgttaattccttccccactactggaaaaatgtaacttcctttcatgccatggggaaaattctccatttctcttttgyggcatggactagcattagcctttgtggctgtagaccattatgacagattcatggggaagtagggtgagagagataggagaactgcccaagctgtgtgaacagaacagcagacaaggcagagctaaggatgggagtttaaaggactggagattacaagtgggaggaaatattcggcaatggcaaaaagattgttcaaattggatgtcttaacatactctttaattaataaagtgttcaattacatccttaaatttatccttccaattagtctgctagaaaaattataaaaaatgattattttattattaaatctaaagttacttatataaatcatacaattaacttttcagaaagagtcaacatgggaactttttttttccttccaacttttattttaggttctgagggcaaatgtgcaggtttgttacatg

SEQ ID NO: 776121 - DNA, 616 bp, Homo sapiens
gttaaaatttgaaaaaagcaaaagaataaaatacaattccatgatgccaatttgactatatccaccctactcatccgaagtcccagatgtcaggccccgaggggtcactgttaattccttccccactactggaaaaatgtaacttcctttcatgccatggggaaaattctccatttctcttttgcggcatggactagcattagcctttgtggctgtagaccattatgacagattcatggggaagtagggtgagagagataggagaactgcccaagctgtgtgaacagaacagcagacaaggcagagctaaggatgggagtttaaaggactggagattacaagtgggaggaaatattcggcaatggcaaaaagattgttcaaattggatgtcttaacatwctctttaattaataaagtgttcaattacatccttaaatttatccttccaattagtctgctagaaaaattataaaaaatgattattttattattaaatctaaagttacttatataaatcatacaattaacttttcagaaagagtcaacatgggaactttttttttccttccaacttttattttaggttctgagggcaaatgtgcaggtttgttacatg

SEQ ID NO: 776122 - DNA, 488 bp, Homo sapiens
agacactggggactgttttctgtcactcactcacaggacagaggctctatctcaagcatggaaggccaggaatactgagacctgattactctcaattcagctcactcatagggaatatgggtgttctatcctggaacatgcaagccaggaagatcagaggctgttgccccacccagcacccagaatatttgcttagagattttgaccagggaaagaggaagtccataagaaaatgrggccctatagctcttcccaaagaactggactttaaatgaaacaaaatataggcaagttcaaggcttagggtgctcttgaaaacaatagctcttttcaatatagagcaacaagctaaacaatagaccacctagctcaccaaggaaagagacagctaaagagagccttcttgggattatttaaaaaaacttaaaactatccctgccaaagggcctgaatttaattgaatcagactgctgagcaatttatgctcc

SEQ ID NO: 776123 - DNA, 632 bp, Homo sapiens
tggcaatcgctagcactcctgggacccatgcaagtgagggaccctgacatgatgcttatgttttattcccatcaaaataaatccatctccatcctcagcacggtgggttgcaactgtaactgaacataataatcaccaggcagccttaacaaatactgragcctgggccccactggcagagaggctgattgatttgctctgggttgtggcctgggcagcagtttcaggagctcccctggtgattagggtgggcaggggtagggagctgagaacccatcaccattgctgctccccagagaggtgagagaagttttcttctttgtaatccctgctatattttcttttctcccgaagattctttcccactaccttgtgccctgctcttcagtcctttcattgactggggaccttggttgacttgttctatctctgcgttagaccccagttctggcctcaggcaacacagcagtgaatgtgggttgtggcctttccttttcaaggacacagatctggctctagtacctgcctaagttcttttgtccactttatattcatgatcgagatttaggagagatttttcatccaccaagacctgaagagtttcttctttttctttttctttccttcttttt

SEQ ID NO: 776124 - DNA, 381 bp, Homo sapiens
ataagcaatggtaaataaaacaaatagatacataattattatcggtgaaatttttaaaataaggaaaacgtattatattttctatatagtcataggagttttaatgtaaaaaattgccattatgccaacattatatctttcttagtattttagaatcaacattttatttatatttatttataattgttatatcagatgatgattaaaaatttagcacaattaaaagttggtgtggtagytgggctccaagattgtctgcagtgacccctacatggtggtatttgcacgaggatgtaggattggtacaagggctggtctgtgtgaacaacagaatatagcagaggtgatggtagtcaattctgagactggtttctgaaaggc

SEQ ID NO: 776125 - DNA, 640 bp, Homo sapiens
atggatgcccaaaagtttaggtaatttgcctgaaccatgcagctcacttgagagtggaggctggggctgatcatgtcgtgttcaaaatgtttaattcctgaaccttggtccaacttttatctgaaatgctcatcttagatttgtattgcaataaaactccagccaactaagtamgactgatttttattattcagttaaagtcttgaaaatgttttgctcgtctgtttcttatttaactccctgggtatccctgagaaggtgtgcagcatccggactggtggctggctggttgtcatctttctcctggtcatcagaggctgagcctgcgtgcaggtgtagtcattggattagttgtaagaggaagtatctccagagccagcgatttgatgaccagtgtgagagcctcaagaggccccctcttcagtccttggagatctctatgcatatgtagagagtggtcctcccttgctccaaggggctcctgcacgacactgatgagcagggcccctgctgccccttactggacatagagtgagagtgacagactttggtatatgaagacactgatatttggggaatgtttgttaccactttacaacctggcacatcacaggatcctttgggacctctagaccatccc

SEQ ID NO: 776126 - DNA, 640 bp, Homo sapiens
atggatgcccaaaagtttaggtaatttgcctgaaccatgcagctcacttgagagtggaggctggggctgatcatgtcgtgttcaaaatgtttaattcctgaaccttggtccaacttttatctgaaatgctcatcttagatttgtattgcaataaaactccagccaactaagtaagactgatttttattattcagttaaagtcttgaaaatgttttgctcgtctgtttcttatttaactccctgggtatccctgagaaggtgtgcagcatccggactggtggctggctggttgtcwtctttctcctggtcatcagaggctgagcctgcgtgcaggtgtagtcattggattagttgtaagaggaagtatctccagagccagcgatttgatgaccagtgtgagagcctcaagaggccccctcttcagtccttggagatctctatgcatatgtagagagtggtcctcccttgctccaaggggctcctgcacgacactgatgagcagggcccctgctgccccttactggacatagagtgagagtgacagactttggtatatgaagacactgatatttggggaatgtttgttaccactttacaacctggcacatcacaggatcctttgggacctctagaccatccc

SEQ ID NO: 776127 - DNA, 564 bp, Homo sapiens
ggatgttataatattgtctttacagtaaaaaaaaaattcagagtaaaatagatgatgagtcactgcctgacaattgtcactgtataagaaagtcccctttgcagggacaatgacaggtggttaaatgtaagcacagatgccaggtccatctcacttatcccactttatttattaatgtcgaccttccagaaattaaaattaatctagtcagcaaattaaactctgattttatttgattgccaacaagtaatyagtaaatattgaaagatgccaagacatgagctttgagagtgcagtatagatgggagggttggggaggactgcagacgggagggatctgagctcacaaagatcacagtttcctaatgttcacgcgtggggcatttgtgatcttggcttctcaatgtcggcagatgttagaagaatttgaagatttcttgtataagttcagaaagcacctgaggtcctgctgaccctactgcgcccctccacaaagcccccaagctctgcgtgaccaccgtccacatggctggagccacacaacatccctcagggatgcagctc

SEQ ID NO: 776128 - DNA, 618 bp, Homo sapiens
acagagtagctgttcaataaagatttgttgaataagttatatagcacagtgttgaggcatgtgggtttttagtcaggtggtccaggtttgaatcctttctcagtcctgaaaagctggctgagaggtataaatgagactgtacgaaagctcagtgcctagagtatggcaggcattcagggaatattagtgcttatgcactatgaatcatcaacttgctacttctgtaaaatggggctagtaatacttctctcctcttcaacatacaaaaagtgaatgtttgtgagagcacatgtggttgttaggtagaaaggtgccattaaaatctgaggctttacatctattattatgtgtacaaaatagcaagaaaaacgtcmaatgaattctgaagcccattataatcttctatcaagagcagcagttggaaggaaggttctgtccgcaggctctctccaactccctgatgtctttgcaatgtttcattttgaaagaaagtgttgaaaaaagtcaggctgggtgttaagaaatgactatgtaatttaattatttttaatgacattaaagatgttagtcattgtaactttccttcctgtgcctgagcacatcaaagcggatcctgaa

SEQ ID NO: 776129 - DNA, 516 bp, Homo sapiens
tagagcccttcatctctgcagagtagagcccggggatccatttccatcgctaagcactctttcagcagagaactacccgtgtggatgagctttggaggagtctggagtatgactacaaagagaggtaaatccacaaggtctggcagttccttcatgaccctctatacctagttggcaaatgaaaacaacaacaaagtagttgaacctgttgtgtggcttcagagacraaaataactggatggttgcctggactgaggttgtttgataaaataaattaacaggttgtgagaatcacaaagatggaagtgggtgattgatcagagcccgggatgaaaaaagctaagtgcctttcagagccttcctccagccggagtggagagggctgggcgtgtttcagttcacacttccatgctcccaatccctggcagtgcctcctaaattagcaggctttggggtgaatacccaggagggcatcacagatggaaacaagccctggccaccagcccctccccttct

SEQ ID NO: 776130 - DNA, 652 bp, Homo sapiens
gtcccattgtgccaattgtgctaagtttgggaaacccattctaaacaattcaaataacaagatgttaattctccatttgatttgctcaaaactgttgaggaaagggtaaatgtcattggcaatttatgagtgaggaaactagagtacagacttcccagggacttataacattttaaacaccagaataattattagataagacaggtttcttcaacacattcctgttgatttgcctaaaagagcaggaaggattcagaaccagatgtgtgaccaatgaaaaaggtaacagcttaaacagttttccacaatggagctcagctacctgaaagacacatgccacaaatagctgttgaataaacagaaattggtttctccaaagtatctgaacacaatttatcytcaagtgtcctggacaaagttaacctgttcctttacttaacaaaacttttctttatagacagtgcaaacttcagctcaaatctttctcatactagcatataagccactctttctcttcacccttgcaccaaatacttgtcaataccaggtagagggagtgtgccaggcactggggtacagtgaatcccaaagcaaacctagaggctagctgcagggagcctacagtctagtggagaacatagagattgcatac

SEQ ID NO: 776131 - DNA, 628 bp, Homo sapiens
gtaacagcttagagtaaatcttggcatatagtgtcttagtccattagggctgctataacagaatactatagacgggggcctataaacaacagtaattcatttctcacagttccggaggctggaagtcccaagagcaagatactggcagattcggagtctggtgagggcccatttcacagatggcagctcctcgctgcatcctcatatgctggaaggggcacacaagcamccttgggcctctttataagggcactgatcccattcatgcgggctcctccctcatgacttaatcacctcccccaaagctccatctaatatcattgccttggggttggggatttcaacatatgaatttgacaggggaaacacaaacattcagaccgcgacacagagtgaacactcaggaaaggctcgcggctgttgtcattcttcatgatgattgtcttagcctgtcagtgtaaagcacatgctcattactgcctggagaacaaaggccacctccccaccgtgccctttcattcttcccttgtcagtgccttgcctttgcagacatagttgccaccacctggagtaccctctggcacttcccttcacagcaaacacctacttgcacatcgaagcccaactc

SEQ ID NO: 776132 - DNA, 705 bp, Homo sapiens
tggggttggggatttcaacatatgaatttgacaggggaaacacaaacattcagaccgcgacacagagtgaacactcaggaaaggctcgcggctgttgtcattcttcatgatgattgtcttagcctgtcagtgtaaagcacatgctcattactgcctggagaacaaaggccacctccccaccgtgccctttcattcttcccttgtcagtgccttgcctttgcagacatagttgccaccacctggagtacyctctggcacttcccttcacagcaaacacctacttgcacatcgaagcccaactctaacgcctcctcctgggggagccctccatgattgcagcgggtgaggtcctgtgtccctgttcccaggctcccacagctcccctaatgtggctttcccagccctcatgaccttgtcctaggcatagggcacagaggaccttgtcctggccataggacacagagtaccttgtcctgggcctaggccacagagggatccctgctacccaattacctcctccagggctgttggcatccctcttgcatgcagaaggtgctcagtaaatgctggttggagttggatggctggatgcaaagaccttaagagcaggatgcaaagtctgattcctctctgcatcctcagagcctatcccagtgcttggcacacagtaggtgctcaataaacaatcatgcactgaaattgact

SEQ ID NO: 776133 - DNA, 570 bp, Homo sapiens
aatcttggccctctgcaacctgcaaccttcgccttccaggttgaagcgattctcctgtctcagcctccccagtagctgggcttccaagtacctgccaccacacccggctaattttgtatttttagtagggacagggtttcactgtgttggccaggctggtytcaaactcctgacctcaggtgatccgcctgcctcggcctcccaaagtgctgggattacaggcgtgagccaccacaccccggccatgaatcaaccagtcttcttgatgtagtatcagaaatacttagatgtagctttaaaggtctatatgaaaataggattactgtacttatctcgggaaacttctccaaaatatttaaactaatttaaaataaaagaatgtaactgttcgaaagaaataagaatcgaagcaccaaaacgatgctacatatggctccaaaaaacaaaagcaaaagccatagttccaacttttaagaacttttccataagaagcaatgtatatccataaagctaatatcttcacttttctcagatatggtaaagtatctagtgactataccacggaaatgt

SEQ ID NO: 776134 - DNA, 682 bp, Homo sapiens
cctggcatctgaagtaggcattattaacatgcccatttcacaggtaaggaaacaggtttacagatgaggaagtaactcacccaatatcccacagctaataaatgccagggctacgatttgaactctggagttctcaaccactatgagacatggaaaagttggcctagagaggtaaatgacattctgggaaaacatcaggatctagaagataagtgctaagaagatcagtcacttcacagtgctggctctttttttttgagatgcagtttcgctcttgctacccaggctggagtgcagtggtgcaatcttggctcactccagcctctgcctcccacgttcaagctatcctcctgccacagcctcctgagtagctggaattacaggtgtgcatcaccatgcctggctaattgtgtatttttagtagtgatggggtttcgtcacattggccaggctggtctcaaattcctggcctcaagtgatctgccctcctcggcctccyaaagtgctgggattacaggcatgagccaccgtgcccgggtaagcagtgctggctcttagtgccatagggcaccagtgagttggccgtggatgtgacctcttttcactcagcctccacacagtcaatttatttagctgtcatcatatacgaggctcagatctacaccctgggtggaacagatca

SEQ ID NO: 776135 - DNA, 583 bp, Homo sapiens
agaaccgaaaacctacgttcatacagaaactcacacatcgatgtttgcagcagcattatccgtaacagccgaaaagcggagacaacacacgtaaatgtctatcggctgatgaatggataaagtgtggtattgtctatatgagggaatattattcactcatgaaagggaaggtgstactgacatgtgctacaacgtggatgaatcttggaaacatcaggctgagcgaaagacgccagacacaaaaagccacgtattccaagattccagttctatgggatgtgcagaataggcaaatctagagagacagagggtagattagtggttgccaggggctgggaggtgtgggaaagagtgagttggtgctaataggtatggggttttgggggtgaggaaacattctgcaattagtcactgttgggaggaaccccaacttgggtaaatcccgcatgaccacttcgtaggtaaactattatcagcgatcctttcacctaaggcacagggcacctcctggcgaggaggaatgggcaggattgtcctagcagatgctgctggtaggaagcagcacacctcaaaacccgggcta

SEQ ID NO: 776136 - DNA, 583 bp, Homo sapiens
agaaccgaaaacctacgttcatacagaaactcacacatcgatgtttgcagcagcattatccgtaacagccgaaaagcggagacaacacacgtaaatgtctatcggctgatgaatggataaagtgtggtattgtctatatgagggaatattattcactcatgaaagggaaggtgctactgacatgtgctacaacgtggatsaatcttggaaacatcaggctgagcgaaagacgccagacacaaaaagccacgtattccaagattccagttctatgggatgtgcagaataggcaaatctagagagacagagggtagattagtggttgccaggggctgggaggtgtgggaaagagtgagttggtgctaataggtatggggttttgggggtgaggaaacattctgcaattagtcactgttgggaggaaccccaacttgggtaaatcccgcatgaccacttcgtaggtaaactattatcagcgatcctttcacctaaggcacagggcacctcctggcgaggaggaatgggcaggattgtcctagcagatgctgctggtaggaagcagcacacctcaaaacccgggcta

SEQ ID NO: 776137 - DNA, 648 bp, Homo sapiens
ggaacattctgtgctttctcagcagctgggggaagagtgcgatgctctccggtgagaggagggggcccccaagagctagaaagagaagatgcttctccacttacttacaactctggatccaccctctaaaccaaacaacacaaccttcatggtacccccagaaaacagcctttcggagccctttccagtctcttccgcagcctctctgtttccatccaccttcactgaactctggttatgacrctagtcattttctgcgtcttcgggagatgaacttgtgtcatcttccaaagacacgtctggtccaggcgtgctctctttaggctgtgagctcttagatgcctttagtaaaacaggagatgagtgactgtgggcaaaagacaagctgtgtgcaaactgaccccaggggccgccatggagctggtgagttactgaggtgtctgtgctcaagggagcccaggttccaagtccccgagggcgcgtgtgaattcactatgggtggatgccttcgctgctaggtctccaagaaagcctagtcatttctaggtcaagtcatccattctttccgtggaagagaaatttcatgtcacattgcaaagacctctcttccctttgaaatcacggaatgatcttaaaataggacaaact

SEQ ID NO: 776138 - DNA, 648 bp, Homo sapiens
ggaacattctgtgctttctcagcagctgggggaagagtgcgatgctctccggtgagaggagggggcccccaagagctagaaagagaagatgcttctccacttacttacaactctggatccaccctctaaaccaaacaacacaaccttcatggtacccccagaaaacagcctttcggagccctttccagtctcttccgcagcctctctgtttccatccaccttcactgaactctggttatgacgctagtcattttctgcgtcttcgggagatgaacttgtgtcatcttccaaagacacgtctggtccaggcgtgctctctttaggctgtgagctcttagatgcctttagtaaaacaggagatgagtgactgtgggcaaaagacaagctgtgtgcaaactgamcccaggggccgccatggagctggtgagttactgaggtgtctgtgctcaagggagcccaggttccaagtccccgagggcgcgtgtgaattcactatgggtggatgccttcgctgctaggtctccaagaaagcctagtcatttctaggtcaagtcatccattctttccgtggaagagaaatttcatgtcacattgcaaagacctctcttccctttgaaatcacggaatgatcttaaaataggacaaact

SEQ ID NO: 776139 - DNA, 582 bp, Homo sapiens
ccccaatttcatgatgtcaatcaaagtagcataaagaccttctgcatccaggtcctgggttgctagttaaagatgtggattcctgggtcctgctgcagaactagtggatcaggagctctggaatccagtaataaactctgggattctgatgctgggatcaagggttatctgagcagcattcaggccatggcagactgccgtcgtagccctgtgtttgcccggggtcagatagggaaggaagtcgaccttcatgagcaaatgaacatgcaagctgcgagtctccctctgtctaggcagtgatgtcccacctctttgtcttttcagaagggtcccttttctgtcgtgatgtgycagggtatattaagagcatcctcagaagtcccaggtttccctgcaggcttatctccagctctgcatactctctgataactttggcacagctggtcttgttcctgtgctgggatggtatcacttttccctctctgatactttcttcctgttgctttgaaggcagattgaattaattaatttgtttttaccatgagcaaagtcttccacattaaactcttaaataattccatg

SEQ ID NO: 776140 - DNA, 514 bp, Homo sapiens
gcctttcttttgtaccctcgtgaacactgccctatttccaggccttcaccatccatcacccacactgctgctcagcaactttaccaaaacagtcaccctcttcagacctgagccctgagatcccactgaggctggagggagctatccaatacactcagctgacctctccctgtctccctcaaacccttcgatgcgtccccactgtcacctgtaccaggtgcagcaacttcggcctgccctcaggccaaatgtggcctgctgcctgcttttgtatacagtccatgaaaattatctgcaatttaaatttcagtgtctataaagttttaytggaacacagccacgccccatcatttgcatgggctggttttgcattacaacagcagactttagaagttgccacggagaccataagggctgcaaagcctgaactcactacttttggccctttagagaaaaaggaaggccatgtggctcacgcctgtaatcccagcactttgggaggccgaggcgggcg

SEQ ID NO: 776141 - DNA, 655 bp, Homo sapiens
ctattaaatatgaaaataatgccttgggggaaactaaaagatggtggatgttgacatcacaaagtaaagtactctgtatgttgttcctgagatgataggcgacatccttccagctggcttcctatccccagtacagtaggcctcatttccaaggagctcatctcatgtggataggggagtcacttagccatttcatttagaagaaaggccttccaagaaagggaactacctagatagaccacaacaaagaaatcataaacaacacttcctaggtaaacttacctttttgaagataaaagcaatttaataaacacaggcaaaaaaaaaaaaaaaggaaaaagaaaaagaaaacctcagcagactaaaaaaataattaaagcaaactgttctggagaacacaaaatttaaagcacaggagaaattaaacaaaaccaaacaaaactctaatttttagccctggagaaattaaagaaagtggtwcaaccataaaaaaattagtaagctatgaaaaaatatatatcatataaaatagttaagaaaaataaaaaaagatttccatttaaaaaaaattaagcgatggattgaaagccaaagtctaaaaaatttcacagaacacagaacaaagtaacaaataattaatcctcagtaccttaaa

SEQ ID NO: 776142 - DNA, 613 bp, Homo sapiens
atgcattgttaggtgactttttcttcgttgtgtgaatattgtagtgtacttgcacaaacctagatggtatagctcactacacatctaggctatatggggtagtctattgctcctcagctacacaccagtacagcatggtactgtattgaatactacaggctactgtaacaaaatgggagttattcgggtatcaaaacatagataagtacaataaaaataaagaataaaagattaaaaaaattgtaaaactgtgtagaacacttacaatgaatggaggttccagaactgaagttgctctggtgtcagccagtgagtagtgagtgaatgtgaaagcctaggacatcacttcacactgctgtagactttataaacactgtacacttacgctatactaatttttaawaaatcttttctttctttgataataaattaatattagcttactgtaacttttttactttgtaaatgtttcattttttaaacttttgattctcataatacttagtttaaaatacacattgtacagctgtgcaaaatatttcatatctttattttatatgtctttttctatttaaaaattttttaggcattttaacgtttttctttaaaaact

SEQ ID NO: 776143 - DNA, 613 bp, Homo sapiens
agcatttgttattgcctgtcatttgaataaaagccattttaactggtgtaagatcatatctcattgtagttttgatttgcatttctgtgatgatcattctctgatgttgagcacatttttagaacaaaaaacctaatttacaaaccacacaaaggacctgaatacacattccttttttatagctgtcatccattttatgttgacaggtatataaaaatgcttgcatcctcattagtcatcaggaagatgcaaatcaaaatcacaaaaaggtatcrcctcatttctgttaggatggctattatcaagaagacaagagctaacaagtatcagcaagggaatggagaaagcagaacccttacatactactggtggaaatgtaaactggtccattactgaggaaaatggtatgaaagtttctaaagaaattaaaaattaaactaccatatgatctagcaatccctcttttgggtatatacacagaggaaatgaaatcactttattaaagatttctgcactcccatgttcactgcagcattattcacaataaccataatatggaaacaacttaagtgtctgtcacaagatgactagataaagaaactgtggcctatgc

SEQ ID NO: 776144 - DNA, 638 bp, Homo sapiens
actcatttaattctcacacctctcatgtcagaaattgatgaacttaatttaaggaagatagtagtaagaaggtgaattaacttctcaattaccagaggtttcactggtccatagcagtcttaataatagttactgttaggacctcatggctttagatactgattaaagctttcaaaaggaataaattactactcaaatatatttaaagagcaaaatcctctagagaaaaaaagaaatgaagctccttaatagtcasaaatttctatctaattttaaaattaattctattctgcaatgtaagattttttctcttttctaatttttatgaataaacaacaattatacatatgtatgggatccatgtgatattttgatacatgcatccaatgtttaatgatcaaatgtttataataacccaaaaatagaaaattctgaggacaatatactagaaaaaaaatgaacctaaatcagtgcctctgcaggaataattcattaaccacttacacttattattagctcttatggcaagttgtaaactagaacactgaaaaataaaagattgacatggaaaggactggtaaagtaaaaagaaccatttttctggtaacttgcctcctcacaccgagaaaccaaaattg

SEQ ID NO: 776145 - DNA, 638 bp, Homo sapiens
actcatttaattctcacacctctcatgtcagaaattgatgaacttaatttaaggaagatagtagtaagaaggtgaattaacttctcaattaccagaggtttcactggtccatagcagtcttaataatagttactgttaggacctcatggctttagatactgattaaagctttcaaaaggaataaattactactcaaatatatttaaagagcaaaatcctctagagaaaaaaagaaatgaagctccttaatagtcagaaatttctatctaattttaaaattaattctattctgcaatgtaagattttttctcttttctaatttttatgaataaacaacaattatacatatgtatgggatccatgtgatattttgatacatgcatccaatgtttaatgatcaaatgtttataataacccaaaaatagmaaattctgaggacaatatactagaaaaaaaatgaacctaaatcagtgcctctgcaggaataattcattaaccacttacacttattattagctcttatggcaagttgtaaactagaacactgaaaaataaaagattgacatggaaaggactggtaaagtaaaaagaaccatttttctggtaacttgcctcctcacaccgagaaaccaaaattg

SEQ ID NO: 776146 - DNA, 581 bp, Homo sapiens
aatgagataccatctcacatcagtcagaatggctactattaagaagttaagaaataacagatgctggtgaggttgtggagaaataggaacacttttataccattggtggaaatgtaagtaaattagtttgaccattgtggaagacagtgtggtgattcctcaaagatttattacyagaaatatcatttgacccagcaatcccattactgggtatatatccaaaggaatataaatcattctgttataaagatatacacacatgtgtgttcattgcagcacaattcacaatggcaaagacatggaatcaacccaaatgcccattaacaatagactggatttaaaaatatggcacatgtacactatggaatactatgcagccataaaaagaaatgagatcatgtcctttgcaggtacatggattaagctggaagccattatcctcagcatcctaacacagggttagaaaaccaaacaccacatgttctcatgtataagtgggagctaaacaatgagaacaactggacacagaaaggggaaaaatatgcactgggtcctgttgggggagggcgggatgggagaga

SEQ ID NO: 776147 - DNA, 588 bp, Homo sapiens
actgtgaactaggaatcaattattctcaattgtgataaacctttccatgactatgataaaataattatttagaagaagacaagactgtagttggcagaagatagagatgaaaaaataaacagacaaatgaacaaactattctttcttacttttatatggctaggttacctgaatgtgagtctgaaggtctccttattcctggactttatatgagcaattcagtcctctttattagtaggccaggttgagtcgtttgctgtttctcttaaycaagaacattccaaatttttataggatttggaattgtgaatgggacaattaaggacccattcaatttcattaaaagtgtgaacttgattaagtaaaggagttaggtagaagacaaaaaaataaaaaaaaacaaaacttttatccacaatatgtggaagttttcaatccttattttatggtagcaaaagagttaaaatgaggcctactgaagcatggatttgatattagactttatgtccagaaactacaccattaggagcttggtgaaaaacaaccagaatattggactatattataaaggaaaaagcaagcttgatc

SEQ ID NO: 776148 - DNA, 661 bp, Homo sapiens
taactgggaggcacccccagtaggggcagactgacccctcacaccagcaggtacccctctgagacgaagtttccagaggaacaatcaggcagcaacatttgctgttcagcaatatttgctattctgcagcttctgctgctgatacccaggcaaacggggtctggagtggacctctgataaactccaacaggcctgcagctgagggtcctgactgttagaaggaaaactaacaaacagaaaggacatccacaccaaaacaccttctgtacgtcacaawcatcaaagaccaaaggtagataaaaccacaaagatggggaaaaacagagcagaaaagctgaaatttctaaaaatcagagcgtctctccacctccaaaggaatgcagatccttgccagcaatggaacaaagctggatggagaatgactttgatgagctgaaagaagaaggcttcagacgatcaaacttcactgagctaaaggaggaagttcgaacccattgcaaagaaactaaaaaccttgaaaaaggattagacaaatggctaactagaataaccagtgtagagaagtccttaaatgacatgatggagctgaaaaccatggcacaagaactacgtgacaaatgcacaagcttcagtagccgattcgatcaactggaagaaagag

SEQ ID NO: 776149 - DNA, 607 bp, Homo sapiens
gatactattgaaaacatctaattgtgtttaggaggagaaaataagcacatttctggccatagacttgcctttcctttggaataaagagaagtaaggaaagaaaagattcttcagaattgccctccacttctctaatgtcattaattttttraagtcttacctcaaatttcactctgagttgaaactccctgacctgcatcatcacccttttttccttcacttccaattacattctgcaataaccactcttgacttccttaagattataggagactatatataaactttaggtcaggcaacatgaaaaacgtgttcttgaattttttaaaaatcctctgttcatttcacacgatagagaagtctttaaaatccctaaaaaggaagttttcctattacagactaactactgaatctcccatttatttcttaagtttcgatctcatgtggagacaacatataaccctgaacaattactcaaatatttattaaaaaacaagtgactttattcatattttaacaacatcctgttttaaaaacaaatttaataaacaaaagctgacaatcttttaaagtataattttctcttcatatatcagcaacacatata

SEQ ID NO: 776150 - DNA, 655 bp, Homo sapiens
tttaaatgcaagaaattatagagtttgaaatgacaggacactagatagaacttgaagctacatgaagaattaaagatattagtaaaagtaatatcttttacaaattttacaaattttacaaatacatagataggtatttgtaaaattgagttggtattattgtaagaatggtacataactttatgttttctacatgactcaagatactacatgactcaagatttcttgcaaggaaggtctagtggaaacaaaatagaccctcagctttgtctgggaatatcttatttttttgtatgtatttttaaaagagttttggtggttacaagattcttggttgacaatttttttgtttctgtttttccttttaacactttgaatattttagcccactcccttctggcctccgaagtttttgatgaggaatctgatgtcagtcttacttagaatctcttgtatgtgacaagtcatttctctcttgttcttttamaattctttctttggcttttgactgtttgattataatgtgtctcagtgtgactattttttaggacatcctacttgggttttgttgagcctcctcttggattttatattcatatcattaatcaaatttgagaagttttcaactgtattttctttaaatattccctctgtc

SEQ ID NO: 776151 - DNA, 632 bp, Homo sapiens
tttcatttctcaaaaatttgcatttttttcctcttaagttcaaaggacaatttattttagtcatattcactcatgtctttgattacagccccattgatgtttgcagttttcaaggactctcaacgctttcttttccatgtgtttcttgttcattggatatcaatatacacacatcattcatcatttattttctacaagtgctacmttctctccattcagtagccttcccaaatggccatggagacattctcccttgccttatacatcatttattattgactttattcctttcacttaacttgagacttgatttttcatgtctattcatttcgcctattgttgagcctttctggttcacatgtgttcggccttcaatgcaattatttgcaaaaactactttggttaactctctttccacttccagtgggaatttttcttcccaaacagctcaaatttgtttcagggtatttttttatattacagcttttttaaaagaccatttggggaatgtgttttggataaatcaggctgaagtgtattgaagttctttgaagttggatggcccctggctgggtggattgaactctggtacagtatatttaacaggatctcagaagagataaataccaata

SEQ ID NO: 776152 - DNA, 508 bp, Homo sapiens
ttcccgggcgccgccaccccttttccccccagcaccagggtacctgcacggcgcgactgaggaaggtgcctgcgtcggccgccagcttcttcacgttgaagtccatgatattcatcctaggcggcagccgggcggagccggccgacctagcggcggcgaggcggaggtgccgcggccgggctggggcgcagggctagagcggcgmgggcagacgtggtaggtggagggaggcggcgccagccccgcagccgcagctgtcgtttccgtgaacggggaggatgaaggcggggcgagggaggagaacaagcgcgcggcggcagcgccaaggatgggtcagtcggctcggagaacggccgctaacgtcgacgatgggccccgcgggcgagccggagatggacgggcgaccccgccgtgtggacccgggtcccaagggaaaaacaagcgcgggccgcggggcggagcctttctcgaggttatcgcgggaacagcgaccccttgaggattgcgg

SEQ ID NO: 776153 - DNA, 472 bp, Homo sapiens
attcatatatctctatttctttggggtcagccactggagctttattattattattttggtggtatatttccttgattttttatgttctttgaagccttgccttgttgccttctcatttgaagaaggagtaaacttctcaagtcttcgattactggcattgcgagagaacaatcttcaccattcagcctggctagagatctggaggtgtctcagatcatttcagttgatgtatccccttactgttcttattccctcttgggggatagtgtcaggattgtatgccttcccttgatcccataaaaccaggccaggtagtgagaactktccatttacttctcctagtgtaatgccaaaggttcttgccttagccatgccaaagaattggtgtggcagctgcccgcagcgagtgatagagacatggaccgaaagagagaaaaagacataggctttattgggcagagtgaaaatacaa

SEQ ID NO: 776154 - DNA, 532 bp, Homo sapiens
ccatatagaatgtagattccaggaaggcaggaattttgattattttatttatatactatatcccccacatctggaacagtacattttaaaaatgaaaagcaaatgtttctctgatggataaagggtgaaatagttttaaatayagcttttcctctctaaaattaagaccacctgtcctagtatcctttcctcagtgaactcggttcttcagtagggattaaatacatacatttctgaagataagaaaaagctctatttatatgaatatgtatatacacatggcttttttagttctctaaccatattttacttccaaatctactagtatgattttagcctttgattagccactgaagtgtacctatgtcaattttgcagagttaaagatttaaaaaatgaactgaaaggccatttttaccttctaagaacttttattgatacgttaaaaaatcatagcaattactcattctataaaaatgtcaattaagccactggagcttgaaatgcaaaagccttccaattattaaaaaaa

SEQ ID NO: 776155 - DNA, 666 bp, Homo sapiens
caacctccacctccctggttcaaacaattcttatgcttcagcctcctgagtagctgggattacaggcacgcgccaccaaggccggctaatttttgtctttttagtagagacgagtttcaccatgttggccaggctggtctcgaactcttgtcctcaagtgatctgcatgcctcagtctcccaaactgctgggattacaggtggccctcrcccagccagaatttttttttcagggcaagaaaatttcacctatatttgggcgattattccttaaggtgtaatgtcataagtattgcatgacattgtaaaataagatcacttaagaagcaatatgataagtattatgttgtagaagttatgagcatatatttatggaaggaataaaaagtcaaccatcctagtggtacttggagattcgcaagtgggaataaaatttccagagacaaatttaaatttctggacatggagtccaaaagtgctatatctcacaactttgtcgtggaaagagcagagtgccaaacaggctctttgagagtggataaccacaaccatgacaccaaagatgaatgtgaaaagttcaaatacaattttcatgaaatgagaaagcaggggaaaatgtttcttaaattattatttttatgtgattttaaacatgtatatgcaatca

SEQ ID NO: 776156 - DNA, 634 bp, Homo sapiens
tccagccactaaggaggctgaggcaggggactcacttgaacccagcaggtggaggttgcagtgagctgagatcgcgcgactgcactccagcctgggaaacagagcaagactctgtctcaaaacaaaacaaacaaacaacaaacaaacaaacaaaaatcaaagcaaagcaaggtaaggagatatgaagatctccaggaaggagaagtggtcagaaacagaatgagtcaggaaaggtcagggtaataaggtgttgtctgagtaaaggcctttgtagtgaaaggggagcagatagatacctaygtaaggaatgcccctggcagagaaaagagcagggacaaaggccctgtgcaggaagaatatcaaggggccagagtggcagaagcccagggaggtgggctgaggtgcagaaggtacgggcggagtggaaggctgagcaccagatcacacttggggccctggggttgggtttattctgaatgaggtttgaagtcaaagcagagatactatctggaagaacttgctccagcatgttttcaaaggacctttatctccaagaaaaaagaaatcgtatttgtcacatgacatacctttatataaaattatgtatacagtttcttttataatacacattgat

SEQ ID NO: 776157 - DNA, 579 bp, Homo sapiens
aatggattacagacttaaatctaagacctcaaactatgaaactactccaagaaaaccctggggaagtctgagcatggtggctcacgcctgtaattccagcactttgggaagccaaggtgggtggatcacaaggtcaagagatggagaccatcctggccaacatggtgaaaccctgtctctactaaaatacaaaaagttagccgagcatggtggtacatacctgtagtcccagctactcgggaggctgaggcaagggaattgcttgaactcaagaagttgaggttgcagtgagccaagatygtgccactgcacttcagcctggtgacagagcaagactctgcctcaaacaaaaacaaacaacaacaacaaaaaaaccacttgggaaactctccaggacactaaactgggcaaagatttcttgagtaatacttcacaagcacaggcaaccaaagcaaaaacggacaaatgagatcacaagttaaaaagcttctgtaaagcaaaggaaacaatcaacaaagtaaagagacaacagaatgggagaaaatattcaggccactgaattcattttaaatgatagat

SEQ ID NO: 776158 - DNA, 544 bp, Homo sapiens
tgggacttcatctatatgataaaaacataacaagaacttgttattggcttccaatacccttatttttatttttatttcgagatgaagtctcgctctgtcacccaggttggagtgcagtggtgcaattttggctcactgcaacctcrgcctcgtgggttcaagtgattctcgtgcctcagtctcccaagtagctaggattaggggcacacaccaccaaacccagctgatttttgtatttttagtagagacgaggtttcaccatgttggccaggctagtctcgaactcctgaccttaagtgatccccacctgcgaccctgccccagccccacaaagtgctgggattacaggcgtgagctactgcactctgcccaaccccccttatcttaagcatttctttctgtctacttcaactctttaggaaaacctcaactctttcaaccaattgtcaatcagaaaatctttaaattcacctatgacctgtaagccctccctgccacccccgataaagatgtcccacccttctggactgaaccaatgtgtacc

SEQ ID NO: 776159 - DNA, 527 bp, Homo sapiens
atttgcaaactgtcgtggcactggtgggagtgtcttttcgcatgctaatgcattataattagcatatgattagcagtgccagggccagaggtcactttttttgccatcttggttttgatggattttggctggcttctttatcagccaaaatcccatcctgctgacctcctgtcttgttccgtgattatgaatgcctaatctcctgagaatgcagctcagcagatttcagcctcattttatccagccastattcaagatggagttgccctggttcaaatgcctctgacactaccatggtgtttaatgtctgctactatctgcctcatctgcctttttcttcttcctctatagaacagctttctctcattccttatatacttggcctaaatatggaagcctcagctttagctttacactaccttcactataagtatccaaaaaagtatcatttttatttgagtcctaattctgattttccagacaaagaatctgggattagtgtgagatttggcaaggggaatgaggga

SEQ ID NO: 776160 - DNA, 585 bp, Homo sapiens
tggatgctttgtatagtagacttaactggagaggaagcagatgaacatttgacttaggagatggcacttaaaatggatctaggatacacactgaagtattaaggagtaaaagggcatgatgtatcaatttactcataaatgttcagaaaaaatattatatatatatayacacacacacacacacacacacacacacatataaatatgaaaattagccagatgataaaaattggtgaatctgaaccaatgtgtagaacatatccaagaattcactatactattctttctttctttttttttttttttgagatggagtctctccctgtcgcctaagctggagtgcagtggcacaatctcggctcactgcaacctccgcctcccaggttcaagggattctcctgcctcagcctcccaagtagctgggaccacaggcgcccgccacgacgcccggctaatttttgtatttttagtagagacagggtttcactaagttggccaggctggtctcgaactcctgacctcgtgatctgcccaccttggcctctcaaagtgctgggattacaggtgtaagccactgcgcccagc

SEQ ID NO: 776161 - DNA, 609 bp, Homo sapiens
tacacctatgtaacaacctctatcaagatgtggaactttaccatcagccaggaaagttccctcatgccccttctctgttaatccccacctccatcttaccccttctttccagcacaaccactgttctgattttttttttttccctaccatagattaggtttgcctgttctagaactgcatagaaatggacttgtctagtatttactatttcgggtaaggcttcttttgttcagcatgtttttgagattcatccatattgctatgtggtaggattccactgtatgaatataccagtttattaacccattttcctgttgatggacacatggctgtttttaggtgtggacaattataagtaaagctgctataaacattcttgggcagatcwttttgtggatatatattttcgtttctcataggtaaatgcttaggattggaataattgggtcatagagtatgtgtatgtttagttttattagatactgctagaccttttcccaaagtggttgtaccattttacacacagagcatttgatccacatccttgtcaacatttagtgtcaatttttcaaattttagtcattctggtggatgtgtggttgtatctca

SEQ ID NO: 776162 - DNA, 564 bp, Homo sapiens
gtttcttataggcaaacttggaaaccgacatgtacttttcataaggatacttatacataactgacctgctcaccaatcagaccatcaatttctcagcctatcacaaagtatttaggttgttgtgtaatgttgggctactatagcaattgtactttcaccaactggcaccaactcagttcatgaattagcaactacattttgaatgtccctgcaaccaaatagtatgctaactgctgggattaaaaggtgaacaagacccagtggcttgggcctcaaaasaggtgagaggggtgcaggggaaggtgaacatttatatagtactttgttttacttgtaattgtgcttggtacattacatactatcttgtttattcaacaaaactacacttttagatcttattcaaagagagtaagaaacttctccaagaccacacggctaataaaaagctgttacagaattcaaaccaaggtccacatattccagttcatggtcacaactttcattagttcactcactaattcctttttcattcatttaacccaccacatgctagcataaaaattg

SEQ ID NO: 776163 - DNA, 562 bp, Homo sapiens
ttaaattatagaactcgagtaacaagaaaccagctaagcattagggcagaatgtgcattttgtttttgtacttttgtttgaaaacctcaaatcatgcaagtgttcaaccttgcccagggttaagaggactcccattgagtttattagtagatgtagggaacaagctgggtgctgcagtatcaatcctctgagtggactaatattccgaggattaatactcagccctcttgggctgctagatttctggacytactttgaaatgagtcttatacccatcaaaatataatgaagagggcatgtctgtgaaaatatgaaaaccattcttattttccatattaatgagaaaagttaatttatttctcacactgggacattttaagtgaaaggcataccttcaatgataccatataaatcttggatagctagttaacgttgctagttattttgaattttcattgtaatttaacattatataaagcgacgtatgtttgtaaattgagataaaagagctctgacggacagaataagtacagaattaaagattaattttttccccaaatga

SEQ ID NO: 776164 - DNA, 566 bp, Homo sapiens
agtcccaagtttgctcatctttgaaatgagaggattgagcagtttcctttctagcgtttcacctctaaaaccaatagaccatttccctcttaaaaatgaggataaaagtcaactattactctctattgctgctccacttctactggcctcttggatgtctctggttaaactcccagatgtctgcaataaattctgtgcacactgaatcaaaaaaaaaaaaaaaaagcctttttcccttttttttttttttttttttttttttaaaggagtgctctaggtgttgactggactgaaattgcccaaaattaaaaacaaaaccaacccccttcccacacaccacccaaacaaaaaccttctatatgtwtctggaagccactttactacttcctgatttttagactcaacagttacatttttaaagagacactgcactgtggaatataaacgtgtgaaatctaaatacaaaatataatgaagccccttgaaccaagtcatgcaatgagaaaattttagggcagccaggcacttttgacttttgaactctatttctagctgtactgctgtta

SEQ ID NO: 776165 - DNA, 628 bp, Homo sapiens
tctgacttccttttagtctccctctgtttagcatggttcacactcattactctcttgatcaagttacagacaaaagcaggctccaaattaggcctattaagatttgtttttaatgaggagataatttttctaacaacacaggccagattcatgtgggtatgattacaaaatcaggccatattgcagaaaagcaaagcaaagcagatttttgcatggtcttcaaataatttcagccagccttgattaacttgatgacacttaaaagcacaaagcaaatataggatctgggactttggagtgatgaagcaatcacatggcctctgttctgctatgacagtgcgaaagtttctgtatcagggattaraacttcttagaaggcaaatgctcagatttaaaatattagaaatcacagaggaaaagataaatgcattctttccaccagtgtgagctttagaaagcaagctgtctcgctttccttaaattcatttgccagtcctttttgtcgttcaggaagaaatgccctgctctgtgtgactgaggaaaaggatttgataattaaccccaagcttttggggtctctttgcatgtgttttattttcattttagttataataatataataatgtaa

SEQ ID NO: 776166 - DNA, 628 bp, Homo sapiens
tctgacttccttttagtctccctctgtttagcatggttcacactcattactctcttgatcaagttacagacaaaagcaggctccaaattaggcctattaagatttgtttttaatgaggagataatttttctaacaacacaggccagattcatgtgggtatgattacaaaatcaggccatattgcagaaaagcaaagcaaagcagatttttgcatggtcttcaaataatttcagccagccttgattaacttgatgacacttaaaagcacaaagcaaatataggatctgggactttggagtgatgaagcaatcacatggcctctgttctgctatgacagtgcgaaagtttctgtatcagggattaaaacttcttagaaggcaaatgctcagatttaaaatattagaaatcacagaggaaaagrtaaatgcattctttccaccagtgtgagctttagaaagcaagctgtctcgctttccttaaattcatttgccagtcctttttgtcgttcaggaagaaatgccctgctctgtgtgactgaggaaaaggatttgataattaaccccaagcttttggggtctctttgcatgtgttttattttcattttagttataataatataataatgtaa

SEQ ID NO: 776167 - DNA, 619 bp, Homo sapiens
tttgtctttatcttgatctcaaaatggggatttgctatcacttataatggggtgttgtggattttatcagatgaaggaaattaactctctgatcccaagttttgcttcagaattttttaaaatcatgaataaatgtagatttttttttccaaatgggttctctataagcttaaagataaccttatacatttttttcttttaatatgttatcgttgtccattgttttacaacaaactacgcaagtagtaagtggattgaaataactaccatttttattatgtttcacaaatctgtgggtgaaaggggtcagcaagatggttcttttgcttttgtttgggtgctctcttgccattgtagtgagacaatgtctggggctgcaaacatctggaagtttaatttggatgtgggactgtccaagatggcccattacatgtctggtgccttggtwgggatggctagaagtctcaatatagctggtataatgaaatgactgaggctgtcctttccatgtagtctcagacctcattctctctacgtggtctctacaaggtcttcccagctggataggtgaacttcttacatggtggctaagggatcccaaagtgcacaagtaacactg

SEQ ID NO: 776168 - DNA, 632 bp, Homo sapiens
aaaaaaaaaaatggtggaaggtgggtctcatctactcctggcatgaaaaatattgggtgttgtgtggatgcctcataccctgtacattttgtcccattttgtatcacaaaacacttctgcctcctttttattttcatttttcattctttctagcaagaagtcttattttcctttctgtcctttaggcttgccttggcagggagcacctgtttatttgtcaaggatgtcctggccagcctgtcctcctagagaccccacattatgccccatgcttcarggtcagtagtcatttgatttgttccttttacagttgtatctttattttcttattataataatacctgcttattataaagataaataccacacagtacagaaagataaaaggcagaaaaaaatcacttctgttccctatggttaatagtttgagtttaggcttctatggtgttagaaataaattttcggtgccgcaaaagaaatagcactcgaacgtaaatttaatttctcagcaaggcaattttacttctatagaagggtgggtctcgtggattgagcaatggtgagagcacaactgaacaagggaggggaaggggttcttatcctaacgcagctaatctctactgctgtgtctt

SEQ ID NO: 776169 - DNA, 388 bp, Homo sapiens
tgaacaagggaggggaaggggttcttatcctaacgcagctaatctctactgctgtgtctttcacctattggctagggttggaccacacagtctaagctaattctgattggctattttaaacagagcaggggtatgagctggagtggcagggtgagtagtttggtgggaaggagttacagaacaggtaactaaaggtgactcaggtcagagcaggtgattaggagtgrctcagaatggagcaggtgacctggggtgactcaggatggagctaggtgatagaggctaggagggggttgtttactgaaactaggggcaaggagacataaagaatgaggaagttaaactttaaaatgaagaacaaagaccaggggagctgaacatactgata

SEQ ID NO: 776170 - DNA, 608 bp, Homo sapiens
gtctcatcctgttcttcagcatctcccatcaagatctccagtggcctcacaaattacaaccagtctctaaaagctgaatgtcaacctgcccttcaaaggccctgtgtcccagtgccaaaaggcagtagtttaaagaaacagggaacagtcttgctggggcctacttctygttggaaggagtgtacaaaatctgaccttgccagtgggtggcctctatccagccctcaaggcatcctccaggcagttctcttgtggagcactagtcagtggctctggaggcaggattcccagtggtgcagccacaaagcttcacctgggcctggcccctgaggacaatattaaaggatctgtgttgggagtgcaattagttctgtatggaaaagaaggctgattcttcactctctggcaaggtcaaggccaggagaacagacggaaggagagggcaactcttggtctctggagagacagacatccttgcagagatctctcatccatgggatcaccattggggacctagacaaacctcatttttacatcacaagaggttattgggtccctggtatgtattgagaactgaactcatacaaaaatgagtacagcacaggttc

SEQ ID NO: 776171 - DNA, 589 bp, Homo sapiens
aaaccaatacttcttggtaatatgtgttgtgttgaggagtgggagaggaggattattgagaagcatgaggaagctttctgggatagtgagtacatttgccatgatgacagtgataatagtgtctcagatgtatacatatggcaacacttttaaaatgtgctctttatatatgtgyagtttattgtatttcagttatacctcaataaagttgttaacttgtggaatatcaccacacctttctgaccttggcctgtttcttaatgtatctatcaagattttgataaagacgtattattacctttgcttaggaaaacataatataaaaatagaggtaaagcttacatacaagatttatcagaattgaaaaaatgacatgaagtggtattgtcgatcctaattagaatgttattctaatctcagtgaagaacatggacacctttgatgtgtagacactaaatcttctacatttttcttctactttcaatcttgacagatgattttctcttttccttccttgaaaaactagaaaatcatcaaaatgaacttctcttctgcctacctgtaattggccaatcagacaatcaatcaa

SEQ ID NO: 776172 - DNA, 533 bp, Homo sapiens
attttatgtttaattttatgggactaccaaactattttccaatgtacctgtatcattttacatccctccaagcattgtttgactgtttcaggtactttgcatcttttctaactcgagatggttttattttttaatatcattttaaccacttacgtatttgtgtcrtgtatcttttcatgttttcatttgtatttatctgctgatgaaaaagattgagcatcttatttgctttttgctatgtttatgtcttctggtcaagtatctgttcaattattttgccaattttcaattattattagtaaaccagacaaaaaggatacatactaggtggcttcatttatataaatttctagaaagtgcaaactaatttatattgatagaagacagtgcagtagttgtctggtgatgggaaagcagggaataaggagggttattatggggagattatgaagggaaatgtgtaaaccttcacggatgatagacatgtttatgtatcaattatggttatgattttacagacatatatatgttaa

SEQ ID NO: 776173 - DNA, 646 bp, Homo sapiens
cacgtatttttatgttgtataattttactttaagcccatgatctattatgagttaatttttgtataaggtgtgaatttacattaagaatctttttttttcttgatgatggatgttaaatggctctagtgcctttttttggcaggaaaccactcctccactgaattactttcatttctttgtcaaagattatttagacatatttgtgtagatatatttttggattctytatttggttccattgatctataggtatcttcttctgggaatactacatgttcttgattactgtaggatgaatgaaatagatctttccaaatgtattagtcaggattccctagagggacagaactaataagagagaaatgtatattaacttatgcaatcacaaggtcctacaataggccgtctgcaagcttgaggagccaggagagccagtcaaagcctcaaaactgaagaacttggagtctgatgtttgagggcaagaagcatccagcacgagtgaaagatgtaggctgggaagctaggccagtctcgccttttcatgcttttctgcctactttatattcgagggcagctgattagattgtgcccacaatcgagggtgggtctgcctttcccagcccactgactcaaatgttaatctcc

SEQ ID NO: 776174 - DNA, 646 bp, Homo sapiens
cacgtatttttatgttgtataattttactttaagcccatgatctattatgagttaatttttgtataaggtgtgaatttacattaagaatctttttttttcttgatgatggatgttaaatggctctagtgcctttttttggcaggaaaccactcctccactgaattactttcatttctttgtcaaagattatttagacatatttgtgtagatatatttttggattctttatttggttccattgatctataggtatcttcttctgggaatactacatgttcttgattactgtaggatgaatgaartagatctttccaaatgtattagtcaggattccctagagggacagaactaataagagagaaatgtatattaacttatgcaatcacaaggtcctacaataggccgtctgcaagcttgaggagccaggagagccagtcaaagcctcaaaactgaagaacttggagtctgatgtttgagggcaagaagcatccagcacgagtgaaagatgtaggctgggaagctaggccagtctcgccttttcatgcttttctgcctactttatattcgagggcagctgattagattgtgcccacaatcgagggtgggtctgcctttcccagcccactgactcaaatgttaatctcc

SEQ ID NO: 776175 - DNA, 483 bp, Homo sapiens
taaagtataattagtaactaggaagctacaaactacatatatgtacataatgatattctgtgatctgtcaataatttatactccccttctggagtacgatctgggcatcattctttgaataagttgctaaattaaactcaggtaattagtgaaattgtagaaaatttttcactttaaacaggttgcaaaagcttttggcaaaaccactatattaaaagactattgatgttgggtcctttaagatctcatctcaaagtgcttsgaattgcagtagtggtggaatgccacctagcaaagaatccacacaaaagagagtatgataaacacctagtgccaattaatattggattatcagaatatgagttgcatcaaataaggatgatgatgtgtgcttaatatggagatgaggaaggaaagaggccaggtgagaagacctgggctcaaaatcccaggcaagggaatttctagcttggaaatattcta

SEQ ID NO: 776176 - DNA, 617 bp, Homo sapiens
gttgcatcaaataaggatgatgatgtgtgcttaatatggagatgaggaaggaaagaggccaggtgagaagacctgggctcaaaatcccaggcaagggaatttctagcttggaaatattctatggcacccagtatttattggaaagcacaacagtatataacatgattaacataagattctattttaatttgatggtaaccaaagaaaacgcatgaatgaattggggaagtcagtggatttcttagctacagaattaaaaggaatttattaatttatttttactctgttactcaagaataatgctactaaaactcttgtccaaatgctcacattctcttgctgcatacactttcttttcaaatatgttttatcaaaatgacaaaaggacaacctctaagaaggcttatgctaaacrtaagtcatgtgcccacatttcctactccagttcccactccctagatacattcacttttaatagtttctgtttgggggctttccgggtgcttgaccccatatctctaaatattttttttgagatggaataacgaaaataattaacatataaagaaggacacaaacaaatggaagaacattccatgctcatggataggaagaat

SEQ ID NO: 776177 - DNA, 523 bp, Homo sapiens
gtaaatagtcctcttttctcaatgtacagtcacgagggtaaacaatgtccctaggtccctttggggaaaggctgggaggatcattaaaatatatacttgctaaaatgttgcagggtccttcctcctgggcatctggtcacctcttcagactatgggtttcaaactgaaaatttaratctagaatctgaggaagggactgtgacttttaatcaagccttttcattgtagatgctaagcagtgcccttgttggccgaccatggcttttgcccaagggatggtatagcctataaatccccttcataactctctggggattgttcctctaaccttgctaatatctatcactttcatccccctgatttctggcagttaggcactgccacctcacctatatttttcaaggcctcactatgctcatggatattaatgagcccatctctgcgtccacctctcgtatggtcaggcctagctgtagtaatgccagtgtctttatacctatgtattcttgatagctttaaatca

SEQ ID NO: 776178 - DNA, 612 bp, Homo sapiens
tagttcttagaataaaaaatagttagtattgtccaaagcaggatccaaaagttaaggccactctggaagattttagctctgggatgaattgatgcttagtcttctttctgctagatggatgtctgaggctctytatattttaataaaatagtttcaaattattttcccagctccatcaggattgattttatttcaatgggttggcaatagattataaaatatcttccttctgtttgtataactgaatgttttgtaaactcttagtgttaatttaccagttattacaaatctttcagttatcaagtaagttattacaaaaatcgtaataaattgtctgtgaattaaatgtaacaagttgtaagagtttgttgagtattgcatgtttgtaccctgctgaaaagtgaagctgctctagaaactataattcttggcaatgatgcaaaattcgtaaggatgcaaaattcgtactgattattgtgagcctgcttcaggaatggcactttagagtcttgggttcagttgtggattttatttgctgtgttctttctatttattacaccttccggtttgttttctttattattattaatttatttagttgtgaattgtttt

SEQ ID NO: 776179 - DNA, 585 bp, Homo sapiens
tggactccaggtgcatccatattgctgcaaaggatataattttgttttcttttatgactgtgtagtattctatggtgtatatgcactgcattatctttcatcagtccaccactgatgggcatctagcttgattccatgtcttttctattgtgactagtgctgcaatgaatgtacaagtgcatgcgtccttttggtagaacaatttatgtgtcattttgggtatatatccaataatgagactgctggtctagtggtagttctgttttaagtttttcgagaaatgtccaaactgctttacacagcaactaaactaatttacatccccaccagcagtgaataagcatttycttctcccacaacgttgccaatatctgttattttttgatcttttgataatagccattctgactgctatgaaacgctgtctcattgtggtttcgatttgcatttcactgatgattagtgatctggaacattttttcatatgtttgtttgctgcttgtatgtcttcctttgagaagtgtctgttcatgtcctttgcccatttttttaatggggttgctaggttttctcttgttgtttcat

SEQ ID NO: 776180 - DNA, 585 bp, Homo sapiens
tggactccaggtgcatccatattgctgcaaaggatataattttgttttcttttatgactgtgtagtattctatggtgtatatgcactgcattatctttcatcagtccaccactgatgggcatctagcttgattccatgtcttttctattgtgactagtgctgcaatgaatgtacaagtgcatgcgtccttttggtagaacaatttatgtgtcattttgggtatatatccaataatgagactgctggtctagtggtagttctgttttaagtttttcgagaaatgtccaaactgctttacacagcaactaaactaatttacatccccaccagcagtgaataagcatttccttctcccacaasgttgccaatatctgttattttttgatcttttgataatagccattctgactgctatgaaacgctgtctcattgtggtttcgatttgcatttcactgatgattagtgatctggaacattttttcatatgtttgtttgctgcttgtatgtcttcctttgagaagtgtctgttcatgtcctttgcccatttttttaatggggttgctaggttttctcttgttgtttcat

SEQ ID NO: 776181 - DNA, 585 bp, Homo sapiens
tggactccaggtgcatccatattgctgcaaaggatataattttgttttcttttatgactgtgtagtattctatggtgtatatgcactgcattatctttcatcagtccaccactgatgggcatctagcttgattccatgtcttttctattgtgactagtgctgcaatgaatgtacaagtgcatgcgtccttttggtagaacaatttatgtgtcattttgggtatatatccaataatgagactgctggtctagtggtagttctgttttaagtttttcgagaaatgtccaaactgctttacacagcaactaaactaatttacatccccaccagcagtgaataagcatttccttctcccacaacgttgccaatatctgttattttttgaycttttgataatagccattctgactgctatgaaacgctgtctcattgtggtttcgatttgcatttcactgatgattagtgatctggaacattttttcatatgtttgtttgctgcttgtatgtcttcctttgagaagtgtctgttcatgtcctttgcccatttttttaatggggttgctaggttttctcttgttgtttcat

SEQ ID NO: 776182 - DNA, 518 bp, Homo sapiens
tttgacattattgatatatagaaatgctactaatttttgtacattaatttgtattctaaaactttagtgaaggtttttttcttctttatcatttctaggagaccatgtacagatactgtggggtttttctaggtatagaataatatcatcagcaaagagagatagctttttcctatttggatgccttttatttctttttttttttagatttttttttttttttagttttttttattattatactttaatttctgggatacatgggcagaacttgcaggtttgttacataggtatacacgtgccatgcagccataaaaaaggatgagtttatgtcctttgcaggtacatgaatgmagctggaaaccatcattctcatgaaactaacacaggaacagaaaaccaaacaccacatgttctcactcataagtgggagttgaacaatgagaacacatgaacacaaggatggatcccttttatttctttcttttgcctgattgctttggctgggacttctactg

SEQ ID NO: 776183 - DNA, 612 bp, Homo sapiens
cccagaggtccatggtgagagtgggctgctctacacctattttacctatcccttccataggaccctctcagggctaggaacaagtcttggtgctctacaccccatccacggttcccagcttttagccccacggtctgtgtcctccttttgtccattctcaaygccttccttccaaagatctgcttgaagtgtcctggtctacttcgtgttctggtctctcttagtgggacaagctcttcctagctgcatctagttgtccatcttggcttccattcagtttatatttttaaacacagaatcactttaccccactaaatacaagttcaaaaagtgttaacagagtatgagtttagtcattaatcattagccagttggtgtgtccataccaacttacatttagtaaaacaggtttataaagggtatatataatcaattttggattaacaatattgctgtcagttatagtaaaaataatttcttattatcttactgttatggactcaatatttttgtctacccaaaatttatatgttgaaattctaactcccaatgtaatagtattagaaagtggggtcttgggatataattaggttataaaaccctcacaaatgg

SEQ ID NO: 776184 - DNA, 623 bp, Homo sapiens
aaaatcaaaaccaagttatttactttcacaatacaatggtggtacaggcatcgggtaaacaatcctattccaaaagagagaaattggctaaaagaaaggggtaacaggctctacatatgtgtggaatttagcagggcagacgttaaaacttaaagctccaaattgcctcccatgagtccatgttctgcattctgggtgcactggtgctagccgtgggcccctaaaacctcaggcagtccttttaatggcttttctggttacatcccacacggctgcttttacaagctagagtcaaatgcctgtagcttttccagattgagggttcaagttgccactggctctaccatgctgggacctacagagcagtggccccattcccactgctccartaggcagtgccctagtggggagcagccatactgggtcactgactttttccttggcactgatttaaaacagtctcttcgctggggctccaccctgtggcaaggggctccaccctgtggcaagcgtctccttgggcacccaagctttcaggcacatcctctaaaatctagatggaagttttccaagcctccatgactcttgcattctgtgtgcctatgggcttagcaccacttgaa

SEQ ID NO: 776185 - DNA, 556 bp, Homo sapiens
aaaaaaagaatgattatacttctaaaacctattttgtggttgatataacacatatattacatatatttgtgctgttaaatgctatgaaatgcttcataataatacattcctgcttatattctgattaaaatcaaggtattctctgaataagattgtattacatgactgtcattaataattccataaacactagtcagttcattaaaaatatgtttttcccctttctaaattattgatgaggttcggatttgtgttttctagaggggtcttttttttatcctaagagaatctaaaatttgaattatcacagattttcttatgctcaattmcaattatctacagttttataaaataagtttccagatattaccactcaatgattgaataagctctaaccatgattatccaaaagtttagttatcccagatcttcatttgttatacccaaatacctgttactttaaaacattcagagctgaaattaggtcactctttacttttaatgttattttgttacttctgctgaaagatttgtacagatgggatttatatcacta

SEQ ID NO: 776186 - DNA, 567 bp, Homo sapiens
ctcagtggctggaattagctgttaagaacacaaccatcagaacattgtgtaacaccatgactcataaaatctcatttaattttcataccaacccactctgaatatgttgctgtctggatgcttctttcagacttaataccactgctgactgaagagcatcattttggtgttatcaccatggcctcttgcaraattatatgtatgttccagtcttagcaccactagctcttgattcaaagtctgaggtgtgtacattttattagtggacctagatcatgggtttgcaccttagctccaagtgagactgggaaagcaagcaggcatctttaggtttcataaagaaaaaaggagcactctacttgccaacagtactcataaaatgaggagttcccccaaaacatgaaggagagttaggacatatagcaatatttttttcaaataatggcaaatgtctattaaagttcatatatttggctaataaacatcaaaatgtatcctttctcaggtacaacataaagtattttttgcctatatcatatatgacagacaagacaaagacttcagagt

SEQ ID NO: 776187 - DNA, 567 bp, Homo sapiens
ctcagtggctggaattagctgttaagaacacaaccatcagaacattgtgtaacaccatgactcataaaatctcatttaattttcataccaacccactctgaatatgttgctgtctggatgcttctttcagacttaataccactgctgactgaagagcatcattttggtgttatcaccatggcctcttgcagaattatatgtatgttccagtcttagcaccactagctcttgattcaaagtctgaggtgtgtacattttattagtggacctaratcatgggtttgcaccttagctccaagtgagactgggaaagcaagcaggcatctttaggtttcataaagaaaaaaggagcactctacttgccaacagtactcataaaatgaggagttcccccaaaacatgaaggagagttaggacatatagcaatatttttttcaaataatggcaaatgtctattaaagttcatatatttggctaataaacatcaaaatgtatcctttctcaggtacaacataaagtattttttgcctatatcatatatgacagacaagacaaagacttcagagt

SEQ ID NO: 776188 - DNA, 539 bp, Homo sapiens
actatcatttgcatatgtaacaatctgaaataaaattataggatatatgtgcaccacacctgcatttggaagcatggtatatatgtgtaaggaattgtatatctttggaagcctgtcacttagcttaatttagtttttccaatttttaaatatttttcattaattagttgtgatttctstatacattatacctcttttgtaactgtgggaatgtctaagtatatttctgaaatttatattttaacaatttggctcataattacacttgtctttgccaagtactgtggtagatgctagagataaaattaaggagaaatgattcctcaaaatgcttatacacctcctagtttatttatattgtgttagagaacaaatgcttatattttgaaatgttaaaaaggcacagcataaggaaagagataatcaaaattgataatctgaatggtttgggattttgtgttttctatctggtaaagttgacctcatttacatgcgaattcctatattttgcacatgaaactgaaggtagagagtcagaa

SEQ ID NO: 776189 - DNA, 618 bp, Homo sapiens
gctattaataaatgtaaaaaggttatatagagagacttaatgaattacgcaagtcaaaccaaaaattttcttagattcaccatatcattaaattttgattcaaagtgctgaaaatctgattacgtatttaattctggctagatgtttataaaatgcacaatatgtgttcttgttaagaaagtggcaccattgaatgacataagccagagcttctcaatctgcttgtgcaataacccggaatgtccaaaattattttcaacagcatcatagaaatctcaagccccactatcccttaaagatttcagaacaaagtagatcttaattcatttaatcttttttgaaatcacaaatactctaaagaaaggatatttaggatgaatgagtatcatgaaacaaaaataamctccaaaaaattaagaatcacttttttaggcaataaatacaaccactgaatgagagactttactcattggtaaaaattctcccagagatttggttcatggttagccagcacctcagaaagcaaattttcttatttctaatgagataggaatgtggcttatttttcttttatccttccaagaccactaattatatgcattatctatttcttctaat

SEQ ID NO: 776190 - DNA, 618 bp, Homo sapiens
gctattaataaatgtaaaaaggttatatagagagacttaatgaattacgcaagtcaaaccaaaaattttcttagattcaccatatcattaaattttgattcaaagtgctgaaaatctgattacgtatttaattctggctagatgtttataaaatgcacaatatgtgttcttgttaagaaagtggcaccattgaatgacataagccagagcttctcaatctgcttgtgcaataacccggaatgtccaaaattattttcaacagcatcatagaaatctcaagccccactatcccttaaagatttcagaacaaagtagatcttaattcatttaatcttttttgaaatcacaaatactctaaagaaaggatatttaggatgaatgagtatcatgaaacaaaaataacctccaaaaaattaagaatcacttttttaggcaataaatayaaccactgaatgagagactttactcattggtaaaaattctcccagagatttggttcatggttagccagcacctcagaaagcaaattttcttatttctaatgagataggaatgtggcttatttttcttttatccttccaagaccactaattatatgcattatctatttcttctaat

SEQ ID NO: 776191 - DNA, 394 bp, Homo sapiens
agtcagtccatcaaaaggacataactaatctaatgttaatagcacctaggccaggtgcggtggctcacgcctgtaatcccagcactttgggaggccgaggcaggaagatcacgaggtgaggagatcgaggccatcctggctaatatggtgaaaccccgtatctactaaaaatacaaataatcagactggtgtggtggcggatgcctgtagccccagctactccggaggttgaggcaggagaatggygtgaacccgagaggaggagattgcagtgagccgagattgagccactgcactccagcctgggtgacagagagagactctgtcaaaaaaaaaaaaaaaaaaaaaaaaaaaagaagcacctagaaacataacttcaaaatacttgaataca

SEQ ID NO: 776192 - DNA, 592 bp, Homo sapiens
ctattctaattagttaaatgattaaatgttaactggttaatagtcttaattacatctgcaaaatccctttttatgttacataacaatctagggcataactaatggggcacaaggcctgggggccatcttaaaatacagaaagtacaaagatgataagacataaacattgcaaatacgtttgcataactacaatttgttgagtatttttctgaatttgttaggcagggctgattggtgtggggaaagaagagaagctacaactcttcaaacttccccatattttatattgggcttcaggttwatctgcagatgaactttacctgtgtgcagggcaaattcactaaacttaggaaagatcaagggcctacagcaactctacttttgaaggtgaatgatgtcaggcttcaggttatcaaagaggagaagcactcaatttctgttttgtttgtatcttctaatatttttaattgaattgatataagaaacattggcataaaatgattgaagcaacagctgctttataggaattaaatgttggcaagtcaaacagtattccaggacactgacaacatgtagatgtgatataatattg

SEQ ID NO: 776193 - DNA, 585 bp, Homo sapiens
ggtggcatatcgaatgacatagttcatatctctaatgtcttctccctaaagaattaatgatatatttgacagtgacaatgagtggctattgtattaattccttcctgataatacctatattctcttcttctatcattagtcttcattattcatctttcttcctctgtttccaccaatctctctcagaataggcagttaattgttttagggcatttttagtagctggttatttgtaatctgcggttgttcaatgagaaactttaaatttataggtcttatctcctcttcatacagcttcagctaatgttgtttctaattgcccactggtacagaatgtaacgcaaaatcttatattggttcactcttctccattttattctataaaaaattgctacaaatggcttttaccagaaatgcccctaaatattaagataaaaatgycgatatatacaaatgaatagttgttaccttaagagaacagcttgtatactaacttgaaattatctcttcctatgcaaaggcttttcctctgcatcatcctatgtaacattatcaactcgcacacctgtatgtagtcacctgttt

SEQ ID NO: 776194 - DNA, 612 bp, Homo sapiens
gtaatggaatattttctttctctcaaacagggaatgcttgtccaattctcagagctttgcacaagctggatctattgtttggaactctttttacccagatctcatacatagcttattttcattattcaggtcacaaatcaaatgacattttcttatgatgccttcccaatgcataaacactaatttcattcatcctgcctttagttattttttatttgactctattttattttttatagattttatcatgagaaataatatttttatgccatttttaaaattttaagttccagagtatatgtgcaggatgtgcatgtttgttacatagtaaatgtgtgccatggtggtttgctgcacctatcaacccgtcacctaggtattaagtgtggcatgcattagstattcttcctgatgctctccccaccctccatcctcctacaacatgccccagtgtgtgttgtccctctccctgtgtccatgtgttctcgttgttcagctcctaattataagtgagaacatgcagtgttttgttttctgtttctgtgttagtttgctgaggataatggctttcagcttcattcacatccctgcaaaggacatgctctaattcct

SEQ ID NO: 776195 - DNA, 531 bp, Homo sapiens
gagcttgtctcccaaatacttcattatctctgcagtatttttcagtaccctgggcttatctgtttctttcttgattatttttgcttgctttttggcactggggaaataattcctcttctatttacagcagtacaaaaagggtgacacatataagaaagtaggtaacggggaaaataaagcttaaaaaarcgtattcaatgtaactatgtagtgctgcattagagaaaaaaatagtaaaaagtgttattttatctattacaaactaaagaaagcgaaccatcctttaaaattatcttttttgctagagagttaaggaaaagcagttctcacatgggacagagaagtcttaaattattttaaggttcttagttagtttattataaaaaaaattaaaggtttttagctctgttcttggacactccactcgtagataaaatttcagcagtgccttagtgcctagctcaaatattaccttcacaatgctccatcttcaaggcaattattttctttctttttagaattggtatattt

SEQ ID NO: 776196 - DNA, 625 bp, Homo sapiens
ggagccaaagaaaggaataaccccaagaaaccaagtgcagacaaaaaagccccaacacaagtcagctctttccagtcaaaggatcaagaaagggcaggctaacaagaaaaaaaactttagacaataaccactctactccaacaaactccacccttacccatgccagcaaagactgaggggggaacctagacttttaccctcgcaagctgaaacaaggagctccctcctcctgccctagcaatgccagcagagaccacaggggaactcagacttccaaccaccgcctccccagrcatctctccccacctccccacctccccacctccccattggatgatgtcaaaggaagatgagtggagttaggacttctatcagtatccaccaggaacaaggctgaataccccttttttggcccccagcccctgccaccctgtagaggtcacataggaaccagtaatgaggcattcctacacctcctagacagggaggtattagtagaggcctgaaggggagccaggactcccacccccaccagcagtaataaaggtgcgcacacacacacctcaggtgacaatggaggttgagtagggacctggagttctgtccccagctggtagtaataagg

SEQ ID NO: 776197 - DNA, 625 bp, Homo sapiens
ggagccaaagaaaggaataaccccaagaaaccaagtgcagacaaaaaagccccaacacaagtcagctctttccagtcaaaggatcaagaaagggcaggctaacaagaaaaaaaactttagacaataaccactctactccaacaaactccacccttacccatgccagcaaagactgaggggggaacctagacttttaccctcgcaagctgaaacaaggagctccctcctcctgccctagcaatgccagcagagaccacaggggaactcagacttccaaccaccgcctccccagacatctctccccacctccccacctccccacctccccattggatgatgtcaaaggaagatgagtggagttaggacttctatcagtatccaccaggaacaaggctgaataccccttttttggcccccagcccctgccaccctgtagaggycacataggaaccagtaatgaggcattcctacacctcctagacagggaggtattagtagaggcctgaaggggagccaggactcccacccccaccagcagtaataaaggtgcgcacacacacacctcaggtgacaatggaggttgagtagggacctggagttctgtccccagctggtagtaataagg

SEQ ID NO: 776198 - DNA, 625 bp, Homo sapiens
ggagccaaagaaaggaataaccccaagaaaccaagtgcagacaaaaaagccccaacacaagtcagctctttccagtcaaaggatcaagaaagggcaggctaacaagaaaaaaaactttagacaataaccactctactccaacaaactccacccttacccatgccagcaaagactgaggggggaacctagacttttaccctcgcaagctgaaacaaggagctccctcctcctgccctagcaatgccagcagagaccacaggggaactcagacttccaaccaccgcctccccagacatctctccccacctccccacctccccacctccccattggatgatgtcaaaggaagatgagtggagttaggacttctatcagtatccaccaggaacaaggctgaataccccttttttggcccccagcccctgccaccctgtagaggtcacataggaaccastaatgaggcattcctacacctcctagacagggaggtattagtagaggcctgaaggggagccaggactcccacccccaccagcagtaataaaggtgcgcacacacacacctcaggtgacaatggaggttgagtagggacctggagttctgtccccagctggtagtaataagg

SEQ ID NO: 776199 - DNA, 628 bp, Homo sapiens
atcttttaattaaaaatttataacgtaataataatacttaaactcatattgcaccttttccccaggaagctcaaaaaaccttcttaacatcaaattattcatcttttatagcaatcccggtcaggtctatgggagccaaaatattttagcgagtacttaaaactaatgcttgatgaatggatgatattttttttttttcctttttgcactctgcaaggaaccgagacaaggttaagcatggagacagagcaaactggagctgtggcaggaacagctcctcctcctgtgctctatgccacctttagccacaatcaggtaaccagggascctgggacaaaaagcacaggtggaagggatccctggctgcacactgaaattaccttggatcccttgaaaagaggtccctgggtgtgcccaggcataggttgaaatacctatgcctgggctcccactacccagaacaattaaaatagagtcacttgaagtgggtctcaggcacttctatttttaaaagttctgcaagtgatcctgacaggcagcctgggttgcacaccaccaggatatagaaagagcactggacaaggagtcaagacactggtctaattcccagctttcctgctgtgtgact

SEQ ID NO: 776200 - DNA, 628 bp, Homo sapiens
atcttttaattaaaaatttataacgtaataataatacttaaactcatattgcaccttttccccaggaagctcaaaaaaccttcttaacatcaaattattcatcttttatagcaatcccggtcaggtctatgggagccaaaatattttagcgagtacttaaaactaatgcttgatgaatggatgatattttttttttttcctttttgcactctgcaaggaaccgagacaaggttaagcatggagacagagcaaactggagctgtggcaggaacagctcctcctcctgtgctctatgccacctttagccacaatcaggtaaccagggaccctgggacaaaaagcacaggtggaagggatccctggytgcacactgaaattaccttggatcccttgaaaagaggtccctgggtgtgcccaggcataggttgaaatacctatgcctgggctcccactacccagaacaattaaaatagagtcacttgaagtgggtctcaggcacttctatttttaaaagttctgcaagtgatcctgacaggcagcctgggttgcacaccaccaggatatagaaagagcactggacaaggagtcaagacactggtctaattcccagctttcctgctgtgtgact

SEQ ID NO: 776201 - DNA, 628 bp, Homo sapiens
atcttttaattaaaaatttataacgtaataataatacttaaactcatattgcaccttttccccaggaagctcaaaaaaccttcttaacatcaaattattcatcttttatagcaatcccggtcaggtctatgggagccaaaatattttagcgagtacttaaaactaatgcttgatgaatggatgatattttttttttttcctttttgcactctgcaaggaaccgagacaaggttaagcatggagacagagcaaactggagctgtggcaggaacagctcctcctcctgtgctctatgccacctttagccacaatcaggtaaccagggaccctgggacaaaaagcacaggtggaagggatccctggctgcacactgaaattaccttggatcccttgaaaagaggtccctgggtgtgcccaggcataggttgaaatacctatgcctgggctcccactacccagaacaattaaaatagagtcacttgwagtgggtctcaggcacttctatttttaaaagttctgcaagtgatcctgacaggcagcctgggttgcacaccaccaggatatagaaagagcactggacaaggagtcaagacactggtctaattcccagctttcctgctgtgtgact

SEQ ID NO: 776202 - DNA, 566 bp, Homo sapiens
cacacacgtacctacatgtcaacagacacacatgcacacaccacacactcaccatacacacacacacaccccagggctgcctacccttctaatctcctacctcatggcatttgccacctcttatcttatatcacaattatttgtgtacagattttagcttctagagggcaggagccttgtctgttttgtagcacctggcacaatgtcctaaattcattaattgaaaaatcgatgtgttaggtctttcctgtgtaccatgctctatgcttgacactgaagttagataaataggacacgaactcttagaaactcacagtctgcctcaaggttctcaacagaattcaagaggtctgtgagcttagatgagaaaacaatttacyttttaattttactaatctctaaccaaagtttaacatttccttttcttctggaggtaggaaattgactagagtaagctgagcagtacctgtgactctgtcacctgtaggagtcacagatattttcgtatcgcccacagttgttataaatatctcacaatctcatatcatcaattagtgttattacag

SEQ ID NO: 776203 - DNA, 608 bp, Homo sapiens
aacagaattcaagaggtctgtgagcttagatgagaaaacaatttactttttaattttactaatctctaaccaaagtttaacatttccttttcttctggaggtaggaaattgactagagtaagctgagcagtacctgtgactctgtcacctgtaggagtcacagatattttcgtatcgcccacagttgttataaatatctcacaatctcatatcatcaattagtgttattacaggctaagcatctccaatccggaaatccgaaatccaaaatgctctgaaacccaaaactttttgagtgctgacctgatgctcaaaggaaatgctcattggagtgttctgggttttggattttgggatttgggatgctcartcggtaactatactgtaaatattccaaaatctgaaaacatttgaagtctgaaacacttctggtcccaggagttttagataagagatactctacccgtattagacccaaagtaaacgttatttgatgttttaataaagaagcacacatactgccatatcacagatctgtttaaaaaatattttgataactatatttcagtataaccagtttccttcataatactatgcttgctatttta

SEQ ID NO: 776204 - DNA, 566 bp, Homo sapiens
agagtcagagatgaatgataggtaagattcaaaagcctgagttattatagaaaattatgagtggaaaaaaattcatgtttattttttcccgctgaaaatatgagcagaatgagaaatattccaataaacaggcaaaaacagtgcttttgtctyagttatctctgtaattcagcatgttgttatgacatattgaagcattatggacttgataactgtgattatgctactgcttctagtgttctaaacggatggtttagttgcatatgaacaaagttttttttttttccatttgaatattagaagcgtaatgaatgttcctgttgcttagatctgtagtccactcagtctgggcttggggtttgttatgttagagctgaaggggccatagaggttgccttaattaccgatgaggaaatgaaggcccaaaaagtagagtgaggtgctggtttcacaactggttagtggcagagctgggacagggaccccaatatgttctctcagatggggcttctctataacatcatttgctttcctccagacaactgggaatcatcacaacaggatcc

SEQ ID NO: 776205 - DNA, 621 bp, Homo sapiens
tggccagtcaccctctgctaacaaacaaggcgtgctgaaagctgaatgataggtacagaaccctcagatggtcgtatcccccactctttgccataaagctgttctctctcagagaaggacacacaattcaagggataactgaagatccagccctgaatccatcagaaaaatgactcctgcactgataaataaatgatgagagtttcatggaagttacaatgtgagagctgcacaatttcctcatgaatttaattctgtattctttctgcgcttattcctttccctttaaaagaacattcccatgcacttcctctgttttcaagtaagcatagttaacctctgactgtttatgttccggtgacagcattgaggatcaggaatgctgccggccatgggctccagccgtcggcacagaacagggaattaagaataagtggtgaaaagagagccatcaraagatgagatggtacaagaagaaaatattcttcatcttggacaactaattccattgagcaagacagtaattttctagggcctgccagagctttaaattctacttttcaaattatcccctagcagatcaattcccagcctgggtcatttttctgaagagctgttctg

SEQ ID NO: 776206 - DNA, 658 bp, Homo sapiens
ataaatgaatgaatatagcaaagcattccatgatgttctcttgaattcatttattctttggaatttggttatttttttttgttttttggtgcagtggttatgtactactaggggtatgatatgggttcttcaataaatctcttcaaattataataaagatttagcgctaaccttctgctcactatctccctctaagtactacagatggatgtgattagcatgcaatttatcatcttgatggaattcatgtcttacaggcctatggctttcaaaattgaagtatctagatttatgttattttgtcaaataggaaatggttttactctattgagattcctacacttaaaaatttatatagaccttaaaaaaatcctaaagaagagtttgaaaagtatggttaggcattcttctagccatatagactatagaggagaataagtttaaggaaatcatcaagtaaagtcaaraacatagtaaaaatggtaacataccaccttcatgtaagataaaaccagataagattttaaaaagaagcgtttatgctatgcttaggaagccaatcctgttgaaaaaactgatattgcagccatatctgtctgtgagtagttgtaacaatgctgtaggtaacatttctgagagcatgatacagtgtaggggg

SEQ ID NO: 776207 - DNA, 448 bp, Homo sapiens
attctattcctaggtgttcacccaacagaaataggaacatgtgatcacctaaaaagaggagtatttatttatagcagtgctatttgtaatagacctgaactggaagcttcccattgacattaatagtggaaggaataaagtaatcagaaatattaatcaaatggaatatgatccagcaatgagaataaacaatttactactgtatgcaacagatggataaatctcacaatcatattgttgaaaaaagaagcaagacacaaaaacatgtaagctgtytgagtccatttatacaaagttcaaaagcagatcaaacaaatctgtgctgggagaagtccaggtgtgataccctaccttgttttaacctgattgactctctcttatctgagagagcaggacagactccactttggtttcttcgcttgcagcccctcgttccccctgcttaagg

SEQ ID NO: 776208 - DNA, 588 bp, Homo sapiens
ggcttgactggttagtctagtcccaagctatctgtgcccagattgccaaaccgttcctggcgttcaggtctgctagaacccgtggagtagaaactgccactaagagaccccaccctttcctgtctggcctcatgaagggagggacgcccagctccccacaccatcacactaacccacttcacactcttctctgtgttctgacagttgagtttcctccccaactcaagatcaggccacagatctcatctccctacccctgggcagtgtgctccagtcctggagaactggacccaggccagcagatttatcctttggccccttgggatcaagcaccagctgtgatacagaggtggactactcccaggttaccaagaaaccactcasgctgggcgatggtggctatgcattgggcttcccctgcaagaatggccaggcaggcagtcttgggagggaccagcaggcatgagggcatgtggttcggatgcacacatggcagcggggcctgtcttgggtgcatgagcatgcgtggactttgctctctcctgcaggcagatagcagaaactgcagctgcttagggaaggatgcag

SEQ ID NO: 776209 - DNA, 632 bp, Homo sapiens
aatttaaaaagatttaaatcttacagtgtatgttttctgaccacaatagaattaaagatcaataaccaaaagatagttggaaaaaagcccaagtatttagaaattaagggacatactactaaataactcacaggtcaaggaaaattttaaaatattttgaattaaaggctgatagcatcttaaaatttgtggaatgcagctaaasccatgcttaaagggaaatttatagctattatagggcaaaagaagtcagacacaaggcgatatattgtgggattccagtagatgtaaagtacaaaaacagacaaaaaacaaatgctcttggaagtcaggatagtggttcccctggggcaggtgtagcccttttaaggacattatattagtctgctagcactgcaataacaaaatattagtctaggtggcttaaataacagacatgtattttctcccggttctggaggctgaaactctaagatcaaggtgcaggtagggttggttatttctggcctccctcctttgcttcagatgtctgccttcttgctccatcttcacatggcctgtgacctgttgacacacatccttggtgtctctttctcttcttattaggacaccagtgctattggattaggatc

SEQ ID NO: 776210 - DNA, 632 bp, Homo sapiens
aatttaaaaagatttaaatcttacagtgtatgttttctgaccacaatagaattaaagatcaataaccaaaagatagttggaaaaaagcccaagtatttagaaattaagggacatactactaaataactcacaggtcaaggaaaattttaaaatattttgaattaaaggctgatagcatcttaaaatttgtggaatgcagctaaagccatgcttaaagggaaatttatagctattatagggcaaaagaagtcagacacaaggcgatatattgtgggattccartagatgtaaagtacaaaaacagacaaaaaacaaatgctcttggaagtcaggatagtggttcccctggggcaggtgtagcccttttaaggacattatattagtctgctagcactgcaataacaaaatattagtctaggtggcttaaataacagacatgtattttctcccggttctggaggctgaaactctaagatcaaggtgcaggtagggttggttatttctggcctccctcctttgcttcagatgtctgccttcttgctccatcttcacatggcctgtgacctgttgacacacatccttggtgtctctttctcttcttattaggacaccagtgctattggattaggatc

SEQ ID NO: 776211 - DNA, 632 bp, Homo sapiens
aatttaaaaagatttaaatcttacagtgtatgttttctgaccacaatagaattaaagatcaataaccaaaagatagttggaaaaaagcccaagtatttagaaattaagggacatactactaaataactcacaggtcaaggaaaattttaaaatattttgaattaaaggctgatagcatcttaaaatttgtggaatgcagctaaagccatgcttaaagggaaatttatagctattatagggcaaaagaagtcagacacaaggcgatatattgtgggattccagtagatgtaaagtacaaaaacagacaaaaaacaaatgctcttggaagtcaggatagtggttcccctggggcaggtgtagcccttttaaggacrttatattagtctgctagcactgcaataacaaaatattagtctaggtggcttaaataacagacatgtattttctcccggttctggaggctgaaactctaagatcaaggtgcaggtagggttggttatttctggcctccctcctttgcttcagatgtctgccttcttgctccatcttcacatggcctgtgacctgttgacacacatccttggtgtctctttctcttcttattaggacaccagtgctattggattaggatc

SEQ ID NO: 776212 - DNA, 621 bp, Homo sapiens
aggcacttccttctcttaatatccttctcttgggtcaaattttaatatatactaaacattccttcccaactcaagtaatatcaaaagtgaacatctgattgtgtcactcctgtttaaatacctttaattgctccgcattaccctcagaataaaatctagattcctccctgaagctttcaaggtcattgttattcaggccagtgctgctgtccggctttattctctttcttctctccccacacttgtgctgctgcagaactgagcatctcagttcttgttgtttctgggccaacgcacacgtgttttctgtgcctagaaggctctatctcagccatcacctcttcccaccctactccccatatttctgcctgactaaactctaattatctttagcttccaatctaggtactacatttccaaaaatgcctttcctgacccaaaggcygatagttcttttcacttgagactctattttacatgcctatgtcctacttgacagtgagttcctcaaattcagagaccacaactgttaagtttctgtttctggaggctaacacagacaacactgagctaacaacaatcattgaagcaagaaggctgacctagggaagaggtcatggc

SEQ ID NO: 776213 - DNA, 619 bp, Homo sapiens
tgtagaaatgtatacatatgaaaatgttatatattatatagaattgtatatatgtatgcatatatgattatatgcatataaacattgtatctgtttatacctaagtcacatatattggctcctagccaaaaatgtgaatagacacacacacaaacacacatgcacatacccacactacgacattgctcaggacagatcacagcagtacctgggtactgatcacactgtccaaggaactgaccatgctcctctggaaagctcacattactgacacagacaaggaactgcagcctcttccctttctcaagggaagagctgcccaaaggagattgagctgcagattcaacgcagttgttgcttcccttggtgaccatgcacttgttcccacccaccraaactctttttccttgtcctgtacaaaatgtcattttgttaataatagaaaaccaactggaagaactttgttttttaaatcacagacacaatagaagaacacaacatgtttttctattaatcttcacattgtatttgaattaggaggatgattctgtctcattttgcaaatggtgaaatctagaaatcccatatgctatcggctcacactctgctgaaactctct

SEQ ID NO: 776214 - DNA, 588 bp, Homo sapiens
ctgggcactccgtggtctggtcaggtccgaaagtggtattgccagaccgttctcgccatattcccctggagtacagcttgtccaacctttgaaaacttaagttctcttagcatatagtcatgaacagcacttcctttgatgttcctaacacacatgaccccatattcttgtagagcatcytcttcagaccagtatttgacacatttactctttcctctctccatttctttcattgtcatgacaatcacttgggagttttcttggaacaccatccagcaaaagtcattcaccatgttttgcaggcagccttgtgtggcaatgcaactctttttgggttttgaattgttgcacttggtttcaaattcaggcatgatggtgtttgcactgatgtaatctgaaataggctcattgggatcatcatcgtgtaggacaaccctggtatgatcaaagggcaggatgtttttatatctatttttgtttttgttttcttgcctttgaccctcttttcggctgtagagaagtttgcactcctgtggttgtagtgtctcaaattcttcccaaaagccttgttggactttgtctgtggtc

SEQ ID NO: 776215 - DNA, 621 bp, Homo sapiens
agctgctggagggaaaaatgtatgcaaggagacaagttggacctacacatgaagtattagagactgagaatacaagccctgatctagaaaattgggctctaagaatggaaaggaaggaatgggtgacaagacagagactgttaaaaaaaaaatcagtaggtcttggtaactaaatgaattcaaacaaagagtgattgtgtctgacagctgtgtttaaagcctagtgagtagggaatggagtcacaattaacagaaaaatgaagacgtgggaaacaagaaagtctttgggcaaatgtagtggtttgggatctatttagtctgaggtgaggttatccaggtgtatttggaggactataaattcttccctgaagtaaatactacctaacacaccttttatcargaagttatgaatattgaatttttttcaaaagtcattgcacccttcccttgagacccatgtaattacatgtaagaatgaatgtcaggttcttcattacctatccccatccctacatactaggattttagccaacttctcttattctgatgagtggggatgaatttatcaccatgacatgttacacataggatactctaaagaaatagttagtggagattcat

SEQ ID NO: 776216 - DNA, 555 bp, Homo sapiens
tgtctgcataaccccctttacgtgctcgacttcagtgaatgccgttgttgacattgtgtcacccaggacacaaacctcagggtcttttttggatcttcttttgtttgcattcacttgcctgtcgatggtaccctcctaacacctctttggtgagattctctgtctgtcactgtcactgtcatagatcaagccctcacygcaccatcgttcagaagattatcaatttctcttgtcctgaatggcccatctcttcagtcttgattccttctaatccattttgcaccctgccgagtttgttttccagaacatcaatcttatcacgtcatatcctccctacattttaaatggcttccaaacttcttataataaaataaagtttcttatcattctctagattcattctcactgttctgtgttgtagaatccgtatgctgcaatgtttcatacactttgctctttacaagtgttttctcctgccaggaatgcgctctgctctgctggaagaattctgcttaatctctaagatgtgcttccactgtgaagcctcccctgaca

SEQ ID NO: 776217 - DNA, 621 bp, Homo sapiens
ttatgcatgtcaaagcttccagttgataggccagcagtatttgaatgaataataaaataatgacatgtacattcgtaaactatcatctatttatttaatgaaatatatttttatttctttctattaatattttagttgaattaatatttatgtcattatgattcagatyttcaccaaatttgtattctatcaacagtaaggccaattaagccatgttttttgaatcattatacctctcagttcttgttcctttcagtttgggtcaactttactctcctgaggcagcagtggaaattgtcaataaaattcttaaagcaatactgatattcacaatgaacaacgaaatttacatacaatgtttaatcattgtcatggagctacctataataaattgtcatgatcatagaatctattataagctattttaattgcatatgtcactatcacaaaactttcatggtctcttagcaatatccatagaatacttcttaagtttttcttctttcaaaaattcaatgttgtaatattataaaaatgaaaaagcaataaaatattgctcaatgtattgaaatttctctttatttaagactatatctggacctataatatgttcagaaaata

SEQ ID NO: 776218 - DNA, 586 bp, Homo sapiens
atgcattagctatttatcctgatgctctacctcccacagctcccccaacagaccccaatgtgtgttgttcccttccctgtgtccatgtgttctcattgttcagctcccacttataagtgagaacatgcagtgtttggytttctgttcccatgttagtttgctgaggataatgccttccagatccatccatatccctgcaaaggacatgatcttgttccttttattgctgcatagtattccacggtgtatatgtaccacattttctttatccagtctatcactgatgggcatttgggttgattccatgtctttgctattgtgaataatgctgcaatgaaaatacgcatgcatgcatgcatctttataataaaatgatttatattcctttgggtatatatatactcagtaatgggattgccgagtcaaatgttatttttggttctgtaggtctttgaggaatcaccacactgtcttccacagtggttgaactaatttacattccctttaacagtacaaaagcattcctatttctccacagcctcaccagcacctgttgttccttgactttttaataatcgccattctg

SEQ ID NO: 776219 - DNA, 586 bp, Homo sapiens
atgcattagctatttatcctgatgctctacctcccacagctcccccaacagaccccaatgtgtgttgttcccttccctgtgtccatgtgttctcattgttcagctcccacttataagtgagaacatgcagtgtttggctttctgttcccatgttagtttgctgaggataatgccttccagatccatccatatccctgcaaaggacatgatcttgttccttttattgctgcatagtattccacggtgtatatgtaccacattttctttatccagtctatcactgatgggcatttgggttgattccatgtctttgctattgtgaataatgctgcaatgaaaatacrcatgcatgcatgcatctttataataaaatgatttatattcctttgggtatatatatactcagtaatgggattgccgagtcaaatgttatttttggttctgtaggtctttgaggaatcaccacactgtcttccacagtggttgaactaatttacattccctttaacagtacaaaagcattcctatttctccacagcctcaccagcacctgttgttccttgactttttaataatcgccattctg

SEQ ID NO: 776220 - DNA, 569 bp, Homo sapiens
gtctgagacacgtatggaagccaagagccccaggcgtcatcagcactgcgcaatccagcagaaacaggcttggagagagacacagtcatgacacggatctccaggaagtgtctccctgatggacggggaagtgatcttcgtagagatattcagccagaccgagagcatctaggcgctcagaaacaggggagacagagcaagagggacgacagagcagaggccatagcccaggcaggatacagcgccgtgccaccgccacgggcataagaggaggggtgcgaagcgggtggcttgtccagagaggccagcgttccagggacggggcttgttgccgtctcccattccaggcttcctcttcaagactgtgtggtggtgtggcttcatttcgcagagaaggggcgtggaaaggtaaaaccatcttcttggacgtgggtctgctcctctcctgccggacaatgtgctaccgtggggcttttgtcctgggctgcagtgtggtcctctcgatcctagaaaagaggccgctcaggatggggatgagacttccaytgctccgggcccgatgcatcccc

SEQ ID NO: 776221 - DNA, 534 bp, Homo sapiens
tgtgtggtggtgtggcttcatttcgcagagaaggggcgtggaaaggtaaaaccatcttcttggacgtgggtctgctcctctcctgccggacaatgtgctaccgtggggcttttgtcctgggctgcagtgtggtcctctcgatcctagaaaagaggccgctcaggatggggatgagacttccactgctccgkgcccgatgcatcccctcacgttatcgaggcctgcacagacccaaagtggaaccgccgcgaagacgatggacagctggccgcaggacccagggagagacgcagaaagaggctcaccaaagaccggtccacataaaagacatccctttttgacgcacagggcacattcgtccaaagacacacacacacacacacacacacacacacacacacacacacacacacagagggaaagaagcacacagagggtgagagacagagagagaagggagaatgggagacacagccccacacacagtcctaccgcggtggccgagcaatgcacgcccccaggcaacccctgtgg

SEQ ID NO: 776222 - DNA, 590 bp, Homo sapiens
cggcagggggcgcgcctgctgcagccgcggctgcggctggatccggggtccagtttggggccgcgtgggagagggggccacgggtgtcccagggccgagcccccaggagtcccgtcttcaggacctccttgagccgacttccaccgatggacggggagcttcagggcgcctgctgggttctcaggactcctcttcagatgcgattttggaccactctgggcgagaaaggatgggctcaccacatctgctgaggcaggcagggcctcgctgcagcacagaatgatcccatggccctcaaggcctgctgtcagcggaaaattcactgatccgtgagccctctgcctccctcctcctttgaaagagcggtggcctggcccgcttctaaaagccctggggctcctgcaagcygacaccgctttccaggacacgtgcagacagggacggggcgaatcccaggtggagacaatgcgatcacgcctggcactggcgtataccagagcagatggcgtgaatgtatgtcaccggaggcatgtggggcgagggcgaaaacaacagtggtgcccaggcatgcgcccggtagaaaggggatc

SEQ ID NO: 776223 - DNA, 593 bp, Homo sapiens
gggtccagtttggggccgcgtgggagagggggccacgggtgtcccagggccgagcccccaggagtcccgtcttcaggacctccttgagccgacttccaccgatggacggggagcttcagggcgcctgctgggttctcaggactcctcttcagatgcgattttggaccactctgggcgagaaaggatgggctcaccacatctgctgaggcaggcagggcctcgctgcagcacagaatgatcccatggccctcaaggcctgctgtcagcggaaaattcactgatccgtgagccctctgcctccctcctcctttgaaagagcggtggcctggcccgcttctaaaagccctggggctcctgcaagctgacaccgctttccaggacacgtgcagacagggacggggcgaatcccaggtggagacaatgcgatcacgcctggcactggcgtataccagagcagatggcgtgaatgtatgtcaccggaggcatgtggggcgagggcgaaarcaacagtggtgcccaggcatgcgcccggtagaaaggggatcaagtggcctttccctgagtgccaagggaacacaaagaagacctgggaa

SEQ ID NO: 776224 - DNA, 488 bp, Homo sapiens
  misc_feature 13: n = A,T,C or G
aagcggcgcggcntgcatgcgctttggctgggccgactcgcgcttgtctgctggcagtcaggcaggctgcgtcccctttaaatacgggcggctgcgcggcggcagggggcgcgcctgctgcagcggctgcggctggatccggggtccagtttggggccgcgtgggagagggggccacgggtgtccacaggccgagcccccaggagtcccgtcttcaggacctccttgagccgacttccaccgatggacggggagcttcagggcgcctgctgggttctcaggactcctcttcagatgcgattttggaccactctgggcgagaaaggatgggctcaccacatctgctgaggcaggcagggcctcgctgmagcacagaatgatcccatggccctcaaggcctgctgtcagcggaaaattcactgatccgtgagccctctgcctccctcctcctttgaaagagcggtggcctggcccgcttctaaaagccct

SEQ ID NO: 776225 - DNA, 543 bp, Homo sapiens
  misc_feature 517: n = A,T,C or G
ggggccgcgtgggagagggggccacgggtgtcccagggccgagcccccaggagtcccgtcttcaggacctccttgagccgacttccaccgatggacggggagcttcagggcgcctgctgggttctcaggactcctcttcagatgcgattttggaccactctgggcgagaaaggatgggctcaccacatctgctgaggcaggcagggcctcgctgcagcacagaatgatcccatggccctcaaggcctgctgtcagcggaaaattcactgatccgtgagccctctgcctccctcctcctttgaaagagcggtggcctggcccgcttctaaaagccctggggctcctgcaagccgacaccgctttccaggacacgtgcagacagggacsgggcgaatcccaggtggagacaatgcgatcacgcctggcactggcgtataccagagcagatggcgtgaatgtatgtcaccggaggcatgtggggcgagggcgaaacgaacagtggtgcccaggcatgcgnccggtagaaaggggatcaagtggcct

SEQ ID NO: 776226 - DNA, 608 bp, Homo sapiens
acccgtggccccctctcccacgcggccccaaactggaccccggatccagccgcagccgcgctgcagcaggcgcgccccctgccgccgcgcagccgcccgtatttaaaggggacgcagcctgcctgactgccaggagccaagcgcgagtcggcccagccaaagcgcatgcgagggcggcgccgctttttgcttcacagtgcttcccacggttgtcttaggaaccagtccccgaggcttggcaacgcgggagccctccgtggcagcgcttgggtgtcgggcctccgaggctccggcctgacctctccacggggtccacaggaacgtctccggctgccaggagtcrcaaggggccgagcaggatgaggaaaccacaggcggagtccgggggaagcagcgtggcatcccagcctcaggcctgccaggacggtgttcgggtgagtctcccgagaagtcgtgcccccgtgatctcgaggacaggtccgcctgcgtgcccgagggctgttctctcagccgagggttgttcctctccagagcagaacccggcagccgcaggggttgcctgggggcgtgcattgctcggccaccgcggtaggactgtgtgtggggct

SEQ ID NO: 776227 - DNA, 608 bp, Homo sapiens
acccgtggccccctctcccacgcggccccaaactggaccccggatccagccgcagccgcgctgcagcaggcgcgccccctgccgccgcgcagccgcccgtatttaaaggggacgcagcctgcctgactgccaggagccaagcgcgagtcggcccagccaaagcgcatgcgagggcggcgccgctttttgcttcacagtgcttcccacggttgtcttaggaaccagtccccgaggcttggcaacgcgggagccctccgtggcagcgcttgggtgtcgggcctccgaggctccggcctgacctctccacggggtccacaggaacgtctccggctgccaggagtcgcaargggccgagcaggatgaggaaaccacaggcggagtccgggggaagcagcgtggcatcccagcctcaggcctgccaggacggtgttcgggtgagtctcccgagaagtcgtgcccccgtgatctcgaggacaggtccgcctgcgtgcccgagggctgttctctcagccgagggttgttcctctccagagcagaacccggcagccgcaggggttgcctgggggcgtgcattgctcggccaccgcggtaggactgtgtgtggggct

SEQ ID NO: 776228 - DNA, 603 bp, Homo sapiens
aaaggccacttgatcccctttctaccgggcgcatgcctgggcaccactgtctgttcgccctcgccccacaatgctccggtgacatacattcacgccatctgctctggtatacgccagtgccaggcgtgatcgcattgtctccacctgggattcgccccgtccctgtctgcacgtgtcctggaaagcggtgtcggcttgcaggacscccagggcttttagaagcggccaggccaccgctctttcaaaggaggagggaggcagagggctcacggatcagtgaattttccgctgacagcaggccttgagggccatgggatcattctgtgctgcagcgagccctgctgcctcagcagatgtggtgagcccatcctttctcgcccagagtggtccaaaatcgcatctgaagaggagtcctgagaacccagcaggcgccctgaagctccccgtccatcggtggaagtcggctcaaggaggtcctgaagacgggactcctggggctcggccctgggacacccgtggccccctctcccacgcggccccaaactggaccccggatccagccgcagcctgcggctgcagcaggcgcgccccctgccgccgcgc

SEQ ID NO: 776229 - DNA, 614 bp, Homo sapiens
tggcactcagggaaaggccacttgatcccctttctaccgggcgcatgcctgggcaccactgtctgttcgccctcgccccacaatgctccggtgacatacattcacgccatctgctctggtatacgccagtgccaggcgtgatcgcattgtctccacctgggattcgccccgtccctgtctgcacgtgtcctggaaagcggtgtcggcttgcaggacgcccagggcttttagaagcggccaggccaccgctctttcaaaggaggagggaggcagagggctcacggatcagtgaattttccgctgacagcaggccttgagggccatgggatcatwctgtgctgcagcgagccctgctgcctcagcagatgtggtgagcccatcctttctcgcccagagtggtccaaaatcgcatctgaagaggagtcctgagaacccagcaggcgccctgaagctccccgtccatcggtggaagtcggctcaaggaggtcctgaagacgggactcctggggctcggccctgggacacccgtggccccctctcccacgcggccccaaactggaccccggatccagccgcagcctgcggctgcagcaggcgcgccccctgccgccgcg

SEQ ID NO: 776230 - DNA, 543 bp, Homo sapiens
cagcaatgttggtttctcccttgccccatatgcctccggtgacatacattcacgccatctgctctggtatatgccagtgccaggcgtgaccgcattgtcaccacctggcattcgccccgtccctgtctgcacgtgtcctggaaagcggtatcggcttgcaggagccccagggctttcagaagcgggccagttcactgctgtttcaaaggaggagggaggcagagggctcacgattcagtgaattttccactgacagcagccttgagggccatgggatcattctctgctgcagccaggccctgcctgcctcagcaaatgtggtgagcccctcctttctcacccggagtggtccaaaatsgcatctgaagaggagtcctgagaacccagcaggcgccctgaagctccccgtccatcggcggaagttggctcaaggaggtcctgaatacgggattcctgggggctttgcccggggacacccgcggccccttgtcacaggcgccccgaaactgtaccccggatccagccgcagccgtcgcagcgcgc

SEQ ID NO: 776231 - DNA, 547 bp, Homo sapiens
atcaagttttcccagaacaatttattggggagacagctttttctccagtagatattcttggtgcttttgttgacaattagttcatggtaaatatctggatttatttctgggttctttattttgctccactggtctatgtattcgtttttatgccagtattatgctgtgttagttactatagctttgtactatgtttttaagtcagatagtgtgattcctttagctttgttctttttgctcaaggctgttgtggctatgtgggtttttttcaaactaaaagcttctgtaaagcaaataaaacaatcaagagtgaagagacaacatatagaatgagagaaaatataarcaaataatatgttttataagagatctatatccaaaatatataaggaacttctataatgcaacaataaaaaacaagcaacccagttcaaaaaataaaaataaaataaagaacttgaatagacatctattaagagatacaaaagatatacaaatagacaataagcccatgaaaagatgctcaacatcattaatcattaggaaa

SEQ ID NO: 776232 - DNA, 541 bp, Homo sapiens
cgaggaaagttcatagccctaaacgcctacatcaaaaagactgaaagagcacaaactgacattccaaggtcacacctcaaggaattagagaaacaagaacaaaccaaatcaaaactcagcagaagaaaggaaataaacaagatcagagcagaactaaatgaaattgaaatagaaaaccactactaaaaaaaaaaaaaaaaagaaaagaaacaaaaagctggttcttttaaaagatgaataaaattggaaggacattaccaagattaaccaagaaaagaagagagacaacccaaataacctcattaagaaacaaaatgagagatattacaagggagtgacaccaytgaaatactatgaacataaactagaagagatgagtaaattcctagaaagacacaacccacctagtttaaatcaggaacaattagatatcctgaacagaccaataacaagcattgagattagaatggtaattaaaaaattatggtaaataaaaaattaccaacaaaagaagtccaggaccagaaggattcacagcaga

SEQ ID NO: 776233 - DNA, 557 bp, Homo sapiens
tctctggaacagtttaactagtatgggaattgtggtttgttcagtaggattctcctatgaaaccatgtatttttgatattaccttagcagtacaccattgtcagagttttctccatttttcgtggaaattaatctattttcgtttctattcctatgaagtcagattttggtaaataatattttgtcaaaatagtttacatttcatttagttttctatttatttgccttgagtttaccaaaacgaaactttctaacttaaaaaaaaagttgttatttttatatcagtgattgttttccccttatcataaccgtgtttgtttcttttgtgttttttctctttttttctcaggtaatttaatcttttatcaattttggagttcttcaaagaagkaatttgtttatttattgctgaattttagcttgaagtattctttcttttcttttccattaattggttatttttcaaccttttgttctaatttttagtttgatgcttaatttgttaacttttattattttttgtatattttatgaagatttaaaacaatatttcactt

SEQ ID NO: 776234 - DNA, 624 bp, Homo sapiens
aataaaatctaaactccttcacatgttacccagggcattgagcaacctcgtcccaagtcagctctctgtcctcagctcctgcctcgccccctgtcctcagggttacacttcagcctcgccgccctgcatgaggctgggtcggctcccctcagacaagtgctccttcctctgcaccaggctcttgtctctgtgcacagttctcagtgtaattaggcatataatgaatacttatgttgagcacgatastgctattttctaaaaggaataatgaatatatgaaataagttgttgaataaagagaatctactggggcatgtgaaattaaaatgttgccagaaggtcaaaattaattttggaaacattggtggaacagagagttttacacagagaaaactgagaaaataaaaactgcatgagttcaatgaataaaaagggcaaaacatctatccagaggtcttttgcctttgctggaattcattaacttttattttggcttcaactctttgaaaaagttctgcctagaggaattcgttaatttgaacttaatgtggcctgtggaggcaaagtgagatttggaggggcttcgaggctaagcagatgctggtaagagtccaagaccaccca

SEQ ID NO: 776235 - DNA, 624 bp, Homo sapiens
aataaaatctaaactccttcacatgttacccagggcattgagcaacctcgtcccaagtcagctctctgtcctcagctcctgcctcgccccctgtcctcagggttacacttcagcctcgccgccctgcatgaggctgggtcggctcccctcagacaagtgctccttcctctgcaccaggctcttgtctctgtgcacagttctcagtgtaattaggcatataatgaatacttatgttgagcacgatactgctattttctaaaaggaataatgaatatatgaaataagttgttgaayaaagagaatctactggggcatgtgaaattaaaatgttgccagaaggtcaaaattaattttggaaacattggtggaacagagagttttacacagagaaaactgagaaaataaaaactgcatgagttcaatgaataaaaagggcaaaacatctatccagaggtcttttgcctttgctggaattcattaacttttattttggcttcaactctttgaaaaagttctgcctagaggaattcgttaatttgaacttaatgtggcctgtggaggcaaagtgagatttggaggggcttcgaggctaagcagatgctggtaagagtccaagaccaccca

SEQ ID NO: 776236 - DNA, 320 bp, Homo sapiens
gaacaaggaattaaatgcaattaagttagagtcccatgtaaggctaagtctaatatgactatagtcgtgcaggtgagcattgtgttgggtgaaaaaacagaaacactgtgattagggcttcaagaaaacagttcattagacctgcagaagccacatcagggtaactctaccrcaagtaataatggtacatatccagggaatgtacaagggatacaaccacttagtatttactgtataagcagctcctaaactacaaatactaatatgctgcaaagactccatattcctaatgtaaaagacaaaggataaaagacttgttt

SEQ ID NO: 776237 - DNA, 610 bp, Homo sapiens
aaaaagaaagtcttagcaagaaagtagagaagttggaatcttgtgcactgctggtagcaatataaaatggtgcagccactgtggaagaccgtttggaagtttctcaaaagattaaacagagaactaccatatgacccaacaatcccacttttatccaaagtgggacttcaacagatgtttgagtagggttttccacagatattggtacaccagtgttcatagcaatggtatttgcaatagccgaaagatggaaacaatccaaatgtccaccaacagatgaataaaaaaatgtagtaaaaacatactaatggaatattatttagccatagaaaagaatggaattttgatatatgttacaatgtgaatggactttgaaaacattatgcttagtgaaataatccagasatagaaaaatattgttttgcttcacttattaggtacctagaataggaaaatttgtagagacagaaagtagaatacaggttaacaacagctgggggctgaagagaagttattgtttaatgagtacagagtttttgttggggataatgaaaacattttgtatatataagatagtagtggttgttacacaacattataatgtatttaa

SEQ ID NO: 776238 - DNA, 607 bp, Homo sapiens
caacaggcccacacaacagtgtgtgttattcccttccctgtgtccatgtcttctcactgttcagctcccacttataagtgagaacatgcagtgtttggttttctattcccattagcttgctgaggagaatggcttccagctccatccatgtccctgcaaaggatgtgatcttgttcctttttatggctgcatagtattccatggtatatatgtaccacattttctttatccagcctatcattaatgggcatttgggttgatttcatgactttgctattgtgagtggtgctgcaatgaacatatatgtgcatgtatctttgaaacagaatgatttatattcctttgggtatatagccagtaatgggattgctgggtcaaatggtatttctggctctagatctttggggaatcaccacaccaccttccacagtggktgaactaatttacattcccaccaacagtgtaaaagtattcctatttctccgcaaccttagcagcatctgttgtttcttgactttttaataattgccattctgactggtgtgagatggtatctcactgtggttttgattgcatttctctaacgatcagtgatgttgagctttac

SEQ ID NO: 776239 - DNA, 645 bp, Homo sapiens
tcaatgaatgccagatattaccataatagatttttattcttcccaacaccactacttaggcatgggtcatactgacaaaagcattttaatatttataaatcaccatttgtgatcattcatgttttcaatcaagaaggcamctttcttcataagtaatgaatggggcattaggaaatttttaagtagaaagaaaaatcatgtttttaaggctgattgtttccgtagttgtgagaaaatggtctgatatgaatacaaactagtgccgaggaaagcaattaggagatgaagaagaatcaaaaactgagttcgttagtgggacagtaaatacagggaggagcccaattctggaaatgtgactagaatggaaactaaaagagtagtaccttggaatctgcagaaggaggaagtagataatttaaagaaggaggtaaaagaccacagagtgctgaagagaagttgagtacaatgaggaatgaaaaactaacctttgaactttgcaataaggaggtaactggtgacattaccatcaaccgttgcatttgagttggaaggaatggttaaggaagaaacaggagttgagtagtgttatttttttcaagaagtctaattctaattctaattcttctaaagaaaagaagaaaggac

SEQ ID NO: 776240 - DNA, 649 bp, Homo sapiens
attctctcttggttcacctccctgttttgcagcttcttggctgattcctacaactctgtaggtccttgtaagcgtaatttccagaggcttattcttttcttttcttttctttattttcctcttgcattatgaattttagctaaagcactttgtctcatgtttcagctgctatatttatgtttgtgattctttaatctgcactttaagctatcttctctttcctaagatacaaacccatacttttatgctaatgttctacagcacctcaaacttggtaagttcaaaataagcttatttttttcttccccaaacatgttcttactcctttattcgttattttagctgtgtgtamatgagtttagtgttgagtatgaaaactgttttgttgtgttaggctggatagcagagaggggatgagctattattcatagcagtgccaggaatgaaatattccttagtgaatataaattaacttttcttcaatttttaaaatcggaacagtttggatttttttagatgctaatattgggacatatggagtaagatggcatattgacactgctcacaggaccacacttcagaacacaaacctactgaaaataaagaagaaaacataatgtcaaacaatctatcagtagcattccaacaa

SEQ ID NO: 776241 - DNA, 578 bp, Homo sapiens
tgaacatttcacacatttgccttctcaattcaagaaccagccaacatttctgctcttttgaaacttgttttacatattggagttctagcctattggtccttcttgctttccaggtttttcaaactaatattgtttcgtacttaaagcactgtatgcattctggacgctctgagaaagcagagtagggcaggatgctacaacagagaagtacccactgtaaatacttctgctgctttgggtcagtttccttgggactcccaggaagatgctctttgtctcaacatagtggtcaggatggcaagagcatgaggtgctgggacacttggcttccgccactccttggtaagaagattgcttccagtacaccatctatggagatgattctttccttragctgccagcacctatcttcaggccaaaggagtatttctggattctcacaagcttatataatatgcatatttgtatatatgtatgtgtgtatacatatgtatatatgtgtatatgaaataatttttaaatactggattatttttccttctctatattttcatgccccagagtataaaaataaaaac

SEQ ID NO: 776242 - DNA, 610 bp, Homo sapiens
atacactgggaaaaagacagtcttttcaataaatggtgcttggaaaactggatatccatacgcagaagaaagaaatgagacccctacctttcaccatatacaaaattcaaatcaaaatggattaaagacttaaatctaagaccccaaaccatgaaactactacaataaaacattagggaaactctccaggacattggcccaggcaaaaatttcttgagcaatatttcacaagcccaggtaaccaaagcaaacatagatgaatgggatcacatcaagtttttytgtacagcaaagaatacaatcaacaaagtgaaaaggcaatcaacagaatgagagaaaatattttaaaaccacccatatgatgagggattaatcatcagaatatataaggagctcaaataattctctaggaaaacatctaataacccaatcaaaacatgggcaaaagatttgaatagacatttctctaaagaaggcatacaaatggcaaacaagcatgtgaaaggtgctcaacgccactgatcatcagagaaatgcaaatcaaaactacaacgagatatcatgtcactccagttaaaaagccttatatctaaaagacaggcaataataa

SEQ ID NO: 776243 - DNA, 673 bp, Homo sapiens
gaagttaactttgcaatttggtttttagaaaacatattcagatgggactgtgactgaatttgagaagtaattcaaacggatacaatgacttgagactttataatcctgaatttggggagaaggtgatgctcgcctgttttatatgctgaatagttgcattttgttgggaggaaatgaattgttttgtggttgtataaaagttcaaatttttgtggagcagtgtaatggatgctaaatagccaaaggggtggrctgtatcagttattgcctctcagttctaaacccaaccttctatagtctgctttgtgatcctagagaccggaccctaaaaaccacatttctgcattgccagttggctctgccaataggggcactagctggagacttcaaagctggaggcagaaaaaggggttttctccttcctatatgcttcctgagggtttcccgtctgcttgtggttcctgtgagtgttaccccagagaagctccttcatcataactttttttttcccttgtagcagcagctaaatctagttttcagtttttctgacttgcagaatcagcttcagcatgtgtcccttggggacaccagcaatagccagccagtgtctcttctgcagagatttggatcctaataccctggatccctccctgtgaactaagacaacaagcac

SEQ ID NO: 776244 - DNA, 703 bp, Homo sapiens
aacagttgaagtcaggactctgaagtcattctctactctggccaacaactttgttctcatcgtgtcacaactgcaacccagtgtgagtagcacacgctctggatactggcagctctgggttcaagtctaggtctgcttccaatctgctgggtgaccctctgcaaagtcctccacctccctgggcttcagtttgttatctgtaaaatggggatgatcactcctgcctggcaggattgctgcgagaattaaaggaggyagcccctttcacaaggtgggagtttggtattggttaccttggggaatgcaggattcagccctgggctctcaggctttgggagaccctgtggcatcagcaggaaaactgagagggagtttgcatctgctcctatctaaaaattggcacaacttcttttcccatgttatgtagcaagaaaatgagatgttttccatcagagacagtgcacacaggcggtttctgctattccggagagcattcaaacaggtaaggccaagagctgagagcttgcccatccagcagaatagactagtctgcaccatcacacgagggcgcctcagagacccaatgcagaatgtaatgcaggggacaccatcagctttgctccaaagccccctgacttagcaggagcacagttatatttgcagaagcatcgtaaactaagtggtcttttttcttccagttttc

SEQ ID NO: 776245 - DNA, 630 bp, Homo sapiens
  misc_feature 594, 595, 596, 597, 598, 599, 600, 601, 602, 603, 604, 605,606, 607, 608, 609, 610, 611, 612, 613, 614, 615, 616, 617,618, 619, 620, 621, 622, 623, 624, 625, 626, 627, 628, 629,630: n = A,T,C or G
tttgaaatgtggacatggctgggtgagaacagtgggcctctactttactgtggcattggctgagcttaaagaacagctgtggactggcacaatgaggttcctctagcacaactctgagagtcttgtcagcttttctcatggcttcctgccgcctcctccccaccccgctttcaaacactgcccatattgaccaacatgtgtttcccacaatgtgccatcattgaccatctctagggctccatccagtgtgcctgtccttttccatgaatcctcaaagactcagccaaggtgtcacctctacctaggagccttccctgatatcccctgcccccacacaacttggtttgcattactgtctctctactgtgttccacagcatgctttatttccccttttcaaagcacttmtaccactgtaatggattatcctctttgtttgcctgtctttcccatgagatcctcagctcttcaggggatgaaattgttgtcatttcgcattcccagatcatagcatagtgtgtaagatacagtgggtgctcaaactgacgaatcaatgagtgatatgatgatgacaggttctggaagttaacatgannnnnnnnnnnnnnnnnnnnnnnnnnnnnnnnnnnnn

SEQ ID NO: 776246 - DNA, 536 bp, Homo sapiens
aattttccagctgtgatatatgataaattatcaacacagggcctacgtgtcaggtagaaaaccacatctactcatagtgggttatctggaacaggctttacctcccaagggcctcagaaagcctctctcttctgttcccacagccatctccacgaagagtcccatatttggtcccgaggaggtgaatagtgtggaaggtaactcagtgtccatcacgtgctactacccacccacctctgtcaaccggcacacccggaagtactggtgccggcagggagctagaggtggctgcataaccctcatctcctcggagggstacgtctccagcaaatatgcaggcagggctaacctcaccaacttcccggagaacggcacatttgtggtgaacattgcccagctgagccaggatgactccgggcgctacaagtgtggcctgggcatcaatagccgaggcctgtcctttgatgtcagcctggaggtcagccagggtaaggatccaagctccttgggcttctgggggaaagttagagggaatt

SEQ ID NO: 776247 - DNA, 609 bp, Homo sapiens
agcaaatagtcctatgttgcaagaaagtagaatcgtaacttgcctgccccctaccttgcacccctcatcctgcaggtcctgggctcctaaatgacactaaagtctacacagtggacctgggcagaacggtgaccatcaactgccctttcaagactgagaatgctcaaaagaggaagtccttgtacaagcagataggcctgtaccctgtgctggtcatcgactccagtggttatgtgaatcccaactatacaggaagaatacgccttgatattcagggtactggycagttactgttcagcgttgtcatcaaccaactcaggctcagcgatgctgggcagtatctctgccaggctggggatgattccaatagtaataagaagaatgctgacctccaagtgctaaagcccgagcccgagctggtttatgaagacctgaggggctcagtgaccttccactgtgccctgggccctgaggtggcaaacgtggccaaatttctgtgccgacagagcagtggggaaaactgtgacgtggtcgtcaacaccctggggaagagggccccagcctttgagggcaggatcctgctcaacccccaggacaaggatggctcat

SEQ ID NO: 776248 - DNA, 591 bp, Homo sapiens
cattacagtccattccaatagattccattcctttgccttccattcgaatccattccattctagtccattccatttgagtcaattccattccattccattctattcctttccaatccattcgattccattcgattcaattccatttgattctctttcattctattttattccatgccatttgattgcattgcattccattccgtttgattccaatccatycaagaaagttccattccagtccattgctttccagtccattccattccactctagtctattccactccattcccttccattgcattccatactattccattccattcctttgcattccgtttccaatctcttcgagtccattgcattccagtccaatccattcgattacattccttttgattccctgccagtcgattgcattgcatactacaccattccaaaggagttcattccattctatctccacactttccattccactctgtttgagtccattccattccagtccatttaattcaagggcattccattccattccattccattccatttcatattattccattccattcaattccattccagatgattc

SEQ ID NO: 776249 - DNA, 531 bp, Homo sapiens
ggattcgagtggaatggaattgaatataatggagtcgaatgaaatggaattgaaaggaatgggatcgaatacaatggaatatactggaatgtaacgtaatgaactcgaatgtaattgactggaatggaatgtacatgaatggaatgtaatcgaatggaaagtaatccaatggaatagaatctaatgcaataaaatcgactcagatagagtagaatgtaatggaatggagtgcagtgcaatggaatggaatggaatggaatgcaatggaatggaatggaatggaatggaatggaatggaatggaatgggatggaatggtatggaatggayagtaatggactggagtgaaatggactggaaaggaatggactcaaattgaaagggctcgaaaggaatggagtcaaatggaatggtctggaatggaatgaacacgaatgtaatgcaacccaatagaatggaatcgaatggcatggaatataaagaaatggaatcgaagagaatggaaacaaatggaatggaattgaatggaatg

SEQ ID NO: 776250 - DNA, 366 bp, Homo sapiens
ttctcgaaaaaaatggaatcgaatggaatggaattgaatggaacggaatagagtcgaatggaattgaatggaatggaatggactagagtgaaatggaatcgaaccacaaggaatggacaggaatagaatggtctcgaattgaatggaatcgtatggaatggcatcaaacggaatggaatggacagccacggaatggaatgcactcgaawgcaatggagtcgaaactaatggactggaatagaatggactcgactggtacggactccaatggaatggaatcgaatggaagggaatcgaacggaagggaatcgaacggaatggactcgaagggaaaagactgcaatggaaaggtctcgaatggaatgg

SEQ ID NO: 776251 - DNA, 569 bp, Homo sapiens
tgtggcgcatagccagaagtagcatctgacttgagagcacaagaagcaacccagtccagctggcaagatcaacaccaaggtctgcctgtttgaggttactaccagctggtccatccagaattcctggctagataaaatggtgaargtctattaccaccaaagaacatctgaaaaggccaaaaaagatggctgtctcctccaacgtgcagacaccaacacaaggatacaaggattttgaaaaatcaggaaaatatgacgccagcaaaaagaccctaataaagcttcaataatgatctcaagaagaaatggagatctatagtgactgatggaaaatttagaattattctcttaaagaagtttagaaatatccagaaaaatatggattacaaaattaaatttgcaaaataattgatgaacaaaataaatttgacaaaaaaatagaaacaaaaagttctagaggtaaaaaaccagcaacttcactggaaagtattatcagcagactttatcaagcagaagaaagagtcagtaaattcaagcatagaatatttgaaattatgcagtttaaggga

SEQ ID NO: 776252 - DNA, 528 bp, Homo sapiens
agggcatggttagtttcatatgtccacaggccttaccagttgtaaagttggcaagtcaaatagttatcaaaaccaaaaaagcagtttgtaaccttaagaccattagcaaaccttgcatctgacctgcagaatttagtccaactatttacattttaatgagtttgtaaccttaagaccattagcaaaccttgcatctgacctgcagaatttagtccaactatttacattttaatgacacctgcattttaccaataatctttaaggctgtttttatttctcaaaggttaaaatcatgrgaactgaaaggtattacagcttttatcttctctttaaaaaaatttgatccaagggcttgtctttctttaggcctaattaattaaagctttttttgcagacattatacaaagcacacagacaggccagagaaagcccagtccccagaacaccctttttcacaaccaaaactttacagagaatataaacagggatccttatatttcctagcccagtgaaccatcttcttaaagg

SEQ ID NO: 776253 - DNA, 638 bp, Homo sapiens
ccttaggtggatcctccaaactgggaaaagttaatttcccaaaccttaaactggttggcttaggatcgggctcaggggaaggaaacccagaagcctgacatgctggcaaaacggtaaatttttttttttttttttttttttaaccagtcgaggttttggcctccctctctccatgcaaagtgatataaggcctctggattttttagctatccttacctctcctcttgtttcattttgatacatgttttctaatgacccagtttgtctcttctcgccttcaggccatcaaactccaaaaggtcatgcaaccagagcctcaaaaaattgccctttctgctagggacccttagataggcctctgagggagctctgactgccattttccccaaaacagcgcckcctgtcagcagaaagcagttaagactggtctttgtttttatccttacccttattccaattggcagttacatgtacttctttaaagcgattaatgagactgccaagtaaaaagggctccctggagaatcttcagccagcctgagcactgggagaatggggtgaagacttgggaattcacaccatttgctggggagaggagcctggcctctcttgttcttgggtggtaacctgggatttgg

SEQ ID NO: 776254 - DNA, 587 bp, Homo sapiens
atacagtggtgaagtatcatgatgcttgcaagctgtttcccaatgattcaatccaaaaaatatatatggggtgagggggaggcagatatgacaaaaacattaataactggtgaatcttgaagaaggtgctcatattttatgtgctttcattacactagtcttttacatttatatagatttgaaatttttcaaaataaaacgatggggagagaaaacagttaatttttttaaagatttagacatttaattggcctaaacttcagttatgtggaaaatccatatattcatatagaacaacttactatagacaaatgagggtttttttttaacatgttcacccattacttactttaaagaaaatggttcagctaaggcttacctacttttttctttttaaaacagcctaggrtaatttgaaatgctgaaacaatcattttcttgacctcaactccattattgagccctggctaactttggctgatgatataaagcaaaaatatatgcagcaaaaattgactgcccaagagaaatggacaaatctgccatcatagtgatatgagtatccttctctctgtaattgacagatc

SEQ ID NO: 776255 - DNA, 607 bp, Homo sapiens
tatttattgaataggtaatacataaatttaacacatttcaaaggtatgaaagggtacagagtgaacagtaagcctcccttattgctctgacccagaaacaatcactcttgccggtttttctgatcctcctaaaggtattagatgcatcaactaatattcmtttttctatcctccacaaaattgtagtaccctctacaccatgttatatcttgctttattctcctcacaatatatctgaggctctctcagcacattcagagctaccctgcaggttttttagcagccacacagcaatccagtgaaggaggcaccattgttgagttagcctctcctttaccgaggctatgtaggaggactgcaagcaaaacagcagtgaatatccttgtacgcacaaaattttgcaaatctatgattgtctgtaatgcaaactttggttttcttctttatattatgtctgattacaatagtcatacatgcttacaggaaaatatttgcagaaatatatgacgcagaatgtggaagtactcaagaatctcacctttcataaccactatggctattcatttgtccagatgatttctaatctagaataattgaaaaagaaggg

SEQ ID NO: 776256 - DNA, 587 bp, Homo sapiens
ctgcctgccccaaccacaaggagaaaaccaagctccgtagtaaagagcagaagacttttgacaagcagccagacctcctgaataatttctaacacagaatcttccctaggcagcatgctatccctatccagagatcaaaacggatctaggtcatttgaggaagtagccaggcaaaggatattgaagagctgcagtaaaacggaatgttaattatgcagctaggaaggacaattttttatagtaaaaaaaaaaaagcaaattatgtatagactagatagatacatacatacaaatgtgcatatgtatgtacctatatgtgtatatcatatgtataagaaattatttaattttaaattgaggatttttttttcaacagcaagagaaggagctacctgtaaactaaaatacctgaaaacttacagttcaggatgtgtaaccagcaggaattaygatcacttttctctttcctcatcacctccccttgccaaaaactatgtatgtacacatagacataaatatatcatttattacttatagaataatgcaattgaattattttgtctaaaaggcactttaagtatttcaga

SEQ ID NO: 776257 - DNA, 611 bp, Homo sapiens
agacacagctcttactgggggaggcagagatggcacagcaagggacatgcccccagaatgccaccaatgccccaggacaggcccacccatgggaccaggttatcagggaccctgtggggatgaggtggaacctggggggtgagccttcttcccaggctgggggtcagcaagacgagactagcacctctacatctgagtgccccccaaacccagcagtcatgctgtgagcaaagaaattacattactagtgtgattctagttgatccacaatttcytggttgtgctgtttccttgggagagtcaaaggaaggtgaccaagggtggccccctccactctattccccaggccatgaagcagtaggcaggggccaggagtggattttaaaggcaaagttatcagacccactaggaccatgaactggtaaactctcctcaagctcccaaggacagaggatttgggactttgttggttttggcccacagccacagaactgaaagtctgaatctggattctctcaaaaggacagtaacataaagctctatgaggcaggaaaataaggtctggaggcagggaatctaagactgtttcgcgctgatttcctagaatcaaa

SEQ ID NO: 776258 - DNA, 569 bp, Homo sapiens
tattttaattatggttcaattctaagcattttaaaatttcatttgattttttaaactatgatttacaaggatgtttaatttctaaattcatgtagatttttgttaatctcttcattattgccttctaaccttaattgcttcatatttaaattataaattacatggtgtgtatggtaccaattgtttttaaatcttctgaattgctttatggattaatacataattaatttttctcccatagtccatatatgcttgagaagaatatataatatctaattattgggtacagaggtctatatttgtccattataccatgcccgttaaatggttattcaaatctacatatggacattctgtttaacttatttatggtaagcagggtatgttgaaatctctaaatatgataatggacttgtcaatttcytcctgcggttttatcagtttttcctctgtattttgaggctattttgataggtacataaaatacaaaaattgctacatcctcctaattaacagacttttatcatcacattgttactaatgctttctgttccaaaatcctattttgt

SEQ ID NO: 776259 - DNA, 569 bp, Homo sapiens
tattttaattatggttcaattctaagcattttaaaatttcatttgattttttaaactatgatttacaaggatgtttaatttctaaattcatgtagatttttgttaatctcttcattattgccttctaaccttaattgcttcatatttaaattataaattacatggtgtgtatggtaccaattgtttttaaatcttctgaattgctttatggattaatacataattaatttttctcccatagtccatatatgcttgagaagaatatataatatctaattattgggtacagaggtctatatttgtccattataccatgcccgttaaatggttattcaaatctacatatggacattctgtttaacttatttatggtaagcagggtatgttgaaatctctaaatatgataatggacttgtcaatttccycctgcggttttatcagtttttcctctgtattttgaggctattttgataggtacataaaatacaaaaattgctacatcctcctaattaacagacttttatcatcacattgttactaatgctttctgttccaaaatcctattttgt

SEQ ID NO: 776260 - DNA, 587 bp, Homo sapiens
ttgaaactcttttgtatgtaatttgcttttttcttgctgcttttaggatcctttctttatctttgatctttgtagtttgattattaaatgccttgagggggtcttctttgggttaaacctacttgctgttctatacccttcttgtacttgaatattggtatctctctctaggtttgtaaagttctttgttattattcctttgaataaactttctacccatatctctctctctacctcctctttaagatcaatmactcttacatttgcccatttgaggatattttttacatcttggaggcatgctttgttctttttaattctcttttatttcgtctgctctgactgtattttcaaatagcctgtcttcaagctcaataattgtttcttctgctttatccgttctgccattgagagactctgatgcattcttcagtatgtcagttaaagttttcacctccaaaatttctgcttgattttttaacatttttcaatctgtttgttaaatttatctgataggattcagaattccttctctatgttatagtgaatttaatttagcttcctcaaaacagctattttgaaatctc

SEQ ID NO: 776261 - DNA, 594 bp, Homo sapiens
  misc_feature 562: n = A,T,C or G
tataaatattatatatcaataaaaaaatagtgtggctggacttcaagtggcctgacttggttttatggccaccatagagattagtaattgcaactttggaaagaatttctagtattatttcccgggaagaccaaatctgaaacaaacattttagggggcttgcaaacccagaaaaataatagtgaaggaaaaggcagcatgggaagaaagaaagaaaggcaaatgaccaaactggcaaaagcatcatcataaaatacagctgatttctcatcaagcagcatttctcaaacaagactttatgaaaacataggacctcagaataattactagaagtggaagagaatttattcaccagytcctttccatctcctatctctcatgagtcaacgtttaccccattgggatattagctatccccactcttccaggttttattccctggcctctgaaggccgctcctggtaaggctggatcagtgtcagagtagcagcagcatcacccacacatgccataaactgcacagtgagtcagcgagaaaaattgccgagtggcagtatttatntgctggctggaagctgacaatgtcattaatct

SEQ ID NO: 776262 - DNA, 561 bp, Homo sapiens
  misc_feature 210: n = A,T,C or G
cagctcctttccatctcctatctctcatgagtcaacgtttaccccattgggatattagctatccccactcttccaggttttattccctggcctctgaaggccgctcctggtaaggctggatcagtgtcagagtagcagcagcatcacccacacatgccataaactgcacagtgagtcagcgagaaaaattgccgagtggcagtatttatntgctggctggaagctgacaatgtcattaatctgataaggtgggctatatcatgggttctgagaaggtcctgcggtgtattgaaccttagtagtgagtaagcatggaatggatggcataaatgaggtgtgcacagtgagaggcatgagactatstgactggactctgagcaatatgggggcaggttgctgcatcagactgagttgaagaaaatataagagtgctaaaatgatataatgtatgccatgatggtgctgacagagcactatgagcttctctgcagtaaacagaaaagtcatcgttctatggcctataagattgtgatcagttcagaccttcctggaatgccaatc

SEQ ID NO: 776263 - DNA, 624 bp, Homo sapiens
tctcggggaattcactgaagtgtgaattcaatgactgtgaggctcacagagacacaggcagtgtagatgccacctgtgcattgtgatgggaggaaaaacagactttataacatggtgcaaaatattccaggtaagaaaagatcatctatttctggaagttattcagatayggttgataaaatccaatgaaagatccagacaatagtcagtatataaaaaattataatcataagttctcacaaggactgagctagaaagcagggtgtggagtgagtctgagaagagaaacaatggaagaataaaagtttataaggctgcccttatttcaagattcagtaatactgttttggttttattgcaattattccatgctaaatttttatttttttttcaagtgatgatgattttaagaattttggatttagcacagagttgaggtatgcacagtgtacatacatgtatacattctgattcaaagtcatgttataagtttagaaagaacacaaacaagggtttaaactattctaataagttccatattctgtaataaaagtcattttgcttccattaattaacacctgctaagtacagattagttaacctatctaaaaatgagggtttttg

SEQ ID NO: 776264 - DNA, 609 bp, Homo sapiens
aaattctgatatggttcagtgtccgttatcagtaataattataattgtttatattaaattattgtgtgccacggaagtaacaagtttccttgtcaattgtgtctttggctatggctgccctgaaacttttgtcattcatggacgattgttgtcttgttttggtcctccttagaaggtggttttataatcagcaataaaactctaacaggtrcacataactcagattgctgctatataatcgtagagcagggttattatgggtagtactgcatctaccccagagaatgaaatccagagaagtccttctcctgcttgccaggcactctcagaactcaaccttgttctggagcagacaccattgccatcaatgtgccgtaggcacattccttctgagaagaagctattgttttcagaggccagcagtaatgagtaaagaaaactggacaatgatttccatttcaatattcttttaatctagcacccaacataaagattttccttgtgctttttaagtgccaggtgttaaagaatccttaatctggttgattcatgaaagctgattagataattcaaaaattattgaaatgtgtccataaaagtcacactaca

SEQ ID NO: 776265 - DNA, 602 bp, Homo sapiens
aaataattcatttaaatactccccactcaaaaaggtggtgcctatctctctactccttaaattagggttgtacttggtaacttgcttctgaagactaaagtatgaaacaggagaaacaagtaatttcaaaagaggttaggaaattgatgtggaggtcagagtggaagcaggtgtaagaggttccagcctggctgccaaagtgtttgaattcatctgcaagctctgcctgcccttagctattgcaggaagcgtggtgaactctgccrtatataatgtggatgctgaacacagagttgtcatcttcgacctgttccatggagtacaggacactgtggtaggagaagggactcactttctctcctcatggatacagaaagaaaccaggtatctttgactgcggctctcgaccatgcaatgtgccattcatcactggtagcaaagtagagagaatgtcagcatctctgcgcatcctcttcccacctgtcacaggccagcttcttcacatccttaccagcgctggagaggactgtgatgagcacgtgctgtggtccatatgattcaattatctcccactgggttcctcccacaatgcatgggaatta

SEQ ID NO: 776266 - DNA, 541 bp, Homo sapiens
tgcatttcgtttctccctgttaggttgttcctctcctactatcacctcatgctgatatatgatggtggcatatggctacttcagtggtgaggacactgaagcctagcaaggtcacgtgttccagggtctcactgatgcccgggaacaagggagagaagagatttgaggagcagtggtcacaactccagaggattacatctaataaaatgttttatttgtgaaggcaatgagagaccttcacagcagatgcaaagatccagcaaaaagataggctgaagagcactggccagctatgggaaaataaaaattccaacagggaactgcctgcagtttctgcctccagcttcatgttcaraagtgggacccatagattatttggctagaacaacattcttcacataaacactaacgaaaaagtactcaacttatgggtccagtgaaaataagaatgtaaaagtaagtaaatcagaggaaaatgcattgcaagtaaataccttattttaaataacagtgggctaaaatagtgtgtagcatattgtaa

SEQ ID NO: 776267 - DNA, 649 bp, Homo sapiens
gttgtctctagagagggggtaatttgacttcctcttttccagtttggattccttttatttctttttcttgcctgattgctctggctagaatttccagtactttgttgactaggagcagtagatgtgtgcacccttgttgtactccaattcttaaaggaaaggctttcaacttttcctcactctgtataaggttagctgtgggttgtcatatatggcctttattagtttccttttatgyctagtttgttgagagtttttattatgaaaggatgctgaatttcatcaaatgctttttctgtgtctactaagatgaccatgtgggttttgtccttcattctgtttatgtgatataccacatttattaatttacatatgttgaatcagccttgcatacctggtataaatatcaagtatgatgatggctgtttttggtctgatgttggattttgtttgctactattttgttgagaatttttgtgtctatgttcatcagggatagtgacctgtagttttctttgttgttacaccttgtctggtcttggcatcatggtaatgctggcctcatagaatgagtatggtgaattgctcctctttaatttactgaaatagtttgaggtgaattggtattagttgtttttttgcacttggt

SEQ ID NO: 776268 - DNA, 568 bp, Homo sapiens
aagcccatcagattcaaatagcaagcatggatgaaaatgaaagattgaaaggcttgagtgccttcttaatgtattaaatatccatttaatttacaattaagctcactgtgctcactggccttttaatcagctttccaggtcctgctcagacttgcctaggacatgggaatgaaagaacctataaatttatggaccaatctaccttaactaacttgtcaagtgttcctgcatcaagcagaagaaacatcagtgaaactgatacaggaattaaccccttgttaatccataaaacttaaagragcgggatccaatcttctggcttccctgggccacgctggaagaagaattgtcttgcgccacacataaaatacacgaacactaataatagctgctaagctttaaaaaaattgcaaaaaaggaaaatctcataattttttgtttgttgtgaggtggagcctcactctgtcacccaggccggagtgcagtggcaccatcttggctcactgcaacctctgcctcctgggttcaagccattctcctgcctcagcctcccgagtagctgggatga

SEQ ID NO: 776269 - DNA, 625 bp, Homo sapiens
aatgcttttatgataagaaaatttctaaacccaaggtagtacagtcttacatcttttgcaaatttctttgatgtttgatatgtcatttgtacctgcattcaatttattgtgtgatatttgcttgaaaaaatgtgaacaaaggacagtctcatacagataggcatttcagatcattgtggatatttcttttttctttctttctttttttttttttttttttgagatggggtctttctctgtctcccaggctggaatgcagtgctatgatcacggctcactggagcctcattctctggggactcaggtgatcctcccacctcagcctcyagagtagctgggactacaggtgtgtactaccccaccttgctaattttttgtattttttgtagagatagggttttgccataggtattcaaatagaaagttttgtttttgttttagtatataaagaaatataactttccatgttggaaaaatttttaaaacctttttttaattttaaaactcataagcaaccattgttgagaaaattggtaaagtacagaaaagataaaagaaaaaaattaaagtctcccataatttctctatctaatataaccactattgactgttgacatgatggtca

SEQ ID NO: 776270 - DNA, 572 bp, Homo sapiens
gcccaaggaacatctcaccaattttaaatcaggtaagtggcctcctcttactctcttctccaacctctctcactatccctcaaccactttctccttcaatcttggcgtcacccttcaatctctcccttctcttaatttcaattcctttcattttctggtagagacaaaggagacacgttttatctgtggattatccatggacccaaaactccggtgtccatcamggacttgggaaggcagacttcccttggtgtttaatcattgcagggatgcttttctgattattcacccacgtttcagaggtgtctgaccacgcagggatgtctgccttggtccttcacccttagcgccaagtcccgcttttctggcagagggccaagaactccaaccccttcactccgtgtctctaccccttctctgcttttctgggtggcaagaacccctgatcccttatttccatgccccaacccctgatctctgcaccctgatcccttattttcatgccctgacctcttatttctgcaccccaaccccttatttccataccccgacccctttcccacttttctgga

SEQ ID NO: 776271 - DNA, 621 bp, Homo sapiens
attttgcgattaacattgtacttatacattctactctggcttctgacacccagacaaattttatttgcaaatcatttatagtaatttctatttttgcatttgttatgtataaaagagaaaaagaacaaataaaaagattccactcatttatgttacccaatgagttaccattagtgctttaatgttttgatttaccaaataaacaaccacagacttcctcatcatcaaagattaagaaattattttacctttttcaagtgccatacctgaaccagatgatgagtgccagtagtttaatgtaatawgtagtcaattattaattaaacctagttcttctagcaaattaactactttgcaagaacatctgtagcagtattgatataaggtcccagttcatttgattatcagtatcagcactaccatgggttttgttacaatcaaattaagctaaccaattacaccagtatcacatcaaataacagttaattagaatagtagtattgtaaaataaaaagcttaaattcagtagaatttctcaaatccttcccaataaaaccaccctttatgtacagcaaacattagtataaatcaacagtaaagactccgttaattctgaacttc

SEQ ID NO: 776272 - DNA, 639 bp, Homo sapiens
ccttatcaacaaaattgttttgcctatccaccccatgatgccaaacccatatactctcctatcctcaatacctccctccacaacccattattctgttctagatctcaaacatgctttctttactattcctttgcacccttcaccccagcctctcttkgctttcacttagactgaccctgacacccatcaggctcagcaaattacctgggctgtactgccgcaaggcttcacagacagcccccattacttcagtcaagcccagatttcttcctcatctgttacctatctcggcataattctcataaaaacacacgtgctctccctgtggatcatgtccagctgatctctcaaacccccaacacctacaaaacaacaactcctttccttcctaggcatggttagatactttcgactttagatacctggttttgccatcctaacaaaaccattatataaactcacaaaaagaaacctagctgacccccatagatcctaaatcttttcccccactcctcttttccgtttccttgaagacagctttagagactgccccgaccctagctctccctgactcatctcaacccttttcattacacacagctgaagtgcagggctgtgcagtcagaattcttacaaaag

SEQ ID NO: 776273 - DNA, 639 bp, Homo sapiens
ccttatcaacaaaattgttttgcctatccaccccatgatgccaaacccatatactctcctatcctcaatacctccctccacaacccattattctgttctagatctcaaacatgctttctttactattcctttgcacccttcaccccagcctctcttggctttcrcttagactgaccctgacacccatcaggctcagcaaattacctgggctgtactgccgcaaggcttcacagacagcccccattacttcagtcaagcccagatttcttcctcatctgttacctatctcggcataattctcataaaaacacacgtgctctccctgtggatcatgtccagctgatctctcaaacccccaacacctacaaaacaacaactcctttccttcctaggcatggttagatactttcgactttagatacctggttttgccatcctaacaaaaccattatataaactcacaaaaagaaacctagctgacccccatagatcctaaatcttttcccccactcctcttttccgtttccttgaagacagctttagagactgccccgaccctagctctccctgactcatctcaacccttttcattacacacagctgaagtgcagggctgtgcagtcagaattcttacaaaag

SEQ ID NO: 776274 - DNA, 583 bp, Homo sapiens
atcgcttgtatttgtccttcctctattcctaatcctaaacccaatctcacaatcaagtctccaccaaggaggttagttcctgcttcaggaatatataagagtgacatctcaatttgttctgatgtcaacctaattaccattttttgaatatcagaatgtgaaatcccttttactcctgatacwgccaatttttccttagagagttctgtaccccttggttggtgaattagggaggtgtgagccacctcaatatcaaccaaaaatgtcacttcttctcccttaggtcccaccttcaaatttatcaaagattcctggtgggacctgcttagaagaaacccctgaccatactagtcttcatcaatggtcatgaggggtatcaccttttcttctttctcccattcagaaaattctctcttaaaatgtcctggctttccacacttgtaacatctactcatagtcttaggagctcgtcccagcatttcccttctttctctgtgtcaaaatctgtcattcccttgtctccttcaaggaggctgttgatctaacctttttctgcctacctcttgcacagtcgaaacaatga

SEQ ID NO: 776275 - DNA, 701 bp, Homo sapiens
atattttgaaaaaaaaattgaggctgcttctttgaaccatgtgctacttagaaagtacatgcttcatctccaaatattgatgatattccagttatttccagttgttagtttctagttttctagtgtaatgcygttgtagtctaagagcatactgttaaaagaaaaacttcagccaaattaaattaaagagttgaattgaacaatgaatgatttgttaattgggcagcctcttaagccagattaggctcagagactccagcacagccaagtggtgggagaaaatttatggatagaaaaaggaaagtgagatacagaaaatggaagtgaggtacagaaatggctggatgggttatgaatcaacatttgccttatttgaacatgatttgtacagttggctgtatttgattggccaaaacttggtgattggcacagtgtaggctaatgtctgtttacatcttcacctgttatacttcacaacttagggagaaaaatttaggctcaatataaaatatctaaggaggcagctttaagctaaacttgacttaacaatactttaaattatttcttccttcctttcttccttccttccttaatatggtgtgttttataaactataacatcatctttcttcatgaattacccacatgagcttgaaaggaatatgggttctggcgtagttgaatagaatattctctaaatat

SEQ ID NO: 776276 - DNA, 541 bp, Homo sapiens
aacttgacttaacaatactttaaattatttcttccttcctttcttccttccttccttaatatggtgtgttttataaactataacatcatctttcttcatgaattacccrcatgagcttgaaaggaatatgggttctggcgtagttgaatagaatattctctaaatatcaattagatcaagcagattgatagtgatgctcaggtcaactatatccttactgattatctgcctgcttcaagcatgaaatactgatagaagtgtgttaaagtcttcaactataacagtggatttgtctgtttctccttgcagtgctgtttgcatttgtctcataaattttgatgctctgttaggtatatacatgtttagttttgctatgtcttcttggaaaagtgacaattcattgcctctgattatttttcttgttctgaaatcttctttctctgaagttgttatagctattcaagttttcttttgaaaattgttagcatggtatatcttttttctccctttactttttacttgaatactttttaagttgggt

SEQ ID NO: 776277 - DNA, 594 bp, Homo sapiens
ttatttgatttttgtatgaaaaaaagcttggttatagaaatcagcatactattttttgttttattctggagagagatattctggtgactgaaaatatggtcaggtgtcagatataaatgtgcaattgccttcttgctatactgttggtctcagtagattcactttatagccgctggcaatatcaaaggttcctttttcgtttgtttaagcgctaatttctatcaaggtgtcatggatttttaaaattagtatttcattacaaatgtcttartgttggttaactaatttttgccaggaccattattgatcaagctaataaattgaacagccatttgggaaaaagaaaaaaaaatgttcactcaagaactttgtcaatttataaactgaatcgtctgccttttagttaagttgtaagtgcagtgctagtcttatagaatgacttagagagtgttccctcctcttctattttttggaagagtttgagaaggattagtgttaattcctctttaaatattgagtagaattcactagtgaaaccatttaatcccaggccttgtggggaggtttttaatgactattttattttctctgttt

SEQ ID NO: 776278 - DNA, 619 bp, Homo sapiens
aaacttaatgaactgatctccactagcttcaaacttttcttctgcagcttcctctcctctctcagccttcayagaattgaagagttggggctttgctctggattaggctttggcttaagggaatgttatggctgatttggttctttgtccagaccaccaaaactttcttcgtatcagcaacaggctgttctgctttcttatcatttgtgtgctcactggagcagcacttttaattcccttcagtaacttttttctgtgcatttaccactgggataactggttggcaagagaggcctaactttcggcctatttcagtattgacatgtctttcctcattaagctgaaatcatatagcttttgatttaaacttagaggtatgtaactcttcctttcaattgaactcttagaggccattttaggttactgttggcctaatttcaatattgttgtgtctcagggaataaggaggcccaacgagagggagagaagtaggggaacagggagtggagcagtcagaacacacatatttatcaagttcgctgtcttataagggcacagttggtgacactccaaaacaattagcttagtaaaatcaaagattactattcacagatcacac

SEQ ID NO: 776279 - DNA, 619 bp, Homo sapiens
aaacttaatgaactgatctccactagcttcaaacttttcttctgcagcttcctctcctctctcagccttcatagaattgaagagttggggctttgctctggattaggctttggcttaagggaatgttatggctgatttggttctttgtccagaccaccaaaactttcttcgtatcagcaacaggctgttctgctttcttatmatttgtgtgctcactggagcagcacttttaattcccttcagtaacttttttctgtgcatttaccactgggataactggttggcaagagaggcctaactttcggcctatttcagtattgacatgtctttcctcattaagctgaaatcatatagcttttgatttaaacttagaggtatgtaactcttcctttcaattgaactcttagaggccattttaggttactgttggcctaatttcaatattgttgtgtctcagggaataaggaggcccaacgagagggagagaagtaggggaacagggagtggagcagtcagaacacacatatttatcaagttcgctgtcttataagggcacagttggtgacactccaaaacaattagcttagtaaaatcaaagattactattcacagatcacac

SEQ ID NO: 776280 - DNA, 619 bp, Homo sapiens
ttattgtgttcttcagctccagaatttctatgtgaaaggtttttttttttatagttttacctcactttgttcatgcatcacttttcaaacgtgtttaattgtctatctgcattcttttcagttcactgagctccattaagatgattattttcaattctatgtcaaatagttcttacatcttttttccttgagactcagtttctggaaatataatttagttctttgactgggccaaaatttgctgtttctttatgttttcttctttttcttttttttctgagatttggatattggaaaaaagggccatctctctctctttacagactagcttcacccagagaaacatgtttaccagtcttsccagctagatattctgagacctctcaaatattttctggagatgtatgttctctagccttgtgcatgaatttttttcattacagaggtttaccagttaattttccatgagaccaaaatctcttgctgcctctggtgttcttttgtggtacagatgcttctctggtgctgcagcaacccactgagctctcccttcttttctgtggctcccaggcatccaaaatatatgagtttccatagtgctcaagtcaggggaaacaga

SEQ ID NO: 776281 - DNA, 619 bp, Homo sapiens
ttattgtgttcttcagctccagaatttctatgtgaaaggtttttttttttatagttttacctcactttgttcatgcatcacttttcaaacgtgtttaattgtctatctgcattcttttcagttcactgagctccattaagatgattattttcaattctatgtcaaatagttcttacatcttttttccttgagactcagtttctggaaatataatttagttctttgactgggccaaaatttgctgtttctttatgttttcttctttttcttttttttctgagatttggatattggaaaaaagggccatctctctctctttacagactagcttcacccagagaaacatgtttaccagtcttcccrgctagatattctgagacctctcaaatattttctggagatgtatgttctctagccttgtgcatgaatttttttcattacagaggtttaccagttaattttccatgagaccaaaatctcttgctgcctctggtgttcttttgtggtacagatgcttctctggtgctgcagcaacccactgagctctcccttcttttctgtggctcccaggcatccaaaatatatgagtttccatagtgctcaagtcaggggaaacaga

SEQ ID NO: 776282 - DNA, 585 bp, Homo sapiens
catcgaaaaccagtcaatttcgagcaactgccatcgtgtaggagagcctaagcgtggcctggatgagattccagaacagaaaaatgacattatgtaaagattacactttgggaggccgaggcgggcggatcacgaggtcaggagatygggaccatcctggctaacatggtgaaaccccgtctctactaaaaatacaaaaaaaaattagcagggcgtggtggcgggcgcctgtagtcccagctactccggaggctgaggcaggagaatggcgtgaacccaagaggcggagcttgcagtgagccgagatcgggccactgcactcgagcttgggcgacagtgcgagactctgtctcgacaaaaaaaaaaaaaaaaaaaaaaaaaaaaaaaaaaaaaaaaaaattaaggaaatccaaataaagtatgaactttagtcaatcataatatatcaatatcagtcattaattgtgacacatacgccacagtaatataagatgtattaaaaaggaatctgcatgtgatgtatacagggacactttttactcccctttgccattgttctaaatctaaagtaaatataaaattaaa

SEQ ID NO: 776283 - DNA, 617 bp, Homo sapiens
tatttttcccctgctgtatttatctgataatttatcttccaaagaaatttgaaatcattcttttccttgttgagtaaccattttcttttttctgagatcttatttattcaaagatttgatgtctgtctatatttcaatttatgttttgttccttaagggcttagtatgatgccactagacaatttattctttaatttattatgaatctttgtggtttaactgcttctcttttgtcccctatagaagccttagaaaaatcaactatgatatattataattagactatctctccatatttttaagccaaaagagatctctataaagaatattgggtaaaatttgtcatttcactccataataaattcattgactcattcatcaaagttcatcaacatttaccaaaygctgggaatttttctacgcaataaaaaatagatgaaaaacagacagaagactttgacttcatggagagtccgtttttagtgagaatggacaatataaataaatgaataacatatatagcatccctggtggtcataaatactatggtgcaaagtagagaatgacaacatggcattagagagggtgtgggtgttactgctgttttcaggtaaagg

SEQ ID NO: 776284 - DNA, 556 bp, Homo sapiens
tctctggaacagtttaactagtatgggaattgtggtttgttcagtaggattctcctatgaaaccatgtatttttgatattaccttagcagtacaccattgtcagagttttctccatttttcgtggaaattaatctattttcgtttctattcctatgaagtcagattttggtaaataatattttgtcaaaatagtttacatttcatttagttttctatttatttgccttgagtttaccaaaacgaaactttctaacttaaaaaaaaagttgttatttttatatcagtgattgttttccccttatcataaccgtgtttgtttcttttgtgttttttctctttttttctcaggtaatttaatcttttatcaattttggagttcttcaaagaagkaatttgtttatttattgctgaattttagcttgaagtattctttcttttcttttccattaattggttatttttcaaccttttgttctaatttttagtttgatgcttaatttgttaacttttattattttttgtatattttatgaagatttaaaacaatatttcact

SEQ ID NO: 776285 - DNA, 638 bp, Homo sapiens
gttaaccacatgcaagttttgcaatgggtcaaggattctatatatataaatgaaatcctataatttttgcctgttgagaaactagggtttgggggttgcaaagcatgtgagatggtgagcatgccctttttccctttatgcaaygcaatgctcagtaaatggcttaatacattttaaattttgagtatgtgatcttaatagcatatatattcccattgcctataatcatgtttaaagcatggtcaatttcaaatgaattaatgtgatataaaatataagattaaaattgtagaagacttccataaaaccttaagggggcaaagctagacgtaatttgtgtaattttacaaattcaatacaattgaaaagttttcaatactcttgtttgatatgttgaaaatatcagctatataatatctctaatgttgctattaatagcatatcttatgtgtcttacttacgaacagcaatctcaatcagccaagaaaatattttgtttacattttactttgtggatcaaaatccactccctaatccaaaccagagtaatgaagtttttttggggggtgcagaattgtatacaagacatttcagattctaaaacagaaattttgtaaccatctttcactgttccttat

SEQ ID NO: 776286 - DNA, 638 bp, Homo sapiens
gttaaccacatgcaagttttgcaatgggtcaaggattctatatatataaatgaaatcctataatttttgcctgttgagaaactagggtttgggggttgcaaagcatgtgagatggtgagcatgccctttttccctttatgcaacgcaatgctcagtaaatggcttaatacattttaaattttgagtatgtgatcttaatagcatatatattcccattgcctataatcatgtttaaagcatggtcaatttcaaatgaattaatgtgatataaaatataagattaaaattgtagaagacttccataaaaccttaagggggcaaagctagacgtaatttgtgtaattttacaaattcaatacaattgaaaagttttcaatactcttgtytgatatgttgaaaatatcagctatataatatctctaatgttgctattaatagcatatcttatgtgtcttacttacgaacagcaatctcaatcagccaagaaaatattttgtttacattttactttgtggatcaaaatccactccctaatccaaaccagagtaatgaagtttttttggggggtgcagaattgtatacaagacatttcagattctaaaacagaaattttgtaaccatctttcactgttccttat

SEQ ID NO: 776287 - DNA, 633 bp, Homo sapiens
aaatcacaaggattcctttacaccaaggacagacactcagagagccaaattatgaatgaactcccattcacaattgctacaaagagaataaaatacctagaaatacagtttacaagggatgtgaaggacctcttcaaggagaactacaaaccactgctcaaggaaataggacacaaatgagtggaaaaacatcccatcctcatggataggaagaatcaatatcgtgaaaatggccatattgcccagagtaatttatagattcaatgctattcccatcaaactaccattgacattcttcacagaattagaaaaaaaactactttaaatttcatatggaattaaagaagaccccatatagccaagacaatcctaagcaaaaagaacaaagctggagtcatcatgctacctgacttcwaactatactacaaggctacagtaaacaaaacagtatggtactgcttccaaaacagacatatagagcaatggaacagaacagagacctcagaaataacatcacaaatctacaaccacctgatcttcggcaaacctgacaaaaacaagaaatgtgggaaggattccctatttaataaatggtgctgggaaaactgtctagccataggcagaaaacagaaa

SEQ ID NO: 776288 - DNA, 461 bp, Homo sapiens
tcctttgcttagtatttgtccttactgttctctagcagaattaaccaggtgtctcatagataccttatatatagtgataaaagtgagaggtgaacccagctggacttcctgggtcgagtggggacttggagaacttttytgtctagctaaaggtttgtaaatgcaccaatcagcactctgtaaaaacacaccaatcagcactctgtgtttggctaaaggtttgtaaatgcaccaatcagcactctgtaaaaatgcaccaatcagtgctctgtgtctagctaaaggtttgtaaatgcaccaaacagcactctgtaaaaatggaccaatcagcactctgtaaaatggaccaatcagcactctgtgaaatggaccaatcagcaggatgtgggtggggccaaataagggattaaaagttggccccctgagccagcagcagcaactcgctcaggtccccttccaca

SEQ ID NO: 776289 - DNA, 615 bp, Homo sapiens
cgagttgtctggcattgtgatgcagagtgagatgattttttaaatataattctatcatatgttcattctttaatttcattttcttcccttcataagataaaatttaaatgatgcaaaatggtcagttttaaaatgtctttttccttccctcagtttgaattccaagatagctctgtttcagcaaaaataactcttaacatttttaactatcccttttactcgtttggcttgataattttcaagctagataagaaaatcaaatttgttttatttgaatarcaaaataatatttacaaaaatataatttgtcatatgcgtcatcatgaatgtgtacaggttatgtacagttttatatgtttcttcatccaatggtcagaaaattatgaaagtcatcttgggttttgttcagccatcttgaattttgtatgctttctcttttataactgcacacctggctttcttacgattaattttggaagcaggaacagacccagaaagcagaaaaataggctttgagagcctcggtgtactttcttggttgaactgacagtaaaattcaaaaggaattttctaatgaatcctaggaagcatttacatagataaaaataaattagc

SEQ ID NO: 776290 - DNA, 640 bp, Homo sapiens
acctccttatgaccctattccttggcaaatgataaaagacaataaattatgaagggcatttctatgtaaatagaaagatgattttggtgttttgtttttgttttccaagacagagtcctgctctcttgccagcctggagtgcagtggtgtgatgatagattactacacccttgaagtccttggcttaagcaatcatcctgcctcagcctcctgaatagctgggactatagctgggactacagccatgcaccaccatgcccgcctaatattttaattttttatagagacagggttgcactgtagtgaccaggctggtctcaaatgcatggactcaagcaatcttcccacactggcctctcaaattgctgggattacaggaatgagccaccgtgcttggtcataattttgttttttttaattattaaagtctgtatgagaggtttaaattgtactaagcttacctcactaattaaaaaaaaaamttaaaaaaacttgaaaatgtaactaaagagcaaaaacaaatagaaactaccaaagaatgatagtaattacaaaaacaaccacaaaaacattcatctttcactaaaatgcaattacagttagaagcacgttagcaataatattgctttatggttacagt

SEQ ID NO: 776291 - DNA, 477 bp, Homo sapiens
atatgagacaaagaagacttacttaaaaaaagaaggaaaatagaaatgtgctaaatgagtaggcagaatgctacttgcaaaatagtcacatataggaggaatatgaatatattttcagataagcaaggtaccgagaagtttatgataatcatcatttctaagaagatatactccaccataaactgtgaggtaaaacaaacgaacagagactacagggcccaagaatgtgactggttttagtctattttcgtgctatgaagaaacacctgaagctggatgatttattkttttttaaagttgtctatttggttcacaattatgcaggctgtatagtaagcatggtgccagcatctgcttctggtgagggcttcaagttgcttccactcatggtagatggggaagaagagccagcatttgcaaagatcacatgttgagataggaagcaagagagataggggagatgccaggctctttgta

SEQ ID NO: 776292 - DNA, 477 bp, Homo sapiens
atatgagacaaagaagacttacttaaaaaaagaaggaaaatagaaatgtgctaaatgagtaggcagaatgctacttgcaaaatagtcacatataggaggaatatgaatatattttcagataagcaaggtaccgagaagtttatgataatcatcatttctaagaagatatactccaccataaactgtgaggtaaaacaaacgaacagagactacagggcccaagaatgtgactggttttagtctattttcgtgctatgaagaaacacctgaagctggatgatttattgttttttaaagttgtctatttggttcacarttatgcaggctgtatagtaagcatggtgccagcatctgcttctggtgagggcttcaagttgcttccactcatggtagatggggaagaagagccagcatttgcaaagatcacatgttgagataggaagcaagagagataggggagatgccaggctctttgta

SEQ ID NO: 776293 - DNA, 576 bp, Homo sapiens
gttggcacatgctgccagctactcgggaggctgaggcatgagaatctcttgaaccagtaggtggagcctgcagtgagccgagattgcaccactgcactctagcctgggcaacagagcacagcaagactctgtctcaaaaaaaaaaaaaaagaaaaaaagggaaaaggcaattcagaatggaagaagatatctgcaattcctttattcaataaaggtcttgcattttaaatatagaaaaaaatcatcaagaaaaacaattcaataaaaaagagcaatgtatttgaataggcagcccacaaaagaagctattcagatgattaataaayacttaaaaaggtgctcaaattattaatagtcagggaaatgtaaattcagtatctctacatacctacaaaaagggctaaaattaaaaaaacaaaatcacagtacaaagttttgacaaagatacagaatagtctgaagtctcatacactgctgtaagaagttcaaatttttatatccagtttgaaaagctccttgatagtaactactgaggcttgacataggcacatcttatgacagcggtttcactgcaac

SEQ ID NO: 776294 - DNA, 609 bp, Homo sapiens
atactgtgtgattccatttatacaaagtttgaaaaggacaaaatttatttgtactgatagaggtcaaaatagtggttacctttgggtggagggtaactaataaggctttagggaggctggcaatgttcacacttctagtggctcatgagttttcaatttttaaaaaagttatcagaatttatttttaagatttatgatttataacttcacaaatcataaacgtatgtatctttaagacataagcaccttttgttataaatcataaactctatctttaagacttatgcagtcttgctctgttgcccaggctggagtgcagtggcacacaaacttcttatgaaaatagtcctattttcatggataaattcttcttcttatgaaaatatgtsctattttcataagaagtttgtgaaataagataaaattagttgctctttttgccataggggtttgccataggagaactgtggataccaagtagttgcctaatactaaccctttttaatttttaactcctacaaggtttcgaattaagtttgtatgtaaaactccaacatttatatctccagtactgacttcttatgtcagtagatgttgtacgatgaaaag

SEQ ID NO: 776295 - DNA, 607 bp, Homo sapiens
gtagcccaagtaggtttcattgggaaatttacagcatgaaatacttattttagaaaagaagagggggtttctatttctagaatggtagcatgaggagctccacagatgtgctccctagcaaaacaagcataattgctaattggtaattaaatctggaaattgtcctaaaggcatagagcaaatgaagacatttattcaagaaaatcaactacagcttggtaagaacagcaagagtttttggcacttcaaccatgactcgctttcacttttcccctgttccttctccagctcagcttcacagaaattccattcccagtgggtgtggcaaagaagatgaagtttctctcccctgagctcccaatcaagggatacagtatygtattgggaggggcatgctgccagcatttcttatccctttgaagtctaagtggaggtggctaaattcctggtgagtgcagcttagtggttgggggaaagggctcttttcctccactcagccaagactgatagggcagaagctctaccccagacacagtaggtcaagaatactgtggccttcattgtccttacctcgacttgttcataggatagagatttcactccaaga

SEQ ID NO: 776296 - DNA, 570 bp, Homo sapiens
gtcctcatcagatgccagcaccttgattctggatttctcagcctccagaactgtgagtcagggccaaatagaaacagctccagtcaggagctcccagtgaaatcaatgcagaaggcaggtgatttctgcatttccaactgaggtacccggctaatctcacygggactggttagacagtgggtgcagcccacagagggcgagccgaagcagggtggggtgatgcctcacacaggaagtacaaggggtcagggaactccctcccctagccaacagaagccatgagggactgtgccgtgagggacagtgcattctgacccagttactagacttttcccatggtcttcacaacccacagaccaggagattcccttaggtgcctacaccaccagggccctgggtttcaagcacaaaactgggtggctgtttgggcagacatcgagatagctgtaggaggttttttttttttcataccccagtggcacctggaatgccagcgagacagaaccgttcactcccctggaaagggggctgaagccagggagccaagtggtctagttcactggatcccac

SEQ ID NO: 776297 - DNA, 532 bp, Homo sapiens
aattttttgtaaagacagggtctctccatgttgcccagcctggcctcaaaggatcctccagcctcatcctccccaagtgctaggattacaggcctgagttaggaaaccagggcgaattgtagcgaggattgcttaaggtcatcataagaagagcattgaaagaaacttcccactacacagctatcagaacggctgaaatacaaaatatgacaacaccagatgctggcaagtatgctgaaaaagtcactcagcttgctggtggacacrtaatggtacagccaatctgcaaaacaagctggtaatttctccaaaaactacacatgcaaccaacatacagccctggccatttatccaagacaaatgaaaacacatgttcactcaaaaacctacccatgaatgctcatagcagctttatttataaaagccaaaactgaaagctgctcaagcttccttcagcaggtggttggttaaacacactgtggtgcttccatcccgtgaaatagtgctcagcactacggaggagccagctgct

SEQ ID NO: 776298 - DNA, 532 bp, Homo sapiens
aattttttgtaaagacagggtctctccatgttgcccagcctggcctcaaaggatcctccagcctcatcctccccaagtgctaggattacaggcctgagttaggaaaccagggcgaattgtagcgaggattgcttaaggtcatcataagaagagcattgaaagaaacttcccactacacagctatcagaacggctgaaatacaaaatatgacaacaccagatgctggcaagtatgctgaaaaagtcactcagcttgctggtggacacgtaatggtacagccaatctgcaaaacragctggtaatttctccaaaaactacacatgcaaccaacatacagccctggccatttatccaagacaaatgaaaacacatgttcactcaaaaacctacccatgaatgctcatagcagctttatttataaaagccaaaactgaaagctgctcaagcttccttcagcaggtggttggttaaacacactgtggtgcttccatcccgtgaaatagtgctcagcactacggaggagccagctgct

SEQ ID NO: 776299 - DNA, 621 bp, Homo sapiens
ctagagccagttggttatgacagctttaacattccaaatgcaagccaactactatgtttataaattcactgggtttttaaagcactagggagattttaactaaaattaactgcacattaggaggatacattattataattttttttttaactacaaggctgcgaacacagctaatgatctgcatcattagatactggacgatttttctcttccttagtgggaaaggaactcacaggaatggtttgtcctctaactgacccagatgaaaacacaaaagcagaaacaagcccttctcgaccatcatgaagccagaacttcaagtcaaaggcatgtttgccctacagagcaccacttgaatcttcccagccctctcctttgtgaagtaaaacataattttaaaagmatctattagttacaacccttttctctttacctctctctttgcagctgaggtcaggtctatattcattctgtccattttgagtctgcattgcttagaaattttcatatgatttgactcagtgatttaagttatgaatttatagcttagaaaaatcatcagaaatgtaggaagaaaagttttatttgcaaaactgttccccccagtgttatttattggaa

SEQ ID NO: 776300 - DNA, 542 bp, Homo sapiens
catctcactagggagtgccagacagtgggcgcaggtcagtgggtgcgtgcaccgtgcgcgagccgaagcagggcgagccattgcctcactcgggaagtgcaaggggtcagggagttccctttcctagtcaaagaaaggggtgacagacggcacctggaaaatcgggtcactcccacccgaatactgcgcttttccgacgggcttaaaaaatgccgcaccaggagattatatcctgcacctggctcggagggtcctacgcccacagagtctcgcggattgctagcacagcagtctgagatcaaactgcaaggcggcagcaaygctgggggaggggcgcctgccattgcccaggcttgcttaggtaaacaaagcagccgggaagctcgaactgggtggagcccaccacagctcaaggaggcctgcctgcctctgtaggctccacctctgggggcagggcacagacaaacaaaaagacagcagtaacctctgcagacttaagtgtccctgtctgacagctatgaagagagcagtggttctcccag

SEQ ID NO: 776301 - DNA, 645 bp, Homo sapiens
agtcaattgatcgtcaacgaagcaaacaagacataaggtggacaaaggacaccctattcaacgaatggtgtcggaattatatgcaagccataggtagaataatgaagctggattctaatctctcaccttatataaaaatccactcaagatggatcaaggacttaagtctaagacctaaaaccatgaaaattctagaagataacatatagaaaacacttctagattgayttaggcaaagagttaataagaaggaaccctaaaacaaatgcaagaaaaacaaaagtaaatagatgggacttaattaatctattaatcaaaaaagcttctgcacagaaatgaaaatcagcagcgtaaacagacatcccacagaattggagaaaatattcacaaaatatgcatccaactaagggctaatatccagaatctacaagaaactcaaacaaatcagcaagaaaaaaatgtcatcaaaaagtgagcaaagaacatgaatagacagttctcaaaagaaggtatacaaatggcccacaaacatgaaaaaatgctcaacattgctaattatcagggaaatgtaaatcaaaatcacaatgagataccacctttctcctgcgaaaatgaccataattaaaaaaacaaaacataataatt

SEQ ID NO: 776302 - DNA, 632 bp, Homo sapiens
ataagaatttaatattagaaaataaaatcaatcactttaatacatctcagagtaaaataataaacacgtttagcacttcctatgggacaggtatggttttaagtgcttagatgacagattgataggtgcagcaaaccaccatggcacttgtatacttatgtaacaaacctgcatgttcagcacatgtatcccagaacttaaagtgaaataaaataaaaatatatatatattttatattttatatattttatatttatatatatacacacacacacacacayacagccttaattctcacaataatcctgtgaggtaggtacttttatgatcattctattttcagacatgcaaataatgacaaaaagagggtaagcaaactacacaaggtcacacaaatgacaaagtggtccagctaggatttaaacccaggtattttggctccagagaagctactcttaaaatgtatgctagagaaattgaaatatcactagatgctgatgtagttcaaggatttttaaataaccttgatgaactataggtaaaatagtatagcccttgatcagttaagaacatccaatatattactgtatgcttttaattcatgtaaataatatttatttaattacttaatg

SEQ ID NO: 776303 - DNA, 533 bp, Homo sapiens
attaactgcaaatacctcccaaaaacattccaatttaaaagctacatattgctataactttaaaaccacatattatgtaattctgtctattttgtagttttcccagaggtcaagaaaaataaataaataaagcaaccaagctaattttcaaaatctaaaagtttcttatagaaattttgattttgagcctacagttaatgaaaatccagacaaccaggcaaagaaaatatttagaaatcaakaagtatatgccaagtgattagatgattaaaaatgaatagaaaaatgagcctcctgttttatagcactaatattgtaataattgatcaaaagtaaatattaaagttacattaaacatgcaaaactgacattccaagtatttaccattttgcaacttattcatagctgaaaatagtcactcagttctaaagtgcacactaacgtatttttcagttttgtgagcttagtctcaaacatcacatttcttcagatttcaggctaggcttacctgtctttaaagccaggagatagac

SEQ ID NO: 776304 - DNA, 533 bp, Homo sapiens
attaactgcaaatacctcccaaaaacattccaatttaaaagctacatattgctataactttaaaaccacatattatgtaattctgtctattttgtagttttcccagaggtcaagaaaaataaataaataaagcaaccaagctaattttcaaaatctaaaagtttcttatagaaattttgattttgagcctacagttaatgaaaatccagacaaccaggcaaagaaaatatttagaaatcaagaagtatatgccaagtgattagatgattaaaaatgaatagaaaaatgagcctcctgttttatagcactaatattgtaataattgatcaaaagtaaatattaaagttacattaaacatgcaaaactgacattccaagtatttaycattttgcaacttattcatagctgaaaatagtcactcagttctaaagtgcacactaacgtatttttcagttttgtgagcttagtctcaaacatcacatttcttcagatttcaggctaggcttacctgtctttaaagccaggagatagac

SEQ ID NO: 776305 - DNA, 653 bp, Homo sapiens
aatatatatgcacccaatataggagcacccagattcataaagcaagttcttagagatctacaaagagatttatactctcacacaataatagtaagagattttaacacccaactgtcaatattagatagaacattgagacaggaaattaacaatgatattcaggacttgaactcwactctggatccagtagacctgatagatatctacagaactccccacccaaacaacagaatacacattcttctcagtgccacatggcacttactctaaagtcaatcacataattggaagtaaaacgctcctcagcaaaaatgcaaaagaatggaaatcataacaaacagtctctcaggccacagtgcaattgaattagaactcgaaattaagaaactcactcaaaaccacacaactacctgcaaatttaacaacctgctcctgaatgactcctgggtaaataatgaaattaaggcagaaattaaaaagttctttgaaaccaatgagaagaaagagacaatgtaccagaatgtctaggatgcagataaagcattgttaagagggaaatttttaacactaaatgtccacatcacgaaactacaaagatctccaatcaacaccttaacatcacaactaaaagaactagaggaacaagagcaaat

SEQ ID NO: 776306 - DNA, 587 bp, Homo sapiens
atcttaaagaaataatctttcaaatttatttgcaagtatactttaaatgtatactcttacacagattttccttttgatatacctaattttacaggtacaatgagggttcaggaaagagacttttgatgtttgatttatctactcwtatcaaactacaaaaaaaattctatctgaacttttgctttcaacatacaatagatctgtgctgcatttttttcctgaagaaaaaatgcattttttcctcagttactgctactaaacagaagctgtttttctacaaaccgaaaataagtagtctattcatatgtaatttaaagcccctgaaaactgtgaagaggaaatggaaaatacagcgcaaaggcttcacattgttctcaaactatcatgtaacaggcttaccatatagaacagtgacataaacatgctgggctcatatacatttcaagagagccagacctctatggatttctggaaagcagacctatttgtccagggtctgtcactgtaaaacagaaaaatgccccctgacaagcttctgctaattttattgtggcacggagtcctgtgcatacatcctctacagtatg

SEQ ID NO: 776307 - DNA, 555 bp, Homo sapiens
tgagtgtcaactacattttgctattaagtttcacaaaaatcccctctaggattttcaatcacaatatttggaatctatattcatgttacagttacaaaataatagcgaagactcataaaaagtataagagcttcaatttcagagacataattttgtgatttaagaaaaaatattcttttaatttttattttttataaaaaaggacaacttttgtttaatattcatggctagcttacyagagatttatataaaatttctgcttgtatagcattactctttttaatatactatttattcagcccaaattattaaacaagtacaaagataagacagtatcactatgattcctgatcaaatacttttggtttctcctctttctttcgttctgtgtatatctgcactcgaagacagacagctggtagaggaacttaaaaggttgctttttaattcacagcaaaacaaatgattttatagatactgttggataaatgtacaaaaaacattatttaaagccaataattgattctacctgtccaagtacctgatccttcataa

SEQ ID NO: 776308 - DNA, 608 bp, Homo sapiens
gctcagcctgatagcagagttcagccagtagtcttgcaaaagtgcagagcctagctagctgtctcacttgaattcagagcaaaggcagcaagccatctatctagaaaatctcaaagcaagctctacctgcccatggtctttagcaggtggtctatccaggatttaggctaaactaattaatgaaggyctgtccctgccaaagaactcgtggaaaagccaaaaatgatggctattttcacaaaaatgtaaactctgatgcaaggacacaataattaaaaagactctggaaattatgatatctccaaaatgaactaatgaagttcaaacaatggaccctaaagtaaaaaagctctatgaaataatgggaaaaaatgataactctttttgaaagtccagcgaagtagaagaatacatgaataaaataaaattaaatggcatttggaaaacaatacatacacaaaataagaagcttaacaaagaaatggaaacaataaatataatcatatagaaatcctacagatgaagaatacaatgactgagctgaaaaatgccacagctggatttgatcaagctgaagaacaaatcagtgactttgaagacagatattt

SEQ ID NO: 776309 - DNA, 698 bp, Homo sapiens
aaaatgagttcactgtaaatgtgtgaatttctgttttctgttttatttgwctatgtctgtctgtctgtcattcgtctctttctctgtctctcctgccccgcttttttttgacagtaccatgttgctttggttactatagatttgtagtatattttgaaatcagggagtgtcatgcctccagcttttttcttttttttcaagattattttgtctacctgaggtattttggatttccatgtgaatgttagttttttatttctatgaagaatgtcttttgtaatttaacatggattgcactgtttctgtagatcacattgggtgatatagatattttaacaatattctagtgcatggacataggatatgtttccatgtacttgtgtctgctttaatatctcatcaatgtgttatagttttcattgtgggatctttcttaaagaagagatgtagttggtttccttgcctagatattcaaaagttgataggattttattcatggtataacatagttaaaagtattaaacataattgtatttagttttgttgaatacctatttgtgtggtatattacatttatttttgttaatattaaattttaaatattttaagtgtacttgtgcatcttatatatttatattatataccattattttactttggattctctcatttaaagtcatagccaaagttatcctatt

SEQ ID NO: 776310 - DNA, 612 bp, Homo sapiens
aagggaaggcaatattgagaagagggaggagtgtgatgattcccaaactgaaaggactcaagccctagtgagcttccaatggccaggccagggacaaaccagtgacaagatggcaaacggcacaggcaatggcctaaacctccaggagtttctggaaacagccacttcccttcctttgttactctgtcatttctagtttgtcccttcacagaaataagagacactttagcagtagaatttggaagaagcctcagaccatgtcctttargatggaagggtgtggtcaaagaacagaagatgacatcagaggaaagatgatgctggttggagttgaggaaccagcaggaaaggtcaggagaggaaggggagcccaaccccagtgcaagggtctgtttgggttcagatgatggtagcatagagcacagacttgggagtcttacgggttgggagtttaaaccaggctctgccacataaaacatgcttttttttttttttgagatgcagtcttgctctgtcaccaggctttagtgcagtggcacgatcacagctcactgcaacttccaactccctggttcaagtgattctcccgcctcagcctcccgagtagttggg

SEQ ID NO: 776311 - DNA, 638 bp, Homo sapiens
aatagggagaaggtatttatggagaagaccttaatttggagagtggagcattttgaaaaaaatgaagtggcttactaagacgaatgcttattccaggaaaataagaatgcagaagaaataaaaaggggaaaatgactacattcctccttcccagctatacctccgcatcccttcacaacctggaacttcagtcctggacccccgtctccacatacggcttgcatattgtcatattgtaagaattcataagaaaatactcaactcattactcttctttctgaaaacttttctttgtcwttcattttcatttctcattccagatacactttttaatacctttattgttttgacaggctggtagacaaatatgaataagtgggttgtcattgttcttttgttcttactgaatttgctctattttactctgaactaagttgctgtgatgttctctgtcagccaggggtcctaagaagcagaccattttcatgcattcttgtgacaatggacataaacccaacccctaaagggcctatttcctcccgggcaccccagaggtgcacactggactgtttccgctgaagaaaagccggggcccatctgctaaagggcctgacgagggaatagccctacgtggcttg

SEQ ID NO: 776312 - DNA, 585 bp, Homo sapiens
gcaggtggtcagttaagcagtcatgacaggtaataagtctgatgtctcatccaaatgcagtgatctggtgagtttcaactccttaatactgtctgggagagctgatggttgttttcccaagaaaggaactcagataagataaacgtaactttttcaagtttttaagactaggaggatcagtttctmtgcttattcaaagaaactataaacatcaactctatgagacaactggataggttttcagggttcaacttaggtaaatcaattaatgtgatacattttacatcaacagaatgaaggagaaaactacgtaatcatctcaacagatgcagaaaaagcatttgaaaaaatttaacatcctttatcataaaaatgctcaacaaatcaggtgtagaaggaatgtatttcaaaacagttaaggccatatatgacaaatgcacagctaccatcatactgaatggggaaaattttaaagcttttcctctaagatcttgtacaagacaaggatgcccactttcactactcttattcaagatagtattagaaattcaagccagggcaaccagtcaagagaaagaaataaag

SEQ ID NO: 776313 - DNA, 576 bp, Homo sapiens
ctaagaataaatttaatgaaaaatgtgaacacttgtacactgaaaagagcaaagcatcaccgaaagaaattaaagaagtcctaaacaaattgaaagcaaccctatgttgatggatttgaagacaaattaatagtgctaaaatagcagaactaccaaagctgtctaaagattcaatacaatatttagtaaaattccaatagtcattttactgaaacagaaataccaattctcaaattccagaattgtacatggaaatcctaaaaaacaaagataaagttggaggactcaaactctaccatttcaaaacttatcaaaaacctacagtaattaaaacagcatggaaatggcrtaggataggtgtatagataaatggaatagaattgaatccagacataaaccatatatttatggaaaatttatttttaacaagcctgccaagtcaagaaaaatattcaacaaatgatgttaggacaactgaatttccaaagacaaattaaggttaggcttcatcccatatacaaaaattaactcacaccatatgtaaaaaatttactcatactatatacaaaaatttat

SEQ ID NO: 776314 - DNA, 604 bp, Homo sapiens
aaatgggcaaagaactggtatatacattttcaaagaaaatgtacaaatagccaacaagtacataaaaagagagttaacatcattagtcattcaggaaataaaaatcaaaatcacagtgagatattattacactacttcgcaacgatattttttttgagacagagtctcactctgtcaaccaggttggagtgcagtggcacaatctcacctcactgcagcctcctcctcccaggttcaagcaattctcctgcctcagcctccggactagctggggctacaggcacataccacaacgcccggctaatttttttttttttttttttttttycagatttttagtagagacagggtttcattgtgttggccaggctggtctcgaacttctgacctcaggtgatcagcccacctcagccttctaaagtactgctattacaggtatgagccagcactcatggccttcttcgcaactattaggatgactgtaataaaaaataaatacataaatacattaaaaaatatatatatagagagagagagagagagagtagggggaggaaaaagggttagccaagatgtggataaagttaaagacacttacattggt

SEQ ID NO: 776315 - DNA, 604 bp, Homo sapiens
aaatgggcaaagaactggtatatacattttcaaagaaaatgtacaaatagccaacaagtacataaaaagagagttaacatcattagtcattcaggaaataaaaatcaaaatcacagtgagatattattacactacttcgcaacgatattttttttgagacagagtctcactctgtcaaccaggttggagtgcagtggcacaatctcacctcactgcagcctcctcctcccaggttcaagcaattctcctgcctcagcctccggactagctggggctacaggcacataccacaacgcccggctaatttttttttttttttttttttttccagatttttagtagagacagggtttcattgtgttggccaggctggtctcgaacttctgacctcaggtgatcagcccacctcagccttcyaaagtactgctattacaggtatgagccagcactcatggccttcttcgcaactattaggatgactgtaataaaaaataaatacataaatacattaaaaaatatatatatagagagagagagagagagagtagggggaggaaaaagggttagccaagatgtggataaagttaaagacacttacattggt

SEQ ID NO: 776316 - DNA, 626 bp, Homo sapiens
cgttcttcactcctctccagtacagctcagttagcctctcaccaccgatctctgcctatcacacaatttaaaaattacaggaagatggtggggggcacaggacttatggagaaatgtctacacccagctcagcttcccttagagccgcctggagttggtgctaccggggggcagctggctcagtggggcatgggctctgacaaaccctgagtctctgcgaggctccttaagggctccacagccgctgctgggcccttctattccctgtcagaagttggccacctcatggggatgtattmctgtctatctgctcacaaggcaccactggcagtcactaggaacacagtgactctttctagaatgaatgagcacaacctccacccgtggctggatacaggatattcccccaccccagaagtccccctcgggcccttaccagtcaacactacccaaagggtaaccctgcttctgtgtccagcaaggcagtatctgcctgagtttgaatagtgtacgaggagtcacacctggtataccctggggtgtgaactggtcctccaggaagcagacacccagaaagataggactgcaaatgtttctaaagggaaacactggaaatgagagagaga

SEQ ID NO: 776317 - DNA, 622 bp, Homo sapiens
atgtggtaccccagtgggagacagaacccaggaaaaaaggtactagtaggctggtatttattgatacatctgtaattctagtaccaccctcctattaaagaaaattcaaacaatccaaaggaatgcagggaaagagaaaaaagaaacaacaagaaagcatattgtacatgatattcaaaatttcartggtgtgacctgtttgctgactagttagaatctcggaaaaggtcctagagggtctccctgtcacaagcattgaccaattttttgccagatcagaagaaggtcaggggtgggggcactgtgggggtctcaggggagtggctatttaccaagaaggatggaagaattccaacttgtaataattgatagggttttaccgatgtgttctagagcctgctgctggttgtgtggccacatggctggagttagagtcccagctctggcagaggaggcctgggtgaggtttgcaggggctgagttcctctagctcaggccgtataagtagcacaaattcaactttttatatttatattaatacttacgatttttatattaacgctgtcccctatataaccaagtgttttcagtcacagttctttgagatgagtgtttatttgaa

SEQ ID NO: 776318 - DNA, 619 bp, Homo sapiens
ggaaactgaaggccagacaggatcctccctgtcccatggcctaaatgcctctcagaactcacagatggtcagtcgggagtacaggcagttcctgtcattccactgcccatctgtgtacatctccacacactgctcttttccccgacctgcaggctcccctcggtaccagttggtgtagtttacaggggtcccatctgagtagcggaagtctccagggctgggaccctcagtcaggcctacataggcatatgtgttgtacttcttcacgaagcttgcaatggcctcattttcctctggattccttgggacagcaatgcggccgcctgctctggcacatgcctcctgaatggcatcaaaagtgatggactgcccattgctggagaagaccttctctcctactgtcattatggagccctgcagactgagggctgagagcagaggagtccrggtcaggccactgaccactttgtctctaagccacctccctcacctagggtctctgctaccagattctccccagtctctccatctctgcctctctctgtgtcttctcttcctcttccaattgcagttttctaaattcacttttagactctcctccatttattcattcatctaa

SEQ ID NO: 776319 - DNA, 633 bp, Homo sapiens
agtgcaggttgggggcaggtggggcgaagctccagcaacttggctgtggggaggcagggctgttttgcaggtgatgagcaggaacagaggccaacttggatgtgcagggccttgtggttggcagggcagggcatggctttaggggaaaggcacacctgagttttgacccagagctgtcacttattaaccaggtggccttggtcagtttcatttttcattttattattctgaaacaacatcaaaattacagaaaaattgccagtatcgtacgacttttttttcccctgaacctatgagagtaggttgtcaacatgaaaccccaacaccccaatactttaatgtgtttttcacgcaaaggcatttttgcattataaccgtaatcaagaaataaacacggatacaataactccaaatagccttcaggccctatgcaaaatgtacacaatgccccaatagtgtcctttatagcaaaggatccgtttytgagccatgtgccttattcggttgtcacgcttctccagggtcctgaaacccacaaagtccctctgtcttcccttcaccttcatgacctgaacacagtgtgaagatcacaggggagttactgtgtaaaatacccctcactttgtttgtttg

SEQ ID NO: 776320 - DNA, 587 bp, Homo sapiens
gggggaccagagaaatgctttcttccttggcttgaagatgatgtcatcaaccttcagggccctcggaatcccttaaataataaaacagtcagagcacatgaataccgggatgctttcagcactgcatatgtcaagccctgaggctcccagaatccctggagacgtatttgtgtgtctacacttcccacctgcactagcggtgaccacacacacagtccggtgaccacacacacagtccgctgaatctgccggtcaaggtatctatcttcaactgccctcttccagagggagctcccacaaaaaggaccagaattaaaaggaggaggaagaayatcatcggagctgctgagtgtgaaaagaccagctctcttgcaggatgcaaatgaaggcctctctttttaagggtgcctgcaggaaatctctctgtcagtgctagctgggaatattcatgtcattgttgggtaggactgactgccttttttttcttctttttccaagcatgactcagtgttttaatttttttttttactttcaattatcatagtcagactgtttcccaggtatagttatgctatcaatttaaacca

SEQ ID NO: 776321 - DNA, 541 bp, Homo sapiens
aacatgggaagatgtgggatccgagtgtgccaagcagaggggcaggcagttagtccacttagaaagcagacagagtgggccgggcccggtggctcatgcctgtaatcccaacactttgggaggccaagacgggtggatcmcctgaggtcaggagttcaagaccagcctgaccaacatggcaaaacccccgtttttgttaaaaatacaaaattagccgggtttggtggggtatgcctgtaatcccagctacttgggaggctgaggcaagaggattgcttgaacctgggaggtggaggttgcagtgagccaagatcatgccactgcactccagcctgggtgacagagcaagactccgtcaaaaaaaaaaaaaaaaaaaaaaaaaaaagaaagcagacagagtgaggggaaagagagagacaggaggtcagggagccaaggggccaggacttgcaggactctggatttcatttcttactcgctgaagagtctggaatttattctagcagtgacaggaaagccactggaagatttaaggttggga

SEQ ID NO: 776322 - DNA, 541 bp, Homo sapiens
aacatgggaagatgtgggatccgagtgtgccaagcagaggggcaggcagttagtccacttagaaagcagacagagtgggccgggcccggtggctcatgcctgtaatcccaacactttgggaggccaagacgggtggatcccctgaggtcaggagttcaagaccagcctgaccaacatggcaaaacccccgtttttgttaaaaatacaaaattagccgggtttggtggsgtatgcctgtaatcccagctacttgggaggctgaggcaagaggattgcttgaacctgggaggtggaggttgcagtgagccaagatcatgccactgcactccagcctgggtgacagagcaagactccgtcaaaaaaaaaaaaaaaaaaaaaaaaaaaagaaagcagacagagtgaggggaaagagagagacaggaggtcagggagccaaggggccaggacttgcaggactctggatttcatttcttactcgctgaagagtctggaatttattctagcagtgacaggaaagccactggaagatttaaggttggga

SEQ ID NO: 776323 - DNA, 583 bp, Homo sapiens
ccctgccattcagtatgctgtgctctacacattgtatcctcattgtaccaggtactgtattcacaaatttttcttaagaaaagaaccccacaaaacattttatttttttaatggatagattttaaagatgtatgttgatttaactttggacttgcttgctttctttgattaaagatgaaaagataatctatgctttgtctttcaggcatgatcactttatctttagtagcctcagttcttcctctccttctttgtttgatggagctgtgattggcactgtaactacggccacaaagaaacatttctcaattatattaaatcttctgkgaatgttacttaagaaagataaccaggacacgaggtaacagatattatatagtattaaccattcctaactttgttaatttgcctttataatttgagaagaagaaatgtggattacaaaaaatttaaaaaaatgtggattatagaggtgaggtagagcagcttctttattgtcaaacaccttataatttggttttattatttaatctaggctttcttattctttctgaaaagaaatacatgaaaaacctcaatcccc

SEQ ID NO: 776324 - DNA, 583 bp, Homo sapiens
ccctgccattcagtatgctgtgctctacacattgtatcctcattgtaccaggtactgtattcacaaatttttcttaagaaaagaaccccacaaaacattttatttttttaatggatagattttaaagatgtatgttgatttaactttggacttgcttgctttctttgattaaagatgaaaagataatctatgctttgtctttcaggcatgatcactttatctttagtagcctcagttcttcctctccttctttgtttgatggagctgtgattggcactgtaactacggccacaaagaaacatttctcaattatattaaatcttctgggaatrttacttaagaaagataaccaggacacgaggtaacagatattatatagtattaaccattcctaactttgttaatttgcctttataatttgagaagaagaaatgtggattacaaaaaatttaaaaaaatgtggattatagaggtgaggtagagcagcttctttattgtcaaacaccttataatttggttttattatttaatctaggctttcttattctttctgaaaagaaatacatgaaaaacctcaatcccc

SEQ ID NO: 776325 - DNA, 583 bp, Homo sapiens
ccctgccattcagtatgctgtgctctacacattgtatcctcattgtaccaggtactgtattcacaaatttttcttaagaaaagaaccccacaaaacattttatttttttaatggatagattttaaagatgtatgttgatttaactttggacttgcttgctttctttgattaaagatgaaaagataatctatgctttgtctttcaggcatgatcactttatctttagtagcctcagttcttcctctccttctttgtttgatggagctgtgattggcactgtaactacggccacaaagaaacatttctcaattatattaaatcttctgggaatgttacttaagaaagataaccaggacacgaggtaacagatattatatagtattaacyattcctaactttgttaatttgcctttataatttgagaagaagaaatgtggattacaaaaaatttaaaaaaatgtggattatagaggtgaggtagagcagcttctttattgtcaaacaccttataatttggttttattatttaatctaggctttcttattctttctgaaaagaaatacatgaaaaacctcaatcccc

SEQ ID NO: 776326 - DNA, 606 bp, Homo sapiens
aaactgaagttaaagcctgatgtacatgccacatgagaggtaagtttctaaagctcatacctcaaaaatcgcctttgtgatgttgtgcatcaagtcaatctgtaagacagtagttacaatattagtgaagacagtgggttaaaacatttgttgttcaaacatggagcaaatatcattcatgagttaggtgcctttagttgaactatggtcccattagggttcatacattaaagcaaaaattgaggtggaaagacactctgtgccttacaggataaagaggcttaatgtggcaaccaaaaaaattttagtacataagagaatttaaatgttaactatmacatacaaatcacatgcaaatacagttaccacttattttagttacctattctcaatatacagaaaaatgccacaaatctaggaggccattcgtttcaaatgaccggaatccttagacctcacaccaacaagccaccatgtgctggggatggtatcgcctgactaaatgtagccttgcagtccattcttgtaagtattagagagaaaaagagagagagcgtcatctctggaaagtgtgaagtcagggaattccctactaggaagcatttc

SEQ ID NO: 776327 - DNA, 648 bp, Homo sapiens
ttacatacatgaccctagacagcaagggccatcttcatgtactcctcacaaggtgggatacaactgaaaataacagattatgtctgtaggcacacattagttttaaacaaagatgaggtagaagatgtttcctaaaacccaagtaaggggtcttaaaactgactgataaacctgaaactgagttctyctgttaagagataatttcggccgggcgcggtggctcacgccagtaatcccagcactttgggaggccgaggtgggtggatcacgaggtcaggagattgagaccatcctggctaacacagtgaaacaccgtctccactaaaaaatacaaaaaattagccgcgcgtggtggcaggcgcctgtagtcccagctacttgggaggctgaggcaggagaatggcgtggacccgggaggcggagcttgcagtgagccaagatagcgccactgccctccagcttgggtgagagtgagacagtccccctcccccgccaaaaaaaaaaaagagagagataatttcaccaagctctcagctctctctcctttgaccactcactaagacagtcttagaactaattctactttctgtagatttaggatactccattaaatggggtgtaccaataaaatcagtgcaggataaactg

SEQ ID NO: 776328 - DNA, 581 bp, Homo sapiens
ttgccttgccttttgcagcttctagtggctgcctactttcattggcctgtggccctgatgtggacaggagacagggaaatactgggtagaagagggtgattccccagcaaagtccccaccctcaagactggaaacccacaatctaatagaaacaggcattcctgkttttgcacccaaaagttgcctcttggcctgccacactcccctgtcctgtacccatataaacctcagaccccaggctccagaaggctgatgagaagatgaacagaagagcaaaagaatgtcagaacggtgcagcagagagaagagaaggagcatctgaatgcccagaggagttcagctgggggcggttggagaggagagctgccactggatggccacactccaggggaagatcatcttcccactccatcctcatccatcccgctaagggccacctccaccactcaataaaacccctgcatttaccatcctgcaagtctgtgtgtgacctgattcttcctagatgccaaacaagggtccaagtaccaagagggcactgagctgattaacgcttaagctgtccacggacagcaaggcta

SEQ ID NO: 776329 - DNA, 745 bp, Homo sapiens
ggaggggagtgcagacgagcgttctggctcctggagcgcctgggagggtgccgggatgccttgcatctgcccctgccacgtggagggctccggtggcgcgggctggcgacgtggaactgcccagacttggggttcccatgacccccggcgacctggggaccccagccccagccccgccacggagtcccctgggacgtgggtgacrcaagcacaccttggccctatggccccccttgagtgggcccaggatgtcccaccgtgcaatgacctggcaggccatagcgctgcgggtcccagtcctcccggcttttgcccaggtgcggaggccaccgaggagcctgagggtgggagagcgccccttatggtggagccggggcggcgtaggcaaaatccccgcatgccggggcaggttgggagatcccctctgccgtcgtggcctggctgggctggagcacggggacggccctggctccctggctcaccaaagcccccctgtgggatagctccaggtgcacagggcacgtggggttcgggaatccccattccccatgtgccagtgtgggcgaaggcgagccacgagggagcagggtgacacacgctgggggctgcgttgtaccggctgcctgcctttgcgggcgccctgccagcctctcccaggtgcctggcccttcgattctgaaacctgatctgaatcctggatcctgggaggcccgtctatctggccaggtcttccctggcagcgatg

SEQ ID NO: 776330 - DNA, 586 bp, Homo sapiens
  misc_feature 1: n = A,T,C or G
nagcatcccctccattgaatggcatgaactggaattaaacggaattgaattgaatgtaatggaatttactcgaatgtaatggatgggaataaaatggcctcgaatgagatggactcgaatggaatggagttgaaagaagttgaatccataggaatggactccggtggaatgcaatcaaatggagtggactggaatggaagggattcaaaaggagttgcctggaatagaacggtctcgaatggaatggaatcgaatggagtgaaatggaaaggaatggaatggaatgaaatggaatagaatggaatggaatggaaaacacgaacgtaatggattggaayggaatggaatccactggaataaaatcgaatggaatagaatcgaaaggaaaggaatcaaatcaaatgcacatgaattgaatggacaagaatgaaactttctcgagtggaatggtattgaatggaatggaattgaatggaatggaatagagtggaatggaatgggatggaatggaatacaatggaatggaatggaatcaaaaggaatgaagcggaatggaaacgaatggaaaggaatggaatggaataga

SEQ ID NO: 776331 - DNA, 586 bp, Homo sapiens
  misc_feature 1: n = A,T,C or G
nagcatcccctccattgaatggcatgaactggaattaaacggaattgaattgaatgtaatggaatttactcgaatgtaatggatgggaataaaatggcctcgaatgagatggactcgaatggaatggagttgaaagaagttgaatccataggaatggactccggtggaatgcaatcaaatggagtggactggaatggaagggattcaaaaggagttgcctggaatagaacggtctcgaatggaatggaatcgaatggagtgaaatggaaaggaatggaatggaatgaaatggaatagaatggaatggaatggaaaacacgaacgtaatggattggaacggaatggaatccactggaataaaatcgaatggaatagaatcgaaaggaaaggaatcaaatcaaatgcacatgaatkgaatggacaagaatgaaactttctcgagtggaatggtattgaatggaatggaattgaatggaatggaatagagtggaatggaatgggatggaatggaatacaatggaatggaatggaatcaaaaggaatgaagcggaatggaaacgaatggaaaggaatggaatggaataga

SEQ ID NO: 776332 - DNA, 563 bp, Homo sapiens
atatctctgcactgatcacccgggtgatgtaaatcctgtctaggttcagcctacaggagctttttgacatatctctgcactgatcacccaggtgatgtaacccttttcaaagctctgcctacaggggcattgtgacagttctctccactgctcacccaggtgatgtaacaattgtctgggctttgcctacagggagctttgtgatatacatttccactgatcaaacaggtgatgtaacccttgtcaaggttgtgcttacaggggctttgtgacatatctctgcactratcaccccactgaggaaacacttgactacactctgcctacaggaggctttatgacttatccctgcactgatcactaggtgatgtaacacttttctaggctcggtctacacgagaattttcacatatctctacactgatcacctaagtgttgtaacccttgtctaggttcagcctactggggatttctcacacacctatgcagtgatcaccgaagcgatgtaaatcattttctttttttttgtacaccccaccttcgataatctctgcactaaacac

SEQ ID NO: 776333 - DNA, 437 bp, Homo sapiens
actctgcactgatcacccaggtgatgggactcttgtctgggctctgcctagaggggtattgtgacatatctctgcagtgatcacgcaggtgatgtaactcttttctatatctgcctactggtggcattgtgacatatttctgcactgatcacgcaggtgatggactcttgtcttggatctgcctatgggggcatagtgacatatctctgcactgatcactcatgtgatgtaacrcttgtctaagctgtgcctaaaggggaattgtgtcagatatctccgctgatcaccaaggtgatgtaacaattttctgggaattgtctacagggggctttgtgacatatctttacactgatcagccaggagatgtaacacttgtctaggctccgcttaaaggggctttgtcacatatctctgcattgatcacccaggtgatgtaa

SEQ ID NO: 776334 - DNA, 514 bp, Homo sapiens
cttaatctggctaaccttactctctaagtctcagctcatgcatgatctttaggaaagccatccctgacagcttttattttccttccttataccccagtgcctaacacttagcaggaactcaataagtaattatttagcaaaattaagactgtttatacaaagatgattcaaaagattgtcctctacagtctagcagcaaaggggatcracatgttaagacatgatgtgcagttcaggtggtaaagtgacactggaaaaattgacaaagtactaagggactccaatgaagcagatacccgtgtgtgtggagaaagatagctagaatcaaggaagacttcacacagcattctgagccttttttttttctttttctgttgttggagacaagttcttactctatcacccagggtggagtgcgatggtgtgatcgagactcactgcaacctcaaactcctgggctcgagggatcttctcacctaagcttcttgagtagctgggactacaggcacatatc

SEQ ID NO: 776335 - DNA, 452 bp, Homo sapiens
ttttataatatatattagagtgaatagtaacaaaaactttagcagaatattctttccttactacttttcaagtatatgcattcttttgaagatgttgaagtgagaaattaaatatctgagaactgcaaaggaaaaataatccagaayatagaaattttattaggataataaacatctgcagaggtatatcacaggatgaactctttattttttaacaaaatgaattttaagataaatgtctttatctgcagatgcaccttaaaacaagaaaatgaagaaaaaacaaatgttaatatgctgtacaaaaaaaatagagaagaattagaaaggaaagagaaacaatataagaaagaagttgaagcaaaacaacttgaaccaactgttcagtcactagagatgaaatcaaagactgcaagaaatactccaaatcgggtaaatcaatctttggtaaa

SEQ ID NO: 776336 - DNA, 528 bp, Homo sapiens
tttcaaaatatttaacttcttgtaactttttagcaaaaaaaaaaaaaatacactactgtccgagtaaaacagggcacttcctatttaaggagaaagccaagctgataatgccatcataccgcctagcattctcatgtatatgacactgatttgacttaraaagaaaaaagttttaatactctcttctacttcccactagcaggcaattccattcttgcctttccttttcaccatttcttctacgatcacctagaaaaatgatgtctggtgcatattaggcccctaataaaggaataaagaaatgtgtgaaaggaatttcttgaataactatttcaaaactttttgagcaagaagactattattaagagtgttcccatgagcaggcaacaaacaatgacaaaagctattattcagagataaaaatgtccaaaacatagataggatataaatctctatcagtgcatgacaggtatctatcaaaaagtctcaaaaaaataccaagaaacatcacaaccaaatgcatgaaac

SEQ ID NO: 776337 - DNA, 646 bp, Homo sapiens
gtatatttgtctatagtgttcaagtccaatgttactgattttctgtctggacaactgatccatggttgaaagtggagtattacttttctctactatttttttgtggtctaactctctctgtagagctgttcatatgtgttttatatattaaggtgttccaatgctatgtgcctatatatttacaattgatatatcctcttgataaattgactcatttatcattatataatgactgtttcttttacagtttttgacttaaagtctattttgtatgatataggtatagctacccctgctcttttctagtttctatttgcatggaaagtctttctttcatttatttcctttcaatctatgtgtgtctttaaagctgaagtcagtcttttgtaggcagcatatagatgggttgtgtgtgtgtgtgtgtgtgtgtgtgtgtgcgctcgcrcgcatgtaatctattcggccactctatgtcttttgaatagagaatgtagtccatttacatttaacataattattgagaggtaagaacttattattgccattttgttaattgttttctgactgtttggtaggttctttgtttctttcttcctcgtctgttatctttgtgatttatttattttatgtagtggtatgctttgat

SEQ ID NO: 776338 - DNA, 557 bp, Homo sapiens
aaatacaagtagaaacgtgaaataagacctactgtttgataaatcagtagagtgactatagtaaacaataatctattatcatttcaaaatagctagcagagaataatttgaatgttcccaacataaaaaaaagctaaagtaatggatatcctaagtactttgatttgatcattacacataatatgaatatatcaaaatatcatatttacccccaaatatgtacatctattatatatcaataaaaatgtagaaaaaggagttatcattatgtacctcataaatgtatataattattatgtgtcagttaaaaaaaatctagtcyttcatcccagatggagtctgttattgtacttgatgaccacttaagacaaaaacaaatgcttctctgttctaacacttgctaacactggctgaattatttagacagtggaacactctcttttggcctattaccaaaaaagtctttatccctgtagcaaaaagcagaattgcatagcagtaaaatgctatacaaaaaaattatattttggatttatgaatatcaatatttctttaat

SEQ ID NO: 776339 - DNA, 516 bp, Homo sapiens
gtctacttatttcggtcaaaatatactctgtgagacaagaaaataacaacgattatatttgtacttcagtggcaaaggtagcaaaatataatccacttctgagaaagctaaaaagagcagcagagctaagtaaaattcaagattgtaaaacagagaagcagttttcagacatttcaaaccgaagggttagtctcccaagccattcctgcaatgttaggcagaaaacagtcaagtgatttattttagagagatgctgatctatatgaggattaagagatctcaggctaacactgctggcagccacagagcagctttgggagtgtactaagaagatttcaaactgggagcaacttatgcaaaagacwcaattcccccaaccccccattggccagggctttaaacagtccttgtgattcgcttgttgccctttctttggcctatttactgagtagacacaatcagtccctctctattcacatagtcctttggttcacatatttgggtaaatgtattgtt

SEQ ID NO: 776340 - DNA, 659 bp, Homo sapiens
tttcagttttctgcatatggctagccagttttcccaacaccactcattaactagggaatcctttccccattgcttgtttttgtcaggtttgtcaaagatcagatggttgtagatgtgtggtgttatttctgaggtctctgttctgttccattggtctatatttctgttttggtaccagcaccatgctattttgattactgtagccttgcagtatagtttgaagtcaggtagcatgatgcctccagctttgttctttttgcttagaattgtcttggytataccggctcctttttggttccatatgaaatttaaagtagttttttctaattatgtaaagacattcaatggaagcttgacagaaatagcattgaatctataaattactttgggcagtatgatcattttcactatatcgattcttcctatccatgaacatggaaagtttttctatttgtttgtgttctctcttatttccttgagcagtggtttgtagttctccttgaagaggtccttcgcatcccttgtaagttgtattcctaggtattttattctctttgtagcaattgtgaatgggagtttgctcatgatttgtccctctgtttgtctgttattggtgtgtaggaatgcttgtgatttttgcatattgattttgtatcctg

SEQ ID NO: 776341 - DNA, 633 bp, Homo sapiens
aaataatactacatattgggtacaatgtacactgctcgggtgataggtacactaaaatctcagacttcaccactatacaattcatccatgtaaccaaaaaccactgtacctcaaaagccattgaaataaaataagtgatcaacactatactcactcagctcatttatatatctgacaccccttcttatcactgggtaggtcccaccgtcaattcctttaaactgcctattctcactcagcttctacatgctcctacttgtggctgacagtgctagtccactcctgcatccactcatcccagtttctcagtatatacccgcaataccgatcactgctctttccctcagtttctctttaacatgtgctattatctaacatgaggcaccttctgcttctaaaactgaaactcagtctcagtgctgaaattcattcaaaaatgcaccctccaatcaacttcyccaacataagaaaatgaaattcattcattcagtttacagtgacccatgttttcaaaactgaaacatacaatacatagtctgatgtttgaaatattttaagtctggctaatatggcataaatataaaatatatagcagaccctcactaaaaccatatccatttatttaaaagtgtg

SEQ ID NO: 776342 - DNA, 526 bp, Homo sapiens
tatggaaaatccctgtatttgttcctcttgttatccatttttcagttccctttctaatgagtttgttctccttataattttcttgtatctctgacccttcaatttgacttcattttgtgttcaagccaggaaaacctaccaatttgaacttgaaagagacagaactcacttagcacaattttcattctttacgttgtcrttgtaccacgttaaaatgttttcccttcaaataattatatggcatagcactttgaaatatgaccatttgcggaaacccaatttcagaaaatcaaacacagctcacgaaggtgctgactggataacaaattcaatccaggatcatagatgcctctaaagagatagttgccagatgttcttttggatatgggagaagataaagaattaggaaagaagaggcaaaggagagaacaatcatgaattaagcagggactttttaggggaaaaactagaaggggaatttttaattccaaataatttcctatctgtcaaactggccaactgatat

SEQ ID NO: 776343 - DNA, 603 bp, Homo sapiens
aagtgaacttggttttgttgaattcagcaaggcaatgataattggcctgtcagccaggaatcccattccctctgaacactttctctctttctcaggctaccttgaaggtagaggcaatccaattctggccaattacaattagggggatatctgttttggtggaaagcttttccttccttgacaagaaaggacagagaggaccagctccactccktcctttcttgaccaagagtatgatgcctgaagaggtagaaatgattttttgatcctgtgggaagaggacaaaacagctgagttaaaccaagcagagagatagaaagaatgtgggttcctgaggacgttgttgagccctgcctgagttcctcctccgatagcttgtgctgttaaaggcaattatatgtgtttattgcatgacacaccattacttgtctccaaaagcagtcctgactggtctaatatcctttgtaatgggcaaaaagcacatgctctttgaactgaaatccagcactggatgcttctgaatgtgtcatatcagcccctataaaattgctgctaatgaattccactatggagtggctcaacagagaaattcagcacctactt

SEQ ID NO: 776344 - DNA, 641 bp, Homo sapiens
tttcctttcagcaaggattcaagagttctaggaaggagagtctattttatagagtaaaagaggaaatcctgagacgtgtctgactggcaagggtcccatgaagttgggaattctgaaagtggggagagactttccaattggtcttcatgtacatttgacggccctggattagctgcaagtgagcaaggggggcaatttcaggatatttcaaaagaggaagattgttcagtgttataggttgactgtggatcgtcatttcctagaacaagtrggggtcaataaagcactattttaaagcaatgatgcttaggacaagttgcatgccatgataggcatctctcaggactttttgttctgcaagaaaaatatcccaactttgtttgaaccacccatttttaggtttctgtaactagcagattcgcactgtttgtgcaccttgatacatctatgcctcaggttagagaccatcatgcagcttttagctagagaaacgtatcaatcaagcttctccaacccacggcctgcaggccgcaggtggcccaggatggctttgaatgcagcccaagacaaatttgtaaacattttaaaaacattaagacatgtttttgtgattttttttttttttagctcatcagctatca

SEQ ID NO: 776345 - DNA, 343 bp, Homo sapiens
ggaaagataggggtcacatggtaggttgttggtgagaaaaagatattgatttcctgggtaatgttggtgcagattagctgagcagctgcctcctctgtctcccccatgttgttttggtcaatcagcccacacagtttggaggattctgcctggtttgtctcagctaggctttttacaacctattccagttgcctgrgactgctataacaaatggcaacaaactgcatgacttaagacaacagggatttaattcctgtcagttctagaggcaacaaatctgagctgcacccactccagaggcgctagggaaggacccttccttgcctctcccatcttcaggtgg

SEQ ID NO: 776346 - DNA, 383 bp, Homo sapiens
gagggcaatggaagtgatgatgttacaaatatggcaagaatctgttcaaagtaagtgtttcctacttcatacctttgccaaaggccagtattatctggcctaataacttcaggcccagataagttttaaagatcaaagggcccacttctaagttaaatccctagagttttttaacactgacactagtgagatttgggggtggataaattatttgttgtctgggtggggctcayggcagggaagaagggctgtcttgtattataggatgtttagtagcatcgctggcctttacctagacagcacccctctgccatccccaccaatgacgacaactaaaaatgcctccaaacatagccaaatgtctttaggaagatgtacaaaat

SEQ ID NO: 776347 - DNA, 581 bp, Homo sapiens
gtggttctcaaacttatgccaaccaactcaatgtcagatccctttctcccaggaggctgcccttatgaccttctctacagtcagataatcatgctgtgttctgtgttcatcttctattttggcacttcttgtattggggtcatttattcattcatttcattcattcattcaacaagtatttattgaccaactttgagtcagacactgttctaggtgctagggacaaagcagtgaatataaaaaggcaaagtgttcaaagcattagcatctatggggagtcaatattatatacatacatatatatataaaatcasacaatttgtggaacaccataaaatattgatatatggaatttaatatatgtctgtgaagaaaaataaagttgggtaagtacaaaggagtgcagtgggtcaatagggattagtaatttttaataaggtgatcagagaagggctctctggtaagatgtcatttgaacagagggcttgatggagtaaagcatgcagaagatattggacaaaggagggatatgatgtgagccccttttcacaggatcactctgggtgttgtggggagaaaag

SEQ ID NO: 776348 - DNA, 635 bp, Homo sapiens
aggaggattatttcaccaatgaggcaaatccaggagtcattaaaattgggctatccacttgaactcatggacgatcctaaagagctcaacctccactaggcttccccatagagtaattggaatataaacaatctctgaactcattcatccattcaacaagtattaagagttctctctatgtgacgagcattgggctgggcttggggaaacaagagtcagcacaaatagtcatggtccttaaagtggactcctgttgtttgcctgtccagcatctcttctgctaacagaaccactcttttctcttgagaaaatattcttcctattttcagactgtgtgttttagcttgggctartttccaattcttggctttgagtttgggcacttggccaggcacgaccaatcattgtgttgtgtcctctctatccacagtgattggtttaggaatggtcatgtggctccagttgggtaaatgattatcagcaatgagtttttgactggaattagagtcatacatcacttctcaatggggctcattgagaatacactctgagaaatgtgtccttaggagatttcatcattgtgtgaacgtcatacagtgtactcacacaaacctagatgggatagcctactacac

SEQ ID NO: 776349 - DNA, 635 bp, Homo sapiens
aggaggattatttcaccaatgaggcaaatccaggagtcattaaaattgggctatccacttgaactcatggacgatcctaaagagctcaacctccactaggcttccccatagagtaattggaatataaacaatctctgaactcattcatccattcaacaagtattaagagttctctctatgtgacgagcattgggctgggcttggggaaacaagagtcagcacaaatagtcatggtccttaaagtggactcctgttgtttgcctgtccagcatctcttctgctaacagaaccactcttttctcttgagaaaatattcttcctattttcagactgtgtgttttagcttgggctagtttccarttcttggctttgagtttgggcacttggccaggcacgaccaatcattgtgttgtgtcctctctatccacagtgattggtttaggaatggtcatgtggctccagttgggtaaatgattatcagcaatgagtttttgactggaattagagtcatacatcacttctcaatggggctcattgagaatacactctgagaaatgtgtccttaggagatttcatcattgtgtgaacgtcatacagtgtactcacacaaacctagatgggatagcctactacac

SEQ ID NO: 776350 - DNA, 629 bp, Homo sapiens
tttcacctttggagaattggtaaaggaaggctgtgaccaagtatttagagttctgccttcacaagattccattaagtccttatcttatgcaaaaagtcagctttgagggcctgggattaaattatattagggcaaaaatgaagaggaaagggaccctacaaatctcactaccaaaggcttgtatatatgacaaaccaggcgcccaactcacaaatcagaaccgctggccttaagcaatcatttgcaaggttggggtatatgtgtagagggtcactgggtgtgccatctcaaagtgggaaaaccacctgcttacacatccactgcctggaggagcaaggagcccrcacccaggaaatacacaggtggggactaattgcttcatccactatagcaggcttattccactatccaaagtcacccagattataggagagagggtgtttttactatgtaggtgtcctttcagaattcacccagatgatgtgaaaattctgaaaatagtattaaaagaaaaactttagaataatccgatgtaacagagtttaattgaatgaagatcagctcaccaactgggcagtcttaagggccagaataggttcagagcaactccagggatgctgcttggttgg

SEQ ID NO: 776351 - DNA, 606 bp, Homo sapiens
aattaaacaaccaaccttgagcgcagaagagtacacaaaatctcaatcagtgactttaaagattcttctccctccttgggcacattaagttttcatctacaacatctgaggaacatcatctgctttgctcatatatcrccccaataatgagttgaaaatagaattcctcctccgtaaagcatttctataatttgtaggaaaatgctgtgaaagctatgtatgtaagagcaagagttcaaaagtcatgatcaagtgcagaaggggactcctcccttgcttgctacaatggtgggtctatgaactggccaacctttcctttcactgagaccctgggggtattttggaggtagcaactggggtggagctgacctgtgggaaaggaaaatggtcaccttgtcattggtgcaaaggatagaaaagaaggaccccttgtgattgggcaatagaaaaaggagtgagataaagaaagatgtctgaacttgggattccaagctgaatgctgttcaatggatggtgcaaaccttctccacgttccttatacagtctccagtgaaatccatattgttcataaatgctgttgtacaatttaattctataggatagttc

SEQ ID NO: 776352 - DNA, 614 bp, Homo sapiens
ttgcctttagggcagtgcattctccctggtcccagctaggtccagagatgctgtccaggagccaggacttggagtcaaaaatctcaggaatatacctggtgccttattctactgtggctgagttggcacccaagccacacgacagagtccttctgacttttctttcccctttccataagcaaagcagcatctccccaaggccaccactgccttaggcctatggtgagtactgcctaaccaccaccagtgttcactcaaggcccacgtgttcttyagtcagcttttggtgattgcctccaggcctaggaccctcccttaaggaaagtggggttccctctggcctaggactgttctggaaatgctgtccaagaaccaaggcctggaatcagggactgcaagagcctgcttggtcctctaccctactgtggctgagctggtacctaaggtggaagacaaagtcccctttactcttctctctccttttcccaaacagaaggagtctctccgtgtagccaccaaagctgggaatgtgctggatctcacctgaagctagtacatctctgagtcctactcaaggcccacagaaagtactgcctgggtgtcattgctgatta

SEQ ID NO: 776353 - DNA, 614 bp, Homo sapiens
ttgcctttagggcagtgcattctccctggtcccagctaggtccagagatgctgtccaggagccaggacttggagtcaaaaatctcaggaatatacctggtgccttattctactgtggctgagttggcacccaagccacacgacagagtccttctgacttttctttcccctttccataagcaaagcagcatctccccaaggccaccactgccttaggcctatggtgagtactgcctaaccaccaccagtgttcactcaaggcccacgtgttctttagtcagcttttggtgattgcctccaggcctaggaccctcccttmaggaaagtggggttccctctggcctaggactgttctggaaatgctgtccaagaaccaaggcctggaatcagggactgcaagagcctgcttggtcctctaccctactgtggctgagctggtacctaaggtggaagacaaagtcccctttactcttctctctccttttcccaaacagaaggagtctctccgtgtagccaccaaagctgggaatgtgctggatctcacctgaagctagtacatctctgagtcctactcaaggcccacagaaagtactgcctgggtgtcattgctgatta

SEQ ID NO: 776354 - DNA, 617 bp, Homo sapiens
aaaaaatgaaatgaaaagtggcattagcatgagctgtccactccccctctcctccttctggtctcttccagtctcttttgccaaagaactgagaatgaatttttgagagccaaggatatggaaaggaagacaaaataaagctgggagaattttggcggaattacatgcttaacatactgcaccatttctttaatatatttaaatagtcctgtgtcatcagttggtggcttttcttttcaacaatttgcaatgtattttgtttttccttaattaagcttcacatgctggaattaattactgctgggtagttgaaatctggtggtctaattttcaaytttagttaataaagctcaaagtctacattcacctctgaaatgatcaaccttaccaaattatatttgtccacttttaccttctagataatgaatatacagggcagctgcaaactgtgattgtaaaataacaagattatttttcatgtgtgacttgtaaatcctctctctttataaagaaaactttatcatatgaaagatctttatattatagggattgcatgtaaaacacaggttgcacatgtgtctccaaagtattcaaagccatcccctctcttaaccatt

SEQ ID NO: 776355 - DNA, 634 bp, Homo sapiens
aaggtatttaataatcaaactcccaaagcggggtagggggataaagaaaggattctaaaagcagtaagacaaaagagacaaataatgtacagtggagttccaatatgtctggcaacaaacttttcagtggaaaccttacaggccaagagagagtggcatgacatacttaaagtgctgaaagagaagaacttttaccctagaatagtatatcaagtgaaaatatcctttaagcatggaagagaaataaaaaccttcccaaaccaaaagaaaaaaaaagctgaaggatttcatcaacactagaccgttctacaagaaaagctgaagggagttcttcaatctgaaagaaagggatgttaatcagcargaagaaattgtctgaaggcacaaaacttactggtaacagtacgcacacagtaaaacatgaatagtacaacaccgtaaatgtggtgtaaaaacttctcttgacttaaaagactaaaagataaatgaatcaaaaaataataactacaacaacttttcaagacttagtgcaataagacataaggaaaataatgaaaaaagtagggggacaaagtttaactgtagagtttttattagttttctttttgcatgactgtttcttgtttatgctatc

SEQ ID NO: 776356 - DNA, 647 bp, Homo sapiens
gaaaagtgatagtgtaagagcagaaaattatttaggaagtgaataaaccaaaagagagaaaattaaacagccaaaagttaattctttaaaatgaataataaaactatacatacctacctagcaagactaatgaaaattatackgagaagacttaaaatatgactagcataagtgaaaaggagaacactaccatagatcctataggtatagaaaaagaattttatggaaaactgtctatgcaaataaatttgaagatttaaatgaagtagataattcctagaaaatcttaatgtagcaaaaagaaatgtaaaatataaatatgctcatatttttaaagacattaggtctgtatctttacatcttcacacaaagaaatctataggtttagatgagattatcagagagaaacattcaaaggaaaaaaataacagttatacaaatacaaactctttcagaagttagaaaaagatgaaacacttctcaatgcattttatgaggtcaatataaagcaaaatgtgatgagtattacaatccagaaaaatctcaagctaacttctctcgtgagcttggatcttgaatgcaaaattcttaaataaaatattagcaaatttaatacagcaatatgtaaaaaggatacacattggccg

SEQ ID NO: 776357 - DNA, 597 bp, Homo sapiens
aggtgtcttgaagaggcaacaaaaagaggaaccaggaatactactacatataatagagataattttttctataatcttttttggatagatttttctcttatgtcctttgaattaaaacaatcaattccctaaatttttcatctttgtgtttccaaaagcacctctagcctttttttccattattgacctccattttcttatgtaagcagaagtcttcacactgcaattctacccagtattctggtcagtatattagaagcccaggaacctggcagtgatggcaaagaactctcctttagagggtggagagagggtcaaaaatcatgaacacatatcttcaatatttttgcttctatagcatcaaagtaatatcacattatcaaaaagasaaagagttcttgtttgaggaccaatttatcccaagtcagggctgatccctattcagtcctctgaagagtaacaagtatgaaaataaatggtatactagaagacagtttcaggtctaggtacacagtgactcaatgaacatgctcctctttccgtctggaacactattttcccatgtttgttgacttagcaaactccaaaacatgcttg

SEQ ID NO: 776358 - DNA, 537 bp, Homo sapiens
ttagatggtaggtagagtaattgcagttattatctaacagacaagtactggagttggcaagcaatgtcaaaagggtgcagacttaccaaccacctcataactggcttctttcagtattttcattttaagtcgttcaaacttttaatttcatacttatctcagcttttcatcagagactgcactcttttgcatggtggtttaattttctacatatgaaagaacacttgcaaaagggagacaaaaaagtaagggaaaatgaatatttcatatacttattgtctctttgatgccaaaattccatatgtagtgcatactgtttgccggatatgaaggataatttggaggataagacagtgttcttttctgtaraaactcacaattctctcattaacaagtctaaaacaggaaaacttttgtatcctggctatcagcattatttggaaagtttctttttagtttattaaattcaacaattttaaactaaataaaaatggaaactagaaaatagatgtagttattataatattcaatatttct

SEQ ID NO: 776359 - DNA, 550 bp, Homo sapiens
aatggctgttatcagaccaatgaaaaacaatgcatgctggcgaggatttagaggaagggaaacactcccacactgttgatgggaatgtgaagtagtacagccattctggaaaacagtccagaggttcctcagaaaaactaaaaatagaactaccwtacaatccagcaatcctacttttgagtatttatctgaaggaaaataaatcagtatatcaaagagatatctacactcccatgttgcagcactattcacagtagccaagataatggaatcatcctaagtgtccatcagtaggtgaatggataaaatgtggtatatatagacaatgcagttctatttagccataagaaatacacattttcactcgtaatctaaaaaacatgatctcttaaaggtagaagtagagtagaatagtggttactagaggctgggaagggcaggagagaagggatggtagggagaggttgcttaacagacataaaatattacagctagataagagaatcagttctagtgtagtgtttcatagcattcttgagggactatagtt

SEQ ID NO: 776360 - DNA, 550 bp, Homo sapiens
aatggctgttatcagaccaatgaaaaacaatgcatgctggcgaggatttagaggaagggaaacactcccacactgttgatgggaatgtgaagtagtacagccattctggaaaacagtccagaggttcctcagaaaaactaaaaatagaactaccatacaatccagcaatcctacttttgagtatttatctgaaggaaaataaatcagtatatcaaagagatatctacactcccatgttgcagcactattcacagtagccaagataatggaatcatcctaagtgtccatcagtaggtgaatggataaaatgtggtatatatasacaatgcagttctatttagccataagaaatacacattttcactcgtaatctaaaaaacatgatctcttaaaggtagaagtagagtagaatagtggttactagaggctgggaagggcaggagagaagggatggtagggagaggttgcttaacagacataaaatattacagctagataagagaatcagttctagtgtagtgtttcatagcattcttgagggactatagtt

SEQ ID NO: 776361 - DNA, 507 bp, Homo sapiens
ggccttgttctaagaggactccaaaaagcaagtcgtagccccagtgactgggaaaggcttccccgggagagcggccgacacagctgccgcagtagtaagggtttatttatcaaaactgatttatttatcagttcaagacacagttacacagagtgtgggggatggttcatcagcagctggcacgtccagtggcgcgtgtgcctcgggaaggcctgggagggggacacaggtgctccgcrgggaaagctgcccccaccccagcccaaagaagccttccaagctccatcagtcatgcagtcatgtacttttcctcatcagcacaaaccccgcttccttgaagagaagcgtgaggctgggcacggtggcgcgtgtctgtaggcctagctacgagggaggatcgcttgagcccaggaggtcgaggctgcagggctatgattgcaacactgcactctggcctgggcaacagagaaagagagagaggactgtctagaagggaaaacagggata

SEQ ID NO: 776362 - DNA, 507 bp, Homo sapiens
ggccttgttctaagaggactccaaaaagcaagtcgtagccccagtgactgggaaaggcttccccgggagagcggccgacacagctgccgcagtagtaagggtttatttatcaaaactgatttatttatcagttcaagacacagttacacagagtgtgggggatggttcatcagcagctggcacgtccagtggcgcgtgtgcctcgggaaggcctgggagggggacacaggtgctccgcggggaaagctgcccccaccccagcccaaagaagccytccaagctccatcagtcatgcagtcatgtacttttcctcatcagcacaaaccccgcttccttgaagagaagcgtgaggctgggcacggtggcgcgtgtctgtaggcctagctacgagggaggatcgcttgagcccaggaggtcgaggctgcagggctatgattgcaacactgcactctggcctgggcaacagagaaagagagagaggactgtctagaagggaaaacagggata

SEQ ID NO: 776363 - DNA, 543 bp, Homo sapiens
gccaatatggtgaaatctcgtctctactaaaaatacaaaagttagccaggtgtggtggcatgcacctggtcccagctacttgggaggctgaggcaggagaatcacttgaacctgggagtcggagtttgcagtgagccgagattgtgccactgcacttcagcctgggcaacagagcaagactccatcttaaaaaaacaaaaaacaaaaaagggagccgtgggcatgtgtgtgcacaggtgtgcatgggtgtgtgcagctggagagggaagggcctgggtcaggggcgccctcagcctggagccagggaagggcagcgagaggaccccasactcccaaatgaccaagggcctgtttgcagcgtgcttctccctcctttcttctggctctgaagttatatcctgccagatcctggagaaagttcttttagcaaaatgatggcttcgctgaagatgatacttgccacctcacagaagcctgtcacgttcctccctttggaacccattgccaaatgtgggtggtgtggtggacccggggcaaggggcc

SEQ ID NO: 776364 - DNA, 579 bp, Homo sapiens
gcatactgatgcatagagacctatgacacttttttctcgataagtaaaaaattattggtcactgtgatcttttctccaagttcaccatttccctgaaggtgagcacaggtccttctgcatgtgttcaaacaaaaggcccagagactacctggtaagtgaggtgctcacctggttctggatgtttggtctgtctcctcccctctgttgccccacacaaggtcagcccactctttccaggtccgaagaagagagcacagttttgtcctgattatatgactcacccagcttctgatgattctcctgttgccagcgtccatggaggcagattatttattatgtaattcactaaactaatatcaaataacaaagctgtaatgccccacacccaaaggtatgttcatgcaattcagtggaggagagggcctttcatagatagaaggatygagctagattggtcaatatatgaatgaggacactagacttgattgtcgttgtcctgccccgtgtcacaggtgtgatctgtcagggcagaagcagagttccttgtgtgctcagatgagaggggtcacggaggttctc

SEQ ID NO: 776365 - DNA, 669 bp, Homo sapiens
gaaggagaaaggtgtgaaggcggcagacagcagaacctgcttgcctccaccctagccttgccagcccccgtgccactcacctccaggctcagacacatcccaaagggtcctgctggcaacatgcccactgtcaagcgtgactggcccactgtccagactgtggccatggaatccttaccctcaggagtggggctgagacaccctccttagaccggactcctgaggacagagccaatattcccccatcagactgggagcctcctgagggcagggacggtgtctcccccatcagactgagggcactcagagagaatgaattatgtctcccctctcagaccaagagcctcctgagggcagggacagcgtcttccccatcagactgagagcttcctaagggcaaaagctcccccatcagctggggctcctcragggcagagatgacatctccccctcaaacagggtgtgctctggaagaagagactgcctctcctggccacagcctagagcctttcatcaggggtcagtggtgtggatggggcccttgagacaatccagtgagatctggaagtgaagaaaaagattataatctgggataaatataaaaagttacaataaaaattttattgcaaatttacaaattatggttgtttatatgtacatggtaaaggg

SEQ ID NO: 776366 - DNA, 669 bp, Homo sapiens
gaaggagaaaggtgtgaaggcggcagacagcagaacctgcttgcctccaccctagccttgccagcccccgtgccactcacctccaggctcagacacatcccaaagggtcctgctggcaacatgcccactgtcaagcgtgactggcccactgtccagactgtggccatggaatccttaccctcaggagtggggctgagacaccctccttagaccggactcctgaggacagagccaatattcccccatcagactgggagcctcctgagggcagggacggtgtctcccccatcagactgagggcactcagagagaatgaattatgtctcccctctcagaccaagagcctcctgagggcagggacagcgtcttccccatcagactgagagcttcctaagggcaaaagctcccccatcagctggggctcctcaagggcagagatgacatctccccctcaaacagggtgtgctctggaagaagagactgcctctcctggccacagcctagagcctttcatcagggrtcagtggtgtggatggggcccttgagacaatccagtgagatctggaagtgaagaaaaagattataatctgggataaatataaaaagttacaataaaaattttattgcaaatttacaaattatggttgtttatatgtacatggtaaaggg

SEQ ID NO: 776367 - DNA, 608 bp, Homo sapiens
ggcccttgagacaatccagtgagatctggaagtgaagaaaaagattataatctgggataaatataaaaarttacaataaaaattttattgcaaatttacaaattatggttgtttatatgtacatggtaaagggcaatgttatgatttgtgaatacaatatgaaataactaagataattaagaaataactgatataattatcattcattgtttcaaatttttatcttttattgtgacaacatttaacatttactcttagctctttaaaatgaccaatgtactattttaaatgaaccatagaaaccaatttatgtaaacaattgaaaatctgggaaatcaattatgaattactgtaataatttaataattaaaagttaataatgtagttaattaagtttgatttttttcaaactttttttatcatttcattgtaatgtttaatacaaatgcctacatatatatgcattggtctgtgtatttatacatctttctatgggtataaatttttgtccctatagctatgtagttgctgatgtcaacaaatgttaataaaactctggaagaatcagtgcaaacaattaggaatgtttatttcttgaaagtatatac

SEQ ID NO: 776368 - DNA, 419 bp, Homo sapiens
gcaggagtggtggtgtgtgcctgtagtccagctaactcaggaggctgaagcaggaggatcacttgagcacagcagttagaggctgcagtgagctgtgttcaggccactgcactccagcttgggtgacagagcgagacctgtctcaaaaaaaaaaaaaaaagatgataagggaggcttctgagtaaagaacagctcyactccacctgccgtggagctgagagaccgccatgtgtgcctgcccacactcctacccaggacagcctaaaccatccacacagggaggcaggatcagaatgtggctgtaacttggggcaccgacgccgcctgggtgtcctggacacagcctggagaaagtctagagacagggctgtcacatctagaacaatggtttctgatgagcttgggagcaccctgtccaa

SEQ ID NO: 776369 - DNA, 419 bp, Homo sapiens
gcaggagtggtggtgtgtgcctgtagtccagctaactcaggaggctgaagcaggaggatcacttgagcacagcagttagaggctgcagtgagctgtgttcaggccactgcactccagcttgggtgacagagcgagacctgtctcaaaaaaaaaaaaaaaagatgataagggaggcttctgagtaaagaacagctctactccacctgccgtggagctgagagaccgccrtgtgtgcctgcccacactcctacccaggacagcctaaaccatccacacagggaggcaggatcagaatgtggctgtaacttggggcaccgacgccgcctgggtgtcctggacacagcctggagaaagtctagagacagggctgtcacatctagaacaatggtttctgatgagcttgggagcaccctgtccaa

SEQ ID NO: 776370 - DNA, 419 bp, Homo sapiens
gcaggagtggtggtgtgtgcctgtagtccagctaactcaggaggctgaagcaggaggatcacttgagcacagcagttagaggctgcagtgagctgtgttcaggccactgcactccagcttgggtgacagagcgagacctgtctcaaaaaaaaaaaaaaaagatgataagggaggcttctgagtaaagaacagctctactccacctgccgtggagctgagagaccgccatgtgtgcctgcccacactcctacccrggacagcctaaaccatccacacagggaggcaggatcagaatgtggctgtaacttggggcaccgacgccgcctgggtgtcctggacacagcctggagaaagtctagagacagggctgtcacatctagaacaatggtttctgatgagcttgggagcaccctgtccaa

SEQ ID NO: 776371 - DNA, 655 bp, Homo sapiens
gatagggttttaatattaattttattatttactgaattttaaactattctacagtttattttttgtttttatgagataaaatttacatataataaaatatgcatagatctgaaatgtatcactagagagtttctggcaaatgtgaatacccttgttctcaatacctaaggtagctgaagagcaagtccatccccacatcgcgggttttccctgttcttgcggtcaactcctgcaaggggaaacgttttgatttctgacactacagatccatttattttctgttttgaactttatataaatggaatcaaacattayagaccttttttttcaaaaggggctttgatatttttgagattaattcatactatttaatgtataaaattagatcaacatattgtcatttattcgattcgtagactgactctgatatgaaacctcaaagttttcatgtacttatggagagagagagaaggagaaagattttatatctgagtcagtccattaagtaaataaatgagaatattttgatttattttcccgttgatgtactttaaatttgtttccattttatgaatattataggcaaagctgtttcaaatatattagtgtaggttttcctatattgtttcatttttgttaagaaaatatgaagtat

SEQ ID NO: 776372 - DNA, 536 bp, Homo sapiens
atttcatgtacggagggccatgctgggtgtctgagcattgccaccgctcggtgagtgttgatgctggtgtttagagggggagagggttggggtctgctggcgggctttagggtgatgggtaggggtgtctaggcaggcgagggactgagaaagcattggtgggctgtgggcaggaggctgcccaggtctagccgggtggagcaggcggctcctggtaggcagcgtggggtccatcccccggctgtcckctgtctgctactgtgagagcagtgggcagaactgacctctcaccactcctgtttcccccaaccccgtgtctccctgcagaaagcgggcagcggcctgcgccagtggaagcgggtgtatgccgcgctgctggcgcgctcgctctcgctgagcaaggagcagcgggagcccgggccggcggcggcgggggctgtgggggccggcgcaggtgaggacaaggcggcgcccgtctgcatcggctcctgcctcgtggacatctacagcgagaccaagaggaggcacgtgttccg

SEQ ID NO: 776373 - DNA, 536 bp, Homo sapiens
atttcatgtacggagggccatgctgggtgtctgagcattgccaccgctcggtgagtgttgatgctggtgtttagagggggagagggttggggtctgctggcgggctttagggtgatgggtaggggtgtctaggcaggcgagggactgagaaagcattggtgggctgtgggcaggaggctgcccaggtctagccgggtggagcaggcggctcctggtaggcagcgtggggtccatcccccggctgtccgctgtctgctactgtgagagcagtgggcagaactgacctctcaccactcctgtttcccccaaccccgtgtctccctgcagaaagcgggcagcggcctgcgccagtggaagcgggtgtaygccgcgctgctggcgcgctcgctctcgctgagcaaggagcagcgggagcccgggccggcggcggcgggggctgtgggggccggcgcaggtgaggacaaggcggcgcccgtctgcatcggctcctgcctcgtggacatctacagcgagaccaagaggaggcacgtgttccg

SEQ ID NO: 776374 - DNA, 614 bp, Homo sapiens
aggtccacccccatgattcaatcacccccaccaggctcctcctctaacacgtggagattacaatttgacatgagatttcagtggggacacagatccaaacataccaagccatttaaacatagttaagatattatayttctgacccaaagatcttatagtttctgaaaggatgaaacataagcatataactcttctcccagagagatttttaaaaaacttttgtacagacattgcatgagtttttgttaaatgccttgacagggagtgctatggaagctcaggccaggaggtctgtactctgtggataagttgccaagaaggtttcttggaaaagatggggcttgagataggccttggcggccccattcagtttgccttggtggagagaaaacagtgatcctctactgtagtgatgctgcagtgtagggctgtgaatgtaggcatgcttaagccaggtcttgtgagcacattagacagaatatttcagtaggctaatatgagagatgatattgaaaagaaataaggggcagagtgcagagggctttaaataccaaacctaagtttttatttgggttaagttacttaatctctgattttctgttttctacttttga

SEQ ID NO: 776375 - DNA, 606 bp, Homo sapiens
aatcagcctaaaaatgctcttaaaaatacatcttcaagacatcatacttcagctctcctctccaaacactccttaattctatctattgtctcagcttcagttacctcctttaaaagttccatgtcttccaaattcctgtccctagccatgtactgtctctggagagtacccacgactcccatctcctgtcttctaaacatctctgcctgcacatcctgttgacagttcacatgcaatgtgtcttagataaaatttatgttttctactttacctattctatttcccatatttcttggtcatgccagctcaaaactttccaactcatctttgatcccttacacacactcytttcttccctcttcattcacagcagttggcatatcttaggaattccactcaataatgttataccatctttcccttttcaatgaccacagctactgttctacttcctctttatactgtctattatctagctattgcagtagcctccaaactactgcccaccactgtctttccacttccgtttcactccccaccatctaacggattaaccttcttgagtaaaattctgatcagaagactcttgtttattgacactccaaa

SEQ ID NO: 776376 - DNA, 627 bp, Homo sapiens
aaagagcatcatattacaggaggtgctaataggtactccacaaaagtacttacactaatgcttgtagtatgttttctttcaaaatatgttttaagcatataatttcaaaagtagccatatatatttagtctccctaattgaaaatcatctcctttaaaataagtttcatgaaattggttgacacatcaacattttaacctgtgcatcctcatattggcagcaattaagtaagtagagagttgtgggggtttttctgttggaggctgactggtcaatgtcataatttgacaacattttgatacccaatatttattgtgtattaarccaatgaataaaatttttgtcatttcttgcagcaaatagttaattataaattcatttattaggtttatttttttgggggggttccttttagttgtttacctttcccatacttttaatataactaacaaccttctgtcaatatttattagatacattacagtttttacatttacaatttttaatttcttcccatggtcaaataaatttgggaattctgcggtcaactttgttcgaagtataagtataaaactttattgcatcataagtggctagatttatatccacctccttctctaaattaca

SEQ ID NO: 776377 - DNA, 627 bp, Homo sapiens
aaagagcatcatattacaggaggtgctaataggtactccacaaaagtacttacactaatgcttgtagtatgttttctttcaaaatatgttttaagcatataatttcaaaagtagccatatatatttagtctccctaattgaaaatcatctcctttaaaataagtttcatgaaattggttgacacatcaacattttaacctgtgcatcctcatattggcagcaattaagtaagtagagagttgtgggggtttttctgttggaggctgactggtcaatgtcataatttgacaacattttgatacccaatatttattgtgtattaagccaatgaataaaatttttgtcatttcttgcagcaaatarttaattataaattcatttattaggtttatttttttgggggggttccttttagttgtttacctttcccatacttttaatataactaacaaccttctgtcaatatttattagatacattacagtttttacatttacaatttttaatttcttcccatggtcaaataaatttgggaattctgcggtcaactttgttcgaagtataagtataaaactttattgcatcataagtggctagatttatatccacctccttctctaaattaca

SEQ ID NO: 776378 - DNA, 570 bp, Homo sapiens
cttttttgtggaaattgacaagcggatccttatatttatataaaatttcaatggacacaaaatagccaaaaccatcttgaaaaaaaattaactcaaaatggattatggatctaaatgcaagacttgaaactataaaactcttgaaagaaaatataggaataaatcttgatgatcttgaatcaggcaatagtttcttggayatgacaacaaaacacaagcaacaagagaaaaagtagatatgttggatttcataaaaattaaagatttttttgttctatgaattgaaaccatcaagtaagtaacaaaaaaacatctacacaatgagagaaaatatttgcaaatcatatatctgataagggaattgtatgcagaatatataaagaactgtcacaacttcatattaaataaataacacaatttcaaatgagcaagtgatttgaataaacatttctcaaagatatgcaaatagtcaataaacacataaaaagatgttcaacgttattagtttagagagatgcacatcaaaagcacaatgatataccacttcgcactcactagaatcattataat

SEQ ID NO: 776379 - DNA, 512 bp, Homo sapiens
agacaacatgctttaatcctcagtggatgttggggtgtcaaattcatattatcttacttgtgttttagttcagacttgaggaaatgctcttagggcgggttaaacaaaaatccctctgacttcataggcgactcacttgcytcgtggagctttgcaatttggacattgcccatctctctgcaagcattaacagcaggcaagagccctgtgaactcgatgtgtctacaagcctcgaggagatttaatgagccagtcaattcaaggcccctttgccagcctggccttatatgtctgcccattttaaattcagccttcttctcctttctcaacacttcagatccttttattttaattttcccttaatacatataaaacaatgcaaagaaattcctggaaaccatgtgcctctcctccaaccagacttggagagagtgagtcactcagcctcgttccttgcctgcctgccggcaagacacactgctcaggcagggcttttgtttcctctggttatg

SEQ ID NO: 776380 - DNA, 512 bp, Homo sapiens
agacaacatgctttaatcctcagtggatgttggggtgtcaaattcatattatcttacttgtgttttagttcagacttgaggaaatgctcttagggcgggttaaacaaaaatccctctgacttcataggcgactcacttgcttcgtggagctttgcaatttggacattgcccatctctctgcaagcattaacagcaggcaagagccctgtgaactcgatgtgtctacaagcctcgaggagatttaatgagccagtcaattcaaggcccctttgcyagcctggccttatatgtctgcccattttaaattcagccttcttctcctttctcaacacttcagatccttttattttaattttcccttaatacatataaaacaatgcaaagaaattcctggaaaccatgtgcctctcctccaaccagacttggagagagtgagtcactcagcctcgttccttgcctgcctgccggcaagacacactgctcaggcagggcttttgtttcctctggttatg

SEQ ID NO: 776381 - DNA, 493 bp, Homo sapiens
cattacaaaaatccctctgcgattagtgcccgactctttgagtcggcaggactggcaagcaaatgggggacggaaaggtaccttgtggtgccaggggttccagctgtcctcctgccacctgaaaggatatttgggtgctgcacttcctggagcctctctgccctgctrccagagtccaaaataaaagtgcccttgcaatttagaagaccttgctgttgacacctacattttgtcctgcactatttcttactggggcttctgttgctggcactttccctgtgctgatttttgtgaccattgttgtttttgttcaccatcatttgtgcacacgttggcccttggctgtggatcatatgctccctgaggacaggctgatgtcttatatatctgtagctcccctcgtgacttgcaaatgacaaaggggccatacccataccatgccatttatttgattaagaactcagtggctccagcgcctcttatccttatgacc

SEQ ID NO: 776382 - DNA, 432 bp, Homo sapiens
ttataaatatgaagatatgatatacacttataaatatgaaatgtccccttatcattgtattggggtctatgtttatatcctcttgctgacttgaaccttttaacgttatataatgagctgcaaatatatgttgtaaatatgtgtgcacccacactggagcacccagatatacaaagcaaatattaaagctaaagagagacatagaccccaatacaatgataccaggacacttcaacaccctactttcagcattggacacrtcaaccagacagaaaattgacaaagaaacattggacttaacctgcgctacagaccaaatgaacctaatagatatttacagaacattttatgcaatagctgcagaatatgcattcttctcttcagcccatggatcattctcaagcatagaccttatgataggccacaaaagaa

SEQ ID NO: 776383 - DNA, 432 bp, Homo sapiens
ttataaatatgaagatatgatatacacttataaatatgaaatgtccccttatcattgtattggggtctatgtttatatcctcttgctgacttgaaccttttaacgttatataatgagctgcaaatatatgttgtaaatatgtgtgcacccacactggagcacccagatatacaaagcaaatattaaagctaaagagagacatagaccccaatacaatgataccaggacacttcaacaccctactttcagcattggacacatcawccagacagaaaattgacaaagaaacattggacttaacctgcgctacagaccaaatgaacctaatagatatttacagaacattttatgcaatagctgcagaatatgcattcttctcttcagcccatggatcattctcaagcatagaccttatgataggccacaaaagaa

SEQ ID NO: 776384 - DNA, 528 bp, Homo sapiens
taaaaacatcatttatcatggccaagtgggatttatcccagagatgcaaggatggctcaacatgcacaaatcaatcaatgtgatacatcataccaatagaatgaaggacaaaaaccacatgatcatttcaactgatactaaaaaagcatttgataaaattcaacatcccttcatgattaaaaaaaaaatcactaaaaaactgggtgttcayggaacataccacaacacagtaaaagctatatatgacagacccacaattattatcatactaaacacaaaaaaactgaatgcctttcctctgagatctggaacaagataaggatgcttactttcaccactgttattcaacatagtactggaagtcctagctaaagcaatcaaacaaaagaatgaaataaaaggtcatccaaattggaaaggaagaagtcaaattatccttgtttgcagacgatatgatcttatatttcaaaaaaactaaagattccataaaaagtatattagaattggtaaacaaattcagtgaagttg

SEQ ID NO: 776385 - DNA, 639 bp, Homo sapiens
actaaaaccaaagacacacaaaaaatcaaactaaagtccaatttccctgatgaacattaatgcaaaaatcctcaaccaaatactagcaaaccaaattcaacaacagattaaaaacatcatttatcatggccaagtgggatttatcccagagatgcaaggatggctcaacatgcacaaatcaatcaatgtgatacatcataccaatagaatgaaggacaaaaaccacatgatcatttcaactgatactaaaaaagcatttgataaaattcaacatcccttcatgattaaaaaaaaaatcactaaaaaactgggtgttcacggaacataccacaacacagtaaaagctatatatgacagacccacaattattatcatactaaacacaaaaaaactgaatgcctttcctctgagatctggaacaagataaggatgcttactttcaccactgttattcaacatagtactggaagtcctagctaaarcaatcaaacaaaagaatgaaataaaaggtcatccaaattggaaaggaagaagtcaaattatccttgtttgcagacgatatgatcttatatttcaaaaaaactaaagattccataaaaagtatattagaattggtaaacaaattcagtgaagttgcag

SEQ ID NO: 776386 - DNA, 497 bp, Homo sapiens
aataaatgtttattgagctagactcccagaaaaccatttactttccttatgataaagatagcaaataagacacaggctgtttcaggatgtgcaagaaaaaaatgttggagcccccaattcatatcacagtttattgtactttaatgacaagataggcagattctgacgtggctccaataatctttgccgcctgatattcatgctggtgggttggacctagtaacttgttcrtaacagaacatggcaaaaatgatggaatgtcgcctcctagattgttagaaaagaaggtgtgacctctatcttattggcactccctctgtaacttcttggctttgtgtactttgatgaaggaaggtgctatggaactgtctacatgtcaaggaactaaggttggtctcctgtccacagggagctgggaactgaggttctgaatctaacagcccttgaggaactaatcctgccaatcaccacatgagtgaacttggaagtggatcctt

SEQ ID NO: 776387 - DNA, 611 bp, Homo sapiens
gtaatcttatttatagtagctacaaataatataaaatacctagggataaacttaacaaaagaagtcaaagatctctgcaatgaaaactataaaacactgatgcaagaaactgaagaagacacaaaaaatgaaaagatatttggtgttcatggcttggaagaatcagtattgttaaaatgtccatgcaagggctgggcatggtggctcatgcctgtaataccagcattttgggaggcctaggtaggaggatcgcttgaggccaagagtttgaggccagcctggccaacatgcgaaaactctgtctctactataaaaaagtacaaaattagccaggcatggtggcacatgcctatagtctccagctactcaggagactaagccatgagaatttcttgaatcccgaaggcgggggttgcagtgagctgagattgctgytccactgcactccagcctgggtgacagagcaagactctgtttaaataaaataaaaataaaaataaaatgtccatactacccaaagcaacctacacattcagtataacctctatcaaaatactaatgacattcttcacaggaatagaaaaaaaaatcctaaaattgatatagaacca

SEQ ID NO: 776388 - DNA, 618 bp, Homo sapiens
gttctattataaagacacatgcacacatatgtatcattgcagcagtattcacaacagcaaaaacataaaatcaacctaaatgcccatctgtgatagagtggataaagaaaatgtgatacatattcaccagagaatactatgcagccataaaaagaatgagattatgccgtttgcaggaaaatggatgaactgggggccatcattyttagcaaactaatgcaggaaaagaaaaccaaatactgcatgctctcacttaaaagtgggaggtaaatgatgagaaagcatggacacagaggggaacaacacacactggagcctattggagggtggaaggtaggaggagggaagggatcagaaaaaataactaatggatgctagtcttaatacctgggtgacaaaatagtctgcacaacaagcccctcatgatacaagtttacttatgaaacaaactggcacatgtaccccttagcttacaagcaaaaaagaaacaacataaaataaaaaattctgatggaactgtttctaaactctgctataataaaagctaatttttcacctgtagccctcaagttccttatcagtaaaatgagcttaattgtgaagtcatttctagcttta

SEQ ID NO: 776389 - DNA, 626 bp, Homo sapiens
agatattgtatgcatcagatagtgaactaacaatactttattttcaggactaagctactttcctttcgcagaaaacctattaatgtgcttccatagagactaaggtttatgttagaagactcgcataagaataataaggactagattataaataatccttcccatatgccaaccacttgtcaagtgctttatatgcattgtcttaattagtggctaaatgccttaaaaggcattggccgggcacagtggctcacgccagtaatcccaggactttgggaggctaaggcgggtggatcacgaggtcaggagatcgagaccatcctggttaacatggtgaaaccccatctctactaaaaaaatmcaaaaaaaaaaaaaattatctggaagtgctggcaagtgcctgtagtcctagctactcaggaggctgaggtaggagaatggcatgaacccgggaggtggagcttgcagtgagctgagatcacgccactgcactccagcctgggcgacaaagcaagactcttgtctcaaaaaaaaaaaaaaaaaagcaaatattatcccataattctgattaacccaagtttagagaagtaactcctccagactcattcagataagggacaaagcta

SEQ ID NO: 776390 - DNA, 605 bp, Homo sapiens
tgcaaaacctatgctactgcataccaggattccattttcatctctgatattgactccctgtgggacctaggaccagagactttgctttctctgagcctcactttcctaatctgtataatgagaagcagttccaagggttcttccaaagttctaaggccaataccattctagttggctagagctcttaatcacctggagaccaatttcttttcacctttgagtttttgttttttgttttttgtttttttgaggtggagttttactcttgttgcccaggctggagtgcagtggtgtgatctcggctcactgcaacctctgcctcctgggttcaagcaattctcctgcctcagcctcrtgagtagctgggattacaggtgcgtgccactgtgcccagctaattattttgtttgtttgtttgtttttgcttttgtttttgttttttagtagagatggggtttctccatgttggtcagtctggtgttgaactcctgaccccaggtaatccgcctgccttagcctcccaaagtgctgggtttatttgttttgttttatagtggcaggctagctgctgtgtattagttccacaacaataacattaaaatcag

SEQ ID NO: 776391 - DNA, 574 bp, Homo sapiens
tttgcatctcaggcttttatactaaatgttcattaaacattctacgatctatctagggtaaccttgtcagaacagggagggaaaaaggaaatatctatcttctttcttgtcatttctctcagatgaatgaattaaatatttttattgccttgaagattaattatcttctgtccccaggccagctttagtattctagctgtatcttcttgtgactggacctgccagttggagtttctgcccccactctcaactctgtttttgccaggtttttcttcatcatcatatcatgtaggcttccgcagtgagtcacagtccaggggttcagagagactagagtgtgacctgcagrgtttagaataaattttgaattatctatcttagagctgagagacctcctgaaatcttctggtcctttctggcacatgagatactgttattgtacttaacaagtgaaatacctgagacctagagagtttaaatgaccaacctaaagctgcccagctaataaattatgagtcctaatgccagattttatccttccgaggaaagccaactcttaatttggaaaaggcat

SEQ ID NO: 776392 - DNA, 555 bp, Homo sapiens
tccttaaaaccccagcttgcagggccccattccataagctctaattcagtgggtcttgggcggggccaataatttgcacttctatcaagttcccaggtgatattcctgctgctggaatgcaatacgagaaccactggcctagaatggtgcccacagtcacatcctcagcaacctggtgtctcctgggcagtactaaggagctgggccacagctggcaaagcccagccttaggggtaccaacatcacctgggaagctgctgggaatggtcttggggtgagcgcccggtgcagagaagtaaactaaggcacagagttcagcggcagagmtgggagaggagcaggataccagggcccagtagagaacggatggggctgcaggaccctacaacaagtactcatgctttttttaaattgccagctctcatacgttttcagagtaaagacaaaaaaagtgtttctgctaattaattttcaccactttttccccctaggttagaggttgcttccaaaataataactgagttgccaatagagatttttttcccttttgttatc

SEQ ID NO: 776393 - DNA, 647 bp, Homo sapiens
gtctagattgtcagttattcccttgaagcacatagacgatattatattttgccgggtatagtggctcatgcctgtaatcctagcactttgggaggccaaggcgggcagatcacttgaggtcaggagtttgagaccagcctggccaacatgatgcaaccccatttctactaaaaatatgaaaattcgcttggcatggtagcgcctgcctgtaatccaagctacttgggaggctgaggcaggagaatcacttgaacccaggaagcagtggttgcagtaagccgagattgcgccattgcactccagcacgggtgacagagcaagactctgtctaaaaaaaaaaaaaccaaagatattatatttatattctggggttcattgttgcagagaattcaactrcttttctagcttattagggtgtttcttggaaagtaatctgtatttttaattttaagatttttctctatgtctttggcgttttataatttcacttcattgtgttgacgtgtggatttatattttattcatcctatttaggatttgctgagcttcctgaatctgtaagttgaaatctttcatcagttctggaaaattctctgctattatctcttcaaatataatctcctttccattctccatattcttttctt

SEQ ID NO: 776394 - DNA, 637 bp, Homo sapiens
taaagacaatataagtcaacatttgtatgttctcggaatggggatgagctttctaagtactggatattagaaaacttgggaagcagaaccagaaagattgatagacatgaccacgtaaaactcaaacactttcataaagcaaatgtaaaatcataaaaaagattgaaaataaagctaaggaaactatttgccacatatgggaacaacaaaaggttaatacaaagaactgcaaattataaaaatactaggttggtgcagaagtagtcacggtttttaccattgaaactaatagcaaaaaccgcaattacttttgcacccacccaataaaagtgaaactcactcmcccaatacacacagtagaaaatgagcaaaggatacaaaaagacaagcaggaaagaaggaaggaaggaaagaggtgaattattacaagaaaagattctgcactttattgccaactcccccaaaaagtaaattaaggtatcatttgtcaattgccagattgataaatgtgaaaaaccctgacaatactcatgttggtgaggggctgatgcaatgggcactctcattgattgttggcaagggtacaaattggctagcctttctggaggacaatttgaaaagcacgtaaaaatttaca

SEQ ID NO: 776395 - DNA, 645 bp, Homo sapiens
ctcaagggagcatgagaagggagggatccggtcccggggggctgagtgtgccccctccctgtctcagatgtccatcccttctttttaaatcaagtcccacattaacaggccttacccggcactgtggagattgcacgtggggccctgggctgtttccctcagctgcatttcttactcttctcctgytcttctctgcaccaaagcaggtgttgttcccctagttcctgtgactgtcagctgctggataagtttgcctgatggcaggtgctggtctgagtttgcctgatggcaggtgctggtctgagtttgcctgatggcaggtgctggtctgagtttgcctgatggcaggtgctggtctgagtttgcctgatgggaggtgctggtctgagttagccagatggcaggtgctggtctgagtttgcctgatgggaggtgctggtctgagtttgcctgatggcaggtgctggtctgagtttgcctgatgggaggtgctggtctgagtttgcctgatggcaggtgctggtctgagtttgcctgatgggaggtgctgctctgagtttgcctgatggcaggtgctggtctgagtttgcctgatgggaggtgctggtctgagtttgcctgatggcaggtgctggtctgagtttg

SEQ ID NO: 776396 - DNA, 623 bp, Homo sapiens
atatgcaaaaatccttaagaaattattaacaaataaaattcatcaactcataaaatggatagtatgtcatagtctactggagtttacttcaggaatgcaagcttgtttagcattctaaatccatcagtgtaattctgcataacagaataaatgatagaaattatatgatcatctcaatagatgtagacaatgcatttgcaaaatttaatgtctgttcacgattaaaaaaacctcttaggatactaagaatagaagaaagtttctcaatttgataaasagcatctatgaatacctaaagataacatcatactttaaatatttttaaaatttaagctaaaatcaggaacaagcatggatgtcctttctcaccacttatatgcagcattatcctggatttccaaccactgtaacaaggcaagaaaagaaatttaaaaaattaaaaggcaaaatgattgcaaagaagtatgatttttaattcacaaacgatatgattatgtatatagtaaatctaaaggaatgtacaaaaagccttactatatatggtcacttagaagtagtttactagtcgtatacaaagtcattgtacaaaaatcaattgtatttccgtgtaaaagcaacaatta

SEQ ID NO: 776397 - DNA, 554 bp, Homo sapiens
ctgtgagggctgaagagaaagagctctttcatgctgtagcgccagcctctcctgctctgcctggcagggctgctgcaggtccggcaggttccagaaaggaaatgattccctggtgtttccacttcgaaaggcatttttgatccatagaaaatttcttttaaagcagtaagcttttaggcctgtcagacccaacccccatttttattgcaaatatattcaagcacctggtttacaattctgaggtgaaattcctggataatatgactcactcacacccataatttttaagaaaaattaatataatgtcataactgaaatataaagaagaatgagacaaagtatttgctgattacttccaacgcaggcacccgcctctgggcaacagaamgaagtgatcaggggctgacacctgccccaagaagctcaggttgggccacccctccaatgcagttgaagtcagaggagtgggattggtgactcagataacatgagctgctgcgggtggtgtgattttccaaaatgatacacaactcttggaattctgaagaaaataa

SEQ ID NO: 776398 - DNA, 607 bp, Homo sapiens
tataaagatggtgtgaataatatcaacaaaatcttgcatgagcatgctgacagcttacattaaaaaatgttgaaaccaactttttcagtcttgatcacatttgtaccaattggttgctgaagggggtacttattttaacacttcattccctcattctccaagtgcttccttctcaaagttccatagtcctcttcccyagaaagaggaggaccattttcctctccagcttccatgtttcaaactccaagcaagctcagaacacccataattaacttactggcccaaatcaactaattattccagaagatttacttttttacaactgaagcaatgaacttggatcttccttgcctgtctcctctactctccttcctgcctcaggtttgctgtcttacacagcgggaaggccttattagctagctggatacctaagggagtttacatttcccttttactcttgttttcaccctagttcttacatagaagtgcctagaacttctcaaagtatttgaaaaatttcaagggcaaacccagaaatttttagaaattcacaatcttacagaaaaaataaatttattttgaaattgtaagtcaagttatgtatgca

SEQ ID NO: 776399 - DNA, 628 bp, Homo sapiens
ttctgaggagaaactcaagcctgctgcagaaatctgcataagtaacaaggggctgaatattaatccccaaggcaatggaaaaaatgtctccagggcatgtcagaggtcttcatggcagcactcccatcacaggcccggaggcctaggatggaaaaatggttaagagggctaggccttgggtccctgtgctgagtgcagtctagggactttgtgccctgcatcccagcctctccagtcatgactaaaaggrgccaaggtacagctcagaccatggcttcagaaggtgcaatccccaagccttagcagcttccacatggtatcaagcctgtgagtgcacataagtcaagaaccggggttttgtaacctccgcctagatttcaaaagatgtattgaagcacctggatgcccaggaagaagtttgctgtaggggtgggtccttcacggacaacctccactagggcagtgtggaagggaaatgtggggtcagagcccccacagagagcacctactagggcactgcctactggagctgtgagaagagggccaccgtcctccagaccccagaatgataagtccactgacagcttgaaccatgctcctagaaaagccacagacattcaatgacagc

SEQ ID NO: 776400 - DNA, 581 bp, Homo sapiens
aatttaaacaaaatatatatacattcaggttataaaaggcgctgttacaaaataataagaaaaacacacataaccaaataaaaatatgggcaaaagacttgaagaggtacttcactaaagacaataaccaaggtggccgaataggaacagcttaagcctgcagctcccagcaagaccgatgcagaaggtggttaatttctgcatttccaactgagatacccagttcatcgcattggcaatggttaggccrtgggtccatcccacagagggtgagcagacgcagggtggggtgtcacttcacttgggaaatgcagcaagctgggtacctccctcctcaagccaaaggaagccatgagggactctgctatcaggctgggttactatgcttttcctatggcttttgcaatctgcagatcagatcctcttgtgtgcctacaccaccaggaccctgggtttcaagcacaaaaccaggtggctgtttgggcagacaccaagctagtggcaggagtatttttttcataccccagtggcacctggaaccccagcaagacagaaccattcacttccctggaaaaagggct

SEQ ID NO: 776401 - DNA, 581 bp, Homo sapiens
aatttaaacaaaatatatatacattcaggttataaaaggcgctgttacaaaataataagaaaaacacacataaccaaataaaaatatgggcaaaagacttgaagaggtacttcactaaagacaataaccaaggtggccgaataggaacagcttaagcctgcagctcccagcaagaccgatgcagaaggtggttaatttctgcatttccaactgagatacccagttcatcgcattggcaatggttaggccgtgggtccatcccacagagggtgagcagacgcagggtggggtgtcacttcacttgggaaatgcagcaagctgggtacctccctcctcaagccaaaggaagccatgagggactctgctatcaggctgggttactatgcttttcctatggcttttgcaatctgcagatcagatccycttgtgtgcctacaccaccaggaccctgggtttcaagcacaaaaccaggtggctgtttgggcagacaccaagctagtggcaggagtatttttttcataccccagtggcacctggaaccccagcaagacagaaccattcacttccctggaaaaagggct

SEQ ID NO: 776402 - DNA, 632 bp, Homo sapiens
ttatgcaaaactgcatttatcttgttttagtataaagtgacaacacagaataatatagtgtgtgactgatttatttggattactttgatttgagttgtttataatgatagtgattccattaaaatcacaaatattaactgactatactatatwccaggcccattgctgaatgctttacatgcattatctcatttaatccttacaataacccagacaaagaaactgaagctcagagatgagaagtaccttatccaaggtcacacggcctagtaaacaaggatcaaaccttggcctctctccaggcttgtgtttttaatcactgtttttaatcactgctatatgattaaatgtgggtgaaaatagattgatgcactcaaaattttttaaagtgtagctggtggaacattttaaaagccactttattcatcttatttatcatctgagaatgtagagtcataagtagttggatccctaagtccatttggattgataatatactctaagattctataaatctgtagcacaattgcactgtttcttctaggtcagcctctgtgacaattagccatattattaccttgatctgtccacatgtcccatatgttgtttgtctaatcatttgaactgtttga

SEQ ID NO: 776403 - DNA, 550 bp, Homo sapiens
ctccagccctctcaagccaatcgtgtgggtggtttacacagacatttgcacagggctggggacccacccagccgccaacatctggagcagacacagtggaaactcatccactgggagaactcctctgaggttatcaggagtgacccagagacccagtgacccaragtaaacacagcacctctgcagctgagttggctggaccccctgccctgggacacctagcagaggaggcagtgttggctcttgctgaaggaatctgagccactttttccacactgggaagaacaggagggaggtcagagccagacaggaagagggagccccgtgcttcagaacccaggcaaatctttgcactgaggggccacagaggaacctgaaaagacctcgggtttcagcctctaaagagacaaggggcctcctccgcaagggggctttggggaagactaaatagctgtggttagttgcttaaactgtcctgtaaggtgggtgcctgggacttactgctgttgaacttactgttgttagtctttcaagtggtcacctcttgcct

SEQ ID NO: 776404 - DNA, 550 bp, Homo sapiens
ctccagccctctcaagccaatcgtgtgggtggtttacacagacatttgcacagggctggggacccacccagccgccaacatctggagcagacacagtggaaactcatccactgggagaactcctctgaggttatcaggagtgacccagagacccagtgacccagagtaaacacagcacctctgcagctgagttggctggaccccctgccctgggacacctagcagaggaggcagtgttggctcttgctgaaggaatctgagccactttttccacactgggaagaacaggagggaggtcagagccagacaggaagagggagccccgtgcttcaraacccaggcaaatctttgcactgaggggccacagaggaacctgaaaagacctcgggtttcagcctctaaagagacaaggggcctcctccgcaagggggctttggggaagactaaatagctgtggttagttgcttaaactgtcctgtaaggtgggtgcctgggacttactgctgttgaacttactgttgttagtctttcaagtggtcacctcttgcct

SEQ ID NO: 776405 - DNA, 601 bp, Homo sapiens
ctccctagatggaataataatgtctggacaacagtacatctgtttgcagcatggtttactgaatattttaagtccagggctgagacttactgctaagaaaaaaaaattctttcaaaatattactgctcattaacaacgcacctagtgacccaagagctctgayggaaatgtataatgaaatgaatgttgttttcatgtctgctaacacaacatccattccgtatgtcatagatcaaggagtaactgaatttcaatcttattacttgagaaatacctttcttgaggctataggtgccatagatagtgattcctctgatgaatctgggcaaagtaaattgaaaaccttctggaaataattcaccattctaaatgctgttaagaatatttgtgattcatgagagaaggtcaaaatatcaacattgacaggagtttggaagaagctgattcaaaccctcatggatgactttgagaggttcaagacttcaatggaggaagtaactgcagatgtggtggaagcagcaagtgaactacaattagaagtggagcctgaagatgtgactgaattgttgcaatctcataataaaatttacatgaataaggt

SEQ ID NO: 776406 - DNA, 644 bp, Homo sapiens
taaatgtatgtcctggaatcattttggtagtgtttcagtagtgtcaactgtattttcctacctgttcagattattaccgtgaaccttttcctgcagttcattttatttatttatttttctgaaagtcgcctataaaatacactaaaacttattctgactccctcagcagttctttttaaacacaaattaataaattccaaaaaaattaccacctaaaaaaagaaagaaaatatatacaacatgagagacacagtcactttctacaaaaacaagtattgctgccattaccttaataagtactaactgcagttttaaaccctaagagaaaagacagaagagcagacaatggcaagcctccatttcttgtaacaggaaagcagtcaggatctacctatgttccccaaaagtcatatgtaagaatgctcatggcagtaccaraaacaacccaaatgctctttatacaatgggtaaaaacatggaggtagagttgtacaatgaaatgtgacacagcaatagaacatacacaataacaagcgtattgttgagtacaaaaaagccagaaacaatgttcagtttccattacacatgaataaaaaaacaggctaaacaaatatatagtgtcggaagtcagagtggtgcttatc

SEQ ID NO: 776407 - DNA, 644 bp, Homo sapiens
taaatgtatgtcctggaatcattttggtagtgtttcagtagtgtcaactgtattttcctacctgttcagattattaccgtgaaccttttcctgcagttcattttatttatttatttttctgaaagtcgcctataaaatacactaaaacttattctgactccctcagcagttctttttaaacacaaattaataaattccaaaaaaattaccacctaaaaaaagaaagaaaatatatacaacatgagagacacagtcactttctacaaaaacaagtattgctgccattaccttaataagtactaactgcagttttaaaccctaagagaaaagacagaagagcagacaatggcaagcctccatttcttgtaacaggaaagcagtcaggatctacctatgttccccaaaagtcatatgtaagaatgctcatggcagtaccagaaacaacccaaatgctctttatacaatgggtaaaaacatggaggtagagttgtacartgaaatgtgacacagcaatagaacatacacaataacaagcgtattgttgagtacaaaaaagccagaaacaatgttcagtttccattacacatgaataaaaaaacaggctaaacaaatatatagtgtcggaagtcagagtggtgcttatc

SEQ ID NO: 776408 - DNA, 619 bp, Homo sapiens
aatagaacatacacaataacaagcgtattgttgagtacaaaaaagccagaaacaatgttcagtttccattacacatgaataaaaaaacaggctaaacaaatatatagtgtcggaagtcagagtggtgcttatcctggtggaagtgggtgagaagtgacctgagaagtgaccagtaatgaacatgagggactcttctgggctgtgggtaattttctgtttcttcatcttagagctgattacacaggtgtgtttgtgaaaattcaagttgcacactcatggtttgtgctgttctctgcatgcatgttatacrtcagtaaaaagtttattaaaacaaaccaatagaatcactaggaaatgtctgaggtctgagctctaacttcttagaatcctgctcatagcttctccgtggaatctagagaaggcaggatctagagcttctctgtccagtatggtagccactggccacatgtggtttagagcactggaaatgtacctagtctgaactgagatgtgctgtaagtataaaatgtaaaggctcagtatgaaaaaagaatataaaatatctactttgcaaccgtgatgtgctgaaaaattttttaaataataaaaatgatttttt

SEQ ID NO: 776409 - DNA, 523 bp, Homo sapiens
ctatgcctatgtcttgaatggtattgcttaggttttcttctagggcttttatggttttaggtcttacagttaggtctttaatccatcttgagttaatttatatataaggtgtaaggaggggatccagtttcagttttctgcatatggctagccagttatcccagcaccatttattgaatagagagtgctttctccattgcttttgtcacttttgtcaaagatcagatggttgtagrtgtcaggcatatttatgagctctctaatctgttccactgggctatgtgtctgttttggtaccagtaccatgctgttttggtttctgtagccttgtagtatagttttaagtcaggtagtgtgatgcctccagctctgctcttttttattgccttggctattcaggttctttttggtcccatatgattttaaaatagtttcttaaaggttaatttcaatgtggaatctgaaaccatattagtgaacttttcatactctcttatattaaaattcattaatctaccttcaa

SEQ ID NO: 776410 - DNA, 587 bp, Homo sapiens
aactgatcattagagaaatgcaaatgaaaaccacaatgagataccatctcacgctattcagaatggcaattattaaaaagtcgagaaatggcagatgctggcaaggctgtggagaaataggaacacttttacactgttggtgggaatgtaaattagttcaaccattgtggaagacagtatggtgattcctcaaagacctagaaccagaaataccatttgacccagcagttccattactgggcatayaccaaaaggaatataaatcattctatcacaaagatacatgcatgtatgtgttcattgcagcactactcacaacagcaaagacatggaatcaactgaaaagcccatgtcttttgacaggctggataaacaaattgtggtacacgtacaccatggaatatcatgcagccataaaaacgaatgagatcatgtcctttgcagggacatggatggcacttgaagccattatcttcggcaaactaaagcaggaacaggaaaccaaacaatgcatgttctcacttataagtgggagctgaacaatgagaacacatggacacagggaggggaacaacacacactgcggc

SEQ ID NO: 776411 - DNA, 646 bp, Homo sapiens
atgcctggaatttagaaagatgagatagatttactcacagtttagttaactcatccgttcgtcatttaatgaagtcacaatgatgttcactattatgtaaataagttcattcattgtcatatgctgctaaatttataaccttaacaaaccattggttaacgagaaagtataaagaacawtgagttaaatataagttattagaagcataaaataactccaaaatttgcttttattttttaaattgatgtatatttgacaatttacagttaacttttagataattttcttcaggtcactacagtcctagtgccaagaatgggtctggcaataaacactcaataaatacttgttaaataactttgtatgttacagaaaatattgtgacaatcatattggagttggtcgcatgttttggaggggtataatgactctctacccctgcaatgttttatttatggagcactatttgcaaatagaagaataaaactatttctcttatttcaacatttagaaaccaaataaattgtaaaaataagtgagctaatttttttaaagcatagaaagaattttaatgattagatcccaaaactagattttgtcatctttgatgttaaaacatttatatttcaacatatatttatttaac

SEQ ID NO: 776412 - DNA, 547 bp, Homo sapiens
cctccctggcctctgagaatggaggagtttattgtaaaccaccaggctgggtgcagcagagtcagaagaatgactcacaggcagggttgcaaccaccagggggaggagcagcgcggccctcccagcaggggcgtatgattaaagtgaggargggcatgagtgcgcggcccacagaagagtcatggtttagattagtggacggattggcacaaaatctggaattattattttccaatagagagagaaaaggggcttgtaggaactgttcactgaaccaggcagagaaaaatatttttcaaggtgtttttttaaatggtttcagtcttttagacacaattacaagtacttttatagaaatgtctgtgtaactaagacaacacacacatttttaaagtggtttatttacacagaatgtagatttcttcatgtgaaaagaaattccaacaattgactgcagcctttttgaactccagagactgaggccagggtgtctacacttcggtgacctctctcagttcctatcctgggctttgctgttccatgctca

SEQ ID NO: 776413 - DNA, 547 bp, Homo sapiens
cctccctggcctctgagaatggaggagtttattgtaaaccaccaggctgggtgcagcagagtcagaagaatgactcacaggcagggttgcaaccaccagggggaggagcagcgcggccctcccagcaggggcgtatgattaaagtgaggaagggcaygagtgcgcggcccacagaagagtcatggtttagattagtggacggattggcacaaaatctggaattattattttccaatagagagagaaaaggggcttgtaggaactgttcactgaaccaggcagagaaaaatatttttcaaggtgtttttttaaatggtttcagtcttttagacacaattacaagtacttttatagaaatgtctgtgtaactaagacaacacacacatttttaaagtggtttatttacacagaatgtagatttcttcatgtgaaaagaaattccaacaattgactgcagcctttttgaactccagagactgaggccagggtgtctacacttcggtgacctctctcagttcctatcctgggctttgctgttccatgctca

SEQ ID NO: 776414 - DNA, 629 bp, Homo sapiens
agacagggcagaatcatcacctctccttataggcgagaaaacgaaggatcaggaatcttaaagtcactcctccaaggtgattcgatgggtaagtgacaggaacggtatccgaaccaagttctaacccctgacaccagagcaatgccttttttttttttcatagatgaagccattctctctctgttaaacctctgtgaaaacacatggctcctcagctgagggcctctataaagctcgaggactgatcgagatggttactccacataaatcatgtactcacaagcattctgcacctgtccacaattttaaacttagaggcacgtagggtacaagagcytccacttcatcacacagagctagtgtgtgaatctcagtcccaaggtgtctgagagatggggcttacatctctgcctctccaggagactcctgcctggagacggccctgatggatggggaggaagaagctgatggtttcagcctgaccttggcaaatggctctgtgtccatccctcttaacctctgccttacaaaaataacctgctctcagcacaaaaacaaagaactagcagaacatgaaaatcaggcagagatgccactggtgtggaaagaatagcaatattatcctaatg

SEQ ID NO: 776415 - DNA, 629 bp, Homo sapiens
agacagggcagaatcatcacctctccttataggcgagaaaacgaaggatcaggaatcttaaagtcactcctccaaggtgattcgatgggtaagtgacaggaacggtatccgaaccaagttctaacccctgacaccagagcaatgccttttttttttttcatagatgaagccattctctctctgttaaacctctgtgaaaacacatggctcctcagctgagggcctctataaagctcgaggactgatcgagatggttactccacataaatcatgtactcacaagcattctgcacctgtccacaattttaaacttagaggcacgtagggtacaagagcctccacttcatcacacrgagctagtgtgtgaatctcagtcccaaggtgtctgagagatggggcttacatctctgcctctccaggagactcctgcctggagacggccctgatggatggggaggaagaagctgatggtttcagcctgaccttggcaaatggctctgtgtccatccctcttaacctctgccttacaaaaataacctgctctcagcacaaaaacaaagaactagcagaacatgaaaatcaggcagagatgccactggtgtggaaagaatagcaatattatcctaatg

SEQ ID NO: 776416 - DNA, 615 bp, Homo sapiens
tccccagccatagagattaagcccaggatgaaggcaggatttatgacaactctgccagggtacaataatctattatttaagcacttatggatctgtactcaaagcagttcaagaaaaacattaaggcacctcaaaaagatatatagaaccaagcaagatgaagtcaaatgtaaaataagtgggtcaaggaacaaaagaaaaargaaaaaaaatgggtgaaagatagagtgaggtcaggagagacgttcgtatgcaaaactgcatggttccagcctctgtggtgttgctgtctgggggcctgagagttattattagtgagctccaaattggctatgaggttattatttgtttgttttgctgtggaggggcacagctgctcctagaatgccgatcagagagatttctccatgcaccacctttactgaagacattatgtgttctcagctacaactacatgaggacatagacagacaaatggtgtattttttgacaatttctcagtgcgagctgaagatatatttccaaagcccaaatcagaacagatgaggctaaaagagcatcaagtagggcatcccagggccttctgaaggtcattctttagccagcaattgatgc

SEQ ID NO: 776417 - DNA, 615 bp, Homo sapiens
tccccagccatagagattaagcccaggatgaaggcaggatttatgacaactctgccagggtacaataatctattatttaagcacttatggatctgtactcaaagcagttcaagaaaaacattaaggcacctcaaaaagatatatagaaccaagcaagatgaagtcaaatgtaaaataagtgggtcaaggaacaaaagaaaaaggaaaaaaaatgggtgaaagatagagkgaggtcaggagagacgttcgtatgcaaaactgcatggttccagcctctgtggtgttgctgtctgggggcctgagagttattattagtgagctccaaattggctatgaggttattatttgtttgttttgctgtggaggggcacagctgctcctagaatgccgatcagagagatttctccatgcaccacctttactgaagacattatgtgttctcagctacaactacatgaggacatagacagacaaatggtgtattttttgacaatttctcagtgcgagctgaagatatatttccaaagcccaaatcagaacagatgaggctaaaagagcatcaagtagggcatcccagggccttctgaaggtcattctttagccagcaattgatgc

SEQ ID NO: 776418 - DNA, 641 bp, Homo sapiens
ataaagggacctcatataagtcagcaacatgctaagagctagaaatataagtttgaaacatgctaagagctgggaacacaaaggcccctgtcctcggtgggctcataatctcatgatgcaaacccacacttgaatgcccctaaccgtggtacagcagcatgcgggatgcaccacacattgcaggagaagggaaaggagcctacctggccgggcaaagctggaggagggcttcatcatagaaggtattagtcactttctgatgaagaagattccacaaagggcccatctccagaaattgaytgagctggaatgcatcgcataacttggcctccccatcacgaagtggtagcagagccaagatgcttgactgtctgtctctgactcttgccgccccttccagtcctatttgcagatgtgaatgtctccactggtccagcctgaacactctgacatcatctaaatcatgagctgctctgacaataatgccaggcttgctaaacctgccaggacaccaagggccaggatgaaatttgaaattcaagctaagccttggacaaatgtcagctgccctgccaagtgccagggaatcctcccgctggccatctccacttggcagttccactggatcacagtttgtcttt

SEQ ID NO: 776419 - DNA, 590 bp, Homo sapiens
gggaacacacagtggggaaaagagagaaaggcaatgagaaaggaaagagaacaattaagaagtttctgtgcatgttggggaaattgtgggaaagcagggagagagaaagaccaaaaacacaagtatttcagttagagaaaagggaaaaatagaagaaatagctgcacagaagacggagaatgacatgcataatagcctgcagtaggyactggggccggaggacgcagccagggggagggagtccagctgaagcctgaggacagagtgtcagctggcagagaggtggctggcttcacatggtcacctcatatcctctgtgtgtctctcagctcagagcagcccccggctgagttggtggccagcgtggaaacagttgaatttctggatttagagactgatgaccgacatttaagtaagtcctggttctgcctctttcctgtggggactttagccaagtcactggctcctctgagcctgtgtttccaactaccaagtgggaatgacagtgctcactttgcaggatcattaagaacattaaggaaataggagccagggtcaagtaacacccagggtcggcaataaaatgcatg

SEQ ID NO: 776420 - DNA, 551 bp, Homo sapiens
ttcaaactcctgacctcaggtggtctgcttgcctcagcctcccaaagtaagtgctgggattacacgcatgagccaccatgcacagcctgttttgtttgtttgtttgtttgtttgtttgagatggagtctcactctgtcgcccaggctggagtgcagtggcgcaatctcgacgcactgcaagctccgcctcctgggttcacgccattctcctgcctcagcctccagagtagctgggactacaggcgccygccaccacgcccagctaattttttgtatttttagtagagatggggtttcaccgtgttggccaggatggtctcgatctcctgaccttgtgatccacccacctcggcctcccaaagtgctgggattacaggcatgagccaccgtgtccggccctgtttcttatttttagtaaagatggggtcttgttatgttacccaggctggtctcgaatgcctgggctcaagccatctcccatcttggcttcccaaagtgttgggcttacaggcatgagccaccatgcccagcctcattccttttcatggctg

SEQ ID NO: 776421 - DNA, 498 bp, Homo sapiens
tgagaaccatcttaatgcctctacatttatcagctaagacagaaaattcgaatacatagagatactaaagaatcagaactttctagtccaaaggagtggttgtaatgtggtggctttctttggattgcagtcgcagcactctagctgaaagctgtgggtcttctccctagaaaattcatgtatctgtgtagggtttcaggggagtgtttggacatccggaatcccaagagtgggcctacyagtggcccatgcactgcaggttaacagcttttgttgtggaatatcaaagattatgtaaaaattttggaaattaaattttttttttgaagaattgtttgctgtatcacatgtactttttgccaggacgtacggaactttgaagcagcctcctctgctgttctggcctttaagagtctctgtcttgggagttcagaagtgcctctttaggcttgatgctgcggcgggtttgcgtggcggcagaagcatacatctgcttct

SEQ ID NO: 776422 - DNA, 419 bp, Homo sapiens
cccccagcaggacctgacagggaacctctgtttctccatgcccagtccgtgggcagactgaccctagagctgctgcctacggacatcaggaatgggaagcccgagagaggaggcaacttccacttaccagggagagggctgagctgggccagccggggctccaacaggtgtgcctgaggctggggatgccgtgtccactgtgacccggcgggcagcccragacacctgggcaggtgagtgcagacgtggccaaagagccagtgcaagacagcaaagccccgctcacggctgttgccgtccctgtgtgctctcccagacctgcccctgcacctcgtgatgctgccaggaagtgcccatgccttccactgaacagacgagcaagcagaggctctaggcggcgaggtcacttgtccaggtca

SEQ ID NO: 776423 - DNA, 642 bp, Homo sapiens
ctcagttctagcgtcagcaggtaagaagagggccactgtctctcctatgcccagataataggatgtctgtagggttccccagggctgaagctccccagacacttcagtcttcctgaacaggtgaaagaaaaccttagcggacagacrgctcctaccaccccaggagtggggttcttggaaaggtattatcgttcccatccgtcaggatggggctggagctcatcgccttccaagaatgtgactgacggcaaatttgagttcaaaagaagattagatttcaaggcaactggaagctattcagttgaagccaagttttacagggagagtttcctccctctcctctcttctccttctccctccagggcagcccagggcttgttgggacctgaaaaagaactgacagtgcctgactgttcccctaattgaggaaaggagagatggaaaaccaggctctggacttgttcacagcccagggaggatccaagcatcacatctccctgggtgccctctggggactgaggcagctgctggaagtgagtcccacacagtggtgggggatgcctgggcacagccatgctctccattgaccataataaaagaagtcagtaataacaaatagaagccttatgtttgtacagaact

SEQ ID NO: 776424 - DNA, 550 bp, Homo sapiens
acttgagaaagagaccaggcccctcattggctatccaccccactaccctcacagatctgatcgaccgagccttcagcagattccgtcacagagaagtggtccatctgtccaggttgaggaatgggctgaacgtgttggagctgtggcatggcgtcacatatgcatttaaggacctgtccctgtcctgcacaacacagttcctgcagtacttcctggagaagagggagaagcacgtcactgtggttgtaggtgtgtttttggggcacraacgcagaatacctgagtgctgtgactgtagggtgtccacctataggatgctgttcatagagccactcaggaactgtggtactggttcttccagagcaaggttcctaacattttctggtgccatagacccctttgccaggctgatggaggctatggaactttctcagagtaatgtttgaagtgcacaaaatgcttaagatgatgtggttcacaagttcacttatgtcctgaattttatccgtggatccatggaccctaggtggagtgctaggttcatatcatc

SEQ ID NO: 776425 - DNA, 632 bp, Homo sapiens
attgctgtgtaataaactacttccaaaatgtagtggcttaatacaacaatatttatcttgctcgtgagctctgcaatttgggcaggcctcagcagggacagcttgtgtctgatctacttggcatcagctgggacagctcaaatgcttagggctggtgtcatctgaagtcccaatcactaccatgctggttgccagctgggacctgagctggggccggggccagaacacatacatgtgtcttctccaggtggcacttggcttccttccaaaatggtggctgggttccaagggtgagcatctcaagagacccrtccaaagttgtgttaccttttaagtctcagcacagaagtcacatagtgctaccttcccaactgtcacaatcccaaccagattcaaggggtgagacggcaggtggggaacatggatgtagaacacatgggatgggacacattgttgcagccatctttgggaaatgcaatctgccacatacatattcatcacttacagacatttatgaagtatgctccatatgctgaatactgggtttacaatggtgaatcatacagatggggtttctgttgccatagagtttgcatttcagttggagtgttgtcgggggaggatttagacac

SEQ ID NO: 776426 - DNA, 633 bp, Homo sapiens
aggacagtaaggatcctggagatgccgatctgtggctcctacaagccaggattggctgtgtgtgcttggaaatcacaagctgcagcacttaacctggatgcattaaaatattttaccttttttttttctgtcctgagatggrggtcacactctgtcacccaggctggagtgcatagggcatgatcacatctcactgtaacctgaaactcccggacttaagcgatcctcccgcctcagcctcccaaagtgttgggattacatgtgtgagccactgcacctagcccttttttactatttgaacatttgactctagcctttccctgctgccaagacaaggtctaggagaggccacagacgtgagctccagggtaggctggttaactattcaggtggatcacggtaaatggaaacccagctttaatctagtggttctgccccggaagtccagtgtgcgttcacaggtggccggcaatgtcacctgaacattctgcatagattttccctggaaaagagctagagaaagtggtgtccctgccaccccacacaaatctgcttgatgactgggcccagtggggaggggatttgctcagcatgctgggtggaagctgccctgccagagaactccagcttcaa

SEQ ID NO: 776427 - DNA, 483 bp, Homo sapiens
aggatcctggagatgccgatctgtggctcctacaagccaggattggctgtgtgtgcttggaaatcacaagctgcagcacttaacctggatgcattaaaatattttaccttttttttttctgtcctgagatggaggtcacactctgtcacccaggctggagtgcatagggcatgatcacatctcactgtaacctgaaactcccggacttaagcgatcctcccgcctcagcctcccaaagtgttgggattacatgtgtgagccactgcacctagcccttttttactatttgaacatttgactctagcctttccctgctgccaagacaaggtctaggagaggccacagacgtgagctccagggtaggctggttaactattcaggtggatcayggtaaatggaaacccagctttaatctagtggttctgccccggaagtccagtgtgcgttcacaggtggccggcaatgtcacctgaacattctgca

SEQ ID NO: 776428 - DNA, 661 bp, Homo sapiens
aggactggaacaggtctcttaccttttagcatctcttggaatgacatggaagagcctggtggaaatacttcagagaataaatgtccagtgccatgtagaatgccagcacaattccctgcatggaggaaaggactactatgaacagctccccaggaaactcagcccaaggccccagaagcaccgggttctcctcctgacggtcactcatcatgggcagccctggacataagtgtgtgccttgagatatttgcatatttatgtcagtgtgtcttggaaccatttaaagtctttctacaaaacttgagttttctgtttaagtgtgtggatttctctttctccaaagtttgtgttctaactaaaagactacagtmttttcatagaaagcagaaataatctggtgaaatgaagttctctaaaaaagtttccagagtaatgattagcttgtaaaatttacagttgttatatataaacttcagcttttattagttctggctatggaaagcaaaaagttaaattggtatctcctcttcagcaaagctaagttatcggggacattgtgatttaggaaaatttatagcttcacatgcataatagtgtagagaacgtgatggtaatttcccttatctcctctatctttgggaaactggaaaaggaaattaaa

SEQ ID NO: 776429 - DNA, 598 bp, Homo sapiens
ccccttctctctccccacctgctgcacacccacagtcaaaggcataaagaacagataagggctctgggcaaaggaattatttatgctcttctttcaagtaagcagcctcagaaagcccaataatactttctatttttatccttcaccagatgttaccctcccattcttccagcaatcctgccaggtagagtttaccttcattggaaaaattcatcatagctatggaggcggcacgttggaggaggggatgccttactttttcctccatatagacctgtctgccttggaactatccatattcgtttccttttttaaagcctgttcargactttccttattgctggaagttctctctctctgattggtcctgccatgatcaattctgccttccctctgtaccattcattcaaagacatgggttgaggctctggcgctgccactgggaagctgtgtgggatggggatgagggctgcttaccctccttgactctttttctcaactttcagatgatgagctgtgagggaattgttaagactgtaactctagttggagtttcatgtgactccttggagggcagggacatttaaatcacctggga

SEQ ID NO: 776430 - DNA, 570 bp, Homo sapiens
caaccaaaaccataaacaaaacaggaagacagtaatagcctggagaagttatttgcaaaatatttgataagcaaactaagtatctgtagtaaacaagagctcatgtaagttgatcgataaagcaacaggaaaaagagaaaagtaataaatagtgaattaaaaggaacaactgcaagtggccattaaacatgtgaagagttgctcaacttcacaacaagtcctgaaatgcaattagaacaacaataacctacaatgtttcccygttcagcttagccaaattttttgaaaatttctcactcccactgctgggaaatgtgcggggaaatggggaccttcctgcactattgccaagaccagaattcctaacaagcttttcaaaagtaatctaggagtatttattaaaattaaacattctcataccctttgacccagcaatcttatttctggaaacctctcctacagaaacaaaagtgctaacgcatagggacataagtattaagaatatttattgtatcatagtttgtatatagaagaatttggaacatctggaatattcttaaagaattatgc

SEQ ID NO: 776431 - DNA, 570 bp, Homo sapiens
caaccaaaaccataaacaaaacaggaagacagtaatagcctggagaagttatttgcaaaatatttgataagcaaactaagtatctgtagtaaacaagagctcatgtaagttgatcgataaagcaacaggaaaaagagaaaagtaataaatagtgaattaaaaggaacaactgcaagtggccattaaacatgtgaagagttgctcaacttcacaacaagtcctgaaatgcaattagaacaacaataacctacaatgtttccctgttcagcttagccaaattttttgaaaatttctcactcccactgctgggaaatgtgcrgggaaatggggaccttcctgcactattgccaagaccagaattcctaacaagcttttcaaaagtaatctaggagtatttattaaaattaaacattctcataccctttgacccagcaatcttatttctggaaacctctcctacagaaacaaaagtgctaacgcatagggacataagtattaagaatatttattgtatcatagtttgtatatagaagaatttggaacatctggaatattcttaaagaattatgc

SEQ ID NO: 776432 - DNA, 594 bp, Homo sapiens
gtttgcttcatcatcatataatttcacagtcctcctgctagctacattctgagaagtgcaagacacctgataatggccttgatgtcagcttcacatgttactttatgtttatttgtgtgtatgtgtgggtggtgcatatgaaaatccatctcagcactggtaactatcaaaacaatttagcccttcatcaccagaggctgaacaaaggacatccyctagtttaatgccagatatttgtttctcttctttaacattgtcttatatcacaatggcaataacccattattaacagaaccacgttttccaaaattgtcaggccatgaggcctacaactctaggaagaagcaatttatacaattttagatcacagatgtttttatacctgcatttaattttttgatgtattagcctgttttcacgctgctgtgaagaaatacccaagactgggtaatttataaaggaaagatgcttaattaactcacagtcctgcatggctgggaggtctcaggaaacttacaaacatggcagaaagaaaagtagttaccttctttacaaggcagcaggagagagtgtgagcatgtgaggaaggaactg

SEQ ID NO: 776433 - DNA, 652 bp, Homo sapiens
tttataatttcacataggaggttacctttggtaaagttcaaaagccgaaaatatcagctgtcctggctaaaatctggtaattaaaaatttaaaagaatttttaaaagctctgcagttaaaaccatttaattaaagctgataattgggatatatgggtaaagatattgttttaaagccccttccttccctctgtaaaaactyctcagtcagtagaattctgcccaattctccatttacctctatctgtccctccttcctcttacatctaatctttttgacttttaagtggaccagaaacttatttacattataaaaggacttttagacatgatttgtaatagttagacaggagatataactttttggggttgctaatgccagttatgggggggatactcagctcttggcacatttaaatcagaaaagcatgcttttggtaacctagaaggtacagaaatgtccttacacccttactgagagataagactcctatgggaaatgagctgattacagaatgagctgattggccttgggttggacactagcgtcaggggaatatccttgcaatgagatgcatggtgaaagcattacatagtctggtcccctagtgttcctctcattttggggatccaggatttgatgtaaaaatggg

SEQ ID NO: 776434 - DNA, 609 bp, Homo sapiens
aaactcttcaaaaaatcaatgaatccagaagctggttttttgaaaagcttaacaaaatagactgctagctagactaatgaagaagaaaagagagaagaatcaaatagatgcaataagaaatgataaaggggatatcaccactgatcacatagaaatacaaactaccatcagagaatactattagcacctctatgcaaataaactagaaaatctggaagaaatggataaattcctggacacatacaccctcccaagactaaaacaggaagaagttaaatcctggaatgtaccaataacaagctctgaaattgaggcagtaattaatagcctaccaaccaaaaaagtccaagaacggatggattcacagccaaattctaccagaggtacaaagaggagctggaaycattccttctgaaactattccaaacaaaagaaaaagaggcactcctccctaactcattttgtgaggccagcatcatcctgataccaaaacctggcagaaacacaagaaaaaaagaaaatttcaggccaatatccctgatgaacatcaatacaaaaatcttcaataaaatactggcagaccaaatccagcagcacatcaaaaagctt

SEQ ID NO: 776435 - DNA, 589 bp, Homo sapiens
cctctccctctcccctttgcacagtctccctctgatgcccagccgaggctggactgtattgcagctatctcgactcactgcaaactccctgcctgattctcctgcctcagcctgccgaatgcctgggattgcaggcgtgcgcctccacgcctgactggttttcatattttttggtggagacagggtttcgccgtgttggccgggctggtctccagctcctgaccgcgagtgatctgccagcctcagcctcccgaggtgccaggattgcagagggagtctcgctcactcagtgttcaatgttgcccaggctggagtgcagtggcgtgatctcggctcgctacaacctccacctcccagccgcctgccttggcctcccaaagtgccgagattgcagcctctgcccggccrccaccctgtctagaaagtgaggagtgtctctgcctggccgcccatcgtctgggatgtgaggagcccctctgcctggccacccagtctgggaagtgaggagcgcctcttcccagcagtcatcccgtctaggaagtgaggagcgtctctgcccagccgcccatcgtctgggatgtggggagca

SEQ ID NO: 776436 - DNA, 587 bp, Homo sapiens
tctgcatccacccatgaactactatcttaccagaataggaatagtactgattaagtgatgggccttttgtgtaacgtacacagttacattaaaaaataacaaacaaaacctttattgctacaattacaagcataaaaaagataaacccaaaggagtttattgcagcaagagtctcartagggatgtgatctgtcaaccagtacaaaaaaatgtgatgagactatcccgggattacgttcatgatgataaggaggagttgagtattgatttatattctttttgttgcttcatacttctacaggctttctaattttcccatgtgttatattactttatacaaaaagaaaagtataatcctcaaaaatgaaacaaaactcttcaaaatttaagtataatagcacaaaaaatatccacgtgcaaaggaagtcttctgtttttaaagaggaaagagtttgacttgctgagagagaaggtgagtggatctacaaaaagaatgaagatagttggaaaaagaaggacaaggaaagacgtggaacacagtggtcatgaggtggaaggccaaaaaaaaaaaaaaaaaaggaaaacag

SEQ ID NO: 776437 - DNA, 587 bp, Homo sapiens
tctgcatccacccatgaactactatcttaccagaataggaatagtactgattaagtgatgggccttttgtgtaacgtacacagttacattaaaaaataacaaacaaaacctttattgctacaattacaagcataaaaaagataaacccaaaggagtttattgcagcaagagtctcagtagggatgtgatctgtcaaccagtacaaaaaaatgtgatgagactatcccgggattacrttcatgatgataaggaggagttgagtattgatttatattctttttgttgcttcatacttctacaggctttctaattttcccatgtgttatattactttatacaaaaagaaaagtataatcctcaaaaatgaaacaaaactcttcaaaatttaagtataatagcacaaaaaatatccacgtgcaaaggaagtcttctgtttttaaagaggaaagagtttgacttgctgagagagaaggtgagtggatctacaaaaagaatgaagatagttggaaaaagaaggacaaggaaagacgtggaacacagtggtcatgaggtggaaggccaaaaaaaaaaaaaaaaaaggaaaacag

SEQ ID NO: 776438 - DNA, 387 bp, Homo sapiens
cacagatgcagtctcagaatccttctaaacacagccaatctaggcagccaacaccatcagagctggtttataagatgaaactgatttgatatcctcacgttagagaattcagctagtccaagagaatggtcctgagcagttacagtgcatcctgctagggagggctaaggagtgaggttgtggaggaggattgggtttagcagatttattgggactgaagggaatgcacaaaaatggcrtgagggtgagactgtggctgctcaaggtgagggcgggctgggaagaatgctgatttgcagagtgggctaattggaagtaaatgaagtggcatgctaagttcaagggcacgtagcctgacctcccactgttgggcaggaagggacattg

SEQ ID NO: 776439 - DNA, 606 bp, Homo sapiens
cacagtggcagagcatatggtcagtgctgagaagatgttagctacaattatatgacgtgaacatcttcagatgttaaatagcaccccaccctgattgtgggatagagaaaatatgttctttggacctcagagagcagtttgggtcatggagatgcctcacctattcaaaaccacactttctrtgttcccaatgccaataggaacctggagcacatgcctcgtagaacccagaacaacaaggtcattttacttagtccatgtgacagatgaattatgatcatttctcatgtcctcccctcggttcaggataaattacactttattcttccttgttatcttcatggggtcagtctgtgacatagcctcttaaagtcacatggtattgaaacattaagacaagtaacagctgtgaggaatatccactatcaaaccagaggctgggcattctcagtctcagtcttcctccttgaccatgctgggaaggaagaccatttgtagaatattccttgtctacatctatctgatgatgcatttgctagctttaaagatataaatgtgaacagataccttgtctctgagtggggctttgtataaacaaaaagagac

SEQ ID NO: 776440 - DNA, 614 bp, Homo sapiens
tgacaggtggagctaggggagtacactgtccatcccggaaccaagccaactccacccccaaccggagagatcctccttcatttttcccccacacatgagtgcaatagtcctaaatcagaggacaacaccggacatctgtctcaccaagctcatgcaactatatcaagaacatcctgtgtgatgcccctggggtttaaaagctagcactgttcatgtagtttcaaagtggtctacaatgccaggtcccatggaattgaaatctatcccatagcccgttgagaaaaacagtaactggaatcactgtgcttcagtctctggggattcatcgtggcctcctagtctttgttgccattaattgttttatgacattgtttaaattaagtcacttaactttcagcttcttcagctattgcaagctttcygggataacagagcacgtgttcttcttctcagagcatctcccatgcttagcacaggtgactcactagtgaaggccagttgtaacttctgtgttatccttgggccccaactcccccccaatcactttctgccttcccacacttatataagttcagacctgctgtttcatcttaaatctggatggcacacagcac

SEQ ID NO: 776441 - DNA, 539 bp, Homo sapiens
aacatgccggctcgccccccgccctccacaacgtgcttaccacattgcaggcaggcagccaggagaaaagagttgaggcccgtccttctgggggcccagacctcggggctccctgagcctgggctctgacacaatgtaacaacatcttcggggctctgcagttcctggcgtctccaagttttaggcgccaccaygttccccggtgcccacagcagaagccacttgcggtacacctggtccagacacagcctcacacagagccagtggctgtgctgctgcctggagctgcccaccccactgcagccaatgtgcctggctgtgcacagtgaccggaccctgagttcactcatgcacataccctttgccaccctgctcccggcttgcccttgacaagcgtgggatctggatcggtagcgtgagccaatcacagcctgctgggttgagtgggtggaacgaacccagcaggtgcgagcaaaactcaagcagaggcgcgccggccacagaggtttcgactgtccaagcgacaccctaaggatcct

SEQ ID NO: 776442 - DNA, 539 bp, Homo sapiens
aacatgccggctcgccccccgccctccacaacgtgcttaccacattgcaggcaggcagccaggagaaaagagttgaggcccgtccttctgggggcccagacctcggggctccctgagcctgggctctgacacaatgtaacaacatcttcggggctctgcagttcctggcgtctccaagttttaggcgccaccacgttccccggtgcccacagcagaagccacttgcggtacacctggtccagacacagcctcacacagagccagtgsctgtgctgctgcctggagctgcccaccccactgcagccaatgtgcctggctgtgcacagtgaccggaccctgagttcactcatgcacataccctttgccaccctgctcccggcttgcccttgacaagcgtgggatctggatcggtagcgtgagccaatcacagcctgctgggttgagtgggtggaacgaacccagcaggtgcgagcaaaactcaagcagaggcgcgccggccacagaggtttcgactgtccaagcgacaccctaaggatcct

SEQ ID NO: 776443 - DNA, 539 bp, Homo sapiens
aacatgccggctcgccccccgccctccacaacgtgcttaccacattgcaggcaggcagccaggagaaaagagttgaggcccgtccttctgggggcccagacctcggggctccctgagcctgggctctgacacaatgtaacaacatcttcggggctctgcagttcctggcgtctccaagttttaggcgccaccacgttccccggtgcccacagcagaagccacttgcggtacacctggtccagacacagcctcacacagagccagtggctgtgmtgctgcctggagctgcccaccccactgcagccaatgtgcctggctgtgcacagtgaccggaccctgagttcactcatgcacataccctttgccaccctgctcccggcttgcccttgacaagcgtgggatctggatcggtagcgtgagccaatcacagcctgctgggttgagtgggtggaacgaacccagcaggtgcgagcaaaactcaagcagaggcgcgccggccacagaggtttcgactgtccaagcgacaccctaaggatcct

SEQ ID NO: 776444 - DNA, 614 bp, Homo sapiens
gccaggctggtctccaatttctggcttcaagtgatccacccaccttggcctctcaaagtgctaagattacaagtgtgagccactgtgcctggccagatttaaaggattttaggagctgtacatcaggaaactgaaagaagaccaaatatctgtttcacaatatcaccagcttctttacaattcctcagtaacctatgacttacaattttctctaatacaactgtagtctaagtaatgttggcttacatatcttttgatccttaaagttatattagtatatgtttgttgtacacaaacgcagatgtatacagatactagaacattctttaaggtagcataagttgggaaacaatctaaatgtttataggtaggggcagagtcaagtcattcgtccatacaatggagcaagmgctacaccgctataaatagtgaggcaaaatctcactctctgggacaatctccaagacagggtgttaagtgaaagaggaaagtgcaagtcattgtgtggagtatcctaccatttgtaagaaaaggatgtgtggctattatacatgtttggaatatctggaaggatgcacaaggagttggcaatagtagttgcttctggggagaac

SEQ ID NO: 776445 - DNA, 670 bp, Homo sapiens
agcttggcctaatcactaggaaatggccctcatcttttctgtaggttatcaatcccctagctcatcagtggcccctaagaaatgctgtgccttgtggcataattatgcttaatcatgtagactgttgagtaaacttatgcttatgcctttcctgttccatgttaggtgttatccattcaattccacttctttgcaatggtgaagccccgttttgatgatamcttctttttgtaaatagccttttttgcagattaatgcagggtctactgcaccttggcccaagtggcctcagttaatatttgatgaatgagtaaatgaatgaatgaattaataaacccatctggatttcaggaccctgatatcagcaggagacgagtagaaggaggagcctttgaagtcagcagtgtcagctggctggcaggggccaggtcattgccctggcttgcttcgtagagactgttccagtgacaagttcctcatagcggggtgaaaacggaggtggggagaagtcatttcttaactcacccctgggaagcccagggcaaatagcaggtgccttcccccatgaccctctctgtctccgaggcccactcccatggccttccttgtctcttgcaggtgcatctctgccttcagtatcagggatcaggggagactgttgtcagggtgt

SEQ ID NO: 776446 - DNA, 621 bp, Homo sapiens
aaacttaaaaaaaaaaaaaaaggatcctaggataaaagtcacttctctccagaaattttgaaagcattacttcattgtcttctagctcaggagttgatataaaaaagtccaccgtcattcagattcgtggttctttgtctgcatactgttacttgtctctgcaagtgctttccrgtatttgccccccatcttccaaaattttgcaatgatataccttgctgtggattttttttttttttttgagacagggtctcactctgtcactcaggttgaagtgcagtggtgcaatctcagttcactacacctccacttcccaggctcaagcgatcctcctgcctcagcctccagagtagctgggactacaggcgtgtgccaccacacccagctaatttttctactttttgtagagccagagttttgccatgttggctagggtggtcttgaacttctgagctcaagtgatccacccacctcggcccccccaaagtgctgggattacaggcgtgagccaccacacctggcccagatcatttttgtactttgagcagggtacatggtggacaaaagaatagtgtcctttagttctgagcaatgttcctctgctacttcctaaatgatttc

SEQ ID NO: 776447 - DNA, 677 bp, Homo sapiens
ttaaaaaaaaaaaaaaaggatcctaggataaaagtcacttctctccagaaattttgaaagcattacttcattgtcttctagctcaggagttgatataaaaaagtccaccgtcattcagattcgtggttctttgtctgcatactgttacttgtctctgcaagtgctttccagtatttgccccccatcttccaaaattttgcaatgatataccttgctgtggattttttttttttttttgagacagggtctcactctgtcactcaggttgaagtgcagtggtgcaatctcagttcactacacctccacttcccaggctcaagcgatcctcctgcctcagcctccagagtagctgggactacaggcgtgtgccaccacacccagctaatttttctactttttgtagagccagagttttgccatgttggctagggtggtcttgaacttctgagctcaagtgatccacccacctcggcccccccaaagtgctgggattacaggcgtgagccaccacacctggcccagatcatttttrtactttgagcagggtacatggtggacaaaagaatagtgtcctttagttctgagcaatgttcctctgctacttcctaaatgatttcctccccactatctcctgtctatacttactcctgtgatttgtttgttggattcctgttacc

SEQ ID NO: 776448 - DNA, 442 bp, Homo sapiens
gaggtgaatgaattttttctatctctatcaggaattaagatcagaaacaattcacaatcatatgggataaataagagtacacatgtagtgttcatcccagtgatagtaatactcccactctccatcctaatatagctcaaaggaacttgggcaatctagacatttcacaaaaacaattaattagtctactgtmtagagtgtcacataaattgaactagaggagttaaagtggcaagtacattggatgacttgttaagtcacttcagaaaatgaaatataaaaaaaaaatgaagtttcgggggctcatgacattagcaaagtgtaagtattccatggtctgtgtcatgattaaacattcctacaaatgtataaaaaattatttgactttatactttcctgtaataagaaagaaacaatgcttagaatacctctttttgttctg

SEQ ID NO: 776449 - DNA, 564 bp, Homo sapiens
atgctcgaggtgtttagagagagaaagcagtgaattaaaacctcctctttttttggctggtaacaaatttcttcttgatgcagagatagccttgatagcaagacagaaccaagattgaatgataaaggcaattaatgaaaaaggctgaatattaaagagtgatcttagatcaatattcagatagcattcagttcctaatattcttctaccaaagaggaggtgagtggagcttgtcacacacaattgagagcattatactttacccaaatgttgtagytgagaataaaacagagtaatgtgctctgtaaaggtgagtcattaaatggtaaagttttaagcaaaaggctttatgcaaaataattttgctaaaatgtattataatctggccaggatggagttaaatattttaccttattcaatcagaaaacacacaattttaaaagcaacagtcttgctaaatgcaataaaagactgtcttttgacattaaaaaatgcttcaaaaattacttattaatttgatttgggttacaccttactgttagagtaacttttttgacaaatgcc

SEQ ID NO: 776450 - DNA, 564 bp, Homo sapiens
atgctcgaggtgtttagagagagaaagcagtgaattaaaacctcctctttttttggctggtaacaaatttcttcttgatgcagagatagccttgatagcaagacagaaccaagattgaatgataaaggcaattaatgaaaaaggctgaatattaaagagtgatcttagatcaatattcagatagcattcagttcctaatattcttctaccaaagaggaggtgagtggagcttgtcacacacaattgagagcattatactttacccaaatgttgtagttgrgaataaaacagagtaatgtgctctgtaaaggtgagtcattaaatggtaaagttttaagcaaaaggctttatgcaaaataattttgctaaaatgtattataatctggccaggatggagttaaatattttaccttattcaatcagaaaacacacaattttaaaagcaacagtcttgctaaatgcaataaaagactgtcttttgacattaaaaaatgcttcaaaaattacttattaatttgatttgggttacaccttactgttagagtaacttttttgacaaatgcc

SEQ ID NO: 776451 - DNA, 564 bp, Homo sapiens
atgctcgaggtgtttagagagagaaagcagtgaattaaaacctcctctttttttggctggtaacaaatttcttcttgatgcagagatagccttgatagcaagacagaaccaagattgaatgataaaggcaattaatgaaaaaggctgaatattaaagagtgatcttagatcaatattcagatagcattcagttcctaatattcttctaccaaagaggaggtgagtggagcttgtcacacacaattgagagcattatactttacccaaatgttgtagttgagaataaaacagagtaatgtgctctgtaaaggtgagtcattaaatggtaaagttttaagcaaaaggctttatrcaaaataattttgctaaaatgtattataatctggccaggatggagttaaatattttaccttattcaatcagaaaacacacaattttaaaagcaacagtcttgctaaatgcaataaaagactgtcttttgacattaaaaaatgcttcaaaaattacttattaatttgatttgggttacaccttactgttagagtaacttttttgacaaatgcc

SEQ ID NO: 776452 - DNA, 564 bp, Homo sapiens
atgctcgaggtgtttagagagagaaagcagtgaattaaaacctcctctttttttggctggtaacaaatttcttcttgatgcagagatagccttgatagcaagacagaaccaagattgaatgataaaggcaattaatgaaaaaggctgaatattaaagagtgatcttagatcaatattcagatagcattcagttcctaatattcttctaccaaagaggaggtgagtggagcttgtcacacacaattgagagcattatactttacccaaatgttgtagttgagaataaaacagagtaatgtgctctgtaaaggtgagtcattaaatggtaaagttttaagcaaaaggctttatgcaaaataattttgctaaaaygtattataatctggccaggatggagttaaatattttaccttattcaatcagaaaacacacaattttaaaagcaacagtcttgctaaatgcaataaaagactgtcttttgacattaaaaaatgcttcaaaaattacttattaatttgatttgggttacaccttactgttagagtaacttttttgacaaatgcc

SEQ ID NO: 776453 - DNA, 616 bp, Homo sapiens
atatctctgagatgcagatgcattttacagttgatgatgtcttacaattgctatcagctaggaataacttgtggtcaaaacgtgaaaatcaaacacaagaaagcaccaaactattttagattagataacatatagtatttgagtttttaaaaatttttatcacatttatatatgtataattatatatgattatatgtatacatacatatagatatatacgcagaaaaacatagtttaaaaatcaaatggaacaggccatayaatgaaaaacattttttgctttacatctatattttaaaacacatgcttactttgctgcttcttgatttatgaacttacttaaaaagtaatctatatactccctcctataaatgagaattttgttgtttgtttatactctcatactctttccagtttggttccccagctttcctcccaccctcagctcccggtttgtgtcatttgtacttcaacttttacattgtcaaggttgattgcatttacattctatgccataactataatttaggcatcaaatctttagctctagattaattcttcctctgcccccaagcactccagtaaaatgtgtttacatagtgatgatagtgtaact

SEQ ID NO: 776454 - DNA, 533 bp, Homo sapiens
tctgttgtagggttttttttattattttaggttatcatgagggttgcaaataacacctttaacccattattttaaactgatgacaacttacctctgattgcaaaaacaaactaacaaatgatcagagagaaaactaataaaaactatatgctttaccttcagccacttccaactttttatctttttgttgtttctatttatatttcatcaactgcttatgccttaaaaagttgttgcagattttttatatatatgtttgccttttagtattactgctcaagatatgaatagtttacacaccataattacagtgtgtattagttcatyttcaccctgatgataaagacatacccaagactggacaatttaccaaaaaaaaaaaaaaaaaaaaaggctttaattggactcacagttccatgtgaccagggaggcctcacaatcatggcagaaggcaaagaggagcaagtcatatcttacatggatagcagcaggcaatgagagagcttttgcaggaaactcccattttttaaagc

SEQ ID NO: 776455 - DNA, 544 bp, Homo sapiens
cttcagatgaattgctcattaatttttttttcaaattgaagatctctttttaacatttcctgtaaaatagatttggtgttgacaaaattcctcagactttgtttttgtctgggaaagtctttatttcttcttcatctgtgaagcatattttcactggatatactatgctaagattaaagttttgttgttgtttttttttcctttagtgctgtaagtrtatcatgccactctcttctggcctttaaggtgtccactgagaaatctgctgccacatatatcgaagcttcattatattttatttttttatgttgtcttgctgctgttaggatcattgttttttatcattgacctacgggagtttgattattaaatgccttgaagtaatcctctttgagttaaatctgcttggtgctctatatatgaccttcttgtacttgaatattggtatctttctgtaggcttgggaagttctctacatcctctttaaggccaataactcttagtctgccctttcgaggccattttccagattctgtatgtgtgc

SEQ ID NO: 776456 - DNA, 623 bp, Homo sapiens
catatccatcagacaaaattatagccaggtaggaggaataaattatagtgttctatagacctggaattgtttcttaaagggaaactctgttgtatgaaaagtaacaataataacaagcaccattttaagtgcattacataccttaactcattttaacttcacgatgatttgatgaggtgagtatgattattaactccatcttgtagatgaatttgagtgagatagaggttaataaattgccattttaccagattagcaagtggtctaaccagaatttaaacccaaacgctttagctccagaatccaggcccttgtttacctgggtacactactagttgaaggtactaaaaatgtttctctttctaaaaaatgtttatttatttgatctgagagtatcgggggaaccagcccccaatatttcaatgtasgttcttttctattttccctaagtgtcagccagtctcagaaataaagagaaagagtacaaagagaagaattttacagctgggctgctggggatgacatcacatatcagcaggttccatgatgcccacttgagctgcaaaaccagcaagtttttattagggattttagaaggggagggtatgtatgaacagggagta

SEQ ID NO: 776457 - DNA, 579 bp, Homo sapiens
aatattatgtcaaatatttttaagttcttgttgctccatttaattttagattcagtttattgataactacaacataaattggactttaatggggattacattcaacaaacacctcaagttgtaaaaaagtgaagtttaaataatgctgagccttctaacatatgagtatggagcatctctcttataatttaggtatttgatttcttccatcagttttccacagatatgtcatttacattgtacttcattatgttttattctagctttccacagatatgtcatttacattgtacttcattatgttttattctagctttccacagatatgtcatttacattgtayttcattgttttttattctagcatatgtgatttattactattttgaattctagttgttcattgaattgtttatgatgttaaggaaaaatctatctgccctctgaaaatatttatggaatcatacatttcctcatggacacactacatttggcaagcatgtattgtcaaaaacccagacttctgaaatatgtccatgtaacaaatctgcacttgtaccccctaaatttattttaaaaa

SEQ ID NO: 776458 - DNA, 586 bp, Homo sapiens
ttgatagtggggcatggagtagatgttggggggtatggggcagggagatgaggttagaatgtcattttaaaatcaggtctagctcaatgacttctgaggctgggtcacaaatgtagcatagcttccatgcaaaatttgctttcataagatactcactcttagaatccaggtgccataatgtgtggaagtttcagtcatatgaagaaaccatgtgtaggtgttttggctgagagctcccagtgaggttctagctcatagcaagcatcagcctacagaaacttgactgaggtggcttttgagatgactccagcccagatgctgtcagactgcaacttcatgaaagaccatatgagacaaccmcctagataaggttagtcaccacagaatgaggagagataagaaaaataaacaatagttactgtttttgctagaagtttgggatttcttaggcagcactagataaccaaagcttttctacttgaaagaacaactgatattataagcatcagagaacaacaacaacaacaaaaaatagtatttacaaaaaccaagagatgtcagagacagatgagatcagtgtaggtca

SEQ ID NO: 776459 - DNA, 633 bp, Homo sapiens
ttgaagattttgcatcaatgttcatcagagatattagcctgcagttttctcttttttaatatgtttttatctgattatgttatccaggtaatactgaactcatagaataagtttggaagtattttcttctcctctactcttcagaacagtttcagaaggattggtattagttattctttaaatgttttgtagaattcatcagtggagccatcaagtcccgagctctcctttactgagagacttttattacagttttgatctcattgcttgttattgttctgttcaggttttagatttcgttaagattcaatattggcaggtaatatatgtctagaaatttattcatttcttctagattttccaaattattggaatattgctgctcatagtagccaayaatgatcctttgaatttctgcagtgtaagttataatgtctcctttctcatttctgattttatttatttggatcctctctttttttcttatttagcctggctaaaggtttgtcagtttagtttaacttttcagaaaaccaactttttgtttcattgattttttgtattgttttcttcaattttatttacttcttctttgatagttattatttcttttcttcactaattttgggtttg

SEQ ID NO: 776460 - DNA, 612 bp, Homo sapiens
aattgatttgtttgagcttcttatatattctagttattaatccttatcagatggttaatttgcaaatatttcctctcattctgtagattgcctcttcactcttttgattgcttctgttgctgtgcagaagctttataacacaatgtgacaaactcccatttgttcatttttgctttggttgcctgtggttttgagatattactcaagcaatatttgcycagaccaatgtcctggctagtttcctcaatgttttcttttagtagtttcatagttttaggtcttagatttaagtctttaatccattgtgatttgaattttgaatatagcaagagatagagacatagtttcattcttcccatataaatatccagttttctcagtatcaggtattaaataaactgtcctttccaaatgcatgttcttgacaccattgtcaaaaatgaattcatggtatatttatggatttatttttgggttctctgttcttacctattggtccatgtgactgtttttcttttgttgttgttgttttgttgtgttttctttgccgttagcaatctgtaggttactataacactgttgtgtaatttgaaatcaggaaatgtgagtttt

SEQ ID NO: 776461 - DNA, 637 bp, Homo sapiens
tgtaaatttgtaattttagcagccttattccaggcctataacataaaattctcttagatgtactactgaggcttgtttagtttctaaaacattgcagtgtgggcttatgtgcagtcagagatggaggccactgttgagtgagtctgttaagttcaactttatgaggacagtggccacaggggagaaggtatgtctgagtcacctgtttctacttctctgaacacagcgttgtttcatgaactaaagtgaatcatctaacctgtrtattactaaaaccagaagtccaagataggtatcctgatttgagaactcccaataagagtaccctttctttggaaaatgtgaacataaatttaaaagaatacacacacacacacacatatacaaacacacagagatagatagaagaatctagagcaatgaataaaaaaaaaaactacatacaatgtgaaaaggaacaggaggcacacaatgagatgggggttggggagagagagagacaaaatggaagagagaattttcgcataacatagacagcttcaaatacccacatcatattgaaggacacgataaccaggtctgcaggtctgcacttgtgtcaggagagctgatgttgtatcatgggaagaagagaagc

SEQ ID NO: 776462 - DNA, 565 bp, Homo sapiens
tatcttgagaaccttaattatatgtgcaaaggccatatttctaaatcaggtcacactcaaagtactagtggttggacttgggtatatctttttgagaatgctattcaacccattgtaccttcacttcttattctttagtagtactggaatccgtatgatccccaaaaccatcctccttctttacacatattgcagatgagatacttcctgcctggaatgttatttttcatgtgtatcaacaaagtttttcctatttttctagttgtrtctcaaggtctagtttgtacaagacttttctagctgttacataagacctagcttctctcatacctctaaatgaccaatggccagtacatcagtgtaccactgcactgggaagttttcttccatgattctctatactgaactgtgactccttatacacagaaataatgcattttcatcttggcactcctaggattccttaggtcaatacatttcttcacaaatgctttatcagacactgcattgtaggatactgaaatgtacgtaaacagatattcttgagcataaatgtctccgcatg

SEQ ID NO: 776463 - DNA, 627 bp, Homo sapiens
agcaaagaagatttacattaggctatattttcattaaaatatcactccagatactaccacctttgaaaaccccaaacaagtaaaaatggctcttctttttaatataaaattaatttcagttgagtattatgggttttgccactttcaacataaatagaaaatctgaatttctttggttgaaattctaataaggtctaccttgttgggtcctttttaatttttcctactttttccttttcaatattatctatcaatattaatataagcccaacttttttctttctagaaaattagagygaatatcaagatactcataaagcacatcaggaagcatttctgttggatttattactatactcttagaaccttaaagtcaagaaaagacttacacacagggagaacacatatcccagtttccccaggacatctgcccagcttatccttgtgttcatctattgtcctgagtaaattgttaatagtacctttcactcgcaaaagtgattagcttaaatgataaattgtatggtcatggacatatcatgtagtcagattgttcagacacctggtgcattttaaaagtatatactcatggccaaattcagtggctcacacctgtattcccaatac

SEQ ID NO: 776464 - DNA, 627 bp, Homo sapiens
agcaaagaagatttacattaggctatattttcattaaaatatcactccagatactaccacctttgaaaaccccaaacaagtaaaaatggctcttctttttaatataaaattaatttcagttgagtattatgggttttgccactttcaacataaatagaaaatctgaatttctttggttgaaattctaataaggtctaccttgttgggtcctttttaatttttcctactttttccttttcaatattatctatcaatattaatataagcccaacttttttctttctagaaaattagagcgaatatcaagatactcataaagcacatyaggaagcatttctgttggatttattactatactcttagaaccttaaagtcaagaaaagacttacacacagggagaacacatatcccagtttccccaggacatctgcccagcttatccttgtgttcatctattgtcctgagtaaattgttaatagtacctttcactcgcaaaagtgattagcttaaatgataaattgtatggtcatggacatatcatgtagtcagattgttcagacacctggtgcattttaaaagtatatactcatggccaaattcagtggctcacacctgtattcccaatac

SEQ ID NO: 776465 - DNA, 537 bp, Homo sapiens
acaaatgaaatgaccccaaaccaaaggaaactaattatggcctgataatggtctgatagaggctatattttgacagcataatatggccccatagggcttttcaaaaggaacagggaaaggaggatgggtagaataaataaagagggatatagcttccatttgccaaagttaagcttttctgtttwaaaaaaaaaaaaaaaaaaccaagtgaatcccatcactgcttggaattttcagcttttaaaaatagtcactgactttgatgtttaaattgtggctaagctggccttctttcactagaaagagataaaatttagtttttctttcatctattcatatccacacaccccttcttaatcattattcaaagaaattgctcatgtaactcttggctcttggctgacccaccagccttactagtaaacagtaaagtgctgtgaagctgagctgcctgcccaccatcaggagagggttataaagatggcctcttagccctcagcacacaggtaatagggagacttgcacagctgatggttt

SEQ ID NO: 776466 - DNA, 622 bp, Homo sapiens
tcttcatatgtggttatatgaggatagaggaaaagataaaaagataagtttttaggattcaataaggttggaaagagctggaaaagtagggcagatgaaagaaaaaatgggaggaggaagaccactcaaataggaaattaaactactaattttaagaaaggctacataagagattatctcattatgtacaagtatacatataaagtgtgtgattctatgaatgtgtgaattaattaaagatttgataaaaccaaattagatatgtctactgatatttgggaatgtcaaggggatatttattatgtaaaaaagcaagtctttgtgtatatggggatttatgtttgcatgtatttcaacaagcaaagagaaaggtatagaataacaccaggctattaaggttaaccccagaggcttgggaatragtgatacagggtgcacataataaatagggtgtatcactggtctgtaacggttaacttttcttctatacatatttgtagtatttaattgtaataggaagtgttcattactattataatttaaatatcaaataatgggagaatatgatgtgtgaaggaagaaaataaaattaccattttaggttaatgccttcaaagcagtt

SEQ ID NO: 776467 - DNA, 611 bp, Homo sapiens
accttgaaaaccaagtgtcttacatcctactgggaaaacctttaaagtagtgaccactgagttgagagaatagatttggagctccccaaaaagtcccatttccaaagaattgttgtcagttgaccagtttggtagctcattagaaaccacctctcgcaagacttgtctttattttacctatctcagaacatgctctttcttcaggggtatttgtctacaacagtcaaaggcaattgttcaacattgctgctgcctgaggcagtgataaccrttggggcaaacaagaggctggccaagaaactaaaaagaaaagctagggattaggtatttaccaggggctatgaaaagctctgacagattcctggaaatctagaaggtcacaaacatgtgcaaagctgtgtacatgcccagggtcatgagcatgctcatgaaagtcttgaaaagatccaaaatcctcacttctggctctacgtaatcaggaggtgtaggctaaggcataattgtaaaccaccagaacatcaatgctatgccctaacatacatgcaaagccacttggcaaagacagagagacttattgatttaatacctttaaggaaatctctgttcagtca

SEQ ID NO: 776468 - DNA, 667 bp, Homo sapiens
tgtcttccttagaatattattttacttaacacataaactaaatgatcactggggactttgtttcctctgggtagttgttgcttggaaaagagacatatggttgcatgcatttaaattcttcattaaaaatgtttacaggaggggaaaagtaatatactctaaaatggcaaacattatagagggttgcaaaatctagctccaaagagtttcatatcatgactttactacttagaaataaacattatgcctaaataagttgtttatacaaactccaagtaactcacttccctgagtaaatatttaggctgaaagtattcccaaaacatttagttattctaatttacatgggatatagggatagagtatatttaatcatgttattaaayagaatttcaaaggagcaaacataatttttggtgttttattcttttaattgaaaaaaatgtagattattttattctgcagttaaaaataactatattggttgtcaagaattaatttcatcttgatttagtctgattttgattaatgtccaattcacttaagtagtcacagctgtcagcacagacagtgttcattctgtaatgggtatctttggctgccctgttccttctaccatcttttgtctggtccaccccttctcatacaaaggtcaaaacagcaagaa

SEQ ID NO: 776469 - DNA, 548 bp, Homo sapiens
caccaattgccaccaccgggagccccctgagagtcattgcagatgcacagccctcccctgcaacccctggacctccccgtggtctggcacctaaagggttatgcctcatggcaggaatcaggaccctcagggtgccctgcccactccaaggtctgcctctgctctgattggtcactgacattcagattgtcacccaaatataaggacrttagcagaaagactcattcaatacaagtggactcagacatagataggaattgggttgcaagaagccccttttgtttcttttattttattttggaaaaaacttttattgtgaaaattcacatatatatatatatatatatatatgtatatataaactcaatctatgcaaaaggatagacaatgaacaaatgaattccccttccactccagatccccaactcagatccagacctcctgagcccacttcccccatctcatcacagatccagacctcctgagcccactttccccatctcatcacagacccagacctcctgagcccactttccccatctcatcac

SEQ ID NO: 776470 - DNA, 548 bp, Homo sapiens
caccaattgccaccaccgggagccccctgagagtcattgcagatgcacagccctcccctgcaacccctggacctccccgtggtctggcacctaaagggttatgcctcatggcaggaatcaggaccctcagggtgccctgcccactccaaggtctgcctctgctctgattggtcactgacattcagattgtcacccaaatataaggacattagcagaaagactcattcaatacaagtggactcagacatagataggaattgggttgcaaraagccccttttgtttcttttattttattttggaaaaaacttttattgtgaaaattcacatatatatatatatatatatatatgtatatataaactcaatctatgcaaaaggatagacaatgaacaaatgaattccccttccactccagatccccaactcagatccagacctcctgagcccacttcccccatctcatcacagatccagacctcctgagcccactttccccatctcatcacagacccagacctcctgagcccactttccccatctcatcac

SEQ ID NO: 776471 - DNA, 607 bp, Homo sapiens
gggtgtaaattcttcctctgctagaagcgtgtgcaatgtgggaagcccagcacacagaaagagcttaattcatgctgctgatttaatagattttttttcatggatgtgccagaaagccccattcatgtaaacactacaattgcaaaagtttatgccagacagaagcctgcatttgttggggattaaaagaaagggcacttgactttgtagcccaaagacccaggttttccaggtgcagtcctggcattgagttgtcatgtcatcccaggcaaatcatggacttgttctgggcctctgtttctttcttcaacatgaaggaatttgttaaagaaatttctaaaattcttctgttaatgagtaatgacgataatatcagtagtcacaagcatttactgagcactgactagctgccaaccackgtgttgtttgctttgtttatataaccccattcacttttaaaatcatcttatgagggaaagaaaccattatcacccacataaggtatgactgcttatatagaaaatgcccaaaatccataaacaaatgattaagaacaattaaatttagtgaagatataaaatttacatacatcaaacagctagaaagt

SEQ ID NO: 776472 - DNA, 458 bp, Homo sapiens
ctgactctgatccttccaaaaactgctcctagagaagctagaggtacactctgagattaagctacctcaacttcaagcctctggattctgggaggagttgagtccaccctctgatctagagtttccaggcatggctttgtgaatgcacctaccttcttcccagatttgtgcccgtctgaccctcttacatgagaacatcgccatacatggctgtggaaaatcctcaagtgcartgaaggcaagactgaaaacagagccgctgccaaacagagcagcaagttgaagggcaagtgcctgtcaacacaatccccttgaaagactataaagagctgccaaaacatgagatgcatctgacatccagatagtattagctgactgcttcccaaatgggttagctgtctacagaaacgccctaggtagctgatatgaatcgcaaatgtgctgtgacttgattaatt

SEQ ID NO: 776473 - DNA, 497 bp, Homo sapiens
tgtcatcaattatatacctttattctcaaatccatccaaggaacaccgagcttagtttatgattacgaacatactcttgaaaaagtatacagaagccaaagttttgtgagtcaaatcacatttttagaggcatcaggagagtttggtatgggaaggcrtattagtgaatatgtaatggatttttctaggacaacagcttagacaaggtcaatcaagggtatctgtgtgtggcaatgaaatgaaaaggaaaaatctttggattcagcctttaccagcaaaatcattggaaccttagctcccagatttgtttccttggggtggtctgaaatgtggtcccaagctaccagcatgtcttcagccctttagttccctccacctactcttttgggtcccaaacctctggaagtggctcttccactgctcttatgtgagcatcatccctcctacaagtatctgtttttcctctcaacatggcctgacaccatcacctttgactg

SEQ ID NO: 776474 - DNA, 629 bp, Homo sapiens
tacactgagtgcacctcctgaaaaggacatcaagaaccatatatgaaggtcattgccagtcaaacataatgaaccattagacctgtagtggaaactactagttgtctaccaaagtccattctccctcttttcctggacacacagcaaaatttcccaaacttctttgcagttagaggtcgtcatataactacattttaacaatgaagcaagcagaatgacgtgggtcacttctgggcccagsgcttagccgcatgagcatgcctcctccacactttccttctcattattgccggctggaacatcccagcacagccttaccatgccactgatgaggatgccttagaccaacaattgcataaacggagtgctctgcaacctgaacctcttatctggaaatggttattaagagataactaatcttctttgttctttaagccactttcagccttttaccctaactaataccagctcccaaattcaggtatgatcttttgttcaaagcaagagaggagctgtttccttaacctcttttgaatatcgcttttatgaagtagttgggaagacattcattcatggctcctagaacattttaaagttaaatgatggaatatatagttatgaagtcagga

SEQ ID NO: 776475 - DNA, 620 bp, Homo sapiens
tttggatccaggcatcaattgaagttaggttcctaccctgcccaggaaactgagagataggagccttaacttccttaatgattatatttcaaagagatggttcccaggttcttgtggaaacattcctgggttgtaaaattggtaagagccttctttagcttttaaaaatatttatatacatttcaaagtagcagagtaagagcttacacttactagttttctaaggtaaatgcccaaagaagagggcaagggggaaggtctctttcctttttctttgcaacaaaaagaattggcttttttttttttttttgkctgatttgtatttgcccttccatgcatagtgtcagcatctccgtgatcccagcagggcccagagcctgccacgggcctcaaagaggagagctgcagagattgagcagatattctaggcacagggaatgaggtaaattatttgtagtactttgtaacttttctgttgaagaagtctgtcctgagaaaagagtttttctcccttaaatttgaccctttcttagaagacagccctaagaaactgagtcctatggctaatgagactaacagcatttgtgatgcacacagccttgctctggaagtctgtctaa

SEQ ID NO: 776476 - DNA, 527 bp, Homo sapiens
cggactgcagtggtgctatctgggttcactgcaagctgcacctcctgggttcatgccattctcctgcctcagcctcccgagtagctgggactacaggcacctgccaccgcgcccagctaatttttttgtatttttagtagagacgaggtttcaccgtgttagccaggatggtctcgatctcctgacctcgtgatcygcccacttcggcctcaaaatagactttcttaaattacatctaccactctcttaaagggtcttaatgaaaccagtgcagacatgtttgatttgatataagattttttggtagcatgtacttcacatatagaagcctgcacagaacaagacattttgcataataatatttaattagtggatgtttgcttcgaaaagccttatgtgacccgtgaagcaatcaaaataattatgggcacaaattgcatatgcaaaattgagaccctgtaggtgtcctcatccactctgcttatacctcagggaattgttggatcctggaaaaagggctgtctgca

SEQ ID NO: 776477 - DNA, 555 bp, Homo sapiens
tcttcaattcatttaaactcaggtgaaaacaaagtgagtcactttgcagaaagaagtacaggaacttgcagattcctccctaccacccttgagttctgagatcagtgtacaaaaagtcacttccatcagttatcctcacattagagaattaggcagagaaaagcatccaggtttctctcacttttaatcaggacaaggtataggaaaatgctgttgacatttcaaaaaaagttgagagaagtgaaggtcaagagtgaatagaaaaagatgttgatttaactgaactacggtggcacttaagaggtcgctgagcagagacaaggtgcaaaggaaataggaatagcttatagactggtaacacaatatgtgccaatagaagcagccaccgaaaggattctgtcattkgtgtgtgtgccccaaggcagttttggtttttttgaaaggaggaaaggaggattttatttggaacatgtggtgttcacatgttcctgcaaaggagaatagacatggcaaataagtttcaactcatgtgcagctctgaatatgtggattatt

SEQ ID NO: 776478 - DNA, 619 bp, Homo sapiens
acctgatggtctttctctacccaccctggtagccaaagacaaatgatgtaatctcttgggagctctatggccctgtccaccacctgatcctcccaatacaaccacagctgatgggctcttgaaagtgccatctcctggctggaggccatccaacataaaaccagcgcatttaacaaaaatgcaaccaaggaccctcacrgagtccacttcactccctactacctccactggaataggtgctggtatccatgactgaaagacccgaagacagatcacatcatagtactctttgcagacactccccgctaccagcctggagcctggcagctccactgggtggttagatccagaagagaagtaacaatcactgcagtttggctctcaggaagccccatccctaggggtaaggggagagcaccacatcaagggatcaccctgtgggacaaaagaatctgaacaacatcccttgggtcccagatcttccctctgacatagtctactcaaatgagaagaaaccagcaaaacaactctgttaatatgatgaaacaagctcctttatcacctgcaaaagatcacactagcttgccagtaatggatccaaccaagacaaaaatctctg

SEQ ID NO: 776479 - DNA, 619 bp, Homo sapiens
acctgatggtctttctctacccaccctggtagccaaagacaaatgatgtaatctcttgggagctctatggccctgtccaccacctgatcctcccaatacaaccacagctgatgggctcttgaaagtgccatctcctggctggaggccatccaacataaaaccagcgcatttaacaaaaatgcaaccaaggaccctcacggagtccacttcactccctactacctccactggaataggtgctggtatccatgactgaaagaccygaagacagatcacatcatagtactctttgcagacactccccgctaccagcctggagcctggcagctccactgggtggttagatccagaagagaagtaacaatcactgcagtttggctctcaggaagccccatccctaggggtaaggggagagcaccacatcaagggatcaccctgtgggacaaaagaatctgaacaacatcccttgggtcccagatcttccctctgacatagtctactcaaatgagaagaaaccagcaaaacaactctgttaatatgatgaaacaagctcctttatcacctgcaaaagatcacactagcttgccagtaatggatccaaccaagacaaaaatctctg

SEQ ID NO: 776480 - DNA, 643 bp, Homo sapiens
aggttccttttgacttttcaatcccaaatccttataacataaaaacaagccagttgctcattgaggaggtgacattccagggctaaaggaaccactgaaataggaaaagacaaagtttctaaactgaaaatgataccaaatctgcatcaactctatttttaacacctgcatctggctaagaggttactttttaattatatattayactttgcaatgattaccctcatttgaataaattgaaattactattcagaagataaaatattcatttaatgaggcacagaatcacatgactgggcatttttttaaaaaaaatttaaagcagactttatggataactctctcctgaattaagagattgcaggagaaaattatcttggaggaaagcatggaaaatgactgcaattattgactgaattctaaacagagtgggataagggatttcactttgatatttggatggaagataaggtttctataaaagtaaaatcagagttttgagagccctggcaagaaagtctcctacattagaggtttaaagttctgtaacataaaatagttccccacattaataacactaaaaattcaaaattctagatgcaagtttccttgcatgatagataaatgacatctagaaaagcat

SEQ ID NO: 776481 - DNA, 541 bp, Homo sapiens
ttgtggcttgcatctgaagtgggggcagtattgtggaggactgacctcttaaacccgtggagtctgatgccagctctgggtgtgtcgtatcagaattgaattgcagtacctcagttggggtggaaatggaataccaacaaaatcttattaatgtgtttctcttatttgggataattattttgattttcatttttctctgggatgggggcttataacagagaaaagatcaagaaatactactgtcttcaaggaaatayggatataactgaaaatcactatgccgaaagcttagagcagttgagcagttagaggagagagaaaaattatagcttgtagctatgtttcttgttgctctatttttgtgataatagtctctatagacttaattatgagaggtctcttaaggtcaagatgacgaggcccaagaacgttttatcaactagattattttaatttcagaaatcctattctgatacggattggcaccttgatcttcagaaacacataaaactacttttggccaaaaaagcctttgaacagc

SEQ ID NO: 776482 - DNA, 573 bp, Homo sapiens
tactgatgatcttaattaacatggatcacttgacttaagcttttttttttgtctgctggctttctacactagaaagggtacttttttttcctttgaaaaatgagtggaaatgattattttttggagatggtgtgttgaaactaagtaactcattcctcatcacacttttcatccactagctttagcatttgttgatttttcttggttgaattattacttaattatttctattgatgattgctgaatggtggtctttctaattttattacattcattagttgacattctactgtaagaaaaagctttctcttcctcccattgttgatttatttgtttatctttgtttttatggactcatggttttcttctttctttttttttttttttttgtttttgkttttgtttcaggagatgggatcttgccatgtcgccctggtgggatacaaacccctgggctgaagtgatcctcctgcctcagtctcctgagtagctgagattatagctattgggcctaacttcattgtttcattttttctattcagtgggcctgtaatccaacattatttttatttt

SEQ ID NO: 776483 - DNA, 617 bp, Homo sapiens
atcatacaattttctacaaatttcaaaccgtatcttaggaagcagagataatatttgattgtctactgtgtgccagaaaattcatattacatttttaaacttaataactatggtatatcatatttttctgattttacaggtaaggctcagagtcacatagtgcagttgggattttgtgtggctcttccagttagagcaaaggttcctaacattcccactgcctccacattgctcatattctcattatattcatcattctctataatgactatacgcactggaatacatatattctctgtgatgaatgtgtgcactggaatcttctggggctagggccaatgtagtttaaaaaaaaaaaaaccactgaaatttagatgctattctaaatagcttttrtaattgcttttataattgcccacatttttttataattgctaagtcagagttctgataaatatttgagtaaactagaattatttctttatttgtattacatatacttttcagtgggatgacaataaactcgtctattttaaataaattttatgggaagtgggttcatttttctgatctctaagagaagtaatatgggagagtttaatgtccatagttaaagt

SEQ ID NO: 776484 - DNA, 540 bp, Homo sapiens
aggcagtgatgtcataacctgtaggtctgcttgatcattgccataagccagtgggccaggcagtgagctgtgggcccgaatgtgtgtaataaaaataagatgtatacattgatctagcagttgctgaagtcggagaaaaagtgcacacagggtgggctccagagtggtcttaatgaaggccgtctcaaagttctgcaataaataaacagtaagcagagtcactaacaatatcratgagctgagtggagaaagtttctaaggctaatattaaggctccaatctcagctctctgagtgctagtaaatccagaatgagtgagggaattatgtgatctccaccagacagccgcttttccatgtttaccagagccattagtaaacaatgttaaagcattaggtatgggggattgaactattttagtaggcaaaacaacagaagtacgagataagaactgaaggagtttgtcagcaggaagggtatgccctataaggcctgtgtaatcagagagtgctgtttgcaggtccatagataagggtaata

SEQ ID NO: 776485 - DNA, 670 bp, Homo sapiens
cagcacactgctcaggctgtcattcttcaatgaccgctggccacagtagttctggtggattgtgaggctgtgtgtttgagtatgtgtggaagtccgcttgtaggtatatgtgtatgggtggtgggatggctatagctgtgctttaagtcaaaatgagtgtgtgtgtgtatgcgtgtgtgtctgtgtctgtgtgtgaataaggggataggaagtcagcagctgtgcttaaagtcagagtgcctgagtatatggttgtatatatggggagatggaatgtcaggggctgcgcttcktgtgtgtgtgtgtgtgtgtgtgtgtgtgtgtgtgtgtgtgcactttaatgcaggagtgacttggtgtattggcctgggcttggcgtggggggcatgaggggcgtgtctgttttgggcatggggggcagtgcggtacaggcatctgtttctcaagcagttgtgagcaagtggaatgtgcctctctcagactccgttgcttgtgtttgtgaaagtgacagatgctgcctccctggcctcactgcggcggattaagtctgtgaatgccacatgagtctgcaccccgggtgggggaggtccccagtctgctcttatacttgcgtgtgtgggccacagccctatactttataggatcctgagagtgtggactaaagtaaccc

SEQ ID NO: 776486 - DNA, 633 bp, Homo sapiens
tggatagtgaggggtcccacacgcctggagccgagggtctgtgtcaagagcggcaggggctgcaggagataagagaaacgggtgagggcgccgcgcggggctggactgggaagagaacgctgggcggacggagggggcggaaggaaaactaaggggtctgcagggatcgaagagccttggggcctgcctagggcgggagcggcgcgggctggaaggagagcactccttcctgtgtccctggggctcctttagtgtgcgggagcctacgctggaactcgcccaccacccactgctgcgagctctcaccctgccgaggagctcagtytggtaggagacaagcgttgtaaagcgggaaagttgaatttccagggccctagtgggttccttcctggaaagacttactgatatactgtgtgaaaaacccccattctttccctaagtagttcacaattcaagagtgggagaaagaatcgtagacgaggaaagggcaaatttcaagtctcccgggccacctcgtagacatttattgggtacctgctttgtgcaagctttgcagcaggcactgggcctcgccctaggggagttctctgttggaaatggggctgtaatcaaggaaaaatggaactctcgggc

SEQ ID NO: 776487 - DNA, 425 bp, Homo sapiens
taatgtgaattcaatcataaaactcaacttgaggccgggtgcggtggcttgcacctgtaaccccagcactttcggaggccaaggcgggtgaatcacgaggtcaggagttcgagaccagactggccaacatggtgaaaccccgtctctactaaaaatacaaaaaatcagctgggcgtagtggcaggtgcctgtaatcccagctactcgggaggctgaggcaggagaatcacctsaacccgggaggcagaggttgcagtgagctgggattgcaccactgcattccagccctggcgacagagtaagactgtgtctcagaaaaaaaaaaaaaaaagaaaactcaacttgagtacgtgtttaagaattctcagggtggacatttttttcttcctctttatagatattgagacctgtgcatatctcctctg

SEQ ID NO: 776488 - DNA, 599 bp, Homo sapiens
tgcccacaagagaaagcatgaaatatctaaaattgacaccctaacatcactattaaaagaactagagaagcaagagtaaacaatttcaaaagctaacagaagacaagaaaaagagagactccttcctaactcattttatgargcaagcatcatcctgataccaaaacctgacagacacacacacacacacacacacacacacacacacacacaaattcaggccaatatccctgaagaacatcaatgtgaaaatcctcaataaaatgctggcaaaccgaatccagcagcacatcaaaaagcttatccactatgatcaagttggctacatccctgggatgcaagtctggttcaacatatgcaaatcaataaacgtaatccatcacataaacagaaccaatgacaaaaaccacatgattatctcaatagatgcagaaaaggcctttgataaaattcaacatcctttcatgctaaaaactctcaataaactaggtattgatggaacttatctcaaaataataagagctatttatgacaaacctacaaccaatatcataccgaatgggcaaacaaggatgtcttctcttaacattcctattcaa

SEQ ID NO: 776489 - DNA, 599 bp, Homo sapiens
tgcccacaagagaaagcatgaaatatctaaaattgacaccctaacatcactattaaaagaactagagaagcaagagtaaacaatttcaaaagctaacagaagacaagaaaaagagagactccttcctaactcattttatgaggcaagcatcatcctgataccaaaacctgacagacacacacacacacacacacacacacacacacacacacaaattcargccaatatccctgaagaacatcaatgtgaaaatcctcaataaaatgctggcaaaccgaatccagcagcacatcaaaaagcttatccactatgatcaagttggctacatccctgggatgcaagtctggttcaacatatgcaaatcaataaacgtaatccatcacataaacagaaccaatgacaaaaaccacatgattatctcaatagatgcagaaaaggcctttgataaaattcaacatcctttcatgctaaaaactctcaataaactaggtattgatggaacttatctcaaaataataagagctatttatgacaaacctacaaccaatatcataccgaatgggcaaacaaggatgtcttctcttaacattcctattcaa

SEQ ID NO: 776490 - DNA, 509 bp, Homo sapiens
tcagtacaaagcagtcacaccttcaacctttcattcattaatttatcatgtgttcataaaacaaaatttattgagtctccattagatactcaagtctgtgctcaataccctgatttaaaagaaatgatcctttcaagaaatgtacataatatgggagaaaaaatatactcaatgtgtaattaaaatataaaatgtgttacaacggagaaatagtggatgatacaggaaaacaaaacatgatgattctcatgaaccagtaataattcaactgaaaattaaagaaatattttgtcttsccacagaagtgtttgaaaaaaaatttccttgaagatgttactactacaggatgctgaatttctcaaatgctttctcctacatcaattaatatgatcttatggtttttgccttgcattttcctaacgttgtgtatgacactgattgatgtgtgtaggttgaaacatccttgaatcatatggatagaccctacttcgttatgattatgatctttt

SEQ ID NO: 776491 - DNA, 622 bp, Homo sapiens
tctatgcttatggactgaaagaactaatattgttaggatgacaatactacctaaaacaatttatagattcaatgcaatcctcgtcaaaataccaatgacattattcacagaaatagaaaaaaaaatcttaaaatgtatacaraaccacaagactcggaatagcccagcaatccttggcaaaaagaacaaaggtggaggcatcacatctttactgcaaagtggcttcaaaatttactacaaagctagtaaccaaattaccatagcactggcataaaaacagatacatagatcaatggaacagaataaagcacccaaatataaatccacacacttacagatttatcttcaacaaaagcaccagaaccatacaatggtaaaagaacaggcttttcaacaaatgataccaagaaaactgaataaccatttcagaagaatgaaactagacccctataacttgccacacacaaaaatcaaatcaaattggattacagacttaaactaagacttgaaactacgaaacttctagaaacaacaatagggaaaacactccaggacactggttttggcaaataatttttgtgtaagatctcaaaagcacaggtaaccagagcaaaagtagaca

SEQ ID NO: 776492 - DNA, 593 bp, Homo sapiens
ggtttgatggaagaagtaagacctagtgtttgatagatcaatggagtaactatagtctacagtaatctattgtacatacttttgcattagttattggggtacaggtggtatctagttacatgagtaagttctttagtggtgatttgtgagatcctggtgcacctatcacccaagcagtatacactgcaccatatatgttgtcttttatctctcacctcccttccactcttccccctgagtccccaaagtccattgtattatttttatgcctttgcatcctcatagcttagctcccacatatcagtgagaacayacaatgtttggtttttccattcctgagttacttcacttagaataatagtctccaatctcatccaggtcattgcaagtgctgttaattcattcctttttgtggctgagtagtattccatcatattgtacatttcaaaatagctagtagattataatttgaatgtttctaacataaaaaacacaaatatttaaggtgatggatatctcaagtatactaatttatcctcacaaattttatgaatgtattatcacatgtaccccaaaactatgtacacctatta

SEQ ID NO: 776493 - DNA, 641 bp, Homo sapiens
  misc_feature 120: n = A,T,C or G
aatagtaattctacatatgtttttccaaaacagttaatgaggaacactgcagaactctttctatgaggcctgcacgtgccctgataacaaaacataagagattacaagaggctgggcacngcgtggctcacgcctgtaatcccagcactttgggaggccaaggtgggcagatcacgaggtcaggagattgagactatcctgtctaacatggtgaaaccccgtctctacttaaaaaaaaaaaaaaaaaatacaaaaaatgagcygggcatggtggcaggcgcctgtagtcccagctacttgggaggctgaggcaggagaatggcgtgaatccgggaggtggagcttgcagtgagccaagatggcgccactgcactccagcctggacgacaaagcgagactctgtctcaaaaaaagaaaaaaaaaaaaagagattataagaagcaaaaaccacaaaccattatctctccaagcataatgcttggagatttttacatctccaagcatagatgtaaaaattcttactacatacttggaaaatacaatttttaaatattttcaaagaataataggtcatgaccaagtgggattttctcaggaatgcacgtttacttttgcagtcataaataaataatatcattcac

SEQ ID NO: 776494 - DNA, 499 bp, Homo sapiens
attgacccctttatcattatatagtgaccttgcttgtctcttcttgtagtttttttttttttgaaatctatgttgttgacataagtataggcacttctgttcttttttgattttcattggtatggaatatcattttctagtcctttattttcagtctatttgtgtctttttttttttttttttttttttaagatagagtcttgctctgttgacgaggcyggagtgcagtggtgtggtcttggctcactgcaagctccgcctcctgggttcatgccattctcctgcttcagcctcccaagtagctgggactacaggtgcctgccaccacacccggctaattttttgtatttttagtagagacggggtttcactgtgttagccaggatggtctcaatctcctgacctcgtgatctacccacctcggcctctgaaagtgctgggattacaggtgtgagccaccatgcccggccgtctatgtttgtctttataggtgaagtgt

SEQ ID NO: 776495 - DNA, 526 bp, Homo sapiens
actataggctaggagaaacgatatacaaatcatatatctcgtaacaaacttgtatccagaatacatatacacgctcacacatgcacgcacacacacacacacactccgtctcgctctctctctttcagagctcaataataagaaaacaacctaataacagtcggcagaagattgaacagaatttctctgcagataacatatatgactagctaataagcacaatgaaaaaatcaataataattagaaaatgcaaatcaaaataattgtacaatagctaccactacatatatactcaaatgactaaaaaataaaattaaattaaaagctgaaaataccaactgctgggaagaagktagagtagctggaagattgatatattggtggtaggattataaaagaatgcagccattttgaaaaatagtttggtaatttattataaagtaaaacatccacttaccacataacccagaaatcccatatttacccaaataaaataataacctatatttacacaaaatctgtatgt

SEQ ID NO: 776496 - DNA, 620 bp, Homo sapiens
cagagacaaaggcctcaacacaatactctaccaccattcagaaaacaagataagtggtgaaagaaatttcagttttactctgaattaatttttatccttttagactccctcttactatttattaataatacaaagatatctattttttgactatttctaaatcaaatggcytagaagtcttgatgtctcaaagctacccattacttgtaaactgttaccttgaatttgatagagaaggtgtattcatagtttaataatactctcttttgcaacttttcctcctttacaactgtgctaagggctgtattagtccattctcacattgcaataaagaactacctgagactgggtaatttataaagaaaaaggttgaattggctcacagttctgcaggctgtacaggaagaatggctgagggggcctcaggaaacttacaatcgtggtggaagccaaaaagaaaggaggcacgtcttacatggccagagcaggaggaagagagagtgaaggggcaagttctacacactttcaaacaatcagatctcatgagaactcacttattatcatgagaacagcaagagaaaaacctgcccccaagtccaatcacctccctccaggtttct

SEQ ID NO: 776497 - DNA, 653 bp, Homo sapiens
atttatatatatttatcacaggatttctccagaataatataagcattatgacggtacagaacttgttggatttgtttactgttatttactcagtactgatcattgcctagaacatataggttctcaataaatatttgtggaaaaaagaggaagaaggaagaaaggagggcaggatggaaaaaaggaaaaggaaagagagaataaacttgtcttgctaattaaaattactaaaatgagtgctccactcttaagtgcttrcatttcatgtttcaaaactgccttttactgctaacctgcaaataaaccctgtagtttctacacagttttcagcctactgagtaagaaaacaatcagtaagtattgttgattggctaatgaaatagctttgagattcactagtcacaataagataatgctaattattttgtggagtgaattagcttgaaaataacataaggaaatactatacagaatattccatctggcttcttctaacttcctccaaaggtagtttcatatcaggcattttcaaattatgatgtattgatgaattaatgggtgccctcaccctcccttatgagaaagtggtaaattaagcatgaaatttcttctctgaaaccacactgggcaaaagactagactagctaagcaag

SEQ ID NO: 776498 - DNA, 602 bp, Homo sapiens
cataagtgtgtcctctccaccaaggaccactcccctctcaaataaacatacaatcctagtaaaagctgtgtgcttgctgtgaaaatacagctggagaacaagcttccctatctgcaatcacactatactgaataagcctctgtactacagaaattctaaagcttcccagcctgcctttggaatcccggaccggtagcctggccattaaaatatttctttattttatggagtatttttactctacrtcttttctggccaatcattcagttagaaatcacatttcatggcaggacagggcaaggatttctgatggaatttttactatccaaatgatacaacacactttttttccctctccaaacactgttaatgagtatgtcagtgctggggtacaaaatctcctcatgaatattctatgttggttttggtttttgtttttatgctaggggatatcatcttcacagtctagcaccgtttttgacatttttaatcttctttccagaaacagagttgcaagattgatagcagagacataaccatggtgttttatgtgtcatgacacctttcatttacccttagtctaagaaaatatgagacatgga

SEQ ID NO: 776499 - DNA, 602 bp, Homo sapiens
cataagtgtgtcctctccaccaaggaccactcccctctcaaataaacatacaatcctagtaaaagctgtgtgcttgctgtgaaaatacagctggagaacaagcttccctatctgcaatcacactatactgaataagcctctgtactacagaaattctaaagcttcccagcctgcctttggaatcccggaccggtagcctggccattaaaatatttctttattttatggagtatttttactctacatcttttctggccaatcattcagttagaaatcacatttcatggcaggacagggcaaggatttctgatggaatttttactatccaaatgatacaacacactttttttccctctccaaacactgttaatgagtatgtcagtgctggggtacaaaatctcctcatgaatattctatgttggttttggtttttgtttttatgstaggggatatcatcttcacagtctagcaccgtttttgacatttttaatcttctttccagaaacagagttgcaagattgatagcagagacataaccatggtgttttatgtgtcatgacacctttcatttacccttagtctaagaaaatatgagacatgga

SEQ ID NO: 776500 - DNA, 542 bp, Homo sapiens
acccaccagtccccacctccaacatcggggattacaatttaacatgagatttggtggagacatatattcaaactatataagctctatatcccattttagcaaagtgcctatctgtttttagaataaatttagcataaacaaggaagggtggctgagtgaccatgccaaatcatgaccttagacattcagaaaacttatctgcatcatcagtaagatatggtctgtgtctggataaagtgtaagwgctaatttcagtgtttctgagacactgggtcttcttagtgactaccggcttttattcaggcttggtctctgacttcccatgatatgcacctataaatttattttgggacgtaacaccaatgaacataggaacagcttaatgcaaatcttttttgagtctcccctaccttcctacccacaccaatgcagttataattaaacaagattagagccaaggcatttaaaataaaggtaaattaatgttagtacaggatcactcaaaatggtgcagacttttaaccctttattccacttaggct

SEQ ID NO: 776501 - DNA, 575 bp, Homo sapiens
agactgactccagcatcaagttcataaccattaaagaagcagagacctactaaccatctgacagaaatgctgtttttgatgttggttggaatatgatctctatgctacctgccaactctaatgactatagagaaataatttcggaaagttttccaaggaactattgaaaggaaatgttgctaaaaayttttgaaaggaagaagaaaatctctagaagcatctctgggaaatagtctgaattaatgagtcaatgtccacatctaaaaatctaaaattaaaaacaaggttgatttaaaaatctcttcttggaagactgggactggagcttggctcaagtcataatgggagtccagagaaagttagtaatctatatttaaaccatggagaactggaaaacaaacaaacaaaaaaaaacaaaaaaaaaaacaaggaccgaaaaattatatttcttcaatagtccttagcaacaaaagaataggaggttggagaaaatgaagttacaaatatgcttaagtgccaggtgcagaggctcacacctgtaatcccaggtactttgggagggcgaggtgggagga

SEQ ID NO: 776502 - DNA, 671 bp, Homo sapiens
tttttttctgaccacaatataacaaaattagaaatcaaaggcaagaggaacttttaaaactgtacaaatgcacggaaattaaacaacatgctcttaaacaaccaatgaatcaatgaagacattaagaagcaaatttaaatattttttgaaacaaatgaaaatggaaatacaacayaccaaaacatatgggatacaacaataacagtactaagagggaattcatagcaataaatgcttatatcaaaaaagtagaaaggtttcaaataatctaatgaaggaccctaagaaactagaaaagaaagaaccaaacccaaaatcacagaaggaaagaaataataaatatcagagcagaaataaatggaatagagactaaaacagaactagaaaggatcaacaaaatgaaaagtttgttttttggaaagacaaaattaacaaaccattagctagacaaagaagaaagaagactcaaaataaataaaaccagaaataaaaaggaacattacaactgatgccagagatatataaaggattattagagactattatgaacaactatatgccaacaaattggaaaatatagagaaaacagataaattcctgaacatatacaacctaccacaactgaaccaagaagaaatagaaaacctgcacagatgaataatgaaaaatga

SEQ ID NO: 776503 - DNA, 410 bp, Homo sapiens
gatccatcattaacccactagctcgggtggcattgacaattcctgataagtttgagtcacagctaataaacctgccctttccttgtggcacccactctctgcctctgtggctgatgtgatcctgccctagtgcgtggcaggtctgtctggacacagtcwctatagagccgtctcctgaattgtgtcattgcaatgctgaaagagttaagtaggccctgcagtgcgctgaatgctccagttggagggtttcagagaaagtcttgacaaacgacgggttcctgccctgctgggaatatttcttctttgagttctggcagctattacttggctgcagaatatctaagacccactttgccttttctggtcataaacacttgtagtgttgaatcttaagtcttgattattttttt

SEQ ID NO: 776504 - DNA, 643 bp, Homo sapiens
ttctattttcatcaaaggaatttctcagaaatatagataaaatgaaaggactagatattcattgctaatttaccagtttttatgttcgaattgttgggttctaactcctgatacaaattcttaccttaaaatttaaaaagaaaagacttttctgcttctgaggaagacacagacaaaaaataccagaatgatataattaacccattgactacttatttccaactttattcaaaaccctcctaatatttttaaatttgaaatgtaatttttatcatcaaaatcttaaygggtttcacagtttaggaaggcacataatactaataaggacttctgttaaacaacaacaacaacttctttccagtgacacagactaagctgaggactcccacttccctttgatggttgaagtggcatctcacctagaggctggcagatggagcgggtgacttttggggattatttcatttcagatttatgcctaaaataacttaaatgccatttaatcatgtatcctttattattttgcataaagggggtctttatagtcccttttttaagctaaaaaaataggtgttgggaagtaaattcagacaaagaacaatgagaaagtgggttaaggaaaggaacctagtatgggagatag

SEQ ID NO: 776505 - DNA, 643 bp, Homo sapiens
ttctattttcatcaaaggaatttctcagaaatatagataaaatgaaaggactagatattcattgctaatttaccagtttttatgttcgaattgttgggttctaactcctgatacaaattcttaccttaaaatttaaaaagaaaagacttttctgcttctgaggaagacacagacaaaaaataccagaatgatataattaacccattgactacttatttccaactttattcaaaaccctcctaatatttttaaatttgaaatgtaatttttatcatcaaaatcttaatggrtttcacagtttaggaaggcacataatactaataaggacttctgttaaacaacaacaacaacttctttccagtgacacagactaagctgaggactcccacttccctttgatggttgaagtggcatctcacctagaggctggcagatggagcgggtgacttttggggattatttcatttcagatttatgcctaaaataacttaaatgccatttaatcatgtatcctttattattttgcataaagggggtctttatagtcccttttttaagctaaaaaaataggtgttgggaagtaaattcagacaaagaacaatgagaaagtgggttaaggaaaggaacctagtatgggagatag

SEQ ID NO: 776506 - DNA, 643 bp, Homo sapiens
ttctattttcatcaaaggaatttctcagaaatatagataaaatgaaaggactagatattcattgctaatttaccagtttttatgttcgaattgttgggttctaactcctgatacaaattcttaccttaaaatttaaaaagaaaagacttttctgcttctgaggaagacacagacaaaaaataccagaatgatataattaacccattgactacttatttccaactttattcaaaaccctcctaatatttttaaatttgaaatgtaatttttatcatcaaaatcttaatgggtttcacagtttaggaaggcacataatactaataaggacttctgttaaacaacaacaacaacttctttccagtgacacagactaagctgaggactcccacttccctttgatggttgaagtggcatctcrcctagaggctggcagatggagcgggtgacttttggggattatttcatttcagatttatgcctaaaataacttaaatgccatttaatcatgtatcctttattattttgcataaagggggtctttatagtcccttttttaagctaaaaaaataggtgttgggaagtaaattcagacaaagaacaatgagaaagtgggttaaggaaaggaacctagtatgggagatag

SEQ ID NO: 776507 - DNA, 467 bp, Homo sapiens
cccagccaaaaataaactttctaaattaactgagacccttcttagatttttacggttcccaccacgaagcctggctaattttaaaattttctgtagagatgggggtgttggcgggttgggccgagggaagagggaggtctcactatgttcctaggcctggttgtgaactcataggctcaagcaatccccccatctctgccatgcagccaatacaagatttttttaaagttcctcggagaggtgaggaggctgaggtgcatgttcaccgactcctgtccctctttggttgaaggttgctcrtggggacacttcggattggtctggggtagaggagcagagaaagccctcaggcagagacccaggacagcctctgcacaaatgggcactgtctggagtgtacagaggacaggagaggccctgaagggtgtccaatgccacctcaccaatgtcacacccaccttcaccat

SEQ ID NO: 776508 - DNA, 403 bp, Homo sapiens
tttactttattattacttttaaattttgagcaggcccttggtgtggttagattcaggccacaagttttgactagacttctgtgattatggtttcaacgtcaatttcattttcaaactttttgcaatatttcgcatrtttgttccatggttataatactcactggccatttggggacctgagtggtagtctattccattgtttacttctcaaagtctatggaatgctgttaagatcagatccatgtatatgcagcttgagggtgaggctgaaatttcaaagacaacttatggggtcactttcatgaaagttttcctcttttatccttcttctgctttatggttctgcaatcctttcctttactttgcccttgtcagaaagctgggattttatttgccctagtct

SEQ ID NO: 776509 - DNA, 403 bp, Homo sapiens
tttactttattattacttttaaattttgagcaggcccttggtgtggttagattcaggccacaagttttgactagacttctgtgattatggtttcaacgtcaatttcattttcaaactttttgcaatatttcgcatatttgttccatggttataatactcactggcyatttggggacctgagtggtagtctattccattgtttacttctcaaagtctatggaatgctgttaagatcagatccatgtatatgcagcttgagggtgaggctgaaatttcaaagacaacttatggggtcactttcatgaaagttttcctcttttatccttcttctgctttatggttctgcaatcctttcctttactttgcccttgtcagaaagctgggattttatttgccctagtct

SEQ ID NO: 776510 - DNA, 785 bp, Homo sapiens
aatgcatcctcttagatggcacaaagggaagagattcttgtttaacaaagtattttttcccagcagtgccaagtatccatttccctgctccttttcggggcactcgaattggtggttctgaatactcatgtattagagtgctattcctaaaagttacaatggaggctgagaacgatttgtcaatattaaataaatcacactactcaaatttgtatatatgtgggttagcaaaatataagcacaagcctaacgctatttttttccattctcaattaattggacattgaaccctagaattacaaatcttgttgtttgtatcttaaaagttaataaggttagttgtagagcaaatggaaccttattcattttttatgggaatgtaagttagcaggaccattgtgaaaaacagtatggaggtttccttaacaattaaaaatagaactaccatatgatctggcaatgctacttttgtgtatttattcaaaagatgtaatatcaataagtcaaaaagataatctgcattcccatgttcattgcagcactattcacaataaccaagacgcggaatcaacctgagtgcycatcaagggacgaatgagtaaagaaaatgtggcacttatacacaaatgagtactattcagcctttaaaaaagaaagaaatcctgtcacttgtgatgacatgaataaacctgggtgaatttatgctaagtgagataagccaggcatagaaagacaaataatatgtaatttttagatatgaaactaatagaagctgaaagcagaag

SEQ ID NO: 776511 - DNA, 608 bp, Homo sapiens
ttcttccttttgtaaagccattaatcccaatgatggttgcagcggcccatttggagcagcctgcagggacgcagcttcagcaggggaggtcctgctggggcagcaggctccctggagtttgcagggttcagcacaggtgggagtcatgccccctagggagttggtggggcaggaggcctgtacttgtgggcacagctgcagctgcccaactgaggctccagacccaggcattcctgcgtgctstctgggtgggaagcacccccttcctccctcaggctcggaagtgcttgctcctgctcccaggcctcccaacaccctgtgtcctctctggtgcagagcaaacttgcagctgaccctggatgctgtcgaaacacggctgggtgtgcatgcactcaggatggcactgacacgccagtcccctggtccctctggagttggtcctctctggactttggccagactttgggaggcgggttgttatgttggtggggaggcactgagggaggcttggcatgggcctgcaggcaaccctctatggtgggaggcagacaggacgggaaggtacggtccctgtcgaaactccactttggtcagaaacggcctgaagc

SEQ ID NO: 776512 - DNA, 608 bp, Homo sapiens
ttcttccttttgtaaagccattaatcccaatgatggttgcagcggcccatttggagcagcctgcagggacgcagcttcagcaggggaggtcctgctggggcagcaggctccctggagtttgcagggttcagcacaggtgggagtcatgccccctagggagttggtggggcaggaggcctgtacttgtgggcacagctgcagctgcccaactgaggctccagacccaggcattcctgcgtgctgtctgggtgggaagcacccccttcctccctcaggctcggaagtgcttgctcctgctcccaggcctcccaacaccctgtgtcctctctggtgcagagcaaacttgcagctgaccctggatgctgtcgaaacacggctgggtgtgcatgcwctcaggatggcactgacacgccagtcccctggtccctctggagttggtcctctctggactttggccagactttgggaggcgggttgttatgttggtggggaggcactgagggaggcttggcatgggcctgcaggcaaccctctatggtgggaggcagacaggacgggaaggtacggtccctgtcgaaactccactttggtcagaaacggcctgaagc

SEQ ID NO: 776513 - DNA, 608 bp, Homo sapiens
ttcttccttttgtaaagccattaatcccaatgatggttgcagcggcccatttggagcagcctgcagggacgcagcttcagcaggggaggtcctgctggggcagcaggctccctggagtttgcagggttcagcacaggtgggagtcatgccccctagggagttggtggggcaggaggcctgtacttgtgggcacagctgcagctgcccaactgaggctccagacccaggcattcctgcgtgctgtctgggtgggaagcacccccttcctccctcaggctcggaagtgcttgctcctgctcccaggcctcccaacaccctgtgtcctctctggtgcagagcaaacttgcagctgaccctggatgctgtcgaaacacggctgggtgtgcatgcactcaggatggcactgacacgccagtcccctggtccctctggasttggtcctctctggactttggccagactttgggaggcgggttgttatgttggtggggaggcactgagggaggcttggcatgggcctgcaggcaaccctctatggtgggaggcagacaggacgggaaggtacggtccctgtcgaaactccactttggtcagaaacggcctgaagc

SEQ ID NO: 776514 - DNA, 325 bp, Homo sapiens
taataataataataataataacatttgaaatggtgtgagaattacaaaaatgtgaaacagaggcatgaagtgaatgcatgttctgaaaaaaaaatggtgctgataggtgcccaacgcagagttactgcaaaccttcaaattcgaaaaaaaaacagaaacaaacgaacaaaaaaatgcagtatctgyaaaatgcaatagagcaaagcacaataagacaagctatgcttgtattgcgtatttggtccaaatatgttatctttatcctgtgaaataaatatggaaatgtgaccagagagctcattgtctaatatataaattcaaatat

SEQ ID NO: 776515 - DNA, 521 bp, Homo sapiens
gtgccacttgcaccccagctgagtgacccccaaaggcagcccaccctgggcttcataccctacattacatgactcactggaataagcatgctttttctagtgagacactaaaacagcctggtgatatggttaggctttgtgtccccacccaaatctcatcttgaattatagtccccataattcccatgtgtcaaaggagagaccaggtataggtaattgaatcatggaggcggtttccccatgctgttctcatgatagttagttttcatgagatctgatggttttataaggagcggtttcccctactgccatgtgaagaagatgccttacttccccttttccttctgccatgacygtaagtttcccaaggcctccccaaccatgctgaactttgagtcaattaaacctctttcctttatagattaccctgtcttgggaagttcttcatagcagtgtgaaaacggactaatacacctgggctattctgtcattgttccctatctcagaatattgtattccca

SEQ ID NO: 776516 - DNA, 602 bp, Homo sapiens
cacttccgtgatagaaagtggcactgacttttttaagaaggattttctgaagtttatacaaggttgatgtttaattgggatgtggttaaatgaagagtttattaggcaaataggcaaggggcttaaaataatctaactgtgtcctatagctgtatgacgttgggaaaagcatttatcctagggagaaatgacaccttgtctcaatattttgcgtgtcttaatccatacatcctaattctaacatcacacatccattcaggacagtactcaaatttggtctgtacaggtgtcttgtgtttataaataagcagaktttctcaagttataaatgggcacacctttagactgtgcatactatgtagggttggaaaagctaccagatggcttcattctaatgggggcttggcttatgcaccaatggatacttaatgtgttaatgagaggggcaccagctctcctttttaagactgggttgatggttggtcatagaactgggctccatcatagcaaagaggatggcaggacttcagaacattaatggtcagttggcaacacttaataattacaggccttgcatgtacttttataataagtagcaaggt

SEQ ID NO: 776517 - DNA, 612 bp, Homo sapiens
tgtgaggaaacatgatacatggggtctgagcagacttttaggaccctgttgcatggtctccacctctaatacagcagcatgtctcaaacaggcagtgatcttttcttcttagagtgaagatggcaagttgaacagctctgcaggcagtcttcagccaatgtgcagcaacatgccctaggtgtgtaaaatgggaaattataagccactaagattttggtggttttgtgcacttatatgtatattatgtattatatttgcaatatcatcataattgatgtatttcaattaatatagcatgcttatattttaatagtatatgttttatgtttttayatattatatttatatatttcttctgaccctgcagcttcctagtgttctcttcaggcacctctgcatggggaagacacaaaaggcactcaacatgtaggatgtaacttcagaaatggcatcactaaaaacagcagatttcaaaaatcaactctatcaaatttcacagcccactttaatttcttcatcaagtaactcttcctagactacctcagttttgagagatgattcctttcctcaagttcctgggattaaacacacactgaatcacttttgggcgtc

SEQ ID NO: 776518 - DNA, 458 bp, Homo sapiens; identical to SEQ ID NO: 772962

SEQ ID NO: 776519 - DNA, 605 bp, Homo sapiens
accgcgctttggcgaaactgggttcgctgctgatttgcgaacctttgcctgactttctcaggccttgagagatctaagtaaatttggtggcccattgaaaggacctggagagagcgtatgaaggtaacaccccgtcaaactgcatgcggcctcagacctgctcctgtggagagctgttggtacctggagcctgaggagatattcagggaaaccagaagaggacaagagraaaaggggaagggacttgggagaacctggcaccagaggctttcctgggacttccaggactcaaagccataggggcccacccgctacattcctgtctttgcccctcttcctacagatctgcctcttctccaagaaactcaaccactagtgacaatgaccagcctcctgactactccttctccaagaggtaggtgaaggcctttcctaatcccagtgagaaagaattgttcaacatccccttccccagaccagtcctggaagcctcagcccaggtgggaagactcccacctctctctgcctgcctcacacaggaagggcctgggaggaagcaggaactagagtgtgccccttagtacggttttaatctgaagtcacat

SEQ ID NO: 776520 - DNA, 616 bp, Homo sapiens; identical to SEQ ID NO: 770742

SEQ ID NO: 776521 - DNA, 601 bp, Homo sapiens
cttctttctgttatgcaagcattttaaaagttgttttgaagacagggatattgctcactccaggctgtttgttaagagaaggtcagggcagcttttggtgggttaggtcaattcctctagcatcactgagtgtccctgcagtgccctttttgttctgcacagtggaagcagtggrgtccctgttccaggctccagccaggtctgtccccagattctaactctgggttaggcctacagaagcggggaaaggggtggggtatataggaggaagggattgcctcctgagagcttttcccagagcgtaggaaactgagctagtggggtacttttcacaagtctgctgctgccaagagcttggtacacaggatgctctccgattcttcagtgtggtctgagagacaaaccaccctccttctgctcttaaagaagaaaaagtaaagcatagacattgtaggctaataatacaagccaaaatgttaaaataaaaaccctaggaagtcttccatatttgctcccctccccaccactaggtcaatgtgcacagctagatctgtactgtgtatctatatttatatctatatctttaatcctatatataggg

SEQ ID NO: 776522 - DNA, 615 bp, Homo sapiens
ttaaagtcactaataccatcaacagaatgcagagatgtagcaaaaggagttaaatggcttatcatattgatagatctggggcaagagtttccaaattctcattaggagttactcagatcacataaaatcggcattaaaacaagccaggtaatccttcttgtttgccagcatgatatcaacaaaggattgactagggagattagattccagttaaagttaaagcatkgctgttcctataaatatacaatgtaagcaccaccccactgtctaaaagaccccagacatactccattacaacctccttagattacttttaaattaagatttgctatttagaaatatactttaattatttgaaaaaagaaaaaatatatattcaataaaaaaaccacctaccacctcatcacccaaagactactgtttactttttgttgttcttctagtttgtttgtatattcttctagtttatttctgtgcctatatatgcctacttttaaaataaaaactagatatgtcataacattatttcatttactctcttttgttatcaatatatcatatgtgtgatgttaatatagtacttgcttcctctacaacaaagtatttatttgttat

SEQ ID NO: 776523 - DNA, 612 bp, Homo sapiens
ctcttgactcttttttcttgctggggatgtgatctttgagagaattatgtcccagaggctcaagacttataaacaagtgtggaatctgtttggagctggcttcagctttcttccttctcagagacacaaatgcccacaacgttttggggaaacttttctttaaactgaagcagacggtccctaaggtctctgttgtgtacggagggggaggtgtttaaaaacaccctctcagtgtgtcacatagatacatcatggattggctgacttcatttcatattttcaggatattcacatccaaasttttggggattttgtctctgtggcaccctgtgtaaccactcaaagcccaataaatattatgtgatttatcagacatttgggcttaatcttcagcaccccctcctccgagccccccatccaactgcatagtacaggaggggtgagggcccaggctgtggttggcagcctgggaagcatcactccctccccatactggggaattaatttggctcctaaaataatggatggggtcatcactagaaggaagaaaggtaccaagagaaatttatcagcacctgaccaagccatgagtattagcagtcaggcctgata

SEQ ID NO: 776524 - DNA, 571 bp, Homo sapiens
agcataagcatagtgagagaacaaatagggaatctgaataaagggaaatgtagcataataaaatggaaattctagaattgaaagatgtaatatttaaaaggaaaaaattatgagatgagtttaatagcagattagacagtcgataagagaggttaatagyagattagacagtccataagagaggttaagatagaagaatataaattatataaatgggaggatgtcacaaaaaataaaatgctgagggaagtgaatagcatctctgtgagctctgggacaatataaaggagtctagtaagtgtgtaactggaataccaggaggagacaaaagagaagttgaagtggggaaaaatatttacagaaataatggttgaaaccttttaaataacatgaacaatataaatccatggctacaagaaattcagtgtacttcaagcaagatagacacaaagaaaactagtccatagtatgttataatccaattgatgtaaaccagtaatatgtaaaattaataataaaaaaatgttaaaagcagccagagggaataagaaaagacatatcaaaaacaaac

SEQ ID NO: 776525 - DNA, 571 bp, Homo sapiens
agcataagcatagtgagagaacaaatagggaatctgaataaagggaaatgtagcataataaaatggaaattctagaattgaaagatgtaatatttaaaaggaaaaaattatgagatgagtttaatagcagattagacagtcgataagagaggttaatagcagattagacagtccataagagaggttaagatagaagaatataaattatataaatgggaggatgtcacaaaaaataaaatgctgagggaagtgaatagcatctctgtgagctctgggacaatataaaggagtctagtaagtgtgtaaytggaataccaggaggagacaaaagagaagttgaagtggggaaaaatatttacagaaataatggttgaaaccttttaaataacatgaacaatataaatccatggctacaagaaattcagtgtacttcaagcaagatagacacaaagaaaactagtccatagtatgttataatccaattgatgtaaaccagtaatatgtaaaattaataataaaaaaatgttaaaagcagccagagggaataagaaaagacatatcaaaaacaaac

SEQ ID NO: 776526 - DNA, 638 bp, Homo sapiens
acatatgcatttgaggggaatgtaattcagcccataacagagcctaatcatttatttttttaaatagaagctattttttgtcttctgtaaaatcttgtaatcacatgacagcatggcacatgaatgttcagagtccacaagaagcacgagaaatttgcagacgacagggaagagctttgcacttgagatcagggggccctgggctctagacatacatcattcacttacaggcacgggcaggcttagtttctctgaacctcaatgtctttacttgtaaaaaaagatgtgaatactatatgcaataatatatataaaagtatctggcatatacaaatgacatcttatcaaatcaaaggtgccatcaattataaaatgtatcattatgttatttgtaccaaaagtggcaaaatcatgccaggggagattttcaaattacagattcaggagacttacccacagattcattgggtttgaatctcctgggatgaagctcaaagattgtcatttttwaaaaatattttccccattattctgttgatagactcagaagccaggactttcggcatgctgtcagtcaatgtgctgaagaacccagattttcattctaagctgccatctttggagctatttatcagttt

SEQ ID NO: 776527 - DNA, 645 bp, Homo sapiens
gcttgtgtgcttttatgtatatgatctcttgtttgttctcagatgttccttttctttagtatcctgttcttgttttatagatgcattttatttctttgaggtgatgtacaatgcatatctcctggaagttttcattcttgcagagattttgcttgctctgagttgcttttttaagaaaatttgttttgattctcatacttttgtgttagggattgcttctttagaaggctggtgatccttggtttgtactcatgtataaggtatgtggactaaaatcttggaaacctcgagcaaatgagttggctggacggtggcaagcatcactgtagggtagtctgagtgtggaacccctaatgtcagtatcttcaggtcctgcctccctggctgggccaagggtaarggcatggctgagagctgagagaagggagggggctagcctctgcattcagcatgtttagctttatctaactccactgcttttggatgactcctcacccttatctgggccaggccagggactttctgcctaagcttctcagaaagaaacttctagactttccaggtgggaagtcattctgcagtgtggaatgaggacgggacctggagatctacctgcttcttgaatagttttcatccatcctttta

SEQ ID NO: 776528 - DNA, 613 bp, Homo sapiens
ctggctctgttataatgacccaaatgaggtggcatcataagtgggcaaaggaggaaaggccaggattttggggagtgtttatatctcactccacccttttccaaggatatatatgaacatattttgacccattgtcttttgttaaacaaatatgtcataacttttagaaggcaaattgacagtgagaatctaaaatcttaaaaatgtttatagcttggaatccagtaattccactcctgggaatttagcctgaagaaataattatagtgcatgaaaaagctttatgtacaaaggtatgtatcataacaatgaatcagttgaaacaaaatatatgtccaacccctgtaaaaagtaaaagtctgatactcygagttttcagttgatctttgttgggaaggaatccctgaacctgtatatctaaaatacaaatatggaaatcaaggcacatctatgctttgaagtgtatagccagtaaaaatgtttcaaagtgtaataacatataacatgcttaactttatatatgttgagaagcaggtcattttcctggaatgtttagaagctgccatattctcaaacagtaattattttgaaatctcctagtgtgaatctcaga

SEQ ID NO: 776529 - DNA, 560 bp, Homo sapiens
acatattctataggtaggagctatgttttattatcagttgcaatcccacaagcatcagcataccttatccatagtaggctttccacaattatatgacaggcacaatgggacaattttatttcttgatctagtaaactttatgctctcctacacagtctttgaatttcttatagagattgtcacaatgccaagcatataatagacaacccatttggtagacttagtgaattattatatcagtgtattccaagaagataatagtgttttttttttaatgrtaatacagcactattatttccttttgtcatgtagtcaacaaaatcagccattttttttcaaagaaaatatattaaatcaagtttttccccattctataagttaaatctaaaaacttaatgcaagattttacattaatccatacttaatcacgtcatactaatttgaacccatttgccaggctgtcaaaaattttttgaatcctctatgatggtttttgcctcctactttatcatctgtaaatgtcatctgtcctttttctgtacactggcctaaaatgttaa

SEQ ID NO: 776530 - DNA, 591 bp, Homo sapiens
cgaagactcatggacataccatactaatgatgtttttagggatccagttatcttgggtatgccaggacatctcctccgaaggaaaagacacattatagcatcttgcacctcttttcatgaagacagaagcataatgtctgctaagcctctttgatttcaggcagcagagtatttcacacttaaaaaaaacctaccctgcctcatttactgagtgatctggaaagctgccacagaggaggagggccgagtgtaagaaagggctctgcagcagctctggcctgcaatgcttacaaccctgacacttgaacaatatgatccatcagactttatggtattagaagtatctgtcrtgggaaaagacacatatgaagtttagggcaagccccaaaatcggagaagcaaaatctagacacctgaagttctagaacaagaccatgttatctgcaagcagagatttgcacaccatttgaaaaacaacttctgatctatagtagaaatggagtgcctggtggtgaggaatcaagcgactttgaggtcagagctgcccattatgagctgggttctgtcagaaccaccatttcgtaaggtaga

SEQ ID NO: 776531 - DNA, 619 bp, Homo sapiens
atccatgttgttgcaaatggcagcatggatgaacctgtttgaataatattttactgtgtaattatactacatttaaaaattcattcactgatggacactaagatcgttcctatatctcgtctattgtgaacaatactgtaatgaacatgggcatgtgcagatacctcttcaaaatagtaacttaattcctttagacctatacccagaagtgaaactcgtggatcatctggtagctctatgtttaagttttttgaggaacttcatattgttttccataatggctataccaatttacgttgtcaccaaactgtacaagggttcccttttcccatatcttcaacaacactagttatttcttgtcatgagactgatttttataatgcccctgaaagtagtaaaatagcataatacctaagtaaaattwaaaaaaaagtctatgaggggctagacaacgagatgcagattcacaaccctctaataatctttcttaacgcaaggagagatttagaagtatttttcaaactgtgattgacacccatgggtgagtcataaagtcactttggtgagtcacaaccattatttttgaaaagaaagaaataaaagagcatagattagaata

SEQ ID NO: 776532 - DNA, 501 bp, Homo sapiens
agtaatcaagaaagatgaacttgccattttgcaactttacattctgacatgaggagaccataatataacaaacaaacaagacattttgcaactttacattctgacatgaagagaccataataaaacaaacaagcaaattacaaactacattaaaagataatatatgctatgggaaaaaagaaaaactagtaaaaggtaaggggattgtgagtacttgagtagcgatggatgaaggctgctatattaaataggttgtctaagttagaccttgttaagaaagtgttatccaaagagtggctttacatgaggkaggtcattttgtaaatatatgagggccaagtgttaggaatgctagccagccagggttgctgcacaaaatgaataaacaaggcaacttagagatggtaatgggcagttagctcttgtaggtaattgcaaacccctgtcttttactttgagtaaaatggaggaccactggaactttttgaggagtcacatgat

SEQ ID NO: 776533 - DNA, 684 bp, Homo sapiens
atcatgaaggttaatgaaaagataaaagtcttaaaaatcaaacgaaaatcggaaaagtgaaagtaagaaaggctttcagcagggatagaatgttggaagggctaaccttgatagaaaatacttagcagaatcatggggaaagaagaaaccaaactgtagtcatatttcagagatgaatcaagtctggggcatggtatccttattaaaataaagaatgggaggctgagacggtcggatcacaaggtcaggagatcaagaccatcctggctaacacggtgcaaccccgtctctactaaaaatgcaaaaaattagccaggcatggtggtggacmcccgtagtcccagctattccggaggctgaggcaggaggatggcgtgaacccaggaggcggagcttgcagtgagccgagatcgcgcccctgcactccagcctgggtgacagagcgagactcatctcaaaaaaaaaaaaaaaaaaaaaaaaaaaaaaaaaaaaaagaatgaagtatcttagccaacttctaatacatgtgtgtttgttttctcaaatagattttctagcaagagaaatacatgatgataaaatatttagccatttaagtataaaatttatttagaaaatagctaacaaactaatattttatccatggcaaattgaacagctttatcttctatctcttgcaggtct

SEQ ID NO: 776534 - DNA, 684 bp, Homo sapiens
atcatgaaggttaatgaaaagataaaagtcttaaaaatcaaacgaaaatcggaaaagtgaaagtaagaaaggctttcagcagggatagaatgttggaagggctaaccttgatagaaaatacttagcagaatcatggggaaagaagaaaccaaactgtagtcatatttcagagatgaatcaagtctggggcatggtatccttattaaaataaagaatgggaggctgagacggtcggatcacaaggtcaggagatcaagaccatcctggctaacacggtgcaaccccgtctctactaaaaatgcaaaaaattagccaggcatggtggtggacccccgtagtcccagctattccggaggctgaggcaggaggatggcgtgaacccaggaggcggagcttgcagtgagccgagatcrcgcccctgcactccagcctgggtgacagagcgagactcatctcaaaaaaaaaaaaaaaaaaaaaaaaaaaaaaaaaaaaaagaatgaagtatcttagccaacttctaatacatgtgtgtttgttttctcaaatagattttctagcaagagaaatacatgatgataaaatatttagccatttaagtataaaatttatttagaaaatagctaacaaactaatattttatccatggcaaattgaacagctttatcttctatctcttgcaggtct

SEQ ID NO: 776535 - DNA, 684 bp, Homo sapiens
atcatgaaggttaatgaaaagataaaagtcttaaaaatcaaacgaaaatcggaaaagtgaaagtaagaaaggctttcagcagggatagaatgttggaagggctaaccttgatagaaaatacttagcagaatcatggggaaagaagaaaccaaactgtagtcatatttcagagatgaatcaagtctggggcatggtatccttattaaaataaagaatgggaggctgagacggtcggatcacaaggtcaggagatcaagaccatcctggctaacacggtgcaaccccgtctctactaaaaatgcaaaaaattagccaggcatggtggtggacccccgtagtcccagctattccggaggctgaggcaggaggatggcgtgaacccaggaggcggagcttgcagtgagccgagatcgcgccmctgcactccagcctgggtgacagagcgagactcatctcaaaaaaaaaaaaaaaaaaaaaaaaaaaaaaaaaaaaaagaatgaagtatcttagccaacttctaatacatgtgtgtttgttttctcaaatagattttctagcaagagaaatacatgatgataaaatatttagccatttaagtataaaatttatttagaaaatagctaacaaactaatattttatccatggcaaattgaacagctttatcttctatctcttgcaggtct

SEQ ID NO: 776536 - DNA, 555 bp, Homo sapiens
aagttagtgcctgaaagtcttcaagcagtttgttttcctctgatatctgggcagaggtggcccctgtagctgggggctatttcccctgctcaatgagaaaagtccatattttgcttgcttataagttgcaccactaccttcagccacatatttccctcttttcctgacctactttaagagttttaaacctatcactcaacctgcttcccaataagattttatttgtgaaacgctaaaactatggagcaagtaccctgctttttttccccagaagcataaactcacatccatcttctggtctttacccaatkacagaaaattttttctccttttgctctctacgacgacccagcttctgttcaagcctgaagcatgtttaactagttaccaatagaaattgagtatccctaatccaaaaatccaaaatctgaaatgctccagaatctgaagctttttgagtgccgacatgatgccacagaccagaatacctacgttagcagttaaacagcagtggcacaaacaacagcaggttttcagtttccatctataatgctg

SEQ ID NO: 776537 - DNA, 596 bp, Homo sapiens
ttacccagccataccaaaaaaaaaaagattttgccatttgccacaacatgaatgaaactggaggacattatgctatgtgacataaaccagacataaaaataaaagttgtattatatcacttatataaggaatctaaaaattaaaaggttgaatatacagagatagagaatgaaacagtggttactaggattaaggtagagggtatggggagatatatgtcaaaggatataaagcagcagatagataggctaaacaaacctagaaatataatgtaccacattaggactatagttactaatactgtattcaagatttttgctaattgagtagatattagctgctcttgccacgaaggagaaaaaatggttaactatgtgagatgctggatatgttcatttgcttcattctattaaccrttttgttatctacatgtatctgataacaccaacttatatgcaaaaaaaattttaaaaagaacataaaactgtaaaaataaattaataaacaatcgcattggctcaccatacaagaagtgaaaactgatggtgctatatgtaagagaaaatagaaaaatccaccatcactgttggagtcaa

SEQ ID NO: 776538 - DNA, 580 bp, Homo sapiens
ttcatttgcttcattctattaaccgttttgttatctacatgtatctgataacaccaacttatatgcaaaaaaaattttaaaaagaacataaaactgtaaaaataaattaataaacaatcgcattggctcaccatacaagaagtgaaaactgatggtgctatatgtaagagaaaatagaaaaatccaccatcactgttgkagtcaaatttcatcctctcaacaactgataagtcaatcagaaaaaaaaggactcaatactttgagaaaactattaaaaacttgacttcatggacatatcaaccattgatttttaatgatatcactgccaacactctatataagcacaccctgagaattcacaaatttaaaaaaactgaccctaaactaaaaactaatttttacaaattttagtaactaaaaaacatagcaataatccacagcatgcaatctgttactataatacaattaagtcctaaacaagtagcaaaaataaatcaaatcactggaaacctctgcatatttggaagttaagacatgtaattctccatacaccattgaccaaagatatgatattgaaaat

SEQ ID NO: 776539 - DNA, 580 bp, Homo sapiens
ttcatttgcttcattctattaaccgttttgttatctacatgtatctgataacaccaacttatatgcaaaaaaaattttaaaaagaacataaaactgtaaaaataaattaataaacaatcgcattggctcaccatacaagaagtgaaaactgatggtgctatatgtaagagaaaatagaaaaatccaccatcactgttggagtcaaatttcatcctctcaacaactgataagtcaatcagaaaaaaaaggactcaatactttgagaaaactattaaaaacttgacttcatggacatatcaaccattgatttttaatgatatcactgccaacactctatataagcacaccctgagaattcacaaatttwaaaaaactgaccctaaactaaaaactaatttttacaaattttagtaactaaaaaacatagcaataatccacagcatgcaatctgttactataatacaattaagtcctaaacaagtagcaaaaataaatcaaatcactggaaacctctgcatatttggaagttaagacatgtaattctccatacaccattgaccaaagatatgatattgaaaat

SEQ ID NO: 776540 - DNA, 572 bp, Homo sapiens
aataataaactttttagaaatttatgttaaaaatggaaaaaaactctcactattgagaaaacatggtatttaatatttagtaagtaattttcaaatctatgaatatttttgtcggcgtaaatatttaacacaagaaattcttatctgacttttgaaactatttatcagttgtcaacctatttgcgatcattcgttttaggartgactaagttggagtattaaaatgattctgaattttcttgaaaatatacacaaagaaatgtaaattctcatttcaaaattaatgttttcatagctgtctgatttctttcaaaagtcagttttaccccaaaagagaactggtttgagtatgaagcacaattaagttttatagtaacagtattcacatgaggccatacataagagccaaaaaataacatgcttatattctgctcagcaccttatataccaatggaccagctcaccccaggctgactactttgatatcagcataggctgctggatgtgtgtgctaccattatccagttttacagaaaaaaatatttattgacttcagagagataaagttaatt

SEQ ID NO: 776541 - DNA, 578 bp, Homo sapiens
acaatgccctaagcagaagttctccatgaggacctcggccctgcagaaagcttctgcctggatacccaggcatttccatacatcctctgaaatctaggcagaggttcccaaacctcagttcttgacttctgtgcacctacaggctcaacaccacatggaagctgccaagacttggcaccctctgaagccacggtccaagctgtaccttggcctcttttagctatggctagagcagcggagacccagggcaccaagtccctaggctgcacacagcaagacgtccctgggcccagctcacaaaaccattttttcctcctaggcctctgggtctgtaataagaggtgctgctggaaaggtctctgacaagccctggattgtcttagcgattaacatttggctcctcattacttatgmaaatttatgcagccagcttgaatttcttctcagaaaatgggatttttcttttctgttgcatcatcaggctgcagattttccaaacttttatgttctgtttcccttttaaaactgaatgctttttacagcgcccaagtcacctcttgaatgctttgctttttaga

SEQ ID NO: 776542 - DNA, 624 bp, Homo sapiens
attgtgcataattcctcatttatttaattttttgggtgcattactactaaatgggtacattactactaaatatgctactgactttatttggatttcaccagtttttccattaatgtcttttttgtgttctgggatccaacccaggatttcaccttgcatttagtcctcacatcttctcagtcaccttgggtctgtgacagtgtctgagactttctttattttcatgatcttggtagttttgaaraatactggtcagatatttagaagaatgccccccaatttgggtttgtctcatgtttttctcatggtcagattggggtcatggagttttatgaagtactgtgacctaccaccactggcgacgttaaccttgattgcttgtttcatgtagtgtttttcaggtcttttcactgtaaagtttttctcctttccccactgtatactttgtaagagggtcactaagtcctaaatgcagcccagactcaagacaggagagatgattaaaccggcatagggagtatctacatatcttaatcggaatcctttcataaaagacatttgtcccttccttttttattttactaatttatatcaggatagactcatttatatttattttatatt

SEQ ID NO: 776543 - DNA, 535 bp, Homo sapiens
aaacaattttaaaaattagaatcttaagtttatcttttgcattgtacttaacaaaccagctacatgaataaagacagcagattttaaactaaaattttaagttaacttcagaactaaagtttatttttaaatgcaaatgaatggatgacacttaaatcttacatttatacataagaacaaaattaaatatgaaattttaaacattagggcagtggtttgtttctttgtttctgttmctgggtgtgttgtgtgataggaggaggctgaaatacaaagatttgtggcgggaagcactgacccggctttaagcacaatcctcagagtctacatccttcttcaatcttgtcttctactaaaaggcctcaaatctttggcaattcccctgactttctatattctactttcctcatctattagctgagggtgactaactctgactcttcaagtttatgtgaggagtatctaattaaaagtcttgaaaatgtgaagtgctctctatatattaaatggcagtagctttacattttctctgtgg

SEQ ID NO: 776544 - DNA, 627 bp, Homo sapiens
taaaaaatcattccatataaaaggataaagtacagatgaagaattagggcaaagggaaaataaaggttagaacaatgatttattaatctataacttaattgcaacatgctttggctttaaagccaaggtacattgcattgttcttattgaagcattgcctgttgtttttgttttttgttttttgcttttgagatggagtcttgctctgtcacccatgctggagtgcaatggcgtgatcttggctcactgcaacctctgcctcccaggtttaagctattctcctgcctcagcctcccaagtagttgggattacaggtgcccaccaccacacccagatgatttttgtatttttggtagagatggggttttgccatgttggtcaggctgctctcaaactcctgacctcaggtgatccacctgcctcarcctcccaaagtgctgggattacaggcgtgagccaccacacctgtcctgtttttaagctagtatcttcacttaaggtaattaaactatcactactgccaagatttctagaagcaataacttctaagttagccaactgtagttttgacataaacacatcctctcagattttattgtacatttcaattaacttcagttggtagga

SEQ ID NO: 776545 - DNA, 664 bp, Homo sapiens
gagccaggagaatcgcttgaactcaggaggcagaagttgtgatgagctgagatcccgccactgcactccagactgggcaacagagcaggactctgtaaaaaacaaaacaaaacaaaaaattacccttccccacaattataagcattttggcatatttccttcctgtctctgttgttcctattttggcagtatttttattgttatcgcaggcagcctgactgaaaagaaatctgggcttctaagtttttggtatttaggaggtagatacaagtgacccatgcatgtagggttaggtatctatttataccatgcaggtagagttttcatagccacctctacttttgggtgaagtttaggctaactgaaartgtaccagcatgcatggtgtatgcagaaaaatgaacgtaattcagattatgtgatagttttctcttgttgccattatatataacccagggcttaccacaaactgaaatttcttatgcattgacatttagcatttgatgtaaaatgactatctcagagttgctgccacaaacactggtaaaactgtccctactttctagcatgcttaatgtctaggtcttgctacatcttttttgatgtaactgttttgtggaaaatggttgtgtgtttggggaggcttttgagaaaagataaggtt

SEQ ID NO: 776546 - DNA, 593 bp, Homo sapiens
gccacggcgcccggcctatttatattttttattttaatttcttttttttttttcaagatggagtcttgctctgtcacccaggctggagtgcaatggcacaatcttggtgggggggactatcttttctggaattttaggatccctcctcagacaagcaggcctaacaaaagctattcctgaaggtatgctatgaggagcctcagaaattgtatccttcctattcatgtaagtgaagataaaaggtgtcactcttccagccttggacatcccttccctccctcagggtatggccctccacttcatttttggggcataacatctttataggacagggataaagtcccaatactaacaggagaatgcttaggacccttaacagtttttcgagaatgtgttggtaagggccactaaatccgaccttcctyggtcctccatgtggtctgggaggaaaactagtgtttctgctgctgcgtcggtgagtgcaactattccgatcagcagggtccagggaccattgtgggttcttgggcagggggacaagcaaaacaaaccaaaaccgcgggtggttttgtctttcagatgggaaacactca

SEQ ID NO: 776547 - DNA, 623 bp, Homo sapiens
ataaaattactttaaaattgagaggctttccttcaaagggttcactgtctagtgggaaggccaaagatggtgcagagtgatgacctggcaagcatctgacagagaagatgatgtggagacacagctggggtattaggaaaagcatcacagttatgacacttggcgctgacaggtaaaaaaacctttttcaggaaaacaagtgtgaagaaggacatttaaagcagatggaaaagttaatgtaaaagcctggtggtgtaaaacagcccagcatgttcaagaaacatgcaacagagcacagatagaatgtattttctaagagaaaataacgaacgctaggraagagtcaaaggctatgactgacgggctgcagggcacccacataggcatgctgcatggatctcctatggtcagtgccagcctccagctgcagcaccttctgcacccactgcagcgccttctggatccactgcagcagctgggcagaggccacagctgtgggcagtctctagccaacaagtaagcacagcaagggtctggggcctcgacgtttctgcccaatacaggccaggcctccttttaacagccctcattcctccagagctccgcagtgggttgttcagaac

SEQ ID NO: 776548 - DNA, 648 bp, Homo sapiens
aaactctagaaaccaaccagagggaaagcctcatacctttcagaaaggaaaaaaaggaacctgctattgacaaaaatgtatctgagtctctctataacttattaatgccatttttctaaccacagaggtgactcttaaagtaaaaagactcctttgttagttatctgttctaaggattttatttgggaacctggtttaaaaaaactaaaataatccccccaaaaaagtgatttcttttttytcttaaaggcgattaaaaggccctggttcaggttttcctttctttttttttttttttgagacggagtttcgctcttgttgcccaggctggagtgcaatggcacaatcttggctcaccgcaacctctgcctcccggattcaagcgattctcctgcctcagcctcccgagtagctgggattacagatgtgtgccaccaggcctggctaattttgtatttttagtagagatggggtttctccatgttggtcaggctggtctggaactcccgacctctggtgacccacccgccttggcctcacaaagtgctgggattacaggcgtgagccactgtgcccagcggccctggttgaggttttcatatgtgtaactttctaaggtgtaacgtaaagctatacttttagtagaaa

SEQ ID NO: 776549 - DNA, 648 bp, Homo sapiens
aaactctagaaaccaaccagagggaaagcctcatacctttcagaaaggaaaaaaaggaacctgctattgacaaaaatgtatctgagtctctctataacttattaatgccatttttctaaccacagaggtgactcttaaagtaaaaagactcctttgttagttatctgttctaaggattttatttgggaacctggtttaaaaaaactaaaataatccccccaaaaaagtgatttcttttttctyttaaaggcgattaaaaggccctggttcaggttttcctttctttttttttttttttgagacggagtttcgctcttgttgcccaggctggagtgcaatggcacaatcttggctcaccgcaacctctgcctcccggattcaagcgattctcctgcctcagcctcccgagtagctgggattacagatgtgtgccaccaggcctggctaattttgtatttttagtagagatggggtttctccatgttggtcaggctggtctggaactcccgacctctggtgacccacccgccttggcctcacaaagtgctgggattacaggcgtgagccactgtgcccagcggccctggttgaggttttcatatgtgtaactttctaaggtgtaacgtaaagctatacttttagtagaaa

SEQ ID NO: 776550 - DNA, 541 bp, Homo sapiens
ataccaagcggcaatttaattcatatcttatatttagacagaatgttgcattttggttatatatgtagagccacttgtaaattatttttaattccaaggctgggcagagaagacacagaaaatatcctctccctcccttgtgagaaagagagaggagagagagtgagagaaagagagacrgaaggcggggtggggggagaagcaaaacttgagttcctcttgtgagcaaagatcatcacccttctttttggttccccatctcactccctccctccagctaccctgggctgctttgggggctgtttagttaccatgttccctcttgcctcagtctttgtacatgttatttttactgcttggaaagttctttaaaacttcaattccactcccttcatcacttccaatcttctcaatctatttaagtcctacccattcttaagatcctaattcaaacatcttttccttaggaaagctttctccaaactcctacacccagttccagtcacctggtgatatttactcttgcagcacttattacagt

SEQ ID NO: 776551 - DNA, 569 bp, Homo sapiens
tagaaagataagttgaataccaagcggcaatttaattcatatcttatatttagacagaatgttgcattttggttatatatgtagagccacttgtaaattatttttaattccaaggctgggcagagaagacacagaaaatatcctctccctcccttgtgagaaagagagaggagagagagtgagagaaagagagacagaaggcggggtggggggagaagcaaaacttgagttcctcttgtgagcaaagatcatyacccttctttttggttccccatctcactccctccctccagctaccctgggctgctttgggggctgtttagttaccatgttccctcttgcctcagtctttgtacatgttatttttactgcttggaaagttctttaaaacttcaattccactcccttcatcacttccaatcttctcaatctatttaagtcctacccattcttaagatcctaattcaaacatcttttccttaggaaagctttctccaaactcctacacccagttccagtcacctggtgatatttactcttgcagcacttattacagtgtaagaaaaaga

SEQ ID NO: 776552 - DNA, 625 bp, Homo sapiens; identical to SEQ ID NO: 735915

SEQ ID NO: 776553 - DNA, 550 bp, Homo sapiens
gctcgtttacgatgcaaaacggggatccaaatgccactgagagaccagcggtatactgggataaaggaggatggtcaggtggtggagaggcatgtttttgtgtaccagcccttcacctctgctgaccttctcaactgggaaaacaataccccatcctacagcgaaaagccgcaagccctaattgatttgctccagactgttatccagacccacaaccacacctgggttgattgccatcggttgctcatgttcctctttaacagagatgaaaggcaaaaggcggagagggctccacgcagcaactaagtggctagaggaacatgcaccagaccagctgattatcaaaacccccaagagtatggaaggactcagttaccaggaaccgamcacctgttggacccacgtgaaagagaggatatgcaaaggctaaactgagaccgggaagctctcttggaagcattaaagacgggagctcaaaaggccacaaacgttaacaaggtctctgaggtcattcagggaaaagaagtccagcacaattctaccagagact

SEQ ID NO: 776554 - DNA, 550 bp, Homo sapiens
gctcgtttacgatgcaaaacggggatccaaatgccactgagagaccagcggtatactgggataaaggaggatggtcaggtggtggagaggcatgtttttgtgtaccagcccttcacctctgctgaccttctcaactgggaaaacaataccccatcctacagcgaaaagccgcaagccctaattgatttgctccagactgttatccagacccacaaccacacctgggttgattgccatcggttgctcatgttcctctttaacagagatgaaaggcaaaaggcggagagggctccacgcagcaactaagtggctagaggaacatgcaccagaccagctgattatcaaaacccccaagagtatggaaggactcagttaccaggaaccgaacacctgttggacccacrtgaaagagaggatatgcaaaggctaaactgagaccgggaagctctcttggaagcattaaagacgggagctcaaaaggccacaaacgttaacaaggtctctgaggtcattcagggaaaagaagtccagcacaattctaccagagact

SEQ ID NO: 776555 - DNA, 607 bp, Homo sapiens
ttgcttaatcaagctacactgactttacatccaacagtacctaacccgtccacattgttgggtttgctgccagctgaggacagctggttcacctgcttggacctgaaagacgctttctttcctatcagattatcccctgagaggcagaagctgtttgcctttcagtgggaagatccggagtcaggtgtcactamtcagtacacttggaccgggcttccccaagggttcaagaactcccccaccatcttcgggaaggcgttggctcgagaccatcagaagtttcccaccagagacctaggctgcgtgttgctccagtaggttgatgaccttctgctgggacaccccattgcagtcgggtgtcccaagggaacagatgccctacaccagcacctggaggactgtgggtataaggcgtccaagaagaaagctcagatctgccgacagcaggtaccttacttgtgatttactatccgacaggggtcggaacgcagcccaggatcagaaagaaagcaggtcatttgcaatctagcggagtctaagagcagaagtcaggcgagagacttcttaggagctgtggggttttgtagactgtggatcccaaactttg

SEQ ID NO: 776556 - DNA, 221 bp, Homo sapiens
gatgccctacaccagcacctggaggactgtgggtataaggcgtccaagaagaaagctcagatctgccgacagcaggtaccttacttgtgatttactatccsacaggggtcggaacgcagcccaggatcagaaagaaagcaggtcatttgcaatctagcggagtctaagagcagaagtcaggcgagagacttcttaggagctgtggggttttgtagactgtg

SEQ ID NO: 776557 - DNA, 614 bp, Homo sapiens
ttaggatccacggtggactcacagcctgtttaccatattgtgagtaatatcatctccccctctggagattatgaactgtttcacagacgggtgtacacactcggtgtacagagggtgtacacccgtctgtactgggagtaatatcatcctcttcctccctgaatattaagaacagtatcacaagggtgtttctactccctgcgatatcgcgtgtcatatcctcctctcccacgttgcaattagaaacaatatcagtgggggcgagtccaccttctgtcatattgaaagtaatatcatcttcttccctccaggatcgtgggaaaaatatccctggggggtttccactttctgccatacatgtagtcatatcaccccctctgccttggaatattattaaggaccatctcacacgggggtgaatacttactgccatattgggagtaatatcaacctctcggcctctgaatattaggragaatatcacagcgtgggtgtacacatcgtgctctattatggggagtcatatctgcctattatggcgagtaatatcatcctctgcctttcaggatattaataaacaattcacacgctgggtcaacacaaactgcgatgct

SEQ ID NO: 776558 - DNA, 608 bp, Homo sapiens
cttctccctccttgtcctggacatgccctcaggctgtcctccaaaccctccccaccaggcttagcccaggcttggaactgtctctgcctttctctcaccagcagctttcccactgcctacctccctcagcagaagctgaatccatcacagccaccttttcatgcatcactcacccaatgaatgttgagtgcctacaacttcgagtgtctgcaagcacagtacccaaaagctgccacacctagtttgcatgctagcctcaccagcgcctagttacttgaagtccctaagaagcttcggtttcctaatctttaaatgggcataaggagagtgcccaaacctctggggactgctgcaaggattaaagagtgcctggtacacagtgggtgcccaataaatgatggctgctatcacgaccatgtgcmgggcaaatcaaataaaatgagaaacaccacgatgcagacatcttgtggtttaggtaggcaccggaagggggtgccactctgagagtcatggctggccccacaaacggggcatgtgagctgattcccaaagatgcctatggtttttccaggcagagcagggaagaaatgtgctccaggcagaaggaa

SEQ ID NO: 776559 - DNA, 629 bp, Homo sapiens
ctttctctcaccagcagctttcccactgcctacctccctcagcagaagctgaatccatcacagccaccttttcatgcatcactcacccaatgaatgttgagtgcctacaacttcgagtgtctgcaagcacagtacccaaaagctgccacacctagtttgcatgctagcctcaccagcgcctagttacttgaagtccctaagaagcttcggtttcctaatctttaaatgggcataaggagagtgcccaaacctctggggactgctgcaaggattaaagagtgcctggtacacagtgggtgcccaataaatgatggctgctatcacgaccatgtgccgggcaaatcaaataaaatgagaaacaccacgatgcagacatcttgtggkttaggtaggcaccggaagggggtgccactctgagagtcatggctggccccacaaacggggcatgtgagctgattcccaaagatgcctatggtttttccaggcagagcagggaagaaatgtgctccaggcagaaggaatggccccagcaaaggcgtggcagcgagaaactgtatgacatcttcatggctgaccaactgaaagcatctccatgaagctgtgcctaagagcactgcttcagcatgaca

SEQ ID NO: 776560 - DNA, 629 bp, Homo sapiens
ctttctctcaccagcagctttcccactgcctacctccctcagcagaagctgaatccatcacagccaccttttcatgcatcactcacccaatgaatgttgagtgcctacaacttcgagtgtctgcaagcacagtacccaaaagctgccacacctagtttgcatgctagcctcaccagcgcctagttacttgaagtccctaagaagcttcggtttcctaatctttaaatgggcataaggagagtgcccaaacctctggggactgctgcaaggattaaagagtgcctggtacacagtgggtgcccaataaatgatggctgctatcacgaccatgtgccgggcaaatcaaataaaatgagaaacaccacgatgcagacatcttgtggtttaggtaggcaccggaagggggtgccactctgagagtcatggcyggccccacaaacggggcatgtgagctgattcccaaagatgcctatggtttttccaggcagagcagggaagaaatgtgctccaggcagaaggaatggccccagcaaaggcgtggcagcgagaaactgtatgacatcttcatggctgaccaactgaaagcatctccatgaagctgtgcctaagagcactgcttcagcatgaca

SEQ ID NO: 776561 - DNA, 578 bp, Homo sapiens
tatctttttctgctctcagaagccacatatttattcttggagtaagcatagaggaagaggagtgattgcccaaagaaaaaactcaaggtgcagttatcggaagaatggaaataagtgttgaacaagcaaaagctaaccagaacttgtatatattttcagaccacattaaggcataaaaatatgtaagcattctrtcttgtttgaaataaaactgagccccaaattttacagtgcaaattatttaaaagagaaataaaatacactgaattataaaaataagcagtattttataaaagcacaacagctagaataatctagttcttcctcaatcataactaccagttaataatcaactcaggtctattcactgtgtcttgaatatcaaaagttagtagaactatacctgttctaaaattggactatgcattaagagaggacttggcctcggcttttatctgctgataggttaattggttttaattagcttgcataccttatcagaaccaaaatagtttctttagtctgacaaatctttggagcatagagaatacttttttagaagaaacgttttccattag

SEQ ID NO: 776562 - DNA, 529 bp, Homo sapiens
ctgcaatagtaatactcaacaatttaactctgcaatacttacaatgaatcactactcacaagtgcatgcaaagaaagagatataatatgtataaatattgtataccattttgctcatttactttttatttaatgtttaaacacactggtggggtggatattatggggccgatgccagactttgatggtaaatctcagagtgcttcagtcaactttaacacagttctaaacccaaagtctcaattttattccaattgctttgaggctagtttacatrtaactaactttcccttctgcaagtggggagcttggtcccttcctttttctatatatcactccccttaagacttctttttcctaagacattgctctaaatctgcatttctaccagctagaacctggaaaatacattgcaggagagaaggaagtccccaactcttctatcttgaggggcctagcggagttgtgcatgcttagttcttatctttgccacctaggtagataattgtgagcatctttcttgtctggtt

SEQ ID NO: 776563 - DNA, 614 bp, Homo sapiens
gcaaggaaagatacatgcagtgaataaatgtgtgttgggagcagggggtggatggtggggatatgtttaggtacaatgcacacagggactgaggttgaaaggaggaatgtttcagtctcaatgtttacacactccaaacatgtgaaaggtgtcctgagagactccaccaaggactttatggccaagagcaatttgttgtgggtaatgccaatctgttcagtaaaggtaaaaacaccgtttgtcactaaaactgacataagaaaacttaatataccttgttaccagacaaacaaacaaaaagatatggtttcctaaagaagcacagagattcagtttcaatgtcttacatagatttccttctcctaagctttcttaagccaaatttctacttcaacaattttgattgctcctcttctayaagccatagaatcattgaaaaagtattctttctagaacagacttaaagaaatgtctctatagatgcctgtcctcttagctcattcctcaaccaaacctccttcaataaggaggttgtaccactctgaaactctgtttatgccatcccaggagttgtattcaggttgaactttcaggacattcatgaatctgtttat

SEQ ID NO: 776564 - DNA, 451 bp, Homo sapiens
gaaaatatggagttttgttttaaaataagtttgggtatgtgtgtaaatgtgtgtatgtttatatggctggaagttaccaccagatgattggacaatcattgtctttagggtgtgggataatgagagttctctttctttgcytagttgttgttgataaaatagattaaatagtcggcaatgttattttctaaattaaacaaattttgaaaattgtatttctattgaaataacaaaacaacgtaacacaaaataaaagataaagcttactctactcgcatattttcttaatgcttaaaaagtccaaaatagctttcaaacctgctccatcttttccagtcccttaagctttcttcaaaccagtgccatcttttgtcaaattattgtaatactcaactagttttcttacctctagctgcttttcgcactcaagcactatttccaaaattcccat

SEQ ID NO: 776565 - DNA, 697 bp, Homo sapiens
gggacaggatccctgtgctgtgtgaagcataggaaattggtgcactgcggtcccagcttttccagccatgactaaaaaggaccaaggtacagttcaggccatggcttcagagggtacaagccccaagccttgggagcttccatggagtattgagcctgtgcatgcacagaagtcaataactgaggtttgggaacctctgcctggatttcagaggatgtatggaaactcctggatgtccagacagaagtttgctgcagggcagggctctcatggagaacatctgctagagcagtgcggaagggaaatgtggggtgagagcccccaaacagagtccctactgaggcaccacctagtggggctgtgagaaaagggccaccatccttcagaccccagaatggtagatccactgacaacttgtatcgtgtgtgtggaaaagccacagaccctcaatgccagcccatgaaagcagccagaaggaaggctgtrccctgcaaagccacaggggtggagctgcctaaggccatgggaacccaccttttgcatcagcatgacctggatgtgagacatggagtaaaaggagctcattttggagcttaagatttgactgccctgctggattttggacttgcatgaggccctcgttttggccaatttctcccatgtggaatggctgtatttacccaatgcctgtaccccc

SEQ ID NO: 776566 - DNA, 593 bp, Homo sapiens
catacacaccatggaatactgtacagccataaaaaagcatgagtcatgtcttttgcaggaacatagatggagctggaggctgttatccttagcaaactgatgctgaaacagaaaacagaatatggtgtgttctcacttataagtggaagctaaataataagaacttatgaacacaaaaaagggaacaaaagacactgggkcctacttgggggagggtgagaggaaggagaggagcaggaaaggtaactattggttactgggcttaatacttgggtgatgaaataacacacacagcaaagccctgtaacacttgtttatgtatgtacaaaagtttcacatatacccccaaacctaaaaaaaaaaaaaaaaaaaaaggaaagtgtgcttacgagctctgtgagtctgctgaaatgatggtagacgacaagctgtcctcaatcattcgccccccgctccccagccaattttctctgtgcaacagtggctatttactttggttacaagataaaatttatgtaagtggttgagcctagacttaggggcactagtttcagaaaaaaatgaaactatatatatttccatgttttttccaa

SEQ ID NO: 776567 - DNA, 569 bp, Homo sapiens
acaataaatctaaataactgaaagaaaacttttgcctacaatcttgtcacctcagcaaatccaactttttgtttggccctgatcttttctagccattgtggataatcacagtgggtgccttctgccattttcaattaatacaatttcagaagcatgttccatgttgctgtgtagtccttgtaatctacattttaatagctacatcatcttttacattattttcctgttgtccaacatacatttcataatcttttctataagaaataatgcagcgaatctttgtctatttggctttttttcccttacgaattacttgttcagaatctattctaagaggtaggatcaaaggtcraaaccctggatatgaggaggtttttatttcttctagtgactaaggaactctgaaggttccacccacagcctcccaccttttacatttgagatagacatttctccatcagaaatgtatccagccactgcagcagccccactggaatgctgggacaagctcatggttcattttcgggaaagtagaggcttaaacagtatgatttaacccatacaagctt

SEQ ID NO: 776568 - DNA, 592 bp, Homo sapiens
atgctgagggtaaagctgagtggatttggtgtatgagggaaactgaagagccagaaataagtcctcagtttttggcttgagcaactagaagaatggatctgtccttcacttagatggtgaagattgtaggaagaacatgttttggggaasagggagaaacgataatgtagttttggacttgttaagattgacacatattagatatttaagtgagaaagttagtaggatattgcataattaaatctaaagtttaggggagacgctggagccacttgctaccatacctaagaaagtccccactgtcaaacttacatagcaaacatgttcattcatccattttacatgtaggttaattaggaggtcttaaaagtgtgttttttaaaagaggagcagtgggccatattctgcatttgcagaggagggagatttattttcacaaagtctgggagtgaagtgttgcccagtagtgtgtccactcatatcacatttctctagcagaaggaagctgtaatccctataaacatgagcgaatttaaagttcccattacccaattgtgacctcatgaccccattctgggaagctgactaagaa

SEQ ID NO: 776569 - DNA, 592 bp, Homo sapiens
atgctgagggtaaagctgagtggatttggtgtatgagggaaactgaagagccagaaataagtcctcagtttttggcttgagcaactagaagaatggatctgtccttcacttagatggtgaagattgtaggaagaacatgttttggggaacagggagaaacrataatgtagttttggacttgttaagattgacacatattagatatttaagtgagaaagttagtaggatattgcataattaaatctaaagtttaggggagacgctggagccacttgctaccatacctaagaaagtccccactgtcaaacttacatagcaaacatgttcattcatccattttacatgtaggttaattaggaggtcttaaaagtgtgttttttaaaagaggagcagtgggccatattctgcatttgcagaggagggagatttattttcacaaagtctgggagtgaagtgttgcccagtagtgtgtccactcatatcacatttctctagcagaaggaagctgtaatccctataaacatgagcgaatttaaagttcccattacccaattgtgacctcatgaccccattctgggaagctgactaagaa

SEQ ID NO: 776570 - DNA, 640 bp, Homo sapiens
gttgcttctgctggctgggagcacacttcagctaagtgccgtctcagtctggatgtgtgcgctcactgattgctctcaatgcccctgtgagtagatattaaccctaactgccattatacaatgaggagctgagctggagagggtaattaagtcacaggcgcttctggttagaactctcttaaatctttcctgaaagcactactgctcagcacaacagctgtgtgaagggtttcccagctgaaagcgagaaacaaaaatcaaatattgcagaaaaatgagtatctcaacaggtatttcccatgctgtagaagaaagctgtccctcactactctgttggccaagccttatgggcacaacttgaacaacctaccttcttgtttttgttttttcttttcttttttttggcagggcggggggaggttgttaatttttggagttttgggggacatttttttttttgaggcgggtctgaccrtcgccagcctggagtgtagtggcgcgatcttggctcactgcaacctctgcctcctgggttcaagcaattctcctgcctcagcctcccaggtagctgagattacaagcgcacaccaccacgctcggctaatttttgtattttagtagagacggggtttcaccatgt

SEQ ID NO: 776571 - DNA, 504 bp, Homo sapiens
gtgtttcatgtaggcaacagataaatgggtcttatttttttatccattctgccaggtatgtcttttgattggagagttcagtccatttacagtcattgttattactcataagtaaaggcttactcttgctatcttgttatttgtttttcagttgttttgtggtcttctcttcctttttgcttttgttcctgtgttctttttagtgaaattgattytctctgatacgattttttttttttgcttcttactttttgtgtatcctttgtatgtttttttatttgaggttatcatgaggcttgcagatactattttataacttgattttaagctgagagcgacttaacactgcttgcataaactaacaagcaaatagaagatgaatgaagactctacactttaactttgtccccctgctttttaacaacttttgctgtatctcatgggttttggaatgttgtgttgccattttcatatggaaacatttttagttttaaatttattttt

SEQ ID NO: 776572 - DNA, 522 bp, Homo sapiens
  misc_feature 48: n = A,T,C or G
tgagctctcattagaaacaatgaagaccagaagacaatggaacttaanaagtgctggggggaactatacctgaaattctatacctaacaatagatgtgtcatgacagacccggtaggcaccagtggcctttggaacatgtctaaactagctggctacttggtgctagcactccccttatctcaagtagccatatgtttcaaagaaaatgctacaccatcatagctgtagctcatttgcttgatataccacttcctttcaacccccacatcctcaccacctgtttctttgtttgatcaccaataaatagtgtgggcttccagagcttgsggcctttgcaacctccatactagcgttggccccctggtcccactttctttcatcttttctcattcctttgactccgccggactttgtagcccccatggcctggtgttgggtctgatcaccccaatattcatggcacccaacatggggcgacaaagaccacagtgaaggaacgctagagcatgtgaaagcggagg

SEQ ID NO: 776573 - DNA, 511 bp, Homo sapiens
aggttaaagatgtccattgctcaatgaaataaaagaggacacaaacaaatggaagaacattccatgctcatggataggaagaatcaatatagtgaaaatggccatactgcctaaggtaatttataaattaaatgccatccccatcaagctaccaatgactttcttcaaggaattggaaaaaactactttaaacttcatatggaaccaaaaaagagcccacattgtcaagacaatcctaagcaaaaakaacaaagctggaggcatcatgctacctgacttcaaactgtactacaaggctacagtaaccaaaacagcgtggtactggtaccaaaacagatatatagaccaatggaacagaacagaggcctcaaaaataacaccacacatctacaacaaacctgacaaaaacaagcaatggggaaaggattccctatttaataaatggtgttgggaaaactggctagccatatgtagaaagccgaaactggatcccttccttacaccttagaca

SEQ ID NO: 776574 - DNA, 419 bp, Homo sapiens
ttcagatgatgtctcacaagtaaaaccacgggggttggtgatagattagatacggagggagacaagaaagaggatgtcaaagatgagccctaatttctgcaactggtgggtgaatggtagtactgtaacttttgtggtggtgattgcttgggagaggaccaggcttttaggggcagagaaaatgagtttggttggaatatgttragtttgccattcacatgcagagtaagcactactgattatagagtttagaggagggtcttggtttgctgatatacattggaagtccgtgagtacagaaggtcattttactacaggcagaggttatcttggttgagactattgaatcagctcattttaaacttcagagatgttgagatgcccctgaattaatttttttactcagtgtctccagtttt

SEQ ID NO: 776575 - DNA, 600 bp, Homo sapiens
atatgaattggaagaaaaagggaagaagtccttttcccatacatgtagtttgaagagtcacagccccagtgtcacatggcaagagtgtgacagggttagagcccaaagagtagaacttagtaaccggcaccctctatatttttagatgtgttggttattaattagcacaactggtgtccaagctaatatttcaccaaggcaaccaaacctatgtctgtaacatttcttaatccttcctcaatagaaagcagaggtggcaaactgctttctattaatattaatgtcatactacttgccaaattgatttttttacatctaacttctatcatatgttagaagraaaaaaaagacccagcctgggctacaagagcaaaactctgtctcaaaaaataaaaaaacaaaaacaccactccctttgcataggaatgggtgtactaccctactcacctcttcccctagtctcctagccaggcttatcgcttatccctcatgtctggaactcacattttatgacaaaaattgcttcttccatttttcaaacaggttcaaagggggattcaaagcttttgttgcaattttaataatcagcaagcatgcaaa

SEQ ID NO: 776576 - DNA, 631 bp, Homo sapiens
gtggcatgtgcatatagtcccagctattctggggaggctgaggcagagtattgcttgagctcagaaggttgaggctggagtgagctgtgatcatgccactgcattccaggctggatgatggagcaagactgactcaaaaaaagtaaattttggaaaagatggaaaattcagtgagacaaaaatgattatgagaagtgaaaataggaggccaggcrcggtggctcacgtctgtaatcccagcactttggaaggccgaggtgggcagatcacctgaggttaggagttcgagaccagcctggccaacatggtgaaacccccatctctactaaaaatacaaaaattagccgggtgtggtggcgggcacctgtaatcccagctactcgggaggctgaggcaggataatcgtttgaacccgggagttggaggttgcagtgagccaagatcgggcgactgcactccagcctgggtgacacagtgagactccatctcaaaaaacaaaaacaaaataagatagaagaaacatttgaaaagaaactgaccaaaactttccaaaactgatgaaatatgtcaagccaaattaaacaatactaagaatccaaagcaggataaataaaaagaaatcaacaagtaa

SEQ ID NO: 776577 - DNA, 632 bp, Homo sapiens
attatatgcatatttgacaagtgctatgctggtacaatggcttaattcttttacctaactcagcagtctgatttcttggatcaaaacctgtctatcctggacaatttacaaccccatcatactcaatttttactgaaatttttttcaggaactctcacccaaatctaagaaaagcagcttacaaagaagacaaacacaggcaagcttgagtcatgaaaggagagcagcatgcgggatgggacttcctggattgagaccatggtttggctctgagcttcctgggagtcaaagcaaaatgaccaacaataaataattatgccattatcaaactaacagttttcaaaacggacaatgttttcccagcagtaaatctagacagtgatggaatctgcaaattcccctcctcagcatatgaggaccagcactgagagtttcctttctyttctcccttctctccctgctgagctgtggggaaatccctgctgaaattacaggggcaatctttatggtgctagagcaaagcaggtagagacaggtgctcagaagcgagtggagttgttcctaggtgtatggcgtgagttccaagaactgcaccctggctgagcactgtggcacatgcattttgggaggcc

SEQ ID NO: 776578 - DNA, 632 bp, Homo sapiens
attatatgcatatttgacaagtgctatgctggtacaatggcttaattcttttacctaactcagcagtctgatttcttggatcaaaacctgtctatcctggacaatttacaaccccatcatactcaatttttactgaaatttttttcaggaactctcacccaaatctaagaaaagcagcttacaaagaagacaaacacaggcaagcttgagtcatgaaaggagagcagcatgcgggatgggacttcctggattgagaccatggtttggctctgagcttcctgggagtcaaagcaaaatgaccaacaataaataattatgccattatcaaactaacagttttcaaaacggacaatgttttcccagcagtaaatctagacagtgatggaatctgcaaattcccctcctcagcatatgaggaccagcactgagagtttcctttctcttctcccttctctcyctgctgagctgtggggaaatccctgctgaaattacaggggcaatctttatggtgctagagcaaagcaggtagagacaggtgctcagaagcgagtggagttgttcctaggtgtatggcgtgagttccaagaactgcaccctggctgagcactgtggcacatgcattttgggaggcc

SEQ ID NO: 776579 - DNA, 628 bp, Homo sapiens
gcctcggcctcccaaagtgctgggactacaggtgtgagccactgcatacggcgagatctgatctctctcttatccctgctaccatccacataagacatgacttgctcctccttgccttctgtcatgattgtgaggcttccccagccatgtggaactataagtccaattaaacctctttctttttttttttctttttaagatggagtctcmctgtgtcatccaggctggagtgcagtggcgcaatctaggctcactgcaagctccgcctcctgggttcatgccattctcctgcctcagcctcccaagtagctgggactacaggcaccaaccagcatgcctggctgatttttttttttttttttttttgtatttttagtggagacagggtttcaccatgttagccaggatggtctcaatctcctgacctcgtgatccacccacctcggcctcccaaagtcctgggatcacaggcgtgagccactgcgcccggccacctctttcttttgtaaattgccctgtctcaggtatgtctttatcagcagcctgtactaatagactaatacagtaaattggtaccagtagagtggggtgttgctgagtagatacccaaaaatgtggaaatgacttt

SEQ ID NO: 776580 - DNA, 531 bp, Homo sapiens
aggtggtctcagatggagatgaggaaattttgggaactggagcaaaggtgactcttgttatgttttagcaaagagactggcaatattttgcctctgccctagagatttgtggaactttgaacttgagagagattattgagggtatctggcagaagaaatttctaagcagcaaggcatacaagaggtgacttgggtgctrttaaaggcattcagttttataagggaaacagagcataaaagttcagaaaatttgcagtctgacaatccgatagaaaagaaaatcccatatactgcgaagaaactcaaggctgcataaatttgcataagtaacgaggaaccaaatgttaatccccaagacaatggggaaaatgtctccagggcatgtcagaggtcttcatggcagtccctcccatcagaggcccagaggcctaggaggaaaggatggttttgtgggctgggcctaaggtccctgtgctgtgtgcagcctagggacttggtgccctatgtcccagccattccagctgtggctga

SEQ ID NO: 776581 - DNA, 531 bp, Homo sapiens
aggtggtctcagatggagatgaggaaattttgggaactggagcaaaggtgactcttgttatgttttagcaaagagactggcaatattttgcctctgccctagagatttgtggaactttgaacttgagagagattattgagggtatctggcagaagaaatttctaagcagcaaggcatacaagaggtgacttgggtgctattaaaggcattcagttttataagggaaacagagcataaaagttcagaaaatttgcagtctgacaatccgatagaaaagaaaatcccatatactgcgaagaaactcaaggctgcakaaatttgcataagtaacgaggaaccaaatgttaatccccaagacaatggggaaaatgtctccagggcatgtcagaggtcttcatggcagtccctcccatcagaggcccagaggcctaggaggaaaggatggttttgtgggctgggcctaaggtccctgtgctgtgtgcagcctagggacttggtgccctatgtcccagccattccagctgtggctga

SEQ ID NO: 776582 - DNA, 566 bp, Homo sapiens
tggatgcttccctgtatcaactcatttaaaatgcacaaccttaaagttagtacagccattatggagccaagggcacagaggttcctcagaaagttaaaaacagcactaccctggctgggtgcggtggctcacacctgtaatcccggcactttgggaggccaaggcaggcggatcacctgaagtcgggagtttgagaccagcctgaccaacgtggagaaacctctctctactaaaaatacaaaattagygggacatggtggcacgtgcctgtaatcccagctactcgggaggtggaggcaggagaatcacttggacccgggacgcggaggttgcggtgtgctgagattgcgccattgcactccagcctgggcaacaagagcaaaactcagtctcaaaaaaaaaaaaaaaaaaaaaaattgctggacctggcggcgagagcctgtagtccaagctgctccagagcataaggcaggagaatcgcttgaacctgggaggcggaggttgcagagatggtgccactgcactccagcctgggtgacagaaactcaaacaaaacaaaacaaaaa

SEQ ID NO: 776583 - DNA, 633 bp, Homo sapiens
ctgtgaaagatattgtatgcatcagatagtgaactaacaatactttattttcaggactaagctactttcctttcgcagaaaacctattaatgtgcttccatagagactaaggtttatgttagaagactcgcataagaataataaggactagattataaataatccttcccatatgccaaccacttgtcaagtgctttatatgcattgtcttaattagtggctaaatgccttaaaaggcattggccgggcacagtggctcacgccagtaatcccaggactttgggaggctaaggcgggtggatcacgaggtcaggagatcgagaccatcctggttaacatggtgaaaccccatctctactaaaaaaatmcaaaaaaaaaaaaaattatctggaagtgctggcaagtgcctgtagtcctagctactcaggaggctgaggtaggagaatggcatgaacccgggaggtggagcttgcagtgagctgagatcacgccactgcactccagcctgggcgacaaagcaagactcttgtctcaaaaaaaaaaaaaaaaaagcaaatattatcccataattctgattaacccaagtttagagaagtaactcctccagactcattcagataagggacaaagcta

SEQ ID NO: 776584 - DNA, 542 bp, Homo sapiens
gcagttggaattggctgctatttgcggggggcgggaacatggcatgaatcgaggatagtgctgtgtccgggcttggagggcccttcaaggtcccgagtgtctaagagtttcagttatggccagagcctttagtgagccaggacagttggcctggggaccaagaatggggagaaaaagtcatttattcaacaaagatgcattagttcctaataggggccagtcctgtcccaggcactgcggcagcttacagtctaactctaggggaaagctgaggaccaccgttgctggctgctgctgtggattccgcccagtcctttctgtatttctyaaggctgctcaccagagaggaggggactggcacaggcctcagccgtgctgtgcagacagctgccccacaggccccaggtcaggagcaaggtagggccagtggtcaaacccctccttcactgaagccagtggatgtttgcaaacctcggagtcagtcaaggccgtgcagaagaactttcctatcagtaagaaacaatcgttgcatcaggcaatgt

SEQ ID NO: 776585 - DNA, 600 bp, Homo sapiens
taatactgccatgcaaggagtgcatacaaactctatctcactaatccttatcatcacccagggaagtaaacccactctacagataagaagactaaggctcttagtggggaaaaaaataatcttgccaacagaaagarcagtcactgggtgcggtggctcacgcctgtaatcccaacactttgggaggccgaggctggtggttcacaaggtcaggagatcgagaccatcctggctaacacaatgaaaccccgtctctgctaaaaatacaaaaaaattagccgggcatggtggcgggcgcctgtagtcccagctactcgggaggctgaggcaggagaatggcgtgaacccaggaggcggagcttgcagtgagccgagatcacgccactgcaccccagcttgggcaacagagcgagactccgtctcaaaaaaaaaaaaaaaaaaagaacagtcatgggatttgaacccaggccaactgaccccaaaacccaagctctgaaccactgtgtccgctgcctcctgagagctcagtgactagcatctgggaggtgataactgggccacctatagggctggcctgtgtaagccagctcttcctgctgt

SEQ ID NO: 776586 - DNA, 600 bp, Homo sapiens
taatactgccatgcaaggagtgcatacaaactctatctcactaatccttatcatcacccagggaagtaaacccactctacagataagaagactaaggctcttagtggggaaaaaaataatcttgccaacagaaagaacagtcactgggtgcggtggctcacgcctgtaatcccaacactttgggaggccgaggctggtggttcacaaggtcaggagatcgagaccatcctggctaacacaatgaaaccccgtctctgctaaaaatacaaaaaaattagccgggcatggtggcgggygcctgtagtcccagctactcgggaggctgaggcaggagaatggcgtgaacccaggaggcggagcttgcagtgagccgagatcacgccactgcaccccagcttgggcaacagagcgagactccgtctcaaaaaaaaaaaaaaaaaaagaacagtcatgggatttgaacccaggccaactgaccccaaaacccaagctctgaaccactgtgtccgctgcctcctgagagctcagtgactagcatctgggaggtgataactgggccacctatagggctggcctgtgtaagccagctcttcctgctgt

SEQ ID NO: 776587 - DNA, 566 bp, Homo sapiens
ctagccatgctccccacccagataatactacatatattattctataactggatttctttcacttcatatatgacaaaattttaaacggttccaactggggaaatttaagaaaaaaattaaggtgcaaactctaatcaactgtggaaacaactgaaactgtgtataggataacagcttcyacagtcagcctgcaaagcctgtctaccactcattaactgtgtgaccctggggtaatagcctaacctccctgtgcctgcctcagttttctcattggtaaaatggatataataatagtacctaccttattttaggatgttattaaataatgtacataaagtatttagactattccctggcacatagcaagaacccaatgactgttggctattattgttgaacatttaggtaatttccagtttttttgctatttctcaacaatgctccaatgacattcaggatttttttttttatggtggtaaaaaacatataacatcacatttaccatgcaaggtcagattctagagtgaccacctgagtactcacactagagctctggcagcaaacac

SEQ ID NO: 776588 - DNA, 636 bp, Homo sapiens
tttgcagatgacatgatattatacttagaaaaacctaaagactccaccaaacaactgttggaactgataagtgaattcagtaaagttgcagcattcaaaatcaacatacaaaaatcaatagcatttacatatcccaagaacaacaatctgaaaaagaaatcaagaaatcaatttcatttatggtagctacaaagaatacaaaatacctaggaatcaatttaaccaaagatgtgaaagatctatccaaagacaactataaaacactaatgaaagaaactgaagagggcaccccaaaatggaaagatatttcaygctcatggacccgatgacattcttcacagaaatagaaaaaataattccaaaatttacatggaaccacaaaagaccccaaatagccaaagcaatcctgagcaaaaagaacaaagctataggaatcacactacctgacttcaaaatatactacaaagctatagtaaccaaaacatcatggtactggcatgcaaagacatcagaccaatggaacagaatagagaacccagacccagatataaatccatgcgtttatagccaactcatttttgacaaaggcaccaagaacatacaatggggaaaggagagagtctcttcaataaatga

SEQ ID NO: 776589 - DNA, 636 bp, Homo sapiens
tttgcagatgacatgatattatacttagaaaaacctaaagactccaccaaacaactgttggaactgataagtgaattcagtaaagttgcagcattcaaaatcaacatacaaaaatcaatagcatttacatatcccaagaacaacaatctgaaaaagaaatcaagaaatcaatttcatttatggtagctacaaagaatacaaaatacctaggaatcaatttaaccaaagatgtgaaagatctatccaaagacaactataaaacactaatgaaagaaactgaagagggcaccccaaaatggaaagatatttcacgctcatggacccratgacattcttcacagaaatagaaaaaataattccaaaatttacatggaaccacaaaagaccccaaatagccaaagcaatcctgagcaaaaagaacaaagctataggaatcacactacctgacttcaaaatatactacaaagctatagtaaccaaaacatcatggtactggcatgcaaagacatcagaccaatggaacagaatagagaacccagacccagatataaatccatgcgtttatagccaactcatttttgacaaaggcaccaagaacatacaatggggaaaggagagagtctcttcaataaatga

SEQ ID NO: 776590 - DNA, 636 bp, Homo sapiens
tttgcagatgacatgatattatacttagaaaaacctaaagactccaccaaacaactgttggaactgataagtgaattcagtaaagttgcagcattcaaaatcaacatacaaaaatcaatagcatttacatatcccaagaacaacaatctgaaaaagaaatcaagaaatcaatttcatttatggtagctacaaagaatacaaaatacctaggaatcaatttaaccaaagatgtgaaagatctatccaaagacaactataaaacactaatgaaagaaactgaagagggcaccccaaaatggaaagatatttcacgctcatggacccgatgacattcttcacagaaatagaaaaaataattccaaaatttacatggarccacaaaagaccccaaatagccaaagcaatcctgagcaaaaagaacaaagctataggaatcacactacctgacttcaaaatatactacaaagctatagtaaccaaaacatcatggtactggcatgcaaagacatcagaccaatggaacagaatagagaacccagacccagatataaatccatgcgtttatagccaactcatttttgacaaaggcaccaagaacatacaatggggaaaggagagagtctcttcaataaatga

SEQ ID NO: 776591 - DNA, 568 bp, Homo sapiens
cgcatcacagtggtggctgggttttccatcagtcattactaatggcaatgagaaaaagtcaggcggcttgtgtgactcccatgttaacagcaccataaaaaagttttgccctaggaatttgggggaaagggaagaatgcggactgcctttgttattacagaaatttcacaacttacttaatgacaaccycgaaagttcacctgtggcatactggctgggaagagaaacaactgaagcaagccaatgctaagtgcagattatggcactacctgaaaataacagatctctttaagaagtttatcaataactaagtgtagaggatattcacatactgccaagtcatagggaaaggtctctggtttcgtaagttcctaatgccacccctcaagaaagagagaacaagtcttccctcccccagctcctgctctgacaacagccacaagaaccctggaaggccccctaggctaagtgaagtgtctgtacttgtgactgctttgagaaggttctaagcattcacttttttgtttgattttttgtccccgctaaaactcatttgctagctcattct

SEQ ID NO: 776592 - DNA, 562 bp, Homo sapiens
tcttctttcttagagaaaggatacactgtcatctggctggggtggcttaactatgttcactaaggttctcaagactgctaaactgttatttttgcaaaaacacaataactttaaaaattggctgtaagcatgcctgcttaagcactctaaatgcaaacaattactgcttatataacagtgactcataccctatggtgtcacctaaaacctgactattctccaaagctttctagttatagatggaaattctcatacttaaaaacttgtaacttacaagccatcacaggtgcaaagctattttccagagcaaaagcatatcaactccgtctggcaacaagacatgcagtaacaattatgcaccatccttttrgttcaaatatacttttgcccgaggcattagccattattctagtgtgtatttgctatgtttacacttagttttgagatactttatgaacatttactccagtgtctcaaataaatgcaaaaacaataaagcttgtaaaaaaaaatactagattgaagaagcggacaatcacaaatgaaacaaaagtagaaatat

SEQ ID NO: 776593 - DNA, 636 bp, Homo sapiens
gctaaaacttgacaggaaaaataaatttgtggatccccaagctcactgctcaggtaagatgatggggctgcacccatgataaagttctctaacatctgtgcaagggcagaaaccttcactgcgaaagagacacatgcagtagtcattgatttttttttaagggaaaacagcctcaggagaaccataaaactggaaacgacatgaaagatggccttctaatgtaacccctgggctgaatttttccaaaaagatattatagatggagcaattataaaaawaagtatccataagtgattacaaatagtgaagtggtgctcgagagacagaaaaataaaagctgctcaggcttttaggaactccagttaaatcctactcttgggcaaaagccagctcatggtctggaaatcagccttggatgctcattaacaataccttcccattcccaccacagcctgcgtttcctcgatctctacctcatcaactccatcctacctcatgctttgaaatctttacccctgaaaagattcgaggaagagcagggggccatagtggaggccaacaataatatcaagaaaccccccaaaacctttcttctccacacacactacccctactgaaggatggtacatggggact

SEQ ID NO: 776594 - DNA, 582 bp, Homo sapiens
  misc_feature 452: n = A,T,C or G
ttagagggttgttgggcgataaggaacatgaaagtgttttgccaactgtaaagctctgtgtcatttgtggaacatcattcttcttaagcggttgacacagtcattaactaaaaaccaggcatcatcataaatgttctcaacacatttattaaacacctactgcatacaacgcagggggcaagggaatgagggagcaagccgtgtaggacattgtcactgctctcaatggtcctacagtctactcagtgacaaagaatatacttatgttcagatttttaaaaaactgcctgcctcccaggttcggagagatgcagtagtggataattgcagaggagaaagggacactagctttcataagmaggggaggacttttttatttttatttttattagttattcttttttattgcttttaattttggggactacatagtaagtgtatatatttattgngtacatgagataaatattatgtgcaatgtgaaataagcacatcatggaaaatgaggtatccatcccctcaagcatttatccttaaagttacaaacaatccagtgacactccttattttcaaatgtacaat

SEQ ID NO: 776595 - DNA, 639 bp, Homo sapiens
acattggaacatcatatttgcataagtgtcttgagtccttcttcggtagtcataggatttagattgttgtccttttcaaattgtttttcatcttttatccagaaaattaaaaactttatttcacaaagtaaactgttaaagaaagacaatgggatattttctctttgcttgcttaacaaactattaaaagtaatttcctcaaatatttttgaaagccattttaaaaatccttaaatctcataaataaatgaagatactgcagtgttatttttttttagtgtttagaatatcaccaaacaacrttttgctcttatgaaatagaatccatggtgttgacattgttattttgaatgcctttattcaaatgttatatgttcatttctttcaagataaaaataaatataattttatatggaatacaatgatggcataacaccattcatgctacctctcaatgtacttttcctttcttagattatggaaaagaaaggtacatttagagacaccatattattactagatacagtactaaatttacaagtaataattagtagagtattgcctgaatgagtctttagagtgtgtctcctttctttggaatatctcttatcatatggctaactcgtctcgagaaatcag

SEQ ID NO: 776596 - DNA, 611 bp, Homo sapiens
atttgaccttcttaaagacagtgcagagctgaaacttcaaaaaatgtgtgtgtgcgtatatatatacatgtatatatacacgtatatatatacgtgtatatatatacgtatatatacacatatatatacacatatatatatacacacatatatacatatatacatatatatatacatgtatatatatgtatatattattctcagttgggtgcctcttcaaaaggatagttcattattctacattttaaaatataactttgttttttgttgttgttgtttatttttgtttgcctaggtaggaatttgctttagcatagagaaaaactgtatcttcccaggcaaaaacaagagaagttacaagaaacagaccaatgatatkaatcagtgtggagaggcaattcacataatagagcaatatgaacttgaaacttcgtaaatggtcaggttacttttattttgtttcattcttggaatatttgccatatattctgtatagagacagatttggcttgatttagatttctctctggctcattttttcagaatattttcctatcttgtatccctttctattttaaaaaataataaatcacaaatttgtaagccctaat

SEQ ID NO: 776597 - DNA, 611 bp, Homo sapiens
atttgaccttcttaaagacagtgcagagctgaaacttcaaaaaatgtgtgtgtgcgtatatatatacatgtatatatacacgtatatatatacgtgtatatatatacgtatatatacacatatatatacacatatatatatacacacatatatacatatatacatatatatatacatgtatatatatgtatatattattctcagttgggtgcctcttcaaaaggatagttcattattctacattttaaaatataactttgttttttgttgttgttgtttatttttgtttgcctaggtaggaatttgctttagcatagagaaaaactgtatcttcccaggcaaaaacaagagaagttacaagaaacagaccaatgatatgwatcagtgtggagaggcaattcacataatagagcaatatgaacttgaaacttcgtaaatggtcaggttacttttattttgtttcattcttggaatatttgccatatattctgtatagagacagatttggcttgatttagatttctctctggctcattttttcagaatattttcctatcttgtatccctttctattttaaaaaataataaatcacaaatttgtaagccctaat

SEQ ID NO: 776598 - DNA, 611 bp, Homo sapiens
ttctactcagtattctttccagggaggtctagaatttctaccttgtttacaataaactttattttttaagtttcaaggaactattccagaagaatatgaagactcactctagccttaaattatagagttctcatatcaaatactatccactatccagttttataatcccacctcaaacaccataaagattcattcctaggcatttttgcctatcctcaagatttttttaggaatgatatctttctccctaaagtagaaaagatactacctttcttgttagtttaaaatagtgttttcaaactaaatcatgcattagaataacctggaaggcttgataaaatattgattgattcccttagaawtttttatcactaaatctgggataggcccaaagaatttgcattttcaatgtcatttcatgtgattttcatgaggctgtggtttgaatgtgtgtgtcccccaaaatttatgttgaacttaaccatgattgtggtaatagtaagtggtggagccttttgggaagtgatgagggctttgccttcataaatagattaatgtccttattagagtggctttagaccgagttcaccctctttttcccttttgtccct

SEQ ID NO: 776599 - DNA, 602 bp, Homo sapiens
tgtttatggtcaacaaaagcatgatcttcatcacttttatgtcttctttaacacatacctcttcaactattctgtctttcagatgtaaaaatctttgccttcttacttcatcatcattttctctttaaacttatgtgagggggtagacaatcctgaataccattaggatttaccctaaccctgttttccatggaaaagaatatgtaaacttccattaggaagtatgtgaaagaaactttcctttaaataaaaatgygtaagtgtttagaattgcccttgcaaagctctaaatcaatcacccagggctaatacatcacttgaggagatgggctagtggcattctcatgaacgatcacctgtgattacagagctctggctggcccaagattttgctctcctgtgggatttgacaccattgatcattttagtttcctgcatcagccatgcacagaaagtcttaatgggacagtatgcaaaatgcattctcattacatttgttctctttctgttatcaataacccaaggtcattttaatattcttaatcatttctctctgaagagtatgccttttagagccacatggcttacctttcagaagaaat

SEQ ID NO: 776600 - DNA, 610 bp, Homo sapiens
ccttccagggtgagattgattgatattgcttaagttaatatcaatgtaaatgcatctgtttaaacccatcccttaatgtctttgaattttctttttgcatttgatgtcaaatgaatatattctttaattattgatgaatagtgactgagatggctaaagttaaggkagaaatcaatcatttaatgtttattgggcccactggatagttggatgtatattagacctctcccagcaggcaatgacggtggaccgtacccaagagtccagagccataaagtgaattcctttcagcatttcatagataaaccatgcagcgtactcagaaaaacacgggctaatctttttttccttgatctctctcctgtgtcactatatctccagctctatctttcacttctactcttttcctcttaccttatcaatttttttctcctcactcatatttccttcctctgtcattgtataatgtgttttgaaaagagaggattttaaacgttctcatcacaaagaaatgataaatatgtgaggtcatatggagtgtaatcatttaacaatgtatacatgtaccaaaacatcacattgtaccctataagtatatacaattattatt

SEQ ID NO: 776601 - DNA, 667 bp, Homo sapiens
atcacactagctcaccactgatggatccaaaccaagacaaaatctctgaactgccagaaaaagaattcagaaagtcaattattaagctactcaaggaggcaccagagaaaggtgaataccaacttaaagaaataaaaaaaagatacagaatatgattgggaaaatctccagaaaaatagatagcataaataaaaataatcacaacttctggaagtgaaggacacaattagagaaatgcaaaatacactggaaagtctcagcaaaagaatcaaacacgtagaagaaagaacttcagagctcaaaggcaaggctttctaaataactcartccaacaaagacaaagaaaaaagaattaaaaaatgaacaaagcctctaagatgtttgggaatatgttaaacgaccaaacctaagaataactggtgttcccaaggaagaagagaaatctaaaagtttggaaaacatatttgaagaaaacttccctggcttcgctagagatctagacatccaaatacaagaagctcaaagaacatctgggaaattcatcacaaaaagccaccacataggcccatagtcatcaggttatctaaagtccagatgaaggaaagactgttaagagctatgagggaaaggcatcaggtaacctataaaggaaagcttatcagactaa

SEQ ID NO: 776602 - DNA, 606 bp, Homo sapiens
ctgcagcctgcgcataattacttcctttaaggcttctgctagtccccagcctgcttaacaacccactcctctgggctcccatagcactttgcacaaatctcacttacagaaactactatcttgtattatttgggactagaatttggggcccgtgtgccccacgatctcctagagagtctgttgcctagcactgtacctagcactgggtgaatagctaataattgtttcttgtataaactacacagaagcagaaaatcaaatattcatgtcctcacttataagtgggagctaaataaattgtacacatggacaaaaagatggggaatatagactctgggaactccacacggaggagggtgggaggggagtgagggttgaaaacttacctactgggtacaatgtccaatatttggrggatggatacactagaatcccaacccccaccattactcatgtaatacccatgtaaaaaacaagcccatgtaccgccgaatctaaaatctgaaaccataaaaagagagagattaaaatcaactgaagtgacttagtttttacctaaagaggatcactccaagaaagaagactgttaaaacagatataatgcca

SEQ ID NO: 776603 - DNA, 622 bp, Homo sapiens
tatctgtgggttagtaaattgacgtttttctccttcatttatctgtgtctgctagaactgtttgacattctccacccacacaggttctgatgacattacttttactcattgtctatttacctgtgaaaggatgagctgttcattcatgggcataaagagcaatgactgaggaaatggactagtgtttttccattaatttttataatcatgtcttagttcactatgatgacgtacagttttctctttgttccagagaactatcaaaattgtcactgacatttatttacaaccatgatttgtataggacagttttagaaacttgaataccagtagtttgtcaagcaagatacagcgcctgcttctctagaatcaggggatgtttaagaggttatctagtccagcytcacagcttgtctcttagatatctttctgcttctgtgggaattaatgacttctactgactgtagatttgtctggagttttgcagaacaaaccaaatccttccccacataactatcttggaaaacctggagaactttcgacctttggaaacttgatgctgcctcctaaacttttcttctcaacctatgaaatgagcttctcatggaaattattttccaaa

SEQ ID NO: 776604 - DNA, 622 bp, Homo sapiens
tatctgtgggttagtaaattgacgtttttctccttcatttatctgtgtctgctagaactgtttgacattctccacccacacaggttctgatgacattacttttactcattgtctatttacctgtgaaaggatgagctgttcattcatgggcataaagagcaatgactgaggaaatggactagtgtttttccattaatttttataatcatgtcttagttcactatgatgacgtacagttttctctttgttccagagaactatcaaaattgtcactgacatttatttacaaccatgatttgtataggacagttttagaaacttgaataccagtagtttgtcaagcaagatacagcgcctgcttctctagaatcaggggatgtttaagaggttatctagtccagcctcacagcttrtctcttagatatctttctgcttctgtgggaattaatgacttctactgactgtagatttgtctggagttttgcagaacaaaccaaatccttccccacataactatcttggaaaacctggagaactttcgacctttggaaacttgatgctgcctcctaaacttttcttctcaacctatgaaatgagcttctcatggaaattattttccaaa

SEQ ID NO: 776605 - DNA, 613 bp, Homo sapiens
acatcgatgcggaaatcctcaataaaatactggtgaactgaatccagcagcacattcaaaagcttatccaccacaatcaagttggcttcatttctaggatgcaaggctggttcaacatatgcaaatcaataaacataatccatcccataaacagaaccaatgacaaaaaccacatgattatcttaatagatgcagaaaaggccttcaacaaaattcaaaagcccttcatgctaaaaattctcaataaactagacattgatggaacatatctgaaaataataattgctatttatgacaaayccacagccaatatcatactgaaggggcaaaaactggaagcattccctttgaaaaccggcacaatacaaggatgccctctctcaccactcctattcaacatagtattggaaattctggccagggcaaaaaggcaagggaaataaataaagggtattcaattaggaagagaggaagttaaattgtttctgtttgcagatgacatgattgtatatttagaaaaccccatcatctcagcccaaaatctccttaagctgataagcaacttcaggaaagtctcaggatacaaaatcaatgtgcaaaaatcacaagcatt

SEQ ID NO: 776606 - DNA, 604 bp, Homo sapiens
aatgaatcattgacagtgttgaggcaaaaaagaatgccttgctcataaaaggtttcaaaaatatttattgcctagattagttttgaacatacttgagcccaaattcgtgtcctaatggactttttgttgttaattcatctgactcttatttcggaaggattttatttcctggatgtcattggagcctcaatgtagaagattctaagcctcaggctatgtctcatagagacttttcttttaaaaagccttttcttccatgtatactttcatcttaatccacggatttatayagatttaatggaataggacattttcccacaatttctcccatctggttgtggcaagttaggattgctaggtcataatggattgaatgtgactttttaaaaaattatattttaataccaaagtgccttgttgtcttgagaggatatagtcaatggctcgttcttattgaaaacaattaatgtaaatttgtatatgagttttattgttgattacatagatttggctggtagtgtttctaaagtacaattcaattgattgattaaattcaatccattacttgttttgagattcttttctatttaggattaatttgtat

SEQ ID NO: 776607 - DNA, 604 bp, Homo sapiens
aatgaatcattgacagtgttgaggcaaaaaagaatgccttgctcataaaaggtttcaaaaatatttattgcctagattagttttgaacatacttgagcccaaattcgtgtcctaatggactttttgttgttaattcatctgactcttatttcggaaggattttatttcctggatgtcattggagcctcaatgtagaagattctaagcctcaggctatgtctcatagagacttttcttttaaaaagccttttcttccatgtatactttcatcttaatccacggatttatacagatttaatggaatwggacattttcccacaatttctcccatctggttgtggcaagttaggattgctaggtcataatggattgaatgtgactttttaaaaaattatattttaataccaaagtgccttgttgtcttgagaggatatagtcaatggctcgttcttattgaaaacaattaatgtaaatttgtatatgagttttattgttgattacatagatttggctggtagtgtttctaaagtacaattcaattgattgattaaattcaatccattacttgttttgagattcttttctatttaggattaatttgtat

SEQ ID NO: 776608 - DNA, 611 bp, Homo sapiens
gtatgccaatagtagtatataaaagtttgaattgccctacatccaaactcacacaaaaataaatgcagtctaaaaaaaaaatttataatgtgatgtatatgaaattatattttgggctgggcgcagtggttcgtgcctgtaatcccaacactttgggaggccaaggtgggcggatcaacagaggtgaggagttcaagaccagcctggccaacatggggaaacccygtctctactaaaaatacaaaaattagctgggcgtggtggtgcgtgcctgtaatcccagctacttgagaggctgaggcaggagaatagcttgaatccaggaggtggatgttgcaatgagctgagatcatgccactgcactccagcctgagtgacagagtgagactccctctcaaaaaaaaaaaaaaaaaagaaattgtattttgttgttttatagttttaatttgaattaataataagctttggtaccatttcatatattttaacttttttattatttaaaaactctgcttaggtattttcctattttaatttttatgtctttttctaaatccttaacataaattaattgtatcatgaattttaatagattgttatgtacttgcaaa

SEQ ID NO: 776609 - DNA, 570 bp, Homo sapiens
attgtaagccattttatactatcgacctaaattccagtctaacagttcctttacaaagttgtgtaaagcccccttatatgctagttgtaggaaatatagttattaaaccagactcaaactataacctctgaaaattgcagattgtttacttgcattgattygacttttaattggcagcaccatattctgctgatgagagcaagagaaggcgtgtggatccctgtgtccatggacctaccgtgagaggcctcaccatccgtccatattttgactgaagtattaaaatgtgtttttaaatagatctaaaagattcacttttactttaattacagtgattatgggattaattgcagtcacagctacggctgctgtggcaggagttgcattgcactcttctgttcagtcagtaaactttgttcatgattggcaaaaaaattctacaacattgtggaattcacaattggtattgatcaaaaattggcaaatcaaattaatgatcttagacaaactgtcatttggatgggagacaggctcatgagcttagaacatcgtttccagttacaatgtgac

SEQ ID NO: 776610 - DNA, 570 bp, Homo sapiens
attgtaagccattttatactatcgacctaaattccagtctaacagttcctttacaaagttgtgtaaagcccccttatatgctagttgtaggaaatatagttattaaaccagactcaaactataacctctgaaaattgcagattgtttacttgcattgattcgacttttaattggcagcaccatattctgctgatgagagcaagagaaggcgtgtggatccctgtgtccatggacctaccgtgagaggcctcaccatccgtccatattttgactgaagtattaaaatgtgtttttaaatasatctaaaagattcacttttactttaattacagtgattatgggattaattgcagtcacagctacggctgctgtggcaggagttgcattgcactcttctgttcagtcagtaaactttgttcatgattggcaaaaaaattctacaacattgtggaattcacaattggtattgatcaaaaattggcaaatcaaattaatgatcttagacaaactgtcatttggatgggagacaggctcatgagcttagaacatcgtttccagttacaatgtgac

SEQ ID NO: 776611 - DNA, 570 bp, Homo sapiens
attgtaagccattttatactatcgacctaaattccagtctaacagttcctttacaaagttgtgtaaagcccccttatatgctagttgtaggaaatatagttattaaaccagactcaaactataacctctgaaaattgcagattgtttacttgcattgattcgacttttaattggcagcaccatattctgctgatgagagcaagagaaggcgtgtggatccctgtgtccatggacctaccgtgagaggcctcaccatccgtccatattttgactgaagtattaaaatgtgtttttaaatagatctaaaakattcacttttactttaattacagtgattatgggattaattgcagtcacagctacggctgctgtggcaggagttgcattgcactcttctgttcagtcagtaaactttgttcatgattggcaaaaaaattctacaacattgtggaattcacaattggtattgatcaaaaattggcaaatcaaattaatgatcttagacaaactgtcatttggatgggagacaggctcatgagcttagaacatcgtttccagttacaatgtgac

SEQ ID NO: 776612 - DNA, 525 bp, Homo sapiens
ttgtgccctagctattccacatagttggaaccacaatccccacatcccatctacttaccagtcatcctaactggggttgtgggaacagcttaggccctgaggcatagagaccacccaaattaaaatacagcctttgttacctatatctgtaacttggagaaatttgctttacatcccaaattcttggaatcaggtaaataatgacaatctccctttaaacttttgtcttggtaagttatttctagcctgggcaaygtagactgagcccatctctacaaaaaataaaaataaaaaaataaaaaaataaaaaaaaaattagttgggcatgatggtgcgcacctgtagtcccagcctacttgggaggttgaggcaggaggaatccttgagccacagaggtcaaggctccagtgagctgtcactgtggcactgcactccagcctgggtgacagagtgagaccttgtctctaattagaaaaaaacaaaaagtatttctgatggctcaaaatcacatctaccaaatttacc

SEQ ID NO: 776613 - DNA, 575 bp, Homo sapiens
atatcactactataattaaaattctaatataacttttcataattaaaaggtaaccatacaaataaactgaataaaaaataatgccattaaaatttaagcggatactattacctgctaaaagctctgagcctaaggcctgtttctgttttttttaaaagggtggttaatatgtgctacgttaaagatgcactcacatcaaattgagacttctcttaatctattcagaaggactgaaagagaaggcaaaagaaaatctctcatcttgtgtgattccattttagttaacaccacattggttttattaaaccccactcaagatcatcttagatttagaatcatcttgtgagtcctagtttatgggaaacaagataagccagcakttctcaaaatgtgggttttggacagtctgcaagagataacctagcaccagattaacatgcaaatcccctggcttctgagacttctgagataggtcttaggaaatctgtatttttaacacatttctcaggtattacttatacacacaaatatttgaaaaccatgagtccagatttgtcgttttcaaacattagcca

SEQ ID NO: 776614 - DNA, 595 bp, Homo sapiens
tagtttaaaagctctaaatattaaaaaatcagtaaattctcctttagcactgccccaccctctgccattcttctctttctcagcacaatggcattactgttctaaccactcaatattcaatatcttatgtacttttaaggaaatcttaggcacaagaaaaaagtttatttgtgaggtgagttaactcttgtttaaaaaaaaaatgggttggctcatatataaaccttacaaaaggttaatgcataaaacacaaatatagttcaatttcctttttatgtgattagagaaacttacctacagagttgcctatgacacctacaaaagaggtgatgataaraatgatgcagttcacactgttcaatggttccttaaattaatgaacaccagatatgttagtgtgatttcttcttcctctttcaagttctttatttaccactccatgccctccaggttagctgagtttagtgctctgggataatgactagttgaattcgctgcaattttttaaatatgcctagcataggggccaaaggaaaacttctcttccactctctgaaggttcactgaaaatcaactggcaaaaggcagatcagta

SEQ ID NO: 776615 - DNA, 644 bp, Homo sapiens
tacacaacagaaattattgaatcatgagatatacattccggtgtgtgacagattggcacatgacataatctgggttctttatagactcagttgttttggggcgatctagattatcaagagaagagccttcatgcttagctttatcttgtaccaaccaccagggcccttgcttctgagcaggaagcagctgggkaataggctctttctcttaatgacttccaacatagttctctcaaaccttactcctccagaaggccaccctcacctggctatggctacttcagaaaaaacttggcctctggtataatagagcagaatcatcacctcacattctatttcaagccaaagtcaatatctcaaaggctggttctgtgatttatttggcccttgggagctcctactgaaagtgctgaaatgtcgtactgacacttcagacttatagctacctagactccaagtaagatttatctctgactggagggtttctcctattaaaaaccaaagagtgtagggtgccttcacctgctaggtaatcttctatgccctaatgggaagaatgggagcagcagacaagtaagttcaggaaggagaaccaaagctgtgtccatgcccttgaggaaagagaaattggaccagacaagttc

SEQ ID NO: 776616 - DNA, 647 bp, Homo sapiens
tgtcaaggatcctattgttttcctaactcacttgactataacagtttcataacagtttcttgggtttgttctcagaattttctcccagagtttctgatttaagaattaggtccatgaatctgtatttttaacagactcacctgagagattctaatcatgaggcaaatatgagaaacattctaaaagggtatgttcaattgaacaaatttccatcattttactccccaacamtagggaaactgtaaagagtaaaagatttcaaacagggaaatttatggcccaacaggtaaacttaaaatagggagttaccacctgcttgctttgtctgatggtcatgcctgaatcacaaacctttgaaccaactcatcttccagtataattcacttccaaactatcaagtaaccttctcaaaaaatctctgttcattcattcatccattcattcatttgacatttattgaacatctgctatgtgccaggcactgttcttggcacaaagaatagagtggtgaacacatatccaggccctacccttagggggctgaattttagtcttttttcaaatcatagtcctcatgtattaccaatcaaaatatcatatgttcttttggataataccctgcaaagcataatgtgaaatcacaaagg

SEQ ID NO: 776617 - DNA, 731 bp, Homo sapiens
ggtgttgtgataactggctagccatatgcagaagatggaaactggatccctcccttacaccatatacaataatcaattcgaagtggattaaagacttaaatgtaaaacctaaaactataaaaccctggaagataacctaggatataccattcaggacataggccctgacaaagatttcatgacaaagacaccaaaagcaattgcaacaaaaacaaaaagtgataagtgggatgtaaktaaactaagagctcctgcacagcaaaataaaccatcagcagagtaaacagacaacgtatagaatgggagaaaatatttgcaaactgcatctgacaaaggtctaatatccagtatctataaggaacttaaattaactagcaaaaaacaaaaaaccccattaaaaagtgggcaaaggatatgaacaaacacttttcaaaagaaaacatacaggtggacaaaaagcatatgaaaaaatgccttaatatcaatgatctttagagaaaggcaatcaaaaccacaatgagataccatctcataccagtcaaaatggccattattaaaaagtcaaaaaataacagatgctggcaaggttgcagagaaaagggaatacttatacactgctggtgagaatgtaaattagttcagccattgtagaaagcagtgtagcaatttctcaaagaacaaataacagaagtattatttgatgcagcaatcctattattgggtatataccc

SEQ ID NO: 776618 - DNA, 766 bp, Homo sapiens
aatggtgttgtgataactggctagccatatgcagaagatggaaactggatccctcccttacaccatatacaataatcaattcgaagtggattaaagacttaaatgtaaaacctaaaactataaaaccctggaagataacctaggatataccattcaggacataggccctgacaaagatttcatgacaaagacaccaaaagcaattgcaacaaaaacaaaaagtgataagtgggatgtaattaaactaagagctcctgcacagcaaaataaaccatcagcagagtaaacagacaacgtatagaatgggagaaaatatttgcaaactgcatctgacaaaggtctaatatccagtatctataaggaacttaaattaactagcaaaaaacaaaaaaccccattaaaaagtgggcaaaggatatgaacaaacacttttcaaaagaaaacatacakgtggacaaaaagcatatgaaaaaatgccttaatatcaatgatctttagagaaaggcaatcaaaaccacaatgagataccatctcataccagtcaaaatggccattattaaaaagtcaaaaaataacagatgctggcaaggttgcagagaaaagggaatacttatacactgctggtgagaatgtaaattagttcagccattgtagaaagcagtgtagcaatttctcaaagaacaaataacagaagtattatttgatgcagcaatcctattattgggtatatacccaaatgaatagaaattattctaccataaagaca

SEQ ID NO: 776619 - DNA, 596 bp, Homo sapiens
ttcaatcttggtgccagaattgttgggagagctattaaaatgtcatttaaatgtttttaaatcaacagaaagctttaagaaaaagtcatataaagatgacagggaaaccgctgcttcttggatcattactagggtccatgtaaagactcaatgaaagagagtttcacatgactgggaaggctggtgagtccccagctaagcttaggtattggaggcwaaagcctctaaagaatttacaaaagatattgtacataaccagctctattcagcctgagtcacaacttttcagaggatgggctgaaatttttaactagtaaccagcatgaatgtgttctaccatgatctacagacatgagtgattctacactaaataaaatagtggaggaaattgagcttattaaagccaatgcttccttcaaaattatgagtcctgagcttcctccaaaaatggaatgaaataagcactttatttgtatttaggcaatattctcgccttttcaaataacaacatgagttctttaatctgactagcagctcccgatagagatcaaaagtaggtaacagacttggatctatcatactttagacactacagc

SEQ ID NO: 776620 - DNA, 593 bp, Homo sapiens
caatgaaggacgtactgttattatctccattttccttgtaataccttagaaatgttcatgacatttgaaaggccattgttatgagttagttgaacatatatatttgcattgcagaggatgttgcaaaacatacccacctgagccgcttgtctatccaaactgaaactcaagttgatgagcttaaggggatctttcctcttcagtctgtctttctctctttttcccaaggctttgatctttaacccccgtgtctacycccccaaggttctactgcttcttcctcttagctctgtctttggccctctgtcattttttcccccttctttggatttgggatgaaaggagaagggaagttgaaggtcctatatatagaaagagtgaaaggaagtaccatagccctaattctttagattcatgacaatctctaagacaaaaaaaacagttttagttttaaggtgcctattttgcagcaaaatcatacgagtttattgtaataatttctaagctatttaacccatcatactgtaagtccaacccgttttaaggattgaggacttgggggagaacctgtttctcacagtcacttgaggatc

SEQ ID NO: 776621 - DNA, 602 bp, Homo sapiens
gttctgtgggtggattaaatgtgacaatacatgtgaaaatttccagaatagagccagataccaggtacgggctcggagccctactgtggtttccttcctcctttggggttggtgactatcatatctacacgtttctagctctatggtccagagcaggtagctttgtgcacagtcatgcctcagcaaatgtttgctgaatgagtgaatgaataattgggtgaaaggaaagaagtaaaaaaggaaggaaaggatggaaggagggaaggagggaaaasacgttaaatgaaagagttgtcccatttatgtcttctttggaatacaaaagttatgaggagtttcaacttaaagaccaagtatatccaaatagaactgggatagttccttttcttgctcacctatgagattttcagcagcaccaaacatctcatctagaaaggaaagccatttgaagtttccaatgtctgaaagtcaatagctgataagctagcaatgctttctctattaaagaatgagttatcctgacacttgttaaaatagtgagaaaactttatttaagacaatcacaataggggctaactttattccaatggaaaacagagatc

SEQ ID NO: 776622 - DNA, 580 bp, Homo sapiens
cttttctccccacaacacccagagtgatcctgtgaaaaggggctcacatcatatccctcctttgtccaatatcttctgcatgctttactccatcaagccctctgttcaaatgacatcttaccagagagcccttctctgatcaccttattaaaaattactaatccctattgacccactgcactcctttgtacttacccaactttatttttcttcacagacatatattaaattccatatatcaatattttatggtgttccacaaattgtstgattttatatatatatgtatgtatataatattgactccccatagatgctaatgctttgaacactttgcctttttatattcactgctttgtccctagcacctagaacagtgtctgactcaaagttggtcaataaatacttgttgaatgaatgaatgaaatgaatgaataaatgaccccaatacaagaagtgccaaaatagaagatgaacacagaacacagcatgattatctgactgtagagaaggtcataagggcagcctcctgggagaaagggatctgacattgagttggttggcataagtttgagaacca

SEQ ID NO: 776623 - DNA, 603 bp, Homo sapiens
tcatgctttagggctttctatatttatatttctgtgtaactactattcctatctttgctattaattaaaattttttctcaatttccaaaagcttttaacataatagggatattaactcattgttaggtatgttgagaatacatttccctatctgtcatgtattttgaaaaattctgcttatttttttgtacacatttttattttaatatttttcagtattttattgcttttggatttttattaatagtaaagagtttctgactgtcaggttatactgaaatttgccaatgtttccttctcatactcaaatgttttcatttttcaattttttratgtttaatttttttttagagacagcgtctagcttggttaccacgctggagtgcagtggcctgaaatagctcactgcatcctcaaactcctgggctcaagtgacccacccgccttggccttccaagtagctgggactacaggtacatggcaccatgcctggataatttttaaaattttttgtagaaagaggctcttgctatggtgaccggtctgttcttgaactcctggcctcaaactatcctctcccatcggtctcccaaagtactggaa

SEQ ID NO: 776624 - DNA, 608 bp, Homo sapiens
attaacttttgagaataccttgaaaaattgaggggaaaaatctaatggcaccgataaaatggaggataataatatctccgtcattcatagacttgctatgaagactatatgaaataatatatattttatgtatatatatgtaatagtcctggatccacgtctggcatccaggaggttcccagaaatatcagttctcacctcttttctgatgaattcatactgcacaaaagcctgttacattatctgaaaaagtcatcactgtcatccatgacacctctagatggagataaacccctcaagaaagcatagaaagggttaataaccctctctagataatgcagatagaaaaacaccgtcatttttgctaaagcaccccaaatcctaccttgacattgcaatcaacaagccttatccaycttccgaatttcaggacttgcgttgggcttgttgctgtagatgatagacgctattaggaaagaaatcatgttgatgaaacaaatattttcttccctccccaggaggatcaggagaatttatttaaggaatgaaaaatataattaaatattctataacctacctccccaaaatatggacaaaattatttattt

SEQ ID NO: 776625 - DNA, 624 bp, Homo sapiens
tctgataacaaccacttcccatcaggggattttcatcagattatgagctgtttatccctgttacaataaatattgctgtgactttagtatccaattattaagtagccaaatctatgaagagaataataatatgccaccccaaaatatgtcactttgacataaggattattttgagctgaaagcaattaagaagcaacaaacacagagccccttgacctctctcatctgcctaaaagcagatgataaatttccctttgtgaagatgttcttccttccttctccaatgcaagtaggggaatgacctttatcatgggaggcagaaatccagcactgagatgagtccacatgaataaaccttattaaaataattcttattttccattagtttcccccatatatttaccttcccacaatttcccacccctagacgttcaaatctcttttcctttattttgtcacttctctacaatttatcaccscttgttaaaatgatatataagctcgtgggtctaaccacttctttgggtcttcatttcttttccatgaaagcctctatgtgtgtaaaaattaaaatattaacattaaataaaatttgtatgccttttcttctgttaatctgtcttt

SEQ ID NO: 776626 - DNA, 572 bp, Homo sapiens
ccaacaacccagagttgttgggaaaatgaagtaaggcccagtgtgtccaagtgcctggcagagaagagcccacaggcagggagtgcctaccttgtgttccagggcgacctcctcaatggggcgcacccggtggccttggtgctcctgactcagactgcagatgaggcagatgggctcatcgtgatcctcacagaagagcagctggacctgcttcaggtggcgcttacactgtggcaggggctgggggcttaggcttcccgggctcttcctttcatgggagtcctggcaccgggggcagccaggtgagcggctgcctgaggcctgggggtgcccagaaactgcctcggggaagctgcaggaatcacgcacacaggtaccgtcaactgggtctccttcctgggcgtggcarcggggactcgcagccgtgtctggtggccttcctggggacatgcagtggaaaaaccccctgaatggcaaacccaagttgcttacacagaggtatcacaaagcacagcggacacagcccttgcctgagatgtgcgagttctcagttagactctgcccacttccta

SEQ ID NO: 776627 - DNA, 606 bp, Homo sapiens
ttttaccccttagcattatactagaagttttatgtagggtaattaggcaagaaaaagaaattaaagcaaccaaattagaaagaagtaaaactatctctattcataaatagcatgatcatatatacagaaaatcccaaagaacccacataaaaactactaaarctaataaattaattcagcaaagttgcaggatataagagcaacatagaaaaattagttgtgtttcaatatatcatcaataaacaaattaaaaaggaaattataaaaataatttaatttacaataacatccaaaataataaaatacctaggaataaattcaaccaagtagatgaaagacttgtacactgaaaattacaaaacactgctgaaagaaaaacataaataaaaggaaagacatcttgtaattatagttggaaagccttaatattggtaatatgacaatactccccaaagtgatctacaagttcaatgcatccctaaaaaaattttcagtggtcttttttttttgcaggaaggaaaagctgatcttcagattcataagggactgcaagggaccctgattagccaaaagaatcttgaaaaaaaacaaagtgggaggagtcac

SEQ ID NO: 776628 - DNA, 606 bp, Homo sapiens
ttttaccccttagcattatactagaagttttatgtagggtaattaggcaagaaaaagaaattaaagcaaccaaattagaaagaagtaaaactatctctattcataaatagcatgatcatatatacagaaaatcccaaagaacccacataaaaactactaaaactaataaattaattcagcaaagttgcaggatataagagcaacatagaaaaattagttgtgtttcaatatatcatcaataaacaaattaaaaaggaaattataaaaataatttaatttacaataacatccaaaataataaaatacctaggaataaattcaaccaagtagatgaaagacttgtacactgaaaattacaaaacactgctgaaagaaaaacataaataaaaggaaagacatcttgtawttatagttggaaagccttaatattggtaatatgacaatactccccaaagtgatctacaagttcaatgcatccctaaaaaaattttcagtggtcttttttttttgcaggaaggaaaagctgatcttcagattcataagggactgcaagggaccctgattagccaaaagaatcttgaaaaaaaacaaagtgggaggagtcac

SEQ ID NO: 776629 - DNA, 637 bp, Homo sapiens
taacttcttattttttttaatgtcataaaatgttgacttactgattccaaattcatccattacacttttaagtgatcgtccagcttcaattctacttagaaccttcattttctcctccaaattcagtgttgtatatttccctctcttattcatactgaatttaactctgaaccaccaacaggagaaaacaaagggaaaagccttaatgaattggcaaaaaaaaamcccacattttttaaacaaaacttagctgaaagccccagaaggcatgggcattgtattggaggataatggactgaaggggctaaccatgactgaagagctagtctagaggtggaggtcttatgcactcagaaagctgccagttgcaaagtcctgtctggctcttgctcctgcaagccatgagtgatcatttttcagaatgccccctacctctcctctcttttgacagatacaacagcctcagtcaggaatgacaggaatacctgcatactttccctaactcaataccggaaaacggacaatatgaagagaggagggatggagcaagatgtgcccacaagacaggtgtgataagtttccataaaaactgatgcttcagaagaagggagcgtgaaagactcaaaggcaatgacag

SEQ ID NO: 776630 - DNA, 574 bp, Homo sapiens
gtattatcttatgccaggaagaatggctattatttaaaagttttttaaaattcttttttttataaaaaacttataacctgtaagtttgtaacttgtaaaacttgtaagttatttttgtaaaacttttttttttttttttaaaaaaaacagtaacatgttgggaggttacagaaaaaattgaatgattatacactgttggtgggaatgtaaattagttgagaccctgtaraaagtggcttggagatttgtcaaggaactgaaaataaaactaccattgagccagcaatccgttactgggtatatacccaaaggaaaatgcattgcttatgaaagacaccttcacccataagagtaagttcaaaaaaaaaatgcaacaaaacaaaaacaaaaattgacaactgggacctattataattaagttaaagagcttcttcacacaaaaagaagctatcggcagagtaaacatacaaccacagaatgggagaaatatttgcagcactactcacagtagcaaagatatgcaatcaacctaggtgcccatcaatgggtggatttgataaagaagatgtgtcat

SEQ ID NO: 776631 - DNA, 546 bp, Homo sapiens
aagggggccattttagaggcccaccctcaggggcgcattctctttctcagggatgttctttgctgagaaaaagaattcagtgatatttctcccatttgcttttgaaagaagagaaatatggctctgttccgcccggctcaccggcggtcagagtttaaggttatctctcttattccctgaacattgctgttatcctgttcttttctcaaggtgcccagattacatattgtttaaacacacatgctctacaatttgtgcagttaatgaaattatcacagggtcctgaggtgacatgcatcctcctcagctgacaggatgaagagattaaaataaakacaggcataggaaatcacaagggtattgattggggaagtgataagtgtccatgaaatctttacaatttatgtttagagattgcagtaaagacaggcataagaaattacaaagtattaatttggggaactaataaatgtccatgaaatcttcacaatccatgttcttctgccatggcttcagccggtccctccatttggggtccctgacttc

SEQ ID NO: 776632 - DNA, 595 bp, Homo sapiens
  misc_feature 178: n = A,T,C or G
caaagcgagtgatcaaagcaggcctccatacggctctcttgttcatatgtccattggcttatttattctttcatatctggataacagtttactaagtactctgcatactggattaattaagacacagtctctaacctcacctaggtactttttcagatcaaataactcccaaaaactntaaagctgaggttataacaatattgtgttaaataaaaacttatttaataaatattatagcttaaaaagtctcatatcacttttagggcatttctttggtagcaactgataagccctttgtattgtattgaggttttatttttattaaaaatactaatttctatgttcttatattctagctattcaattattgccagtatcatgatgaataatattatttatgatcatctgaagattcaaaacattgtatattccctccctttgtaacytcatatcccatgacaggccacagatcatctgcaggggtgaccaatcttttggcttccctggaccacattggaagaagaataattgtcttaggccacacataaaatacactaacattaacaatagctgatgagctaaaaaaaaaaattgc

SEQ ID NO: 776633 - DNA, 624 bp, Homo sapiens
tagttcttcattcaaatggaccccactaacaaaagacagattaataagagaaaaacaaacaagtttaataacatgtatatctcatgtttacataagaaatacctagagaaatgagagagctttgaattcaggcttaaataccactgtccatggaaataaagaatgaagggcccagggaagctcagaaatgagaggtcaccaggaaaarcactgaaattggtgccttccctattgacaagtctccagtgatttgcagccatccttcccttcctggtcctgagagagagactcccttacaaatgaagatttcctttatagttatacatttctcttacaaaaggataacttctacccttgttttcagagcttctctggtttctgcagtttctccaaactatcagctcaaaataatccttatatcaaagaagcatattttggggtggcatattctcacctcctataggtctaataaccaaaataataggacattacatgacttgtattatattttatatttttccctcctcttccaggcatttgcttcactgccaccagcattatattttctaaactaccgttctgttagtgtgattttcctactcgaagtcatttgtctgtagctat

SEQ ID NO: 776634 - DNA, 589 bp, Homo sapiens
attgttagtagaaatgtaaattagtacaaactttatgaaaaatagtacggacatgtctcaaatagctaaaaatagaactgccattcaaactggcaatcttactactggttatttacccaaaggaaaataaaacattatataaaaagacatctgcatttgcatgtttattacagcactattcacaacagcaaagtcatagaatcaacctaagtgtccgtcaatggatgattggaactatacacacacacaaacacacacacacagacasacactcagtcataacgaagaatgaaatcatgtcttttccagcaacatagatggaactggaggccattatcctaagtgaaataactcagaagcaaattcaagtacagcatgtactcacttataagtgggagctaaacaatgggtacacatggacatacagagtggaataacagacactggagactccaaaaggtgggagggtggcaaagcaggtgagggttggaaaattacctgttgggtatactgtgcactgtttgggtactggctacactaaaagccaagactataatatgcaatatatccatgtaacagagctgtgctc

SEQ ID NO: 776635 - DNA, 652 bp, Homo sapiens
aactaatttacactaccaccaacagtgtaaaaacgttcctatttctccacatcctctccagcatctgttgtttcctgactttttaatcatcgccattctaactggtgtgagacggtatctcactgtggttttgatttgcatttctctaatgaccagtcacaatgagctttcttttcgtatgtttgtyggctgcataaatgtcttcttttgaaaagtgcctgttcataccctttgcccactttttgatggggttgtttgtgtttgttttcttgtaaatttgtttaagttccttgtagattctggatattagccctttgtcagatggatagattgcaaaaattttctcccattctgcaggttgcctgttcattctgatgatagtttcttttgctgtgcagaagctctttagtttaattagatcccatttgtcaactttggcttttgttaccattgcttttggtattttagtcatgaagtttttgcccatgcctatgtcctgaatggtattgcctaggttttcttctagggtttttatggttttaggtctaacatttaagtctttaatccatcttgagttaacttttgtataaggtgaaggaagggatccagtttcagctttctgcatatggctagccagttttcccaacaacat

SEQ ID NO: 776636 - DNA, 581 bp, Homo sapiens
agtgtaaaaacgttcctatttctccacatcctctccagcatctgttgtttcctgactttttaatcatcgccattctaactggtgtgagacggtatctcactgtggttttgatttgcatttctctaatgaccagtcacaatgagctttcttttcgtatgtttgttggctgcataaatgtcttcttttgaaaagtgcctgttcataccctttgcccactttttgatggggttgtttgtgtttgttttcttgtaaatttgtttaagttccttgtagattctggatattagccctttgtcagatggatagattgcaaaaattttctcccattctgcaggttgcctgttcattctgatgatagtttcttttgctgtgcagaagctctttagtttaattagaycccatttgtcaactttggcttttgttaccattgcttttggtattttagtcatgaagtttttgcccatgcctatgtcctgaatggtattgcctaggttttcttctagggtttttatggttttaggtctaacatttaagtctttaatccatcttgagttaacttttgtataaggtgaaggaaggga

SEQ ID NO: 776637 - DNA, 616 bp, Homo sapiens
ccctctttccagcattctcactgaaatgtgggaacaaattggccaggtgggatctgaaagagacagagtcatggatgggcagaatgtagttgagtctcttggtgatctaaatcagggagaagagctatgaattcctgctactcaggtctctagagccactttatgtctagaagtgacttctacttccaaattccagcttttgtgcttggactttggagaggtttctaaaaggtcttgaaaaatattctggcagagactatccaccacgaaagtgaggacagaaaagtgaaaggaaatactttgatgtctaccattttcactttttacagarctgcagtactccgtaaaggaatcttagattttatctgactcagtgtatctaaagtgtagatccattcgtatggctttccaagaaccagtctataaatcataagatggattcccataacctacttccctagattcagcacctcctgagtggttcctaggactctctttttagagagcctccaggcaattctaatgtcttggactagccaggtttgggtcctgatattgctaactctctcattttgtagattagaaaattgaggcacaatgtcttcacatgtcaaac

SEQ ID NO: 776638 - DNA, 616 bp, Homo sapiens
ccctctttccagcattctcactgaaatgtgggaacaaattggccaggtgggatctgaaagagacagagtcatggatgggcagaatgtagttgagtctcttggtgatctaaatcagggagaagagctatgaattcctgctactcaggtctctagagccactttatgtctagaagtgacttctacttccaaattccagcttttgtgcttggactttggagaggtttctaaaaggtcttgaaaaatattctggcagagactatccaccacgaaagtgaggacagaaaagtgaaaggaaatactttgatgtctaccattttcactttttacagaactgcagtactcygtaaaggaatcttagattttatctgactcagtgtatctaaagtgtagatccattcgtatggctttccaagaaccagtctataaatcataagatggattcccataacctacttccctagattcagcacctcctgagtggttcctaggactctctttttagagagcctccaggcaattctaatgtcttggactagccaggtttgggtcctgatattgctaactctctcattttgtagattagaaaattgaggcacaatgtcttcacatgtcaaac

SEQ ID NO: 776639 - DNA, 605 bp, Homo sapiens
ttcgtatgtcttttgagaaatgtctaaccaagtacttaactattttttaattagattattgaattttttcctttagagttgtttgagctccttatatattctggttattaatcccttgtcagttgggtagtttgcaaatattttctgccattctgtgagttgtctcttcactttgttgattgcttcctttgctgtgcagaagcttttaaacttgatgtcatccaatttgtctcttttgtgctttgrttgtctgtgcttgtgggatattactcaagaaattttgcccaggccaacgtcctggagaatttcccaaaagctttcttgtaatggtttcacagtttgaggtctgagagttaagtctttaatccattttgatttaattttgtatatgacaagagataggggtctagtttcattctcctgtatatgaatatccagttttcccagcaccatttattgaagagactgtgttttccccactgtatgtttttggcacatttgtcaaaaatgagttcactgtagatgtgtagatttttttctgagttgtctactctctttcatgctgctttggttaccgtagctctgaggtataatttgaagtcagg

SEQ ID NO: 776640 - DNA, 612 bp, Homo sapiens
gaaaggaaaaaatcaagattacccctatttgcagatgacatgtcttatatagaaaatcctaaggaagccataaaaaacaacaacaacaacaacaaaaaaactattagaggccaggcaccacggctcatacctataatcccagcactctgggaggccaaggcaggcagattgcctgaggtcaggagttcgagaccagtctggccaacatggtgaaaccccgtctctactaaaaatacaaaaaaatgagccaggcatggtggtgtccmccttaatcccagctgctagggaggctgaggcaggggaatcacttgaaccagggaggtggaggttgcaatgagccgagatggtgccattgcactccagcctgggcaacagagcaagactctgtctcaaaaaaaaaaaaaaaaaaaaaaaaaaggagttaagaaacctccctgggcggggcatggtggctcatgcctataatccagcactttgggaggccaaggccagcaaatcacctgaggtcgggagttcgagaccagcctgaccaacatggagaaaccctggtgctactaaaaatacaaagttagctgggcaaggtgatgcatgcctgtaatcccagctattcca

SEQ ID NO: 776641 - DNA, 480 bp, Homo sapiens
caaaaattacaaactattagcctagtgtgatggtgcgcacctgtagtcccaactccttgggaggctgaggtgggatgactgcttgagcccaggagttcaaggctgcagtgagctatgattgcaccattgaacttcaggttgggtgacagaatgagaccctgtctcaaaaaaaaaaaaagggcaagttattttttccctcagtactgatgaaatataaaatggagaatgttaggagagaagagaatgcaagaagtggatgtgattgcctagcctatgcagttggaatgccagttttcctttccagtrtgtcttggacttagtggagaatagattctctaaagggacactggggaatctgccctgtggagggttgtgctaggagccgtcaggctctcttggcagctggtgcagctgtgcttgaagagctccttgttatgcccacgtggacccaagtggcatcacccactctgttttcacacc

SEQ ID NO: 776642 - DNA, 662 bp, Homo sapiens
  misc_feature 655, 656, 657, 658, 659, 660, 661, 662: n = A,T,C or G
ataaaaagatgggtaggaatatatgcaacacagagtaaggtatgtttgccccactagtatcttgctccctataacactggacataaaggtgcaagaattttctagaatctgagacacagatccaagaaattagttctactagtccctcaggatactcatgacacagtgtaataacccctcataaagcatgtaaattcttgtttctaatccagaaacttaagtggacaccttgggaccttctgacaaataccaaatatgagttttccagtaacaatccatacattaaatattagtacactatatttctcttatttctacattaaaaattataaactacatctttatggtggagacacaacattttggaagccactgctctccaaacctttttgattgaccaccacayaattaaaaatactttagctgcattcctcctgtatttgtgggttgattggcttatgttattcaaatatatacatccataccactgttacatatgctataaaatatgcataaagtatacataaagtgaaaattagataagtattaaatgaacaatatttatgaatacttttactgtattattgatacaacattaatcaggctatatatcaatataaaactagtacaaaattaatgacaaaagttagtcctnnnnnnnn

SEQ ID NO: 776643 - DNA, 451 bp, Homo sapiens
tagctcagactgcataactggataaatcctaatattcctaaatgttgtcccttgtcatttaggggtcctctcggaagttttagatttccctaccagtgtaataggttctttccttttgtttcttctctgcccttaacgagtggttctcaagcgtgtatttccatcagtgtcaattaactgtggaacttaaagttgatatccctgggtctccagctgcaattctgattcagcagatctagggtggwgtttagactttgtaaaatttttaaaagctccgcaggtgattcttaaacataatcagagttgagaatttctaccctagatagatttaaattgtcaggcttaagaaggaaaccgaggatttggggagttgctagagactgtttgatcccttacagtttagggacttagtataatgggcactctgtcttccacctggctcccaatcttt

SEQ ID NO: 776644 - DNA, 474 bp, Homo sapiens
agaaccttcgagtatgttaacttacagggcaaatggggcttggctgatgtgattaaagtaaggatcttgagtttgggtcattaacgtggatgactgggtaaacccaatgtcctcataaggacacaaaggtccttataaaagggaggtggcagagtcagagtcagaaaggaagtgatactagaagaagagatgagagagagagaaaaagatttgaagatgctgcactgctggccttgaagayggaggaaggggtcatgagccaaggatagcaggcagcttgtagaagctggaaaaggaaaagaaatgtattatcccctaaagattccaaggtgttgcgtctctatgaacactttgattttaggatttttgatccccagaactgtaagataataaatttttgttgttttaagccactaagagggtgtatgtgcgtgtcatcgttttttttttaatttttaactttttgtgttgaaa

SEQ ID NO: 776645 - DNA, 600 bp, Homo sapiens
ttccacagtgtatcgtgcccctggtttattgagactagagaatggcgatgacttttaccaagtatactgcttggaaacatcttgttaacaaggcacgtcctgcacagccctagatcccttaaaccttgatttcatatgacacatatttttgtgagcttcaggttgggtcaaagtggctggggcaaagctacacattaacaacatctcagcaaagcaattgttgaaagtaaaggtctttttcaaaatggagcctcttatgtctttcctttctacatagacacagtaagagtctgatctcactttcttttgcctacactcactgaactgtccttcccctctgctgggccatgaccacggagaacaggtccactgtcctccctgcwtggtgcacgatggaggatcagactccgtcctcaaggctggcaagaagacagggtgagacatgagcctcctgatacaggtgacgggtgtggagcccacaggactggaacctcacactgcagggctggaagcacagactgagtatttactgttctgtggcctggggggttcaagacacagagctcctcattagccaaagtcacccaagttccccagcct

SEQ ID NO: 776646 - DNA, 659 bp, Homo sapiens
agataactgctgctacttccctggatcctctcatgacagccaagtgaagcaaataggaagccaattcaccacccagatccaggcccatctgaatctagccaagcccagaagagccctgtagaaccacagctgacctatggaaatgagaagtaaatgtttgttgctggcattgagattttgagattacttgttatgtagcatcatcacaacaaagcctgactaatacattgtataaagttaattgagtactaacaacacaccaggtattgttctaagtcctttatataaagaatctcatctaatccttacagcactgcataaggaggcatgataartatctccattcaacagattagaattgaggcatcttgtcaatctcattcatgttattcctcctcacttcctgcatccaaatgaaccaagcctcctatgttcattagaaccacagaccaagactgctggagaaagatagggctgtggagatgggaatgaattggcaaacagctttgggatgacaatgttaaggtcaggcaaatgcgctcagtaacctcaaatgagtgtcgatgttcatgagggctgctcaaaaaagacacagaaattgacgttcttttatctgaggacccttcctcagcctcaggacttaagtctatgggagcgtg

SEQ ID NO: 776647 - DNA, 606 bp, Homo sapiens
aaggacagcagcctcacagcatcagtctgaggatagaatgggttaatgcagccgggcacagtggctcatgcctgtaatcccagcactttggaaggctgaagcaggtggatcatgaggtcaagagatcgaggtaccctggccaacatggtgaaaccctgtctatactaaaaatacaaaaatgctagctgagtgtgggggcgtgcacctgtagtcccagctactcggaggctgaggcaggagaattgcttgaacccgggagatggaggttgcagtgtgccaagattgtgccactgcactccagcctgggtgacagagtgagactttgtcttaaaaaaaaaaaaaaaaaaaaaaggatgggttaatgcctgaraactctttggcacagtgcccagcacaaattcagcagtcactcagtgttggctatcatctttggtgatgttggtcccaaacccagacctctgctctggtcctcggctcatacacccacgtgggtagcccatatgcactttaaacgtgagtccaaaatggaatccaaagtatcagatcccctcgttgccaccaccaggtttgctttcttctcaagctgctgagggatcctcagaagca

SEQ ID NO: 776648 - DNA, 615 bp, Homo sapiens
ggcatcagacattgttgatcttgggcaaggaagatcaaattatcaggagtcactggtctgaactgaaagagcaaaggaattttcctcctgttgtatccagagacactgcaaaagttagaggcagaaaatatcttagggaccccctaggccagccccaacccaatatttcaggtggggaaactgaggctagagaggtggagtgagactcccagtgtttcagaggagtaggatccaggacttccaaactagcctgattgactgctctactgtgtcctccctaggaattcctggtgcccacccatgcttagactgttcccactgctggaaatgcccccgagctttggaaagatttcaaggcacacaaggatatgggtaatttacttcacatgagcttggctyccagtataggataaagaagcaatggcgcctttttccccttctacacagcccaaccaggtagccagcataagtaactacacaagcctgtggtctcaccacatgggatgtgttttctaaaaaaaaaaaaaaaaaatggaaaggagacttctccaggaatgggcatgagacatgagcatgtattaattaggcaaaaggggcaggtccctccaccactac

SEQ ID NO: 776649 - DNA, 611 bp, Homo sapiens
tcagtgcacccattttacagatgagaaagctggggaataagtaacgggccctgcatattgcagtcagtatcaaagcaaggactggggccctttcccccatgccacaagtccctccttgccctcctgaatggcttgaggaatgaaaccactacctggaggcagaggggtcctgggtgaagtgctcggctgtgcctcacttctctgtatcacatccttgcgtctgggagccatatgctttgaaatgctctgtttgccaaaatggcaaatcatgggccccggggccagattccygcaaaccagtgttcctgcagggaccttgggctgtctcatcaatccaattgtggcaaatcttcaaagaccgtctaacaaaaccagctcctgcccactcccttcctttatgtcctggaaagggtgggaaacccagccctgccatgtggcatcgagagaaagacatgagcttgggtcagacacaggctacacctccagccatgtgtgatgtctttggaaagtcaccagcctccctaagcctccaccttgagagctattatgcaagaagaactatataaagactgctaagcgatatgtatggtgcctggtacacagaaggtgct

SEQ ID NO: 776650 - DNA, 593 bp, Homo sapiens
ctttaggagcctcattttttaaaagagagagagaaaaaaaggaaactttttagcagtgtctttcggccacgtttcaatttaatctcacatttgagttccacaattgttttttaatacgtaccctttgcgccatcggcctctctggctcccttcctacttcaacttctaatatatcctctttaaggccagtgtgaaaagaaacaaatattcaaactcccccggaaaaaaaaaaaaaaaaaaaaaaaggcccgacgaaaaatcccttaacgtctccagcaacgtgagctactggtcccaratcttcggtctacgggacctgaagcaaagcgcccgagtcactgagcataaaagcgctccgtttccaagacagcagcgggggcaaaaaaaagcagatcttctctcccccaaaaatcagtttaaaaaaaaaaaaagaaagaaagaaagaaagggaaaaaaaagagcgcccctcagacccaactaccaaatctcatggctttctgccactccagctgtcaatcacaggcgaggttgtcaacgtggtgaatgaatgatcatccgctctgtcttcttctggtcagaacacctcaaatgtt

SEQ ID NO: 776651 - DNA, 562 bp, Homo sapiens
agaatatgagaactgagtgatctgtctgtatttcatttggtggcaatatgggcagaatttagtctaagaatgattctttagccatctaattgtttcctgaaaaaaaagtcttatcttcagcatatataggtggtggtatgatgggctgtatagaaatataagtttaatctgactagtgaagatcatacttcatcagttcacttgtgacaaaaaaagagtggcatgatctcaaagttgttctcagccttctcactcctttcaatcagttgaatcaacaaatcgatcacttgttccatatgtaatakctctccccgtgtagaaatgaagagttagcaaacctctagaatgcaagaccaaattctttgttaaagttttcttataatgaattctgtctattccgcatatatggaaaaactcagggtaagacacttaactttttttctgtagagaaacgaaagctgtaaaggcaaaggtatttttctactgcctccccttcccacaaaccactgtattactctaaagaaatttattatctcaatctgctattcatctaacaaactcc

SEQ ID NO: 776652 - DNA, 477 bp, Homo sapiens
aaggtggtgtaatatcagctataattcgcacatggaaaatgcacctacctctgtattggaggatcccggaggaagttctcccatagtcagggaatgttttacagtacttcatgttttcccaagaactttcacatatatgatctcrcttgttcctcataacacccctttgaattagccagttccttatcaccatcacgtctttgtgggtagaagaaggaaggctcagcaaattgagtcacttcatgaagagtacccagaccgacctgagactgaggacccaggttctgaccttaaggttagtcatgaatgcatatgtttggggaagtaggggaacttggaaagacgagaaatagtggcccggtgttgcgaaattactgtttgaccatctggaaatttgcccctggttcacagccaggtttcagaagacatggaacaatcattccacattcacatagcctaagcacagattcagaatgc

SEQ ID NO: 776653 - DNA, 624 bp, Homo sapiens
cgaagtgggaggatcacttgagtgcaggagttggagactagcctggataacatggcaaaaccccgtctctactaaaatacacaaattagctgggcgtggtggtgagtgcctgtccccagctactcaggaggccaagacacaagaatcgtttcagcctggaaggcggagatggtagtgagctaagctcgtaccacagcactccaacctgggtgacagcatgagactctgtctcaaaaaaaagaaaaaattatatatatttttttttctggaaaaataaatacatttttgaataaatgaaaaatgtgagttttaaatcagaactgagktggaaaactagctccaatacttactaggcttttcagtttgggacaaattattattgctttttctgagccttagtttctccatatataaaaataagatttatagtatctattcaacagaattgctataaatgtgttttcaatattgttaataagacagtatgtggagaaagtgaaacccacatacactactggttggaatgtaaaatggtatagctgctttggaatcagtctatcagttcctccaaaggttaaacagagttactagatgacccagcaattccatctctaggtatttata

SEQ ID NO: 776654 - DNA, 571 bp, Homo sapiens
  misc_feature 294: n = A,T,C or G
aatgcttgcagataggagttcaagaccagcctgggcaatatagcaagaccccatctctacaaaaaattaaaaaaagtagctgggtgtggtgacatgtgcctgtagtcttagctactggagaagctgaggcaggcagatcrttttagcccaggggttcagggctacagtgagctatcatggtaccactgcatagtaacatgaaacaaattttatgaaaaatagctgtaaccaaatagctaaacaaaaacaaattagtgagaagagtggcattggtttacatttttcagatctctnttaatgtatgggttaatagatgttggactcgtatctgtttctgcatttagtcggctttgataaatttttgattgaagtgtatgaaggcaatctgacctcattttgatatggagttaaagagaggagtattttacaaccttttcgtgctattgtgaatattcttctttgatacttcaccaaatttggcaagtggcagtttcttaaaagttaggtccagtagaggatctgaaaccctatcaatggacttttcatacttttatattaaaatctattggtt

SEQ ID NO: 776655 - DNA, 571 bp, Homo sapiens
  misc_feature 294: n = A,T,C or G
aatgcttgcagataggagttcaagaccagcctgggcaatatagcaagaccccatctctacaaaaaattaaaaaaagtagctgggtgtggtgacatgtgcctgtagtcttagctactggagaagctgaggcaggcagatcgttttagcccaggggttcarggctacagtgagctatcatggtaccactgcatagtaacatgaaacaaattttatgaaaaatagctgtaaccaaatagctaaacaaaaacaaattagtgagaagagtggcattggtttacatttttcagatctctnttaatgtatgggttaatagatgttggactcgtatctgtttctgcatttagtcggctttgataaatttttgattgaagtgtatgaaggcaatctgacctcattttgatatggagttaaagagaggagtattttacaaccttttcgtgctattgtgaatattcttctttgatacttcaccaaatttggcaagtggcagtttcttaaaagttaggtccagtagaggatctgaaaccctatcaatggacttttcatacttttatattaaaatctattggtt

SEQ ID NO: 776656 - DNA, 592 bp, Homo sapiens
acggatctctaataagtatttcaacaaaatagttcaacactaaacttttgatattctccctccaacttccagaccctcactcactgctgatatctgttcttcttacagcttttccagtgaatggcagaatctcagtgaatgtcaactccatttttctagttgcttaggtcaaaatccttgactttcctctctccttttcactctaaatctcgttggctttgctcttacaatatatctagaattgamttctcactattaacctggtccaagttaccaacactttgcctaaaatgccttctcatggtctccctccttctacccttccaccctttcgtctaattgcaacacagtagccagaatgagcctgtcaaaacccaagtcagggcacgccgttctttccaatggtctcccatcccatttgaagactaaagtccttacaacgatgtaaaagatcatctgtgttctcatttcctactcttttctctttcgttcactcactaaaattacccctaccctggccagccatactgtccctgatgctccttagctaaagctagcaagcccccatcagctagcatgctctgctgtttcc

SEQ ID NO: 776657 - DNA, 567 bp, Homo sapiens
gccagatgatttttctccctcaaattcacctgtctttgtcactgtaagatgttctcaaaatccaaaacttaaacatctgcaggtaaagtaagcattctgataattagggagtttatgtcaagtggcttttatcaaggataacaacagtaataaaaatattaataataacaatgatggtgatgaactctaaacttaaaagagactccaatgcgagttgaaattgcttaagaacaatagccttgatcstaatttatagtttcccaaagaaccctagagttctcctagatgtaacttactctgtatcacaatactaagtcctaatcactcccattgcattcctaaccaaaacaaaatttccaggagtaattatatgcagcttattatagcttcaatttgtactatagaaagtgaaagtattctatgctttctattttaaacttttgcaaggaactattgtaagccattgaatagaatccttgatacaccttcaagtaagctgctcatcagatatggaagaaaggataatccatagtacctgagagtttatatatttgttttctcaaagtc

SEQ ID NO: 776658 - DNA, 567 bp, Homo sapiens
gccagatgatttttctccctcaaattcacctgtctttgtcactgtaagatgttctcaaaatccaaaacttaaacatctgcaggtaaagtaagcattctgataattagggagtttatgtcaagtggcttttatcaaggataacaacagtaataaaaatattaataataacaatgatggtgatgaactctaaacttaaaagagactccaatgcgagttgaaattgcttaagaacaatagccttgatcctaatttatagtttcccaaagaaccctagagttctcctagatgtaacttactctgtatcacaatactaagtcctaatcactcccattgcattcctaaccaaaacaaaatttccaggagtaattatatgcagsttattatagcttcaatttgtactatagaaagtgaaagtattctatgctttctattttaaacttttgcaaggaactattgtaagccattgaatagaatccttgatacaccttcaagtaagctgctcatcagatatggaagaaaggataatccatagtacctgagagtttatatatttgttttctcaaagtc

SEQ ID NO: 776659 - DNA, 551 bp, Homo sapiens
ctttggacttaaaatacatagtcaaaatactggtccaatgttatttaggtagtcccacccactacccctatacatgctcagtatggttatatcatctgaaatacagttaaatccctttgtctctgtgtgtaatcatttgggttcttcattcatgtttgtttgtttgtatatttagtatgagaaatagtagtatggttctgaaatacacaaatatatgaaaagtagtcactcaactactaatccccatcccatccmttctaccctactcacaccaaccccatcttttctactccatttgcacccatcatctctagataaccagtctcaatagtttatagtttacccttcctctgtttctttctgcacaattgaacagatatgtgtatgttatctcatttcttcttccttctatacaaaagatggcattctataaacattcttctaaatttatattaaattacattggaaatcacttcataccaaattacagatagtttcttcaatcttttttatagctacatatactccattgtgggactgcagcataattt

SEQ ID NO: 776660 - DNA, 617 bp, Homo sapiens
ccgaagcaactggactccaacacagtgtctggcagcagtaggcaaggtggaaaggaaagccagggggaacctcaggggtctcttcatcttttctggggagaaatgtttacctctgcactctcaaggtaagaacaagcaatgtttacccctttcaccgtgaatcaggaacaaatgtacctaatgctgcagttacagggcctcaccaggagccgaaacccagccctgaaaatgagcacrgtgagaactgtgagaaagagggatcaataagctctgtggctgggtggtctgtgaggggggcgctgcacacataagaaaattgagcttttctcagctttgaacttaaaatacctgaagggaacgacgatagaacacaggatacatttcactgagtggccctacaaacagcgcagttaattctgcttgcttgtgttttgtgtgctgtgtgtgtgtgtgtgtgtgtgtgtgtgtgtgtgtgtgttttatgtatgaaagtataagccaggtgtgttggctcacatctgtaatccaagcactttgggaggttgaggtgggaggatcacttgagcccaggagtttgagaccagcctgagcaacacataaggagaccccatctctac

SEQ ID NO: 776661 - DNA, 573 bp, Homo sapiens
tctactaaaaatacaaaattagccaggtgcactggctcatgcctgtgatcccagcgacttggaaggctgaggcaggagaatcgccttaacctgggaagtggaggttgcagtgagccaagattgtgccattgcactccagcctgggcaacaggagcaaaactccatctcaaaaaaaaaaaaaagaaagaaagaaaygtgttcatgagagattcatctgagtgaggatcttgcacatctgactgtccagagtcaaattaagggtgaggactgccaaatagtgcccagtgtgccaatctccaaggggcccgaaagcaccactataaataagatgaagacaatattttctttaaaattcttctttcttgagaattctatatgtggtgtgaaggaatgtttgatacacacttgggaaagtacttggatgcagtaatatcaaacagtattgttttgttatttgttttgttttgctggctaaattgcttgagacaatagagaagatattgagtggcgttgctgctggaagttcctcactcttctctaaacttctcaaactctcctctaaagaaaggtaca

SEQ ID NO: 776662 - DNA, 536 bp, Homo sapiens
tgaactgccaatcagaaagtctttgaatctgcgtatgacctgggactccccacttccagttgtcacacctttctggactgaaccaatgtacatcttatgtgtattgattgatgtcttatgtctccttgcaaatgtataaaatcaagctgcagactgaccaccgtagccacatgtcatcaggacctcgtgaggtgtgtcataggcacgtccttaaccttggcaaaataaactactaaattaattgagacttgtctcagatactttttgatttakgtcgtgattctagaatcgaggaatacttcatcctacaaaacagagtaagtgttccaatgagctgaacagtgggggttggctttatagacagaaaaggctgaagaaagcagattggtcatttcaaagttactttccttgtaaggcagagacaagaaaacaaaacaacaatagaaggataacggtttagttagcatcaggttacttttgtctaccctttgtgtgtaaagattaaagcagagggaacttatgatcattatcatgcc

SEQ ID NO: 776663 - DNA, 657 bp, Homo sapiens
  misc_feature 413: n = A,T,C or G
ggagaccagaagttgcagtgtctctcatattctcaagacttaaattttgccctttgactgtcagagttagaataataaagtctaatctctacattgttcagctgaagaaatagtgtctcagaaatatgtctgtcttgggatatcaaatcacatcaatttcttgagcacttaatyatgtgtgatggttaattttatgtgtcaacgtggccaggttatagcacccagtagtttggtcaaacatcagtctagatgttgctgtaaagatattttaaaagatatgattaacatataagccagtaagctttgaataaaacagattaccctttataatctgtgtgggcctcgttcaatcatttgagggctgtaagaaaaataactgagctcccctaaagaggaatgcattctgcctccangctgcattcagactcaagactgcgatagcagcttcttctggaatttcctttctgctagcctgccttgcagattttggacttgccaacctccacaatcgcatgagcagattcttccgaataaatctctttcattagctctctttatgtggggaggcttcactaatcaccgtagaaagggccacgtgggaagtacaagtgattcagacctggccttcaggccttttgacgggttcaacgtccactt

SEQ ID NO: 776664 - DNA, 623 bp, Homo sapiens
tgaatactgaaccattgctcctaggggaaatatagggttagtttgctgtaggcctccggtcacatttttgtctactgatcaataagtaattatattttatatgtgcttctgtttaaagggactctgtttaatatataatgctggcttgtgaacatggaactcacggaaacagcactagaactcaggcctgaacgaagctcatccaacacatgggttttctccttgacgcacctcacagcttcttgtgcttaggaactttaggcagcacctcagcactatacttgcgagtcactgaaatgcaaaatcactaaccaaaagcacaaaagtgcaaaacacatgggactaagtagatcctgaacaggcaacttatttacagtgtgagagttgaaacaaaaagatagaacattgctctgttcagcattggctggaaacgtgggtgtcaggtgacatatgtttttccaggaataagtgcaaaggcaccaygagtattcattttgaggctacaaataaattttagtgagtaggtgaatttggaaatacagaatccacaaataatgaggatcggctgtagttgcagcagagtctatacagatcacaaagtctaaagtatatgcgttgtgccc

SEQ ID NO: 776665 - DNA, 597 bp, Homo sapiens
cctatttatcttgacatgcagggagcacaagcactccccagggtacgcagaagctgagagaatgacctcagtatccaagcaatccccagggcactgataagaaaatgagatgttaagaattcagcacagatcctatttttttttttgaaccatttttctcaatkgaaaaactgaatgccacagaaaacataatattcattaaaagacaacctagagaaaagtgaaatgcctaattacaaatggtgggaaagatatctgcaacacgtgaccaatgaaagattagtatttagaataaaaagagcccttataaatcattaagagaagcataatgtgagcaaacaaatgtggccgagtgacatgaataaatgctcattaccatgaaggattagggaaatggcagtcaaaatctgtatatcattttatatccatttggttggcaaaaattaaagtctgacaatatcaagcgttgagggaatgtggatacacagattggtaagagtgaaaattggtacgggcactttcgaaaagcttgcattttaaaattgaacatacatattctttattacccagtaattctgttcctagggatagaagcaa

SEQ ID NO: 776666 - DNA, 540 bp, Homo sapiens
tattgtgattctatttcaagaaaaaaatatatatattttgtggccaatattttaaattctttttttcattgttataagttcttatttccttctcttctattttctaatgccttttttctttaaatttattttttagttaactatttgagcatcacaagcatacttaatttaaacctgacattagaccattttatgaaatcatgtccatctagatttaacttacatactacttatgaagttgttttttactttcttagcattagttttttktttttttgtttgtttgtttctggcattttggaattcagtatattgtatcacaggaaaaggagtttcttctttaaatttattcgtattttttcaactacgttttgatttactttcatttcctcctaaccaatagttttctagtatctgttccctgacctattaattttttatactagaggcctttgttaacattttataaccttgttaatttaataaaatatgaggctttcaactctatggtggtaactagggagatccacattgaaacat

SEQ ID NO: 776667 - DNA, 619 bp, Homo sapiens
atagaaagtctgctttacccacatttaaactctgcctctaatatatttatacaataatatgtagggaactcaaaaatattcaggaatgttctacagctacctaaaaataacttgcatttccctttaagggtggcaaaaaccatgttgccagtgaaataactacttcaaagtaatctcaaaatttctagtgaaaaaggacatccagaaacaatatctactatataatattcaaaattaacacactcrtgtgtgtgtgagtgcacatgtgtatgtgtaagtgcacaaaacatgcataccaatgaaaccctatttgctggcttatattttctgctgtttggtacttagtatgtgtgtgtttgcgtgtgtgcgtgtgtgtgtgtgtgtgtatatatatatatatatatatatatatatatatatatgcacatctacatatttataatgtcctgaaagtatatataatattattttagaattagacattataaacagtaaaagttttttttttttccagaattaatgaggcatgttaatctttaaggtacgttaaattttaaggtatgctaactaagcccaaattgaagaagagtagtaaccagtcattgaaactgtgtcccat

SEQ ID NO: 776668 - DNA, 564 bp, Homo sapiens
cttgtatgtcattggcctatatgtctatatttacgctgttaccatgctgtttggttattatagctttgtatattatttgaagttgagtagtgtaatttcttcaacttttttctttttgttcatgtttgccttgaatagatgaggtcttttttggtcccataccaattttaagatggtctcttctatttctgtgaagattgtcattgatattatgatatggattgcattgagtctgyagattgctttgagtagtatgggcattttaacagtataaattctttgaatccaagaacataggatttttttttttcatttttagtgtcttcttcaaattctttcatttgcatttgatgtattttgttgtagaggtccttcctttctttagttgaatttattccaggttattttttttggtagctaaagtggattgcttttttttaaaaaaatatcttttttagattgattgctgttggtacaaataaatactactgatttttgtgtattgattttgtatcctgaaacttcacagaatttattagttttagcaggtttttttggtggagt

SEQ ID NO: 776669 - DNA, 609 bp, Homo sapiens
cagggagctgtgggacaggctactcattttaaaatccttgaagacagaacagtcgatatctgctttgagtggagctaaaaacttttttctcatttactccacaccatgcaacctcctatataacaatatttgataactttttcacagcagtagtgayggcattgatgcttaattactttaagccaaatatcatgtaatgttgtgatactgcttatacattttctaaaatattcagaacatagtggccactattgtgtactactttgcatcaggaattatttacttaatgaagatattttgcttatttgagtttactactatggtgtttctgtggggagaaatattaaaagacaaaatcagaagttggcctctactgcttcccagttcaatctttgttctctaggcatcattgttgtagttcctgaatgataaaggaaataagcacataaagaagtaatgaacattttttaaatatttattttacatggtaccaatttctctcaacacaacggctaattcatagcatagtgtataagtaaaaataaatatatatatctgcagcagaaaatgttactgttactgtatgctttgaaacatattcttttgata

SEQ ID NO: 776670 - DNA, 463 bp, Homo sapiens
ggctcaagcatgagaactaagaggcaaaatggctgagtttaactgatatacgaccttctaggagcatttgactggtaagagaagaatgccccaagtaagcatgcgtacaactccagtaaacacactgcacgtatggtacctcccaagtgctggcaggccactgcgcatgcagactccccaccccaaggaaataatcaggggagaagtgacacatgaccctggaagtawgccaacaaaccatgcacttgatctctcaagtcacctgcttggccctcttctaaatgtattttacttccttttgttcctgctctaaatctttttaataaactttcactcctgttttaaaacttgcctcagtctctcactctgtcttatacccctcagttgaattatgtcttctgaggaggcaagaatcaaggttgccgcagacctttatggatttgccactgttaaacactgtgat

SEQ ID NO: 776671 - DNA, 596 bp, Homo sapiens
tacaaactctttgaatatgtatctttctctgtgggtatagaaaaacccaaaccaaagtgctttttctatcctatcactcaacaatcaacacagaacactgaccaaatgtagggggattgttccccaccagcaagcaagcacttctgcagcagacaccagctgggttctgacaccatcgatctgaagacaacatcggaccacaggctgaggaggrgacagagcagagacccctccctcttaaggggacaccagcactgccaccctaccccacacaaggagataaaggaaaatcttgagtcctttcaggggaacttccaggtacccagctaggcctgagaagtaaatgagcagcttgataagcaagaaggtaatagtaacataaaacaatagccaaggaagttagagtcagatgtttggttccctatagaaactgaagataagatcttcacgtatgtccctgagttgtttttcagcaccacactctaaccaactgagctaaccggccaccgaccctgagcttttcaaaaacctggacccccaccacatggagtctgctggcacatagactccagagaacggggagctgagcactgaac

SEQ ID NO: 776672 - DNA, 596 bp, Homo sapiens
tacaaactctttgaatatgtatctttctctgtgggtatagaaaaacccaaaccaaagtgctttttctatcctatcactcaacaatcaacacagaacactgaccaaatgtagggggattgttccccaccagcaagcaagcacttctgcagcagacaccagctgggttctgacaccatcgatctgaagacaacatcggaccacaggctgaggaggggacasagcagagacccctccctcttaaggggacaccagcactgccaccctaccccacacaaggagataaaggaaaatcttgagtcctttcaggggaacttccaggtacccagctaggcctgagaagtaaatgagcagcttgataagcaagaaggtaatagtaacataaaacaatagccaaggaagttagagtcagatgtttggttccctatagaaactgaagataagatcttcacgtatgtccctgagttgtttttcagcaccacactctaaccaactgagctaaccggccaccgaccctgagcttttcaaaaacctggacccccaccacatggagtctgctggcacatagactccagagaacggggagctgagcactgaac

SEQ ID NO: 776673 - DNA, 614 bp, Homo sapiens
gagctggagaaagttttaggggtgtggaaccagctgtgggtcaaagcctcatccagagcaagaccctaactctcttcaattccatgaaccctgagagatgaggaagctgcagaagagaagttgaagtctaacagaggttgttcatgagactgaaagaaagaagctgtctccataacataaaagtgccaggtaaagcagcaagtgcyaatgtagaagttgcagcaagttctccagaagatctagataacatcattgataaaggtggctacactgaacaacacattttcaatttagatgaaacagtcttctattgaaacaagatgctacctaggactttcatagctagaaaggacaagtcaatgcctggcttccaagtttcaaaggacaagctgactctcttgttaggggctaatgcagctggtgactttatgttgaagccagtgctcatttaccattgtgaaaatcctagggcccttaagaattaagctaaattaactctgcctgtgctttatgaatgcgacagggcctggatgacagctcatctgtttacagtatggtttactgaacactttaagcctgtgattgagacctattgctcagaaaaaaaagattct

SEQ ID NO: 776674 - DNA, 614 bp, Homo sapiens
gagctggagaaagttttaggggtgtggaaccagctgtgggtcaaagcctcatccagagcaagaccctaactctcttcaattccatgaaccctgagagatgaggaagctgcagaagagaagttgaagtctaacagaggttgttcatgagactgaaagaaagaagctgtctccataacataaaagtgccaggtaaagcagcaagtgccratgtagaagttgcagcaagttctccagaagatctagataacatcattgataaaggtggctacactgaacaacacattttcaatttagatgaaacagtcttctattgaaacaagatgctacctaggactttcatagctagaaaggacaagtcaatgcctggcttccaagtttcaaaggacaagctgactctcttgttaggggctaatgcagctggtgactttatgttgaagccagtgctcatttaccattgtgaaaatcctagggcccttaagaattaagctaaattaactctgcctgtgctttatgaatgcgacagggcctggatgacagctcatctgtttacagtatggtttactgaacactttaagcctgtgattgagacctattgctcagaaaaaaaagattct

SEQ ID NO: 776675 - DNA, 614 bp, Homo sapiens
gagctggagaaagttttaggggtgtggaaccagctgtgggtcaaagcctcatccagagcaagaccctaactctcttcaattccatgaaccctgagagatgaggaagctgcagaagagaagttgaagtctaacagaggttgttcatgagactgaaagaaagaagctgtctccataacataaaagtgccaggtaaagcagcaagtgccaatgtagaagytgcagcaagttctccagaagatctagataacatcattgataaaggtggctacactgaacaacacattttcaatttagatgaaacagtcttctattgaaacaagatgctacctaggactttcatagctagaaaggacaagtcaatgcctggcttccaagtttcaaaggacaagctgactctcttgttaggggctaatgcagctggtgactttatgttgaagccagtgctcatttaccattgtgaaaatcctagggcccttaagaattaagctaaattaactctgcctgtgctttatgaatgcgacagggcctggatgacagctcatctgtttacagtatggtttactgaacactttaagcctgtgattgagacctattgctcagaaaaaaaagattct

SEQ ID NO: 776676 - DNA, 614 bp, Homo sapiens
gagctggagaaagttttaggggtgtggaaccagctgtgggtcaaagcctcatccagagcaagaccctaactctcttcaattccatgaaccctgagagatgaggaagctgcagaagagaagttgaagtctaacagaggttgttcatgagactgaaagaaagaagctgtctccataacataaaagtgccaggtaaagcagcaagtgccaatgtagaagttgcagcaagttctccagaagatctagataacatcattgataaaggtggctacactraacaacacattttcaatttagatgaaacagtcttctattgaaacaagatgctacctaggactttcatagctagaaaggacaagtcaatgcctggcttccaagtttcaaaggacaagctgactctcttgttaggggctaatgcagctggtgactttatgttgaagccagtgctcatttaccattgtgaaaatcctagggcccttaagaattaagctaaattaactctgcctgtgctttatgaatgcgacagggcctggatgacagctcatctgtttacagtatggtttactgaacactttaagcctgtgattgagacctattgctcagaaaaaaaagattct

SEQ ID NO: 776677 - DNA, 470 bp, Homo sapiens
aggaggggcagggctaatgggctgctaatggccctgcagctgggctctggtgacccctggctccctaggggccagaaacagtgctaatggggctgcccctcccacagcaggcccttcccttctgttccagatcggctaggctgttaaggggtaagtggcaggagagagggaagagtgatcagccccctccattatccccaccaccttggccctcaaggcagctcagtgagcccagaaaccagcctagaatgtsggggaggacatcggcactccatcccctcattacaggcggggagctgaggctggtgcattaatctggtcctgttcaccttttcccctcttgttcccaagttcatggttcacttctcctctctggactcaagcccataggcacaggccgcagctggcagggaaagccagggagggcacagtaggcacagtgcccagggcccacacaacttccaggatcc

SEQ ID NO: 776678 - DNA, 608 bp, Homo sapiens
gtggctgaccacctcaccatgacgctgaggagctgggacgcagggccggaatggtggacactgcttctgcctgggcctggaagtagggagccggcagcaggggggacccctgaggctgtgctgggaagggggctcagccccagattcctggaccctccagaaagaggcagccagggccggggcactcagacgccggcgtgaggccaccagctgacaggggctggatttgtgtggcccaggggccttgagggacttccagcgggtcatggctgctccagcccctgctccgagcagctcaaagcctgcaaggaacagaatcacaagaattaaaggccagagagcccggtctgcatgtgctcccagyagctggcggcctcgaaactggccaactaccagactggtgagggtgctgccacagctcctggcatctctgccagggctgggcaccgcagacctgcccagatggtgtcatacaggcttggaaacccccacttctgtcgacgttcctctctgcgtggttttaccacacagagagcatcaacaaggtcaagttcatgccccactccctcatttctcagagccaaaaactgacaaagacacctgtccca

SEQ ID NO: 776679 - DNA, 624 bp, Homo sapiens
caccattcatcagatgcagcactggggcctggaaagcccagcccttcctttgcagatggggagactgaggctctgagccggtgcccttgctccgtcacatagggtgtgagaggcagggctggctgcagggttaggggctctccctcatggcaggccctgcccagggtataggaccacatcaaggctaggctgggcacaggcagccaggaggggcactcctgggggacactgccagagccaggagtgggaggcaaagacgtgytgggcaccctgggggcagtgaggaagcttggctggatgggggagaacccaggctggtgtggaggggagagggagagtggtgggtggcattcctatgtctcataatctgggaagaagatgatgacctcttacacccaatcccctttccaggccaaacctccccaccagagactcagctgacctctgtccacgaagctaacccatggccctcaaacatttgggtccaatgccatgacggcttcctatgccaaatgcaggctaggcctgaggagagaggcagcagcaacacatcactgtgtgcagggcatggggtggtgggtgccccactgatatcctaggcccttaccacctcaggcccacctg

SEQ ID NO: 776680 - DNA, 624 bp, Homo sapiens
caccattcatcagatgcagcactggggcctggaaagcccagcccttcctttgcagatggggagactgaggctctgagccggtgcccttgctccgtcacatagggtgtgagaggcagggctggctgcagggttaggggctctccctcatggcaggccctgcccagggtataggaccacatcaaggctaggctgggcacaggcagccaggaggggcactcctgggggacactgccagagccaggagtgggaggcaaagacgtgttgggcaccctgggggcagtgaggaagcttggctggatgggggagaacccaggctggtgtggaggggagagggagagtggtgggtggcattcctatgtctcataatctgggaagaagatgatgacctcttacacccaatcccctttccaggccaaacctccccaccagagactcagctgacctctgtccacsaagctaacccatggccctcaaacatttgggtccaatgccatgacggcttcctatgccaaatgcaggctaggcctgaggagagaggcagcagcaacacatcactgtgtgcagggcatggggtggtgggtgccccactgatatcctaggcccttaccacctcaggcccacctg

SEQ ID NO: 776681 - DNA, 498 bp, Homo sapiens
caaattaatacataaatattaaatgaaacctttctacatggccaaaaacaccataaatgacagcaaaatacaagtaaaatattgggagacaatgtttgcagcagatagaaggttaatctagctaatatttaaaaagtcttgaaattgacagaaaaaaagaaaaatgtgaatacaaatggtccttaaagcatctttgaatatttgcagctcagatgcagagaccctagggaatcctgctgttggccacctgcaggaggaaacgaaaatgagactgctcaggactgcggggtgagccctacagttctccctggacgtggcctgttcagaytcaaacccaaccacaccccaggtgtgtagaagcctggtgagggcaggagggggcagcgagggtccacagaaccttcaagtccaccagatgtggcccaccctgagggccgggatcccaacctaggcacttggtggctgaggaaaccatggtgggtgtttggatgactctgc

SEQ ID NO: 776682 - DNA, 645 bp, Homo sapiens
ggtacaaagaagagctggcaccatgcctgcttaaactattccaaagaattgaggaggggggactcctctccaactcattcyatgaggccagcatcatcctgataccaaaacctggcagagatacaacaaaaaaagaaaacttcaggccaatatccttgatgaacattgatgaaaaaatcctcaacaaaatacttgcaaactgaaccaagcagcacatcaaaaagctaatccactgtgatcaagtaggctttatccctgggatgcaagcctggttcaacatacacaaatccataaatgtgactcatcacacaaacagaactgaagacaaaaaccacatgatcatctcaatagatgcagaaaagactttttataaaattcaccatctcttcttgttaagaactctcaataaactaagttttgaaggaacatacctcaaaataatgagccatttatgaaaaacccacagccaacattgtactgaatgggcaaaagctggaagcattctccttgaaaaccagcacaagacaaggatgcctgctcttactactcctactcagcatagtattggaagtcttgttcagagcaatcaggcaagaaaaagaaataaaggacatccaaataggaagagaggaaccccctgtttgc

SEQ ID NO: 776683 - DNA, 602 bp, Homo sapiens
aaaatataccttgtgtaatttctttttcagaaatgtctggattattctacaagtattttcctttttcttttttttttttctttttgagagagagtgttgctcttgtttcccaggctatagtgcagtggcacaatctcggctcactgcaacctccacctcctgggttcaagcgattctcctgccttagcctcccaagtagctgggattacaggcttgcaccaccacgcctggctaattttgtatttttagtagaggtagagtttctccatgttkgtcaggctggtctcgaactcccaacctcaggtgatccacccacctcagcctcccaaagtgctgggattacagacgtaagccacctcgcccggcctctacaagtatttttcttacaaataaaacctagaattatttggtcaagttttaaaaaatcccattgggatactgattggattatatctaatatgcagatgagcgtaactgttattaattttttttttttgatacagagtttctctctcgttgcccaagctggagtgtagtggcgcgatcttggctcactgcaacctctgcctcccaaataattctcctgcctcagctttccaagc

SEQ ID NO: 776684 - DNA, 572 bp, Homo sapiens
taataagtaaaatatggttgactctttgtatctgtagcttctgcatctgtggatttaaccaacagcaggtcaaatatttaaaaagtaacaataaatagttgcatccattctgaaaatgtacagaatttatcttgtcattatttcctaaacaatacagcaaaccactatttacaaagcattaccattgtattaggtgttataagtaatctagagatgatttagagtgtacaggagaatgtgtgcaagttatttgcaaatacgacatcatttaatatcagggacttgagtatctgtggattttggtatctggacggggaggaggagggtyctgaaacaaatcccccatggatacaggggcaaatgtaccatagtcccgtgctaagacaacaataacaaaaatttatgacgaattgttttggtggataatttatatgttctctaaaggacttatttaacaacataaaggcctcttagaaaacaaaactgtatatttaaagatgcacatagaaatggggttaatgtaataaattaaaagcaatgaaatacaaagtaacactgtataaatgcttgtc

SEQ ID NO: 776685 - DNA, 600 bp, Homo sapiens
acatacatggctgtggcaggaggattccatttcttgctgtatggatggacttctccacagttctcatgctaccacttcccccagagtaagtgattcaggagacagcaagagtgcacacccaaggtagaggctccagcatccttataacctaatctcagaaatgccatcccatggccgagcacagtggctcacacctgtaatcccagcactttgtgaggccgaggcgggtggatcccctgaggtcaggagttcaagaccagcctggccaatatggtgaaaccccatctctactaaaactacaaaaattagcggggcgttgtggcgtgtgcctgtaatcccagctacccaggaggctgaggcaggagaattgctggaactcgggaggcagaggctgccgtgagccgagatcatgccactgcactccagcctgrgtgacagagcaagactctgtctcaaaaaaataaataaataaataagtaaaaaaaagaaagaaatgccatcccatgacttttgccgtatcctattcatttgaggtgagtcactaagtccacccacacctgaggaaaagtgaatgaagctccatctcttgaagaagaagta

SEQ ID NO: 776686 - DNA, 632 bp, Homo sapiens
atagaaccttcttaaagcataaatatcacagggccaataaaagaaacacacacacacacacacacacacacacacacacacacacaatcaaggtattcaggcaacaaatagcatgatgaatagaatagtaattcacatctgaatactaacattgaatgtaaatggcctaaatgctcaacttaaaagatactgaatggcagaacggataagaattcactaaccaagtatctgctaccttcaagagactcatctaacacrtaatgtctcacttaacttaagataaaggggtggaaaaatatattccatgcaagtagatgccagaagtgagcaggagtagctattcatatatcagacaaagcaaactttaaagcaacagcagttaaaaaacacaaagagggacattatataatgataaaaggacttgtccaataggaaaatatcacaatcctaaatatatatgtacctaacactggagctcccagatttataaaacaattactactagacttaagaaataagatagacagaaacacaataatagtgggggacttcagtactccattggaggcagtagacaggtcatcaagacagaaagtcaacaacaaaacaatggattttttgtttcagaacat

SEQ ID NO: 776687 - DNA, 679 bp, Homo sapiens
catttactcagaatgtgtcctattataaattgagaggatgttatttggtgtgtgtgatctatgtaaacggagaggatgaatgtgaagttacaaagtgtaaatggcatgaatggagaggatgaagtgaagttacaaagccattcatattcctgtcattgctgaagtgctttcatttgatttagttctaggaattcattgtggattggccttatgttccctgtctccaggccccatttccctgccttagacagaccaataacaaacggcgagattgaagtggtaatataaaattgccagcaacaaaaaacagtccaggaccagatgaattcacagctgaattctatcagacattsaaagaagagttggtagcaatcctattgacactattccaaaagatagagaaagagggaatcctttctaagtcattctatgaagccagtatcgccctgataccaaaaccaaaaaaggatataacaaaaaaagaaaaaaagagaacaatatccctgataaatatagacaccaaaatcttcaacaaaatacaaaaacaaaaaccctgaatccaatagcatatcaaaaggataatcaactatgatcaagtgggtttcctatcaggtattaagaaatggttcaacatacgaaatcagtaaatggaatacaccacataaacagaattaaaaac

SEQ ID NO: 776688 - DNA, 442 bp, Homo sapiens
ttatgattaaaacccagcatccctttatgattaaatccagcatccctttatagttaaaacgcttagcaaaattgacatagaagaaacataccttctatgtcaaggtagtaaaaaccatctatgacaaacccacagccaacataatactgaatggggataagttgaaagcattccccctgagaactggaacaagatgaggatgcccatttctaccacttgtcttcatwatagtactggaagtcctagccagagccatcagacaagagaaagaataaagagcatccaaattggtagagaggaagtcaaactgtcactgtttgctgatgatatgattgtatacctaaaaaatcctaaagatttctccataaagctcctagaaataaatgaattcagcaaagtttcaggatacaaaattaatgtccacaaattagtagctctgcta

SEQ ID NO: 776689 - DNA, 636 bp, Homo sapiens
cagaaagctgctgaaacattatttctgggaatgtctgtgagagtgtttccagaagagattagcagttgaatcagtagactgagtaaaaaggatacatcctcaccaacgtaggcaggcatcaccaattcactgagggcccagagagaacaaaagaggcaaaggaagaattcactctctcttctggggctgggacatccaccttctcctgccctcagacatcagaactccaggctaagaggccttcagatactggaacttacaccagcagccccccagtttcttaggcctttggcctcagattgagagttgcactatcaactctcctgcttcccgggccttcagattyggaccgaattaccccaccagcttccctggtgcttcagcttgcagatggcatgtcatgagacttcttagcccccataatcatgtgagacaattcaaaaaataaatcctccaatatatctatatctatctatcgatcctactgattctatttctctggaaaacctttatataccatgttaaatttttaagtaaaaaaagtattaattttaacaatattttctttaacccaatatataaattatgattttgacatgcaattaaataaaattaatgatttttttttattttgtg

SEQ ID NO: 776690 - DNA, 657 bp, Homo sapiens
tgcagaaaaaaatgagctgtctctttttcagggtttgtgggtcaaattggtcccaatggcttaggatgcatttcaagggtgagcctgttgatgcctgagtgtttcccatctgaaagacaaaaccacccttggttttgctttgtttatttctccccctgcccaagaacccgcaacagtccctggaccttgctgattggaatagttgcactcactgatgcagcagcagaaacactagttttcctcctagaacacaagaaggactgaggaatgtcagatttagtagcccttactcatgcattctcaaaaacctgcacccttgcctgtcctcctagaccacaaagaggaccaaggaaaawcagatttagaggcccttactgatgcattctcgaaaacctgttagagtcctaagcattctcctgttagtactgggactttaccccatcctataaagatgttatgcccccaaaatgaagtggagggccataccctgagggaggggaggaatctctagagttggaagagtgatgcctttttgtcctcacttacatgaataggaaggatatcatttctgaagcttcccatatcctagcttctggaatagcttttgttagacctgctagtctgaggagggatcctaaaattccagataagatagtc

SEQ ID NO: 776691 - DNA, 507 bp, Homo sapiens
tgcccaatcaacacatgaaatggcataaatcctgtgtagtcagtgcagggtggcaagaggtgctttatgaagtgggttagtcttttttttgttctgttttgtttctgagatggagtctcactctgtcacccaggctggagtgcagtggtgtgatctcggctcactgcaacctccgcctcccgggttcaagcaattctcctgcctcagcctcccaagtagctgggactacaggggcccgccaccacacctggctaatttttgtatttttagtagagacagggtttcaccatatgggccaggctggtctcgaactcctgaccttgtgatccacccgcctcagccccscaaagtgttgggattacaggcgtgagccattgtgcccggttgaagtgatttagtctttaaactccaagacagagagccctgggctcaaatccctgttcacagcaccatttggctgtgcaaccttgatccatgtgtttaaccctttatacccaggttccccca

SEQ ID NO: 776692 - DNA, 552 bp, Homo sapiens
aggatcatgcttggcatgtaaacaattctcaatacatcttgttgaatgaatgaatgaatgaatgaatgtgccaaattgacttaagacttctgctcctaaggatcaatcccaaaccagtaggcaaagcggtaggtgtgaaatacttaatgagcatgatttatagtagcaaaaaaaatgggaatggcctcctgtccacccacccatgctggatgaactacatgagggtacagccaaaaagtcctgtacagtggtcaaaaagtgacacatgtctacattcattgatacccaagtttctccgctaccgtcaatgaataaaagaagcaaacggtcaagcagagtttaatttgatgcaatttgtgtaaaagtgtgtgtgtgtgcgtgtgmgtgtgcgtgcacaggtgtgtttgtgtgtttgaaggtctggaatggtagttacttgtttctgggtgacaggattccagggaatagtttttctttctcatgcctttctgaatcttttgatttttttaaaattgagaatatgtaaactttgcaagcagataaactaaaaac

SEQ ID NO: 776693 - DNA, 517 bp, Homo sapiens
tatgaagaactcacacaattcaatagcaaaaaagaaatcccatccaaaaatgggcaaagggcatgaatagacatttatcaaaagaagacatgcaaatgaccagtagatataggataaaaacgcttaacaacactcatcatcaaaagaaatgcaaataaaaaccataataagatatcaccttatcccagttagaatagctattatcaaaaatacaaaagataacaaatgttggcaagggtgtggagaaagaagaactcttatacactgttagttagaatataaaatagtacatccattatagaaaaatagtatagaagttcctcaaaaaattaaacatggaactactatatgattcagcaatttcaytactgggtatttatccaaagaaaatgaaatcagtatgctgaagagataactgcattctcatgtttattgcagcactggtcacaacagtcaagagatggaagcaatttaagcatccatcaaccaatgaatggataaagaaaatgtggtattt

SEQ ID NO: 776694 - DNA, 578 bp, Homo sapiens
atatgaagaactcacacaattcaatagcaaaaaagaaatcccatccaaaaatgggcaaagggcatgaatagacatttatcaaaagaagacatgcaaatgaccagtagatataggataaaaacgcttaacaacactcatcatcaaaagaaatgcaaataaaaaccataataagatatcaccttatcccagttagaatagctattatcaaaaatacaaaagataacaaatgttggcaagggtgtggagaaagaagaactcttatacactgttagttagaatataaaatagtacatccattatagaaaaatagtatagaagttcctcaaaaaattaaacatggaactactatatgattcagcaatttcattactgggtatttatccaaagaaaatgaaatcagtmtgctgaagagataactgcattctcatgtttattgcagcactggtcacaacagtcaagagatggaagcaatttaagcatccatcaaccaatgaatggataaagaaaatgtggtatttacacactggaatgctattcggctattaaaaccagaaggaaatcctgtcatttgtggcaac

SEQ ID NO: 776695 - DNA, 609 bp, Homo sapiens
tcagacttataatacattttgatttaacctttatataaggtgtgaatcatgggtctatgttcattttttagatatagatctctaattgctttctgcacaattcattgaaaatacatttctctattgaattttctgcacctttttaagaaaattaattaataataatggtataggtttgttctgtgactgtatctttcgcacccaatatctatttacatacagtaatggtttctatgtagaaaatccccaacaatctataaaacaaatcctaaaacaaatacgtgattttagtaaggttgcatgccmcaaggacaatgtaaaaaaaaaaaaaaaaaaaaaggaaatgtaggttcatataccttgtttctgatcttagtggaaaagcactgagctttccactaataaatatgatgccagttatttctataataagtgtcttatttaaggttaacgaattatcttcctattttttagtattttgagaagtttaacaggaatagatgttgaattttgtcaaatgctttttctgcatttatgagatcatcatatgaattttcttctttattaatatgattaattacattgattttctaatgttaaatcaatttt

SEQ ID NO: 776696 - DNA, 609 bp, Homo sapiens
tcagacttataatacattttgatttaacctttatataaggtgtgaatcatgggtctatgttcattttttagatatagatctctaattgctttctgcacaattcattgaaaatacatttctctattgaattttctgcacctttttaagaaaattaattaataataatggtataggtttgttctgtgactgtatctttcgcacccaatatctatttacatacagtaatggtttctatgtagaaaatccccaacaatctataaaacaaatcctaaaacaaatacgtgattttagtaaggttgcatgccacaaggmcaatgtaaaaaaaaaaaaaaaaaaaaaggaaatgtaggttcatataccttgtttctgatcttagtggaaaagcactgagctttccactaataaatatgatgccagttatttctataataagtgtcttatttaaggttaacgaattatcttcctattttttagtattttgagaagtttaacaggaatagatgttgaattttgtcaaatgctttttctgcatttatgagatcatcatatgaattttcttctttattaatatgattaattacattgattttctaatgttaaatcaatttt

SEQ ID NO: 776697 - DNA, 607 bp, Homo sapiens
actatatcccaatacttctcctacacaacatctgtagtattttgtcacatattttatttttacatgtaagataaataaatatcgcattgctattactttttaataagtggtcagttatcttctagagcaactaaaaatatgagaaacatgttttatttttaccttcattcattttattttcagcgcccttcacttctttctgtatagctatactagtctgttttcacactgctgtaaagaactaactgagactgggtaatttatgaagaaaagagggttaattgacacacagttccacaggcttgacaggaagcatgactaggaggcctcaggaaacttataatcatggcagaaggtgaagrggaaacaaggtacatctttccacagaagagcaggagagagggcaagtgaaggtgggagtgctacaaattttaaaagccagatgtcatgagaactcactcaccatcatgagaacagcaagggggaaatctgcacccatgatccaataactgccaaccaggtccctcccctgacatgtggcaattacaatttgatgtgagatttcggtggggacacagaaccaaaccatatcaataaccaagtttaa

SEQ ID NO: 776698 - DNA, 607 bp, Homo sapiens
actatatcccaatacttctcctacacaacatctgtagtattttgtcacatattttatttttacatgtaagataaataaatatcgcattgctattactttttaataagtggtcagttatcttctagagcaactaaaaatatgagaaacatgttttatttttaccttcattcattttattttcagcgcccttcacttctttctgtatagctatactagtctgttttcacactgctgtaaagaactaactgagactgggtaatttatgaagaaaagagggttaattgacacacagttccacaggcttgacaggaagcatgactaggaggcctcaggaaacttataatcatggcagaaggtgaaggggaaacaaggtacatctttccacagaagagcaggagagagggcaagtgaaggtgggagtgctacaaattttaaaagccagatgtcatgagaactcactcacyatcatgagaacagcaagggggaaatctgcacccatgatccaataactgccaaccaggtccctcccctgacatgtggcaattacaatttgatgtgagatttcggtggggacacagaaccaaaccatatcaataaccaagtttaa

SEQ ID NO: 776699 - DNA, 623 bp, Homo sapiens
attatattgcaaccaatctctccctttaggtctatgtgtatttgctgtatatatttgggtgctctggtgtaggatgcatacatgtttacaattgctatattttcttgctgtatggatgcctttattattatataatggcttaagtttgatattgttgtcattcctctcttaaattttatctgaaacacatatagctacttacactctttttttagtttcagtttgtgtggaatatctttttgtgtcacttcagtttctatctttgtgcatctttaaaggtgaagtagatttcttgcaggcatcatttatttgcacctttttaaaaaatgttatatagtcactctrtcttttaattggacaatttaattcatttatattcaaagttattgttgataggtaagggtttattactgatatatttttactcattttctgttgttctttttttgatccttactatctttgtggttaaatgattatctttattagcacatcttgattctgtattatttttaatgcatctattataagtttttgctctgtggttatcatgaagcttacaaaaaaattatatagttataacaggtcattttaagctgataccatcttaactttaattgcaa

SEQ ID NO: 776700 - DNA, 547 bp, Homo sapiens
cattattcattttgctagaaattttgaatacatttgctaaagctggaatgaaaatctcaataaatgaataaataatgatttagtgacatctgccgtgtgcttgttcactcgttgatctttaagagtgaaattttccaaaagagactgatcattaggggtttctgtagatyttaagtatgatgctttttaaaaccttttatcagaaacacgcttctttgattaacatgaatataatatagtgatgtagttaagagtatatggtctggagttaatgtgctatggtttaaatcctggctcagcctcttggaagctgggtaacaatgagtgagataatcaattaaattagagcctcattttcctcatctgtagaacaagagtaataatagttgtgttcaactcatagtactgtgatgaagattgaataagttaataaatacaacagcacctggttcatcgtaaatgctccctacatttgggctattgttatttttctaaattctattgcttgcttgtctgaacatcatcttgggttaatattgttactact

SEQ ID NO: 776701 - DNA, 602 bp, Homo sapiens
atgaggtttctgaccgacttttgaccaaatggatttccaactgcatttgaaaaggaaaataactttccaatgtaccaaataatgaaaaatgactgggcgagtttataactgttgatttagccaccaacttccccccagccctgactccggttctctggaggttttcattgagcattaattcactctctttctcagcgcacaaataggtccttctgaatccattctgcagcgtattagcttcaaggcctgttggaaatggcttagcatctgctcttaatagacactgcagcgtgcggggtgggcgagggctgggatggggtctcacggcrtcaaagaacagacatgaaatttcagggaagcagcaccttgagaagctgttgcctggaacaagcacagaatatagcagggaaggtggcttttgggggcctcaagaggcacagacgtgagctaaaccactcataagccctccaacccattcagccacaaagaagatcaaggtaaagagtcaaagatgaatgccgggctggagcttttctggctatgctgcatttgaaacacgctgggagctctttttttaaatattttttattttttgagacaga

SEQ ID NO: 776702 - DNA, 573 bp, Homo sapiens
agcaccatgtttaagcatgtgtgtgtttgtgggtgtgcacgcatttgcgcacacacgtatttaccaaagttgctttccgcaaaaattaaagacaaaagttttgtttctttctaaactttggcaatttcagcatctgcctatttaggtaaattagacaaggattatctcttttatcttccctcttctttgtttttttttcctctccaaacccagaaattccatgagaaatatttttaagagtgttaactgacaaatgtacacatgccgtccgcagccagagagcaagcagcacagtcgctaacttgttagacaggagytagattacaatcataaataaatgatttgctgtctcctcgcattcagacttgtagcttttaaagtgtgcctgtcatcgcagaatcagatttagtcaaatgctgtgtaactgcaaaattatcctatccttacctttttattctccttataatggacagttaaattggattttcaaatttgaagtgcatatgtttttcaaatccccagaggctgtctattttttcatttctaaagcaactcactaatgtttatcattac

SEQ ID NO: 776703 - DNA, 504 bp, Homo sapiens
tcctccagtgtaaggcacttcacctgctccaccatctgcaatccttataagaacatttgtaaactcacttaacaaaactttgagtacatattctgtgccaggcgctgtgctagacaactgtcaaagccttgattattttccactttagagacactgaaactaattggaatgatttctctagtttcatttagctggcaaggagctgaamtggattcaagcccaggtcgtagtgactccaaactttaggcttttatccatgttcctaaatcttatcatctgaggtcagagcagactggattttctttctttgcgtcaggcagctgtgagtcctgaaacaacatggagcagataggctagctgctttctccaaaccgattgcacttgttgggcacaaaggaaaattgcatttcccagcctccttgcttctaggcagggtcacgtggctacttccggtgggtagaatgtgagaggaagtgacggatcgctttcaggttgaggcaaatt

SEQ ID NO: 776704 - DNA, 652 bp, Homo sapiens
cttgatccctataggagagcgtgttggtgaattctgctgggctaaaactaaaacagtgatttttttttccctacgatcctttaggggtacccttatgctaattaaccctaccccacacaagactggcttgtgtgccttggggccacttcatcaggggagggagatgttatggggcctgactcaggactggtgcatcctttccccacctccatgacaccagccaccatcagagggctgactgtgaacgctcaatggtacccatgcagaaaggtcctgagctcagtggtctccccatcatgctggggtttgggaccctagttatgtttcctctctttagcccagtggagstcatcttttgcttcatattactatcacccgaggacctgtaaaaaatatttactccagaccagaccaattaagtcaaactctctggttgtgggaaaggaggggaccctagtttttaaagctccctaggtgattctaatgagtggcaaagctgagaataacagtttagcccttttcatgtgatcgagaccagaccctatatctgtgtcttcctcctgcaaaagggtaagtggaaaagccagactcgaactgggtgcaaatcttgcctttgtgtggcttcctgcctccatccctattcacctcactg

SEQ ID NO: 776705 - DNA, 540 bp, Homo sapiens
gccattcattcacccggctatgaatctccagtatttgtcgccctctttttctgacacatagacgaattctcagtcccatcttctggttacccacccatgctcaagccttgactatctgggtaaattacatcatcctgcacccagtcacctgcacccaccgctttgcaactgtgcrtcacccacatccaacccttctgcagcttctaatttccacctctgcatgcgtttttaatgtatcaaatttcccccatatctgttgttaccatctgtccagggccactgtcatctccttcctgggcactacagcagccttctgagggctctccatccttctgccatagtctccaccctccaatccattctctagcctgggataatttttcaaatttgctctcagaactcctctttctaaaaccttttaataatttcccaatacgtttaaaacaggagtcagcaaactatggcctgtggatcaaatccagccagctgcctgtttttgtaaataaagttttattagaacacagctacactcatttgttt

SEQ ID NO: 776706 - DNA, 546 bp, Homo sapiens
attactgttccttcatctgaatgatgacttctgacaacattggaatatagtcccagccccctctttggccactgtccacacacacaccatgtgtaatctgcccccagtcaaggtaacctgtgcagaagcagctgtttgttctgcawgtctccaggggtcagcattgggatgtttcataagcttaaggtttggacttaatagctatgaaagtgagtgagctccccattactggaggtatgcaaacaaaacagatcaagcatctttttgtcagggaagccggagagaagattcatacaacaggtgctggtggagggggaatgagatgattctgaactgctcaccatcagatcatgatggggagagaatattgaaaatgcaggtttctgggtcacacccttgaagattcttattccataggtaggtgtgaagttcagacacctacattttatatgaaaatgcccccaaagtattaactgcagatttcccacaacatctgaggtccctgctagctcagtaatcagccaaccccaagcccatttctttagg

SEQ ID NO: 776707 - DNA, 512 bp, Homo sapiens
gtctgtccatctccaaatatagtcatattgtgggggggcaggaattcaactcaggaattttggggagcacaatttagttcttaacacctctgtagtcagacaaatctggattcaaattcctactagctaagtgacttcaggcaagttattaaattccatcagttgtagttttctaatctacaaaatagaaacaacgaaactgaacttttagaggtccttgtaacaattaaataagataaattayagcaccccaaaatttagctagaaatatattgaatatctcaaaattataatgacttccttcagtctttttcagtcaatataacaaaaattcctttcccatttcttgaaaaagatgcttgtctaataggttcatgttttctttcattgattcaacagttgttagttgcttccttactatatgccaggcactatgctaggtacagtctatacagtgctatgtgaaaaatttctgcgctcatgcagcttacagattaaatgggggaattgac

SEQ ID NO: 776708 - DNA, 565 bp, Homo sapiens
taatagaggcagaaggcagagaaatcctaggcaaacaggggcaggtccctggtgaaaccccactttcaagcccaaaacatcctgaaacctgcagaccagagtgagaacttctattcctgtttacttgctctctcccgattggttctttctgaataacaccttttaaccagttgaatgttgccttttccaatactacctatggcccacgctgcccccaccctgtgcctgtaaagacccagactccgttggtagagtggtgatggtctcatgggaaggagatggcctgacgtcagggaagagacctcctracttcaggggaagatgacctgcctttcccatcccctctacagctcccctctctgctgagagctgttttcattgctcaacaaaattatctgccctcaccattcttcagtaatcaagtgtgacctcattcttcttggatgctggacaagagcttgggacccaccaagtatgagtactcagaaaggctgtcacactggccctttgcctttgctggtggagggcagccacctcacgcaacagggtcggggctgactgagct

SEQ ID NO: 776709 - DNA, 565 bp, Homo sapiens
taatagaggcagaaggcagagaaatcctaggcaaacaggggcaggtccctggtgaaaccccactttcaagcccaaaacatcctgaaacctgcagaccagagtgagaacttctattcctgtttacttgctctctcccgattggttctttctgaataacaccttttaaccagttgaatgttgccttttccaatactacctatggcccacgctgcccccaccctgtgcctgtaaagacccagactccgttggtagagtggtgatggtctcatgggaaggagatggcctgacgtcagggaagagacctcctgacttcaggggaagatgacctgcctttcccatcccctctacagctcccctctctgctgagagctgttttcattgctcaacaaaattatctgccytcaccattcttcagtaatcaagtgtgacctcattcttcttggatgctggacaagagcttgggacccaccaagtatgagtactcagaaaggctgtcacactggccctttgcctttgctggtggagggcagccacctcacgcaacagggtcggggctgactgagct

SEQ ID NO: 776710 - DNA, 643 bp, Homo sapiens
atttttttaaataactgtggtttaagccaatttttttgaagcaaaatctttggttgttcttggcatttcttaatttgcttacttgggggtattctccccaaatccacacatataattttcattgcctctaaaaggggttatgaacacacatctgaaggagaattgaccacttgttttttgatgttttaaagccaactaaagcataaacctcttgtttcctttctgatcccaggctttttcaataagaacaatgcttatgcaagatttcctagggggattttgtggtttgaggttttaataatctaggctaaaattcaaataggaaccacagctgcttggataagamtcttagaccttttcatttgaactgtagtgaacttaccagaatttttaactattctgagctctatctgatatacaagcagggcatgtggtagctgtatttcccacataagaatatctgtatacttgcaaattgtataaaataatataaaataatatgcatgtttcctttaatacttgttaacttgtttaaaacagatttgactcttttaaacagcgatgaatattggtgttctgattcagtaaggggaagctatgaagaatactttaacaattagatcttcaggactgttaaaataga

SEQ ID NO: 776711 - DNA, 642 bp, Homo sapiens
tttaaaacatagagttttaacattttgtgagaggtttcgcttttgttgttcacctccatgctatttttttttctttccgtgtaagatttttagctaaaaaacactacactttcagtaatatgttttaaaaaaaatttgaaaccacctatttctaaccgagtccttcccttcatgagtaaagagtctggagcccagagagatgaatttcttgcattattattattttgatgtgttgctagaaaaagacatgtgggtttactcagtaaaatctggggagttattttcaccttcccacatagtcaagrcagagccattcctagagggactagaattcgtggactatttagaagaaatagaggaagatggctttgtgggtgagggatgtatggctggtacagtgactcctcatcttttatttttgttttattgatcactcttttgaaataaatgtatattttcttctttccccaaatgataacttattaagtatataataaacagaaaccattttatcattttgttaaaagtttaaatataaattaatttatgttcgaaaaaattatctggtcaaaccatgtattctggtgttcttttagaaaatacgaccattctttggcgctgaagaggttgcagcaagtaggg

SEQ ID NO: 776712 - DNA, 610 bp, Homo sapiens
aatgaaaattatttttgctttcctttttttatcttaaaaatttttaaagggattttccaagtttatatactgtttatctcatatctggaacacttttaaattttggttagatttggagtaagtttgattatagtcttttctatagtcttttcttgatccttaaagaatgattcatttgattgctgtttcttatttcactgaacttttaatcatgtcacaatactatttttaggagtgtctatggatttctactgcctgagaagataaagccccaagtcttcacattaaagactctcataatctcacattggctttcttttcagtccttatgatccagaaacaccaggttacccrttagttgccaagcacattctttaccgtcttcttagtgtccattcatctaccctcccgccaccatatctcctccttcatgaagctttcccagcacaggaaccccaggtggaatgaatcacttctgctcccagaatcctctgctcccagtgatggccattgtggatcctgctgttcctatgtgtataacccccttgctgtgtaggctgtaagaagcatgaggacagggactgtgcctattcttttttataactggcat

SEQ ID NO: 776713 - DNA, 443 bp, Homo sapiens
cttttcccccatgttttattttaatattttatttatcatgtcttacatttaagtctttaatccattttagtggatttttatatgtgtcatgagatagtgctctgatttcattcttttccatgtgaatatctcattttcccaacacaatatattaaaraaattcttttttccatagtatattcttggcacccttggtaaatataagttgaccatatatgcctgggttccgttctgggttctgtattctatcccatttgtctatatatctgttttgatgtcagcaccacactgttttgattactgcaggctttgagggtctttagtgtttccaaatgaataataggattttttttctatttctgcaaaaatgccattgggattttgttggagattgcattgaatctattgattgatttgggaagtaagaacattttcttttctta

SEQ ID NO: 776714 - DNA, 443 bp, Homo sapiens
cttttcccccatgttttattttaatattttatttatcatgtcttacatttaagtctttaatccattttagtggatttttatatgtgtcatgagatagtgctctgatttcattcttttccatgtgaatatctcattttcccaacacaatatattaaaaarattcttttttccatagtatattcttggcacccttggtaaatataagttgaccatatatgcctgggttccgttctgggttctgtattctatcccatttgtctatatatctgttttgatgtcagcaccacactgttttgattactgcaggctttgagggtctttagtgtttccaaatgaataataggattttttttctatttctgcaaaaatgccattgggattttgttggagattgcattgaatctattgattgatttgggaagtaagaacattttcttttctta

SEQ ID NO: 776715 - DNA, 588 bp, Homo sapiens
gtttctagtgcccaagcagtccccacatccagacattccagcaaggagccattggctggcctttttaaggtgatggaacttacatttgcagtactctgccgtggagtatattcactcttgatatttgccaccactttgatccaactttcattttgtttagcagctacattttgtagtttgtggttgcagatgcttctcagtttcacgaggctttctcttctacgttttttcattcttcttgttgcctttaattgattttaggaaggagagtgggaaaacatggttttactccattgttaattggacagcctggtatcctttttatccccctctgtatactttcgtggtttttgctaacaggagctggaaatatgagggtcattgcctcccatctgcayatttgtttcctctcttgtgtattcttgcaacttactggctttggacttgattcatgacattctttcatgcccaaaatatgtatggaacaccctttcagtgccagagccctgatcaatattttgtaattcttgcacgcataaaatatacagtccagaagcaggtaagcatcaaccgaccgaacaaaaacat

SEQ ID NO: 776716 - DNA, 647 bp, Homo sapiens
aaacttccatgtggtctgctatttagggaccacgtgttaccaaatatgactcatgcctcatcaaaagggaagagaagaggactaggagttactgaacctattatctgtgggcacctttatcatctcatttaatccttacaaaaatgtgattattcctatcttagagatgaagaagctgaggctcaaagatgttagacaacttggaggccaggtatgaacgtatttgttccactgtcccatgatgattatctctattataacctgcagctcctttccttctttccctgccccaccgcataaccatacacacatacctgacccagtagatttaatgtgcctctttctgggctacaactccagscatatatccaattactgctatcgtccttgatttcctaaatagtgatttatcaaactagttgtttctagtacttaacctataaattacacatgccattcctacaaagtcccaggggttttaataaaacttgactttttaaacttcagtttatttgagaaaaaaaaattaagaaatttttgaaaggcaacaagaagaagagatttgctctaagacattaaacatagttatataagaaatatctaggagttagtaccagaagtaaaacagacaattattatcagtggat

SEQ ID NO: 776717 - DNA, 591 bp, Homo sapiens
gtctgaagagattgcaacttttccttgattactctccttcacaggatccttattttgtgagaagacctctgatttttccaagattcattagccaactctgctgacagaggtgtgatagcactgcagtcagggtcttggagtctgaggcttctgacttgccagctgtgttagtctgctagggctgaaataagaaaatgccacagatcaggagggttaaacagcagaaattcattcctcacagttctgaaggctggaagtccaagatcaagatgtcagcaggtttggtttctcctaagacccctaggcctttgcagatgaccaccttttcactctgtcgtcaatggctttttttytgtgcacgcacacctctggtgtctcttcttcttcctcttcttacatggatgccagtcatattgaattagggccccacatttacgattttatttaatctcaattacctctttttttttttttttttttttttttttggagacagagtctcactctgtcccccaggctggagtgcagtggcgtgatctcggctcactaaaacttccgcctcctgggttcaagtgattctcttgcctcagc

SEQ ID NO: 776718 - DNA, 553 bp, Homo sapiens
gttcagaatggtatttcctttgtattcttctaggatttttatcattttaggttttacatttcggcctttaatccatcttgggttgatttttatatatggtgaaaggaaagtgtccagtttcaatcttttgcatatggttagccagttatcccagcaccatttattgaataggaagtcctttccccattgcttgttattgtcaactttgttgaaaatcagatggttgttaactgtgtggctttatttatgggtttttaatcctgtttcattggtctatgtgtctgtttttgtaccagtactatgctgttttggttactggagccttgtagtatagtytgaagtcgggtagtgtgatgcctctgactttgttctttttgcttaggattgctttggccatttgggctcttttttggttccttatgtattttagaatagttttttttctaattctgtgaaaaataacattgcattgaatctataaattgctttgggcagtatggttattttaacaatattgattcttcctgtccatgagcatggaatgtttttccat

SEQ ID NO: 776719 - DNA, 622 bp, Homo sapiens; identical to SEQ ID NO: 774608

SEQ ID NO: 776720 - DNA, 625 bp, Homo sapiens
tatgtaatctaaaatatcaaaacatcactgactttgcattataattaaatataaaaggtgactgacttaagccaaatttaaaaaaaaaaattgagacaaggtctgtgtcatcagaggtggtaagcagtagtgcaaacacagctcactgcagcattgacctcctgggctcaaactctcctcccatctcagcctcccaggcagctgagatcacagatacacascaccacacccagataatttttttttttaagtaaggacaaaatctcactatgttgtccaggttccaaataaattttaagagcctaattttaactattcaaaaactaagcaaatacctgaaaattatttcttctgaaaaacacatactaaataaaaatctattatacttatggattttcagaggtcttcataagtattaactcataaattcttgtggctttcccaattgtcacatgtctcctttcatgaaatattttgtaaatttttactatggtattggacagagcatgaacctcagaattgcccaaatctgagttcaccgacttaatcaagcacatattaatatataatcttggataatttatcaatttaaactgaagagctttatcttcaacatttctaaatt

SEQ ID NO: 776721 - DNA, 633 bp, Homo sapiens
ggtgggcggatcacaaggtcaggagatcgagaccatcctggctaacacagttgaaaccccatctctactaaaaatacaaaaaattagccagtcgtggtggtgggtgcctgtagtcccagctacttaggaggctgaggcaggagaatggcctaaaccccagaggcagaggtggcagtgagccgagatcacgccactgcactccagcctgggtgacagagcgagtctccatctcaaaaaataaayaaataaataaagataatttctattgaagatgattgctataaacagtgctttgcacaaatggctacatatctctttttactttaggtaacatgatttataagctactttcacatatatcttcttagatcatcacaaggatttgagatcatcatttaatcaggactgttgtgacttgcttgaggccacatgcctagtgtttgacatcatacttcaagagacagattgaaagttctgcagaaatagggactggtggctgttctctcccttactccctagcagttaatacattgcctggtacagagtaagctatccatatttgtggactaactgtttaaactcctgcatatttatttatacgtgtaaataagttatagcattataaaatcaaca

SEQ ID NO: 776722 - DNA, 504 bp, Homo sapiens
gctgtcaccctctgaggaggcagcgccaggggaggggcgtcccgggcggccgccgccgccagggggaggcgctgggagtgggagtgggaacgggacctcagcggtcgagctcggccgggaccctaggtgcgggggaggcggggtcccgggctccggctgcctgcccagacctggcggggatgggcccgtgcggctccgggtgtgggacgtaycctgggagcgcccggggttattcccactgactcccgggaggtgggtgtgcgcccttcgccccctgcctggtctgtggggatccatcgttgctggagactggaggtcgggggccatgggagccccggggcgaacggtgcgggcctgggtcttgtggaaaggaggagcgaccgcctgagcgtgcagcaggacatcctcctgacctggtaataattaggtgggaaggatggttgggggcggttggcgtaactcagggaacactggtcagactgctccccaaacgattacagtgtt

SEQ ID NO: 776723 - DNA, 589 bp, Homo sapiens
tcacacacacacacacaaaatgatgttctacagttagagaagaacaagaaagtggagagagaccctctctataacataggttgtaaggactaccgaaagctaactgtggaacaggatcattggcatatgctctccagagtctaaggccccacacaaggcacatcatatagcagtctactgctggagaaatctgagttacattgttcactgaatgtttcagacaccgcagcaaaaagcaacctttgttcctgcccacactaatcgcatgacacaaacaaaaatgaaacagaaatataaaacaatctcgacataaataattatctcatgatctactgtttttctacatcagatgatttrcattttttagaaattgggagacacataaaagcaagttagaaatttgagttatgagttataatattttcaaaggataaaaagtcaacagaatcaaattcagagataattcagatgttggaactaaatgaaagtaatttaaaataataatgatcaaaatgtgaaaggatctagttaaaaaaagacaacatgtatggaaaaatgaggaatttcagcaaagatgggaacagtaaaa

SEQ ID NO: 776724 - DNA, 504 bp, Homo sapiens
tatttatacaaacagattattctcattccagagtgggctttttgggggatgaagtttactaagcaatttacaatgttctgtgaaaatcatcagctttttcaggttctgtagtaaagttataaaagttctaggcaccatatctttttaaaccataagaaaatacgagggcacatgygtgtatgtatgtatgcatgaatgcttttatggcagttttattcgtaattaccaaaaactggaaacaacccaaatgaactggggaatgaatacagaacctgttgtacatccatacaacgcaatgctactaagcaacagaaagtaattactgatacataaaaacatggatgaatctcaaaatacattaggttaaataaaagacgtccgtctcaagaagccacatactgagtcaagcagggggatcccttgagaccaggagcttgaggccagcataggcaatataacaaggcctcccatttctattaaacaaacaaaaattaaaacaaaaag

SEQ ID NO: 776725 - DNA, 548 bp, Homo sapiens
agatgtgtttcccagtcttacagaaccatattcaaatacaccttaataaagataattttcaaccatacatatgatagaatcataattattactcttatactaagaccaaatagatgctgcttaaaccactgaggcaagaacactaaaccttggtctgatctgcctccaagtttgaaaactcccttccattaacattttgcctaaaaattaaacaatatttgtaaattagtcacaaaatcctttaagattaaaatatacatatattcttaaagaaaactacctagtgcttgcaaccaartcattttaggagaaaattagctttgttaagaagggaataaagcccaagtaataaatattaacatccatcttttccagaatcatgatggtcaaaacaatgagactcttctcctaattttggttcaaaataccaaaatttttacttcaaaaactctctaacagattattataaaatcttaacatttgcctaaaagtctttaagtattttcacataactaggcagtataacaaaaaaagagcacaggcttagg

SEQ ID NO: 776726 - DNA, 548 bp, Homo sapiens
acaagctttactggggactaaaggaacctccatgatttagcaggagacaagataagggtaatcaccctggcacctggacccatttagattaagaaaatttactaaggctccagaggaaggtcttcagtactcagattttagttataggttagaagttgattacttggccggayggggtggctcacgcctataatcccaacactttggaaggccgaggcaggtggatcacctgaggtcgggagtttgagaccagcctgaccaacatggagaaaccccatctctactaaaaatacaaaattagcctggcatggtggtgcacacctgtaatcccagctacttggaaggctgaggcaagagaatcacttgaacccaggaggcagaggttgcagtgagccgagatcgcgccattgcactccagcctgggcaacaagagcaaaactccgtctcaagaaaaaaaaaaaaaaagtttattacttatgtctttagatgaatgcacacttacatacttacacatagacatatagcttagaaggtgtataagctctgga

SEQ ID NO: 776727 - DNA, 548 bp, Homo sapiens
acaagctttactggggactaaaggaacctccatgatttagcaggagacaagataagggtaatcaccctggcacctggacccatttagattaagaaaatttactaaggctccagaggaaggtcttcagtactcagattttagttataggttagaagttgattacttggccggatggggtggctcaygcctataatcccaacactttggaaggccgaggcaggtggatcacctgaggtcgggagtttgagaccagcctgaccaacatggagaaaccccatctctactaaaaatacaaaattagcctggcatggtggtgcacacctgtaatcccagctacttggaaggctgaggcaagagaatcacttgaacccaggaggcagaggttgcagtgagccgagatcgcgccattgcactccagcctgggcaacaagagcaaaactccgtctcaagaaaaaaaaaaaaaaagtttattacttatgtctttagatgaatgcacacttacatacttacacatagacatatagcttagaaggtgtataagctctgga

SEQ ID NO: 776728 - DNA, 548 bp, Homo sapiens
acaagctttactggggactaaaggaacctccatgatttagcaggagacaagataagggtaatcaccctggcacctggacccatttagattaagaaaatttactaaggctccagaggaaggtcttcagtactcagattttagttataggttagaagttgattacttggccggatggggtggctcacgcctataatcccaacactttggaaggccgaggcaggtggatcacctgaggtcgggagtttgagaccagcctgaccaacatggagaaaccccatctctactaaaaatacaaaattagcctggcatggtggtgcacacctgtaatccmagctacttggaaggctgaggcaagagaatcacttgaacccaggaggcagaggttgcagtgagccgagatcgcgccattgcactccagcctgggcaacaagagcaaaactccgtctcaagaaaaaaaaaaaaaaagtttattacttatgtctttagatgaatgcacacttacatacttacacatagacatatagcttagaaggtgtataagctctgga

SEQ ID NO: 776729 - DNA, 573 bp, Homo sapiens
tctgtctcaaaaaaaaaaaaaaaaaaagactatggaagagacatactatggaataatgtaaaactgttaaaaagaatgaggcaaatataaaaaagtatggggtaaatatatacgtattgaaatggaacgacctataagatatattattaaatggaaaagcaagggattggccaggcgcagtggctaacgcttgtaatcctagcactttgggaggctgaggtgggtgaawcacttgaagtcaggagttcaacactagcctggccaacatggtgaaaccttgtctctactaaaaatacagaaattcactgggtgtggtggtgggcacctgtaatcccagctaattggaaagctgagacaggagaatcacgtgaacctgggaggaggaggttgcagtgagacgagatcgcgccactgcgctccagcctgggtgacagagtgagactccatctccaaagaaaacaacaacaacaacaacaaaataacaataacaacaaaaaacaaaaacaagcaaaagcaaggggcagaacagtgtatatggtatgttaccatttatgtttttaaaatatgcacatt

SEQ ID NO: 776730 - DNA, 507 bp, Homo sapiens
aaacagagtcactgttttttttttttcaccaatgttcttcaaaataaaccaaatatatatgaacatgtgactattaaataaactttaacagaggggtgaccagtcttttgggttcctttgcccatactggatgaaraaaaattgccttgaaccacacctaaaatacactaacactaatgatagctgatgagctaaaaaaaaaaaaaaaaaactgtgaaaaaatttcatagtgttttaagaaagtttacaaatttgttttggtccacattcaaagccatcctgggccacatgcagtctataggctgtgggttgagcaagcttgttttaacacatagaatagattgaagaaaattttgtttcaaattagcatacaatcccatcacccagcatcagaataaaacagtttttcgtggtttgttcttcctagttaatatcctactgcatacagagtattctgacttttcttgtgtcattatgttttatacaatattcacttatgactttgct

SEQ ID NO: 776731 - DNA, 507 bp, Homo sapiens
aaacagagtcactgttttttttttttcaccaatgttcttcaaaataaaccaaatatatatgaacatgtgactattaaataaactttaacagaggggtgaccagtcttttgggttcctttgcccatactggatgaaaaaraattgccttgaaccacacctaaaatacactaacactaatgatagctgatgagctaaaaaaaaaaaaaaaaaactgtgaaaaaatttcatagtgttttaagaaagtttacaaatttgttttggtccacattcaaagccatcctgggccacatgcagtctataggctgtgggttgagcaagcttgttttaacacatagaatagattgaagaaaattttgtttcaaattagcatacaatcccatcacccagcatcagaataaaacagtttttcgtggtttgttcttcctagttaatatcctactgcatacagagtattctgacttttcttgtgtcattatgttttatacaatattcacttatgactttgct

SEQ ID NO: 776732 - DNA, 581 bp, Homo sapiens
taactatgatatctattgattgaattacttgtggtaaatagcttgacttctctctttttcagtttctttatctcaatgatactgacataaaaactttgaatatttacacataagaatgatttaatgacgcttaattgaaaatgtttatgtatgaagttatagaaatttttcagaaaataatgatgatgtctcttttcagtccattactagaatcatggtgaaatrtactttaacattagaacagtttggatgttctaatgtagctacaacccctgaaaatggatcctatgaggataggcacccagtgactatgccatttaactaaggttacttccttagatattggtgattgatccaggccagctgaattctctcatgttaggatttggaatgcagaataaatgaagacagatcctgaaaatcactgatgttattaaattgtattagtctgttttcatgctgccaatagagacatgcccgagactgggcaatttacaaaagaaaagagtttaatggacttacaggtcctagtggctggggaggcctcataatcatggtggaagataaagaggagcaagtca

SEQ ID NO: 776733 - DNA, 391 bp, Homo sapiens
acatggatccctaaactgtggcctcagattggtatcagtgtgtggcccattaagaaccacaacaggaggtgagtgtctggtgaggcagcagtaccacctgagctctgcttcctgtcagttcaggtacagcattatattataataggaatgtgaaccctattgtgaagkgcacatgtgagggatctaggttgcaagggtttttggttgcaggctccttatgagaatctgatgcctgatgacctgaggtgaaacagcttcatcctgaaaccaccccacacccacctcatccatgaaaaaactgtcttccaggaaattggtccctcatgccaaaaaggttggggacccctgctttaaaagaaggaaatcttatcatatgccataagatggatga

SEQ ID NO: 776734 - DNA, 523 bp, Homo sapiens
gattcagagccaaaggacatttaatatgtcagccttttatattctttaccttacttgggtgacatcaattcacttgtttaaactaaaaaacctacgattccttcttaattcctctcttcctcacttctcatatccaatccatagccagttttccttttgctacctctaaagtatgtcctcttctttcccatgactatgcctcctcttcaacctctcatccytcttgccttggctgaggccataattctggcttgcacttacgaatttaagactcaattctgagaaaatatattttctatccccagagtaattgataaaattaataataacctgatcatgttaagcaatatcacataaggttaagagtgggggctttggaggctgactttctgaatcttaactcctccatttactaaccttgtgaactacagtaaattaaataaactcactgttgttgcatttttctcatctcaaaatgagttaatattcactgctaactcatagagttggtatgaatatttaa

SEQ ID NO: 776735 - DNA, 537 bp, Homo sapiens
tagtttaggcctgataatgtagtcattaatatagatcaccaaatatttctgattgttctcaaactaatggattttctttcctcttcttgatacataggagatatgtattccataccctttgcatttgggtataggctcatacatgtatttgtccactgaaatatgaatagaagggatatgtgatcctttttggtggcactttgaattgccaatatttaattyatcaaatattctttatctgcctgccaaaaccggcaatgtctcagatactgaatccatcagtgtggattctgaagtaaggaaaaaatggggtaggtctttagcctacttcaaagttgatgtagcatgaaagagaagaatgaactttgttgttccagttcactgaaattctggaggctctttgttactgtggcataacctagatcatgtgtgactaatataggtagaaatagcatctggaaggacgggatcatattttactaagattgaaatgaccagggtaggaagaacaattagaattttagttgggcacattga

SEQ ID NO: 776736 - DNA, 479 bp, Homo sapiens
aatatagtatcccaagtaggattagccctagttacctactgtggtggtgagctcaataatttaagagttactttttcttcctttcttaggttgctcttcccagttctccattcttgttccctatgatcatttcccaaaataaattccccgcatgcaagacctggtctcaggctctgacttctggggaaaatcgaggctaatatacttggttccagaagtgaccataggaagcagaacctcaagatgttatggtggaactgcttcattcactgtccaaacagtgggaagaactttgtttgtggtggtgagttggtaacaacttctggcacccaatgcwtcagtgaagtgaccgaaaggtctagggcatgtgaggaacagtgcctccaaggtaaagaacaatgtattgtttcttacatctcctgttactgggaggcactgtatttggtgtggctctttcaatttgggaggttgcattgaat

SEQ ID NO: 776737 - DNA, 631 bp, Homo sapiens
tgaaactgaattaagaggggaaatagatggcagtgacctaacaacaaaggaacccgtagctaagggtggatccaggtagtgccaaccttcctcagacaggaggtacactagagttcctgatgggtctgagtcccaggccaaccacacatttcagaacttccagggacaaaataacagtaattttaacacaagccaaagcaaatatcttccaaagttaataagacatattagcagcaagatcagaaaggcagggaatatggaggggtaggtacataagagcctgccctattcactctctgtacttgtgtggatatttgaaatatttaaaatatttagacattttctagggaaagacaaagaaacatgaaaatctcttgccatgaaccagaatcctgattmgatgcagcagaactggacactgcaggtgaaggaacactgctctgctgctccacacacccggacacatactccctggtagggagatatgggctggcccacagccccaccctgcccatgggccaggaggaaagcaaggtttcacccacctcgccactctgtcaatgggcagtggtatctagagtgcaaccgtggggattctgagccacttcccaggctctgagaatgaggactg

SEQ ID NO: 776738 - DNA, 631 bp, Homo sapiens
tgaaactgaattaagaggggaaatagatggcagtgacctaacaacaaaggaacccgtagctaagggtggatccaggtagtgccaaccttcctcagacaggaggtacactagagttcctgatgggtctgagtcccaggccaaccacacatttcagaacttccagggacaaaataacagtaattttaacacaagccaaagcaaatatcttccaaagttaataagacatattagcagcaagatcagaaaggcagggaatatggaggggtaggtacataagagcctgccctattcactctctgtacttgtgtggatatttgaaatatttaaaatatttagacattttctagggaaagacaaagaaacatgaaaatctcttgccatgaaccagaatcctgattagatgcagcagamctggacactgcaggtgaaggaacactgctctgctgctccacacacccggacacatactccctggtagggagatatgggctggcccacagccccaccctgcccatgggccaggaggaaagcaaggtttcacccacctcgccactctgtcaatgggcagtggtatctagagtgcaaccgtggggattctgagccacttcccaggctctgagaatgaggactg

SEQ ID NO: 776739 - DNA, 631 bp, Homo sapiens
tgaaactgaattaagaggggaaatagatggcagtgacctaacaacaaaggaacccgtagctaagggtggatccaggtagtgccaaccttcctcagacaggaggtacactagagttcctgatgggtctgagtcccaggccaaccacacatttcagaacttccagggacaaaataacagtaattttaacacaagccaaagcaaatatcttccaaagttaataagacatattagcagcaagatcagaaaggcagggaatatggaggggtaggtacataagagcctgccctattcactctctgtacttgtgtggatatttgaaatatttaaaatatttagacattttctagggaaagacaaagaaacatgaaaatctcttgccatgaaccagaatcctgattagatgcagcagaactggacrctgcaggtgaaggaacactgctctgctgctccacacacccggacacatactccctggtagggagatatgggctggcccacagccccaccctgcccatgggccaggaggaaagcaaggtttcacccacctcgccactctgtcaatgggcagtggtatctagagtgcaaccgtggggattctgagccacttcccaggctctgagaatgaggactg

SEQ ID NO: 776740 - DNA, 567 bp, Homo sapiens
tttgtttagaagggatgtcattatcctccaggaaaggtcacagatgaccaagacacctcacggtggtgccctcaagaacactgaccagattcaaactcagatacaaaaagatgcttctagcttgaattttaacaagcagagtttctctttaattaacttgatcgcctcacagctcattagagagagtcagacagcacagttgtcaggatggctcgtgtttctagaaaactcccacctatggcttggtaaaacggtatggatcktggagaggccatttccttggatgagatttagagtctcaggggtgtggtcagtgtcctctgacttcaaataaaaagagtgttgtggggtagataatggaggcttaccaccagcttacacagcctgagaatcaaaaccactgacagctccgtgcaggcaatggggacacctggacgggcggaaccactgagtttcttgtctcccgtgacaggtctaatcaggacttccccaaaacggggcttgcctgtgccctctgacctgcatgtctgaacacagcatggataggcctggcaggatatggaggag

SEQ ID NO: 776741 - DNA, 612 bp, Homo sapiens
caagaacactgaccagattcaaactcagatacaaaaagatgcttctagcttgaattttaacaagcagagtttctctttaattaacttgatcgcctcacagctcattagagagagtcagacagcacagttgtcaggatggctcgtgtttctagaaaactcccacctatggcttggtaaaacggtatggatcttggagaggccatttccttsgatgagatttagagtctcaggggtgtggtcagtgtcctctgacttcaaataaaaagagtgttgtggggtagataatggaggcttaccaccagcttacacagcctgagaatcaaaaccactgacagctccgtgcaggcaatggggacacctggacgggcggaaccactgagtttcttgtctcccgtgacaggtctaatcaggacttccccaaaacggggcttgcctgtgccctctgacctgcatgtctgaacacagcatggataggcctggcaggatatggaggaggacacagaaggggaggagtgggtgggagcagggccatttccttatataaataagtcgcagcctctcgtattgcaacagttgtgaaaaagtccacacccatttcagagttttgaaaga

SEQ ID NO: 776742 - DNA, 612 bp, Homo sapiens
caagaacactgaccagattcaaactcagatacaaaaagatgcttctagcttgaattttaacaagcagagtttctctttaattaacttgatcgcctcacagctcattagagagagtcagacagcacagttgtcaggatggctcgtgtttctagaaaactcccacctatggcttggtaaaacggtatggatcttggagaggccatttccttggatgagatttagagtctcaggggtgtggtcagtgtcctctgacttcaaataaaaagagtgttgtggggtarataatggaggcttaccaccagcttacacagcctgagaatcaaaaccactgacagctccgtgcaggcaatggggacacctggacgggcggaaccactgagtttcttgtctcccgtgacaggtctaatcaggacttccccaaaacggggcttgcctgtgccctctgacctgcatgtctgaacacagcatggataggcctggcaggatatggaggaggacacagaaggggaggagtgggtgggagcagggccatttccttatataaataagtcgcagcctctcgtattgcaacagttgtgaaaaagtccacacccatttcagagttttgaaaga

SEQ ID NO: 776743 - DNA, 612 bp, Homo sapiens
caagaacactgaccagattcaaactcagatacaaaaagatgcttctagcttgaattttaacaagcagagtttctctttaattaacttgatcgcctcacagctcattagagagagtcagacagcacagttgtcaggatggctcgtgtttctagaaaactcccacctatggcttggtaaaacggtatggatcttggagaggccatttccttggatgagatttagagtctcaggggtgtggtcagtgtcctctgacttcaaataaaaagagtgttgtggggtagataatggaggcttaccaccagcttacacagcctgagaatcaaaaccactgacagctcygtgcaggcaatggggacacctggacgggcggaaccactgagtttcttgtctcccgtgacaggtctaatcaggacttccccaaaacggggcttgcctgtgccctctgacctgcatgtctgaacacagcatggataggcctggcaggatatggaggaggacacagaaggggaggagtgggtgggagcagggccatttccttatataaataagtcgcagcctctcgtattgcaacagttgtgaaaaagtccacacccatttcagagttttgaaaga

SEQ ID NO: 776744 - DNA, 677 bp, Homo sapiens
ttcttatttggcccagtgcaactctttatttattaaagccttggggctgttcaggccagggttcagtgtattagtttatgtagtttgcctccctagacagaagagaaatttgaaaacccccagctttagggtgacccagtttgrgctgagatattaactctgaagctttttctttctcttttcttcttacgctgtaaaaggtatttggggccatgctagcaaaaggtcaggattcaacacctcatttctccccttaccaatgcctctctcctccttcactatccctacatgaattgtattcttttttgtttatttgtttttctgagatggagtctcactctgttgcccaggctggagtgcagtggtgtgatctcggctcactgcaacctccgcctcccagattcaagcaattctcctacctcagcctcccgagtagctgggattacaggcacatgccaccacgcccagctaatttttgtatttttagtagagctgggggttcaccatgttggtcaggctggtctcgaactccagaccttgtgatccgcccgcctcagcctcccaaagtaatcccacgcctgggattacaggcgtgagccaccgcgcctggccatgaattgtattcttgatgtaattcggcccaccaatatttcttgaatactagtaatatgcaaacc

SEQ ID NO: 776745 - DNA, 539 bp, Homo sapiens
caaagttttgagatgtggcttgttcaaagctctgcctctagccctgtaactctgcgcagtgttcagagttgttcttcacgggtcccatgactgcagagaaagcttggagcttgcaggcagtggttccaggaacttctttttcttcaccttttattcctggtgtttagcctggaccttgasattagttggagagatatgaagggatgagacccagtttaggccacaggatctccatgaaacctcttgaggcttctctgcagcccaaaagatctctgatatggtttggctgtgtccccacccaaatctcatcttagtagttcccataatccacatgtgtcgtgggaggtaatttaatcacagaggcggttacccttatgctgttctcgtgatagtgagtccttacaagatctaatggttttatagggaccttccccccccttttgcttggcacttcttgctgccaccatgtgaagaaggacatgtttgcttccccttccctgaggccttggcagccatgctgaactgtgagtcaaacctct

SEQ ID NO: 776746 - DNA, 627 bp, Homo sapiens
cagggaagggaagagtccgatcagccgtcatcgccgccgggcacaaagaagggctggagtccaccaccaaaagaggtgtttgcattgccaccaaaaaaggaagcaaaactatttaatcattattcttgttaggtaagattcagtaacatttttccaagcaataaaatactacagagaacacttggatgctgactgctcttaagacagtagctcaagtcttaggcacaatcagggaaaatatgaacatatagttaaggaattaacgaaaagagaaggataaaaaataatttttctttgataagcaaagttgggaatctctgactaatataatgataaaggctgtaccatttaataattgagaataatgtcagtgcttacagaaagagggaggtcaatttgtataaaaaatagtacactaccgaaatactacaaaactaagcatgaataggaaaagtaatgatggaagcccacatatgtcaaaagttwggttaaagcttcaggccctggagacttccaagccgggttctttaatgagtgaatgaagttaataaacatgtagataccatctgaaggaagttatgaaagcctacagactctgggtattttatccttaaattacaaatgagg

SEQ ID NO: 776747 - DNA, 649 bp, Homo sapiens
cttatacacatgctgctgcaagcttatgtcttcagttttgagcttctgaattctgggatctggactggtggccatggtaaagcctgagcgtgcatgtgtatcccagcacctgggctggcagctgcagggcagggtctagccgagtataggcccatcctgtggccagtgtcacagaggcctcgatggaaacaaagctggctgttgcagggctagcttggtcttgctttttcaaaaataacttctatggttagctttgttttccgtgagcaattcaaatataattgttaagaatgagtaaattaggtaaatggaataaacatttctaaataaacttgtcctaggttcaaagatttttaaaaataatttaaaatctgaaagttgtgttatattaagttaaataatagatcatcatgaaaygtctgagtcatttctaaataagttaaggtactgaaagattaattaataagcataagttccagtttatatactttggcattttgtttttataggttattttaaaaagcaaaatgtatttggatttgttaataaacatacgaagattctaaaaaactaatgtttctaataattttaaaatgtgtatttataaattactagtgcaaacagtcaaaattgcttacttctaggtttt

SEQ ID NO: 776748 - DNA, 557 bp, Homo sapiens
atctcggacatccaactcttctgccctcagacattgaagggtctggtgtttgggtctttagactccaggactccaccctcgaattctcaagtctttgaccttggactgggggaagtcacgccatcgtcaccccattgacccccctggttctcagatcttcacactcgggctggatcacaccactggctttcctggttcttcagctcgcagatggcagatgatgcgacttcttagcctctgtgattgcgtgagcctgttcccctaataaatctcctggtgtatgtctctgtatcttattggttctgtttctctggagaaccccaatacagggggaggaagagacacttgctctttataaatgggcggtgtrtcacaattctgtggtgattttgagctaattttctgctttggaaccactgaagaggcttattgaagactggaatggaatggaattttgtaatggtagagctgtcgcgtatgccaattacaagtgttgcgggcaggacagttacttcacaggcagaagtagtgtctgtgtgattctctgagaagccctg

SEQ ID NO: 776749 - DNA, 622 bp, Homo sapiens
ccaaaaacaaaggctcttccactcttttttttttgagatggagtctcactccatcacccaggctggagtgcagtggcgtgatcttggctcacctcaacctccgctccccaggttcaagtgattctcctgcctcagcctcscaagtcgctgggattataggtatctgcaaccatgcgtgactcatttttgtatttttagtagagatgggttttcgccacgttggccatgctggtctcgaactcccaacctcaggtgatccaccagcctcgccctcccaaagtgctgggattacaggagtgagccactgcgcccggcccgactcttgaactctctaaagaacatgaacaagtggtgaaaaaaaacagaggatattgttttcgcttgaacaaagatcacttgtcatttttaaaaaacaaatgttatttcatttatgaaaagaagagcatctatatatgtaaagattgctacgtacatacaaaggttatcatttactcaaggtacagatcatgcctgatgcatgcacggattcccagtccctcagggtacagatcacacctgatacacgcacggattcccagtccctcagggtacagatcacacctgatacacgcacggattccca

SEQ ID NO: 776750 - DNA, 622 bp, Homo sapiens
ccaaaaacaaaggctcttccactcttttttttttgagatggagtctcactccatcacccaggctggagtgcagtggcgtgatcttggctcacctcaacctccgctccccaggttcaagtgattctcctgcctcagcctcgcaagtcgctgggattataggtatctgcaaccatgcgtgactcatttttgtatttttagtagagatgggttttcgccacgttggccatgctggtctcgaactcccaacctcaggtgatccaccagcctcgccctcccaaagtgctgggattacaggagtgagccactgcgcccggcccgactcttgaactctctaaagaacatgaacaagtggtgaaaaaaaacagaggatattgttttcgcttgaacaaagawcacttgtcatttttaaaaaacaaatgttatttcatttatgaaaagaagagcatctatatatgtaaagattgctacgtacatacaaaggttatcatttactcaaggtacagatcatgcctgatgcatgcacggattcccagtccctcagggtacagatcacacctgatacacgcacggattcccagtccctcagggtacagatcacacctgatacacgcacggattccca

SEQ ID NO: 776751 - DNA, 648 bp, Homo sapiens
aactgtttacagtagatgctgaccaagtgttaggtgagagtggtgacgatgagtgtggaaatctgccttaattttatgagttaccaacctgtcattgacttcatgttcattctggcaagagctaagagagatactattgagtattttaacacagacttcacttgcttgggtgaactgtagacagaatccatctttaatgacctatttctgttactgaactgaactggtgtctgctctcctgtggggtgaggccaaacatccacaccgtggtttgcagcaggggaaagcaaggtgtttatttgcaggatgccaaggaaagagaattgggcagcttacaattgagacctgacctctcggtggcttacaggtaggagattttaaatctggagaagcagagattgcaggcaaagaagtcaattaatatattgaggctmtatattggtttggcctaaaaaagtagggtgtcatgaagcagggttccacaggtcacaggtggattcaaagatgttggggtttgcaattgggtaaggaggtgaagctttatctaaataccccatgactttaccaaacaccccatgacttcaactcccttggttattgttttaagctactattaccttcttgctggtcaagttgctcatttactct

SEQ ID NO: 776752 - DNA, 648 bp, Homo sapiens
aactgtttacagtagatgctgaccaagtgttaggtgagagtggtgacgatgagtgtggaaatctgccttaattttatgagttaccaacctgtcattgacttcatgttcattctggcaagagctaagagagatactattgagtattttaacacagacttcacttgcttgggtgaactgtagacagaatccatctttaatgacctatttctgttactgaactgaactggtgtctgctctcctgtggggtgaggccaaacatccacaccgtggtttgcagcaggggaaagcaaggtgtttatttgcaggatgccaaggaaagagaattgggcagcttacaattgagacctgacctctcggtggcttacaggtaggagattttaaatctggagaagcagagattgcaggcaaagaagtcaattaatatattgaggctctatattrgtttggcctaaaaaagtagggtgtcatgaagcagggttccacaggtcacaggtggattcaaagatgttggggtttgcaattgggtaaggaggtgaagctttatctaaataccccatgactttaccaaacaccccatgacttcaactcccttggttattgttttaagctactattaccttcttgctggtcaagttgctcatttactct

SEQ ID NO: 776753 - DNA, 536 bp, Homo sapiens
tgtagttcagtcgagccaaagtgacacaaggcaaagtgaccacaatcagcctcttttcgatttggcatacatccacatttcattaaaccatacttaacctccaaataaaggtaataacaaagtcaggcctctgcctaccaaacatacaatatcttgaggacaatcaaaaggcaagctaacctggaaatacatgtccagaaaggcagtgtgaggaggtttgtggatcagcttcccagtcaaacagccatatttggtaaaaattactttttaaaaaattaagtcttgagacattgtccaaagtacatacattaaacatgaagaaacatttattcaagaaaatctattaaactgtggcaagaacagcaatagtctcyggcatttgagccatgacctgcccattcctgtcctctccatactggaggtgataagagagccacttcaggtgagtgtggccaaaaacacagagatcccccacacctcagctcaagggttgtgctatctctccccaggacgaaaagccagcagcatttatcatc

SEQ ID NO: 776754 - DNA, 619 bp, Homo sapiens
tttcttaccaaattttattttaagttcagggtatacgtgcaggtttgttatatgggtaaattgcatgttgtgggggatgggtgtacagataattttgttattcgggtaataagcatggtacccaataggtcattttttaatcctcaccctcctgccaccctccacccttaagtaggccccactgtctattgttttcttctttatgcctaagtgtactcaatgtttwcctcccacttttaagtgaagcatgcagtatttggtattctgttaattgatttaggataatgacttccagcttcatccatattgcgacaaagctcttctttatatgtctggtagaatttagctgtacatccatctcttccagggcttttctagtcagtaggcttttcattaatgattcaatttcagaacttgttattagttggttcagggtttcagtttcttcctgtttcaatcttgggaggctgtgtacttctaggaatgtatccatttcttctaggttttctagtttgtgttcatagaagtgttcataatagtctcaggttttttgttttgttttgttgtaattctgtggggttggtggtgatgtccgctttgtcatttctgattgtgttta

SEQ ID NO: 776755 - DNA, 619 bp, Homo sapiens
tttcttaccaaattttattttaagttcagggtatacgtgcaggtttgttatatgggtaaattgcatgttgtgggggatgggtgtacagataattttgttattcgggtaataagcatggtacccaataggtcattttttaatcctcaccctcctgccaccctccacccttaagtaggccccactgtctattgttttcttctttatgcctaagtgtactcaatgtttacctcccacttttaagtgaagcatgcagtatttggtattctgttaattgatttaggataatgacttccagcttcatccatattgcgacaaagctcttctttatatgtctggtagaatttagctgtacatccrtctcttccagggcttttctagtcagtaggcttttcattaatgattcaatttcagaacttgttattagttggttcagggtttcagtttcttcctgtttcaatcttgggaggctgtgtacttctaggaatgtatccatttcttctaggttttctagtttgtgttcatagaagtgttcataatagtctcaggttttttgttttgttttgttgtaattctgtggggttggtggtgatgtccgctttgtcatttctgattgtgttta

SEQ ID NO: 776756 - DNA, 525 bp, Homo sapiens
tttctttcttttttttttttttttttggatgctgttaaattcttaaatagtatttaacttcagagaaaagccttgctaagtttggattggatttgagagagaaagatttggttttatttgttgtttatgtcttggtttgtcttcatctcaaaggtctaagttataataaattaattctaattctagagagaaccatgaatccagtctcaatggggaaaaagtattgatttatattttcacccttgccgctattcaaagttagaaattcccagtactatcaacccatattcarttctgcagatattgatcctaaaatgatacataaatgcactgtcattgtttttcatttttttcctctggggaaatagagactagctgctctaaatttttcacattgtttataaatattcactatagagcaagaaaatagactagacaggcaccaaatatcttcatcacaactctagtctccttgctagtgcatagaaatcaatagaatcctccatcaaaattttcttgttacat

SEQ ID NO: 776757 - DNA, 657 bp, Homo sapiens
ttttatttgcttgagaaattaactattaaacctgtagcttttaaaaattaccaagtaggctgggcacggtggcttatgcctgtaatctcagcattttgggaggctgaggtgggtggattatgaggtcaggagttctagaccagcctggccaacatggtgaaaccccatctctactaaaaatacaaaaattagccagggcttggtggcgcacacctgtaatcccagctactcgggaggctgaggcaggagaactgcttgaacccaggaggtggaggttgcagtgagccaagaytggccattcactccggctctgggcaacagagcaagactctgtctcaaaaagaaaaaaaaattaccaaataatttgtaacaaattaccaagtgatatgtaaaatctacattcttagtccatcccatagtcttaccccttccctgcctaagtgaaatgggagagttccctgatccccctctcaggacttgcaacaggggagtggcttggctatttggtcaccactgctgctcaaaacccttgagggagagggatcatgcagacaggtgggtgcagaggctggagcaagcactgtgttctctggtcacacggcagtgtcttggggtgggtgcctgcagccacagtgttaactgatgctctcttagcct

SEQ ID NO: 776758 - DNA, 665 bp, Homo sapiens
caagagttcttaaccaggctgaactggctaaaatgacagaaatagaattcagaatatgaataagagtgaagatcattgagattcaggaggatggaaaaacacaatccaagcaaaataaaaatcrcaatatagcaatatgggagctgaggatgaaatagccagtgtaaaaaagggtctgacagagctgaaaaacacaatacaagaattttgcaatgcaatcacaagtactgacagcaggatagaccacgccacacataggaaagaatctcagaaagtgaagactggtataaatgaaataagtcagtcagacaaaaataaagaaaaaagaataaaaaggaatgagcaaacctctgagaagtatgggattatatgaagaggcaatgtctacgaatctttggcatccctgaaagggaggggaagaaagtgaacaatgtggaaaacatatttcagaatataattcataaaaacttctccaaccttgctagagaggccaacattcaaattcaggaaatacagacaacacttacaagattctacacaagaagatcatttccaagacacataatcatcagattttccaaggtcaaaatgaaagaaagaatgttaaggaagatagaaagggcaggttatctacaaaaggatccccatcagactaacagtggacc

SEQ ID NO: 776759 - DNA, 627 bp, Homo sapiens
tagatgcatagattgatttctggatcctctgttctgttggtctgtgtgtttatttttatgtcagtaccatgctgtttgtattactgtagctttgtagtaaattttgaagtcagatggtgtgatgcctccagctttgtttattttcctcagtattgctttggctattcaaagtcttttgtggtttcattaaaaatttaagttttttcttctattactatgaagaatgtcatcaatatttcaatagagattgcccttaatctaaagattgcctgaatagaatggtcatttaactctattaattcttccaatcactgagcatggtctttccatttgtttgtattctcttcaatttcattatcatgttttgtagttttctttgtagagscatttcaactcctcagttaaattaattcctaggcattttatttattttttgtagctattttaaatggggttgccttttttatttcttttttggttagtctattgtttgtgcacagaaacactcttgatatttgtctgttgatttttttattctgcaccttcctaaatttgtttatcagctctaagagttttttggtagattctttagatttttctatttgtatgatgatgttgtctgaaaca

SEQ ID NO: 776760 - DNA, 651 bp, Homo sapiens
tgttatttcagcttctttgggtagatataccaaggaacatgattacccaatcacagggtaagagtatgcttagttttgtaagagactttcaaactgtcttccgatgtgactgtaccattttgcaatttcaccagcaaagaatgagaggttttgttgctttatatctttgctagaatwtgacattgtcagtgttttggattcttatcaccctagtaggtgtgtagcggtatagcattgtttaatttgcaattctctaatagtatataatattgacaatcattttatatgcatatttatcatgagtatatgttctgtcatgagacattaatttttatccgatttttaatcagattgtttattttcttactgttgaattctaagagttctttatgcattttgaataacaatccttaatcagatacatgttctgtaaggattttcttagtgtctgtggcttgtcttctcatttcctttacagtgtctttcacagagcagaagtttttcattttaatgaagtccatctcatcaattgtttcatggatcatgcctttgttgttgtagctaaaatttatcaccaatcccaaggtcatttagaatatttgctatgttttcttctaggagacttgaatgtttttcattttacatttaagt

SEQ ID NO: 776761 - DNA, 651 bp, Homo sapiens
tgttatttcagcttctttgggtagatataccaaggaacatgattacccaatcacagggtaagagtatgcttagttttgtaagagactttcaaactgtcttccgatgtgactgtaccattttgcaatttcaccagcaaagaatgagaggttttgttgctttatatctttgctagaatttgacattgtcagtgttttggattcttatcaccctagtaggtgtgtagcggtatagcattgtttaatttgcaattctctaatagtatataatattgacaatcattttatatgcatatttatcatgagtatatgttctgtcatgagayattaatttttatccgatttttaatcagattgtttattttcttactgttgaattctaagagttctttatgcattttgaataacaatccttaatcagatacatgttctgtaaggattttcttagtgtctgtggcttgtcttctcatttcctttacagtgtctttcacagagcagaagtttttcattttaatgaagtccatctcatcaattgtttcatggatcatgcctttgttgttgtagctaaaatttatcaccaatcccaaggtcatttagaatatttgctatgttttcttctaggagacttgaatgtttttcattttacatttaagt

SEQ ID NO: 776762 - DNA, 615 bp, Homo sapiens
gagacagcttctgctgattgattgatttttgaatgagccatacttttgtgtttttgtttttttttgttttttgtttttttttttttttttttgcataccttgtgaacttttgttgaaaaaactggacatttcaatgtaataatgtggtaactgtgaaaatcarattctctaccttgccaaggggctttgttttttgttattgtttttggggttataattattgcaggctgtctccctgttaaagattagcctgatgtgtacacttaaaatctcttcaggtcttttctgagcctgtgcttttttctgtaagtgtaatatcactttctaattttcttcatatatgtcgttactttggaatgtcctaatctttgacgtctgattttcaaaaaggaaaaagagagagaaatgaaacagggcaagcagggaaaggacactagtctcacattcactggaaatcacttcagccaaggaagagaggcttgcaacaatgacatgaggtggaaaacaatggccagctgcctctttctgcatctccatgataaaagtagcaatccgagatcagaacacaggttcccaatattcagaggacagcattcctactgctcaatctggcta

SEQ ID NO: 776763 - DNA, 615 bp, Homo sapiens
gagacagcttctgctgattgattgatttttgaatgagccatacttttgtgtttttgtttttttttgttttttgtttttttttttttttttttgcataccttgtgaacttttgttgaaaaaactggacatttcaatgtaataatgtggtaactgtgaaaatcaaattctctaccttgccaaggggctttgttttttgttattgtttttggkgttataattattgcaggctgtctccctgttaaagattagcctgatgtgtacacttaaaatctcttcaggtcttttctgagcctgtgcttttttctgtaagtgtaatatcactttctaattttcttcatatatgtcgttactttggaatgtcctaatctttgacgtctgattttcaaaaaggaaaaagagagagaaatgaaacagggcaagcagggaaaggacactagtctcacattcactggaaatcacttcagccaaggaagagaggcttgcaacaatgacatgaggtggaaaacaatggccagctgcctctttctgcatctccatgataaaagtagcaatccgagatcagaacacaggttcccaatattcagaggacagcattcctactgctcaatctggcta

SEQ ID NO: 776764 - DNA, 615 bp, Homo sapiens
gagacagcttctgctgattgattgatttttgaatgagccatacttttgtgtttttgtttttttttgttttttgtttttttttttttttttttgcataccttgtgaacttttgttgaaaaaactggacatttcaatgtaataatgtggtaactgtgaaaatcaaattctctaccttgccaaggggctttgttttttgttattgtttttggggttataattattgcaggctgtctccctgttaaagattagcctgatgtgtacacttaaratctcttcaggtcttttctgagcctgtgcttttttctgtaagtgtaatatcactttctaattttcttcatatatgtcgttactttggaatgtcctaatctttgacgtctgattttcaaaaaggaaaaagagagagaaatgaaacagggcaagcagggaaaggacactagtctcacattcactggaaatcacttcagccaaggaagagaggcttgcaacaatgacatgaggtggaaaacaatggccagctgcctctttctgcatctccatgataaaagtagcaatccgagatcagaacacaggttcccaatattcagaggacagcattcctactgctcaatctggcta

SEQ ID NO: 776765 - DNA, 625 bp, Homo sapiens
gatcacgccactgcactccagcctgggcaacagagcgagactccgtctcaaaaaaaaagaaaaaaaaatgtggtacataaacacaatgcgatattattcaaccataaaaaggaattaaattctgtcatttccagaaacatggatggaactggaagatttttttttaagcgaattaagacaggaacagaaaaacaaatttcacatattctcactcatatgtgggaactaaaaattaaaacaattaaactcatggtgatagagagcagaatgatggttaccagaggctgggaagggtaggtaatatgtgtggtgagtgagggtgattaatgggtgcaaaaatacagtgaaatagaatgaagaagatctagmgtttgatcttactaattgacagcaaaagagggtgactacattcaataataatttattgtatattttaaaataactagaaactggaatgtttctcacgtctctcacctctagaaatgataaatactagaggtgatggatacatttaccttgatatgcttattacacatgatatgcctgtatgaaaacatcacatgtaccctcaaactatgtacatcacttgtacccacataaatatatattatgtattcatagtaat

SEQ ID NO: 776766 - DNA, 599 bp, Homo sapiens
aggtaagctctgctctccacagatatttattctgctcagataccagtccgcttacaaagagttaccactgtctactgtatgcctgtccctggtgtgtgtgtgtctgtgtgtgtgtgtgaggagggtgggaggtggagacagacagagacagagagtgagaactggtgctgaagttccacgggcaaaagggctcttacgcagagaaaacaaagagaaggaatagctgcaggtcaactccaaaatcactgggggcttagaaatccgcagactcagcagtacctggaacactgccttttcaacagactcaatccttccttcccttgggygtgaaacacaaagggtatttctggtattgtataaaggcctatgaagtcagggcacttaatgacaagggatttctcagtttttcgtgggaaatagaatccacattcaagaagttaactgggaagaatgttcatttctgattctgtgctcagctcttgatgtttttgacccaggtgtgtaaggaccagatggcttctgtttactgtagctcacctcaggcaaaacccacaattctgttatgtctgcaccctcaaataaccattataaacaacata

SEQ ID NO: 776767 - DNA, 599 bp, Homo sapiens
aggtaagctctgctctccacagatatttattctgctcagataccagtccgcttacaaagagttaccactgtctactgtatgcctgtccctggtgtgtgtgtgtctgtgtgtgtgtgtgaggagggtgggaggtggagacagacagagacagagagtgagaactggtgctgaagttccacgggcaaaagggctcttacgcagagaaaacaaagagaaggaatagctgcaggtcaactccaaaatcactgggggcttagaaatccgcagactcagcagtacctggaacactgccttttcaacagactcaatccttccttcccttgggcgtgaaayacaaagggtatttctggtattgtataaaggcctatgaagtcagggcacttaatgacaagggatttctcagtttttcgtgggaaatagaatccacattcaagaagttaactgggaagaatgttcatttctgattctgtgctcagctcttgatgtttttgacccaggtgtgtaaggaccagatggcttctgtttactgtagctcacctcaggcaaaacccacaattctgttatgtctgcaccctcaaataaccattataaacaacata

SEQ ID NO: 776768 - DNA, 636 bp, Homo sapiens
aactgttcctctctttctttaaggtctgtgtttagtattctagtgtaggctttgttacatagtggcaggaacactccaaaatagcaaagtagaaggctcaggaactcacacagtttcacttctgcatattcagttacyacccagaccaaggggcatggaaattggctctacctcttgagttgcatgtcatgaaatatcatagccactttttcaatcaattagaggaagcctacagtatgagtatatctcagaaatgtgatagattttaaattgatcttgcctttctaaagatgtttcccatctatactctgtgagagacacctctaaaatatctcatgtcaaaaaagtattgggtaaggtgtccagtaacctaggtttgtggtctggctctggaactgatttatgttatcttgtaatgatagcaatgatgatgattttggtgatgacggtgatggtgattttattagatatgatttagacaatgcagttagtactttcatgtgcattattataaatatttaaattctaattttaccttttttggacttttgtatgtattatctgttaaatataaagcccatattttacttttgtcctagatatttgtcactatcttgcacccatttctccctccta

SEQ ID NO: 776769 - DNA, 654 bp, Homo sapiens
caggattttaaactcattttttttttattctcttgctttgtccatatcaagagagaaacacatattcttcaagtaattctattctttaccataacggtcaacttgattatttctctgttttattcccctttcattgtgacaagattgtacattttaacccattgcaattccttcctatggagaaatattctttcttgtcccatttggtattggacttggccatgtgacttcgtttgaccaatcatatttgagcagatgtaataaatgccattaaatgtttagctatgacactgttttccatytaccatgagaatgacgtgttccaagcaggggctgcttctccagcctgggtctgagaatgagaagctgtgtggagtagagtcacagcctacctgcagcctacatgtaacacatatactaaatgaatctttatttcataagccaaagagactgggggatcatttgttattacagcaaagttgcctaatatgaaaaacatggaaccaggagtggaatgctgcatagcaaaacccctaaaaggtatagcattagctcctggccagtgtgtaacaaggaaactttgattaaagacagacaaaaatgccaatctatgatgtggagtagtgagcatttgttataactgctgtccacaaa

SEQ ID NO: 776770 - DNA, 492 bp, Homo sapiens
gtgggacatctgggagtagttgaaactgtaataaacaccacattgaagaaagaatgagaagttcagtctgaagacttattctcactgggtgaaagagcttccagagatagtgaagaatggggttctggaggtagacaagtaatcactttacaacctttgatgcaagacattttatatggtgaaagctgcaggcaaaagctgaatccgagaatctttatggttctcttgtaacmtttgcttgcataatgttgtcaagataaaattgttttatcaagtggcaatttgttacatttaatgcagtcacctaaaactctcatttgagagctgggtcatattgttcacatttgaagaaatggttaatagctgaatctgagccaaaccgtaaaaatcaagcctgtgtattggattccagaaaggtgaaatgaatatcatttctgtagctattaaggtcctgattttcatgctcaaagagaaaagcaaacatacatagtg

SEQ ID NO: 776771 - DNA, 544 bp, Homo sapiens
tttaaaagggtttggagcaataaatgttattgctataaaaatacaccttttaacaccatctaggtcaacatatgaatatcattttattacatgcatctacaaagatgtaaaatgtcttatattatcattgaaatctgtcttctttgaaaaataatcaaaaatgatccacaggctaattaattacacaattaatcaataaaaatacctgtgtcaacatcttaggggatgcgtttccaataacattgttcccatgtttagtgaaatgataactaaattcagatcttaaagtcacaataaaaaatgayacttaagtatatatatatatattgttgttatggaggaattacataaggtgattaaaaatattttttcaagcataaaaaatacatgtatattacattaacataagatttggtagcagaaacagaatagaaatataattcaaagttaaaaaatgggaaattttgaactattatatagatttcaaatggatgacagcacatatcaaatttctatggcatttatatttcaatgaataaatttt

SEQ ID NO: 776772 - DNA, 564 bp, Homo sapiens
aaatcttttgagaattcatgcactatcatgagaacagtaaaggggaagtctgcccccataatataatcatcaagtccaaccaggcccctcctccagcatgtgaggattacaattcagcatgagatttgggtagggactcagagtcaaatcacatcattccacccctggcactttccaaatctcatgcctttctcatatttcaatacccatcatgccttcccaacaatccccatgtcttaactcacttcagcattaattcaacatttcaagtctaaagtctcatctgagactaggcaagtcccttctgcctatgagcctgtaaaattaaaacaagtgagttacttscaaattacaatgggagagcaggcattggttcaatagaccaggagggaaaaatcagccaaaacaaagaggttataggcctcatgaaactccaaatcccagtagggcagtcattcaatcttaaagctccaaaataatatcctttgactctatgtctcacattcatagcacacagatataaggggacggctcccaaggccttgggcagatctgcccctgcag

SEQ ID NO: 776773 - DNA, 597 bp, Homo sapiens
atatatagaaaacaaattacaaatgacaaacttaagtctaatcacaacatctaaaagtagatattaattgtattaaattaatatcattaaattccacatgaatggctcaaacactcctatcaaaagagagaaataaacaaactggattttaaaagtttccagatgtatgctttctataaaaaacataatttagattcataaacacaaatagattgaaagtaacaggatagaagaagttgtcataataagaactggcatgactaaattaatgtcwaataaaatagactctacaataagaaataattctagagacaaagaagaaactttataatcatgaaagtgtcaatcagaaaaatataataattataaaagtatgtgcaactaccaacactgctccagaaacataatgcaaaaactgacactattgaaagaagaaatagacaatttaataccaatttttgaggattttggtatctcattgtaaatatttgacaggattactacagagaaatttagcaagaatagacctggcgtagtggctcacgcctataatcccagcacttcaggaggctgaggcgggtgaatcatctgaagtta

SEQ ID NO: 776774 - DNA, 581 bp, Homo sapiens
ttaaataggatccataattatcataaagagaaaaaaaggtgtgacaaacttgccttattgacagaataaggcagtagaaagttagatatatctatttctatgtagccttattaagggcaaattaattatagtgacaattaaatgtattgtgatgatgacaggtgctatgtaattaaaccctaagctcaaattattagaagtatgacaggtgctaagcagagaaacattaagcaaagcctcaaaattatctcctttagtttaatcctgagttcataagtttttttttttttctttttttttaaggtcaatgaatcaaaggcatgcccatagattgcttttctctaccactcgtttattggctaacaataaaacagcagtctctttttcaaggtcacaccactgaatattttctccatttatgtgtayatttaacatatttctaaatataaagtattaggtttcatttcttaacaacactatttgcatgagtaaaaccaccaagtacaaagcaatattaagcttgggagatgccaagagagaagcaacaaagataaacaaatgaatttacttccttattgtgt

SEQ ID NO: 776775 - DNA, 605 bp, Homo sapiens
gaagcccctaagatgccaagtacacgtgaagtataagtacaagtggttcgtgcttgcagctgcctgcctgatgcaggctgctcagaaaggcccaggccctgtgtgtcaggagctcatcctgatggcagaatcggccttgtcaacgcaagaactcaaatccaatatgtccagggttgtaatcaatgcagagaatctcagggggaacacagagggtggaggccccaaccctgtcctcggaaccatgaagcttgacaaagggatgtgatccccacctgaagtgtggcaggagcccccagggaaaggaggagggcagagcagggcactccagacacrggaagagaggttcgcccggaaggagaccaggggtgtgtggcagggaccctgagagggtcgggggctagaacagggcacaggggtcacacggaaaggaacaggagctggggacggtggaatgggaaaaggggcgcacagggagcagctggtgagcacaccctggggagggtggtgggtagagtggcagctcctctatgaggatcctggactcaacaggagcaggggcaagtgtccagcagaaccacgtgaccttgtagattttgtaggagaaa

SEQ ID NO: 776776 - DNA, 605 bp, Homo sapiens
gaagcccctaagatgccaagtacacgtgaagtataagtacaagtggttcgtgcttgcagctgcctgcctgatgcaggctgctcagaaaggcccaggccctgtgtgtcaggagctcatcctgatggcagaatcggccttgtcaacgcaagaactcaaatccaatatgtccagggttgtaatcaatgcagagaatctcagggggaacacagagggtggaggccccaaccctgtcctcggaaccatgaagcttgacaaagggatgtgatccccacctgaagtgtggcaggagcccccagggaaaggaggagggcagagcagggcactccagacacgggaagagaggttcgcccggaaggagaccaggggtgtgtggcagggaccctgagagggtckggggctagaacagggcacaggggtcacacggaaaggaacaggagctggggacggtggaatgggaaaaggggcgcacagggagcagctggtgagcacaccctggggagggtggtgggtagagtggcagctcctctatgaggatcctggactcaacaggagcaggggcaagtgtccagcagaaccacgtgaccttgtagattttgtaggagaaa

SEQ ID NO: 776777 - DNA, 706 bp, Homo sapiens
gagaattcaggatccagtccagtgtgtagacaaatcagaaaaccacaaaaacaatgagcaaggctaaaattcaataagaggtgtgctatagttttcttctgaaacataatttctctctctccatttacccccattcctaccaaaaataagcaaagactgatttgcttgcaaaataagtttagtctcattaacttggcctgattatttatataaacgcagcaaaaataatgattgaccacctaggctctttttgagtttgctttcctggaacttttaggggaatctcagactaaacagttaaaagccttttaaaactagaaagygaagccaaggacttgctctcaggctgtttctgaaatacttagggatttgagtgaatatcccttttataggtctccaaaatatcctggggttcctaggcctgccaggaagtgacactctttattcacccggaagaaaactatgtaagtgaaccaagtatgcaacacaacatggcgataatttttttccaagaggctttattgactccataaagtcaaccttagtttcttaaagtcgtcatatctgaagatacaacattccagttaaggccttcataatatatccagtgttttcaattgtgtactgttacaaggaaaacatattcttactgcacatatgcaaataactacattatcataaaataaaaatgtttactaatagtttt

SEQ ID NO: 776778 - DNA, 706 bp, Homo sapiens
gagaattcaggatccagtccagtgtgtagacaaatcagaaaaccacaaaaacaatgagcaaggctaaaattcaataagaggtgtgctatagttttcttctgaaacataatttctctctctccatttacccccattcctaccaaaaataagcaaagactgatttgcttgcaaaataagtttagtctcattaacttggcctgattatttatataaacgcagcaaaaataatgattgaccacctaggctctttttgagtttgctttcctggaacttttaggggaatctcagactaaacagttaaaagccttttaaaactagaaagcgaagccaaggacttgctctcaggctgtttctgaaatacttagggatttgagtgaatatcccttttataggtctccaaaatatcctggggttcctaggcctgccaggaagtgacactctttattcacccggaagaaaactatgtaagtgaaccaagtatgcaacacamcatggcgataatttttttccaagaggctttattgactccataaagtcaaccttagtttcttaaagtcgtcatatctgaagatacaacattccagttaaggccttcataatatatccagtgttttcaattgtgtactgttacaaggaaaacatattcttactgcacatatgcaaataactacattatcataaaataaaaatgtttactaatagtttt

SEQ ID NO: 776779 - DNA, 598 bp, Homo sapiens
ggatccacgatttattaacacaaacattacacgcaggcaggtccaaattgaagcagcaaaagccccatgaacagtggttgggagcaaagaccctggaatcacacacaaggctgccttgaaattgtagctcacccacttagcagacatgtggctctagcatggacctttctctcccagtgcctccacttcctaatactgtgggataagcttggcagatagarggacaatcactccacagctccagtaccccggagacagcggtgctccggaatattgcttacacgctccgcaagggtttctctcagcctttctagagccatcaataatccatggtctgtttatgtttctcctctagtagatggtgaattctttgaaaacaagaactattaattatttatctttctattccccatacctaacagagtgctggcaaatagcaagggatgaatcaaagccttgcagatagagggtgaatggaaggacacaaagatgagtagaacacacacagagtagccagacacctggcaacaggcattcctctgagccccagcaggagggctggagccctgagacagaggtgtgctagctacacaccacc

SEQ ID NO: 776780 - DNA, 598 bp, Homo sapiens
ggatccacgatttattaacacaaacattacacgcaggcaggtccaaattgaagcagcaaaagccccatgaacagtggttgggagcaaagaccctggaatcacacacaaggctgccttgaaattgtagctcacccacttagcagacatgtggctctagcatggacctttctctcccagtgcctccacttcctaatactgtgggataagcttggcagatagagggacaatcactccacagctccagtaccccggagacagcggtgctccggaatattgcttacacgctccgcaagggtttctctcagcctttctagagccatcaataatccatggtctgttyatgtttctcctctagtagatggtgaattctttgaaaacaagaactattaattatttatctttctattccccatacctaacagagtgctggcaaatagcaagggatgaatcaaagccttgcagatagagggtgaatggaaggacacaaagatgagtagaacacacacagagtagccagacacctggcaacaggcattcctctgagccccagcaggagggctggagccctgagacagaggtgtgctagctacacaccacc

SEQ ID NO: 776781 - DNA, 570 bp, Homo sapiens
atgctggtatacagagtcctaagtcttccccatggaggccagtgagggagccaagaatctgcttgtctttcaaaagactgttgctctccattcccttaaaggtatatgagagaatttatgctactgaaatataggcaacggtgaagaatttggatttaacgacacaggaagcagaaggctctcaatggttttcaacagaagcatcacaagatggaaacagagaatgccccaggaacagaatggtgagaagggaggaggctgggagcagaagatactttaggaggccccaggtgtgtccacgagagactgaagmggacctgcattagtctgttctcactctgctaataaagacatacccaaggctgaggcatttataaggaaaaaaggtttaactgactcacagttccacatggctggggaggacccacaatcatggcagaaggtgaaggaggagcaaagtcatgtcttacttggcggcaggcaagagagcttgcgtaggggaactcccatttataaaaccataagatctcctgagacttattcactaccacgagaacaatatggggaaac

SEQ ID NO: 776782 - DNA, 630 bp, Homo sapiens
tgcatagccccacacctgcaaccttgaagccgcatgcatatggctctgggcctaatccatatgggctcctgctttgccaggaagagcaggtaagagagggaaaggcagttttatcaaggcctagcacggccaacccctgcamggggcagttctctcgcatgtgttaccagtccagtcctccaggaccacctcccaggcagaccctcattttctctccttctctttctccaggagccggccacgcagcccagctctggcactgggccctgaacagagtcagccaccaaacttttggaaaagcttgtcgcttcttgacaaaaacggacagatgcagctgacaccaactccccctcctctctcactgccttcaacacagatgtggcgcagctgtggccagcccttttgcatgatggggcaaaggaaaacatgctgaggatggcaaagtgaaagaagagagaacctggctctcagtaacatcccaagccgctgcaccagcacctggaagcaagcacctaccttcagtgccttgctattaaggaaacagaaagctgtttaagtccttgttagtaagtgctatgttgctggccaaacatatgctaacacatccaaacacaaacaaacactatgcct

SEQ ID NO: 776783 - DNA, 593 bp, Homo sapiens
cactgcaaagggattttgcaacagggaagagagattgagcccaactcggagcacagcactggtaagtgggaatttatatccaaggagcagggtggggaccactagatagaaaattactaagaggagatatcggggtgagggtgcagggattctggctacagaaatctaacaggattcttgctgaaaacaggccakgtgatcagacatcacctggggatgatggacaatgagaaacttggtcatatattgaaaatactgagtcagatatcaagggtgggggagttcttgataaactgacttagcagcgttcttagcccaaaatggactttacaaggaagtacacaggtagacataggagaagcttcaggtgactggctacagtttggccaagcaaggagtttttgttagtccttcctcttgttcaaggaaaggagagacattcttctttcttttgaacgctgtaactccattttctcatgtggtcaccttttgttcactaagaacccactgagtcacctgttgggacttgatagttccaacatactggatggtgcaagcagtcaggcatttaatgaggggatttttttaatagt

SEQ ID NO: 776784 - DNA, 608 bp, Homo sapiens
tgacctttattgctttttttgcttattgcgatagagactgaatttgtttcaatgtcattgtttatcatcttttgttaagaaaatacaggttattcttttcttaacaatgcgcttttgcagttttcaacttctcagaaactstgtgattgctttatcttccatttattttcacagtcaataaatgttcaattatctttttgaggttaaagaaaaaacaaaagagaccactaatgctaataatttttctggaaatatgatagaagaaataattcttaactcttcatttccatttaaatttttatttcattgaaactataaatgatgctattatttgcaaaatacttaagggtttttattagagagagagagcaagagaataaatctgtttgtcaaagattttttgttttttttagaaaattcataccaagggatgtattcatttggatggcattgatagaaaaacataaattggaggcagagcaagatggtggaatagaaggctccactgatcaatccctccaaccaaggacacaaaattaacaacgatctacacagaaaggaacaccttcataagcaccgaaagtcagatgatccctcatagtacctgg

SEQ ID NO: 776785 - DNA, 625 bp, Homo sapiens
atttgctttggaccatctaatgcatcaatactctttcacattctgactctgtaacctaatatacttactaatgcattctgaatttgttgcactttcgaaaccattcatcctgccatctctgttctgggaactgatataaatgtggacaggctcttctagcatgtgtttaaacatcttcttccagattgaaatcaatctatttatttatcagtagctttagatttggtccttcacccaagtatggatctacatgacgtacatttactatcattaatccattgttcattctgttttctctggatgatatggtttggttttgtccccaccaaaatctcatcttgaattgtagtttccataaaccccacgtgttgtgggagggagccggtgggaggtgggaggtaattgaatcatgggggcagcaacccctaygctgttctcccaatagtgagttctcatgagttctgatggttttatagggggcatttcctcctttgctcagaattcattctctcttctgccgctctgtgaagaggtgccttctgccatgattgtaagttttctgaagactccctagccatgtggaactgtgaatcaattaaacctcttttctttataaattaccagt

SEQ ID NO: 776786 - DNA, 643 bp, Homo sapiens
tattcagggataaatttatagctataaaaacttccagtatagaagaaaaaagacctcaaatcaatactaattttccacttaaaaaaaggttaaaaaaaaaagaccaaactaaacccagaacaagcagaaagaagaaaataagaaagattagagtgaggataaacacagaaaatggagaatagaaaaccaagaggggaaagtcagtatgccaacagatttgcaaagtatcaayaaaattcacaaaatttttgctagacctgcgaagaaaacaatgcaaggagactcaaattactaaaatgaggaatgaaagaaggacgttattactggttttatgtaagcaaaaaggattacgagggaatactataacacttttatgtcaataaataataaaatgtagatgaattataaagagttttggaaagatacaaactaccaaaactgactcaaaaagaagtaaaagaaaaacctgaagagacctataacaagtagagatactcagtgatcaaaaatattccctaagaaaaatctagaaccagatagtttcactgctaaattctatcaaatacttaaaaattaagacaaatccttcattaactcttttgaagaatagaagaggagggaatacttccaaagttattctata

SEQ ID NO: 776787 - DNA, 651 bp, Homo sapiens
agtatgtctttttaaagcagcatatagctagatcatgtttctttttttaattttctgccaataactgttctttggttggaaagtttaatatatttatacttaaaaattgccaattagtgatgacttatttctaccattttattacttatattccttacatcttgtatcttttgtgttcctcatttccatcattactcaagggatcctcttgcctcagtctctcaagtagctgggactacaggcatgcaccaccatgcctggttaattttttttattctttgtagagatgagatttcgccctattgcccaggctggtctcaaactcctgggctcaagtgatctgcccaccttggcctcccaaagtgctggaattacaggagtgagccactgygcctggcctagttcaccttcctaatccccagtttctccttctgtaaaacgtcgggatttcagtatctcctttgaatatttcttgagagaatccgtgaaaccacatgttaagagccaagcacagggcagggctgcgtttcatgatatccattagttactgttataattattagtgcagttatgaaattcaacctctattttccttcctggagcatgcctttctcaattctgagatccctgattgtctccgtcagaaaacaa

SEQ ID NO: 776788 - DNA, 626 bp, Homo sapiens
ggtgacacaagcaggttgctgctgctggcccgggtggcctgcttttattcccttattcggccccgcccacatcctgctgattggtccattttgcagagcattgattggtccattttacagagcggtgattggtccgttttgacagagtgctgattggtgcctttacaaatctttagctagagggaaaagttctccgagtccccacctgtcgccagaagcccagccggctacacctctcaatggcactcgcgggggacttggcggcacctarcctgggcactcaggcagccagagggagctcatccccggatcaagcccagcagcgcggcgtcgcctagtgcaggcggagcccgcgcccacccggaactgcgcaggcccgcgcacggcaggcgcagcgcactccagccggcacctctccctccacacctccccgctagcagagggagccaactccgcctcgccagcccagagaggggatccccacagcgcagcggcgggctgaagggctcctcaagcacgccagggcggacgcctaggccgaggaggcccaagagcgatcgagggctgctagcacgttgtcaccgctcacaactactggaaaacattcaggtaggaccttacttctg

SEQ ID NO: 776789 - DNA, 619 bp, Homo sapiens
tatgtgtttatctttatgccataccacactgtcttgattattgaagtttacagcaaatttttaaattgggaactctgagtcctctaattgtgttctttttcaagattgtttttgctcttcagagtttttatagtttcatattaattttagaatcagcttatcagttgatataaaaaacccacctgggattttattaagagctgagttgwtttcatagatcaatttaaggagcattgccatctaaacaatagtaagtgttctgatctaagagcacgacatgtcttttcattcatttagatcttcttttatttctttcaacagtgtacttttctacgaacaagccttgcattgattttatgtaatttatttctaagtattttattctctttgttgctgtggtaaattaaattgcattcttagttgcatttttggattattcattactagtgtataggaatacaatggattgtttttcaatttctgatcatggcaaaacacacataacataaaatttaccattataaccattttaagtgtgcctttcagtgatattaagtgcattcatgttgtgcatccatcaccatcaagtatctccatatatcttttcatcttgtaaaac

SEQ ID NO: 776790 - DNA, 616 bp, Homo sapiens
tcatatgcctattaaccacttaggaagtatctgttcaaagatttttccaatttgtatatgagattgtccggttcctacttattgccttgtaggatttttttattttctgtgtaataattctcaattttataagtatactgagaaagatagcccattgtggtttgcttttttgctctctcaatagtgttttaatagccagaagtgctgaatcttaatgtctaatgtatcaaccttttcctttgtggctagggacatgaacatcctgctaaagcattttgactgcttacatattctcccacagttctttctaraagctttatgcatgtgtctttcacattaagctatatgacccatcaagaatcggtttttgttctgggtataagataggtcaacatctgttgcatcctacatggatatcaaattggcctacttgaaaagatcacaatttttacactgcatcgcattgtcacctctgcctttgctgaggtgattgtgcatgaaagcatctattattgggctcttagtgtgtgttggtctgttctgatctattttttccttctttcaccaatattatactgttttaattactgtaagttattaaaagtcttagtatatt

SEQ ID NO: 776791 - DNA, 664 bp, Homo sapiens
ctcaagcagtggatccaaaccaagataaaatcattgaaataccaaataaataattcaaaagattgattactaagttactcaagaagatacaagataaagatgaaagccaacataaagaaatttttaaatgatttakaatatgaataaaaaatgttctaaaatatacgtattttaaagaaaaaacaatgagaacttctggaaatgaaagatacatttaggaaactactcagtgcagtggaaagttttaacagacttgtccaagtagaggaaacaacttcatagcttgaatacaaggctttgaattaacccaatcagacaaaaatgaagaaaaaggaattaaaataaatgaacaaagtcaccaagaaatatgcggttatataaaatggccagacctaagatttataggtgtttcttcttctgtaggaggagaaaaattaaaactttggaaagtctacttggaggaataattgaggaaaacatccctggtcttgttcgagatttaaatatcaaaatgcaagaagcaaaaagaactccttggagacttattgcaaaaaagacatcaccaagtcatataattatcatgctatctaaagtcaatgtaaaggaaagaattctaagagcagtgagacaaaagcaagaggtagctcctaaaggaaaacctatc

SEQ ID NO: 776792 - DNA, 664 bp, Homo sapiens
ctcaagcagtggatccaaaccaagataaaatcattgaaataccaaataaataattcaaaagattgattactaagttactcaagaagatacaagataaagatgaaagccaacataaagaaatttttaaatgatttagaatatgaataaaaaatgttctaaaatatacgtattttaaagaaaaaacaatgagaacttctggaaatgaaagatacatttaggaaactactcagtgcagtggaaagttttaacagacttgtscaagtagaggaaacaacttcatagcttgaatacaaggctttgaattaacccaatcagacaaaaatgaagaaaaaggaattaaaataaatgaacaaagtcaccaagaaatatgcggttatataaaatggccagacctaagatttataggtgtttcttcttctgtaggaggagaaaaattaaaactttggaaagtctacttggaggaataattgaggaaaacatccctggtcttgttcgagatttaaatatcaaaatgcaagaagcaaaaagaactccttggagacttattgcaaaaaagacatcaccaagtcatataattatcatgctatctaaagtcaatgtaaaggaaagaattctaagagcagtgagacaaaagcaagaggtagctcctaaaggaaaacctatc

SEQ ID NO: 776793 - DNA, 569 bp, Homo sapiens
aggacataatctcttgggtgctccatggccctgcccatcacctgatcctccctatactagtgcaactgatgtgctcttgaaagcaccacctcctccctggaggccaaccaacacacacacaaaaaacccagtgcacttaacaaaaatacaaccaagaaacttcacagagtccatatcacttccctgctacctccrctggagcagatgctgttatccatgcctgagagacctgaagatggatcacatcacaggactctttgcacacactcactagtaccagcccagggcccggtagctctgctgggtggctagacccagaagagaaataatactcattactgttcagctgtcaggaagccccatccctaagggaaaggacagaaaaagacatcatgggagcctcccgaagggcaaatgaatctgaacagcagcccttgagtcccagatcttccttctgaaatagtctacccaaatgagaaggaactagaaaagtgattctggtaatatgacaaaacaaggttctttaacactctccaaaagatcacactagcttgccagtaatggatcca

SEQ ID NO: 776794 - DNA, 608 bp, Homo sapiens
aaggagagagtgactaaatgtgatcctagataagatcttggaacagaaaaaatacattaggtaagatttaaggaaatctgaataaagtatggactttagttaataataatatgccaatagtggttcattaattgtgaccagtaccatatttatgtaagatgttagcaagaggagttcctgggtatggggtatatggttactctctgtaccatcttcaccatgttttttataaatctaaaactattttaaagttttttaaaatgtagtttttaaaaacctggtttttaccaggacacggtggttgcagtgagctgagatcgtgccactscactccagcctgggcagctaagcaagactccatctcaaaaaacaaacaaacaaacaaaaactgggttttaaatactttggcctaatagtgtaacatggaacctttgctcacataacttagacagaactagtcacatagtcccacctaacctaacagcagggggctgggaagtgccctctgtgtatctggaggaaagacctggaaatgggtggagcttgcagatgagatcagtgcaaaagagtcatttgcagaaaggggttgacaggatggacattctcac

SEQ ID NO: 776795 - DNA, 554 bp, Homo sapiens
caagacagcctgccctttgcagtagacatcactgcatgattccagtgacaaggagggaggaaaaaggtttccttcagaagccgtgttaaatagcagcccctactaagcatgtagcagccacactttatctcactgacttaaagatgagtaacacacctgttcctggaagccctaacactgcttgcatttctttcctcaccacagtgtgactggcaatygcactgctctgtttctttcagagggcatatcctttcactacaagacctctggaaatattctagcccatctatgaatggaggtttgtaaaactgagagacgatctgctgcaatttgaactgtggttctcaaatagaggccgagacactgcacccgaatcaaaacctctggggaaagctgaggtcaggagaccctcgtagtctgatttgaaacccctggtctacgggggacactgatgcatttccagaaaggactacaagaatctccgcagtgctttggctataaccctcaccacattttagttaataaaagaggcattgatttcctcaaactttcag

SEQ ID NO: 776796 - DNA, 575 bp, Homo sapiens
caaggctgtggataggggtgggtgctgagtctaagctcccccagttcttagatctggcttccacctttgccgcctggggttgggttataggggaggaggccgccatctggccagggcagctagggggaagcagaaaaaccccaacctaaagagagaggttgccttatttcctccctgtctgtattgacttaaatttgcagtgaccagcgcccacctcgtagcattctgttcctgctcactgacccgtcagagctgggtcacatcagcctccccactcccatccctcctcttttatgacgccacatatgttatggycccctagtgcgagccaccattgttgtggcctgctgggcccgcagactgggagtttgtcagccaagggcctccctgtagagctgcttcaacgagcacaaaagccaagcggatggtggtcagaaggaatggaaactggcctctttaagcaactttgggaagtagtgactttccttttcttctgctaagagggatatccaaccatcaagctggggtttgaagtgttgagtcccaggagctcatatctgttagtggatgtgtct

SEQ ID NO: 776797 - DNA, 512 bp, Homo sapiens
aaactggcatattttggttccacattgaagttcctgacaaagtttgacctcgtattagtacttcaacaatggataattatggtctgaggcacttcgtctataaatcaaactcggtagaaggagtattccctgcaatgacatgcagcaattgaaatagtcatctttttattttttggtaattattctaccagtttggagtgtaaaagtagaaaatatgatgctgctattacattgctaagcaagcagaaggatatccaacaaggaaccacatataaatttaagtgttcatgactacaagcctatwcctattgaaagacgagccttgtgtccagaacagtgatgagcacatattctgtgctaagtatcatttgaatgaatttttttatatgtgtttgcacccgacagagattttatatgcaaaaataaaaaaaagaaaatcctctgtctttttatgctttactttttaaaaaaaatacaacacctggattgttgtagagcatattaacttaaaa

SEQ ID NO: 776798 - DNA, 686 bp, Homo sapiens
tagtacacccaagtggggtggatccctaaaaggaacctgggaaaacagaggggcacatactccctgggaaaggagagggtatatctaattggctgaatttcttctgcaaggatggaccacaggcctggggtgagcattattkcatccgactattccatcaacattgtgagaagagcattttcatatccattttataaataagaaaagtcacaccaagaaagcaaaggtaccagttgaagattgattctggcctcctcacaactcaggttatgaggtatttttttctggaaggcttaaaggtttctgaagccctttttggctccttaagaggaatgaaagagaacatgaccttggaaagtgatcttttagcattatgggaattttcgtgcctatggtggcagccctattctaagcagagggttctagagcgtacatagaaatagtgccaaaagtgactgaaatgtggatgttctataaatagtgatgaatgatgaataaaatgaacccacattacagttcaagcaactttcaaactgcatagcctcagacaagttattgaaaagatacaagcttcatttcaactggaaaatgagagctgacttatgtctcccttaggtctatctaatggggtctgtgttatagccatagggtgagaacaatcaattttgagaggtaagtcaggacca

SEQ ID NO: 776799 - DNA, 686 bp, Homo sapiens
tagtacacccaagtggggtggatccctaaaaggaacctgggaaaacagaggggcacatactccctgggaaaggagagggtatatctaattggctgaatttcttctgcaaggatggaccacaggcctggggtgagcattatttcatccgactattccatcaacattgkgagaagagcattttcatatccattttataaataagaaaagtcacaccaagaaagcaaaggtaccagttgaagattgattctggcctcctcacaactcaggttatgaggtatttttttctggaaggcttaaaggtttctgaagccctttttggctccttaagaggaatgaaagagaacatgaccttggaaagtgatcttttagcattatgggaattttcgtgcctatggtggcagccctattctaagcagagggttctagagcgtacatagaaatagtgccaaaagtgactgaaatgtggatgttctataaatagtgatgaatgatgaataaaatgaacccacattacagttcaagcaactttcaaactgcatagcctcagacaagttattgaaaagatacaagcttcatttcaactggaaaatgagagctgacttatgtctcccttaggtctatctaatggggtctgtgttatagccatagggtgagaacaatcaattttgagaggtaagtcaggacca

SEQ ID NO: 776800 - DNA, 609 bp, Homo sapiens
caagtttctgttaatcctatggaatacacagagacttacttagaaagatatgttccaagcataaggattctgctctcgagaagtagcccagtgtctttccattatactctgaggacagcatttttgtggcagaaaatatgactgattgttcattctkgtgtcgtttttcgaccacctgccatgtgccaagcatttgttcaaaccttcacttagtattcactgaggatctcagtagtactttcttaatcaagaaatgtttgttgaatgcttatcttatagcagatatagtgagagtctttccctggttccttcttttatccaatcaaaaactatttgttgagttcccattgtatgttcaacttctaaatattcactccatagagattttttaggtctctactatgtgctaggtattgcacattagggctggagacacacatgattcagacagtgtcccctttctctgacaactcaaagcctattgtctttgctttctataagtccaattgtcccatggccaatagccacctaaaagcaaaacttcaacggtaatattaacaccttggatccttgagatatcctccatgcataaatgcacatctgtaaaga

SEQ ID NO: 776801 - DNA, 575 bp, Homo sapiens
agagcatctacttccccttttgagggtacccttgatgtcaagacccaccattcatcatttccaaatgtggaaacttggcatttgtttcagaaaatgccaaatgtgttttccttgcatatctgctggcacatcagtgatctgtccttagttagatctcttygaaaaaaggaaagatgcaaacagatctttctgtctcttttttgctagatgattttggataaattacttaaatgtctgtgcctcaataaatgtatataaacaatagaagcaatgatactgaacagaattattatgaagattaaatacagcatctggcatagtaggtaacaatacaattacaaatactattattaatactatttatagggtgcttataatgtgatatttggcaataaatgttagttctttctatctgaactatgttacctttctaaaatgtaactttcttatctgtacaacaagcctaataatattttacgtgtttgttttaatgcagtggttctcaaccttgagcatgcatcagaatttcctggagagcgtcttaaaacatcaattggtgggttccactcctaatg

SEQ ID NO: 776802 - DNA, 514 bp, Homo sapiens
cacatgcccacctccagctactgcctggcccctgcctgacaacattgaaaacaggtagcccttcctgacctatggaagtggatttctgactgcactgtaagttttatagaggccagatcaaggagccttaatttgctttatgttttggggctttctctaacatttaattgtagagaaattccactgctataaatgtatttgaacattcatgatctatcataaaatcaatctataagttgtcaactatcgtaaaaccttgatagtctccaggrttatatcctgagaccttcacaattccccgaagtagcatttgcaaataaccactacacagttagttttcttagttttctcatctgggaagtggacataataatgtttgtatcatatggtgctgggggtgttacatgagaccggatgttgaataaagagaccaatgaagctgcgtcaagaggaaagttggctgatgagcacgtctttctctagttaactgactttcactcatatatcagccttg

SEQ ID NO: 776803 - DNA, 477 bp, Homo sapiens
caaagtattatactttcttcctttttcatacacctttgatatttctatttcatctcggccctgatacatccaggtttttagctaaaagtttctgtgtgcatgtgtgtgttttatttcatcaagcagaatttagtctatggtttgtgtatttcagaagctctgtgtttcagcttctcttcccctggtacactgagctcctgccccargctcaggccgcctgtgcatgacaggtatgaggccagcattctgtgattcacctggaaaacacaagtccccacttcttcctcatttctgtgcctctctggagggaaccctggcagcccttgcctcagtttctgggacaatccaggcagctctccatcactggagaacaccagatggaatggatggaggcaatttttcagaaagtactttaagagcggcttcctcagtggtctttccagctggaagcagagcgtccagaaagcaccgcattct

SEQ ID NO: 776804 - DNA, 602 bp, Homo sapiens
aaagtcctgagaacaggcactaacattcagttagtttcttggcagagacttccttttttgcactatcacaaataacgagggtgcttgtggcagaaggaacttcagactcatgcctggtgccacgcagcacctgcatggagaagggtctcctgtgggcagaggaaagccccagacagggcacaggtgctggccagtggctcaagagggtgcagctgcctcggccttttccagaccagccttgacccctgcccgcccagagaaacaactgttcccattttgaccaacttgcttggagacacctgaccagcagcctaccaccaaaatcacamaataaccatggcatcgtgtttctcgcggacagatgctgagacgcagccagccaccctttggtttttagtgctcttccctgatagcatctgttggcctgctgagtcacactgcaggtgaagtgcactcatccctctgtgtgagctctggccatttgctgcctgtggttcccccatgagtcagtggcattgggcttactctgaggagatgtaatggagggacatggaggtcacagggcatgtgctgagaggagagtttgcaattcttgaagagtt

SEQ ID NO: 776805 - DNA, 619 bp, Homo sapiens
gaaaccgctgctcacccgaagtgtatttaaggggtcccaacagcaacttatcaacattttttgttgtaaagcacacagagagcagtgaattctgtccattttgtgagcagcacatctggataaggcaggtgccccactgcattcagagcagctctgggaatgaggaaggaagagacaacaaaaggaacaggagccttccaataagcccagacattagacctgagccttgtccctgtcataggctagtcattattgattaaaaggtggacatcagataaacccaagagggacagccccgccaacgtccagagcaatgaggccctcactctgccctcacctctgccagtgtaaattctggggaatttctgaaacaccgtgaatacagaggtgtgactcagygggaatcacaggaatgtcagaggacaaagcagttggtattaataaattgctttgagtctggaaacaaagaagtggccttctttgtttccaggctgaagtacagtgctgtgatcatagctcactgtaacctcgaactcctggcctaaaatgatcctcctgcctcagcctcccaaagcactgggaatacaggcatgagacaccatgcctggcctggccttca

SEQ ID NO: 776806 - DNA, 596 bp, Homo sapiens
tacatttctgctcacctctgtggtggggctgatgtgcatggttttcatggcttaaaagcacactccatctcactgggggtttcccaaatggtcatatgaagagaggaattgctccccagaaccgctggggcacctcatttcrttgatgctttttcttcctctccacggagatgctctgggtagaaggaatgaagccttcaaggtggactctggagggctctcccagaggcttctgtctgaaccagtgggcttaaaaatgagcaagggagaaccttcatgaaaatcactgtcaagtactgtctcagtttgctccagctgctgtaacagaataccatagactgggtggcttgtgagcaatagaaattaatttcttgcagttctggagtctgggaagtccaaattgaggtgctggcagattctgtgtctggtgagggcccacttcctggttcatagacagcctactcctcgctgtgtcctcacctgaaggaaggggcaaggcagctctttagtgtctcttttatgatagtactaatcttatttgtgagggctccactgtcatgacccgagcacctcccaaaggtcccacctccaggtat

SEQ ID NO: 776807 - DNA, 638 bp, Homo sapiens
ggtaagatttaaagagagtctggtttcagagaacattctcttgatcactgtatacaaatattattccaaccatagtgtaggctcttctggtcttacccttcctatgagagaggggttattgtctccatttcataaatgaaagcagtaagagtcagagcaattcactgagctgacaagtcataggatcactgaacaagggctccagtggcagtgcctgggagtggcagaacaaatagcacagtatcacatacaactgcagcaacagcagcagtacccgcagcaagtacaatgacacatttactacacacttgctctcatttaatactcacaagaattatggcctctgggttctatcatcaacaccattgcagatgaggggaccaaagttcagctggatcaaggaaggtgttcagkggcatagagctagggagtaatggagttgggtgtccccctggtctaccatgcccaagctgtgcctcagcttctgtgctgccatctcctgcagcacttaaacagaacccctaagaacaactagcagcacttgcctgatcaatgtagccaacagaaggaggacaacctatttttcatagattttttgggggattttctatttaaataatcatgctgcctaaaaaagg

SEQ ID NO: 776808 - DNA, 338 bp, Homo sapiens
cacaagaattatggcctctgggttctatcatcaacaccattgcagatgaggggaccaaagttcagctggatcaaggaaggtgttcaggggcatagagctagggagtaatggagttgggtgtccccctggtctaccatgcccargctgtgcctcagcttctgtgctgccatctcctgcagcacttaaacagaacccctaagaacaactagcagcacttgcctgatcaatgtagccaacagaaggaggacaacctatttttcatagattttttgggggattttctatttaaataatcatgctgcctaaaaaaggagacagtttcatttcttattttccaa

SEQ ID NO: 776809 - DNA, 604 bp, Homo sapiens
aagatgactggcatcactaatgattagagaaaagcaaataaaaactaaaatgagacatcacccccacaccgttagaatggctaatagcaataaaacggaaaatatcaagtgttggcaaggttgtggggaaattggaacccttctgcacttttggtgagaatatgaaatgctacagccactgtggaaaacaggatggcagttcttcaaaaaattacaaatagaacaaccatatgacccagaagttccacttctaggtgtgtattaaaaaaaattgaaagcaagatctcaaataaatrtttgcacatccttattccaatatagcagcattgtttgccatatccaaaaggtagaaacaacccgagtgtttacagatggatgaataaacaaaatgtggtctatacatacagtggaatattattcagccttaaaaggaaaagaaacagtgctatatgctacagtatggaagaacctggaaggctttatgctaagcgactgaagccagacaaaaaaggacaaatacactatagttccacttatatgaggtacctagagtagtccactgcatagagatggaaagcagaatggtgtgctaggcacggtggct

SEQ ID NO: 776810 - DNA, 604 bp, Homo sapiens
aagatgactggcatcactaatgattagagaaaagcaaataaaaactaaaatgagacatcacccccacaccgttagaatggctaatagcaataaaacggaaaatatcaagtgttggcaaggttgtggggaaattggaacccttctgcacttttggtgagaatatgaaatgctacagccactgtggaaaacaggatggcagttcttcaaaaaattacaaatagaacaaccatatgacccagaagttccacttctaggtgtgtattaaaaaaaattgaaagcaagatctcaaataaatatttgcacatcmttattccaatatagcagcattgtttgccatatccaaaaggtagaaacaacccgagtgtttacagatggatgaataaacaaaatgtggtctatacatacagtggaatattattcagccttaaaaggaaaagaaacagtgctatatgctacagtatggaagaacctggaaggctttatgctaagcgactgaagccagacaaaaaaggacaaatacactatagttccacttatatgaggtacctagagtagtccactgcatagagatggaaagcagaatggtgtgctaggcacggtggct

SEQ ID NO: 776811 - DNA, 488 bp, Homo sapiens
gcaatgactaataaagtagcgaggatctgtgcacattttcccccttttgtgcctattttcataagttaataactcaagcatgaaaattgttttaaggctgaagactggtggtaagatctggtcaaactgtgtgggaaacaacttttgttgttgttgttacttaatttagtttggctgtttttaagttagaggagtggaaatgtcaatgtcaatgtgagtcttgcaatgtgtttttgttaagcccaagagcatttgggattgcatcatacaaagcacatttttaatgactagagatcatagtttctcttcctacaggtgtatgttcctatttggkacaggttgggattgttggggagggaggaggagatggaagcaaaatcttataaatgacatcatcctgggcttacccttcttcagctagaaaattcctatcccaccagcaaatcagcccggtgagcaaacagctgccttagacaaatggggttgag

SEQ ID NO: 776812 - DNA, 521 bp, Homo sapiens
cacttgggtcaggctcaggtctggcgcttggcaatcagctgatgatggcagggaggctctgcttcctgtcccaggcagaggggatggcacggcctgtgagtaatgcaggtttgagtggtgagccagttcagagcaaggctgggaggacctttgggcacagtcaggctccagggatgcaaggcgtggctccttcaacttgtctccagcacagccacasacgccaccagtgtggggagggagcccctggtcattttctgctggggagcagaatcgctgatgaagggcccagcgccaatggggaagaggcctccccaacaaccctgggcctcctgcccgctcaagccacttaaaaatccgtaccgtgcccacaaggctttccagtctccatgtctcaggaaggtccaagacagtaggtggaggtgggcacatgacagggctttctcattgcctccaaacaatgccatgtgctgggccatattttctgctcttctagaagcttctgtgtcccgggccaggtgggt

SEQ ID NO: 776813 - DNA, 521 bp, Homo sapiens
cacttgggtcaggctcaggtctggcgcttggcaatcagctgatgatggcagggaggctctgcttcctgtcccaggcagaggggatggcacggcctgtgagtaatgcaggtttgagtggtgagccagttcagagcaaggctgggaggacctttgggcacagtcaggctccagggatgcaaggcgtggctccttcaacttgtctccagcacagccacagacgccaccagtgtggggagggagcccctggtcattttctgctggggagcagaatcgctgatgaagggcccagcgccartggggaagaggcctccccaacaaccctgggcctcctgcccgctcaagccacttaaaaatccgtaccgtgcccacaaggctttccagtctccatgtctcaggaaggtccaagacagtaggtggaggtgggcacatgacagggctttctcattgcctccaaacaatgccatgtgctgggccatattttctgctcttctagaagcttctgtgtcccgggccaggtgggt

SEQ ID NO: 776814 - DNA, 590 bp, Homo sapiens
atgaggtggtatggggataggattctggaggaccctgctggaacaggtagaaggacaagaataactccccactgggactggaggagaggaaggcacatgggggcccttggcagggtggagtagggccataggtaaaaggaaagaggagaaaaggacagatactggggagagtgagagggaagggaggggaggagaagggaggcggasacctccagatctggcatggcagaagtctccttggaaaagatgagtgcaagatgtgggaggaagagtaggacgtgagggtctccaaagtctgctcgaattttcaggtacaaatgacctcccatcagaatagccccaatctgagttctgcagaggctgagagccaactcaagggcatggagtttctgaagccagaagggaccttgataaacaagaaagcctgaggcccaaggaagttaaagtgatgtgctgaagataacccagccaaaagggggcgcagcctggatccacacacttcatggtgctctacccactacaccataaaaggagagtccaaacatggtaaagatgaatggcagactggcagccagtgctgtctccatgac

SEQ ID NO: 776815 - DNA, 590 bp, Homo sapiens
atgaggtggtatggggataggattctggaggaccctgctggaacaggtagaaggacaagaataactccccactgggactggaggagaggaaggcacatgggggcccttggcagggtggagtagggccataggtaaaaggaaagaggagaaaaggacagatactggggagagtgagagggaagggaggggaggagaagggaggcggacacctccagatctggcatggcagaagtctcctyggaaaagatgagtgcaagatgtgggaggaagagtaggacgtgagggtctccaaagtctgctcgaattttcaggtacaaatgacctcccatcagaatagccccaatctgagttctgcagaggctgagagccaactcaagggcatggagtttctgaagccagaagggaccttgataaacaagaaagcctgaggcccaaggaagttaaagtgatgtgctgaagataacccagccaaaagggggcgcagcctggatccacacacttcatggtgctctacccactacaccataaaaggagagtccaaacatggtaaagatgaatggcagactggcagccagtgctgtctccatgac

SEQ ID NO: 776816 - DNA, 600 bp, Homo sapiens
gagttgtgaggtatcagtgaggggctagagttcatctctaggtttgatgtcacccaagatagagaacccagctaatgcagaggaccatgtatccgtggaactaatccagtgagagcagaagcttggaactgggctgtagagagctatggaaccccacagcaatttgatggtgatcttaaccagatgtgtaagagactatttaacccrtgcactagcatctgtgctcctctgatgtgctcccatctctctcctacccgtctctctagactagaggccttcccgtgtgattgctggcaactccagtgcaggcactggctggcatttctttgtccctccagcaccacctcctgcctagtgcaatttatggtcatgatggttcagaaagaactttttgaagggatagcccatgccagattttatcatgacgcaactttgcttcaactggatgttagtgtagaatcaatctccttagttatttagaggaagcaggatgttcaagaaggtagacagcaaatagtggacacatttattttagggaaaagaatcattagagtgtgtattcttccagtcgtgcagtcattaatttaactatcataatgc

SEQ ID NO: 776817 - DNA, 600 bp, Homo sapiens
gagttgtgaggtatcagtgaggggctagagttcatctctaggtttgatgtcacccaagatagagaacccagctaatgcagaggaccatgtatccgtggaactaatccagtgagagcagaagcttggaactgggctgtagagagctatggaaccccacagcaatttgatggtgatcttaaccagatgtgtaagagactatttaacccatgcactagcatctgygctcctctgatgtgctcccatctctctcctacccgtctctctagactagaggccttcccgtgtgattgctggcaactccagtgcaggcactggctggcatttctttgtccctccagcaccacctcctgcctagtgcaatttatggtcatgatggttcagaaagaactttttgaagggatagcccatgccagattttatcatgacgcaactttgcttcaactggatgttagtgtagaatcaatctccttagttatttagaggaagcaggatgttcaagaaggtagacagcaaatagtggacacatttattttagggaaaagaatcattagagtgtgtattcttccagtcgtgcagtcattaatttaactatcataatgc

SEQ ID NO: 776818 - DNA, 600 bp, Homo sapiens
gagttgtgaggtatcagtgaggggctagagttcatctctaggtttgatgtcacccaagatagagaacccagctaatgcagaggaccatgtatccgtggaactaatccagtgagagcagaagcttggaactgggctgtagagagctatggaaccccacagcaatttgatggtgatcttaaccagatgtgtaagagactatttaacccatgcactagcatctgtgctcctctgatgtgctcccrtctctctcctacccgtctctctagactagaggccttcccgtgtgattgctggcaactccagtgcaggcactggctggcatttctttgtccctccagcaccacctcctgcctagtgcaatttatggtcatgatggttcagaaagaactttttgaagggatagcccatgccagattttatcatgacgcaactttgcttcaactggatgttagtgtagaatcaatctccttagttatttagaggaagcaggatgttcaagaaggtagacagcaaatagtggacacatttattttagggaaaagaatcattagagtgtgtattcttccagtcgtgcagtcattaatttaactatcataatgc

SEQ ID NO: 776819 - DNA, 600 bp, Homo sapiens
gagttgtgaggtatcagtgaggggctagagttcatctctaggtttgatgtcacccaagatagagaacccagctaatgcagaggaccatgtatccgtggaactaatccagtgagagcagaagcttggaactgggctgtagagagctatggaaccccacagcaatttgatggtgatcttaaccagatgtgtaagagactatttaacccatgcactagcatctgtgctcctctgatgtgctcccatctctctcctacccgtctctctagactagaggccttcccgtgtgattgctggcaactccagtgcaggsactggctggcatttctttgtccctccagcaccacctcctgcctagtgcaatttatggtcatgatggttcagaaagaactttttgaagggatagcccatgccagattttatcatgacgcaactttgcttcaactggatgttagtgtagaatcaatctccttagttatttagaggaagcaggatgttcaagaaggtagacagcaaatagtggacacatttattttagggaaaagaatcattagagtgtgtattcttccagtcgtgcagtcattaatttaactatcataatgc

SEQ ID NO: 776820 - DNA, 613 bp, Homo sapiens
aagtgaaggaggctcctgaggttcctgctggatcccaaactagagcaggctctgacaaggaggaccggggctgtcccctgaggcctcgtgtttagagcattccattgtcctccatccatcagggccatcatcatcaaaggcctgttcctctccactgctgggattagcatagtttgcacctatgtcttttggtgttggttggttgttttgtgtctactattattatttaactttgctgaaattcgggaactttaatccctacatctggcctggtttccataagggcttgtttggagaaccragcccacgggggcgtgagtgcctgcgaaacacagaaagaagccgagacccaggactgaagactcgagactgctttgggcgtgtggagtttgcatccctgatgagtaagtcagtctgttctgaatgatccaagcttaattcgtggttaaaaacaaaaactggccacaaccaggcagctctaggttttagacagcaccctaaaccccaaggaccaccagacactttcccaatattaaccaccaagagtgaaaaatgcataatgctcagtttgcaaagttaacttcatcagaaatgcttctccctcccaggtagt

SEQ ID NO: 776821 - DNA, 637 bp, Homo sapiens
tctttgaagtggaagttggtcagtcattgcaggaggaggtaagaaggggtgagataaaaactcaggcagctgaaaccattaccccctggggaagcaaaccccagccctcaattctgaatccccagtaaggcctctccccagtgcaagcaagcccacctttccttagccatccccattcatagcctcatctgcttctgcctcaccaagggtgactgctgttcaaatcctggctcagctgctcaccggccttatgcccctgccctggggaaggccaatgcttggctgcttgctcacctactaaacaagaaccctctgagtgctggtgcatttccctcggtgaagggtttggcttggagtcagggtcttctctccctcttctgattgcgagcctggccggacccttgcctgggtaaatacacatgctctaccctcacctgcccccgayatcccacccacctgcccttctctgccccctgcgctgccccatcccttggcttcctgccctgcctttgacctggcaccagcacaatgtgcgggttgctgagaccaggaacaggttcatgccaggagagtcgtttcctgacccaacgatcagctgcatgagaaggggtgacatcatcgaacttccacggtcact

SEQ ID NO: 776822 - DNA, 644 bp, Homo sapiens
actcagggcagggtggaatctttgtattcatctcatctgatcttcttagtgttctgctggagaaagtagcatccagagacgcccagctgaggctatttccctccacaacacagtggtctttatcttccaggatgggggcaaattacrtaaactttaggaagttcatcagcaagggcaaagcttggtttctgatgagaacctgactgtccagacagtagagagttcacaatcacccttttctgctgggtgatgtcccagaggaaagcctgggtcctcaccctagtgaggccattcaccagactcagatcagtttccttatccaccaaacatggtcagagcactgggctgctcagcatctcggtgtgcctgagaagtaataagaggatgaacccagtcagcacatagttgttgatgaggctcggatctcaaacgccggggacagaccgggaaataagacagaccacagtctgccttttgggagtggagtgagagacagacagatgataattgaacattcaggataagtgctgataatgataagtctatgaataaaataaaataaaatcacaagatagagagaaatggtggggaggaaggagggttctctcacgacatggtgctcagggaattctcctcgagaaggg

SEQ ID NO: 776823 - DNA, 573 bp, Homo sapiens
gtgattctccttagtacgtcctgttcaactggtagtcagagctgtgagcactcaggctcaagccactctgcaagtcagtcaatattgcaaaccatacacagcagtgtccttaacttaatcaatatataaatgctatattaaacattccacatggaacagtaacatttaacatcgagagaaaggggataacagagcataagtgtggctttgaaaaaaaaaagagtgagaaggggatagaagaaagggttaatgagccaatccaatgagagcaacgtggatgagagtgtcctggcctgttccggacagacatcaagagtctytgatgtgggcagagtctttggcagcagatgccgggtgctgatcacgagcaacaacagagcaaggctctgttaagatgaccatctcaagctggtgaaatcctgctcttcttatagccctgagacctctggcaaggactgatagtagaagagggctggtgatgtccctgtctggttgggtgtggtctttattgattaggtggccatctgttccctgttggcatgatgccttttgacatgtaagatggagtctttt

SEQ ID NO: 776824 - DNA, 573 bp, Homo sapiens
gtgattctccttagtacgtcctgttcaactggtagtcagagctgtgagcactcaggctcaagccactctgcaagtcagtcaatattgcaaaccatacacagcagtgtccttaacttaatcaatatataaatgctatattaaacattccacatggaacagtaacatttaacatcgagagaaaggggataacagagcataagtgtggctttgaaaaaaaaaagagtgagaaggggatagaagaaagggttaatgagccaatccaatgagagcaacgtggatgagagtgtcctggcctgttccggacagacatcaagagtctttgatgtgggcagagtctttggcagcagatgccrggtgctgatcacgagcaacaacagagcaaggctctgttaagatgaccatctcaagctggtgaaatcctgctcttcttatagccctgagacctctggcaaggactgatagtagaagagggctggtgatgtccctgtctggttgggtgtggtctttattgattaggtggccatctgttccctgttggcatgatgccttttgacatgtaagatggagtctttt

SEQ ID NO: 776825 - DNA, 573 bp, Homo sapiens
gtgattctccttagtacgtcctgttcaactggtagtcagagctgtgagcactcaggctcaagccactctgcaagtcagtcaatattgcaaaccatacacagcagtgtccttaacttaatcaatatataaatgctatattaaacattccacatggaacagtaacatttaacatcgagagaaaggggataacagagcataagtgtggctttgaaaaaaaaaagagtgagaaggggatagaagaaagggttaatgagccaatccaatgagagcaacgtggatgagagtgtcctggcctgttccggacagacatcaagagtctttgatgtgggcagagtctttggcagcagatgccgggtgctgatcacgagcaacaacagagcaaggctctgttaagaygaccatctcaagctggtgaaatcctgctcttcttatagccctgagacctctggcaaggactgatagtagaagagggctggtgatgtccctgtctggttgggtgtggtctttattgattaggtggccatctgttccctgttggcatgatgccttttgacatgtaagatggagtctttt

SEQ ID NO: 776826 - DNA, 573 bp, Homo sapiens
gtgattctccttagtacgtcctgttcaactggtagtcagagctgtgagcactcaggctcaagccactctgcaagtcagtcaatattgcaaaccatacacagcagtgtccttaacttaatcaatatataaatgctatattaaacattccacatggaacagtaacatttaacatcgagagaaaggggataacagagcataagtgtggctttgaaaaaaaaaagagtgagaaggggatagaagaaagggttaatgagccaatccaatgagagcaacgtggatgagagtgtcctggcctgttccggacagacatcaagagtctttgatgtgggcagagtctttggcagcagatgccgggtgctgatcacgagcaacaacagagcaaggctctgttaagatgaccatctcaagcyggtgaaatcctgctcttcttatagccctgagacctctggcaaggactgatagtagaagagggctggtgatgtccctgtctggttgggtgtggtctttattgattaggtggccatctgttccctgttggcatgatgccttttgacatgtaagatggagtctttt

SEQ ID NO: 776827 - DNA, 599 bp, Homo sapiens
gggggagagttccctcttgccctcagaaggtcagcctttttttctacccaagactctactgattggatgaggcccaccacagtagcaatctgcttgacccagtctattgatctaaatggtaaactcatccagaaaacccctattaattaattaattaattaattaattattgagatggagtcttgctctgtcacccaggctggagtgcagtggcacaatctcggctcactgcaatctctgcctcccgagttcaagcaattctcctgcctcagcctccctagtagctgggattacaggcacccgccaccatayccagctaatttttgtatttttagtagagacagggtttcatcatgttggccaggctggtctcaaactcttgaccttgtggtctgcccatctcggcctcccaaagtcctgggatgacaggcgtgagccaccgtacccagcctcctatttagaataatgtttaaccaaatatctggggactttgtggcccagttaagttgacacataaaattaatcacagatctcaagccaatcagattctctctccagaggaattttctactgggacagagagaccagctggtctctgc

SEQ ID NO: 776828 - DNA, 599 bp, Homo sapiens
gggggagagttccctcttgccctcagaaggtcagcctttttttctacccaagactctactgattggatgaggcccaccacagtagcaatctgcttgacccagtctattgatctaaatggtaaactcatccagaaaacccctattaattaattaattaattaattaattattgagatggagtcttgctctgtcacccaggctggagtgcagtggcacaatctcggctcactgcaatctctgcctcccgagttcaagcaattctcctgcctcagcctccctagtagctgggattacaggcacccgccaccatatccagctaattyttgtatttttagtagagacagggtttcatcatgttggccaggctggtctcaaactcttgaccttgtggtctgcccatctcggcctcccaaagtcctgggatgacaggcgtgagccaccgtacccagcctcctatttagaataatgtttaaccaaatatctggggactttgtggcccagttaagttgacacataaaattaatcacagatctcaagccaatcagattctctctccagaggaattttctactgggacagagagaccagctggtctctgc

SEQ ID NO: 776829 - DNA, 599 bp, Homo sapiens
gggggagagttccctcttgccctcagaaggtcagcctttttttctacccaagactctactgattggatgaggcccaccacagtagcaatctgcttgacccagtctattgatctaaatggtaaactcatccagaaaacccctattaattaattaattaattaattaattattgagatggagtcttgctctgtcacccaggctggagtgcagtggcacaatctcggctcactgcaatctctgcctcccgagttcaagcaattctcctgcctcagcctccctagtagctgggattacaggcacccgccaccatatccagctaatttttgtatttttagtagagacagggtttcaycatgttggccaggctggtctcaaactcttgaccttgtggtctgcccatctcggcctcccaaagtcctgggatgacaggcgtgagccaccgtacccagcctcctatttagaataatgtttaaccaaatatctggggactttgtggcccagttaagttgacacataaaattaatcacagatctcaagccaatcagattctctctccagaggaattttctactgggacagagagaccagctggtctctgc

SEQ ID NO: 776830 - DNA, 520 bp, Homo sapiens
ttacttattcatatgtatgtgattaaataaatatataaatgtaaatcagtatggaatcatgcatatttattttatacttgggttatttataatccaatactactttattgctcaaattgttccagcttaggccattgaaagctttttcaagtggtcactgtgtctccttgacctgtgtgttattgtttgttcttctgaacacgttcttactttctggccctgtaaaatgctcctccaggctcattttgtacattccccgcctgtcctagaatcagccatttctccaggaaggcttacttccttttattaaatggtattaagaacagtgggggcggtggtgggggcagtggcrgtggtggcacagtgacgtcagggcgttggggcagctcctgtgacagacagagctggagcggcggggtggtggcagaatccagcggccgggagagtggaatgaatcttacttgttgaatatcttctggttactagttggattcatttgtaaaagaatcattttccgctg

SEQ ID NO: 776831 - DNA, 402 bp, Homo sapiens
aaataaagtaggctggtgttttgggggaaaaaatggacatctgttattagattacaaaagaagtttatggaattagaatcaacactaaatgaagcaaaagaagaatttacgtcaggtggacctcttggtcagaaacaagacccaaaagaatgggtattttctgccagaaaaatacacattgagtggtcacaggagtccaatcattcgagtcattttccatcctgtgttcagtgttatggtctctgcttcagaggatgctacarttaaggtgtgggattatgagactggagattttgaaagaactcttaaaggaaggacacacagactctgtacaggacatttcatttgaccacagtggcaagtttctggcttcctgttctgcagctatgaccattaaaccat

SEQ ID NO: 776832 - DNA, 544 bp, Homo sapiens
actagtggcttcagaatttatatccttttgggaaagagctttatctactagaatacagggttgtggacagttccttatgccttaatcttacagtctccactcacttccaatgccacttggtcagtacgctttcctcccaccccttcagtggaattattttatacatttgtaatacagttagtcttctgtcatactcagcaccccatcttggaatcccccaacatctttaattatttttttaatttgcatatgttaaggttcwctctttgtgatgtaaaattccatgggtttcgaaaaatgcagtgtcatgtattcaccaccacagtatcatacacaataattttaccattctaaaaaaaaatctcttgtgctttgctgactctactcttccatctctacaggcccctggaaaccactgatccgttgaccatctcgataattctaccttttctagaacataatataaatggataagcttttttcagtaaacaatatccatttaagttttatctatgtttttacatagcctgatagttcatttatt

SEQ ID NO: 776833 - DNA, 633 bp, Homo sapiens
aacaaagagaaacctggctcccaccatcctccatccagtgacttcacatttcagagcgtgtgactagtggcttcagaatttatatccttttgggaaagagctttatctactagaatacagggttgtggacagttccttatgccttaatcttacagtctccactcacttccaatgccacttggtcagtacgctttcctcccaccccttcagtggaattattttatacatttgtaatacagttagtcttctgtcatactcagcaccccatcttggaatcccccaacatctttaattatttttttaatttgcatatgttaaggttcactctttgtgatgtaaaattccatgggtttcgaaaaatgcagtgtcatgtattcaccaccacagtatcatacacaataattttaccattctaaaaaaaaatctcttgtgctttgcygactctactcttccatctctacaggcccctggaaaccactgatccgttgaccatctcgataattctaccttttctagaacataatataaatggataagcttttttcagtaaacaatatccatttaagttttatctatgtttttacatagcctgatagttcatttatttatatctctgaatagtattcctttata

SEQ ID NO: 776834 - DNA, 607 bp, Homo sapiens
ggaagtttcacagatgctagttcatttagattggatatgcctcccggaccagtgtgctgtccgttatggaaaatcaaaacagccattgcatttccatagtgttcacaaggagcctcatttctgggctcaggcaggctgaggcgttccagggttgagaatcagacttggtgactgagcaggaactgttgtcctttttctcttttgagatatgaaatttgcttcacatctcagaagagtgtgtgcctccatcccacacttgggacaagcgccgttattctttttttaaaacatctgtagaacatattaaatgctctgctttcttcacgggttaaatcatgctggggcgggaggcttgtggtgtaagagcggtgcactgtgcatccactagggctctcccgtcattccagttsgtctccttgccacgccccagctcgctgcccccaggctgtcttggacagacacatctgtgttttgtaatagagcacatcatgcactattatatggggatattttataaaggagcccacgtgacacaaggaaactaggagaaaacaatcctagaaatccccaaagcttggaagcagggacatgcaagcgaggtacagca

SEQ ID NO: 776835 - DNA, 607 bp, Homo sapiens
ggaagtttcacagatgctagttcatttagattggatatgcctcccggaccagtgtgctgtccgttatggaaaatcaaaacagccattgcatttccatagtgttcacaaggagcctcatttctgggctcaggcaggctgaggcgttccagggttgagaatcagacttggtgactgagcaggaactgttgtcctttttctcttttgagatatgaaatttgcttcacatctcagaagagtgtgtgcctccatcccacacttgggacaagcgccgttattctttttttaaaacatctgtagaacatattaaatgctctgctttcttcacgggttaaatcatgctggggcgggaggcttgtggtgtaagagcggtgcactgtgcatccactagggctctcccgtcattccagttcgtctccttgccacgccccagctcgctgcccccaggctgtcttggacagacacatytgtgttttgtaatagagcacatcatgcactattatatggggatattttataaaggagcccacgtgacacaaggaaactaggagaaaacaatcctagaaatccccaaagcttggaagcagggacatgcaagcgaggtacagca

SEQ ID NO: 776836 - DNA, 634 bp, Homo sapiens
gttttgatttacaggctgatgggaatgatccagtagagagggaaaaaataatgatgtgggaaagagaaaaaggcctagcctgtaggaaagaggggttggccttagacaggacacagtcggttcatccacagttacagaaggaagacagggaaaatggatgcaggtgaaggtgggtgggtaattaaggtggtgtattagtccattctcgcattcctataaagaaatacctgaggctgggtaatttatgaagaaaagaggtttaagtggttcatggttctgcaggctgtacaggaaacatggtgctaacttctgctcagcttctgtggaggtctcargaaacttaaaatcatggtggaaggcaaagcaagagcaggcatgtcacatggccatagcaggagcaagacagtgaaggaagaggcagtacatcctttcaaatgaccagatctcacgagaactcagcatctcaaggactgtaccaagggggatggtggtaaaccattcacgagaaatctgcccccatgatccaaacacctcccaccaggccctatctcaaacactggggactacaattcagtatgcagtttggtcaggaacacagatctacaatatatcaggtggtgagagcttatggaag

SEQ ID NO: 776837 - DNA, 525 bp, Homo sapiens
attattattccattttacattttatagatgagtaaattaagacccaagaaaagttaagcaatttcccccaaagtctttagttagtaagtggaagaagcagaatatgaaccatttctatctgacccccaaaactactttttgttgcagtaggaaaaaaaacacacacacacacacacacacacacacacacacacacacacacacagtcaaacttaaaaaaaaaaaaaaaaaaaaaaggagtcttggatagccaaaaagtaaactgcagtctaggttgggcatggtggctcacacctataatcccagcatgttgggaagctgatacaggagaattgcttgagcccaggaggtcaaggttgcagtgaactatratcacaccactgcactctagcctgtgtgatggagaaagattctgtctctaaaaaacataaaaactataatctactatttattgggcacctaccatgcccgttattattacaaattattgtaaacacttcatagatctcatttagtcacaaccac

SEQ ID NO: 776838 - DNA, 616 bp, Homo sapiens
gatgaagcatggaaaaaaaaacaaaaaacaaacatgggctaggaatgaacatgccacatagtaatgtcagctccactacttgccatccatgtgattgcgatccagttatttacctctttgatgccatttatttatcaactaggtagagccaatattaaggtctatcttgcaggctattgtcaatgtcacaggtgatggtatagttaaactacagtacatggtacatgggggaggcagctctctcacttgatgtgcggtatgcagtcatgcggtatgacaggacaatgtaccaaccccaatttcagagatgtatcaagttatggttgaaagtcctckgtccaaatgctgcctcagttctgatccttattatagaacaggcaattacactgcgtcctaaagaagcactatttttccaaggagattactcctcgattgatttcaccgttgtcccctgttatataatccccttggctgtcacagcatgcagacttttataaagacattcaatactgagatcaaatgaaactgtatcatttgtatccaaagttgagagatgctcagtttttgaaggttataaaaacatggagcccccaagaataaagctataatctgcatg

SEQ ID NO: 776839 - DNA, 616 bp, Homo sapiens
gatgaagcatggaaaaaaaaacaaaaaacaaacatgggctaggaatgaacatgccacatagtaatgtcagctccactacttgccatccatgtgattgcgatccagttatttacctctttgatgccatttatttatcaactaggtagagccaatattaaggtctatcttgcaggctattgtcaatgtcacaggtgatggtatagttaaactacagtacatggtacatgggggaggcagctctctcacttgatgtgcggtatgcagtcatgcggtatgacaggacaatgtaccaaccccaatttcagagatgtatcaagttatggttgaaagtcctcggtccaaatgctgcctcagttctgatccttattatagaacaggcaattacactgcstcctaaagaagcactatttttccaaggagattactcctcgattgatttcaccgttgtcccctgttatataatccccttggctgtcacagcatgcagacttttataaagacattcaatactgagatcaaatgaaactgtatcatttgtatccaaagttgagagatgctcagtttttgaaggttataaaaacatggagcccccaagaataaagctataatctgcatg

SEQ ID NO: 776840 - DNA, 627 bp, Homo sapiens
taacacctcccctctcctctctctttctccccttgcctctttctcctcactgagcctgtgcaaggcaagaaagttaaggatgtgctatgatctcgtgtcttctggctgctctcagcctgatgggagaggcacaaacctcaayatacgggtatgacatacagaaggcatggcaaggattctcagccagaaaatggggattcatcagggcctggcagagcctctcttccaggccagccccacgtgctgctaacatgttccttttctctaagttcactaaaattcctcagggaaacagacaaagcacacataagactgggaaaacatcccattgtaggaagctcatctcccttccaaccagggacccttgctaggtcatctcagacaaaaaaaaaaaaaagaaaaaagttttaccctgatgctataagaaaagccctacgtccccagatgatgagagaatcattctgcattgcagaccaaagtgttccatccacagcctgccagcatctggggtacagggactcttggagtttgtgatattatgaaagaatcctggttagctttgtgctcgggccaaaggaggctttcttgattagttaggtatccaggatcccaactagggtatggaga

SEQ ID NO: 776841 - DNA, 627 bp, Homo sapiens
ttgaagtaaataaataatctttgctggcaggactatgctgaatctcctaagcactctctaatcagatgtcctaggtcctcccaattcttaaaccatttatacctgtttttctccttctcttattccatttagtttttcagttcatacaaaaccgtatccaggccatcaccaatctttctgtatgacaaatgtttcttctracaaccccctcaatgtcaccccttaccacaagacctcccttcagcttaatctctcccactctaggttcccacgccgcccctaatcccgcttgaagcagcactgagaaacatcgcccattctctctccgcaccacccccaaaaattttcgccaccccaacacttcaacactattttatttttcttattaatataagaaggcaggaatgtcaggcctctgagcccaagccaagccatcgcatcccctgtgacttgcacgtatatgcccagatggcctgaagtaactgaagaatcacaaaagaagtgaaaaggccctgccctgccttaactgatgacattccaccattgtgatttgttcctgccccaccttaactgagtgattaaccctgtgaatttccttctcctggctcagaagctcccccactgagc

SEQ ID NO: 776842 - DNA, 540 bp, Homo sapiens
ccatgacatttcgttggatggcacagtaaggaaagaagtctgatgagacccaaacatgcgtggcaggaattggaggaaggtacaaggaaagtatctttgcttttgcatttgggagattcaaagaagcaggttttttgttygtttcttagaaaacaacaaagttgtctctcccccctactacacagaaccactttcagagaagactttcaaaagcttcgacaacaacaaaaaactaaactaaaactaaacaaaggctccccggctactagaacagggtttgcttcatcttcaagctgttctttcacagccatgtcctagttatgacagtgtgggaagtcggaatgacaaccaccaaaccaaactggtctctgtcttcaccttctcacagaaaaaaaaaaaaaagccccatcttggaatgtgctctgaagattttctcgtctcactgtagctaggaaagaattcaccccagaggctagagcaacatgcttggctaagcttcccacaaaaccaaggactacttgccttaaaggttttcctttc

SEQ ID NO: 776843 - DNA, 516 bp, Homo sapiens
gagaaataaagcttatgttttatatttttatcattcaattccactttccactaactttgtttaagtcctctcacagtaggtgctcagttgatgctgatttatttcccattttttatcttgcctcttttgagagtcactgaatgaaagaaacctgaattaccatcaagctcattgtattagtttgctagggctgccaatagcaaagkactacacactggtaacaacagatatttattgtctcacaattctggaagccataagaacaagatcaaggtgttggaagggtgggctgatttggatagttgtgaggaagaatctgtttgatacatttctcctagtgtccagggaatctttgacattcttatgatacagaagctagaaagaaattatttaggcagacaataagggcaacagagtcctcagtggaattccccttttaataaaaaagcatctcccaaatcatttcttttctaacaaagagcagactgaaaaatcgagctgcagacatagataagc

SEQ ID NO: 776844 - DNA, 635 bp, Homo sapiens
atcttcccttttccttgtcaccatgtgtacagtaaagaaacaggcaacatggtactggccaggtagagaacccatctgcataattaaagattaggccagctttttgcaccctatgcaaatggcacacctggtccaaacaatcttttgtaccctatgtaaatcagacactgccccctcaagctcatctataaaacccactgcatttcaccccagaagtggcaacccgcttctttggggcccctctctgccacagagagctcttctctttctttcacctatgaaacttccactccaaacctcactctttctgtttctgtgtccyagtgttccatgactgtgagacaacaaatctcaggtatttactccagacaacaaggccgcttcatttaggcttctagaagcaccaccccaatctctgctttcatcttcacatggcgttctctctgtgtgcatgtttctgtgtccaaattttccttttcataaagacattaagcccagcctaatgaccttatcttattacatctgtaaggaaatgatcgtgaaatacagttacattctcaagcactgagggctagtccttcaacatatgaattgggagaagagggagatataatttaacccataacactggggag

SEQ ID NO: 776845 - DNA, 556 bp, Homo sapiens
gctcagtgaatctcccacacctgtcaatcctgggcttaccccaggaggtctgaccccaccaggacttcacttcccaggttctcattcagctgactcagtgtgggttgggtcaacatgaggcaatggcaagagacacagaaggatgagtagtaggatatgctgraacatttgtctcctactctctctgcctcaaaaggtgtcaggaagcagctcactctccagcttcaccctcacattgcctggcctgggaagctcaagctgatggcagttggtgccaggtgaccctcagctcatgggatctggttacaccaccctcctcttcattctccccgccaaggcatggaagcagttccttgagcttcccaatttctatattgcctctctgtgcctctggtcagcctctccaccttctatccctaaatagtcaacttcctataagactccaaaggatttgttactctaggtggactgtgactgctgtatacaggcctatatccccatgtgatcctgaggggctggaagtcaaggacttcaccttagcgtctttgttcacatg

SEQ ID NO: 776846 - DNA, 618 bp, Homo sapiens
aaatcttagctgttgaactacaacatgaggtggctgccattgctctttcagtttaggcttggctagcaaaaagtggccttgttgggtacatgaagccccccatgtagtcaaattttttaatttttctttttgatgtacttttttttcccccttccccctgcctttgttttgcagctgtgggaatttcaaccaatttagaggccttgttccccataatttgagactttccttcagatttgaccaaacctgatagagttggtcaaacccaatgaaaggagggcygaaacaacaaaaggcaacaataaaaacaggtacaggcaaataacaaatttaaagaaaataagcaaatgatcacacaatgtatacaattactgaacactctaaaagtgaggaaaaattaagactcactgattgtcaacctaaacctttagtcattaagcagaaatttcaagcccaagtcccaactcagcaacttatctaggaatgggacacaggctgaagactgctctctacaatcttagaagcaggaaaaagactcaaacttgccttccttggtggaagcaagtggaaactccagaaaaaaaagttaaactgctcgtctttgtcacggaagcaagg

SEQ ID NO: 776847 - DNA, 566 bp, Homo sapiens
tgataaattcctgaaaatatacaaccctcctagattaaatcagggagaaatagaaaccctgagcagaccaataactaacagccaggttgaatcagtaataaaaaaagctgccaacaaaaaaaaaagtccaggaccagatggattcacagctgaattctatcagacattcaaagaagaattggtaccaatcctactaaaactattccaaaagataaagagagaatcctccctaaatcattctataacgccagtatcaccctaataccaaaacccagaaagaacaaaacaaaaaaagaaaaccacagaacaatatccctgttaaacatagatacaaaaatccttcataaaatactagctaamcaaattgaacagcatatcaaaaagataatacatcatgatcaagtgaatttcataccagagttgcagggatggtttaacacatgcaagtcaataaatatgatacatcacataaacatagttgaaaacaaaaaccatatgatcatctcaatagacacagaaaaagcatttgatataatccagcatccctttataattaaaaccctgaa

SEQ ID NO: 776848 - DNA, 566 bp, Homo sapiens
tgataaattcctgaaaatatacaaccctcctagattaaatcagggagaaatagaaaccctgagcagaccaataactaacagccaggttgaatcagtaataaaaaaagctgccaacaaaaaaaaaagtccaggaccagatggattcacagctgaattctatcagacattcaaagaagaattggtaccaatcctactaaaactattccaaaagataaagagagaatcctccctaaatcattctataacgccagtatcaccctaataccaaaacccagaaagaacaaaacaaaaaaagaaaaccacagaacaatatccctgttaaacatagatacaaaaatccttcataaaatactagctaaccaaattgaacagcatatcaaaaasataatacatcatgatcaagtgaatttcataccagagttgcagggatggtttaacacatgcaagtcaataaatatgatacatcacataaacatagttgaaaacaaaaaccatatgatcatctcaatagacacagaaaaagcatttgatataatccagcatccctttataattaaaaccctgaa

SEQ ID NO: 776849 - DNA, 524 bp, Homo sapiens
aaaaagcatttgatataatccagcatccctttataattaaaaccctgaacaaaataggcataaaaaggacttacttcaaagtaataaaagctatatatgacaaacccacaggcaacataatactgaatggaaaagcattgagagcattccccctgagaactggaacaagacaaggatgctcactttcaccatttctattyaacatagtactggaagtcctgaccagagcaatcagacaagagaaagaaataaagggcatccaaattggtaaagaagacatcgattgaattgtcattcgaccccttttataatagctgaaaaaaaaataaaggaatatacctaactaaggaggtgaaagacctctacaaggaaaactacaaaacactgctgaaagaaatatagatgacacaaacaaacggaaacaggtcccatgctcatggatgggtagaatcaatattgtgaaaatgaccatattgccaaaagcaatctggtcattcaatgcaattcccatcaaaataccatca

SEQ ID NO: 776850 - DNA, 634 bp, Homo sapiens
aaaaggttaagatggtaaactttgtgccaattaaaaaacaaagctggctaacaccctacagggcaattaaaacatcataatcgttggtgttatcttttttattagatagaaattatttatacttactggataagatctgtaagttaacacatawcttcacagagtctgagcccttaatgaataataaatagccaagtcacagggagatactttccctgaggtaattaagcaatccttgggtaggcttgtgaagaaatgcccagaatgactttggaaggacatgctgttctctcttggccttatttccaaggtttggactcaaagtattattttttaacatcacagaaattttttatgccctggtctcttgagggtagggactgtgtctttttcatctttgcccctttccacatgctctggtttgtagaacagaattgaagaaggagccatgtgctagatagagcgggttgggagcagcagacctgcctgctcattgtttctgtgaccttgacccatcctgtagtctccccacgccttgctattctcatccatcaacgatgagattgcacctaaatcctgggtgctgtgctgggcctggggatgctgtctaatccctgggtttccttctagtttg

SEQ ID NO: 776851 - DNA, 633 bp, Homo sapiens
caatttccatattgattctcttttgtcttttcacataggaaataccaagcaattttttgtcacgtgaccttttcccatgaaggtttataaaattagataatgtaaattggcaggtaaataggaaaggaaggaagaaaagaaggaaacaatgatgtggaaataagcaatggtttgcttagaaagaaatgaaattccatgttmtatcttgagataaatacaggttcatctcactatcctgcccgtttgtagttagagttggaggctatactagctaacattgattgaacacttgctgcgatccacataattctcaggtacctcctatgtcttatctcatttacgtctcacattaaccctgcaagtagatattattatcaacccattttatagagtagaaactgaagactctagaaattaaggaatttaccacatgtccatctggctccagagccagccagggctcctaacatcactctgctactaaaggctgggtggggcatgccgtgaatgtgtagggattgtcatttctagaaacaaaagccagagcactgtaagttcctgggatcaatgaagattccttcatgccagctcactatggacaccccagaagcatttttgaccctctttacccca

SEQ ID NO: 776852 - DNA, 589 bp, Homo sapiens
caaaatccagggtatatttttcagttagcagcacatttcaattcagaccagccgcatttcaagtgctcagcagccacctgtggctagtggccacagtattggccagtgtagcccaaggatatctcaaattatctcaaagctagatcagtgattaaaggattctcaggccaggcatggtagttttcaggcctggtatggtggtttacgcctgtaatccccgcactttgggaggcctaggtgggcrgatggcttgagcccaggagtttgagaccagcctagccaacgtggggagaccctgtctctaccaaagcacaaaaattagctgggcatggtgatgcgcacctgtggtctcaagtactttgtgtgaggtgggaggatcacttgagcccgggaggttgaggctgcagtgagctgagattgcacaactgcactccagcctgggtgacagaatgagaccctgtctcaaaaaaaaaaaaggattctccgaaagactggcgattgctttttaagctataaggaaggcctttgaagggaaatcaagtaggaagaggatgatagctggctcacatgtccttgccacatgggaggt

SEQ ID NO: 776853 - DNA, 512 bp, Homo sapiens
atagaattttaagttaatatgctctacaacaatccaggtgttgtattttttttaaaaagtaaagcataaaaagacagaggattttcttttttttatttttgcatataaaatctctgtcgggtgcaaacacatataaaaaaattcattcaaatgatacttagcacagaatatgtgctcatcactgttctggacacaaggctcgtctttcaataggwataggcttgtagtcatgaacacttaaatttatatgtggttccttgttggatatccttctgcttgcttagcaatgtaatagcagcatcatattttctacttttacactccaaactggtagaataattaccaaaaaataaaaagatgactatttcaattgctgcatgtcattgcagggaatactccttctaccgagtttgatttatagacgaagtgcctcagaccataattatccattgttgaagtactaatacgaggtcaaactttgtcaggaacttcaatgtggaaccaaaatatgc

SEQ ID NO: 776854 - DNA, 610 bp, Homo sapiens
atacatttggcctacacagaaaaaagcagtaatttttctagcatgagaaataatgttctaaaatgaatttcatacctttctcagaagtagagtaaagtaattcttcctctgatctacttggataacaactctcattaggaacttcctgttctccattattgggtacagttttccatttaaataaactttggtgacttttgcccatattaggayctgctatagtatcatggaacgaggaagatgcacgtattttgttgaccacaaccattttcaaatctttttctatctccatttttaccttctcagcatcattttctccaaagtaattttcttgcccattgtttgtttccacagtgcttagaagttcattttccctactaatttcatgaaacatacgaagttcttcaagtactaagtcaaattttctcttcatctcaaaatcttttactattgtcagagcttctgttgataaatatttagcagctaagtcctgaaaacattcatcattcccttcactcagaccagtttcaaattgatgattaatatataatgcagagtcattctttctgtgaaaatcctttgaattagctatctccctttctggcaaaat

SEQ ID NO: 776855 - DNA, 633 bp, Homo sapiens
tttgaggagaattacttgagacatgctaacctgggaagaaggcagaaacaactttagccatcaatagtatttaaaacctgtgagcaaaactaggtcataattgaatgactgcagaggatccagccagccagggagtgtgtctgaaatgcatgcttagtgatgctcttmtaaggtgaccatttgagccaaagtcagaattcaaaaaagaccagagttagggaatacaagagaaaaagtgagtctggccaaatactggaaacaatacatctatcaagtttatccaagccaccttattttgttgttgttttgttttactttaggcttttagcagcctgaaaccaggtttttaatttctgtctctaatgataaccagaaaagagggatgagaaaggggatttactggcccaaccagaaacagaaactaagaatccatgactatattctgtctcttggatacccctgattctagatttttatatgttgttgccgtcaatttttgggtgagcttgtcctatttaaggactccagaaagaaggggctcctattttccttctaacttgcatttcgagtttactgttagaaatatttgatgagttatagtacttgctgaggcaagcagtgagttttgaggaa

SEQ ID NO: 776856 - DNA, 536 bp, Homo sapiens
acacatatccacaaaaaaacttgcacatggatgtttacatcagctttattcataattgccaaaacttggaagcaattaagatgtccttcagtaggtgaatggaaaaactatggtacatccagacaataaaatattattcagcactaaaaagaaatgagctatcaagccatgaaaagacatggagaaaccttaaatgcacataactaaatgaaaaaaagtcaaactagaaaggctacatrctgtcagtttccaagtatatgaaattctggaaaagttaaaactatagaacagtgaaaagatccatggtttccagaagtaaggggtgagggaggaatgaataggcagtgcacagggaagatttagggcagtgaaaatactgggtatggtactgtaatggtggacacatgtcattacacatttgtccatacccatagaatgtacaacaacaagagtgaaccctaatgtaaactacagactttgggtaacaatgatgtgtcattgtaggttcatcaattgtaacagatgtaccactctgg

SEQ ID NO: 776857 - DNA, 475 bp, Homo sapiens
ccacaggtggtccttcctgagcaccctgtgtaaaactcagtccccatctgctcactctctacttatcctgctttatttctcctcatagcatttatcccacctgatgtcttatgtgttttactgttcattttttttattgtctccccctaccccattaaaacatcaactcaataagaacttgggctttgcctgttttacttactgctgtattccccagcacctaraatagtgtctggcatacagcaggcactcagtaattatttgttgagtgaatgaaaagaagaaaggaggaaagggagaaagcaagagagtcctaagagtcactaaaaagaaggattttaaggaactacaataagagaatgtttctggaacagtgggcgtgaagaacctccagactagagtgcctggtcttcaaattatatggtttgaatcttcatttgcagtgttgcaaaaacattggaaattaaaattaatt

SEQ ID NO: 776858 - DNA, 575 bp, Homo sapiens
aatcaagtcacgccttttgccttggctggaggcttcctttactgctgcttccctgggaaaatctgttgacagcaaggtcccctctctgcaggtagggatgctgaaggataacccttgactttctgaacagtgagataaaacgaatcagaaacctccaagagaagaagaggacttgattttggtagactgatagagtgtcacaatttgtgatggatattggtggtttccatgggacggtgttagtttttgaacaggtrgagatcagactagaaagagcgcacataccttgcttaaggcatccacatcattacatctgggcaaccaaaacattagttactttactttgaaacatttatatggatttacctataatcctttctaaaacagaagcatttagaaagcatttagtctgttctgagaaaaccaaacatcacatgttctcactcataagtgggagctgaacaatgagaatacatggacacagggaggggaacaacacagcagggcctgttgggggattgcaggggtgaggggagagagagcgttaggacaaatagctaatgcatgtggggctt

SEQ ID NO: 776859 - DNA, 590 bp, Homo sapiens
cattttcctctaattgttttttctctctttttctgcgagaatgtttagtactggcagctgcatttttctaatattgtggggagtaaattatcttgagtccatcccctctttcttgagatctatcttctccttagggtgtgaggatttaagtatatcttctgtttcaggaagtttttttttttttttttttttttgtttttgagacggagtctcgctctgtcgcccaggctggagtgcagtggcscgatctcggctcactgcaagctccgcctcccggattcacgccattctcctgcctcagcctcccaagtagctgggactacaggcgcccgccactacgcccggctagttttttgtatttttagtagagacagggtttcaccgttttagccgggatggtctcgatctcctgacctcgtgatccgcccgcctcggcctcccaaagtgctgggattacaggcgttcaggaagttaatggcaaggaagagatgaccttagttggagttatataaaaccttagaagaattgtgtttctacttttcctgtagatgttaaatttcctgtcatggttcacttcccgtactggagct

SEQ ID NO: 776860 - DNA, 642 bp, Homo sapiens
tgctgagattacaggtgtgagccaccatggcaggcctaaactcatttcttttactacttttgaaaccaacatcatttttttcttggtacttacttctgagatcttaatattgctttctcaggatgctttagaacaagtaatgtacaatatcttctgactttctatatcatagtttcttcacacagttcttcacatagttcttcacacagarttctttttcttgtactagggtttctcttctgaacacattagattattagccacgaatagtttttttgttgttgttgttttgtttgtttgtttgtttttgagacggagtctcactttgttgcccaggctggagtgcaatggcacgatctcggctcactgcaacctccacttcctgggttcaagcaattctcctgcctcagcctcccgagtagctgggactacagtcgcatgccaccacacctggctaatttttgtatttttagtagagacaaggtttcaccatattggtcaggtggtctcgaactcctgacctcaggtgatccccctgcctcggcctcccaaagtgttgggattgcaggtgtgagccactgcacccagccaggtggtaagttcttttttttttctccacaaacggttttaaaatttaaagca

SEQ ID NO: 776861 - DNA, 580 bp, Homo sapiens
ttttactacttttgaaaccaacatcatttttttcttggtacttacttctgagatcttaatattgctttctcaggatgctttagaacaagtaatgtacaatatcttctgactttctatatcatagtttcttcacacagttcttcacatagttcttcacacagaattctttttcttgtactagggtttctcttctgaacacattagattattagccacgaatagtttttttgttgttgttgttttgtttgtttgtttgtttttgagacggagtctcactttgttgccsaggctggagtgcaatggcacgatctcggctcactgcaacctccacttcctgggttcaagcaattctcctgcctcagcctcccgagtagctgggactacagtcgcatgccaccacacctggctaatttttgtatttttagtagagacaaggtttcaccatattggtcaggtggtctcgaactcctgacctcaggtgatccccctgcctcggcctcccaaagtgttgggattgcaggtgtgagccactgcacccagccaggtggtaagttcttttttttttctccacaaacggttt

SEQ ID NO: 776862 - DNA, 642 bp, Homo sapiens
tgctgagattacaggtgtgagccaccatggcaggcctaaactcatttcttttactacttttgaaaccaacatcatttttttcttggtacttacttctgagatcttaatattgctttctcaggatgctttagaacaagtaatgtacaatatcttctgactttctatatcatagtttcttcacacagttcttcacatagttcttcacacagaattctttttcttgtactagggtttctcttctgaacacattagattattagccacgaatagtttttttgttgttgttgttttgtttgtttgtttgtttttgagacggagtctcactttgttgcccaggctggagtgcaatggcacgatctcggctcactgcaacctccacttcctgggttcaagcaattytcctgcctcagcctcccgagtagctgggactacagtcgcatgccaccacacctggctaatttttgtatttttagtagagacaaggtttcaccatattggtcaggtggtctcgaactcctgacctcaggtgatccccctgcctcggcctcccaaagtgttgggattgcaggtgtgagccactgcacccagccaggtggtaagttcttttttttttctccacaaacggttttaaaatttaaagca

SEQ ID NO: 776863 - DNA, 603 bp, Homo sapiens
acaggaaaccaagttttaacaattatctgcacacagaaaagcaccttcataagaaccaaaaatcaggtgagcaatcacgttacctggttttaacttcatatcactgaaagaagcattgaaaacaggaaaaacagtcttgaaacrctgatgctgcccctccgcattccccaataacacccatgtggtgcagagggagaatctgtacacgtcggggagggacagcgtagtgactgggggactttgcattgaactcagtgctgccctgttgcagcagaaagcaaaactgttctgacctcagctggcacctacccacacagagagcatttggaccagacatagccagcagggaagcacccatcccagtggtcagaacttgaatttctcagcaggccgtgccactgtgggctaaagtgctctggagtcctaagtgaatttaaaagacagtctaggttacaaggactggaattcttaggcaagccctgatgctgtcctgggcttagagctggtgaactgggttaacatgtgacctaaggagacaccatgcagggtggctgaggaagtgcttatgccatgcttctcccaaccctaagcagtgtagctcac

SEQ ID NO: 776864 - DNA, 619 bp, Homo sapiens
aactgtgagccgatgtcttcaacgaatgaagctgagtcaaggagaggagatgctatgagcctaagattagtaagaattcatagtggaaaacagaagataaatgttgcagaccccatatcccaaacttggaagaatggaaaagcctaaacagaaataggcttgagggagagacaaatttcattaaagacctggagataagaatagagttctcagaatgggttgaagatgtagttttgtttcatagcctaagggtacagtgataagcgttgaaagtcagtaaagtactagggggttcagtcagccaattagaagcaaaaagcacttaagaaaaaaaagattgcctcaagggtttactccacaggcaataaccaacagatataaaggtgtactacgtttagcagstgccaacctgatgccaaaagaactagtcccagcagttccgaggtgtttagaaggagtttcagattcttggcaaaagttcaaggttaactggattgcttcatggagggtcatagtccacatgagcaggccaggagacactgagggattcacagcaacagcatgagacacagatgagcctaaaaacattagccatccaccttccactctttaccatctg

SEQ ID NO: 776865 - DNA, 619 bp, Homo sapiens
aactgtgagccgatgtcttcaacgaatgaagctgagtcaaggagaggagatgctatgagcctaagattagtaagaattcatagtggaaaacagaagataaatgttgcagaccccatatcccaaacttggaagaatggaaaagcctaaacagaaataggcttgagggagagacaaatttcattaaagacctggagataagaatagagttctcagaatgggttgaagatgtagttttgtttcatagcctaagggtacagtgataagcgttgaaagtcagtaaagtactagggggttcagtcagccaattagaagcaaaaagcacttaagaaaaaaaagattgcctcaagggtttactccacaggcaataaccaacagatataaaggtgtactacgtttagcagckgccaacctgatgccaaaagaactagtcccagcagttccgaggtgtttagaaggagtttcagattcttggcaaaagttcaaggttaactggattgcttcatggagggtcatagtccacatgagcaggccaggagacactgagggattcacagcaacagcatgagacacagatgagcctaaaaacattagccatccaccttccactctttaccatctg

SEQ ID NO: 776866 - DNA, 552 bp, Homo sapiens
cacacacacacacacacacacacacacacacacacacaacaaagctatagtaacctaaacatcatggtactggcataaaaacaaacacatagaccaatggaatggcatagataacctagaaataaatccacacttctacaataactttttttttcgagacagggtcttactctgtcgcctaggttggagtgmagtggcatgatcatggctcgctgcagccttgacctcctgggctcaggtgattctctcacctcagtgcccttggagtagctgggactacagatgtacactatcactaattttttgtgttttttgtagagatggggttttgccatattgctcaggctggtcttgagctcctgggctcaagtgatctgcctgccttggcctcccgaagtgctgggattacaggtgtgagccaccatgtccagccagtaactaatttttgacaaaggcaccaagagcatacattgggaaagggatagtctctttaataaatggtgccagaaaaattggatatccacatacagaaaaatcaaactagacccctgt

SEQ ID NO: 776867 - DNA, 667 bp, Homo sapiens
gaattctctttctctacatccttgcccacatctgttattttttgtctttttgataatagccattttaactggggtaaaataatatctcattgtggttttgctttgcatttccctggtgattagagatgttgagcaagttttcacacatctgttggccatatgtacatcttctttggagaaatatctattyggatcatttgcccatttttaatcaaattattattattattattgtttgttgttgagttgtttgagttccttatatattctggttattaatcccttatcccttgtctatggatagtttgcaaatattttctcccattctgtgggttttctcttcattctgttgattgtttcttttgctatgcaaatatttttagcttgatataatcttgtttttcttttgttgcttatgctttcgaggtcttaccccaaaaaatctttgcccagaccaatctcctgaagcatttttccaatgttttcttctagtactttcatagtttcaggtcttagatttaagtctttaatccattttcattttatttttgtagatggtgagagatagggtctagttttattcttcatatggatacccagtttccccagcaccatttattgaagaggctgtcctttccccaatttatgtttttggcacctttgtcaa

SEQ ID NO: 776868 - DNA, 667 bp, Homo sapiens
gaattctctttctctacatccttgcccacatctgttattttttgtctttttgataatagccattttaactggggtaaaataatatctcattgtggttttgctttgcatttccctggtgattagagatgttgagcaagttttcacacatctgttggccatatgtacatcttctttggagaaatatctattcggatcatttgcccatttttaatcaaattattattattattattrtttgttgttgagttgtttgagttccttatatattctggttattaatcccttatcccttgtctatggatagtttgcaaatattttctcccattctgtgggttttctcttcattctgttgattgtttcttttgctatgcaaatatttttagcttgatataatcttgtttttcttttgttgcttatgctttcgaggtcttaccccaaaaaatctttgcccagaccaatctcctgaagcatttttccaatgttttcttctagtactttcatagtttcaggtcttagatttaagtctttaatccattttcattttatttttgtagatggtgagagatagggtctagttttattcttcatatggatacccagtttccccagcaccatttattgaagaggctgtcctttccccaatttatgtttttggcacctttgtcaa

SEQ ID NO: 776869 - DNA, 605 bp, Homo sapiens
acggttctctaaaagttggttttgacagtttttcccagtattctgtctttaatggataagcagagatttgcaggtcctagtcttccattctggaagtgcttggagattaacttaaaacagcactgtcctgtcatctttcctgtcgtgcttcccaggctcctagctgtcttgggtttccatcatctttttgtctccttgcttattgaccaagagctgtatggarcattacttttatcgcaactggctccaaggtattattcattcaacaagcacttctcgagctctatcccttcttctggaaggaaaagggtcaaaattatgataagaagttagagttgggggaatagatagatatgattaatagagattgatatgatataggtgatagatggacatttcttattttctatttatagtataatgatgttatcattgaatacattttaaagaaaataaaaatgatttgcatttagaagcttttgatacactttgtattttttgagacagggtcttactctgtcatctaggctggagtgcaatggtgcagtctcacttcactgcagactccacatcccaggttcaaacgatcctcctgcctctgcctg

SEQ ID NO: 776870 - DNA, 528 bp, Homo sapiens
tgctggccgagtcccaccactttgctcagctatgaacacctgacatctcgtttcattttcatgcaaaatctggagataattattatccacaattctaaggccttaggcccctccgcatgagcctgccattaccacttcattcccttgcacctgaaagactccagagccccttgaaagaacaggtcctccaagaggagcatcgccagccagcccctgaatctcctgaggaaactctcatgcacatatcttgacctgagcacagacyggacgccagcggagggcaggagcaagcaggacacactgtggctgaggaggggaccctgggcttgtgggcctcggagaggcagagcaggggaggcagatgagactgcacacagctttttgtttgacatatcctaagccccctgcacacgccactcaaggtcttctctgtgccccatctggtgcaggaggcctgtctgtctgtgaaattgcttttagcaatagctgtggatcaccactgagagggtgaatatacaaatgaacaat

SEQ ID NO: 776871 - DNA, 618 bp, Homo sapiens
acaaaatctccaggttgaagatcatgaagaagctatttaggaagatgttgtaagaagggggctgttgaatattgaacatcaccagtattttgctcgtctgggtgcagcagggcagaggctagtatcagagatgaaatccctaaatgcattacaagttgtcttagtccattcaggctgctataacaaaataccagactgggtggcttataaacaacagacatctatttctcacagttcaggaggctgggaagtccaagatcaaggcagtgatcggattcagtgtctggtgaggtcctaggtcatcatcgaaggccatcttctcaccatcacctcaaatggtggaagaagttatgggtctcccctggacctctgtttataagggcactaaccccatctgtgagggcttcaccatcataacttactcacctcccaaagaccccactcttaataaatcacattggtggttaggatttcaayatacaagttttggtgagacattcagtctatagcaccagttcagagggtaattgatgtcaccctgaaggagggaaccatacggcctgaaggggagtgggattacctttggccaaaggagctccagggtttctgaaatttttc

SEQ ID NO: 776872 - DNA, 685 bp, Homo sapiens
ggctcaagggatcctcccacatcagtctcctaagtggctgggaccacaggtacacgccatcacgactggctaatttaatttttttaattttacagacaaggtctcgctatgttgctcaggctggttttgaactcctgggctcaagcgcttctcctgcctcagcytctcaaagtgctgggattacaagcatgagccaccaggcctagccactggagaatttactaagaaaaatacaaattgctggggagcacccccagagtctctgattcagccatctggagtggggcctcacatcacatttctcaggacttctgaggtgatgctggtgctgctagttgggggactagcctccagaaacactgccttttttttttttttttttttttgagatggagtcttgcactgtcacacaggctggagcgcagtggcgtgatctctgctcactgcagtctccatctcccgggttcaagcaattctcctgcctcagcctcctgagtagctgggattacaggcgtgtaccaccacacccagctaatttttatatttttagtaaagacggggtttcgccatgttggccaggctggtctcgaactcctgacctcgagtgatctgcccaccttagtctcgcaaattgatgggattacaggcatgaggctctgcacccagccaagaaacactgatttca

SEQ ID NO: 776873 - DNA, 685 bp, Homo sapiens
ggctcaagggatcctcccacatcagtctcctaagtggctgggaccacaggtacacgccatcacgactggctaatttaatttttttaattttacagacaaggtctcgctatgttgctcaggctggttttgaactcctgggctcaagcgcttctcctgcctcagcttctcaaagtgctgggattacaagcatgagccaccaggcctagccactggagaatttactaagaaaaatacaaattgctggggagcacccccagagtctctgattcagccatctggagtggggcctcacatcacatttctcaggacttctgaggtgatgctggtgctgctagttgggggactagcctccagaaacactgycttttttttttttttttttttttgagatggagtcttgcactgtcacacaggctggagcgcagtggcgtgatctctgctcactgcagtctccatctcccgggttcaagcaattctcctgcctcagcctcctgagtagctgggattacaggcgtgtaccaccacacccagctaatttttatatttttagtaaagacggggtttcgccatgttggccaggctggtctcgaactcctgacctcgagtgatctgcccaccttagtctcgcaaattgatgggattacaggcatgaggctctgcacccagccaagaaacactgatttca

SEQ ID NO: 776874 - DNA, 668 bp, Homo sapiens
tggcttaatactgacatgttcaacagggatgttcaaaccaacagtaataagtgaaggactttttacacataaataatctcattcagttgactaaacaatcttataattgtatattatattgtaattaaaccacattttgttagataatgtggttttattttatttatctttgttaaggataaatccatgttttacgaacagctcaaactatagtggacacctagcagttagacgcaatgcaatgggataagtactacaaatggcttatcccaccaccctctcactccttgagctcagtccctgacaaccactagtctactttctgtttttatagattttactcttctggacatatcatattaattggattayacagttgtggccttttgtgtctagtttattttattaagcataatggtttcagggtacactcatgatataacatgtataagtactttattccgttttgttgcttaatgataatattctattgtaagaatatatctcattttgtttattcattcacccatttatgctcattggaactattttcacattgtagtgattatcagcaaattttcttgaattctgttcatgaatcctgaacattcaagcacaagttcttgtttttttaatctttgcaattttgacagataaaaattccattg

SEQ ID NO: 776875 - DNA, 644 bp, Homo sapiens
tgagtcatcggtgttggcttcatcttcctgaccagaaagtaagccgactccatgtggggaccatgtcttctaattatttaattattttttcctacagtactttctctaatagtgtgctgtgcgcattgattaaggtttatttaccaaactactgtggagaatggtggctgtgagatgaagcttcccttttcttaaaatcttggccaaaccattaacattccctgtgcctcattttatcaatattaagaataaccacaatgatgcactttcaaatattctatgaaaattaatggataattratggcgacagtgcaagatagtgattaagagggctggctctggagccaggctgcccagtttgaatcctggatctgtactgactcactgctcaataattataatgctctaaatttaccattcagttttaggcttaacagttattgaatgtttactccctgccagccgctggtgacaagcactttataagcattcttgtacttcatcattaggacatccctatgaaatagatatggttattattcccattttgcacacgggcaaggataagcgctaacctagctcttgggatatagtaggagctcaatgactttagcaaagctaaagccatttgataaattcaaaat

SEQ ID NO: 776876 - DNA, 644 bp, Homo sapiens
tgagtcatcggtgttggcttcatcttcctgaccagaaagtaagccgactccatgtggggaccatgtcttctaattatttaattattttttcctacagtactttctctaatagtgtgctgtgcgcattgattaaggtttatttaccaaactactgtggagaatggtggctgtgagatgaagcttcccttttcttaaaatcttggccaaaccattaacattccctgtgcctcattttatcaatattaagaataaccacaatgatgcactttcaaatattctatgaaaattaatggataattgatggcgacagtgcaagatagtgattaagagggctggctctggagccaggctgcccagtttgaatcctggatctgtactgactcactgctcaataattataatgctctaaatttaccattcagttttaggcttaacagttattgaatgtttactccctgccagccgctggtgacaagcactttataarcattcttgtacttcatcattaggacatccctatgaaatagatatggttattattcccattttgcacacgggcaaggataagcgctaacctagctcttgggatatagtaggagctcaatgactttagcaaagctaaagccatttgataaattcaaaat

SEQ ID NO: 776877 - DNA, 619 bp, Homo sapiens
cttgtttcattataaagttttgaatcatattctttcctaaatatatttttaaaaacaattttaaattctgtagctggctgtgttttctgtgaattctccctacctttcttctgtggaagcctatccagcaacttggaatgtgtttgtaaaataggaaggaagctaggatagtgtcccartggaaactgagctccctccctaaatggaatgtttatgtaagcaatttcacacgataaggtttacagttaaggtagcacacatccaagacccaggatttaaccttccaaagatgcagtttcatttttctgatgtatcttttcgcttgtataaaatgggtttcagctctcatacataaactactaggtagagaaatgaaaagttctttgcatgaaaaatagtattctaaggtatatgaaaacttggtgttggaagtaattttcactttttttttccattcgtttttattgctttccaaagtgaaaactccatagattcagaagccaaagggccttttgaaaaatgccactttcagatttcagccaacagccacagctgaatcgacaaggaagggttctaacaagacagttgcttgctgccggctacagttcccacttttgtt

SEQ ID NO: 776878 - DNA, 564 bp, Homo sapiens
gaaaaatagtggaaggaaatataccaaagtgctaacactagaatgtgggtttataatttttattttcctcatgatgactttctatagtttccaaatttagtattctatgtaaaatggtgggggggggggggctattatttaaaaaaaataaaaataagaaagtcaayactagaacttagatgaaaatttaacttccaggctagaatccattttataatttttcattcccatctcttcaatgtaaaatgcaatttataatatctcatatcaatcagatactaacagctatttaaaactaatttgaaaaacacacacaagtaagtatgcgtaaaactggtgaaataggaataaatcatgtggattatacctatttcaatttactggttttgatactgtatatactacagttatgtaaaaagttaccactgggggaaactgggtaaatggtagggacctctctgtaacatttttgcaaagtcctgtgagtctgtaactatttcaaagtaaagagttaataaaactaacttaaaggtttatagggccaatattcaaaggaaactatac

SEQ ID NO: 776879 - DNA, 635 bp, Homo sapiens
aaatccttacagaaaatttcattataaaacataacatagcatccagaaatcctgcatttttaaaagcccatattcagaaaaatacaatttgtattcatctctccttttgaattactatgtttcttgattatcttcatatacaagattttgtgaacacttttgtgttgctatttaatatttaggttgtgtttctcctctttatgttgggttcttcctcgttctacctttcaccttatgtgtactccatgagtaaatttatatttcttcattgagtgagttggacaaagcttcttgtctgtatctgggaaccaatggtttatgtgaaagttagaaattttgttattaaattggagcagttaaggtagtgtctcttacagtatggagtatgcatcttatattcttgaaagaattaatatattaattttaragcaagtttcatgatttgtaaaatggaaagagtaatagcaactagtaacaagtgtgtgaatatttaataagaaaaattatgccttgatcagttttgaacaactcaacatttcagcagggagctgaaatgaacaataacatttctcacttgtattacatgcaagctgtaggtcggcaatggctgatatgggtctgaccagccctccaac

SEQ ID NO: 776880 - DNA, 585 bp, Homo sapiens
gagtcaaaaaccttaaacatttacctggcattctattttactgcagctgagcttgtaggcaaactacaagatagagcatttcccagttttctctcccttttctaataacagaggagcctcgcctcatggcctatgccaccacaattccactgtaagactaccatcaatgtttccttcagggccaagggctcttcagtcagcttgtggtaaatgctggtggctgggacactcccttcagggcagtggactacmctctggcccagtgcagattcagaaatgccattcaataccaagtcctggaatcagagaccccaagagcccacttggtgtctacccacttgtggccaggctagtacctaaggtgcaagacaaagtctctttcactattccctctgcttttctcaagatggagtctcacatcaaagccacaacagctgggaatgtgctcagtctcacctgaaaccagcaagtctctgaccctcaatgtagtacctgggtatattgttggttattcagagcccaagggctcttcagtttgcaggtgataaatcctaccaggactggatccttcccttcaagacactg

SEQ ID NO: 776881 - DNA, 587 bp, Homo sapiens
gtgtgtgatgttcccctccctgtgtccatgtgttcttgttattcaactcccacttatgaatgagaacatgcggtgtttggttttctgtccttatgatagtttgctgagagtgatggtttccagcttcattcatgtccctgcaaagacataaactcatcttttttatggctgcatagtattccatggtgtatatgtgccacactttctttatccagtctattattgatgaatatctgggttggttccaagtctttgctattgcaaacagtgcgacaataaacatacgtgtgcatgtgtttttatagtagcatgatttataatcctttgggtatatacccagtaatgggattgctgggccaaatggtatttctagttctagatacttgaggaatcaccacacagtcttccacaatggttgaactaatttacactcctgcaaacagtgyaaaagcattcctgtttctccatatcctctccagcatctgttgtttcctgactttttaatgatcaccattctaacttgcatgagatggtatctcattgtggttttgattggcatttctctgataaccagtgataatgagcat

SEQ ID NO: 776882 - DNA, 620 bp, Homo sapiens
gtgaataaagaaattgggtttttggcatattatataaagttagtgatacagccagtagaactgaaaccaaacaacaaactatcatattgcacatatacgtacaaatacagagaaaacaaagcaaaagcttcatttattgaaaaaagaatttgaaacagaaaacaggatgcaaaaaaggaacctgaaggaaacatttcagtatttgcaaatgggttatatgcatatatttattaaaataaacagattgggccgggcgctgtggctcacacctgtaatcccagcactttgggaggccaaggtgggcgratcacctgagatcaggagttggagaccagcctgtccaacatggcgaaaccctgtctctactaaaaatacaaaaattagccaggcttcatggcgggcacctgtaatcccagctacttgggaggctgaggcaggagaatcgcttgaacccaggagctggaggttgcagtgagccaagatcacaccactgcactggggtgcacagaatgagattctgtctccaaaaaataaaaataaaaataaacagattgggttaaaaaccaaagcccaagttataggctgtatataataaatgtagctaaaataaaatatttcag

SEQ ID NO: 776883 - DNA, 651 bp, Homo sapiens
aaaaaaaacgaatcatcatgtacaaagaaaacccaagattgtcagctgattcattgtcgaaacaatgaaggtggaagccaatgggatggcatagtcaaagtgctgaaagaaaaatcaggtctaagagaactacaaaacactgctgaaagaaatcatcaatgacacaaacaaatggaaatacatcccatgctcatggatgggtagaatcaatattgtgaagatgaccatactgtcaaaagcaatctacagactgaatacaattcccatcaaaatactatcgtcattcttcacagaactagaaaaaaaaactctaaaattcatatagaaccaaaaaagagarcctgcatagccaaagcaagactaagcaaaaagaacaaatctggaggtagcacattacctgacttcaaactatactacaaaactatagttaccaataaaatgggcatgtataaaaatgggcatgtagacgaatggaacagaatagagaacccagaaataaagccaaatatgtacagccaactgatatttgacaaagcaaacaaaaacatgaagtgaggaaaaacaccccattcaacaaatggtactgggataatttgcaagccacaagtagaagaataaaactggatccttaattctcgttttatacaaaaa

SEQ ID NO: 776884 - DNA, 549 bp, Homo sapiens
ttttgtgtgtgtgtgtgtggtttgatagcgcatttccttttgaagcagataccattgtcctgatataccacagtgtgtttatacattcatctattgatgaatgttttgattgtttccagttttgagcgataatgaataaagatgctataaacatttgtgtgcaggttttgtgtgaacwtaagttttcaagtagttgggtaaatacctaggagcatgattgctggatcgtatggtaagactattaagagtgttatctatttatgtttactgtgattactgttttagatttccttctaaaatcttattttggactttctaagacctgcttttctgtttctttttattcttccatctggtcttcttttgaattaactgagattttttcccccattactttcaaagttatacactcaattttttttcttttactgttaccttgaaaaaaatatttttaacatgcataagtttgccaaactcttgaatactttgtaaaggtctaagaatgcttgaactccagtttatcctccttcagcttgtgtactcttttgt

SEQ ID NO: 776885 - DNA, 380 bp, Homo sapiens
tccagagcttctgcccaggcacactccaagtttaagagagcaatattcctacctggtatggaaggaagcatcttgcacacgtgggctaacttgctgcctcctggcaactaagcggacacagagagtagagacccacacacctgtgagataggcgcagggcttccaaccgtggctatgcattagaatcacctggaagccctcaaaaactasgaatgtcctggggctccatccccagacaaattaaatccttggaaatgaggcctagcacagatactttcttaaagatcctcaggtgatgctaaagtgcacagtcgttgatatagagtgaatcaaatgattgcttgagagcaaggagtttttatttaatttataaggatcct

SEQ ID NO: 776886 - DNA, 619 bp, Homo sapiens
tcttagtggccaagtaaacacaggctttgcaaacacaccatttttccttaagttcctcaaaccctaggcatgaatgaggctttctgtggttgctaatccctgggtaatgtttctttttaccattttgtaattctagcctccatccaggatgatttctttacaattttgttgagatataactgtgtgaaccccaaagatctgagacaggaatcaattaatttagaaagtttattttgccaagattgaggacaaatgcccataacacaggctcaggaggtcctgatgacatgtgcccaaggtggtcagagcacagtttggctttacacattctaaggagacaggagacatcaagcaacatatgcaagaacattggttcggtatggaaaggcaggacaactcgaagcaaaggcaggaagacttgaggtggggaggggactttaaggtcataggtgggtaagagatraatggttgcgttcttttgagtttctgattagcttctccaaagcaggcaattagatatacatttatctcagtgagcagaggggtgactttgaatagaatgggaggtaggctggccctaagcagttcccagcttgacttttccctttagcttagtgat

SEQ ID NO: 776887 - DNA, 583 bp, Homo sapiens
tcaaggctttgtatggaacattgcctccttttcccccaactccaggcactcgtactccttcctgctgctttgagagaccccagggctacagcaagaacttgtggtgcatgcagaagagccagacagcagcccaaatatcatagttcacacatccttctgcaatggcaaggggctgggaggcatctgctctggtcggaagaattttaacagactttttgcatcttaaagagctgattgctaccgtcatcaacttcatctcattgtggcctcgttttatatttttccttcatccctttgtaccccgtcattagtatgggattaagagacagagcaattgggaagtcagaaaaacaaaacagcaagttccactttagggcaatttgctgttataaaggcctttccccttgtgctacctggaggtagccagatctycttgggcccatggtcagaaggggcacggaggctcgcagagatctgcaggctgctgtagatcattaggaggtaggagcaggtctccccatccaggctctgacacattcacccagaacacactgccacaaagcctctgaacggacagcagctt

SEQ ID NO: 776888 - DNA, 628 bp, Homo sapiens
cagaaaactacacaaaagttataaagaaagagatggctattgtacaacaaaataaaaaaatctaaattacagctaagtttgaaaaataaaataaaaattaattcatttaactaacaaatgtgcatgcgtatgcgtttgcgtgtgtgtgtgtgtgtgtgtgtgtgtgtgtgtaaagacagcattagagagagacaatatgagtctgctacccactggggacacagcaacgaataaaacagaatctcttccctgggagtcagtgctgctggagccatgccaggaaacagggccaaggatgggattggtgatccatgcaggaccactgggttttattckgagaagacagggagctgttggagggcttggagcagggcaggggcatgacatccctgctttgatttttaaaatttcagtctgtctattccaaaaagcattgcttctgggtggtttgaagcagggagagccgtccagtggccactgcagtgcttcgggggaagtggagttgtgtttgaaccattgtagtaggggtggggtggtgagaggccagcaggctctgggtggactttgaggacggagcccccaggatttgctggtgtttcagatggcggcaacaaaagagaggaaccaa

SEQ ID NO: 776889 - DNA, 646 bp, Homo sapiens
tccacgagaggagaaggacaggccaaacatttagtaatgtacatgcacagaagacaagcatgctgtgcacattaataagcaagaagttctggtggtgtcacttagaatggagaatttcagagctggaaaggtcatctacaagaaacagaggccatgcgccagctgtgggaggcaccagggagccctaccagtcaatgtctccattgccttaagtctctcccgaggggtgggaaggtggcgctcaggtcagacagcgcagacatgacaacgcgggttctggctgttaattgtaggctgtgtcttcttcacagcaaataaccccaaacagagaaataaaaatccccaaacgcacctaattatcattcactctgcagccaccataatggctcatctcattctctaaacttctcaagctcataccacattccagacagaaagtcctctgctgagcaaaatttttaaaaaaccattcccacaggccaggtgcrgtggctcacgcctgtaatcccagcctgtgggaggctgaggcgggcagatcacttgaggccaggagtttgagaccaccctggccaacatggcaaaacctctttactaaaaatacaaaaattagctgggcatggtggtgggtgcctgtaatcccagctac

SEQ ID NO: 776890 - DNA, 615 bp, Homo sapiens
tcaaatggcattcattttattatttatttatttttatttcattatatgcattacttataaatgactccaagtcttttatttaaaaagatacactttttaaaacaaacatgcatataaacacacatacttacatacttgttgcaggacagaaaatgtgttacatgcctattatagctttagaacaccttgagctatctggtcaatgtttggattttgatgatcattatgtatattactgactcagtttatttgctctcagcatatacactatggactgttaagatctctggtgtctctttgaattcacccgaggaaagaacatttccagyaccaactgtgacattagaaaaactttgagaaacagtcatatccaatgatgcaaacaacttgtttcatgatctctataatctaatgtgaccctagtctaggtcacataattattcctcaggtcttattaattcatttcactaactaaacctgttagtttatagatagcatagatagatagatagatagatagatagatagatagatagatagacagacagacagacagacagatagatagatagatgatacatagatagatacttagatagataggatagatagatg

SEQ ID NO: 776891 - DNA, 625 bp, Homo sapiens
agtactggcaggaactaagcaaaggaataataaaacaaacacgtatttatttttgactaatattatttgattaaaaacgaacgtgatagaaaatcgctgtgggtatatgtcttatatatacataggtgtgtagatatgtcttatatatacataggtgtgtaaatatggcttatatataaataggtgtgtagatatgtcttatatatacataggtgtgtagatatggcttatatatacataggtgtgtagatatgtcttatatatacataggtgtgtagayatggcctatatatatacataggtgtgtagatatgtcctatatacacataggtgtgtagatatgtcctatatatacataggtatgtagatatgtcctatatatacataggtgtgtagatatggcttatatatacataggtgtgtagatatgtcttatatatacataggtgtgtagatatggcttatatatacataggtgtgtagatatggcttatatatacataggtgtgtagatatggctgatatgtacataggtgtgtagatatgtcttttatatacataggtgtgtagatatgtcttttatatacataggtgtgtagatatggcttatatatacataggtgtg

SEQ ID NO: 776892 - DNA, 519 bp, Homo sapiens
gtttctttcaagggacttcatattatgcagccaatgtgatattattacaaaatatatgaaaattatgccaaatgaaaatgccatagataaatacagttaaatgagtagaatgccaagattttaatccacaagtctaaaaaaatttcttttttagtttcacaactttgaatttgtgaattttagctattttaatcagaatcagaatatcgtatttctcaaaattataaatcactgcttgtctctgtatacacacagatgcatgcatacatatttagttacattttttgaaatggcaattattcttattcaaagyataagcatttaaagtacttaaatttttttttttagaaaatagaaacatgttaggtagacttgactcatgtccccatttttggcatgaggtctatagacatagcattgcagaactcctttatattactatctgtttatcccttcatctattcagaaatgcattcaaatataactttgatttcaaatatttgtttgggctattagata

SEQ ID NO: 776893 - DNA, 513 bp, Homo sapiens
aacacgcccggctaatttttttgtagtttttagtagaggcggtgtttcaccgtgttagccaggatggtctcgatctcctgacctcctgatccacctgcctcggcctccaaaagtgctgggattacaggcgtgagccaccrcccccggccagggccagatcacacttgtttttaatctcaacaagatctaagaaaactatagtctatttaagaacatacttttatgtgatttaattttaattttgaaataaaaagttatttcaagatattttatgaagagcattgagtatttcataacttaggactaaggtagtgttggaaggtgaaaacacgtggaaaataattagtcaaaaacaaatttaagcaaagatgtcactcatttaaatgtgtgcaaacattgttcttaattaaaatattgggaagataggaatatattaagcacatatttaaaaaaagagagagaagagaggtttggacagagagcatcaacctcttactttttgccttggttata

SEQ ID NO: 776894 - DNA, 513 bp, Homo sapiens
aacacgcccggctaatttttttgtagtttttagtagaggcggtgtttcaccgtgttagccaggatggtctcgatctcctgacctcctgatccacctgcctcggcctccaaaagtgctgggattacaggcgtgagccaccacccccggccagggccagatcacacttgtttttaatctcaacaagatctaagaaaactatagtctatttaagaacatacttttatgtgatttaattttaattttgaaataaaaagttatttcaagatattttatgaagagcattgagtatttcataacttaggactaaggtagtgttggaaggtgaaaacacgtggaaaataattagtcaaaaacaaatttaagcaaagatgycactcatttaaatgtgtgcaaacattgttcttaattaaaatattgggaagataggaatatattaagcacatatttaaaaaaagagagagaagagaggtttggacagagagcatcaacctcttactttttgccttggttata

SEQ ID NO: 776895 - DNA, 580 bp, Homo sapiens
tcggagatgtatcttctctgtggataattagcctcttgtattaaaaataaaacctataaatatcacttcattagtaggattctatcctcttccctgctctctttatgatctggaataacccacagacatttagaagtctaatggccagaacgaaataaccgaggttggttttcggggctgttgagtgttgtgggtcaataatgaaaacggactgctcctaggttttagatcaacgagctctcaagggaaataaatgaaatgaagagaccatgggagtcaggaatttgctagttgcctcatttccactttttgtatrttcttcttagttttccttgtacattaaatcattatgctctcaccaaggagagaatgataagtacctgattcataagatcttcttttctaagtaagttcctaattttttcaagggtaaataataataattcaattcttcagttcttctaagcatcatctatcatgagttcaaatatggtcacattaacataaatgttcaaactatgatagctcttaaccattgaggaacttaacttttcccctggatttttttcaggagtcactg

SEQ ID NO: 776896 - DNA, 578 bp, Homo sapiens
atacataaagggcagaacttctgttcccatcctgtcctctgaagacccaaagatgatggtgctttgacataagcctcagataggatcagccttaaattggagtgactttataggtagatgacttttttttttttcaaaagaaggcattgcttttcatttttaaacacattctgttcagaggcccttaaacatcttgaaagtttgattaagaattctaggtacccccacaatwatcctcaaataacataagtttctcttgcaaccatctagaacttttgctcattccccctccacagatgttcaggatattcttaaacaaatagtgataatcctgcttttattcctgtgaattatacattcccagtcctccaatgtatagcttctcttttgagggtcaccataatttcacagtcaggcagtcagctgagggaggaacagagccaccttaaccttcagctaatgaaaaattctcagtgggctaaattcgtacagaattgaatcagtacattaactctaaaacctctgcaggttgtctgagacacaaacacctaagcaataatctgcatgaaggcatagag

SEQ ID NO: 776897 - DNA, 624 bp, Homo sapiens
caatctgtttagatgtcatatacactcttaacagcagcctgaaagagtaattaaatattacttttaaaaaagagcttggcattgcagtctgtttcatttttctcatctctttcttttttttcatcccactaatacaacactttagttttagagccaaacatgtactctgcagctagagaattagaattactggtagcttacattcaatttaggaagaagcagcaactgcataatayatccaaatagtagcaaaggtaagaatgattgatataaataatcatatagctatcaacaggtctggagatacacaatacataacattttaaaggagaataactttaaccattctcacctaaaattctcagcagccagatcagaaacaaggttctgctatacaaatgttatttaaaagtctatgtgggtagctccccatttcctagcccatctctgatcaagggaaattaacaattacatattccagggttaagctcaaatgtgatttctgctcttcccctgcaaattgttcaataaaggactggaagtactgtgaaaaaagaaagagagaaagaaatgttcttatcatccacaatatacttctccttccaacagcaaatctaaccacag

SEQ ID NO: 776898 - DNA, 609 bp, Homo sapiens
agacgtgagatcggatcctatactttgttccagttcttctggctgatgtttttcaatgttcattcttgttgtcttaaaatcagaatatgtgaattagatttggagagtggagtctttattaaatgagtgttgcgcaaattttctttgtttaataatcagcttctctacatttgatattcatacttgagatacttacaagctctccccaagcaatactgtgggatttccaaaagggtcaaacaatgaagaatattaaatttaaatttattttctttttcccgatagtttasaacccatggagtaattttaaattattatagtatcactataactgtaattcttgtcagtgatgttaagcaaagcctaattagtttaaaaagatgcaaacatcagctaagagtatgttaacttttagaatctacccggattttaaaggtatgtcattatggaaccattagataaaattcttacttgattatcagaaaaatgaggactgaactttacatttgaatatatatttttaaatattttatgtatctttttaaaattatccattttataagtacttttcagtaaaatttagtaaatttagaacccatggaataattt

SEQ ID NO: 776899 - DNA, 607 bp, Homo sapiens
gtgcacctggaaaagccgcagacactcagcggtgtctgtggaaaagctgcaggccatgaaagcagcctggagggaggctgcaccctgcaaagccacaggggtggagcttcccaagaccataggaagccacctcttacatcagtgtgacctggatgtgaaacatggagtcaatggagatcattttggagctttaagatttgactgccctattggatttcagacttgcatagggcctttagctcctttgttttagccaatttytcccatttaaaatgggtatattattcaatgcctgtacccccactgtatctagcaggtaactagcttgcttttgattttacaggctcatatgtggaagtcactagcattgtctcagatgagactttggattgtggacttttgagtcaatgctgaaatgagttaagaccttgggggactgttgggaaggcatgattggttttaaaatgtcaggatgtaagatttggggaggggccagaggtggaataatatggtttggctgtgtccctacccaaatctcatcttgaattttagctcccctaattccaatgttttgtgggagggatccagtgggagataattgaatcat

SEQ ID NO: 776900 - DNA, 508 bp, Homo sapiens
tacagagaaacttccttccagaaagaaaaagaggaaccaagagaagaatgaccatcatcctgatgtgcccagaactctttcagttttagcacctaatattgtacatcctgggaaacccctcagtccccaggactgttggtcaccccacaaaggacacttcacaaattattaaatctgaacaagtaacaggtacaagatattatgatgatgacttaatgaccgaataagactctgagggtaaatcaagatttaaattgcagttacgtgttatacaatrcatgtagttcaggctggtaggaggaccttccagaaactggaaacatgggactctgaggatgagagagcacacgcaggtgagcggagacttcttctcctcctaatatcccactgttgacgggtgctgtgttatctgtactgtggcccctctgcagcacaacctgagggaggaaggcaggtcagacacagccagggcgttgctcaaaggcctgggaccaggcagaggaggatc

SEQ ID NO: 776901 - DNA, 497 bp, Homo sapiens
agccactgtggaaaagagtacaggagttcctcagaaaattatgtagaattggcagggcatggtggctggcacctaatcccagcactttgggaggctgaggcgggcagatcacttgaggccaggagttcaagaccagcctggccaacatggtgaaaccctgtctctactaaaaatacaaaaattagctgggcatggtggcaggtgcctgtaatcctagctgctcaggagactgaagcagsagaaccacttgaacccgggaggtggaggttgcagtaagccaagatggtgccactgcactccagcctgggtgacagagcgagactccgtctcaaaaaaaaaaaaaaattacgtagaattaccatatgatccagcaattccacttctgaatatatgcccataaggactgaaagcaggaatttgaacaggtatctgtacaactgtgttcacagcagcattcttcacaatagccaaaatgtggaagtaacccaagtgtccat

SEQ ID NO: 776902 - DNA, 497 bp, Homo sapiens
agccactgtggaaaagagtacaggagttcctcagaaaattatgtagaattggcagggcatggtggctggcacctaatcccagcactttgggaggctgaggcgggcagatcacttgaggccaggagttcaagaccagcctggccaacatggtgaaaccctgtctctactaaaaatacaaaaattagctgggcatggtggcaggtgcctgtaatcctagctgctcaggagactgaagcagcagaaccacttgaacccgggaggtggaggttgcagtaagccaagatggtgccactgcactccagcctgggtgacagagcgagactccgtctcaaaaaaaaaaaaaaattacgtagaattaccatatgatccagcaattccacttctgaatatatgcccataaggactgaaagcaggaatttgaacagrtatctgtacaactgtgttcacagcagcattcttcacaatagccaaaatgtggaagtaacccaagtgtccat

SEQ ID NO: 776903 - DNA, 576 bp, Homo sapiens
agaagggacctgtgcacctgcattttaacagcacccctagtggttctgacacaagtagttctgcagaccacatttgaaaaataacaatttattcaaactcagctaatgagtcattgcagatagataaatcaacttcactgatccagagaaaacctgagaaacagaaggaagccttaaaaaaatgagatgggccgggcgcggtggctcacgcctgtaatcccagcaytttgggaggctgaggcgggcggatcccgaggtcaggagatcgagacccatcctggctaagacggtgaaaccccatctctactaaaaatacaaaaaatcagccgggcatggtggcgggtgcctgtagtcccagctacttgggaggctgaggcaggtgaatcacttgaacccaggaggcagaggttgcagtgagccgagatcatgccactgcactccagcctgagtgacagagtgagactccgtctcaacaacaaaaaaaaaaagagaaaagcagaaaataaaagtcctaaaacaataaagctctcatatactgtattccttagaatttcctcagacctttgatcaaagact

SEQ ID NO: 776904 - DNA, 576 bp, Homo sapiens
agaagggacctgtgcacctgcattttaacagcacccctagtggttctgacacaagtagttctgcagaccacatttgaaaaataacaatttattcaaactcagctaatgagtcattgcagatagataaatcaacttcactgatccagagaaaacctgagaaacagaaggaagccttaaaaaaatgagatgggccgggcgcggtggctcacgcctgtaatcccagcattttgggaggctgaggcgrgcggatcccgaggtcaggagatcgagacccatcctggctaagacggtgaaaccccatctctactaaaaatacaaaaaatcagccgggcatggtggcgggtgcctgtagtcccagctacttgggaggctgaggcaggtgaatcacttgaacccaggaggcagaggttgcagtgagccgagatcatgccactgcactccagcctgagtgacagagtgagactccgtctcaacaacaaaaaaaaaaagagaaaagcagaaaataaaagtcctaaaacaataaagctctcatatactgtattccttagaatttcctcagacctttgatcaaagact

SEQ ID NO: 776905 - DNA, 595 bp, Homo sapiens
aaaagaagacaaccaaaggtcatgtgaaatagtgatggctcactaataaatccaggacgagttatcactactcaagcataagctttcctaagactgctacaaagatgtttgatataaaggcttgggttgagaatgttgtggaatgaactgcaagggacccctgtggcttctttatagyaattctttggcccttgttctactactgctcaaacaagtccatactgtcctggaaattggccaggatgattgaggccagaggaaaggaacaaaagaagaaaaaacgttgagaaaatatatattacataagggaaacaaccgaaaaaaggattaaaggaatgaacaggctgtgtaaaattatgtagctttagaaggacccactaaagcttcttccttggatattatgacagtattatttaataaaagcagtctaaccataatgaagaatcatgctagttcttacctcagtattgtattaacttccagtctttgcagtagaaaagtttattgatgtctgttgacagttattttaaattagcatttattatgctatcagttttttataaatgaagtagtcatttgccattttgcagtatat

SEQ ID NO: 776906 - DNA, 595 bp, Homo sapiens
aaaagaagacaaccaaaggtcatgtgaaatagtgatggctcactaataaatccaggacgagttatcactactcaagcataagctttcctaagactgctacaaagatgtttgatataaaggcttgggttgagaatgttgtggaatgaactgcaagggacccctgtggcttctttatagtaattctttggcccttgttctactactgctcaaacaagtccatactgtcctggaaattggccaggatgattgaggccagaggaaaggaacaaaagaagaaaaaacgttgagaaaatatatattacataagggaaacaaccgaaaaaaggattaaaggaatgaacaggctgtgtaaaattatgtagctttagaaggacccactaaagcttcttccttgratattatgacagtattatttaataaaagcagtctaaccataatgaagaatcatgctagttcttacctcagtattgtattaacttccagtctttgcagtagaaaagtttattgatgtctgttgacagttattttaaattagcatttattatgctatcagttttttataaatgaagtagtcatttgccattttgcagtatat

SEQ ID NO: 776907 - DNA, 566 bp, Homo sapiens
ctcaagaaggagttaatattagggcagagacctacctgaggtgatggaagaagccatttcctactccaggagaaggacatcctgggtagatgaaacagcaagtatgaaggctccaagcttggtgagtttgaggaaaatgtagaagatcatggtgactaaagtagagaaggtgagaaktgggagtagcaggagttaatgtcagagaggtaagcaggagacagatcatattgggccttagaggttatggagagaaatttagattttgttttccatgggtgggaagcagttggaggattttgagcaggacaatgatctatgattagtatttttgaaatatgactggctgcttttgtgtataaggtgaagaatgtaactagagagaccagataggaggagaggtgcaggaatccaggtgagatgatggctccgatgaggatcatcatgaaggatatggtgagaagtattcagatttgggatatatatattttataggtagagacaacaggatggattggatgtgatggattggatatggagtatgagggatcctgaggaatcaagactgc

SEQ ID NO: 776908 - DNA, 508 bp, Homo sapiens
catcaaaagaaaaaaatagaaaaatttcaaataaacaacttaatgatgcatcttaaagaactagaaaagcaagaccaaaccaaactcaaagttagtagatgtaaagaaataataaaggtcagagcagaaaccaatgaaattgaaacgaagaaacaatacaaaagatcaatgaaagaagaagttcgtttttgaaaggataaacaaaactgacaaatctttagccagattaattgagaaaaaagagataacaaataaaatcagagacgaaataggagacattacaactgatactacagaaattcaaaggatcattagaggctgctatatgccaataaatttgaamacctagaagaaatggataaattcctagacagatacaacctcccaagattgaaccatgaagaaacccaaaatatgaacagaccaatgatatgtaatgagatacaagatgtaatgaaaaatctcccagcagagaaaagtccaggatccaatggcttcactgctgaat

SEQ ID NO: 776909 - DNA, 655 bp, Homo sapiens
tttatcccactccctcttctcccatcccttgtggaggaaggtgccagccattggtcctcgtttctcagtggggtctccttagctttctcttttcatccagatcagtgggagcagatggctgtggcaaggtccagcctgcagggaaggcagatggccagtctattttggctttcacataggctacgctcttccagcattgtctctacattaataaaagtgatgttttagcctcctgctagctgttatcttatttctcaattggttcagaactcasgcagggaattgggctgttatgaaactgacttcacaggcttcatcccaggagaaacagtaaagttcatatggcctgggtttgagtctcacttggccacttacttggtcaatggctcactttccacatttgtaagataggtataataatgctacctacctaactgggttgttttgaagaataaatgggttaatccttggacagtacttacagcagtgaccactcatagttacacttaagaaatgtagccaataccattctagccagggcgggggtggagactgtttctagggcctctttgaagatagtgtgccaaatttttaatggtttactggaatggacatgtgattactcaacatttaataaagcctagatatgagcaca

SEQ ID NO: 776910 - DNA, 392 bp, Homo sapiens
aaaaaattgccatgagtgttcgctagatgcctgccactagacctagatttatttcatttttgatacttacaaataaagtatcattgttttcattatacaaataaagaaatggaagctcagagaagtgaaatgtcttacctaaggtggatggaacccagtgttcagtttcttggacactaccaggttttcttctcttagggaagaaaataggtcaggttatgcttccttcctgacygtggggcctctttcaaccaggttcctctttatgggacagtctttttttgtgtgtgtgacgccagcctccctaggaccagactaggtctgaagccccgggcgagatttgccagatcttatactgaccaccaggtggtgctgttggcccaacgtatagt

SEQ ID NO: 776911 - DNA, 568 bp, Homo sapiens
tccaggattgtatacaaatggatttgtgagctccttatctatctaattagtgggttagattagagttttcccacaattgtgagtaggtggaatagcaggtgctgtgatacttaatataactgaggaaactgaggctctgagaggttaagggaaagattcaaggtcacacaataagacaggagcagaaccaaagcttaactgaatttttgtctgacgagctttctggtataccaccttacctttcaagttagcttcctcgtcaatccccagtgcagctaggaacagaatccagcctctctccaggaagattcctctcgtcttccagcccctaaaatgttggtcaggcagggcatgtcctccagcctgtgccacggtggcrgatgtcatgtggacgggcccctatgacaaaaagcatctggaacttggagcctggcacagtcagtgacctggaaatcccttctgaaactcccccctgccacatcacctgcccagcccatgcctcctctgtgtctatgttaattaaagcaatccctttctcaatgtccattcccctgtcccaaccccaaat

SEQ ID NO: 776912 - DNA, 615 bp, Homo sapiens
gaaatcaatgactaatatacataaagctcttaggacagtgtttcaatttaattaatatcatctaattgttatttgtcttaacattattatagatgcacctgaaagcaaacagaggctgtgaagggcaggacagagttgagcaaagaggcctacctcccccacggggaagaaaactaactgaaactaacagtcaagagatgtggttctattcctcattctgccacttaccatctgtgcaatcttgaaccaatcagtcactttactccatttaggtttcctcatctgtcagatgagaaaagtcaaccagattgggtaggggaggcctagcaaatgtccactgactccctcatgtcatccagtgcccctgtagactccgaggggtacacccagccaccccacttgaattaagactgactagtgaagatacccacttaagaccaggttgaccagctcatcctggtttkcctgggactttcctagttctaaaatgaaagtttcatatcccaggaacataattccagaaaaaccaggatggttgatcatcctaattaggtaaaaaattatatcatctagtccatcattttcccaaactttgctgcttatgttaccaccacc

SEQ ID NO: 776913 - DNA, 616 bp, Homo sapiens
  misc_feature 324: n = A,T,C or G
atatatattctttccagtaacagaagtggtgtataaccatttcccactcacagattaaatctttgaaaaatgttatttttatagaaaaactccttgtgctaaagcttaaaaaaaaatacacattacatcttttttcttctctttattgtccaggaaatttttttaaagtgatctggtcagtatattgtcccagtatcagagaaacacaaaaccaacagtaaatagaaataggccctgaaaatatatgatagtgctactcatgaaaaggcaaactamttgttaaagactttgaatgaatgcgaatggggctaataattcagattntccaggtaactaagcagttagtgctgattgtggctgttctaagttttaaaacgtacttcacttttcactgggctatctctgaagttctcagatacctcaatgtcaaggagtactcaatttttctaaacactctgacgcaagcattctgcaaagaaagaacagcaatagagtcagggcaaaaacactagaggaaaatctttttatttaatcaccaagaaagctgaaaactcatgtcgatgtgttattaatgcagtgcactcataggttagcgctctctgagatcgtggtcatt

SEQ ID NO: 776914 - DNA, 628 bp, Homo sapiens
aaatgtatttaattcaaattttgtgcaatctttaaaattctccaatgcttcacagagaccctgctttttggattttgagtcttgccatattttggtaatgtgtgagccagcagcaacaatgagcattcatagaaaaagactttggaaattactgtgtgattccaatacagtatatcataaaccaagcccccagaagagagaattttcartgtcaccattttagggtaccactataattctttttatactcaactaacttcaaataaagtactcatgccgggcatggtggctcacacctgtagtcccagcactttgggaagccgagatgggcggatcacctgaggtcaggagtttgagaccagcctggccaagtgaaaccccgtctctactaaaaatacaaaaactagctgggtgtggtggctggtgcctgtaatcccagctactcgggaggctgacacaggagaattgcttgaacccgggaggcagaggttgcaatgagctgagatcgcgccactgcactccagcctgggcgacaagagtgaaactctgtctcaaaaaaaaaaaaagaaagaaaatgaagtactcttaattaaaaaaaaaataaaaaaaagaaaaagagtacacaatc

SEQ ID NO: 776915 - DNA, 626 bp, Homo sapiens
gcctttagaatacctgtatgacagatgaaatataatagtggtgttcaaaaaaaaataatgaaagaaagaggcagatgttttaaggagctaaaagtagacacgcaagaatatacggtggttcacaagtttagagagtagtctagaataataaaaaattaaaaataacaacaaacagcataaataattttatatttattaggttattttatgataaaaattcttaacgaactagatatagaaagratgtacctcgacataatagagaccatgcatgacaaacccacagttaataacatactcagtggtggaaaaccgaaagctttttctctaaaatcaagagaaagcaagcatgcccactctcaccacttcttttcaacatgtattactttttgaatatttaggaattattttacagtgtggagattttgtaaaatacaaaaaaagttaagtaaaattaaaattaaattacaactaggattgtgttttgtgtttaggagtatacttttaattaatatttataaatgaatctaccagattaaaagacataattatagaatttaggcatttacagtggaacaaatgttctttaacatgttggaaaaaaagatgctacctgcataattgat

SEQ ID NO: 776916 - DNA, 639 bp, Homo sapiens
gactgtctttatgcctagggtagccctgaatcagccttactttatgaaagagtgaattagtcacaaactttggcatttgagaaatgtgtgtgtgcatacacttagaaaacaaaaacaagaaatgacctttttctgtttttctaatttttttattttttatcttttatgttttttaggcaggatctcactttgtcactcaggctggaatgcagtggcatgatcttggttcactgcagcttcaaccgcctgggttgaagcgatactcttgcctcagtcccccaagtagctgggactactggcgtgtgccaccacacctggctaattttttatttttatttttgtagaaacagagttcgccatgttgcytaggctggacttgaactcctgagctcgagtgatccgcctgccttggcctcccaaagtgctaggattgcagacgtgagccactgcacgtgcccggcctgtttttctaaaattaaattcagttgaagtgaccatcaccaaggttgatgacaagttcaatgtcagatcattttggtgtcccttgcctatgtccttcccgtttgagatcatgtgcaccataacccaccacagcccccatcccagggcttttaggcagtccagtaaaatgaaccctga

SEQ ID NO: 776917 - DNA, 639 bp, Homo sapiens
gactgtctttatgcctagggtagccctgaatcagccttactttatgaaagagtgaattagtcacaaactttggcatttgagaaatgtgtgtgtgcatacacttagaaaacaaaaacaagaaatgacctttttctgtttttctaatttttttattttttatcttttatgttttttaggcaggatctcactttgtcactcaggctggaatgcagtggcatgatcttggttcactgcagcttcaaccgcctgggttgaagcgatactcttgcctcagtcccccaagtagctgggactactggcgtgtgccaccacacctggctaattttttatttttatttttgtagaaacagagttcgccatgttgcctaggctggacttgaactcytgagctcgagtgatccgcctgccttggcctcccaaagtgctaggattgcagacgtgagccactgcacgtgcccggcctgtttttctaaaattaaattcagttgaagtgaccatcaccaaggttgatgacaagttcaatgtcagatcattttggtgtcccttgcctatgtccttcccgtttgagatcatgtgcaccataacccaccacagcccccatcccagggcttttaggcagtccagtaaaatgaaccctga

SEQ ID NO: 776918 - DNA, 646 bp, Homo sapiens
ataattgaatcatggggcagttttccccatactgttcgcgtggtaatgaataaatctcaagatctgatgggttttttttgttgttgttctcgttgttgttgtttttattattttcgtttgtttgtttttgaggcagagtctcactctgttkcccaggctggagtgcagtggtgcaatctcggctcactgcagtctccacctcccatgttcaagtaattctcctgcctcagtctcccaagtcgtggggattacaggtgtgtaccaccactcccagctattttttgtatttttagtagagacggggtttcaccatgttggccaggctggtctgaaactcttgacctccagtgatccacccacctcggcctcccaaagtgctgtgattacaggcgtgagccaccacactcagccttgatggttttataaatgggagtttcgctgcacaagttttcttgcccacggccatgtatcttcctttgccttctgccatgattatgaggcttccccagccatgtggaactgacagtccattaaacctctctcttttataaattacctagcctcaggtatgcctttattagcagcatgagaatggactaatacaggggcctacttgagtgtggagggtgggaggagggtgaggacc

SEQ ID NO: 776919 - DNA, 646 bp, Homo sapiens
ataattgaatcatggggcagttttccccatactgttcgcgtggtaatgaataaatctcaagatctgatgggttttttttgttgttgttctcgttgttgttgtttttattattttcgtttgtttgtttttgaggcagagtctcactctgttgcccaggctggagtgcagtggtgcaatctcggctcactgcagtctccacctcccatgttcaagtaattctcctgcctcagtctcccaagtcgtggggattacaggtgtgtaccaccactcccagctattttttgtatttttagtagagacggggtttcaccatgttggccaggctggtctgaaactcytgacctccagtgatccacccacctcggcctcccaaagtgctgtgattacaggcgtgagccaccacactcagccttgatggttttataaatgggagtttcgctgcacaagttttcttgcccacggccatgtatcttcctttgccttctgccatgattatgaggcttccccagccatgtggaactgacagtccattaaacctctctcttttataaattacctagcctcaggtatgcctttattagcagcatgagaatggactaatacaggggcctacttgagtgtggagggtgggaggagggtgaggacc

SEQ ID NO: 776920 - DNA, 646 bp, Homo sapiens
ataattgaatcatggggcagttttccccatactgttcgcgtggtaatgaataaatctcaagatctgatgggttttttttgttgttgttctcgttgttgttgtttttattattttcgtttgtttgtttttgaggcagagtctcactctgttgcccaggctggagtgcagtggtgcaatctcggctcactgcagtctccacctcccatgttcaagtaattctcctgcctcagtctcccaagtcgtggggattacaggtgtgtaccaccactcccagctattttttgtatttttagtagagacggggtttcaccatgttggccaggctggtctgaaactcttgacctccagtgatccacccacctcrgcctcccaaagtgctgtgattacaggcgtgagccaccacactcagccttgatggttttataaatgggagtttcgctgcacaagttttcttgcccacggccatgtatcttcctttgccttctgccatgattatgaggcttccccagccatgtggaactgacagtccattaaacctctctcttttataaattacctagcctcaggtatgcctttattagcagcatgagaatggactaatacaggggcctacttgagtgtggagggtgggaggagggtgaggacc

SEQ ID NO: 776921 - DNA, 607 bp, Homo sapiens
tcagtgtttccccatctctctcctttgcaactagctgcttcctctctggaattttaacttctattcttggaggagagaacatttttaaaagctagcaaactcagtaaagactccaacacaatttttttaaaataaaaattacctccaaaaatgatcaaagcaaggtacaatwattgtagacaacattagcaataaagagaaacaaaaaagaataaaatttatattactatcacctcatcacccagaggaaattatgatttattactccttggtctatattcttccagaccttcttaacacatataacacatactttgtccattttgttttgctgttgtgattatccttgtctcttaaatttcaaaaataaccatggtcattccttaggataattctagaagtaaatatcataactatattttctgagtcaaatagcacacatattttgaaggtcttctcttcagtttccatacacattcccagtctctcctctcctctccaaccttcataggcagcctggagatgtgacaagactcacagcactgctgttctggtttactctgtaatatctccatttgctgaagaattgtttgataaaagaccatgt

SEQ ID NO: 776922 - DNA, 607 bp, Homo sapiens
tcagtgtttccccatctctctcctttgcaactagctgcttcctctctggaattttaacttctattcttggaggagagaacatttttaaaagctagcaaactcagtaaagactccaacacaatttttttaaaataaaaattacctccaaaaatgatcaaagcaaggtacaatawttgtagacaacattagcaataaagagaaacaaaaaagaataaaatttatattactatcacctcatcacccagaggaaattatgatttattactccttggtctatattcttccagaccttcttaacacatataacacatactttgtccattttgttttgctgttgtgattatccttgtctcttaaatttcaaaaataaccatggtcattccttaggataattctagaagtaaatatcataactatattttctgagtcaaatagcacacatattttgaaggtcttctcttcagtttccatacacattcccagtctctcctctcctctccaaccttcataggcagcctggagatgtgacaagactcacagcactgctgttctggtttactctgtaatatctccatttgctgaagaattgtttgataaaagaccatgt

SEQ ID NO: 776923 - DNA, 572 bp, Homo sapiens
tttgagcctgtgggtgtcattgcatgtgagatgagtctcttgaagacagcatagagctgagtctttcttctttatccaacttgccactctttgcctttagtgagatgtctagcctgtttacattcaagattaatattgatatgtgtggatttgaacatgtcatcatgttgttagctggttgttatgcagacttgattgtgtagctgctttacagcgtcaaggatctatgtacttaagtgtgtttttgtggtgactggaaatggttttttatttccatgtttagtacttccttaaggrtctcttgtaagacaggtctggtggtaacaatttcccttagcatttacttgtctaaaaaggattttatttctccttcacttatcaatttagtttggctggatattaaatttttggttggaatttatattctttaagactgctgaatataggcccctaatttcttccggcttgtagggtttctgctgaaaggtctgctgttaacctgatgggttccccttataggtggcctgccccttctctttggctgcctttaagatttttttctgatggccaga

SEQ ID NO: 776924 - DNA, 435 bp, Homo sapiens
catgtatcactcccacacaagcttatagcaaagaggaaatagattccacaaggacaaacttcctccctgatctcaaattttttcctccgtaagaatcttttgcccaattatctgtttggctttaataaatgtttatcaataactatttaacacccagaaattatttttcttttttccggattatgccaaaaaggcaaaattaacataacaaaggttttaaaagattaagtactaaacaagatgcagtattaaagttactaatcatagccaggcacagtgactcatgcctrtaatcccagcactttgggaggctgaggtgggtggatcacttgaggtcgggagttcaagaccagcctggccaacatggagaaaccccatttctactaaaaatacaaaacaattagccaggcgtggtggctggcgcctgtaatccca

SEQ ID NO: 776925 - DNA, 550 bp, Homo sapiens
  misc_feature 546: n = A,T,C or G
aatattcataacatgctttttaatcatgcatttgtagaaaaaccttatttaagaattagttacaatagaaaagttgaagctatttttttttaaagaaaatctgactggaggctattaaccttagtacacttatgcaggaacagaaaaccaaatacctcgtgttctcacttgtaaatgggagctaaatgttaggaacttatgaatgcaaagaaggaaacaayagccaagccaagcgtagtggctcatgcctgtaatctcaccactttgggaggctgaggcaggcagaccacttgaggccaggagttcgagaccagcctggccaactcagcaaaaccccgtctccattaaaaatgaaaaaagattagcccggtgtggtggcacacgcctgtaatcccagctgcttgggaggctgaagcacaagaatcacttgaacccgggaggaggaggttgcagtgagccaagattgtgccactgcactccagcctgggaaacagagcgagacactgtttcaaaaaacaacaaaaaaagaccaggccctggggctancatg

SEQ ID NO: 776926 - DNA, 550 bp, Homo sapiens
  misc_feature 546: n = A,T,C or G
aatattcataacatgctttttaatcatgcatttgtagaaaaaccttatttaagaattagttacaatagaaaagttgaagctatttttttttaaagaaaatctgactggaggctattaaccttagtacacttatgcaggaacagaaaaccaaatacctcgtgttctcacttgtaaatgggagctaaatgttaggaacttatgaatgcaaagaaggaaacaatagccaagccaagcgtrgtggctcatgcctgtaatctcaccactttgggaggctgaggcaggcagaccacttgaggccaggagttcgagaccagcctggccaactcagcaaaaccccgtctccattaaaaatgaaaaaagattagcccggtgtggtggcacacgcctgtaatcccagctgcttgggaggctgaagcacaagaatcacttgaacccgggaggaggaggttgcagtgagccaagattgtgccactgcactccagcctgggaaacagagcgagacactgtttcaaaaaacaacaaaaaaagaccaggccctggggctancatg

SEQ ID NO: 776927 - DNA, 550 bp, Homo sapiens
  misc_feature 546: n = A,T,C or G
aatattcataacatgctttttaatcatgcatttgtagaaaaaccttatttaagaattagttacaatagaaaagttgaagctatttttttttaaagaaaatctgactggaggctattaaccttagtacacttatgcaggaacagaaaaccaaatacctcgtgttctcacttgtaaatgggagctaaatgttaggaacttatgaatgcaaagaaggaaacaatagccaagccaagcgtagtggctcatgcctgtaatctcaccactttgggaggctgaggcaggcagaccacttgaggccaggagttcgagaccagcctggccaactcagcaaaaccccgtctccattaaaaatgaaaaaagattagcccggtgtggtggcacacgcctgtaatcccagctrcttgggaggctgaagcacaagaatcacttgaacccgggaggaggaggttgcagtgagccaagattgtgccactgcactccagcctgggaaacagagcgagacactgtttcaaaaaacaacaaaaaaagaccaggccctggggctancatg

SEQ ID NO: 776928 - DNA, 631 bp, Homo sapiens
agcaaagtgtgaagtcaatctttagaagtctaaaatgaagaaggcttacaacactctatgtcagatgccatgccatatctcttacataaattatctcatttttcctttgcatggaatatattcaaaaaattgaacaagttgcccaaatactcagatagtaaatgtggcagagctaggattgaaactgaagatacctggctgtaaaacttgtacttttcattgtatgataaattttctaaaagtaggccgggcacggtggctcatgcctgtaatcccagcactttgggaggcaaggcgagtggatcacctgaggtcaggagttcgagaccagcctggccaacatggtgaaaccctgtctccactaaaaatacaaaaattagccaggcctggtggtaggtgcctataatcccagctactygggggactaaggcaggagagtcacttgaacccaggaggcggaggttgcagtgggccaagatcacgccactgcactccagcctgggtgacagagcaaggctcctctgtctcaaaaaaaaaaaaaagaaaagaaaagaaaaagaaatttctcaaagttactcagcataaaaattgtcaataaagttccaacttaattgccatgttcttgtgtgaa

SEQ ID NO: 776929 - DNA, 343 bp, Homo sapiens
gagccatcagagggagcatggcctgccctgctgaacctttgatttcatacttctagcatccagaatgtgagacaaaaaaaaatttctgtttttaaaaccatccagtttttggtactttgttactgtagtcctaggaaacrgacacagtggccatgtgcccagaaaaataatgggggttctattagaaaaggggtcagggcattggatacaggggagaaaccaatagtttctgtcattgaccggaaaaaaatgtacaaacatccttcaacaagtatttattgattacctaccacatatagtacactgtggcaggtactgaggatccagttgtgagcaaagccag

SEQ ID NO: 776930 - DNA, 430 bp, Homo sapiens
ctgttagcaccccgggaggcagcgtagggatggggttgagatggaatgaaggtaatactttgtcttgagccaggggcaactaggatgcacaaaccccctctgcaaacagccagtgtacacaccctgcaaggaaggcgcgcacaggctgcaaagggagacacaggttcctccagcagcagtgggccatgggcaccgagcggggacmcggggacgctgtagtggctctggggcctcaccctgcacttgcgtccgtccacggtctcctcctcaaagccttctccgaccttgaagttgatctcagtggtgcgcaccgtggtggatgtcttgatgtagaactgatccccgtcctggcggatctccacgtgcggcttggacgcagccgctacggccactttcctcagcatggcgttcacacctgcgcagggtgcac

SEQ ID NO: 776931 - DNA, 594 bp, Homo sapiens
cgagatgagagactgaggcacagagagggtaagtgactttcctcgagttgcacagtgaattcgtggcagagcctggtcccaaatttgagtctccaaatttaagtccctgatcctccttgctctccagtaatctctcctcgctatgatctagcacgagataaagtccgcaccatcgaggagggcgccaaacattcagcaaacgttcgctgaacgcgtgggttccgggatctctaccagcttctccgagacccggtgcgcctgggagacaaggcgatctattgccccggggactccctcctgcctgggctccccaacttccaccccctccaggaccggggcacttccgggaccagggcacctccgggccgcatctccccgtcgggcgcgccctctgcaccagcttacccagtgccttsagcagctcgtcgaaattctcgctgctgcgcatcttccaggtgccggcgaagttgggcatggtggcggtggcggcggcggcaggtacggacagcggcggcgcagcgggcacactctgagctcgcaaggcggagactggcgctttccgagcgctgcgcgcttgagtcactaggagagcgc

SEQ ID NO: 776932 - DNA, 651 bp, Homo sapiens
  misc_feature 419: n = A,T,C or G
ggctaggaggaggccgggagtggtggctcacgcctgtaatcctaccactttgggaggctgaggtgggcagatcatgaggtcaggagatcgagaccagcctggccaacatagtgataccccgtctctactaaaatacaaaaaattagctgggcgtggtgtcacgcacctgtagtcccagctactcgggaggctgaggcgggggaatcgcttgaacccaggaggcaggggttgcagtgagccgagatagtgccacagcactccagcctggtgacagagcaagactctgtctcaaatagtaataataataataataataggaaagaacataaaagtaaaaagaaaaagcctagcagggaatgggaagaatggaccttcctggctccctgctcaggtgacaacagcattgctgcaattcagtntctccctgcctactgccgccactgcttctgtgcactccactcactatgctgtgacttcgaccaccccattgtctcagctcagcyatcctgatctctgcaagtggcttccaaactctgcaggagagactctaattttctgtcaccacctacagggagcactcccactgagcagtgctcctgcacagcaacttcatgagcctctggcagggcttgcagctccggtctcatgcat

SEQ ID NO: 776933 - DNA, 580 bp, Homo sapiens
tttattgtagaataatcaggcattgcgctaagcactgaagaatataacaaaacaaaaacaagtctctaccttaaggagtttgcatgcttgcaggggagacagacattaacaaataattatacaattaaactgtaattgtgacaggtgccatgaatgaataaaaaaaaaaaaagggaatataatcaatgccactgaattatacacttaaaaacatttcaaatggaaaattttatgttatgtgtattttaccacaatacaaacatttttttaaaatgtcggtaattaaaaaaaatagaatataacgaagatctgacttggtcttgagggttggtgcaggctctcctggtaaagcaacatttaaactgagacatgaaacaggagtaggagttggctaggggaagaactttctaggaaatgggcacagcatgtgcaaaggcccygaggtgggatggagcttgtagtgttcaagagactaaaagccagtgggaacagggcagatttgggactatcatgtaaaagccacaggaaatcaaggtgctggtgtcaagagcccaagatcaaaggggtcaggcacatccat

SEQ ID NO: 776934 - DNA, 555 bp, Homo sapiens
gaaacactggttcctttctggttcttcacaccttgcggccttcacacgtgctgttgcctgtgcctagaactccctaacccgagtcctgcacgcctggctccttctcaacctccaggattcatgcgaaggtcatctcctccttctgaccacccagarttcaaaaggacacttttcctttgctcctacagttagagctttatttctagattttttcttgtcctctgtgtgggggagacaggatctgttccccggtgtgctcaaagcctcttgcaacactggacacaaaaggcactttacatatctgttggaaggatggagggatgtcttctctctggactctgggacctcaaaagatgggtgccctgatgagaaaacctcagaattttgtctctaaagcccaaatatgtggcaggatgaccactccctcactttcttagtttttttctccccaaacagaggcagccccaacctctggtgacagcaactctgggtaaaggccaagttccaggaagaagtgacttctcagagaccaggccctaacccacaggaatgtag

SEQ ID NO: 776935 - DNA, 600 bp, Homo sapiens
ctgggggttttgaggggaaatggggaatgattggatgcacagtttatttttagggtgatgagaatgttttaagatcgacgtggtaatggttgcacaaccccatgaatacaataaaagccatggaattgtatactttcaatgggtgaattgtaggctatgtgaattatatctcagtaaaactggccgggtgtggcracccactcctataatcccagcactttgggagaccaaggtaggacaattgcttgaagccaggagtttgagatgggaaacatagtgagacccccccaatctctacaaaaaatacaaaaatttgggcagatgcggtggctcacacctgtaatcccagcactttgggaggctgaggtgcgcagatcacttgatgtcaggagtgtaagactagcctggccggcatggtggaatcccgtctctataaaaaatacaaaaattagccaggcgtggtggtgcatgcctgtaaccccagctactcgggaggctcaggcaggagaatcgtttgaacccaggaggtggaggttgcagtgagtgagactccgtatcaaacaaaagcaaaaattagccaggcatctacagtccttgcta

SEQ ID NO: 776936 - DNA, 600 bp, Homo sapiens
ctgggggttttgaggggaaatggggaatgattggatgcacagtttatttttagggtgatgagaatgttttaagatcgacgtggtaatggttgcacaaccccatgaatacaataaaagccatggaattgtatactttcaatgggtgaattgtaggctatgtgaattatatctcagtaaaactggccgggtgtggcgacccactcctataatcccagcactttgggagaccaaggtaggacaattgcttgaagccaggagtttgagatgggaaacatagtgagacccccccaatctctacaaaaaatacaaaaatttgggcagatgcggtggctcacacctgtaatcccagcactttgggaggctgaggtgcrcagatcacttgatgtcaggagtgtaagactagcctggccggcatggtggaatcccgtctctataaaaaatacaaaaattagccaggcgtggtggtgcatgcctgtaaccccagctactcgggaggctcaggcaggagaatcgtttgaacccaggaggtggaggttgcagtgagtgagactccgtatcaaacaaaagcaaaaattagccaggcatctacagtccttgcta

SEQ ID NO: 776937 - DNA, 600 bp, Homo sapiens
ctgggggttttgaggggaaatggggaatgattggatgcacagtttatttttagggtgatgagaatgttttaagatcgacgtggtaatggttgcacaaccccatgaatacaataaaagccatggaattgtatactttcaatgggtgaattgtaggctatgtgaattatatctcagtaaaactggccgggtgtggcgacccactcctataatcccagcactttgggagaccaaggtaggacaattgcttgaagccaggagtttgagatgggaaacatagtgagacccccccaatctctacaaaaaatacaaaaatttgggcagatgcggtggctcacacctgtaatcccagcactttgggaggctgaggtgcgcagatcacttgatgtcaggagtgtaagactagcctggccgrcatggtggaatcccgtctctataaaaaatacaaaaattagccaggcgtggtggtgcatgcctgtaaccccagctactcgggaggctcaggcaggagaatcgtttgaacccaggaggtggaggttgcagtgagtgagactccgtatcaaacaaaagcaaaaattagccaggcatctacagtccttgcta

SEQ ID NO: 776938 - DNA, 613 bp, Homo sapiens
aagttttttgtgacttggggaaaagaaataagcagtaatggctaaagactgaggtaaccctaagttcgaattgtagtctacctgtcatgaataaaataatgactaatatccctccaaacaagctataatttacagtagtagtccatacaaactgtaatccacagtggaactcagcgaagttcttaccaaaacatcacttgagcaggaaaccctttgtaatatggctgtgcaatgagaggaacgatcctttggaagggagctcaatctgggagaatgaggtggaaaacactgcgggagttctatgcctttgcagaccctcaagtcaccccggattactggtcagagaagctggctgtgcatgggccaaaccagcagcattctcccttggcttctgttgctgcactgaggctgccggggacacagaaggatttagttttctttacaagyaagcactttggtgggaaagcattgcaaaagttgtcaacagaaaatcattaaaaccctgaagaacaaggtgtgagggtcacaggcaaacagttatcagcatatgattcaaacactggtttgtcctcaccacagagcttggaaggttcagaaaacttccaagagagat

SEQ ID NO: 776939 - DNA, 461 bp, Homo sapiens
tcacgttgaaatgtgatcccaatgtcgggggtaaggcttagtggaagtgtttgagtcatggggacagatacctcatgcatggcttggtccccttcccatggagatgagtcagttctccattcgtccacatgacaattggttgtttaaaaagagcctggcatatcctttcttgccatgtgacaggcttgctccctcttcaccttctgccatgattggaagcttcytgaggccctcagaagaagaagatgttgatgccatgctttttgtacaggctgcagaactgtgagcaaacataaaacttttttctctataaattacccagcttcaggtatttctttatagcaacttaaaaaggggtttaaaaagtgcaccttaaacaggacccatgtgtcatctggtactatcaacatcctctggagtcagaaagactttaatgtggtagtataatcccctaatctagg

SEQ ID NO: 776940 - DNA, 603 bp, Homo sapiens
aaaataaaagaatgttcagatgtgctattattacatataccaacctattaattcagactattggaactagttgttccagtgaaatactgtattgttgcaagaccatgcaattttttatcatgcttctaccaactctatattgtaaatcatcaaaagttctcttggctgtattttaggataggggattctataaaatctttggcttgggccctgttgagtgtttgcatgtttctacaagccatatgctttgtctctacccattttatacagccttgtaagaagctactgtgtgtggttatccaaattttaagagccaatgtaaagcacgtagcagagtttcatttggaaatattcctatagaacattgttatggctctttcyacttgagaaaataggagaagaaatttattttagggatcagagagtgattatgttttggcctaaactctaacctgaaatgtattattttgtatgcatcagttcaccctagccatagaaatgatttcattttggttattacctccacactatctttcacagtaagatagagtggttgagaaaataattttaaactacccattcctctccctgtatatcttaaaa

SEQ ID NO: 776941 - DNA, 521 bp, Homo sapiens
atgttacctgacttcaaactataatacagggccacagtaaccaaagcaggatggtactggtacaaaaccagacacgtagaccataccaatgaaacagaatagagaacccacaactaaggccacacacctacaaccatctgatcttcaacaaagctgacaaaaaacaaccaatagggaaaaggattccctatccaataaatggtgttgggataactggctagccatatgcagaagattgaaactgtacctcttccttacaccacatacaaaaataaactcacaatagattaaagacttaaatgtaaattccaaaactgtaaaatctctggaagrcaacctaggcaataccatcccggtcatagaaatgagcaaagattttatgacgaagatgccaaaaacagttgcaacaaaagcaaaacttgactaataggacctaattaaactaaagagcttctgcacagcaaaagatactaccaacagagtaaacagacaacctacaggatgggagaaaatgtttgcaa

SEQ ID NO: 776942 - DNA, 606 bp, Homo sapiens
cacagtcccaaaatttcttgtatctatctggctatattaaatactcttaaaattttgttgcagtcccaatgaatattctattacttaaagacaagattgtaaagttatacttgaaatagaataaaaatgagagaggaagaggaaaactaaatagcttgcataaataagcatatacatatacaataaaggaaaatatccaaagctacaagagccctcatatctgaaattgctcaagcagctgtagttaatatctattgcttccttcttccattacacattccatatttttctcacattcagtcagaacctctgctggtcttatttcttttttccttttcatttatttatttatttatttatttatttatttatttatttattgtatttttgagatggagtctygctcttgtagcccaggctagagtgcaatggcagggctcaccacaacctctgcctcctgggttcaagagattcctgctgcctcagcctcccaagtagctggaattacaggtgcccaccatcacgcttggctaattttttttatttttagtagggacagggattcaccatgttggccaagcaggtctcgaactcctggacctcaag

SEQ ID NO: 776943 - DNA, 629 bp, Homo sapiens
gaaactgcattggcacatcatactaacccagagcccttagtttacattaggattcactcttggttttgtgcattctatgcatatggacaaacgcataatgatatgtatccattgttatagtatagtacaaagtattttcattgacctaagattcctctgtgtttttcccacatccccatctccaactcttggaaaccattgatttttttttwaatttttttttttttaagatggagtctcactcttgttgcccagactggactgcaatggcgccatcttggctcaccgcaacctccgcctcccaggttcaagcgattctcctgcctcagcctcccaagtacctgggattacaggcatgcgccaccatgaccggctaattttgtatttttagcagagacggggtttctccgtgttggtcaggctggtcttgaactcctgacctcaggtgatctgcctgcttgggcctcccaaagtgctgggattacaggcttgagccactgcgcctggccccacagatctttttactctctccatagttttgatgtttctagaatgtcatatagttgatatcatatagtgcattgccttttcagattggcatctttcacttagcattatgcatttaagat

SEQ ID NO: 776944 - DNA, 629 bp, Homo sapiens
tgtttgttaagtagactttacaaatctgattagaataacaatatctgtactgagaaaatatagaggaaaacatgttttcactttatattcttttactccattttctcacagataaattacaatgaaagctaaaagaacacagattcaagtctgagatactagcttctgtgatctagtaagaatatacctattagtctgattatttttaataatccagtgtgttttggatgacaacaaagrcaggcactgttacaacccaagcaagtgcttgtgaagaacaacgtgtgtgttgctgccaggttaggccagtgctcacaaccaaaagggtgacgtgacataacatgaagtatataatgaagcatacatttgctgtacatttctagcaaattaccatgtatttccacgtgacattcacaagcctggatctaataatttcttccgctaagggtagcaatgatgtagtgaagagactttgaattagaagcagatgatcaatgttcaagttaaccttaatgaatggtggtacacatagcattggtgtcaccagatccacacatcttaacctaacataagtgacccactctttgatacagtcagataagtgagggggaaaaagaaaatccttacct

SEQ ID NO: 776945 - DNA, 667 bp, Homo sapiens
gccaacttgaaatcacaatttactctttggttatatctctttgttagaaatttcctttcaaaatggggaaaatttttttctttaataactcatatgttacattccattgaatgaaaccagctgtcaaattcaaaagagtagattctctatttcattttgaatagtaataaataaaacagattaggacaagtaaatgtgtgcatatgtaacttcacagagacttatagtcgttcacaagttgatgttactattgtatataatgtttagaactatatcgtatggttttgttttatttgtgttttgagtgttgcaaagctagagataaatttttagcaaaygattcaagttttttgtatattcacatttctctgcactaactttacaccagatttcatatcaatacccaacatcgaatttttctataataatttatttatgtccttttatttttatcttatgttttattatgcatttctgaatggtctgtcaaatcactttgatgaataagttacttgaacatcatcatccattcataaatgtaagcaagcagcaacactagcaaataaaaacatggccaaaacaaagctcctgtttatttttatttgtgtcacaatacagataataatttagattttcaaatgactggaaacaaatttggagtgaaaag

SEQ ID NO: 776946 - DNA, 632 bp, Homo sapiens
cttttaatatttcatcatgttcattgtcctattctcaagttcactgattcttgcttctgtctgctcacatttgcttttgaatcccagaaaagcaggaattcaacattgactcagtttaattttagttattgtacttttcatttccagaatttatttttggtttcctttttytttttactgacaacactattttgttcatatatcataagcttgactttctccacaccttcctttagttagttgagcatccttaagatagttttaaagtctttagcagatctaccatctggttttcctcagtgaaagtttttgtttatttcttggaatggactatacttacttgtcttttctatgccttgttattttttgttgaaaagtgaatgcttgaattctaataatgtggtaactcatttccccccttttctaggttatgcagattcccttcccttcccagggtttgctgctttttgcttttgtttttgttttaattgtatgctgttttgtgctgagaattagcctgagacataaatttaaggtcttctcaggtctttctctgaacatgaatgatcactttctaattttctctctgtgtgtgtgtgtgtgtgtgtgtgtgtatttaataccctgatctt

SEQ ID NO: 776947 - DNA, 606 bp, Homo sapiens
agagaaaattgccaaagagaagaagaataattgcaaagtaaaaggcaaatgcaaaagggtggtatggatcagttgctgaaagtcagtttttgatggtggcgttcgatgttagatgttagatgaagtgaaatgaaaccctacaccaaatcgcaaaaagagaaaattctattttgttttagtcttcatttaaaatacgttttgattgcttatgctygggcaaagattaaggggtgtattagtctgttctcatgctgctaataaagacttgcccgagactgggtaatttacaaaggaaaggggtttaattgactcacagttcagcatggtgggggaggcctcaggaaacttacaatcatggtggaaggaaatcaaacatgtccttcttcacatgtcccagggagaaaaagaatgagtgcccagcaaaggggaaagccacttataaaaccaacagatcttgtgagaacgagctcattatcacaagaacaggatgggaaaaccaccctcatgattcaattatctccacctagtccctcccatgacacgtggggattatgggaactacaattccagatgagatttgggtggggacacaggcaaaccatatca

SEQ ID NO: 776948 - DNA, 602 bp, Homo sapiens
ttttttaactttttaagaatagccattttctctgctataagatggtatctcacggtgattttcatttgcatttctctgatgattagtgatgttaaacattttttcatatttgcttgacatttgcatatctttgaaaaatgtttttttcatattctttgcctactatttaatggagttatttggtttttttcttgttgagttgtttgagatccttgtaggttctggatattagccttttgtaggacacttattcaatgaatggtgctgggataattggatatccatatatggaagagtggaactggacccctatcactcactatatacaaagcttaacttaaggtggattaaagacttaaatgtaaggcccgaaactattaaaatcctatgaaaaactcttctggacattggtttaggctaagaattcataaataagtcctcaaaaggaaatgcaaaaaaaaaakatgaattaaattaattaaactaaggtgttctacacagtgaaagaaataatcaacagagcaaatagacaacccacagaataggagaaaatatttatagtgcatattttttaatttaacataacttattttatggcaaca

SEQ ID NO: 776949 - DNA, 600 bp, Homo sapiens
aagatatcacatgttcatggattggatcacaatatttttaagatgtcattgcatcccacattgatgtacagattcaacataatccctatcaaaattccagcgacctttttggcagaaaaatgacatttattttaaaatttatttggaaatctacgggattcaaaataactagaacaatcttgaacaaaaagaacaaaagttggagggcatatgcctttgtgtttaaaaacttactataaaacaaaagtaatcaagaaatatggtactcttaggatgaccatatagatcaatggaatagaattgagagtcctgaaataaactttttcatgtaatgtcaactgatttttaacaagggtcaatggargaaagagcagcctttttgaacatagtgctgggagaactggctatctacatcaaaaaaaaaattaaatgctacgtcacttcataattaaaaattaaatcaaaatggattgtagacaaaatcataatgctatctctataaaactcttttctgccccagccacctgctaaaaatacttgaagctctgagatttctaccctgcttacaagattacaatttaccctgtcatcattttatag

SEQ ID NO: 776950 - DNA, 583 bp, Homo sapiens
ctgggggagaggagccggccgtattgaggtgggtgcttctgtgtgtaggtaccgagcccctgaactgctgttgggaaccaccacgcagaccaccagcatcgacatgtggtgaggagatacggttaccgctcctggggcctcaggaagggctgggacaggagccgggtcacctggttcctragctcagcctcaggggaggggcaggagtgcagtggggtctttgccagcctcccactcccagggaggtgggcctgagcctggaaacccaggaggaggtgtgagaacttagcttgctgttctcaggctgggagcacagaggtctggaggaggcacgcctgcccctgcacttgtcaccccgggaggcctgcggggcccaggaggggagccagtggtccctgcctgtccttcacagtgtccctgacccagcgtgcctcacactggcagggtcagcaaaggtctggctgcagtcaggtcctctgttcctcgcgctggcggggtcagcagacgtctggccgcagtgaggtccactgttctctgcagggctgtgggctgcatactggccgagctgctggcgcacaggcct

SEQ ID NO: 776951 - DNA, 616 bp, Homo sapiens
aaatatatatttttctaatagagatgaggtctgactatattccctaggctggtctggaactcctgacctcaagtgatctgcccgcctcagcctcccagagtgctgtgattacaggcgtgagtgactgtaccgctggaaatcagctctttgatgtctaagagttaccaccttgctatttttatccatttacctttgaggagaaagagtctgtaaaaagtaaactgtcaagtactgmacttttaaattggcccaggctggcctcaaaccctggctttaagtgatccactggcctcggcacccccagagtgctgggattacaggtgaacttttaaattgggaaagaatcccaagggacttttgcaaagttgcattaattataaaccaccatcttttggattctaaccatggccaaaagatgctgcgtccatgacctcttctgtcctcacactaaccctttgagattggctggtaccaccctcatgttcccaacaaggaaacagggagggagggtctgcatttgctgggccctgtggctagcaaggagccagggctggcacacgaatctgtctcgtgcctcccctgttggggggggctccccgaaggccccaggcaggtg

SEQ ID NO: 776952 - DNA, 511 bp, Homo sapiens
ttttgcctcagggacaaggctttttttctgtcagtgacagggtctcactctgttgcccaggctggagggcagtggtgcgatcacggctcactgttgcttcaacctcccaggttcaagcaatcctcctgctgcagcctcctgagtagctgagaccagaggtgtgctccaccaccatgcctggctaatactctttattcttttcttttaagagatggggtcttgctgtattgcccaggctggtctcaaactcctggcctcaagcaaccctyctgcctcagcccccaaagtgctgggattacaggcatgagccacagtgcccagccagggacaaatgtttgcattaaatctcccctgttcagcttactggtgaggcttcatttcctgtctcagattttccacacatctgtaagtgtccattctgtacaacttgaatcagctcgtggtcctgagcactcaagtacgtcatgtattttctttcaactggcttgtggttcccactcagtccttcctg

SEQ ID NO: 776953 - DNA, 590 bp, Homo sapiens
catcctttctggtttgaaatttgtgttacttttgaaatatcagcagtttgtcccggctgaaataaggtagtgagatttaaagatttaaaaggattttctttttttttgagacggagtctcgctctgtcgcccaggctggagtgcagtggcrcgatcccagctcactgcaacctctgccgcccaggttcagccattctcctgcctcagcctcccaagtagctgggattacaggcacttgccaccgcacctggctaatttttgcatttttagtagagacggggtttcaccaccttgaccaggctggtcatgaactcctgatcttgtgatccaccctccttggcctcccaaactgctgggattacaggcgtgagccactacgcccagccaagaggatttttaaaagggcttaatggtcaaaagtaaacttaactaaaagctaatatcggatatattccaacatagtagcttaattaagtccgtatgccacatacacatatacagacccctgtgtagaaaagaaggcaccagactcgtttttggggagaaacttctgtttttcttatggaactccaagagtggaaacagacacg

SEQ ID NO: 776954 - DNA, 656 bp, Homo sapiens
gcccccacaggctctgtagttctccctcagcttccgttaggaagtgggaagccactgggcccaggtcacttccagatctgacttggcagggagaaggctgggtggaggtggccacagcatcggaggtgcaggcagggtcccctgggagctgctgggaggcttcactacccactagccaagccttggctggaggccctgagtcgaggagcagggggctccggggtccatgcccttccatggagcagcagcccctgcaggcggctctgaagcctccagaagggacgcgtcctgatcttccaggatgcacttatcaataatcgttctgtctgttcccctcccagcctggctgctgatcatccaggatccacttatcaataatcatcctgtctgttcccctcccagcctggcgttttccgtctgggattggagactcgggggktccctggtgggctgcaagggtattaggcctaattttattaacagtatttgtagggtcctacagggtctgtaggtttttctcctcgtgtacggagacgagcgatcatagaaataaagacacaagacaaagagaagaaaagacagctgggcccaggggaccactaccacctggacgcggagaccggtagtggccccgaatgcctggctgcactgttatt

SEQ ID NO: 776955 - DNA, 563 bp, Homo sapiens
agagtatttccaagagagttcttcaccctagtgattcaactcttatactgaacagacaagccttttcttctgtctccagtaaaaattttgattaccttattataattttagtctccttgcaactcttaattatattatccagcttccttttcatctcggctcactatctttttacttcatcctgttttcatcttggtttattctcttgataactttctgctcctgtttcattaacagcataccctctagcatcctattaatgatgtcacataatattctaaaatttttttctaagttctacataaaatctttttcagaaatctgttyttccaaaactttaggatgatttttgctttctgtcattctgtagtatttcttcatggtccccttggtgggttttaggtcctctatactcatcctctaagcaaaaagagatctttgggaacctggtatatgtccataaacaggttgtatagatctcccttgtctatcattatccttttgaatgatgatcaaattctcttctaaattcttctagtggttgtttctaacttgcagctcag

SEQ ID NO: 776956 - DNA, 667 bp, Homo sapiens
ggggaatttgtaaaaaggcttatggcagttattgttataatcacaaaccatcaaagactattcagaaatgcactcaggttaaacactcaaaatgatattaaagactcccctctttagagctctaggcaacatctgagctcaagggtgagatatatcttttctttagctaggttttcctcaagtaaaaaattacttctggcttcaaaaaaagtgaaggggaaaaaatggcaacaatgcaaagttggtggcattcaaggtggtagaggcggatctggaagcggcttttaggggtccaccccgcccaggtttatatgatggtcttgttgcactcagtgggctacaccgagtatcagcaacttttcaaataaatcattttggtggaaragaggtggaagcaccgcagaaggctacaaaagacaggaaacttctctgctagtaattaattttagaatctgccttattttatagatcctctctttagtattttctctgagagcctagattaggatttgctcacctacaactgatcaagcttaatgcatgagcaagaagtattttggaaattcgttgtgagcacctctaaggaactggctttattaaccattattgcctggacttctactaatgtctaaggagacttcaaacatcataaaaattctgcattttt

SEQ ID NO: 776957 - DNA, 626 bp, Homo sapiens
ctgcttcccatgttcaagcaattctcctgcctcggcctcccaagtagctgagattacaggtgcatgccactatgtgcagataattttttgtatttttggtagagacgggcttttgccatgttggccagggtggtctggaactcctgacctgaactccacttgcctcggcctctgaaagtgctgggattacaggcatgagccactgcttctggcctaattgacagcatcttaatagctactggtgatcataggctttgagaaatgccataatggttatacaatgttaaagttagttcaaatttccatggataagaacataatattaattcagcagactgagggacttttagtgggtcttggtgggtkagctctttctgattctgtcaattttgtaaatgattcatagagaagaattaacatgctatttaaaaagtgtatagacactgtattgcaagatgacatcaatattactaaaggcagaaaataaaataaaaaaatgatttggagcttttagaggtgttacaagtactattgaaactaaataatgttcatcatagaaaataaaagctcataaacttataaaagctaagacttactagcataaatactgctgtttgagaaatata

SEQ ID NO: 776958 - DNA, 538 bp, Homo sapiens
agtacaactatgtgcagtcaacaggcagtagacatgaatctatcataaatcacaccctgaggcaggaaatatcttcaatcattttacctcaaaaccttaatcatttaggttaaaaatctcccttcactgtggcagaagactcatgtgaatgtaaatattttctaggaattttgcaaggtagacataatttcttctttaagaaaataacttctaagtcatatgtggttcactatttattccccatgcatttgttttaatcatgcgtagtttatggttatgtccaaacataagaagttaatggaaraattgaaaccattgcctccacaagagaaaggggtatccagagtctttcataaatatttgttgagtactcaactgtgcataaggcctactttcaatgtcaatagagatgcaaagataagttggttaatcatgctactgtactttgcactaggcaaatcacatctggagaaatgcatagttttatgtttcttgttttaaatgtttgacctggggtaagaaatatgttatgtggggg

SEQ ID NO: 776959 - DNA, 554 bp, Homo sapiens
aaataagaaaaaagtttcttgagatatggggattttttttttttttttttgatggagtctcactctgttgcccaggctggagtgcagcaatgcgatcttggctcactgcaacctccacctcccaggttcaagcgattctgctgcctcagcctcccaagtagccrggactacaggcacccgccaccgcgcctggctaatttttgtatttttagtagaggtgaggtttcatcatgttggccaggctggtctcgaacttctgaccgcaaacaatctacctacctcgacctcccaaagtgctaggattaaaggtgtgagccactgtgaccggctagggatttttttttttttagacggagtctcgctctgtcacccaagactggagtgcagtggcgccatctcgactcactgcaaactgcgtctcccgtgttcatgccattctcctgcctcagcctcccaagtagctgggactacaggcgcccaccaccacgcccagctaatttttgtattttttttagtagagacggggtttcaccgtcaggtgcactccagcctgg

SEQ ID NO: 776960 - DNA, 512 bp, Homo sapiens
accagcattatttcatgtagtcctcaaaatcactttaggagctattacaggctttttctctgttttacagataaggattcttttttttttttttttttttttttaagacagagtctctctctgtcacccaggctggagtgcagtggcgcaatctcggctcactgcaagctccgcctcccgggttcacgccattctcctgcctcagcctcctgagtagctgggacgacaggcgccygccaccgcgcccggctaatttttttgtatttttagtagagacggggtttcaccgtgttagccaggatggtctctatctcctgacctcgtgatccgcccgcctcggcctcccaaagtgctgggattacaggcgtgagccaccgcgcccggctcagataaggattcttatatgcacatggccatgagagaaatgagacacaagtatatatccaactcctaatctgcactcactctcaacatttattttattttatactcttttaaaacaaataaatata

SEQ ID NO: 776961 - DNA, 567 bp, Homo sapiens
cctgtttatttttactgtttatttatttattatttatttattttttattttttgagacagagtcttcttctgtcgcccaggctagagtgcaaaggcgcgatctcggctcaccgcaagttccaccttccgggttcacgccattctcctgcctcagcctcccgagtagctgggactacaggtgcccgccaccacgcctggctaattttttttttttttttttttttttgkatttttagtaaagtcggggtctcaccgtgttagccaggatggtctccatctcctgacctcgtgatccacctgcctcggcctcccaaagtgctgggattacaggcgtgagccactccgcccggcccctctccctcctatttaaatagtcctaaggctcagagaattctccccacttcctgccacatgccttttgatgagaagagtaactaccacaaaacagaacagaaatacggactgcatgaccttttttgcattacaccataaaacgttcacaagggcactggtcacagtgttactgtttaaccatttcatttcaccaccaatatgaggggtgtgcta

SEQ ID NO: 776962 - DNA, 567 bp, Homo sapiens
cctgtttatttttactgtttatttatttattatttatttattttttattttttgagacagagtcttcttctgtcgcccaggctagagtgcaaaggcgcgatctcggctcaccgcaagttccaccttccgggttcacgccattctcctgcctcagcctcccgagtagctgggactacaggtgcccgccaccacgcctggctaattttttttttttttttttttttttggatttttagtaragtcggggtctcaccgtgttagccaggatggtctccatctcctgacctcgtgatccacctgcctcggcctcccaaagtgctgggattacaggcgtgagccactccgcccggcccctctccctcctatttaaatagtcctaaggctcagagaattctccccacttcctgccacatgccttttgatgagaagagtaactaccacaaaacagaacagaaatacggactgcatgaccttttttgcattacaccataaaacgttcacaagggcactggtcacagtgttactgtttaaccatttcatttcaccaccaatatgaggggtgtgcta

SEQ ID NO: 776963 - DNA, 479 bp, Homo sapiens
atcgcatttctgaaaacacaatttcttggtagttttttttaatgatgaaatttaaagatttcacaataaactggaggtttcacataaagcgcacttactactactttaccttcttcagtagattctttttaactctttcaataggaagaggtctgccatcatggaagttggtaaggattactgcaatggcygtaagagttttacccttaaaaatgttttaaaaagataaatggtcagattgtgaaacccagttcaccagaaaaacgttcccattttaaaatcaagtaatcgaatatcaaatatcattcaaggtcacaaaagtgtactgtatattaatgaaaaatgagtatttcatttagttagaaaatgctttcccccactgcattattagggaattattaaatgatttacactataaaatactacaagtatctctgagaagtgtcattttattgaatgactgctattctacaattcta

SEQ ID NO: 776964 - DNA, 599 bp, Homo sapiens
gtgtaggggattcattttgggctatgtgatataaggcactcattgcattcatattaaataaaggaggcttcctttccgctgtaaaagaaaggaaacattcctgttaaaataggttccaggggtactcaagtcctgggcacgtttttccttttttttttttaaatgattttattttgaaacaatcttaaacttacacaaaaaattgcaagtagagttcaaagagctttttttttattttttttctgagatagggtcttgctctgtcacccaggctggagtgcagtggcacaatctyggctcactacagccttgacctcctgtgctcaagcaatcctcccacctcggcctcccgagtagctgggaccacaggtgtgcaccaccatgcccaattaagttttgtattttctgtagagatggggtttcaccatgttgcccaagatggtcttgaactcttgagctcaagtgatcctcccaactcagcctcccagagtgctgggattacaggtgtgagccactgcacccagcctccaagaacttcttcaagtgaatcaattgagaataaattgctgacctgaagcctcaccatacttaatatatac

SEQ ID NO: 776965 - DNA, 598 bp, Homo sapiens
aaaaggaccccatgggcaaagagtacattaaccagcttctgtacatgtatacccaggcttcttaagaaattaaattaggacctatgggtaggaaaaagaatcataggtaaaagaatagagattagagtttaggacacctaaaggtactttcaaatggaagaaacagttwtgcaaacttcaaattaagacaaagaaatcccaagtatgacatggtaatctccaaatctctgtttgttgatgttgttaaactataaaacaaacagcagcaggatgtggagcttgaagggagtagttaacagaggaattccaacaaaagtgaaaatacttaaagattacattttagggaaaaaaaactggactgcaaggtagtctggttgtaatagaaatcgtaactttaatctactgtgtaataataagcaagattttaccttcattttacctcattttccctatacttattttagaaaactactgacaaactcgagtagataatgattaatcaaaattaccaacagattttacttttaatgtattattttccatccttagtcactccttttagaatggtttagatgagcgcagtggctcatgcttgaaa

SEQ ID NO: 776966 - DNA, 652 bp, Homo sapiens
ggggccctgggttctgctgtccctgggaacctcccttgagagccccctgctttatagcctcccttctccccgcagcttcgtgccctgctcagagaagatccatttggctgtgaccgagatggcctccctcttcccaaaggtacaggggccaaagagaggaccaggagtgggagggcctcgagctggggcaggcgtggagaatcccatctgatcgctacctgggtggagacacagacaaactgggccctgatctcagctggyggcttaaagtccaaggtccagcctcactcctgccccctccagaggccagccctggagccagtgcggagctcactgcggctgctcaacgccagcgcctaccggctgcagagtgagtgccggaagacagtgcccccagagcccggcgccccagtggacttccagctgctgactcagcaggtgatccagtgcgcctatgacatcgccaaggctgccaagcagctggtcaccatcaccacccgagagaagaagcagtgacctctctccccacaccctcacctgcaccctaggacctcactggccataggagctgggccactccagacattaatccccaccccaacagagccactggcacaagtgcccttagtgctgccacactccctggcagcca

SEQ ID NO: 776967 - DNA, 585 bp, Homo sapiens
aaattatggcattgtattatatgtttataatatatgtagatacaatacatatgacaagaatagcataaagaatatggaaagggataaataatttctacattttacttgacatgatagaatattaacaaatgaacttgaaaaaaagatggaatgttctagtagaaagtaacagtaagaaaagcttgcaaaagtgtttgtttacataataaaacactgtgtagaamagaaccaaatgaactataagtaactaacaaagaacacaatactacacatcatctattctcacctccagagagaaaaagagcaaaaacaaaataagttgtagtcctaaagacaaactagatgctgttgagagaaaaacgggaacagaaatagtcagagagagtaggaaaaagaaaatacacacaataaataattttgtttcaaactaggaaattgtctgtgaagatacatttgggatctattttaataaattcataagaatgatctgaaatcactacatcaattaattatatataaatggtcttatgagactaatgtgaacaacaccaaacaatttactgtaatcactgaaaatataaaact

SEQ ID NO: 776968 - DNA, 581 bp, Homo sapiens
ggtcaaagccctaggaaaaaaactggatctgagggatccagaggcaaatgacaacagaggttaaaaggcacattgcaggtgagcgtggctgactcctgctgattaagccaactccaagcttcctgtttcatggataaaggccacattaatatccatggcataaatgaggcctagggaactccaaagctactgactgtaggtgggaaasagacataggtgagacaaataattcctattgtctcgacacccctgtttcatgggtgcaagccactttggtactcatggtggcacctgccaaggtcgccagaactcggggatgcaaggacagaagactgaaagaggacactctttcctctcactctcacgtatcctgagtatatgctaggaaaataagggaaccagggaggcctgcttccctctttctagattggtagccattcatcttcaatctgtacccctttcaaatgcatcctgaacctctgggactcctttaaaaggaggctttttccctttctcctcagttctctcttcactaatagataattgtgtttctgtactacaagacactcccctcaaatgca

SEQ ID NO: 776969 - DNA, 640 bp, Homo sapiens
aatccctgttagagaattataaagacactagttagaaaaaaatggaggtatacacatctttaaatacaaatctttatacttaagatacctggtctccgtcaataaatcttgaatgtcaaatactttgcatgccacaatcacttaagccctaggcaaacaagaatgtctacagggctaygaaaggttttatttctctttgcttttcatgtgtttaaagcaatcacatgatgctgaaagcatccaaaggaaaccaaaacatgcatgatattcaaaaaccattcctaatctgaaaaatttttggtctaataaagagcaaactgagtacaaatctctctctaacaacaaaatagcagtgtgcatattccccttcagatccgcctggacttggcagagtacggttttactttccagagtgtaaaagagaaatttgtggacttcagaaaagcatttggtgttctagggaactgcagctgtcagcttttaaagatgccatgtgtttgcccacataaaggaatgcaatgagctatggaaatattatctggtttcatgaaccagaataataactccacagagtcagtaggctgccaataggagtgctttaatccatcaggaaaatactgatcactcactgtttattaaa

SEQ ID NO: 776970 - DNA, 640 bp, Homo sapiens
aatccctgttagagaattataaagacactagttagaaaaaaatggaggtatacacatctttaaatacaaatctttatacttaagatacctggtctccgtcaataaatcttgaatgtcaaatactttgcatgccacaatcacttaagccctaggcaaacaagaatgtctacagggctacgaaaggttttatttctctttgcttttcatgtgtttaaagcaatcacatgatgctgaaagcatccaaaggaaaccaaaacatgcatgatattcaaaaaccattcctaatctgaaaaatttttggtctaataaagagcaaactgagtacaaatctctctctaacaacaaaatagcagtgtgcatattccccttcagatccgcctggacttrgcagagtacggttttactttccagagtgtaaaagagaaatttgtggacttcagaaaagcatttggtgttctagggaactgcagctgtcagcttttaaagatgccatgtgtttgcccacataaaggaatgcaatgagctatggaaatattatctggtttcatgaaccagaataataactccacagagtcagtaggctgccaataggagtgctttaatccatcaggaaaatactgatcactcactgtttattaaa

SEQ ID NO: 776971 - DNA, 472 bp, Homo sapiens
tctgcagaggaggggaaggaatgagttgtcagcaccatcccagttgaaactgaggatacaactctaagacccttaacaggaatatgtgttcgcctgtgttctaggggcgcttaaaagtctttctgattcttagaagtggcaactgatttgtgtgatagggggtgtgtgtccaatatttaccccaaaaagctgtaagcgagaaaaataaaaaccaactgacagggtagctgtgcagggtcctggaaatagaaggctgtgccrggatgaggggaatccggctgggactcactcagctcgagctgcataagtgctgggctcagtctgaacaactgcccataagctgggctcactttgaacaactggggctgcccaagagctctgattttcaacggcaagggaacatcaaactatccagacactttttctatgactacagagtacttttaaaattttctttcttagaaaatcattt

SEQ ID NO: 776972 - DNA, 624 bp, Homo sapiens
aatgaggtggtaccagaaacatctcccttactactctagagaaaatcagcattgtcagtttgaataatctttatagtatttcattttcgtttccgcaaagtagagcaaaggcataaataattccctaaacatcaaatgcttcaactctatgaacggatctatgaatgactatgatccttgcacttttctgtatacatactgcatttaaataaaaagttagaataaagagagagcaggacacctggcttctgaatggaaaccttcgtagtgccagagacaaaagagaattaaacatggatgatgttgagaaaggcaagatttttgttccaaagggtgccgcccagtgccacaccatggaaaagggaagcaagcacaagacygggccacatctccaccgtctctccgggcagacgacaggtcaggctgctggattctcttatacacagatgccaataagaacaaaagcatcacctggagtgaggacacactgatggggtatttggagaatccctggaacaaaaatggtcttcactggcggggtgtggtggctcaggcctgtaatcccagcactttgggaggccaaggcaggtggattgcttgaggtcaggagttcaagaccagact

SEQ ID NO: 776973 - DNA, 624 bp, Homo sapiens
aatgaggtggtaccagaaacatctcccttactactctagagaaaatcagcattgtcagtttgaataatctttatagtatttcattttcgtttccgcaaagtagagcaaaggcataaataattccctaaacatcaaatgcttcaactctatgaacggatctatgaatgactatgatccttgcacttttctgtatacatactgcatttaaataaaaagttagaataaagagagagcaggacacctggcttctgaatggaaaccttcgtagtgccagagacaaaagagaattaaacatggatgatgttgagaaaggcaagatttttgttccaaagggtgccgcccagtgccacaccatggaaaagggaagcaagcacaagactgggccacatctccacygtctctccgggcagacgacaggtcaggctgctggattctcttatacacagatgccaataagaacaaaagcatcacctggagtgaggacacactgatggggtatttggagaatccctggaacaaaaatggtcttcactggcggggtgtggtggctcaggcctgtaatcccagcactttgggaggccaaggcaggtggattgcttgaggtcaggagttcaagaccagact

SEQ ID NO: 776974 - DNA, 638 bp, Homo sapiens
cccatttcctgtcccagacttggaatgagtcattttaacaggaacgcctgggttcaatcgggatgttagagattctctttgtaatgggctgctcattgtttctaagtaaattcacttaaactcaccacacatacacatttaaagataaaaatacctcatgaattcatattaaccttccaattcaaatctgagactacagggcttcttctttttttttttttttttttttttttgaaacggagtcttgctttgttgcccaagctggagtgcaatggcacaatctcgcctcactgcaacctccgcctcccgggttcaagcgattctcctgcctcaacctcccaaggagctgggattataggcgtgcaccaccatgcccggktaatttttttatttttagtagcgatggggtttcacctggccaggctggtctcgaactcctgacctcaggtgatccgcccaccctggtctcccagcgatgggattacaggcgtgagccaccacacctggcgactacagggcttctatttaaccactccctgatctatcttccacacagacaaccttcaacacaggacctggggaaagctggctgaggacagcccctaattactcacttgttaccatacaaaaactcagca

SEQ ID NO: 776975 - DNA, 359 bp, Homo sapiens
taagtttgattttatgttaagggaaatagacaataagggaattgatagattttgagcagttaactgatgaataaaattatgtttagaaatatagaacagataatgagagacaacttgtaggaagatctgttgaaaggttaagaagtgatcacgtccttatttttataagcaacagtgaaggtatagaaagatggattagtttgaaaaatatttagaatataraatcaatagaacttggagattgaatatgtagagaaagagggtgaagaaaataatcaaggattaccccagcaagtttatatattgaatgaccgctatatgacattataacccattatgagtaaatattggagaaagaa

SEQ ID NO: 776976 - DNA, 501 bp, Homo sapiens
tctgtaggttgtgtgtttactgataatttcttttgctgcacataagctctttagtttgatcagatcccacttgctgatttttgttttcctagcaattgcttttgaggacttagccaaaattctttgccaaagtcaatgttgagagggtatttcctaggtcttcttctaggatttttatagtttgaggacctacatttaaatctttaatcctttttgagtgactttttgcataagttgaaaggtaggggtccaattacatttttcagcayatgcttagccagttatctcagcacaagtatcatatagggagtcctttctccactggttgtttttgtcagccttgtagaagatcaaatggttgtagacgtgttgtaggtggttttatttctgagttcgctattctgttccacatcagtctatatgtctgtttttgtaccagtactacgcattttggttactgtagccttatggcatactttgaagttgggtaatgtgattgat

SEQ ID NO: 776977 - DNA, 551 bp, Homo sapiens
cataaaaaagaaggaaatcctgacatttgtgacctggaggatattatgctaaatgaaataagccagacacagaaagagaaatactgcacagtctcacttatatgtggaattaaacaaactcagaatcatagaagcagagagtagaatggtgattgccaaaggctggtggggttggtgggggagttgggagaaatggggagatattggtcaaagtgttaatatattgtaagataaatacattctgragatataagacacagaatgagtgacaatgaaggtgttcattaatttcttttaaataatgttgggctttgttctaacagacacttacataacttgcaggttggcttaattatttacagaccccttcataagctttttaaaggtgggactagactagattttcctctaagcctgctttagccctactgccattctggggtatctactaagtgctctgtggttcaccctccactttgcatgattgggactcaaatgtctcacagaaatacataagctctgcaaattgctcagcttacaactccaagttt

SEQ ID NO: 776978 - DNA, 505 bp, Homo sapiens
agccttcccctgcctctggaggagaaggcacactggatgctgagtgattaggccttggagatagctgcagcactctgaggcactgaataatggatagcctgagaagcccttggtggaggctgcaaaactgccacagggggaggggaggatgcccaagaaccttaaaggtcttgcagtgaccgggggaaaaaccagagaagagattggcaataaatctttcaatgcctaagaaaacaggctaccagattttttttwaaaaagtatgcattttagccagaagagcatttgttctcttgttatcatagccactcatttgaaataaatgtatgaatgctatattagatccagtctgagaaagacagaccaaaattatctattcaaaaccattagttgtttaaccctggcttgcagattagcacaaattaattgacagaacacattttgccgggaattttcagaaggctttccaaatggttaaactgagacacattattgatcatcaaga

SEQ ID NO: 776979 - DNA, 445 bp, Homo sapiens
accagagctggtttactcgttccttctcattcgggtaggctctgtcagagggaaggtctagggctgaaggctgtggttcagaatttttttttcccagggggtgttcccttttcctatggatgcggcttcctgagagttgaactgtaatgattgttctctctctcctgggtctagagacctagcaagtctaccaggctctgggttgctactggtggttgtctgcacagagtcctgtgatgtgaaccatctgtggatctctcagccgtgggtacccacaccagttctrgtagagatggcagggggactgaaatggactctgtgaggattcttagctttgatggtttactgcactatttttgtgctggttggcctcctgacaagagatggcactttctggagagcatcagctgtggtagtctggaaaggaaccggcagtgggcaggcc

SEQ ID NO: 776980 - DNA, 631 bp, Homo sapiens
tatcagtggggtttctagatcaaaaggaaccaaccactttcagacgtgagaaacagactatccactttactcagagatcctaaactttgtcctaaatagtgtgaagggatagaacttttgagttctgcctttttgggagaaaactgatacacagcagagcagaaaccccagatgacctcacatggatatattgtgatgcatgaaatcagctctggtgattttaaaactccgaggcttgttgtggctgttgttgttttaaaccacagaatagcccaactcattctaactaatamagaaatacacataaatatttcttaaagttagaatatgaaaggtgtgctttttaccccatatgcaatttccgcttcttttaaaatgagcatatatcattcatgtaataaaataataaaaagtttaaaaataattgcttttataacaacattaaatataaaatagaattaaaatggatataagaagttaggagaaataaattattcagtaaatagtactgaaatactagttaacgatttggaagcaaaataaaaaaagaaaaagtaataaaaccttacctctcacctacatgaaataaatccttaagtcgtgacatcaacccaagtaacttcactgttat

SEQ ID NO: 776981 - DNA, 495 bp, Homo sapiens
tactgtttgaacacccttccaattcagccacagctgctcctaatttttttttttttttttttgagatggagtcttttgctctgtcgcccagctggagtgcagtggcgcgatcccgcctcattgcaagctccgcctcccgggttcacgccattctcccgcctcagcctccccagtagctgggactacaggcgcccgccaccaagaccggctaattctgtttttgtatttttagtagagacgggttttcaccgtgttagccaggatggtctcaatctcctgacctcgtgatccgcccgcctcagcctcccaaagtactgggataacaggcgtgarccactgcgcccggccagctgcccctaatttatgtagctgcccgtgtcctgagtttttcagcacacactccgttcaattcctcctccaccccttccaggtatgactttctgctctgctagaagaaatacttgttatagtgcagagatctctccagaaacatca

SEQ ID NO: 776982 - DNA, 579 bp, Homo sapiens
ccaaattctgccttcgtcttcacatgatattttccctgtatgtgtctctgagtctaaatatttcactttataaggacattagtcatactagataagggatccaccctactccattacggcctaattttagcttattacatctgcaacaaccttatttccaaagaaggtcaaattctgagttgtgaagtttaggacttcagcatatgaattttgaaggaacacagagatgtttaaagaagatggcacaggagcagtgaccttgtcagtgctcygcttctcttagtctctgcttatgttctatgcctggttttccagtctttccatttccatttctggttaatgtcaatagaagtgtttcatttctcccatttgcctttaagagccctaattcagacagggtaaccagccaatatatcctccacatttaaaaaaaattacatttgtaaaatgcacaatatttctctaaggctttaaacatattgtattattatataccactatctattctttaccttaaaaagtatgagcggaaatttatggtaattttttaatctcaggaatgaaaaaacacgctatcat

SEQ ID NO: 776983 - DNA, 547 bp, Homo sapiens
aaaaattgttgttttcaaaaattctaagcttccatctttttgaagatagagtcctgttcctatccccaagttacttgtttataatgcccaaaatctttgtaagcaggtgcatcagttctatcatccctgtctgcataagttaagcatgctagttgctgaagatttttgctgctattactggaggctcagtactagctgttaaggtgcacattgcagcggcattgtacacctcagagttactgcttcctgaaattaagcacaactgaaattttagaatgagtctgaaactttaatctgcatttgtctcatacagagattctgctaaacatagattctgattcarctgttttggggtggggcttgagatttttccctcttaataacctctcaatgtgatgctgccagtccatggaccacacagtgaatgtcaatgtatcagagcgctgtttctcaaaatgtggtctttgtactgctcggcatttaatcaccacagatgtttatttgtttctgtttttttttgtttgtttgttttttactgtagactttc

SEQ ID NO: 776984 - DNA, 600 bp, Homo sapiens
attgcatcagtaatcaaaaacccagcaactaagaaaagctctggaccagatggcttcactgttgaattcttcctgatgtttaaagcagaattaacaccagttttcctcaaacgccttcaaaacgttgaagagggggtaacattttctaacttattctatgaagccagtactctgacaccaagccagacgaagacaccataagaaaactacaaacaaacatcccttacaaatgctgatgcaaaaatcctcaacaagataccagcaattcaaatttggcagtatattaaaaggattatacaycatgaatgagtataattgactcctgaaataaaagtacactccaacacatgaaaatcagtgtaataccacattcacataaagaagaaaaaaaacctgtgatcatcttaaagaagaaaaagcacttatcaaaatttagcccacgttcatgataaaagacacttaataaactataaaaagaaagaaaacaccttaacataatacgttatattaaaaaaaaaaaaaagacagctaacattatggtgaaagactgaaagcttttaccctaagagcttaaacaaggatgcctgcttttaccacttc

SEQ ID NO: 776985 - DNA, 635 bp, Homo sapiens
ccatcagtctgccagccagaggggccctggactaaactgcaatccctggcccattttagttcttcagagaattctcacccagctctatgtatgctgaccagcatgcccatcagcttcattgcccctttcagtgcggtggccttggctgccgcatctgtgagggcatttccttttacatggtcagtctctcttttgatgtcctctacartgaattatagtcacttttttttttttttggcagcaaagcagcattctaacaaactcaaaacctgagtgatgttgtctagaaaagcccttggtggtcaggagtccctacccattccaaattgcagcataagtatgaaacgctaaaatatcacacttggaatcggtgtaaatgttaacttttaaatcccttcccaactgcagggctgtagtaagttcagttaactcagctttttgagctgaggttgaggccagcaaggcttgtgccttctcttgtgctgactaataatagcatatctagccctcctgttttcctgatgcataaaacaacttgcatttgttaacccctcttccttgggatggggaaggggctcatctctcttcagtctggcctgctaaaataaatttgtttcataacctgtgacatggtt

SEQ ID NO: 776986 - DNA, 635 bp, Homo sapiens
ccatcagtctgccagccagaggggccctggactaaactgcaatccctggcccattttagttcttcagagaattctcacccagctctatgtatgctgaccagcatgcccatcagcttcattgcccctttcagtgcggtggccttggctgccgcatctgtgagggcatttccttttacatggtcagtctctcttttgatgtcctctacaatgaattayagtcacttttttttttttttggcagcaaagcagcattctaacaaactcaaaacctgagtgatgttgtctagaaaagcccttggtggtcaggagtccctacccattccaaattgcagcataagtatgaaacgctaaaatatcacacttggaatcggtgtaaatgttaacttttaaatcccttcccaactgcagggctgtagtaagttcagttaactcagctttttgagctgaggttgaggccagcaaggcttgtgccttctcttgtgctgactaataatagcatatctagccctcctgttttcctgatgcataaaacaacttgcatttgttaacccctcttccttgggatggggaaggggctcatctctcttcagtctggcctgctaaaataaatttgtttcataacctgtgacatggtt

SEQ ID NO: 776987 - DNA, 505 bp, Homo sapiens
cagctcactgcaatctctgcctcctgagttcaagcgatttctcccgagtagctgggattacaggcacatgacaccatgcctggctaatttgtgtgtttttagtagagagggggtttcgccatgttggctaggctggtctgaaactcctgaccttgtgatcctcctgccttggcctcccaaagagctgggatctcatgcgtgagccactgcgcccagcccctagcttgttttccctgtgcttctgatctatgggacataagtcaggcttcccrcagcccccgccttgggtttcattaattggctagaatgactcacagaactcagggaaacacttttaccggcttattacagaggatatcacaaagggtacagatgaagagatgcatagcgaggtatgggggaagggcataccaccctccaggaacctccacgtgttcagctagcagaacctaggccttttgggtttttacggaggcttcattatgtaagcaagattgattaaacc

SEQ ID NO: 776988 - DNA, 505 bp, Homo sapiens
cagctcactgcaatctctgcctcctgagttcaagcgatttctcccgagtagctgggattacaggcacatgacaccatgcctggctaatttgtgtgtttttagtagagagggggtttcgccatgttggctaggctggtctgaaactcctgaccttgtgatcctcctgccttggcctcccaaagagctgggatctcatgcgtgagccactgcgcccagcccctagcttgttttccctgtgcttctgatctatgggacataagtcaggcttcccacagcccccgccttgggtttcattaattggctagaatgactcacagaactcagggaaacacwtttaccggcttattacagaggatatcacaaagggtacagatgaagagatgcatagcgaggtatgggggaagggcataccaccctccaggaacctccacgtgttcagctagcagaacctaggccttttgggtttttacggaggcttcattatgtaagcaagattgattaaacc

SEQ ID NO: 776989 - DNA, 570 bp, Homo sapiens
gggtttttcttcagtcattgacatcatcagcgtgtcctgtttggccttgtccggtttgctgggagcctccaagattctctctacgacaaggaaaggattagatgtaaagaggagagattcagagatatatgtcctatctactcagtctgggccatccctatataaatctccctgctcatcacacatagctgttgcccccgaaacaggaaattgagggacagagaaatctaaggaaaaaacaaaactcctaaatatgactcctcacacctagggtcaactgcaaatcccaggcaggactcttcacggtctgatctcaatccctccaacactgtgtctcatcctgcacaacaaaccctccatcccagctcctccttgccccatcagcacccattccaatttcctcctccaaaccttgaakttttatccttgcatcttagatgctcttggtgtttcctttcaatcttgcatggatcttattccaggcaatatcttttaccctaaaatatcttctgtagttatggcattgccaggtgcatttatatttaactttgaatgtgctcatgggctcag

SEQ ID NO: 776990 - DNA, 605 bp, Homo sapiens
gtatggctacagtgaccaaagactgagatcaccacacccaagtccccttgaatacctggaaagccttcccaagaacaatggttaaaaacaagcccagactgcaaggctaagtaaatacctaactctttaatgcccagacagtggagaatatccacaagcatcaagaccagccaggaaaacatgacctcaccaaataaactaaataagttgtcagggaacaatcttagagaaacagagatatgtaatatttcagacagagaattcaaaacagctgttttgaggaagctcaatgaaatccaaggtaacacataaaaggaattcagaattccatcagataagttcaacaaataaattgaaataattaaaaagtaccaagcakaaattctggaactgaaaatgcagttgacatactgaaaaatgcatcagagttcattaacagcagaattgatcaagcacaagaaataattagtgaaccagaagacaggctatttgaaaacacagaggtaacaaaagaaaaaagaataaaaaagaatgaagcatgcctacaagacctagaaaattgcctcgaaaggacaaatctaagagatattggccctaaagaagag

SEQ ID NO: 776991 - DNA, 627 bp, Homo sapiens
tgggattgaagtgtgggatactttgaaatgtggccccctaaattctgtcattgaaaatgtcaagaaatccccattttatctgagcaggattataactacttcaaccaacacagtagggaggaagtgatgctgtgtaatctgaggccatgtcatcaaagcccacgtagctctcatytgttttcttgggatgccccctgtgaggaaatccagtagccatgtgagatatccacctactccgagactaccattagagggagaacacatatggtgtgagtgttatgtttgacagtctcagttgagttttcaaagagttgtcaagtaagaattgcctagcgtggtcacggtggctcactcctgtaatgccagcactttgggaggccgaggctggcagatcacaaggtcaggagatcaagaccatcctggctaatatggtgaaaacctgtctctactaaaaatacaaaaaattagccaggtgtggtggcatgtacctgtagtcccagctactcgggaggccgaggcaggagaatcacttgaacccaggaggcagaggttgcagtgagctgagatttcaccactgcactctagcctgggcaacagagcggacttcgtctcaaaaaaaaaaaaaaa

SEQ ID NO: 776992 - DNA, 554 bp, Homo sapiens
ctaggtggatcacctgaggtcaggagttcgagaccaacacagccaacatggtgaatccccgtctctattcaatatacagaaaaattagctgggcatggtggcacatgcctatagtcccagctacttgggaggctgaggcaggagaatcgcttgagcctgggaggtggaagttgcagtcagctgagatcgtgccactgcactccagcctgggtgasagagtgagactccatctcaaataaaataaaacaataataataataataataataataataataacttttgatgaagttccaggtttggagaacaatggctgttgcttaatttcaaatagaatcaaacattttctttcacccaccctaaaaatgactctccataaaatcaaccataagagcaaattaaccacacaaaaccaatactttcagtattttggggagacaggaaaatgcaaccttacaattacctgaaacttggaggaaaaaaaaacaatttccagtggctctcccactgctcactctgggctacaaatatgcagatatgagaacagagaagaa

SEQ ID NO: 776993 - DNA, 535 bp, Homo sapiens
gagagtgagctgaagcagggcaaggcatcacctcacccaggaagcgcaaggggtcagggaatgccctttcctagtcaaagaaagggctgagagacggtacctgaaaaatcaggtcactcccaccctaacactgcacttttccaacggtcttagcaaactgcacaccaggagattatatcccgcacatggctcagagggtcctacacccactgagcctcactgattgctagcacagcagtctgagatcaaactgcaaagtggcagcaaggctgggggaggggcgccaccattactgagccttgagtaggtaaacaaagtggccrggaagttcgaactgggtggagcccaccgcagctcaaggaggcctgcctgcctctgtagactccacctctgggggcagggcatagccaaacaaaaggcagcagaaacctctgcagacttaaatgtccctgtctgacagctttgaagagagtagtggttctcccaacatgcagctggggatctgagaatggacagactgcctcctcaagagggt

SEQ ID NO: 776994 - DNA, 613 bp, Homo sapiens
gttgctatgggcctacaagaagacactgtttttgagcagctggggtctgtgtcccgggagttattccggtggctgtcctcagtgggatttccttgtgcattttcatcaagtggtgggaagtggctgtgttatttacccaggctttgtttctgggcacttccagcatataggaacatacataaacacacacacaagtacacactctgttctaatcctttatgttcagaaaatgtaagggaactaaaaataatttttttaatggaaaactaaaagtaaaatcctctaagcaatgccttggaaaataaaaggtgctggggaggccagcacataaacactcaggccatggagcccgtgcagtgaccaaaccaaaaataggttatatgttcattacattaatcagtttctgtctaatagtgctggctatttattgaatggacactataagctaggttctattctaagcayttctcgtgtcctaactcattcaatccttaaccatactctgtacaaaaagagactgttagcaatgccattatacaaatgaggaaactgaggcagagggagttaagtaatttgtttaagagcatgcaacacataaaagtttatgttggca

SEQ ID NO: 776995 - DNA, 587 bp, Homo sapiens
gtgttaagaatgctaaaatatatgccttccctgataaacaagggaaagccccccaccccccatatttatttctgtatctccaaaagttaggacagtaatcctgtgactttgcattttcagtcagttggctgacagaatggatgaacagttgttcaatgtccttgtctgtttaccaagggtcattcccatctctttgaatatatttaaagtagcattaaaacacacaagatattcagggcagagggaaattaatcatttatttccttcaaaatacagyttaattggaggattgggtaagtagagaaataataatccaagtgaatttctttgttccctggggaatgttccctcatccatacagatcccaaccatcccccgcagtgtgtcccacacagtagagtcttacattcgtctttatgttgtgggaatgatgctgttgcctgaggatacgtgtgaaagtgagactcatacttcaattccagattggaggaagctgctatccagcttgtgaaagctcttctaaaagattcttctttttaattggagcacagaaaactatgctaagcttttcttattgtaggtttcct

SEQ ID NO: 776996 - DNA, 627 bp, Homo sapiens
tgactatatttttaggggacttttggtagttaatcttactgattatgtttgctgctttgatttacaaaataaaatatggcaattcaatgagctggtaccataaggtcaaaaatcacaacatcaccctgctaagctcatgacatcccgtaactccaagtgccttggtgggaagggggaatccagtatgtgctcaggtggatgtgacacacaggttaattccagaatackcatggtgctcaagctctttgcaggctcatcccttcagttactacaggaccctcaagggaccgtcacattccctgagtggtgcagttagatgaggtcagtagctcttccaggcatggcagactaaaggagaagtttgtgcggctgaacattgacccaaagccgtgttgcactgggttttgtttcacagtggggaacttgagttgaatggccttctgtggctctcccttctgatgctctgttccctcccacttggggctggccctatcaattaggttggtgcaatagcaattgctgctttcatcatacttttaatggcaaaaactgcagtgacctttgcaccaacctaacatacataaaggcaagttgctagtggaattgagctacctccagttggagtca

SEQ ID NO: 776997 - DNA, 559 bp, Homo sapiens
atagaaactagtttttatgtcttactaccttccctccttccactgtttcctcttattacctatttagctgagagtgatctaagtgattacccttaccccgaaactacttaatgcttttttttaagagacaatgctaaaagttgatgattaatggataaaaagtagctttgaactggtaagtgggcctctatctaattaaattcattaccaattccaaatatctgttagagtaacaaaatccaatttagttagtatgttcttcaaataaaggtataatctaaatgacagtgagaataaacatattctcaaaaatttaatccattgcttttaaaagacagcatcactcatttctttgaacttgaacaaataaaaagggtattatggaaatcctttttaarcatatactatatatatttaaagctaatttaatcctgaaaacattatgagataggcactattaatctattatctataaaataggtaacttttttttagaaaaccaaaaggagcttcagactgtttaaacaatttttccaagacggcattgtatgagtgaaat

SEQ ID NO: 776998 - DNA, 609 bp, Homo sapiens
tttcatctaataacaattttacatattagtaatggttataactctttaaaggtttttgttgttgttgtggttaagacagggtctcattctatcacccaggctggagtgcagtggcaagatcacagctcactgcatcccctatctccctgggcttaaggtaatcttcctgcctcagcctcccgagtagctgggactacagttgtgcaccaccacgcctggctaatttttataccttttgtagagacagggttttgccatgttgcccaggatggtcttgaattcctaggctcaagcgattcactcaccttggcctcccaaagtgctgggattacagttgtgagccaccrgtcccggctctctttaaagtatttgatacctttttaaagtattgtttgaaccctaatattagaaaaaaaactctaaatactgtggcatctaatcaggttacaaatatctcataatattatgtcaaaatatttttatataaacagggctaaatctcctttactcaattaaatagataaaaattagttatttagaaaggcatactaatgttttatgtaaaatgattatcggttaaatagaatttactacaaaagggaaagcaga

SEQ ID NO: 776999 - DNA, 659 bp, Homo sapiens
gttgatcttttctctataatgccctatcacagaaatgctactttaactcccacgcactgacaccatcatttttactggtctggaatctgagccactctgtgcccccaaaaaggcctgtgtccttctctattcctccacattttttacatcctcctgccagagaacagcaaactgttcagacccctttccatatgaagggcccaaataaaacctgtgcacattactcttccattacctcctcacaaaaaccttcctccagccactttcagaaaacaaacatttccatcccaagtccttccaatgaccaacaggagctcacaaaacttgcggaaatgtaccttttctaggactccactttcttaaatttaataactagtaataagtattacatacttccttattattctggcactagtcaagwtagaccttcaaacaatgtgaactaatttgtttcccaagtcctcagtttatttgtatttttatgaattgcgtcatattttccaagaaagtgaatcagaagctaacagctctccattaagaacaagaacgctgtccacagcactttgtaaaatgctgtgatgaggagtacaatttaaatggaatttggtactatacgtggcagcaaaacacaggatttgctggaggcttttgcttgttaa

SEQ ID NO: 777000 - DNA, 659 bp, Homo sapiens
gttgatcttttctctataatgccctatcacagaaatgctactttaactcccacgcactgacaccatcatttttactggtctggaatctgagccactctgtgcccccaaaaaggcctgtgtccttctctattcctccacattttttacatcctcctgccagagaacagcaaactgttcagacccctttccatatgaagggcccaaataaaacctgtgcacattactcttccattacctcctcacaaaaaccttcctccagccactttcagaaaacaaacatttccatcccaagtccttccaatgaccaacaggagctcacaaaacttgcggaaatgtaccttttctaggactccactttcttaaatttaataactagtaataagtattacatacttccttattattctggcactagtcaagttagaccttcaaacaatgtgaactaatttgtttcccaagtcctcartttatttgtatttttatgaattgcgtcatattttccaagaaagtgaatcagaagctaacagctctccattaagaacaagaacgctgtccacagcactttgtaaaatgctgtgatgaggagtacaatttaaatggaatttggtactatacgtggcagcaaaacacaggatttgctggaggcttttgcttgttaa

SEQ ID NO: 777001 - DNA, 594 bp, Homo sapiens
atgtttcaaatctgcagcatttcaaaactttcaaagaaaccaccttttttctttttatgtgcatgaatctttgatatacagaaaatacttttagtgtagataaggaaactggaatctaacccatttttcctaaaattactgaacaggtgcttcaacactatgtattgagtaatacatctttccctcactcttgctcaggtttcgttgagaactaactactatagaatgtaatggcttaagacaaatgccattgatctatggaactatgggtggctttgggcacctcttgctttatgtagcttgtctggggcaattctactgcatgtatctgacatgatcctgaaaccactgacaaratagaacatgttcccttgataatggcaaaagcattatagagcaaacattcacatgtgatgcctcctacgtcttagcctcataattaacaaaaggtccctttgaacacattgatttgcctaatgcaagtttgctgcatggcaaggtctaaagtcaaggagcttggatatacactgtgtctctgatgtggccatggtaaggatatagatacagggtgaagtgaagaattgtggccagtaa

SEQ ID NO: 777002 - DNA, 518 bp, Homo sapiens
ctattgttcgcctatctcaataacttagaaatgttgtcatttcttttacagagaagacacagtataaagttggaatactgcagaaagaaaaagagaactatcactgaaattaagtcaaaatatttggttgagttctatttaacatatcttaagttgcatagccatgattcagaggtttcatcttccatttacaacaacataataattttgaaatcaccataaaaatcccaagaacctaatgtggtagcttcacaaggaagcatgcctcctgcctgccttcctttcctttcctcctttcaccatacatcacctccacatyacagatgaagaaaatgaagatgctggcacaagtggattaagggccttgtcctgtaactgaactgtcatttgaacccacgtctgtgtaactccagaggtaagatttttggagagcaatagctacctatatatggatgctacctatatatagtatacatgtaactatctagatactttctatcatgccaaagtcacaactt

SEQ ID NO: 777003 - DNA, 617 bp, Homo sapiens
ccacagaaataagaggttgaggctatttaggaaaatgaagtaaatacattttggtatgctataaataaatcatggcaatttaggttagttaagattaaattatataagttgataataaacctagataaagagaagtgtttcccaatgctttctcaaagactcttttattttcttccgtatcttcagcataaagtgtgaagagttctacttgaagtccttctactacttgagtaaaatcattgttttagatatattgagcaaatgcaaaacttataatctattctgtctaaaagtttattctgtaaagtacatcacctctagtttgattttatttattgcataagaattcattatgttcttaagatagtcaaggaaacgtgctatatatcttgcatgccacaaacttgcaaaggaaggtgwaaagttataaggagaaagtgattaggaaaagattttaggttgattagataagggtcttgagggactgaacaggagtttatgatggaaggaagtgggcataaaatgcagtcattgtttttaaggcagaaattcatacagaaacaataactgaaattaagaggtagaaaagacctacaaatataactaaataaactgat

SEQ ID NO: 777004 - DNA, 657 bp, Homo sapiens
ggagacacaaagttccaaaggtcatggcatccccatgagatttactaaaagctaataagttggatcttgaatcatcattagcccatattcagcctgtattacagaagcctagaagttcataccagaagagatgtctttgaagagaatttttaggagtagcaagtgctctgggaaatgggatgaggtcctctttctgtactcagcctcaagtgaaagtgagttcaaacagaaaatgcttttcttytaaaactccaattcagacctgcttcttgttattgtcagcgcaggactagagatttttggaagaactttgcatggatacttgtttggagttcctgtgcctgtgtcatacaggctggataagcttaatttccaaaggttgcagtggcaaaaattgtgaattttcctaaggactaagtcagttgatggagactactcagattgagcctccttgaataagtaaataagtacatagttaaagagaataaaagggtattatagggtgaaaaaggtagcaataatttatgtgcaataaataaaatatacttttcagtgataagaaaatgaatacagagattctgtttcaggaaacttgacatatcaaataatatagaaaaataagcaaaaatgctctttctacaatatatatgagaagcc

SEQ ID NO: 777005 - DNA, 548 bp, Homo sapiens
ccctggctgcagaaaggagctaccccctgcaggtttcctctgagctcttctatcactcaataaagctccgcttcatcttgctcaccttccacttgtctgtgtacctcattcttcctggtcgcaggacaagaacgtgggccctgccgccacgtaagacagctgaaacacaaacagggctgaaacatgccccttgctcatcacattgcaggtgaagagaaggagaaaagaactgtggcccttcaggaagcctagacctgggagctcccccagccagggatgtgactccctctttgggaccctgcagttcctgacatctccaagttaccaggtgtcactgcattccccgktgccagccagggaagctgcttgtggtgggcctggtccagctgcagcctttcagagagccagtgcccatgctagcacctggagctgcctgccccatagcagcagccggcttgtctgactgcagtgacctgaccccatgctggctcacaaccctttgccgctcaaagcctgacttgcaatctcccttggaggcgtgggatcca

SEQ ID NO: 777006 - DNA, 559 bp, Homo sapiens
tgcacatgtttatatggattttattaatcacctctaacagtttttacattctttaactattttagctatacagaattcttcaaactgagaatcactaatattcttttgctgcagttgtacaacagaaatattaaactatagtttaggactagcttctgactagataaatggttttgaaccaaatcataaacttcagatgactgagcagctctgttctaaaatatttatgtctggcattaaacattccataaaaataccaactttggtttcctgaactcttstaacattttaaaggtttacataccagttgctttggggagctttcagtaaacatttttttgtaatgacctaagttgctcatttcatgcacaaaccataggtcatcaggttcacttatattaatataatactatctcactactaagttgcctgccttgggtttgaacaattaggagcaagtttaagatgaatggactgtattcactgatttagatcagcaagaaatctcatcatctgtggaaggacatcatataagtttgcattacattatataattgta

SEQ ID NO: 777007 - DNA, 694 bp, Homo sapiens
catacctgaagctgtgttctggaatatattctctagaagcctatcaaggaaattagaaacagacttaaaaactgagatgggtttacaacccagctgtgattcaccatatccatttgtcttttgctattctcctcttatattgctgctagaagttcccttttattgccatcattttttgatatatatctgtgcttgtgttaatcatgaaggaaaagttaagacgtccataaattctaaatacattcccttcattagttgtctcactacttctgcttaaaagaaaaataacttcaagagaattgtccaacattgttaaagaacatttagtcaacattatatttattaagaatgttatatgtacctcataaagatgtacaaacattaatattttgtaccaataaaacatttttaattgaaaaatggctttggccaattttttttcatctttgttgttgagaaaatatcagaatttcagttcttattcaaactttcagatcttagatttcttcaaggtattcctatcygggatttttctgaaggatgtgtttatcaactgattatttaagaagaaattaataacatctatataaaaatcaaatcatttttaatttatttttattgttttgtattgtatatcacttaactgtcattttttctaccttaatttttttctactcagctcctccactctctt

SEQ ID NO: 777008 - DNA, 472 bp, Homo sapiens
gcatctttcctgtaaggtgagcagaaaacgatcctccctacaaaaagattgcaggagaaaacttcctggaggttgagaataacatgcaaaaataatgtcctgtgatgaggaaacttgggcctgagtgtgcacaaaggaatgatctttgagaggaaccactcatacctagaagtcattcaataatgcgtgctggatgcagtaagatgcgagggtggtaggacatgtacagggagatttttagaggtatctgaggtacagtcttctacaaatactcagtatggggtcacttctcaggttgcaaattttgtgtctcagtctcctattgagawacaaatatggtacttgtgaagcttcccagtatgaaggatagaacattcaaatcagaataggatcttattccttgggcaactcatgccctctttcgacctcagtttactacctctaacaaaagggatacggcctatcttagtgt

SEQ ID NO: 777009 - DNA, 551 bp, Homo sapiens
aggttatcgtgatgcctctgctgttatttcacgggttttatggtaccacgccacacatcgcatactctctagccagggaacgcaatggagattgttgtgcctgcttgcaaggtctggagccagggcagccgtattgggcccaggagggaagatatccaagaaatacatgctgagaatrgcagcactaaaaatggaaagagcctcagctattcaccatgtcactggcttgccgaagtgaccaaccccagagcttctctaccttggaacttcttgtgatgtacgttgataaacccctggtagctcaccccagctggggttgaatcttctgtttcctgcagctgaaggcattccatctggcttgcttctctcacgtgattgacccattgtcttcctggtggctaagaaacatgactttctcatgccaacagtgaccatgagcactgcatcagaccaggccccacggctgatacaaggagttcccaggagacaaagccctgtcttgggaagtgaggttagagagacaagacagaggggcgtgggaagttgacagc

SEQ ID NO: 777010 - DNA, 628 bp, Homo sapiens
ttctaaaaccctgcagcctcctggggaaggttcatcgtagtcactctctccctgatgtgaactcagaaggcgatggagtgggtttgtaggaaaaaccccaggggttctgagcacaggtgtgagccagccagctgcctctcagtcagcacggagcctcccgaagaccgcagacacggacagctctgctcccatcgagggactgcccaactcaggacatctcactcagcctgttcaaaccttagaaggggccagaaaaagaaaaaaaaaaaaaaacagactctggaatcagagaggcatgtgttccaatcccagctcagctgcctcctagccacagccatgcaaactcaggccacgcactcggcctctcaggcctcagttttctytgccggagacaggagataagaatagagcttcattaaagaggtgattaaaaaggtgatgaaagaggattaaagaggtgacacaatagagtactcagcgcgctgcaggtccccaacaaatggcgctcatgacgatcactatgcggctccacgtccaccggcctggctgctaatcacccttgggtcaggcacattagccagcagggttcttccacttccccagcctgaactggcttgagttggagcag

SEQ ID NO: 777011 - DNA, 576 bp, Homo sapiens
tccctcagactggagtataccctcagactggggattcacaattacttggtctgcttggactctgtcatgttttttgtaaccatccacatgatccatgcattttacttctggtaaatacaggtgttggtatcatattgtcctcccattctggcccttttttactgttttaaattggtgttttgtttttaaaattcatccttgccgctgcataaccagggtatgcccaccatacaactcagccctcactgaggggcatcggatggttcccacactccccagcasacataacaccatcatccacgtccccagtggaccccaggtgagaattttggggtgtatgtatccaggagtgcaatgatgggctcatattctcgggaggccaccttttttaattcatccaccccactgataccctgcagcttatccagcagcccaacaggcagtgcatggacttagtgacaatcaaaggtcctagaggtcccagaggaggatggggaggagcagggaagaagccggggtgaggagagccgggggaaggtggaggggggggagggtcgacgataagccagcagggga

SEQ ID NO: 777012 - DNA, 576 bp, Homo sapiens
tccctcagactggagtataccctcagactggggattcacaattacttggtctgcttggactctgtcatgttttttgtaaccatccacatgatccatgcattttacttctggtaaatacaggtgttggtatcatattgtcctcccattctggcccttttttactgttttaaattggtgttttgtttttaaaattcatccttgccgctgcataaccagggtatgcccaccatacaactcagccctcactgaggggcatcggatggttcccacactccccagcacacrtaacaccatcatccacgtccccagtggaccccaggtgagaattttggggtgtatgtatccaggagtgcaatgatgggctcatattctcgggaggccaccttttttaattcatccaccccactgataccctgcagcttatccagcagcccaacaggcagtgcatggacttagtgacaatcaaaggtcctagaggtcccagaggaggatggggaggagcagggaagaagccggggtgaggagagccgggggaaggtggaggggggggagggtcgacgataagccagcagggga

SEQ ID NO: 777013 - DNA, 563 bp, Homo sapiens
gctctgttacctcaggaaagttctttaatggatttagtgagtctgggctttggttttcttccagagtgcagtatgggaagggggaagagagtaaacttccagtggagaacccaacagccagccaggtggccaaggtcaacgtccaccrtggtaagtcacacggacagcatggaccatggataggaagtgatgagaacagcactttcatctgagatcttcccgcaaaaaccgataaccccagtttaaccatgagaaaaacatcagaaaagcccaaactgagggatcttctacaaaatattctacccgagcagtcctcaaaaccatcagcgtcatcacagacaggcaaagtcccagaaactgtcagccaagaggagcccacggaaacccaatgactgtcacgtggaatcctggatgggatcctgggacagaaacagccacgaggggaaatctgaggaaattggaattaagtgtggatttcagttaatgatcatgtatccttattggttaattaattagaacgaatgcaccatgctaatgtaagatgttagtaaaaggggaagctg

SEQ ID NO: 777014 - DNA, 563 bp, Homo sapiens
gctctgttacctcaggaaagttctttaatggatttagtgagtctgggctttggttttcttccagagtgcagtatgggaagggggaagagagtaaacttccagtggagaacccaacagccagccaggtggccaaggtcaacgtccaccgtggtaagtcacacggacagcatggaccatggataggaagtgatgagaacagcactttcatctgagatcttcccgcaaaaaccgataaccccagtttaaccatgagaaaaacatcagaaaagcccaaactgagggatcttctacaaaatattctaccygagcagtcctcaaaaccatcagcgtcatcacagacaggcaaagtcccagaaactgtcagccaagaggagcccacggaaacccaatgactgtcacgtggaatcctggatgggatcctgggacagaaacagccacgaggggaaatctgaggaaattggaattaagtgtggatttcagttaatgatcatgtatccttattggttaattaattagaacgaatgcaccatgctaatgtaagatgttagtaaaaggggaagctg

SEQ ID NO: 777015 - DNA, 650 bp, Homo sapiens
ccaaggctttgaagcttccatttaagcctccaaatggtcatggttaaacttttacagtagaaggtatgctagttatcaatttattgccccttagcttcaagttgtcttttctatgatgaagaatttggaccctgtaaatattccttctttgacagccaggacaatgtaaactatcagtagatggcgctagagggacacttgaagaggacaacttactttctggttttgatgtgttgctctggccaggctcctgcactgcactgtgtctagcagcaactagcggccaasagcttcctaagcacctcaaattgtgtacttttagtaagtcaggtatgatcctaagattcctaccactgagaagggttccctgatttcaatggagttgatgaaatccaggagtagcagaggccaggcttaaccacaaaatacaagaggggtatgtctactggaaagggaagcaggcacatagcagtaatcagagtgctttggcctggagagttatttggcagttgctagttgatcatggtgtctttactaatgaagtagttggacagccctctggggtatttcttgaacaatagaacaggaaaataaaaactctagatttggtggcaaaaaaaaaaaaaaaaactgacctgaataatcacaat

SEQ ID NO: 777016 - DNA, 650 bp, Homo sapiens
ccaaggctttgaagcttccatttaagcctccaaatggtcatggttaaacttttacagtagaaggtatgctagttatcaatttattgccccttagcttcaagttgtcttttctatgatgaagaatttggaccctgtaaatattccttctttgacagccaggacaatgtaaactatcagtagatggcgctagagggacacttgaagaggacaacttactttctggttttgatgtgttgctctggccaggctcctgcactgcactgtgtctagcagcaactagcggccaagagcttcctaagcacctcaaattgtgtacttttagtaagtcaggtatgatcctaagattcctaccactgagaagggttccctgatttcaatggagttgatgaaatccaggagtagcagaggccagrcttaaccacaaaatacaagaggggtatgtctactggaaagggaagcaggcacatagcagtaatcagagtgctttggcctggagagttatttggcagttgctagttgatcatggtgtctttactaatgaagtagttggacagccctctggggtatttcttgaacaatagaacaggaaaataaaaactctagatttggtggcaaaaaaaaaaaaaaaaactgacctgaataatcacaat

SEQ ID NO: 777017 - DNA, 684 bp, Homo sapiens
ttcttgctcactggatccaatcagcataatgtcatcaatgtaaccaaccagtgtgatatctggtggaagcaaaaagcgatcaagttctctccaaataagattatgacacaaagccagagagttgatataccactgaggtaggaaagcaaagatatattgctggccttgccaactgaaggcaaattgcttctgtgggccttatggacagcaatggagaaaaagccatttgccaagtgaatggctagataccaggtatcaggagatgtgtcaatytgctcatgcaatgaaaccacatctggtacagcagctgcaataggaatcactacatggttaagcttatgataatccactgtcattccccaagatccatctgtcttctgcacaggctaaatgggagagttgaatgaggatgtggtgggaatcaccacccctgcatccttcaagtcgttgatggtggcactaatctcgcagtccctccagggattctacattgttttattttattatatatgtataaaatatatatttttttaaatagatttactatttactatggcttccatttagcctttcccaccataatgatccttaccctaccagtcagggagccagtgtgggggtctttcagctgctcagtatgtccatgctaattatgcattctggcactggggaaatgacaggatg

SEQ ID NO: 777018 - DNA, 684 bp, Homo sapiens
ttcttgctcactggatccaatcagcataatgtcatcaatgtaaccaaccagtgtgatatctggtggaagcaaaaagcgatcaagttctctccaaataagattatgacacaaagccagagagttgatataccactgaggtaggaaagcaaagatatattgctggccttgccaactgaaggcaaattgcttctgtgggccttatggacagcaatggagaaaaagccatttgccaagtgaatggctagataccaggtatcaggagatgtgtcaatttgctcatgcaatgaaaccacatctggtacagcagctgcaataggaatcactacatggttaagcttatgataatccactgtcattccccaagatccatctgtcttctgcacaggctaaatgggagagttsaatgaggatgtggtgggaatcaccacccctgcatccttcaagtcgttgatggtggcactaatctcgcagtccctccagggattctacattgttttattttattatatatgtataaaatatatatttttttaaatagatttactatttactatggcttccatttagcctttcccaccataatgatccttaccctaccagtcagggagccagtgtgggggtctttcagctgctcagtatgtccatgctaattatgcattctggcactggggaaatgacaggatg

SEQ ID NO: 777019 - DNA, 684 bp, Homo sapiens
ttcttgctcactggatccaatcagcataatgtcatcaatgtaaccaaccagtgtgatatctggtggaagcaaaaagcgatcaagttctctccaaataagattatgacacaaagccagagagttgatataccactgaggtaggaaagcaaagatatattgctggccttgccaactgaaggcaaattgcttctgtgggccttatggacagcaatggagaaaaagccatttgccaagtgaatggctagataccaggtatcaggagatgtgtcaatttgctcatgcaatgaaaccacatctggtacagcagctgcaataggaatcactacatggttaagcttatgataatccactgtcattccccaagatccatctgtcttctgcacaggctaaatgggagagttgaatgaggatgtggtgggaatcaccacccctgcatccttcaagtcgttgatggtggcactaatctcgcagtccctccagggattctacrttgttttattttattatatatgtataaaatatatatttttttaaatagatttactatttactatggcttccatttagcctttcccaccataatgatccttaccctaccagtcagggagccagtgtgggggtctttcagctgctcagtatgtccatgctaattatgcattctggcactggggaaatgacaggatg

SEQ ID NO: 777020 - DNA, 622 bp, Homo sapiens
ctatatgatataaatgattgtgaaaaatgctgtcataggggcataatttttcaggtgagttgttctacctcaccaacaaggagaaagtactacacagacccaactagtttaaataaaaaccttgcatgtaaaggaagaaaagataatgtttgctttggatgtgacggtaacaattatgatcaaacataagaataataaaggcaagagtaaaggaagactcacacagactctgtaggtaagcatgcaattgcttttattatttatacccattatagtatttatacccattataccctaagaggctgaaaactacataacaggttgctaacagattcttgtcatctggtgtgaacacagttccatagtcatgaatgctgtgacatcttttaaaacaggttggggtaatgcttaacagacatttgttagcagtccaaacttytaaacactgaaaaaaaaaaaaaaggaattatcagcaagaatggcagttgcacacttgagtccttgttatgatatttattgggctgctccagaaaactttagctgtgcacatttagttgattacgtaaatagttgccactattctgactataaccagatttgatgttaataaggctttattaaa

SEQ ID NO: 777021 - DNA, 601 bp, Homo sapiens
attttaatttcaaatgcattattcattgctgctatatacaaaagcgattgacttttgtatattttttgtggtgcaaacttactgtaattatttcttagattttggagttttttgttaacattttaatttttaatatagccaataagacatctgcaaacaaaaagagttttgtgactttctttccaatatgataccttttatttccttttcatgtcttactgcattagctaggacttccaatatgatgttgaaaaagtgtggcgagaggggctatacttgccttgctcctgatcttaatggggaagcatcttctttttcactattaagtatgctgttaactgtagattttttgtaaatattctttatcatgtttaaaaaaagttccactctatttgtagttcattcactggattttgtcaaatgtgtttctgcatctattgctatgattmtgtgtttgtcttctttaacctgttgatgtgataaattacattaattgatttttgaatgttgagccagacttgcatacttgagctaaatcccactttgttgtggtgtatgttctttttatgcactattagagtcaatatgctaatatttcatt

SEQ ID NO: 777022 - DNA, 634 bp, Homo sapiens
aaattaaactaaatattgataggatgcatgaatatctagaaacaaaactttgcggaacaattttgataaatggaggaagagatagatctgttcaaccttctcagaaatgggagccagtagctatacataattttcttagtaattctttgtaaaattgtaattctcagtgattctttgctacattttaattttgcttaaatatgcaaggataatttattttaaattcataaatttaatctgagctattatttgtaatatatttatgctgaggtttttccactctctgaatttgccagactatataaaatcaaaccrtctcacatcaggtggccagtgaatgaagcgtgagaatatgccatacaatatctagaaaataacttgcatgtttcaaaacatccaagctatatactcatggaaatcatagtaatattgattgtaaattgtatcattgattgcagttttactatatgccaaacattgtgacaagcattctagattgtcatttaattattaaaagtatttgagtaggttctagtaatatcctcattttatagctgaggaaattaaggaaaaaatctatttttcttaaattcctaaagtcatattgaagcaaaaatgtctggtatcttctgtc

SEQ ID NO: 777023 - DNA, 634 bp, Homo sapiens
aaattaaactaaatattgataggatgcatgaatatctagaaacaaaactttgcggaacaattttgataaatggaggaagagatagatctgttcaaccttctcagaaatgggagccagtagctatacataattttcttagtaattctttgtaaaattgtaattctcagtgattctttgctacattttaattttgcttaaatatgcaaggataatttattttaaattcataaatttaatctgagctattatttgtaatatatttatgctgaggtttttccactctctgaatttgccagactatataaaatcaaaccgtctcacatcaggtggccagtgaatgaagygtgagaatatgccatacaatatctagaaaataacttgcatgtttcaaaacatccaagctatatactcatggaaatcatagtaatattgattgtaaattgtatcattgattgcagttttactatatgccaaacattgtgacaagcattctagattgtcatttaattattaaaagtatttgagtaggttctagtaatatcctcattttatagctgaggaaattaaggaaaaaatctatttttcttaaattcctaaagtcatattgaagcaaaaatgtctggtatcttctgtc

SEQ ID NO: 777024 - DNA, 639 bp, Homo sapiens
tttcaagactatcctaattagtaatttgattttacactataatgcttattgaatttctgaaggctatgcaggttgtaatttcaaagttgaggagtctcatggagtatttatagagcaagggcattaaaatcatgcctaaaagcaattgtgaatgtgacagaatacagattggaacaatcaactatccaaacattctgattaacttttttcataaatattctttgtagtgctgagtttgctttacttatttcaagatgcaataaagaaacagcttakaacagaggactgattggtatatgtttaggtgtaactgtggtttaacttcgcatcttattgtacctctactcacagattggcgggcctaaccccagcatgtctgatccaggtctgatatggggtctgagaatgtctttctatgtccccagatgatgctgaggctgctgtacgtgcactacattttaagaaccactgccatagagtgtagatacttacatctctttaggttgaggactctgtatgaagactcaaaatttgcatttaatatttacttagaatttaatgttaaattaatctttaaagtaagaattaatttaaagcacgtagtagttttatatgttcatgcaatgtgaaaggctcgta

SEQ ID NO: 777025 - DNA, 379 bp, Homo sapiens
cccattttacaggtcgaacaagtgaggcttagagggatcctctcccctaatcccacttagcccaccactgagagagaggaaagggcctgcccatgctcacagagacgacggcagaactcaggcttgagtccatggctggtaggctcaggcagggctgaattccagacagttactcaaacttcaagactttagaccagctttgaaaatcccaagctaggtgaaaccctacaccaccrttacttagtgcagggcagtggagtgtgggcgtggtaggtcagggaacgacttattcagctaatgcttccaaaaccctccccgctaaaggagaagcatctggagactaaatatgtaaaatgacattggctatagagtcccacca

SEQ ID NO: 777026 - DNA, 629 bp, Homo sapiens
tgactatagtcaccctagtgtgctatcaaatactaggtcttattcattctttctatttttttttgcaaaactacggaagacttcacaaatttgtgtgtcattcttgcacagaggccatgctaatcttctctgtatcattccaattttagtatctgtgctgcctaagcgagtacrtattctgaacttttaaattcactcattaattctaagtttagccatacattcttttggattttctatatacataatcatatcatctgtgaaaatgacagttttatttcttactttctaaactttatgcctttcatttctcttatttgccttattggactggccagacctcccttacaaagttgatggggtgattacacagaccatccttatctccttgatactctcactcgcttcatttctgatgcctgaggttgtccttactttcctgtgactgcacctgagcatttcaaaggagtttgaagctggaagcttgtctggtcacctgctggaccccagcctccctgcagcatccctccttttgcacatgcctcattttgcgggctctgcctgagttaaaggcagggttcagcctgatggggcatattctggtttctcctctatgtgctgacagagag

SEQ ID NO: 777027 - DNA, 629 bp, Homo sapiens
tgactatagtcaccctagtgtgctatcaaatactaggtcttattcattctttctatttttttttgcaaaactacggaagacttcacaaatttgtgtgtcattcttgcacagaggccatgctaatcttctctgtatcattccaattttagtatctgtgctgcctaagcgagtacgtattctgaacttttaaattcackcattaattctaagtttagccatacattcttttggattttctatatacataatcatatcatctgtgaaaatgacagttttatttcttactttctaaactttatgcctttcatttctcttatttgccttattggactggccagacctcccttacaaagttgatggggtgattacacagaccatccttatctccttgatactctcactcgcttcatttctgatgcctgaggttgtccttactttcctgtgactgcacctgagcatttcaaaggagtttgaagctggaagcttgtctggtcacctgctggaccccagcctccctgcagcatccctccttttgcacatgcctcattttgcgggctctgcctgagttaaaggcagggttcagcctgatggggcatattctggtttctcctctatgtgctgacagagag

SEQ ID NO: 777028 - DNA, 629 bp, Homo sapiens
tgactatagtcaccctagtgtgctatcaaatactaggtcttattcattctttctatttttttttgcaaaactacggaagacttcacaaatttgtgtgtcattcttgcacagaggccatgctaatcttctctgtatcattccaattttagtatctgtgctgcctaagcgagtacgtattctgaacttttaaattcactcattaattctaagtttagccatasattcttttggattttctatatacataatcatatcatctgtgaaaatgacagttttatttcttactttctaaactttatgcctttcatttctcttatttgccttattggactggccagacctcccttacaaagttgatggggtgattacacagaccatccttatctccttgatactctcactcgcttcatttctgatgcctgaggttgtccttactttcctgtgactgcacctgagcatttcaaaggagtttgaagctggaagcttgtctggtcacctgctggaccccagcctccctgcagcatccctccttttgcacatgcctcattttgcgggctctgcctgagttaaaggcagggttcagcctgatggggcatattctggtttctcctctatgtgctgacagagag

SEQ ID NO: 777029 - DNA, 645 bp, Homo sapiens
atacatagggaattccactcaaattatttcaaaaagtagaggtggagggactactaaactcatttaccaggtcagtattatcttgataccaaaaccagaaaaatatatcaaaaaaagaaaaaaaaaaaaaagaaaactacaggccaatatccctgatgaacattgatgcaaaaatcctcaacaaaataccagaaaaytgaatttgacaacacattacaaagattattcatcatgaccaagtgggatttatcccaaggatgcaagaatggttcaacatatgcaaatcaatcaatatgatatatcaacaggatgaagaaaaaaaccatatgatcatttcaattgatgattaaaaagcatttcataaagttcaacatcccttcatgataaaaacctcgaaaaactgggtatagaaggaacatacctcaacataataaaagctatataagacagacacatacatactattacactgaatggggaaaaatggaaagcttttcctctaagatctggaacaaggcaaggatgcccactttcaccactgttatttaacatactgctggaagtcttagctagggcaatcagaaaagagaaaaaaataaaagcatccaaattggaaaggaagaagtctaattttccttgtttgca

SEQ ID NO: 777030 - DNA, 659 bp, Homo sapiens
cttaccccaagttacatcccttccccaggaccagcctgaatccagtagtgaatccatgcctcaatttgagatacttttggtgggctatcccagcctcagagctccacatgagatgggtggaagcctctgttttgactaccttacrgttcagcatctctctctggcaagtccccactcttttgctcgcttacacatgtcatatctgagagcattctctgataaaccacaaatctctgcttcagtgtttgttttatagaaaactcaacctatgacacttgataatgaggctggtcttagaggcaaactctaaaaagggattttgaagttgaattatttgctggctggttcataatcagaactccattactggtggtagggtagtgatgcaactgtgaaaattttcactaatgttgaattttgataggacacgagcagaaagaaatgtatcacaaaatgcaatatctcaggtgttttagactttaggcgtagatagtaattaaaggagtatagcactggatagctatcttttgaagagatggggtctccctagcccaggctagtcttgatctcctgggctccagtggtcctcccattttggcttcccaaagtgcttggattataggtgtgagccaccatgcccggccttctggatagctatt

SEQ ID NO: 777031 - DNA, 505 bp, Homo sapiens
agttgtgcagaaatgcaaaagacacttggaggactgtctcctaacacctatcaaatgcagagtactacattaggtatcagggaaagaaagatgaaattatttgggctgatggaaatcagcagctcacttaaaagaagcatgagtggaaagttagttatggtaacgcaggagaggaagtgataccataatgtttaaaacagggagacatttagccaagtctaggaggtcagggagtacttttcaaagttaatacctgataagagttttgatgtaaattttctaaaaacgcttctatgtagctgtatctttcttactttcttaggggttctasgttatacaaaagtcaagaatttcaaggctttttattaaaaattgctcaacatatgtttctaagatttgtttgctaccagtagcctcctttagccaaaatttcataaggtttcaagattatataaagataatgaaaactaatctgaattagagtttttgcttaattagtaggatc

SEQ ID NO: 777032 - DNA, 463 bp, Homo sapiens
tacaaactgtattaaatgagtctgtgaaagttcatctaagtccctagtattattattttttaactctctagaaagtcctagccacgtagctcaaagcaaaatagaaaagatccaaatcattcataggacaagtgttgaggcaactttcaattactaaatatatttttagccatttaaaactaaaagaaaagtaacgtctgtaatcccagcactttgggatgctgaggcaggcggaacacaaggtcaggcgatcgagaccatcctggctaacacggtgaaaccccgtctctactaaaaayacaaaaaattagccagcctggtggccggcgcctgtagtcccagctacccaggaggctgaggcaggagaatggcttgaacccgagaggcggagcttgcagtgagccgagatcacgtcactgcactctagcctgggcagcagagcgaaactccgtctcaaaaaaaa

SEQ ID NO: 777033 - DNA, 659 bp, Homo sapiens
gtatactcctaatgattgcagccttttagcaatgtaaataaatattcctttatttcttagtgttccataaagttgttttcgtatatttttttctgcccagacacttagcaaagctttaacctcctcctcagtccagtgctttcctgctccactctccatgttgaaagtgacctggaaatgattcactatttccagccaaggttttgtttcctaggaaaccasatggctggttgtcaataagctccgaagagctgaaaggatgtagtttaactggttcaagctgcctgagggagtaacttgagaaactgccaaataagcaggctttgtgattaaagaagcctggatctaaatgattcttaactatatcatttcagcctgaaggaaaaacttcccttgagacaaaagggaaagaaaaccgttttttgtgtatttcttttcttacataatttactgttttaccaaatgattgttgatttttaaaaattgttttgaaaatggttggcagaggctttttccaagaggtctatagccaatgttaataatatatttcctctgacatgaatcacctagtcctctaacattggttaacttacagaccccacagcatttcactaaataaaagaaatcataagtcaatttatttagtcccatatggtata

SEQ ID NO: 777034 - DNA, 669 bp, Homo sapiens
attgaattctgcagaaacctgactgagcatagaaatatattcttccacagagcctcaaggtcccagcccaggcaacaccttaaccttgtattagggcctgaacagagaaccaggtgagtccacctgcaattctgaactaaaaagctgtgagacagtgaataagcattgtttcaagctgctagtttgtggtaattgacacagttgtctctcaacactgtaaaagttattggctcagaattccctgggcatcctttggtggacattgaacagaaagccagatgaattactcactgggctcagcttattttttcttatggctttgagtttatctttcatgactcccgggtgaatgcaggcatacrtgaaatgtagggtaagctctgatacctaagtagagagtatgtatgatgaaaactaaaggagaaatgcctgtttaaaatgttagtttgtcctatctgataaaatctcaactattaagtgaagtcattgtcttcaacacttaacatttataatataactcagctcaaaaacttagagagggaccacacgatgcctggttctgtgctatccaagccagattcaataggtcggtgtaagtaataatctaccagagaaagcaaaggtagcctaaagtggtctagggtaaaaattctggaaaaatacagaaaa

SEQ ID NO: 777035 - DNA, 486 bp, Homo sapiens
tccatatgctgcttctcactttcacaactgtgtgaatatactatacattgtattctacttatcagtgctatgtaacaaaactccaaaaaactcagtaggacaaagcaataatttaattacttctgattctgtgtggtagaggaatagggacaggtcacattgaggatagtttgtttytgctgcacatatgtctagggcctcagcagggaatacttgaaggtcaagggtgcatgcatagctggggctggagccctttggaggattcttcgcacatgtgcttaacagttgatgcaggtagtcagcttgaactcacattgggaagttgtctaaaacattatatgtggtctttgggcaggctactttgggtttccacatggcagggtgactggtttccatgagtgatttcctgagaaatcaagttgaatctatgacatctttatgatctagcctcagaagtcacacagcatcacttgctccgtactttat

SEQ ID NO: 777036 - DNA, 486 bp, Homo sapiens
tccatatgctgcttctcactttcacaactgtgtgaatatactatacattgtattctacttatcagtgctatgtaacaaaactccaaaaaactcagtaggacaaagcaataatttaattacttctgattctgtgtggtagaggaatagggacaggtcacattgaggatagtttgtttctgctgcacatatgtctagggcctcagcagggaatacttgaaggtcaagggtgcatgcatagctggggctggagccctttggaggattcttcgcacatgtgcttaacagttgatgcaggtagtcagcttgaactcacattgggaagttgtctraaacattatatgtggtctttgggcaggctactttgggtttccacatggcagggtgactggtttccatgagtgatttcctgagaaatcaagttgaatctatgacatctttatgatctagcctcagaagtcacacagcatcacttgctccgtactttat

SEQ ID NO: 777037 - DNA, 624 bp, Homo sapiens
aagtatcttatattgaacaatgagaacacatggacacaggaaggggaacatcacacaccgaggactgttgtggggtgaggggagtggggagggatagcattaggagatacacctaatgctaaatgacaggttaatgggagcagcacaccaacatggcacatgtatacatatgtaacaaacctcacgttgtgcacatgtaccctaaaacttaaagtataataataataaaatttaaaaaaaaaaaagaagtataagtttctctttggctctttacttctgcttttctcaatagttggagaagaaaaaaagcacaygttagtcactgatagatctcatgccagtaaactgtatttgttaattttttatgataaccttcttcaagacttgtgaatgtgtccaaccttctcagatcctcctttcatcactctcctttttctcttgtacttcttgaacttcctttgagtcacttaatttctctaggaaggatcttcgttcttccctgcttgctatctgccttcccttttcttcatccatattctgtcacaatgtgaaacattccatttaccacagcccaagtgatgaaaaccttttattcacatatgaaagtcatcagaactgactgcc

SEQ ID NO: 777038 - DNA, 610 bp, Homo sapiens
tctgaaaatgaaaataactgacttatctcatttcttatgactattaaatcatatacagtactttgattatttcttgacacaatgaaggcccttagcaactaataattagtgttatcattagctttgctattattgtttcctgagtgcccagagcagtgcctgacatgtgataaaactgcaataattcgttgtttggtgaaaaatttaatgaaataatgaatacataaacaaatcaataagttatagaaatagcattataataaattatgtttacataatagtgtgattctggtaaatatcatagaaggactaacagacaagcaaataaatgtccttggagatagtcaacatggattcacagaaagcawaaaataagaaaaattagttgacttttaatgtaatataccagaaaattaatctgcatacattgtctatatatttgaaatctcagaactcatagtttctatttattctatttaatcatataaaatagctttcttttttttaaattataaattttattgttctgtgttattggaggttgtattaattaggataggctaggttatgttgcattataattaactacatagcaaatacaaatagtaac

SEQ ID NO: 777039 - DNA, 633 bp, Homo sapiens
ctttgtgaggagaaagctgtatcctgactcagcctaaaaggataattacaaccactctagctgaatcaatccatgctgacttagtaaatgatgtggcttcttcctagacattcttcctgatgctccccttgcatccgaagagacagaaaaattttaatcattcaaagcttaccctgaaaaaagcttactttctcagcaaccgctgctagctgctttcaattgctcttgcgttcacaagcagttcaagtccacaaggtgacaagatttgaattttacatttcrcaggaattttgaattataaaacttccaaaatcaataacaattcagtcttgtagagctgggttggaattgtcttctttccagaatgtctagagagttgtggagagaggcaaaacattattagatccttgagaaagtgctgtagaaacttaatcttgacagtacataaaacagactgggcaattacgtgatctttctgtgagaacttcttcttgtctttacaagatcaaatatgaaaatactcaccttcttgctaatttccaactaccatttggtcattaaattttacataagaactctattttaggttttgtgaactatagttacttccaaaggtgtggtgactttgtgata

SEQ ID NO: 777040 - DNA, 612 bp, Homo sapiens
cctggaaacatacagcctctcaagactgaatcaggaagaaactttaaccctgaacagatcaataatgagtttgaggccaggtgcgatgactcacacctgtaatcccagcactgtgggaggctgagggaggcagatcattttgaactcctgaggtcaggagttcaagaccagagggaccaacatggtgaaaccatgcctctactaaaaatacaaaaaaaaaaaaaaaaattagtcaggtgtggtggtgcatgcctgtacagctacttggaggctgaggcaggagaatcacttgaatctgggaggcagaggttgcagtgagctgagattgtgcccctgcatttcagcctgggcaacagaggaaggctccatttcaaaaaaataaaaaattaaaaaattaaaattaaaataaaaaaatgagtttgaaattgaayataaaaaaaccaaacaaacaaaaaaacctaccaaaaagccctggaccagagtgattcacagctgaattctatcaaacacataaagaagaacgggcacgagtcctactgaaactatcctaaaaaatcaaggaggatggaatcctttctgattccatgaggctagtatcattttgatacctaa

SEQ ID NO: 777041 - DNA, 632 bp, Homo sapiens
caatcagtgagttatcaattagtatgcttttaagaagtgaaataacataaaaatggatattttatgaattcagcacataaaaaaaaagtttacccctgacctgaatttcaactagaaagatctgattaatttgtttttatactcttttggtcattagagctgatagcttgcaattttcctgtggtttcaagtactgtagttattggattatggtcttgtgcatcagaaaacctgggctgttatcatgagagcagtgggcaatattctctctacctttcctatcaactgctgtccagggccacccactggcctctcaaatggcaagccgcaaatgccagcactctgttagatggagctaccacatctaagcattgcctttgagtcttttctatatccactaactattcatcagtttgatttcccttgactctttgtcctaggtagagacataaaaatacgtcttaccctgtacctactcttttatgtataatagctacrtctcttggatgcactagagaatatatcagcttcaacagagcttggaggagtcttactctttagtcagaagtatttatgtcactgtaaaaaaatgcctatgaccatctattctctaggagactcaaagctctgtc

SEQ ID NO: 777042 - DNA, 538 bp, Homo sapiens
ggcctctcaaatggcaagccgcaaatgccagcactctgttagatggagctaccacatctaagcattgcctttgagtcttttctatatccactaactattcatcagtttgatttcccttgactctttgtcctaggtagagacataaaaatacgtcttaccctgtacctactcttttatgtataatagctacgtctcttggatgcactagagaatatatcagcttcaacagagcttggaggagtcttactctttagtcagaagtatttatgtcactgtaaaaaaatgcctatgaccatctattctytaggagactcaaagctctgtccaatttacttttttgactgattggtggacagatatttggtaaactattatctcttccttctttcctagtttacgaacctaaatcacctactgatttttttgtgttgtaactaaagcatatctaggatgttttatatgaaagccatagtgcttttatcaccttatttaaatgcagtgaactggtagagaataaactaacaaactccaaaatcta

SEQ ID NO: 777043 - DNA, 609 bp, Homo sapiens
aatctatgcagttcaaatctataggttcataatctgtgcagctttggaaccatttgagagggtaaaacccacaattagttttcttttttttttttttttttttttttgagatgaagtctcactctgttgcccaggctgaagagcaatggtgggatctcagctcactgaaacctccgcctcctgggttcaagtgattctcctgccttagcctcccaagtagctgggattacaggcacctgccactgtgcctggytaagttttgtgtttttagtacagaaggggtttcgccatgttggccaggctggtctcaaactcctgacctcaggtgatctgcccttggcctcccaaagtgctgggattacaggtgtgagccactgcgcccggccaattagtttttattcttaacacactaacgttgtaatgcgcttagcaaataagtgctaagttactgtaataatgtaacaagaagttgaatttattttaaaagtaaaatactgaaatgggatagttcccttgacccttttgtgggactcgtgaaggggtttgtctcatttactcagcttgcagctctcaacccctgtgggaaggggaccactcaggtgattgggt

SEQ ID NO: 777044 - DNA, 614 bp, Homo sapiens
tctgaagaaacaggactggaggaattcacagtaatttgagccttgtccctcttcaagctccagaaagaaatatactgtgtttaattgaagtagaaaaggaatatcgggctttgtttgatcaggacatatagtatttatgtcctggctaatttcagacactggactagtttacaaaaagtaggtacaagacagakagattaaatttgatcattattcttattttgttgtttggggatgttagttataacttcttaaatgtgatttaggctgaattgggaatttcttccatgtatctatgcaaagatccttttgtatttttgacaaaaaaaaatttataggaaggattttaaaatatatttagactagataccatatctgttgagtgaaacatcaccaaactaatgcttttttaatattatgcttgggagtacattgttgcctctttgtgtaaatatgacatccaaaagagggagttacacatctgttttattccctgtaataaaggtgatttctgggaattgtttgctaaataaatccacaataagatgtacatcatttttattgatgacatgggagatgtcatttataaagcttaggtacatcattttcttatt

SEQ ID NO: 777045 - DNA, 614 bp, Homo sapiens
tctgaagaaacaggactggaggaattcacagtaatttgagccttgtccctcttcaagctccagaaagaaatatactgtgtttaattgaagtagaaaaggaatatcgggctttgtttgatcaggacatatagtatttatgtcctggctaatttcagacactggactagtttacaaaaagtaggtacaagacagagagattaaatttgakcattattcttattttgttgtttggggatgttagttataacttcttaaatgtgatttaggctgaattgggaatttcttccatgtatctatgcaaagatccttttgtatttttgacaaaaaaaaatttataggaaggattttaaaatatatttagactagataccatatctgttgagtgaaacatcaccaaactaatgcttttttaatattatgcttgggagtacattgttgcctctttgtgtaaatatgacatccaaaagagggagttacacatctgttttattccctgtaataaaggtgatttctgggaattgtttgctaaataaatccacaataagatgtacatcatttttattgatgacatgggagatgtcatttataaagcttaggtacatcattttcttatt

SEQ ID NO: 777046 - DNA, 616 bp, Homo sapiens
ggattacattgtcctttagtacaggaggggccattttttcctttctgaaggtggactggatccttttcattttttttttttaatccaagtggcctaaacaacgcaagaccagtgtttacatttatttccacacagtcttaatttatgacagatatacttattttctgccatatagcctcttttctaattaagagaaccacaccttattcctaacttattactgttaataacagcacaggcatcaacttttaaggtgacttgtttgggcacccctttttcttctgttttggctaacactttactcatatcgtttatgagcccccaccagtcctcagtccttaatcttattttaaaaactgtggtcatgggaggctcaggtgggtcataacacacatcaggctggtcattttctgggctacataccttgtatagaataacattataccamcaagttctttttagagttccagtacacttataataaccataaaataataggaccgtagcaaccttttgtcccacctcagtgacttgatgtatacactgggagcagtcctcagtctgaggaaggtcagttgaagtccttactgtaaacatctacattttaaggaaaatg

SEQ ID NO: 777047 - DNA, 559 bp, Homo sapiens
aaagaaatgtaaatcaaaactgcaatgagatatcaactcaccccagtaaaaatgttttttatccaaaagacaggcagtaacagatgctggcaaagatgtggagaaaaagagatccttgcatattgttggtggaaatgtaaattagtacagccactatrcagaacggtttggaggttccttaaaaaactataaacaaaactaccatatgacccattaatcccattgctaggtctataattagaaaaaaaagaaatcagtatatcaaagagacctccgtacgcccatgtttattgcagcactattaacaatagccaagatttggaagcaacctgtatccatcaacagatgaatgggtaaagaaaatgtggtacctatacacaatggagtactattcagccataaaaaagaatgacatcctttcatttgcaccaacatggttggaactggaggagattatattaaataaaataagacaggcacataaaaataaacttcatgtgttctcacttatatgtgggagctaaaaattaaaacaattgaacttatggagatagaaagt

SEQ ID NO: 777048 - DNA, 559 bp, Homo sapiens
aaagaaatgtaaatcaaaactgcaatgagatatcaactcaccccagtaaaaatgttttttatccaaaagacaggcagtaacagatgctggcaaagatgtggagaaaaagagatccttgcatattgttggtggaaatgtaaattagtacagccactatgcagaacggtttggaggttccttaaaaaactataaacaaaactaccatatgacccattaatcccaytgctaggtctataattagaaaaaaaagaaatcagtatatcaaagagacctccgtacgcccatgtttattgcagcactattaacaatagccaagatttggaagcaacctgtatccatcaacagatgaatgggtaaagaaaatgtggtacctatacacaatggagtactattcagccataaaaaagaatgacatcctttcatttgcaccaacatggttggaactggaggagattatattaaataaaataagacaggcacataaaaataaacttcatgtgttctcacttatatgtgggagctaaaaattaaaacaattgaacttatggagatagaaagt

SEQ ID NO: 777049 - DNA, 643 bp, Homo sapiens
tttgatttggggaaggctgttaaacatattagaggtttaaaacacttgacattatgaaatagaattccagattaccataagttatttagccaaaatgatgactcaaagatactttaaaaaggcaaaatcctttactcattaagaggaagacttagctttccaaacaatctgtcttctgtcttcttcttcttttttcagtatttacaaggcaaatgaaaaattttcaktatcctttactagtacacgtaaatcttgttcataggagagaaagccaattttccccctttcattagtcaactattaatgtcaacctcagtttttaaaaaataaaacattatagataattctgtctaatcttaaccagtttgaccatgaggtgagattcttataaaccctttataactcttttcaaatttttgttagagaagatcagtaccttaagaaaaccttgttgtgcttttgtttcatgctcaatttatggaaaaaccacataatgcccttttgaatttagtcagtatgttcacgtaaagaatttcttgtgcaagattaattttacaaaccttccacaacttgtttaaacctttagctttatcttatctaatttaaaacaattctttaaccttctaagctaggcacaaattta

SEQ ID NO: 777050 - DNA, 507 bp, Homo sapiens
gggcctaataagcaggtatagctggaagataaaaacagattttgagagggatatatccatttttcattcctgggattccataagaaaaacagaagttttttccaaaacagggtcagtggcacctcctttgtttttcccaaggagtcccatgctctcagaagttatcttagggccacttgtgtgcagtaagagtggcaaaacaagatggagaaaaataattcagttgaccgagaagaaaaaaaaaaacatttttttttccagcaaaacaaaaatccaaggagagaaaagacataaaggaattttagatctacctayatcttggatatccacttttagttaagctgacttttaaccatagtgctcttaaaaaatcctttaaaatccattattacctgactttagccatgccaagtggccaatatttctggcttttagactttaccaaaagtaacctcacaggtgaaaccaacaagtctcaactaaggttatgacttaagtgtgagtgta

SEQ ID NO: 777051 - DNA, 622 bp, Homo sapiens
aacaaagtttgagcaattgcttctgaggtttcctctaatacaaaatgtgtacaataagatctgtgacacaagtaaacatattacaaccctactacaatgttcttcttcaaaataatcttctttactttagaggcttccattttcttaaagatattttgacagtagttgcacttataatgtttttattaagtatgaactctctgatgttgagtaagatgtgagcatgtattaatggctttttcacagtctttatatttrtacaatatttctcaagtataaatgctttcctgtgaagtaaggtgtgagcactggttaaaagttttgtcacactgttcacacatgtagaagttttctccagtataacttatcttacctacaatcaagtgtgacaaccacttaaaactttatcacattcttcacatttctaggatttctcaacactatgatttcttttatgtttagaaaagtttgaggtgttttcaaaagcactgtcacatctttctggtttatagaatttatctctagtatgaattatcttatatctgttaagaattgagaacttattaaaggctttgccatattcttcacactaacaggggttctctctagcatgaattttttt

SEQ ID NO: 777052 - DNA, 622 bp, Homo sapiens
aacaaagtttgagcaattgcttctgaggtttcctctaatacaaaatgtgtacaataagatctgtgacacaagtaaacatattacaaccctactacaatgttcttcttcaaaataatcttctttactttagaggcttccattttcttaaagatattttgacagtagttgcacttataatgtttttattaagtatgaactctctgatgttgagtaagatgtgagcatgtattaatggctttttcacagtctttatatttatacaatatttctcaagtataaatgctttcctgtgaagtaargtgtgagcactggttaaaagttttgtcacactgttcacacatgtagaagttttctccagtataacttatcttacctacaatcaagtgtgacaaccacttaaaactttatcacattcttcacatttctaggatttctcaacactatgatttcttttatgtttagaaaagtttgaggtgttttcaaaagcactgtcacatctttctggtttatagaatttatctctagtatgaattatcttatatctgttaagaattgagaacttattaaaggctttgccatattcttcacactaacaggggttctctctagcatgaattttttt

SEQ ID NO: 777053 - DNA, 622 bp, Homo sapiens
aacaaagtttgagcaattgcttctgaggtttcctctaatacaaaatgtgtacaataagatctgtgacacaagtaaacatattacaaccctactacaatgttcttcttcaaaataatcttctttactttagaggcttccattttcttaaagatattttgacagtagttgcacttataatgtttttattaagtatgaactctctgatgttgagtaagatgtgagcatgtattaatggctttttcacagtctttatatttatacaatatttctcaagtataaatgctttcctgtgaagtaaggtgtgagcactggttaaaagttttgtcacactgttcacacatgtagaagttttctccagtataacttatcttacctacaatcaagtgtgacaaccayttaaaactttatcacattcttcacatttctaggatttctcaacactatgatttcttttatgtttagaaaagtttgaggtgttttcaaaagcactgtcacatctttctggtttatagaatttatctctagtatgaattatcttatatctgttaagaattgagaacttattaaaggctttgccatattcttcacactaacaggggttctctctagcatgaattttttt

SEQ ID NO: 777054 - DNA, 556 bp, Homo sapiens
gagttcaagaccagcctggctaacatggcaaaaccctgtctctactaaaaatacaaaaattagctgggtgtggtggtgggaacctgtaatcccagctactcaggaggctgaggcaggagaatcacttgaacccgagtgrcagaagctgccatgagctgagattgcatcactgcaccccagcctgggaaacagatcaagacttcatctcaaaaacaaaacaggtggggcgtgggggctcacacctgaaatctcagcactttgggaggcagaagcaggcagatcatgagatcaggagttcgagaccagcctgaccaacatagtgaaaccccgtctctactaaaagtacaaaaattaggcatgatggcatgcacatgtaatcccagctactcaggaggctgaggcaggagaatcacttgaacctgggaggcagaggttgccgtgagccaagattgcaccaccgcggtctatcttgggtgacagagcaggactccatctcaaaaaaaaaaaaaaaaattattacattgcctgcatggactacaacttttacaatgtaaga

SEQ ID NO: 777055 - DNA, 591 bp, Homo sapiens
tttagtggtgatttgtgagattttcgtgcacccatcacccaagcagtttacactacacccatttgtagtcttctatcccttgccctgctcccactcttcccgcaaagtccccagagtccattgtaccattcctatgcctttgtgttttcgtagtttagctcccacatatcagtgagaacagaaaaccttttatctgaggaatgcaaatcctcttgttaggtcggggcaaaagttattgtggttttaccttttaatgtaatggcaaaaaccagaattacatttgcaccaacctaatagttgtcaaactcagagagacattaaaatgagaacacaattaygtctttcctctttgaactatgtagttatctcttgaaactgtttactattgccaccagtggctataaattaaattaatagtgctgcactgtgcactataacccatactctaaaccttaacgatgtatatatacccaattaataatcaattttttttgtaaataaataatttctgacagacaaccttgtatcagcccacttgggggtgtctctcaggtcctgcaggagcagtctgcttccttcagatggtctgtg

SEQ ID NO: 777056 - DNA, 604 bp, Homo sapiens
ctgtaatattggaattaacagagttttgtaaggatttttgtttctgcaaaatgtcctcaatgtatgcacaagtttttatatcctagaaacaatgttaattaggggacttttgtgtaaaattggtcttcaacggggttcaaatcgtggtgtatatacatatataaatatatatatatataaatatatagatgattttattttttatgtttttaaatttaaattttttaatttctgtgatacatgtgcaaaacatgtaggtttgttacataygtatacatgtgccatggtggtttgctgcacctatcaacacatcatctaggttttaagccccacatgaattaggtatttgtcctaatgctctccctcccattgccccccacaccctgacaggccccagtatgtgatgttccccttcctgtctccatgtgttctcgtcgttcagttcccacttatgagtgagaaaatgtggtgtttgattttctgttcctgtgttagtttgctgagaattatggcttccaatttcatccatgcccctgcaaaggacatgaactcattcttttttatggctgcatagtattctgtggtgtatatgtgccacattttc

SEQ ID NO: 777057 - DNA, 552 bp, Homo sapiens
gctggccgggcggggggctgacccctacctccctcccggatggggtggctgccgggcggagacgctcctcacttcccagaccgggcggctgccaggcggaggggctcctcacctctcagacggggcggctgccgggcggaggggctcctcacttctcagacggggcggccgggcagagacgctcctcacctcccagacggggcggcggggcagaggcgctccccacatctcagacgatggggggccgggcagagacgctcctcacttcctagatgggatggcggccgggcagagacgctcccaggagaaggggtttaaagaaatcaaaaaagcttgactcaggccccagctttaggactgccrgataaactaactaagcctatcttcttgtatgtccacaagtgaaagggaggccataagggttctaactcaagccataagtttatggcatcacccagtgacatacttatccaggcaattagactttgtggcacttggatggcctctttgttttaaagctattaaagcactagctgccactgccctactggt

SEQ ID NO: 777058 - DNA, 600 bp, Homo sapiens
agattaaaatacatagttttaactttaagatgttttatgtaatctgttcttcaatatggttacattgtatttcaagattacattatacttatggaaagtatgcaaaacaaaataaaaaataaagcatgtcacaataaaattaaaacaaaaattaaggcagtaaaacaagaaatgagaaaagacatatctacaagaaacacataaaagtgtaacaatgaagtggtttctgcagatcagcagacttagtctttycccctgctggctctgaaaaatctgggcagtccagatgtatggaatttctcccagtgaagcacacccccttcaccaagaagcagccagagtgccttgttaagtggttcctgaatcctgtgcatcctgactgagtgaggaccacccccccaacaggcattgtaagacaacttataaagaagtattcccactgtcatcagctcagtgcccatctgggaaaaagcttacagatgaaggagcaggcagttctctctgctgttctacacactccactggtgacacctccaggtgtgggagaaacccaggcaaataggatctgaagtggatcccaagcaaatcacagcggcccta

SEQ ID NO: 777059 - DNA, 600 bp, Homo sapiens
agattaaaatacatagttttaactttaagatgttttatgtaatctgttcttcaatatggttacattgtatttcaagattacattatacttatggaaagtatgcaaaacaaaataaaaaataaagcatgtcacaataaaattaaaacaaaaattaaggcagtaaaacaagaaatgagaaaagacatatctacaagaaacacataaaagtgtaacaatgaagtggtttctgcagatcagcagacttagtctttccccctgctggctctgaaaaatctgggcagtccagatgtatggaatttctcccagtgaagcacacccccttcaccaagaagcagccagagtgccttgttaagtggttcctgaatcctgtgcatcctgactgagtgaggascacccccccaacaggcattgtaagacaacttataaagaagtattcccactgtcatcagctcagtgcccatctgggaaaaagcttacagatgaaggagcaggcagttctctctgctgttctacacactccactggtgacacctccaggtgtgggagaaacccaggcaaataggatctgaagtggatcccaagcaaatcacagcggcccta

SEQ ID NO: 777060 - DNA, 600 bp, Homo sapiens
agattaaaatacatagttttaactttaagatgttttatgtaatctgttcttcaatatggttacattgtatttcaagattacattatacttatggaaagtatgcaaaacaaaataaaaaataaagcatgtcacaataaaattaaaacaaaaattaaggcagtaaaacaagaaatgagaaaagacatatctacaagaaacacataaaagtgtaacaatgaagtggtttctgcagatcagcagacttagtctttccccctgctggctctgaaaaatctgggcagtccagatgtatggaatttctcccagtgaagcacacccccttcaccaagaagcagccagagtgccttgttaagtggttcctgaatcctgtgcatcctgactgagtgaggaccaccccmccaacaggcattgtaagacaacttataaagaagtattcccactgtcatcagctcagtgcccatctgggaaaaagcttacagatgaaggagcaggcagttctctctgctgttctacacactccactggtgacacctccaggtgtgggagaaacccaggcaaataggatctgaagtggatcccaagcaaatcacagcggcccta

SEQ ID NO: 777061 - DNA, 600 bp, Homo sapiens
agattaaaatacatagttttaactttaagatgttttatgtaatctgttcttcaatatggttacattgtatttcaagattacattatacttatggaaagtatgcaaaacaaaataaaaaataaagcatgtcacaataaaattaaaacaaaaattaaggcagtaaaacaagaaatgagaaaagacatatctacaagaaacacataaaagtgtaacaatgaagtggtttctgcagatcagcagacttagtctttccccctgctggctctgaaaaatctgggcagtccagatgtatggaatttctcccagtgaagcacacccccttcaccaagaagcagccagagtgccttgttaagtggttcctgaatcctgtgcatcctgactgagtgaggaccacccccccaacaggcattgtaagacaacytataaagaagtattcccactgtcatcagctcagtgcccatctgggaaaaagcttacagatgaaggagcaggcagttctctctgctgttctacacactccactggtgacacctccaggtgtgggagaaacccaggcaaataggatctgaagtggatcccaagcaaatcacagcggcccta

SEQ ID NO: 777062 - DNA, 632 bp, Homo sapiens
acaaaattcaggcttaattaaacataaatttccatttaatccctgattatgttaccagaaagttttctcctggacactccaaatgaagcgactacctaactgtacccaatcatttatttaatttgcattccatcctcatasacattatagaatccttttcttcaagaccctctggtagcccctgaaggggtggcctgcccctccacacctgtgggtatttctagtcaggtgggactgagaaaagaaataagatacaaagtatagagaaacaacagtggacccaggggaccggcgctcagcataccaaggacctgcaccagcactggtctctgagttccctcagtttttattgattattattttcattatttcagcaaaaatgaatgtagtaggagagcagggtgatgataaggagaaggtcagcaaaaaacatgtgagcaaaagaatctatgtcataattaagttcaaggggaggtactatgcctgcatgtgcacgtaggccagatttatgtttctctccacccaaacatctcagcggagtaaagaataacaaagcagcattgctgtaaacatgtcttgcttcccaccatagggcggtttttctcctatcccagaatagaacaaatgtacaa

SEQ ID NO: 777063 - DNA, 616 bp, Homo sapiens
tgggaatgcagccagcctctagaagcttgaaatggcaaggaaccggcttctccctagagccttcagaaggagcacagctctgctgacaccttgattttcattcagggacatccattttggaattctgatccccaggactataagctaatgtgttgtttttaagctaccaagtaatrggttgcagtggcaacagaaaactaatgcagggggccactgtttggtatatatttaaacatttttagaggatgagaatattctctaaatttctctttaaatgtcaaagtattgctgcagctaggagaaccgcacatggaaacttgaggaaatttctcttattgctaggactataggacaatgggattcaagatgaatttccacaatgggataaccacgaaccgacctagagaatcaggaagtctcttatcaaagcagatatgtgtcaatgctgctcaaacacacacattcttttctggttggacagattgtaaattattcccaccacctgggggacaggcacacgtttatctagcggtcagtagaagtcacaacccaggcatccaaaccagttagtatgagttattactaagtcaggtgaaaagagctaggtggttataca

SEQ ID NO: 777064 - DNA, 613 bp, Homo sapiens
tctgtagcatatcacagccttcaggaaataaatgtaactcagactagtccaccagaagcagctttgctctgctttgtagcctctggggattggggtgtccctcggttgctttggctacagcaagacttgcccttgcagccccgcctgcagtgaggtcaccycaggctgtgttgagacaacatcagtggaatgtcatggcaatggacggggctgtcacccccccagggagcagaggctagaagagagtccaaggggatgagggtggggactgaggcagagaaacaagcagctaggaccaagggcacagaaaaggaaagaaggggctgtgggggcctcccttaggcctcccggggctcttcataaatggacagttgcccactggccaggaactagtgcagtgcataaagggacatcggggccatggggcctcacaacactgtgacaaagaatggggcaaatctggctgctgataaaaaaatcatcttcaagattcagtttacaaagtgaaaaaagaaacattcaaaagagaatgagtatgatgctgacatttgctttgaaaaagggatttatataataatacatttttacttgtatgtgcataagttctttctgg

SEQ ID NO: 777065 - DNA, 585 bp, Homo sapiens
agccgtctggacaccctggcccaggaggtgccctgctgaaggagcagcaggccctgcagacgggtgagtgcagcagtagcctctctgggcaggagcgtctgagagaaggcccaggccagcagccagcaatgctcttctcgcctccgttcagcatcagggtcctggctccattagtccargcctatgggtgaaggcaccaggttcagggagccccacctctttctcttggggagatcccctgacacgtgtctgcaaaactcacctggatgtgtacggccaaatctctggccacagctgggtggtgtggaagtggggatgtcccaagaggacaaaaaattctccaacaagaatccactactgcccaccagaagtgaccctggagcgctcgatggggcagaggtagtggcccaccctagcaaagctcccaggagcccctcactcagctggcctctgcagccccagagagctccacactcctgtgtgtcagcagctttgctgaccctgtctctcttaatcgtaactctgctgaggtgggatttgtcagctccattttaaagatgagctgtcagctccatgaaatgtcag

SEQ ID NO: 777066 - DNA, 605 bp, Homo sapiens
ccagagaagcattccctggatgcctaggacagagctggagcctgtcttctctcctgtttgcacaggtattctaatcacagaattactggagcatcaagaagtgcctgcatgcttggaagggcttccaggcagatgaacacacctcagcaccgggtggcattttcccagggtgcaacccggaccggctctgggtcacactgacaaggtgaagtggatgggcaaagagtgggtggggtactgaacacgggtttctttagggaatcaaatagggagggacctttaaagcaggaagtgggaccttccaacgtgctttggttcacttgagagaagaggctgagtgatgctccttctctaactcaagagacgtaggcatgaagaacagggcacaagatccygaggagcaaagggtcatcagctgcccccatccagcagaatctcacagcaccactggctgaccacaggcaaggagggaaataccctttattttttaatttttatttttcggagactgagtctcattatgttgcttagactggtctcaaactcctgggctcaggcgatcctcccacctcagccccttgaatagctaggattacaggtatatg

SEQ ID NO: 777067 - DNA, 636 bp, Homo sapiens
aatataattttgtagcaaatgtacaatacccgtgcaagatgtcaataatagatgaaactgcaactgcatgtggtgaggggaggtatgtgggagctctctgcacattctgttcaaattttctgtaaacctaaaactgctctagaaataaagtcaattaattttttttaaaaaaggttattgtgtgaactatctaaaatactttattcatttgtttattcattccaaggacaacttaatgtcaagcactgggctagggattcatgggacatcatgtgcagaaaattcacgaggaactgtggccggaagtgctggttgcccacctagtatgcattctccctttccacttagggggcattaaacaattgcatttacaaaatacarttttctgtcttcattaggagtaggtgtggccatgtgactaagttctggctaattagttataagcaaaagtttttgcatgggacttttggtaatgtttctaaaaaggtgacaggctgggcgcggtggcttattcctgtaatcccagcactttgaaagtccaaggcgggcggatcacttgaggtcaggagttcaagaccaccaacatggtgaaaccccatctctactaaaaattcaaaaattagctggatgtggtgg

SEQ ID NO: 777068 - DNA, 599 bp, Homo sapiens
ctgtttgtcctgctgggctccgggctgagattcagggtccaggcagaggctgtgagaggcagcatagcgccatccctctgccaaaaaacttgcagccctctggcttactgtcactgggcaggtattttcttgttgggcaaaagggataaatgtcaacttagactggacaactaagaagacaagctgtgcrtggggaggatgtgcctggccatgccaccatggagctctgccaccactggctccatgagcactgatagacagccccagctgtttcctaccacctaccaggaggaaactccataaaatttacacgctgataaaatggcaggatgatattttaaaatcctccctgttttggcatcagctccagacactgtgagcaatttcagtgtccaagccagactgatgggccttttgatggcttcagagggtggcttcagtgagaaggggacatgtaggactgtaaacattggctgtaaaagccttcaattgctttgaaatggtaaatttccaggcaatgtagatctgatgttatatgcctcctgcattaacagctttttcttcccgttcaattattttgactggtaagggagtagaaa

SEQ ID NO: 777069 - DNA, 589 bp, Homo sapiens
tagttaaaaacatagggaacatgagagttaatcatactattcaatttacttttgtgtagtttgaaaatttttataataagaagttttaaggaagtgtatggtgcccaggttgtcgtacattttgaattaggatcctaagagttatctatttctttgtgattgactttgaagtttttctctctggtttgccttccagattccactgatctctgacttttctcttcaggtaatttatgctgccagggatgcccagatttcagkggctctctttcttcatcttcttggataccctttctctaggaattcacctggagaaaaaaacgatgaccacagtagctggagaaaagtcttggaaaaatgccagggtgtggtcgacatcccatttcgaagcaaaggaatgagcagattgggagaagaggttaatggggaagcaacagaatctcagcagaagccaagaaataagaagtctaagatggatgggatggtgccaggcaaccaccaagggagagaccccagaaaacataaaagaaagcctctgggggtgggctattctgccaggtaactgaatcactccctgtctagtaaagag

SEQ ID NO: 777070 - DNA, 599 bp, Homo sapiens
gttaaacatggagcatttttttgttgtttttcatatgacaaaaactccactctgaggtatatactcgagagaaatggaaacatatgtgtacataaaaacttgtacacttgttcatagcaggaaacaactcaaatgtttatcaactgatagawggataaacaataaacaatatctatgcaataaaatattatttgcataataaattatgcaaagaggtaaaactacatttatttatagatggagaagctttgagaacactatgctaagtgaaagaagccagatacaaaagaccatatgctgtatgattctatttatatgaaatgtccagaataggcaaagccatagaaacagaaagtaggtaagtggtttccaggggcttggtaaggtggcaatggggaatgactgttagtgggcatgaggtttcttctgaggctgatgaaaatatcctaaaataagaaagtggtgatggtggcacaactctgtgaacatactaaaaactactgaactgtacaccttaaatggatgaattttacaacgtatgaattatttcttaataaagctgttactgtaagtaaatgagaggaaaagtattttggtgc

SEQ ID NO: 777071 - DNA, 573 bp, Homo sapiens
aaaaccacaatgagatatcacctcacacttgttaacaaaagattaacaagtattagtaaggatgtgaagaaaagggaaccctggtacactgtcagtgagaatgtaaactggtacagccattataaaaaatagggccgggcgcggtggctcacgcctgtaatcccagcactttgggaggccgaggcaggcggatcatgaggtcaggagattgagaccatcctggctaacatggtgaaccccatctctaytaaaaaatacacaaaactagccgggcatggtggtgggtgcctgtagtcccagctactcaggaggctgaggcaggagaatggtgtgaacctgggaggtggagcttgcaatgagctgagatcgcgccaccgcgctccagcctgggcgacagagcgagactccgtctcaaaaaaaaaataaataaatagtatagtggtttctcaaaaaataaaaaagagaactaccatacgatctagcaatcccacttctgggtatttatccataaggaattgaaatcaggatcctgcaaatacctgcactcccatgttcattgcagcattattgata

SEQ ID NO: 777072 - DNA, 556 bp, Homo sapiens
aaaagacaagttacaaacagatagcctatatctgcattacatacagccaacaaagaattagcagcaagagtgaagtactcttagaaatcaataagcaagaggcaaaagaaagaacaggcatttcacaagagaggaaacaaatatgcccaataaacacaggaagagatgctgatcctaattggtaatttaaaaaatgtaaaacaagaccataatgagatattttatacccatttgatgagcaaaaattaagaagtctaataattccaagtattagtgaggcagtgaatctayaggatctcataaattgcatgtagaagcatcagtacaatcaatttcaaaagcaatacagtattaacttgtaaaaatgaacattggttcatattacccagcaattctactctcaagcatatccacccaagagatattcttgttcatctgaacctggaaatatggattaaaatgttcataaaagcgctgtttggaattgaataaaactggaagaaacaaaaatgcctattaataaattatggtcacaatatagcaataagcaacaagg

SEQ ID NO: 777073 - DNA, 510 bp, Homo sapiens
aagaaatgataactgtttgaggtgatgaatatgccaattatcttcatttgatcactgcacactatatacacgtataaaaataccatactataccccataaatatgtacaattattatcaataaaaaattaaaaataataaagatagatgcacaaacacaaaataaatgcaatgaaaaccacaatgagaaactacttcacaaaaactaggatggcaatgataaaaaatatataatgacaaatgttagcaaggatattgagaacttggaacccacgcatgttgytggtgagaatgtaaaaagattttagctgctgtggaaaacagtgaggctattcctcaaaaagttatacatactgtcaccatgtgatctagcaattccacttgtagatatgtaccaacgacaaatgaaaacatgcccatgtaaaagcttatacatgaatattcatagtactactcacaataaccaaaaagtagaaaaaatctaaatggccattgattgataaatggtgta

SEQ ID NO: 777074 - DNA, 480 bp, Homo sapiens
ctgctgcagctgtcattacaccagcttgtacgtgaagcccagagtctcccagaccagcacattactgtagcttgccaaaggcccatggctgctattgtgtgactgccaccaatgtttattcaaggccagaggccattttaaccagcacctagtggtgagtcctgctagacttggtccatcctaccagggaagtagatttctttctggctcacaatgggtctagaagcaatgacctagtaataatgacctggaactaggggctttgggattctccmtggtgctttattttaacgtggttgggctgatattcagttggaggacaaagtcctctgtattcttcactctttcatccaaattgaaggagtctctgtctacagtgcactgtctggcattgggggaggggtggcataggctctcccatggccactgcagctagtgtcatgctgggttgtaccctgagcccacagcctctgagagcag

SEQ ID NO: 777075 - DNA, 607 bp, Homo sapiens
  misc_feature 1, 2, 3, 4: n = A,T,C or G
nnnnctaactcttcccttgctactttagcttctgaggcaggatggtgatctggatcagggcatatcatctatttcctgctctagctagttgtacagtaatatactccccatactgctgtttactttgtaaattccccattttttcttcatccattagatctgtagcatatttccaaacttggatcaatgaatgagcactgctttttgcagacatagagcagggctctagatagagtctactcagtcctactstggagtagcccatagtcctatatattatgacaattactttgtgtttattatttgaattacatttttatctttattctgccttcccatactcttacatacatccttaacattagaaaatggatgttaccataaaattatcagtaaaaatgctggagttccatgtaattatgtaaacacaaatagttaacaatagttattctactataaatatagaaagggatttcatatgttctgaaccatatcaaacttaaagttgtaaagttttacaagaagccataattgaaggataagattacaaggtacaataatgattttacagtgacatatttgcctttgctcaccgtcattcattgtt

SEQ ID NO: 777076 - DNA, 607 bp, Homo sapiens
  misc_feature 1, 2, 3, 4: n = A,T,C or G
nnnnctaactcttcccttgctactttagcttctgaggcaggatggtgatctggatcagggcatatcatctatttcctgctctagctagttgtacagtaatatactccccatactgctgtttactttgtaaattccccattttttcttcatccattagatctgtagcatatttccaaacttggatcaatgaatgagcactgctttttgcagacatagagcagggctctagatagagtctactcagtcctactctggagtagcccatagtcctatatattatgacaattactttgtgtttattatttgaattacatttttatctttattctgccttcccatactcttacatacatccttaacattagaaaatggatgttaccataaaattatcagtaaaaatsctggagttccatgtaattatgtaaacacaaatagttaacaatagttattctactataaatatagaaagggatttcatatgttctgaaccatatcaaacttaaagttgtaaagttttacaagaagccataattgaaggataagattacaaggtacaataatgattttacagtgacatatttgcctttgctcaccgtcattcattgtt

SEQ ID NO: 777077 - DNA, 602 bp, Homo sapiens
aaaaacaggcaaaattcaactatattttagtagtgtacaattaggtagtaaagctatgtaataaataccgcagaaattggatttcataaaattcagcatagaggtaactccagggaggagggaagggttttttttttaataagggacttgcagagggcttttggagttctgttaatattcaagttcttgacttgggcaaaagttaaacaagtgtttattctatagttcactaagttatacttttatgctttatgcactttcctatacgtttgtaatattccagataaaagaagcctaacaagtgactattagtaatgtggtctatgacaaagaagaaggaaggagaaaagaagtctgcttagctcctttttgccatgcaaagtgctcagcactttgcctgcagtgtttgacagagccacttctggctcttaacttctcartatggttgctgattgcttctcttttagtggcctccaaccttctgcctatgcccactgggtgtcatactcactaaagggatgtacgctaagttctccagttaaaaagggcacctcaccctgtcctcctggctacattcaggcactaccctccttatggtcata

SEQ ID NO: 777078 - DNA, 553 bp, Homo sapiens
gcctgtctgttcagtttcttcttggtgtctctgtgtcttcagagataaggactttcctttccttcaggtacagggtgggcacctgtcacaagagggtcttcaggggagaagggagggagaaagtcagaaagtgacctttctaggttttwtggcctgtttcaggaaaaaagggtgagaggacattgagagtggcctttctggcttctactgttttctcaatatccagggtgccatattttgggatagaattttgtgcacctcatcattaattttattggctcagcttggttcacatactcattttaatgctgaagagcacaaaatctattgccagaagagatggaataggtcctgggcaaggaaatacaatgattgctacaggaatattaaagtaatcggtgtagtagagttctctacattttgcaatacagcttgattgctgaatgggtggtcatcaattccacagaaagccccaaattctacattttgaaatatttattcaaatatcatataatcagaaacttggacttcagttaacgaaatggcagaaact

SEQ ID NO: 777079 - DNA, 553 bp, Homo sapiens
gcctgtctgttcagtttcttcttggtgtctctgtgtcttcagagataaggactttcctttccttcaggtacagggtgggcacctgtcacaagagggtcttcaggggagaagggagggagaaagtcagaaagtgacctttctaggttttatggcctgtttcaggaaaaaagggtgagaggacattgaragtggcctttctggcttctactgttttctcaatatccagggtgccatattttgggatagaattttgtgcacctcatcattaattttattggctcagcttggttcacatactcattttaatgctgaagagcacaaaatctattgccagaagagatggaataggtcctgggcaaggaaatacaatgattgctacaggaatattaaagtaatcggtgtagtagagttctctacattttgcaatacagcttgattgctgaatgggtggtcatcaattccacagaaagccccaaattctacattttgaaatatttattcaaatatcatataatcagaaacttggacttcagttaacgaaatggcagaaact

SEQ ID NO: 777080 - DNA, 567 bp, Homo sapiens
acccctgttatttcagccatctgagccacagcacagttctaaacccttgcgggagaggtgttgcagtcatttggaggaaaaggtgcactctggctttttgagttttcagtgtttttgcactgattctttctcatctttgtgggcttatctaccttctatctttgaggttgttaaactctgggtagggttttggtggagttttttcttactgttgttgtttgcttgcttttcttttaacagtctagccactcatctgtggggctactgtggtttgctgggggtccactccagacccttgttgcctcggtttctttagyaattggaggtatcaccagcaaaggctgcaaaacaacaaagatggcagcctgccccttcctctgggagctccaagttagtcccaggggggtcctaacgtgttgctagcccacatgcacctaaaggtggtggataaagaccccagttgggaggtctcagcagtcaggaagaatgagatcagcgttcctcttaaagaagtagcctggctgcatgtcggtagagcagctagctgtgctatgttgggggatcctt

SEQ ID NO: 777081 - DNA, 556 bp, Homo sapiens
aaacaaaattatcttctctttttaaattttctttctcatgtcaaattttatttttgttatgattaattcatttttccaggagcttttccattttttgtttgttttcaaaatgaccacatttattttgggagaagggcttaaagaattcttttgtggmtacttgaggactttctttaatgaagaaggagtgggcgtcgaggggaagatgaaaatccaagaatagcatgacccaaactcaaggcgatgaagactgttctgagtcaggaggggaagctggcagtcttgtttctctgcaggaacaggggcagtagatgaagcatagcatacctcattatgaaacgtggtcaggagctggcatttgtaatgatgataaatggtgtgctactttaaaactttgagcaagatatggaaggacccaaattacgcagtttttaagtgattttaggagaaattcatgaaaaggcttaaagattgaggcaggaaggctttccaggaggctattaaagttctggacaaagggatgagtaagaacaaacagattaaagatttcatggtt

SEQ ID NO: 777082 - DNA, 498 bp, Homo sapiens
ttgcggtgagccgagattgtgccactggactccagcctgggcaacagaactagactctgtctccccgcaaaaaaaaaaaattaagaaattatgttcatcaaaagacattaatagaagtcttaaagtttgtgtgtgtatatatatgtgggtatagacatatgtatactataaaagtttttaaatacatatatacattttcaaatccaaaatataaaaacacctaccaattaatagaagtataggcgaaagactcagaaagacaatttacagaaaaggatatygaaatcatcaaacaatatatgaaaatgtactgtatacatcaggaaaatacaaattaagactattataagatacctgcatatactcgagattatagataaaatgagaaagacataagataccaagtgttggtaaggttttgaatcaacagcacttccataagctctagtttgagaataacttggtaaactacttagcaaaactctttgacattattaa

SEQ ID NO: 777083 - DNA, 534 bp, Homo sapiens
  misc_feature 90: n = A,T,C or G
aagtgcgaatccctttccaagtccttctcgctacctccactgcagccaaactttgagaacacaagtcttggtaccatctttccaggttanaaagagcacctgcagctgacccatcaccaactaaccaaccagctgttccctgcaaatactccagcactcttctcagaccaattcgactccgcctaacgcccatgcctgaagaccccactcttccctcatgaaccatagcagataagttatcaccccttaccattaagtatccaaacccttattaatggaaatcatccattacgctgcccttgcakgaatcaccctacttactctactctttgccataggaatatatactgtcttgcctcctgggtggaatttcagacaaaaaaaactcaatattcgtaacctcttgcctcataatcctcctcatagcaggtataatagccaccaccaacagatagtggcccctcctaaatgtcctgtctttgcccatcctggcatttcacactcttccttcactgcatcacagaaaacctttca

SEQ ID NO: 777084 - DNA, 623 bp, Homo sapiens
taaatttatggggaagagatttattacagcaatggggagcacaggttctaattccagaacaattatatagccctcaaagtcaacatatgatgcatgaaatggggcatgtccctggtatgggactaggaaaaaatttgcaaggtttgaaagaaccgcttaaagcagaaagacaaagttcttgccaaggtttaggatatcattttttatggtggccattgttaagcctccagaacctatacctttaaaatggttaacagataaaccaatttggatagaacaatggctgctaggcaaagagaaactggaggctttagaggacttacttattaaacaattagaaaaaggacatatagcgccaacattttccccttggaattmtccagtttttgtaattaagaaaaaatcaggtaaatggagaatgttgacatatcttagagccattaattcagttatacaacctatgggagcattgtagccaggactgccttctcctgctttgattccaaaaaattggcctttaatcatcatagatttaaaagactgtttctttactatccctttagctgagcaagactgtgaatggtttgcacttacaattcctgcagtaaacaaccttcagcctg

SEQ ID NO: 777085 - DNA, 598 bp, Homo sapiens
cagagagaaataaatactgagctgtaatgcatttcactcatcccaattcattctttctgtcaactgtgcaccctctcccttctttattaagatttgtataaatttaaacaaagtcaaactaagctggaataaaggcaatgtggcatgtgtatagtcaagcaagaagtttgttttgtgagaagaataagccctcacatgcattcaatcactgtgttccagcatgaggagcctgaaaacccttcagatgattggctatttaggatagtgaaaactgatcaaagarggaaaataaataagaaatttggagaggcttggaacttttatgatgtcaaagaaacgttggctgagagagttttgaagaagtaaaattaaagcaatttctgaaatgtttgtaattcagatccaatcttctcaagttgcaatgtgcatctggggatcttgtgaaaatgcagattctgatttagtaggttcatgggaggtctgtacattcttcttctccaataagctttcagtttgctgacgctgctggtccacaaatcatgcttttagcaataaggttttagtcatattggccatttctcggttactaaaatactga

SEQ ID NO: 777086 - DNA, 631 bp, Homo sapiens
catcgaatttcccaggttttgctgttttttgttattacttttatttttttacttttgttttttgattgctgtaggctgtctctgtgccaacaatcagccagtggtataaatttacggtcagtttagatcttttttgagtctgcacaattgtcttctcatttctctgcatatacagttgttttgaaatgttcaagtgtttaatgtctatttcccaaaaggggaaaaatagcaaaatgaaggagracgaaggaactttagccctgtaaattccttgaaagtcacttcagtcagagagggaggggtttgcaacaatgaggggagatgcaacaatattagccacctgactctttgtctgtatgcctgtaatcagaagcagtattcagggatttgtccgcagattactgacatttggagtacaaggtcctatttgcctatcctggctcctgcaagatgtgtgcaagtcacgtcaggaacacacgcacatctgcctgccacaggattggggatgaagaataggttactgctattgtctaaagagctgaaattggctaaaattaactataatttattgtccaaccctttctctggaattttcaaaccttgaataaatcccagcattccaaattggtta

SEQ ID NO: 777087 - DNA, 534 bp, Homo sapiens
gacattatgttagtagcttaaaatcagccatggtaggagtattgacactacaaaaatttgcaaactccaaatcaggacttttttccctatagagatctagttgttaaatatttaccagcacacaactggaaacaatgcaaatatccaccaaagggttctggttgattaaaccatgatatacccactcaattgagaaatatgtaactataaagggaaacagagctatttttatatactttatataaaactgatctctaggaaagtgaaaaaagtaagctgaagaaaagtgtgtatgttaccatttattggtagaaaggagagatataaaggaagaatatgaaagragggaggatacaaagacatatgttttcatatttttttaatgtaaggctaaagcaaaaaggtttttaaatggctacctacagggagaggaaagaaactataaggaagacaggaataaatgatgaactttttgcaatagatcttgtttggtacatttctttaagtcccataaccattttacttaattaaaat

SEQ ID NO: 777088 - DNA, 587 bp, Homo sapiens
actgcttgggcccaggagttcaagaccagcctaggcaacatggcaaaacccccgtctctgctaaaaatacaaaaagtagccaggtgtggtggcacacacctgtagtcccagctactcaggaggctgaggtgggaggattgcttgagcccaagaggttgaggctggagtgagccaagataatcccactgcactccagcctcagtgacagagggagaccctgtctcaaaaaaaaagaatagatgaataaaaaataaaaataaaatgtgctgatagaagtgcacagtactgtcraataaaataagcttcttgagacctctgcaattctagtcccaccatgtgcagtaagcgtgttcatatgctcagcatatcactgctacaaccaggatttgagaaagccaccgcacaaaggctatttataaccaagaaactcataagacttgggcccctgaaagcacacagaatcaaagccaaacaaccacacaatatacattacagtcataccctcaagtgggggaaatgctttttaaaagtcccattcaagcaaaagtaaattaaaaaataagaagtgacagcttctccagataaga

SEQ ID NO: 777089 - DNA, 548 bp, Homo sapiens
ggctgtactaatttacattctcaccaacagtgtataagcattttcctttctccaccttctcaccaacatatattgtttttgacttttagtaatagccattctgaatggtataagatagtatctcattgtggtttaaatttgcatttctatgatgattagtaatggtgagcattatttcatatgtttgttggctgcttgtatgtcttcttttgagaactgtctgtccacaccctttgctcactttttaatagggttatttgtttttttcttattgacctgtttgagttccttgtagattctggatattagccttttgttagatgcatagtttatgartattttttcccattttgtaggttgtctgtttactctgttgattgtttcttttgctgtgcagaagctttttagttcaattaagtcccatttgtctatttttgttgcatttgcttttgagaacatagtcataaattatttgcctaggtcaatgtccagaagagtttttcccaggttttttttttctaggattttcatagtttccagtcttatgt

SEQ ID NO: 777090 - DNA, 620 bp, Homo sapiens
atgctttgaagaccaaggcttatgggaagaatattttcataggaagcctgtttgggattcagaataagtggtgaatattagaaagcaagtgtttggaaccttccaagggaattttcattcagagtctttttgctataggatggtttaaattatttagctcaatgttggtgaattagttgcaggagacatttccacctagattagaggccgctttctttggtataaaatatattatactaacctgggaatcaagaggcttgagatttcttcatggctctgcctcactgactctgtgagtaacactaggcaaaggtattaccctagatgtctttctttgtaatacgagctcatctaaattgccaggctatagttcttaataccatgaataaaataattgttttttggtatggattattctrttttatttagttaacaaatcaagtcagattattgtcatttttgaaaggagagctgtgacataatagagatttatgggctttaccctatcttcaaaggctattcagtcaatctgttccttgaccttagaaaaaatatttcagaacataatagtcgcttaagacatctactttcttgtgtaatccaaaactatacagaactgg

SEQ ID NO: 777091 - DNA, 594 bp, Homo sapiens
ttaaatggctatatattgttatttgcactacaaattccaggactatgaaaataatgggtgaggcagctagtaaggaacaaaatgactttttaaaaattgtccctggggatgggtgggggtatcagctagactccagggtaagattgtcttccctctctgtccccttctcatctccctttcctgctgagagctactttcatcagcaataaaatcccctgcatttaccatctccaatttgtttatgtgacctcattcctcctgaatgccagacaagaactcaggagcrggtgcaaaaagctgttgcactgatcctccactgagctgttaacacttaagtcatccatagatggcaaagctaaaacagcgctgcctgtaacactctttctggggcttcagggatcaagggcacctccctagatgctgctgtggtggtgcagggagttttgctcttgttggcacccaaaaccagcagccctggctcctgcacctgctcatctgtgctcctcctcctgcaaagggtggaatatagtgggaccgagcaagtggtatccatctctgctgcagtgaagcagctggctagttctagcacccatg

SEQ ID NO: 777092 - DNA, 478 bp, Homo sapiens
cagtcctaatctctgaaagaaggaataacagagactggaaaacaggagaggtggtttgggggaataccacttccaaattagttgacgcaactcaaatgttaacctgtcaaggccctgatggaacacaacatggtgtgttagaagctaaagtcattctttgggcatgcctaaaaaaagagctataacaccctaagagagaaagtatcttttctcttctcagtgagaactgcactggtgcttgcagaatttttatgatgagagactgtargaaaatttgattctaatagtcatggtgtgtttgctgagttttgagctttagctatattcctctactagcttaggtctaggctgaccccagtcactgtatgacttaggttagtttccctggaaacagtttcagagactgggacttgcaatcaggagatttactgagggcttttcttaggtgatacatttgcaagattgggcagagggagaa

SEQ ID NO: 777093 - DNA, 594 bp, Homo sapiens
aagaataaaaggaatatatatcttgctttgaaaatttctcctagtccaatattttttgacaccttgtgaattgtaacaggaggattgattataagcagctgtaaattctcagtctacttagtgtgcataagtgtgccttatcctgcaaggtaatttttacaatgtggacactcacgataccacctatgacacagtcttgccaaaaataaattgaccctgaatcaattaagtctctaattccaactgcaatgtacagaaactacagaggacagaggaacatgtaacaatagcaccacgaggatgcattagcaaattccagactgtctttgatgattagaataatgattcctcaaagatgtccacgtcctaatccctgtaatctgtgactatattaggttatgtggcaagggagaattaargttgtaggtgcaattaagattgctaatcagctgaccctgagaagggtgagatttctcttggattacctggatgagttcggcatagtcacaaggatgcttgtagatgaaagagggaggtagtagagtcaatatcagagtgatgtcatgtgagaaagactcaactgcattgctggct

SEQ ID NO: 777094 - DNA, 614 bp, Homo sapiens
acctgaatcgatacccactttacaggtggaactatgactctcctcttacagtgaggtaggggcaggatgtggattctaaagtcattagaatatgatggaattagatggaaattgaaggtatgggaataggtaaggtaacacttaaaagatatggattgtgagccacccttaaccctaaacaaaagaataccaacattttactcrtgtaatctgggtagtaaaaccagaagggtagaaagccaaccagaaaagaattgcctaatggttgcctggggaaatggtgctttaaaaagccttctgtaaataaatactgcaaacaaattagtagatgacaactgaaaacgaagcctgagctaagtctggcagtggaattggaaagagattattgaaaatagtgcaagaaatgttgagtattggaaatgaaatcaatcattattaagtcattgtatcattgtcatcatttgggggactataaattaatgcagtcgtgtgcagtgaaatatttttccttctaaaaataccaaattaactttgtaatttttttttttaatgtaaaccaggtgccagatgcaattaaaaagtgtcagagggctggaattactgtgcggatggtc

SEQ ID NO: 777095 - DNA, 615 bp, Homo sapiens
taggacccaccctacaactccctttgcttttagacctataactagactcaaggcccagcaggaccctaaaggtgaggctgaaagtgttacccataatgaggtatactacactctaaaagaatgacttgagttttgttaatttatacagacagaaatctgggaacttgtgtgagaatggatattgagagtgtaggataacggtggaaaaagcataaagctgaatcaggctgaatttattaatatggtckcactaaaagaaattctgtatttaacattgtagcttagggagttagggatggctctaaaggtttggttagtaggttggctgaaacacagaccaaaaggcagcccacagagagtgaactggaaagccaaatctgccttggtttaatgcagcggaggagattcaaaggcttagggaaggctgggtgtggtggctcatgcctgtaatcccagcactttgggagaagaccaacctggtcgacacagcaagaccctatctcaaaaaaaaaaaaaagcttagggagactggaatgtgagagatgtgagagtaggtgtttcatataacagctacttttccacactgaatggatccagaagacatacctttcacca

SEQ ID NO: 777096 - DNA, 581 bp, Homo sapiens
ttaacattgctaacaagactatctctgctccattgagttgcccttgcctcttcatcaaagatcgattgacaaaaattatgtggctctatttttggtctctctattctatttcattgttatatttgtctgttcttttgccaataccacactgtcttgatttgtagatttgtagtaagtcttgaggtcagatagtgtcagtcctccaactttgttcttttctttcagtatcatgcgggctattttgcgttttttgcctctccatataaactttaaaataagtttgycaatatccacaaaataatctttgaggattttgattgggaatgcactgaatctatagatcaagttgggaagaactgacatcttgacaatattgagtcttcctatccaggaacatgaaataactctctgtttatttagttctttgatttccttcatctgagttttgtagtttttctcataaagaatttgtgcatattttgttagatttatactgaagtacttaatttaggggtagtgctaatgtaaatggtatcgtgtttttaattccaaatttcacttattcattgctggtgttcaaa

SEQ ID NO: 777097 - DNA, 645 bp, Homo sapiens
gctggtatttcgatttgtcatctaaatttgtcctagcacctggttatggtgttccaatttgtgatctaaatctattctggcactacaccattgaggatgactgactcaagattttgtgcctgactaggacttgaagggtagtggcagcaacttcaggctctcccagatatttgatatttgttttgtcatactgatacagggatattgggccaggagaataccagggatatggagacccacctttcacttccccatttgtcaagatgtggttgtctgaagtttcctcacctagctttgcccttccctctgtgtcactcatcccctgcaacttgagagagggagctggatgggggattgcccctgatccccaatcccgtgatttcatagggcatgttatcacaggatttttgtcatagttcctttagtgttttgttttattttttcaattttgatcaaaacctatgcagwgaaaaagaataatgtttactggacccaggcaaaggttgctaggaaaatgttgattttgagtgtttattgaagccaagtgggttaacctatcaaaacttggagacttgaggatttaaagctcataattactttaaaaaaatgtccactctgggttaattaattaaaagctatgggttg

SEQ ID NO: 777098 - DNA, 605 bp, Homo sapiens
gaatgcgttagctatttttcctgatggtctcccttccccacacaatcccccagcaggccccagtttgtgttgttccccttcctgtgtccatgtattctcattgctcagctcccacttataagtgaggacacgcagtgttttgttttctgttcccgtattagtttgaggataatggtttccagctccatccatgtccctgtaaaggacatgatattgttcctttttatggctacatagatggttgtagatgtgctatcttattcctgagttctctattctgtttcactggtctatgtgtctgtttttgtaccagcactatgctgttttggttactgtagcctcgtagtgtagtttgaagtgaggtaatgtgatgcmttcagaggccagcatcatcctgataccaaaacctggcaaagatgcaacaaaaaaagagcaaacttcaggccaatatccctgatgaacattgattttcaaaaaattatatttcactttaagttctgggatacatgtgctgaatgtgcaggtttgttacctgatctttgactaacctgacaaaaacaagcaaccgggaaaggatcccctatttaataaatggtgctggaaaa

SEQ ID NO: 777099 - DNA, 647 bp, Homo sapiens
caacccatagcttttaattaattaacccagagtggacatttttttaaagtaattatgagctttaaatcctcaagtctccaagttttgataggttaacccacttggcttcaataaacactcaaaatcaacattttcctagcaacctttgcctgggtccagtaaacattattctttttcwctgcataggttttgatcaaaattgaaaaaataaaacaaaacactaaaggaactatgacaaaaatcctgtgataacatgccctatgaaatcacgggattggggatcaggggcaatcccccatccagctccctctctcaagttgcaggggatgagtgacacagagggaagggcaaagctaggtgaggaaacttcagacaaccacatcttgacaaatggggaagtgaaaggtgggtctccatatccctggtattctcctggcccaatatccctgtatcagtatgacaaaacaaatatcaaatatctgggagagcctgaagttgctgccactacccttcaagtcctagtcaggcacaaaatcttgagtcagtcatcctcaatggtgtagtgccagaatagatttagatcacaaattggaacaccataaccaggtgctaggacaaatttagatgacaaatcgaaataccagcta

SEQ ID NO: 777100 - DNA, 582 bp, Homo sapiens
ttttgaacaccagcaatgaataagtgaaatttggaattaaaaacacgataccatttacattagcactacccctaaattaagtacttcagtataaatctaacaaaatatgcacaaattctttatgagaaaaactacaaaactcagatgaaggaaatcaaagaactaaataaacagagagttatttcatgttcctggataggaagactcaatattgtcaagatgtcagttcttcccaacttgatctatagattcagtgcattcccaatcaaaatcctcaaagattattttgtggatattgrcaaacttattttaaagtttatatggagaggcaaaaaacgcaaaatagcccgcatgatactgaaagaaaagaacaaagttggaggactgacactatctgacctcaagacttactacaaatctacaaatcaagacagtgtggtattggcaaaagaacagacaaatataacaatgaaatagaatagagagaccaaaaatagagccacataaatatagtcaatcgatctttgatgaagaggcaagggcaactcaatggagcagagatagtcttgttagcaatgttaa

SEQ ID NO: 777101 - DNA, 448 bp, Homo sapiens
actatgtaaactatatgtgtgcaaaaaaagattggagagtggtggattatcatgtctgcaaaggttatctctgaacaacagagaactttaaaaattatccctcagtgagtacattctttatattatacattttttttttgagacagagtctcactctgtcactcagtacggagtgcagtggtgcaattatggctcactgcagcctcaacctcccgggctcaagcgatcctcctgccttagcctcccaagtatctgggactacaggtgtgcrccaccatgcctggctaatttttttttatgttttatagagacggggtctcgccatgttgcccaggctgatcttgaactcctaggctcaagcaatcctcccacctcagcctctcaaagtgctgggattgtaggcgtaagccatggcacccggctacattcttttataatcataaccccc

SEQ ID NO: 777102 - DNA, 521 bp, Homo sapiens
gaaatttatttctctcagttctggaggctgggaaggccggggatgggtgtctgctgagggccgtcttcctggtttgcagatggttgtcttgttctgtcctcatgtggcctttcctcggtgtgtgcctgtggtgcatgcctgtggtgtgtgcccgmggaaaggagagctcttgtgtctcctcttcttgaggccccaccctcatgatctcatctaaacctaatctcctccttacagccccacctccaaacaccatcacattggggtcagtgtttcaacagtttaattctaggggcacacaaacctgtagtccatagcagtaaatcagcagaattctcacctgtgtttgtgtagtgtcaacaccctagagtatgtttattttggtgtttctgtaattgaatctggacagcatgcactgtatctgtggttgataataaaccattctctttgggtattgaggtaataaggtcagacaagcaatatcagaagaaaattagaatttattggtcaggcgtggtggctca

SEQ ID NO: 777103 - DNA, 521 bp, Homo sapiens
gaaatttatttctctcagttctggaggctgggaaggccggggatgggtgtctgctgagggccgtcttcctggtttgcagatggttgtcttgttctgtcctcatgtggcctttcctcggtgtgtgcctgtggtgcatgcctgtggtgtgtgcccgcggaaaggagagctcttgtgtctcctcttcttgaggccccaccctcatgatctcatctaaacctaatcycctccttacagccccacctccaaacaccatcacattggggtcagtgtttcaacagtttaattctaggggcacacaaacctgtagtccatagcagtaaatcagcagaattctcacctgtgtttgtgtagtgtcaacaccctagagtatgtttattttggtgtttctgtaattgaatctggacagcatgcactgtatctgtggttgataataaaccattctctttgggtattgaggtaataaggtcagacaagcaatatcagaagaaaattagaatttattggtcaggcgtggtggctca

SEQ ID NO: 777104 - DNA, 428 bp, Homo sapiens
aatcacttgaacctgggaggcggaggtggcagtgagctgagatcgtcccactgcactccagcctaggtgacagagcgagactctgtctcaaaagaaaattagaatttattgaagatgaaagcctaaaaataggccgagtgcggtrgctcacacctgtaatcccagcactttgggaggctgaggcgggcggatcacgaggtcaggagtaccagaccagcctggccaatatgctgaaaccccgtctctactaaaaaatacaaaaattagccagtcttggtggcacacacctgtagtcccagctacacgggaggctgaggcaggagaattgctggaacctgggaggtggaggttacagtgtgccgagatcatgccactgcactccagcctggacgacagagcgagactccatctcaaaaaaagaagccatt

SEQ ID NO: 777105 - DNA, 636 bp, Homo sapiens
ttctctaatgaggggagatatttttccattcctgattgagctccctgttgaggttggtctggtctgccttactgtgtaccacctacgagtgtatgcaaatattcattttctatctggaacccattgtttagtggtctgaggctccttcagctggtgtgatggacctgggtgaattgaatgttaagcctgggctgggcacagtggctcacgcctgtaatcccaacactttgggaagccaaggcggatggatcacctgagacctggagttcaagaccagcctggccaacatggcaaaaccctatctctaccaaaaaatacaaaagttagccaggtgtggtggcgcacacctgtagtcccagctacttgggaggctgaggcatgagaattgcttgaacctggcggggcagggcaggggttgcagtgagctgagatcatgccactgcactccagcctgggtgacagagcaagattctgtcycaaaaaaaaaaaaaaaaaaaagttaagcctgttgtcgtatttgcccatagaaaatctgatagggccggctactcagtgggcaggagaccgcgcttttgtgtacagcagttctcgcttctccatggtttcactttctgcagtttcagttacccatgatca

SEQ ID NO: 777106 - DNA, 516 bp, Homo sapiens
ctaagattgggactgctgggttgtgtggtgtaatgtttaattttacaagaaattgccaaactgttttccaatgtagtcgtacctttttacatttccacctgcagggtatgagaattccatttgcttcgcatcttttccagtacttgggattgtcagggttttctttttagcagttctaatcggtatgtaatggtatttcatttgattttagtttgcatttccttgatgcaagtcagtctttttttttctgagacagagtctcgctctgtcacccaggttggactgtagtggtataatctccgcccactgcaacctctgcctccwggaactcacaagtcattctttgtttttgcttttgtttgtttgtttgtttgtttgtttgtttttgagacagtttcactcttggatcccaggctggagagcagtggtgcgatcttggctcactgcaacctctgccttctgggttcaagcgattctcctgcctcagcctcccgagtagctgggattacaggtgcc

SEQ ID NO: 777107 - DNA, 620 bp, Homo sapiens
tctcatgttttgtgtgtgtgtttttttttgagatagagtctcactctgtcgcccaggctggagtgcagtggcgtgatctcagctcactgcaacctccgccttcccgggttcaagcaattctcctgccttagcctcccaagtagctgggattataggcgcccgccaccacgcctggctaatttttgtatttttagtagagacgaggtttcaccatgttggccaggctggtctcgaactcctgacctcaggtgatctgcctgcctcagcctcccaaagtgctgggattacaggcatgagccaccgcacctagctggtctcatgtttttaactagatctcgcagctgaccgtgtggaaracaggttcaaaacgaggcagctgtaacactgtaggtaagagatgataaaggcctgaactggggttgtgatggtgggatggagtttcgggaggtaaattcagtaggacatagtaactggctggctgctggaggagagaaaaggttcaaatatattcctgaggatctccctggcgcactcagattcttaacactaatatgagaatacagaatgtaaaccagaaagtaccttgagacgggtctcaatcaatttaggagttaattttg

SEQ ID NO: 777108 - DNA, 521 bp, Homo sapiens
attagttatgttgagcatttttcatgttttttggctgcttgtatttcttttgagaagtgtctgttcatatttttgctcactttttaatagggttgttttttccttgttcatttgtttaacttccctaaagagtccagatattaatcctttgttggatgcataatttgcaaatattttctcccattctgtaggttgtctctttactctgtagtttcttttgctttgcagaaatctttagtttaattaagtcctatttgtctgtttttkattttgttatatttgtttttggggtcttcttaaattatttgccttggccagtgttgagaatagtctttcctaggttttcttctaaaatttttatagtttaaggtcttgaattttttgtatatggtgagaggtatgggtccagtttcattcttctgcatgtggtcagccagttttcccagcaccattttttgaataaggtgtcctttccctattgtttatttttgtcaactttgtcaaaaatcccttggttgtag

SEQ ID NO: 777109 - DNA, 604 bp, Homo sapiens
ggagtttcacgttacatatatgcagtacaggctttgaccaaagacttgggagcccctgtgtgcagctctgtcctcttcagtaccctactccacaagttccaattgggtcagcagtcgtgcattctattctttgccttcccagagagacccttcttggactctactttcctcataaaagttgggaaataggccccaagtacaaagttggcaagagtatgrgaggctaaatttcatgtgttactcttctctcatgggtcattgtgatattgtgaaacatatatttggtctttgaccctgtttcctggcatacaaccaaaatctttagactgttttgtatgctaatgattgactaatgacaagcagcccctatgtagctttgaggagtgtaagcgcaagtgcaagggtggggctggtaatcagaaaaaaacaagtcatggttacagggttgatattttcaggcccactccacaacctccagagatggggaagggactgaaggttaagctgatcaccaatggccaatgatttaatcaatcatgcctacataatgaggcttccattgaaacccaaaggagtgggttcagagagcttctggatagctgac

SEQ ID NO: 777110 - DNA, 635 bp, Homo sapiens
cataataaaatagtctctatcttggaggacctaggattctcttaggatagattgataggtacacaaacaattggagatgatgtgcctaaattctgatatgcagagaacagataattctctgggaagatgaaagaagtaatagcagtttcttaagtgtctcytgttggcacttattcttcattttcctagtcagaaatcagcatgctacattttaatttaaatactgtaaagatatttgtttaatgcctagtttcttctcttttaaatgaattatatggttattgacaagtaatgaagtttaaatgaattatatggttattgacaagtaacaaagctatcatataatataaaattctgtttgggcaggttgcaaaaataataaagcctcttcaacaggcttgaactattttttttaaatgatagattcatacttcagacaagctgtatctacttaaaggaagaagtttctgtggaaaaaaattggccttcgtaaagttcctctttacacaaaataagaaaactaactcatagtaaatcacctgtcttattctttcctcatattattaaaataatatgcaagtatgttgcaatataatataaaatttcaacagtagtatacatgtgaaatgccatat

SEQ ID NO: 777111 - DNA, 621 bp, Homo sapiens
gtgaagtttgcttccgcgaattgatagggggagaacacagaatgtcacaatgataggatgggtgttaccatgagggtggaggtaaaggaatagacacaaaaagtgaaagctattagtgtccatggtaatatgaatcttactttcaaattgttcttgaaaatgagtttattttaaaaaatgaaaaggcacaatataatgtgagctaaataactgtcatgtgtgtatatgtatgtccattctgattattataactatttatcagggtactgaccaatgaaaattgatgctggccactgtgccatactgatatatactggctgaataacaatgatgtatttgaaataatccttgatactttcctgatcaatagagagattactcacataaaatgcattttcatctcttattggtcatgtatgaaaaggtcatcttgctccctagagctctttaccctgccagawgaataaaaaataaatgtcataaataatcaagaatgaaagcacttaggaatatatctgtgtattattagtcactcattcgttatgcatgaactataaatgcattttcaaaataatgcaaatgaaaataatacagtccaacaatggataatttgaataaaaa

SEQ ID NO: 777112 - DNA, 609 bp, Homo sapiens
cactgggaatttgcagtgtgcattttcatcaatttatcctcctcatttttacacattggaaaggaatgactttaatcctcagattagcacatggcagtcctttaaaactggaattacaatttctccaagcacacggacatacctggtatggaaaaaggataattatctttacagaaaagctactaggatgatttgcctgagggtggatatgaaatcctctggacatatttcagagaaacagcaatttttaaaaacatgatagttagctactctctacttgaaataatgaggtttgtttttattaatgagaagttctggagttctgttttcataatggtcgagacattgtgtgtgtgtgcatgtgtgtgtgatctctaaaattttatttatacttattaaaattaggttttaggctaccaagaatttttgagaacactagaggctccttgtcacmataggaatcatcggaatttcagtaaatgttatttagtctagggaagccctttcaaatgaaatggctaacactggaaataatgctgggcataggaagagtgtggtttgtggttagaaagcctgcaacttctagttctccaaaagatcctttttgct

SEQ ID NO: 777113 - DNA, 596 bp, Homo sapiens
actttctgaactttcaaagtgaaaaacttgaagttgaataaaagcatacctgtttctacactttcctgttcctgcatattgtgtctagccatcattcctctccttgggaaatgctcagtaactgttgggaaatgcccagtcctttaaatgtcaatcccagcatccaagaattcaaaaccttttttaaaatttagatgggatgcttgtttattactcaaagcaattccttcctttttytttttgtctcaaaatctcccaatcatgaaggctctttggccttctcttacatccccaaaatggctcattaatttctcctcacccccacaagatgtacaaatctctctctggatgaactctgctggagatctacaatagagaaactcaaagctataatctagcctagagacatactttgctggtctgcagaatttgcttgttttcaattcctgtctcatgtattttggaagcagatagtttattttatagttttatgggtccagagatgaagagaaattttgtcacaatatggatcatactgaatctcattcatatctgatttaaataatttagatgataatatgtggggcttttgagct

SEQ ID NO: 777114 - DNA, 667 bp, Homo sapiens
ggattttaaaccatactaggagagaatatgggcaattttttttttttttgagacggagtctcactctgttgcccaggctggagtgcagtggcccaatctcagctcaccgcagcttccccctcccaggttcaagcaatttctcctgcctcagcctcccaagtagctgggactacaggtgtacactgctacgcctggctaatttttgtatttttagtacagatggggtttcactatgttggccaggatggtcctgatctcctgacctcatgatccacctgccttggcctcccaaagttctgggattacaggtgtgagccacygcgcctggccaggaatattttttataatcttcaagtggggaaagcccagaattcataatggaaacaagttaacaattaaactacatacataaaattgtatgacaaaaacatcacaaatgaagtcaaaatacaattaagagtaggaaaaaatttgaaacactataaacataaagagctaatttctgtaacatataaaatcactttgagcaatgagaaaaaagtaaacaaaggaaagcagttaacagaaacaaaattacaaatagttaatggacatgaaaatatgttcaatgtctttcagcaataaatgaaattaaaacaataagggcttgtttttatctatcagtaaa

SEQ ID NO: 777115 - DNA, 603 bp, Homo sapiens
ggacaagcacagtaattcagtttcggtatttcataaaaagtggtttatttcactttgcaattttccatttattagaaaatatcattcatacaaaacaatatataaatgcatatattgacttaaataattttagtaaatgatgcacctatgtgtccactgctgaggttaagaaatagagactggccagttttttccaaatcctctatacatcttcccaattatatcaccttcccaycctacaaacagaggttttcgtcattttgacttttataataatcatcccacgttctttcggctttaaatgattttaccacttatggatatatttctcctatttttgaaccttatgaatatgaattcctacactataatgtctatgtcttacttatttcattcaatatgaggtttgggtagattcactgggcaaagctcacatgtaactgtctctcattcagtttccctgctgaacagtgttccaccttaaaaccagtctacaatgtattttccattctaccattgtcggacattttggttatttcctgtaatatgttattaatttttatacatttattccaggagtgaaatccttagatcatatattat

SEQ ID NO: 777116 - DNA, 604 bp, Homo sapiens
gattctggattctgttacattccatcaaagagtattgatattttgtatatacatttacaaatgtacatgtacacaataataaaaataatttttttctcagacctgcctgcaatcatgaagggtttcttctttatgtgcttataacagtgtagacaaggggactcccaggcaagatggccaagtaagaacagctctggtctgcagctcctagcgagaccaatgcagaaggccagtgatttctgcatttccaactgaggtacccggttcatataactgggactggttagacagtgggtgcagcccacggagggtgagccgaagcagggtagggtgtcacctcaccctagaagtgcaaggggtcaggaactccctccctagcgagamcaatgcagaaggccagtgatttctgcatttccaactgaggtacccggttcatataactgggactggttagacagtgggtgcagcccacggagggtgagcagaagcagggtagggtgtcacctcaccctagaagtgcaaggggtcaggaactccctcccctaaggaaagctgtgagggaacttgccatgagggacggtgctatctggcccatatactacgc

SEQ ID NO: 777117 - DNA, 554 bp, Homo sapiens
aaaacacatggcctgttcttttgtttatttttgaccttttctgcaaagttgtgaaagctggtgatttttccattattggcaagagagaaaggggcagatctaacttagatgggcagttttggtgtttatctgggtttttgtttttattttcggtgtgtttgatcaraaatgaatatatggggccataaagagtctaaaatttttaaggactgattcataaagaaatatgatttttttaaaaaattaaagttataattttaatattaaaacatatcccctctgttatatgtctagaaataacacatatatgctaaaaagaaagaagttaattataggataatgatgtattttatgacaaatgcttattcagttatgaattttaaattagtttttttaatgaaaaagtataatcattaaatattttggtaacaaattcatgattgtctgtattatactcaacatatcagatcaaattaaataaaactcaaataattagatcacaaaagtagcatcgatatagtaattaagtgttggtaactggctgtgcctggtga

SEQ ID NO: 777118 - DNA, 654 bp, Homo sapiens
gataaaatttggctttaccattaggtcagtattgtaataaagcaaataaagaattttcagaatgtagcagtctgacaattataagcaatgtaaagcgttaaggaaatacctcattctctgctttaaaaaatatctccccatcctatatttattatttatgtgtccatatgttgtattttttcaytttcatctaactttaaatcctaacataatttgtactacttgaaagaattattgccagtcaaaatgccatgtgtggactgtcagatctagaaaaatgcttctaagtcattcactctagatccctcatcatcacaacaaggacatcagcctcagagtggttagaggggatacggctgggaaggctgactctgggaaaaatgaagaatatcttgtgcacaatggaaatgggaggactcaccctaggggaagagagagtggcagagaaccctccctgacagctgtgtgtatacactgtttcctgatgttaaaggagaaaatcactcttacccatccccaggctaggacctaacaatgtctattctaaaaaacatgaaaaaaaaaaaaaaaaaaagaaggaaagaaaaacaatagcaagcttgagagagagaatacagcagtttgaccttccaccatgcacccttcttggggaaa

SEQ ID NO: 777119 - DNA, 654 bp, Homo sapiens
gataaaatttggctttaccattaggtcagtattgtaataaagcaaataaagaattttcagaatgtagcagtctgacaattataagcaatgtaaagcgttaaggaaatacctcattctctgctttaaaaaatatctccccatcctatatttattatttatgtgtccatatgttgtattttttcactttcatctaactttaaatcctaacataatttgtactacttgaaagaattattgccagtcaaaatgccatgtgtggactgtcagatctagaaaaatgcttytaagtcattcactctagatccctcatcatcacaacaaggacatcagcctcagagtggttagaggggatacggctgggaaggctgactctgggaaaaatgaagaatatcttgtgcacaatggaaatgggaggactcaccctaggggaagagagagtggcagagaaccctccctgacagctgtgtgtatacactgtttcctgatgttaaaggagaaaatcactcttacccatccccaggctaggacctaacaatgtctattctaaaaaacatgaaaaaaaaaaaaaaaaaaagaaggaaagaaaaacaatagcaagcttgagagagagaatacagcagtttgaccttccaccatgcacccttcttggggaaa

SEQ ID NO: 777120 - DNA, 642 bp, Homo sapiens
ccctcccagtcatcctgtcagaaatgaggcactcattcagatctatttttttaatcttctgtctttttctcctctaacttcccacatcaatggacaaatttgcttaatttcaagcctgtaaccttttcttttcaggactaatttattcttcctctctagagttcagagttcttaacttagtaggtccagtccaatcttcactcctccagttaatctatactgtattcattggaggtaaacagatgaatctcaagagccctaggactcaggtgggttaggtgattttctcacataattgggacttttatcccagtgcttccacttctaaatgtttttgtctttctgctgtaattctatacatcaagaaatatacaaccttcacacccaatcttgattactcttgccaaataaactaagtttagcctaaagctgcctctttgcatattttaaaggtttcttgatacacagtgagttgtaacttaattggatgtgtaayctactcttgtcccaatcactgagtttcagccaaaggtaaccaacttgtggaaccagtttcaaataaggcaaacgctgagctgtaaccaatccgcctatttctgtgcctcacttctgttttctgaatgtcactttcctttttctacc

SEQ ID NO: 777121 - DNA, 534 bp, Homo sapiens
catgaaaggttttctgtgatgcagtgaaggaagagtgtgaaatgccaggatgggcaaagacaggacatttaggaggggccactatctgttggtggtggctattatacctgctatgaggaggattatgaggcaagaggttacgaatattgagttttttttgtctgaaattccacccaggaggcaagacagtatatattcctatggcaaagagtagagtaagtagggtgattcmtgcaagggcagcgtaatggatgatttccattaataagggtttggatacttaatggtaaggggtgataacttatctgctatggttcatgagggaagagtggggtcttcaggcatgggcgttaggcggagtcgaattggtctgagaagagtgctggagtatttgcagggaacagctggttggttagttggtgatgggtcagctgcaggtgctctttttaacctggaaagatggtaccaagacttgtgttctcaaagtttggctgcagtggaggtagcgagaaggacttggaaagggatttcgca

SEQ ID NO: 777122 - DNA, 672 bp, Homo sapiens
atagatttggcagaggtcttgaaacaaaggatacaagttttctatgaagcctgagggagcacaagcctgaaggtaaatctcagtataaagtcaaccaaagtcatcattgtctagcaattgaagagtagagtcagagatgtttaatcagagatggagagtacaacctatttcaagtttctcacaatgttgcactagcacagaatttcagaaagttttctgtgtccttgagagaggcacaagagagctgattagtggtttggacagactttataggtaaaataaacaggatgtagagtggcctgcttagtcacgacagaggaaaagtagagggggatgtggatgctgtggcagtgggtgcaggcaggctggaggctgaacacatagcattagacctccactataggacccagagaaagtgaraaaaagaaagagaagcacctgcttctcagtgtatactgatggaaattgaaccccctctcccaaaatcatttatgtcatctcctagaggaaaaaaggtgaagggaatgaaaacagtctggaattggctacttactcatcagaaacagagaaaatctcataagcagctgagtttagttttaattgttcagattatattcaggacctttagtagaaattggagagcaggaggaagggtggagaagtagagagtaa

SEQ ID NO: 777123 - DNA, 637 bp, Homo sapiens
ccaggaatgaccaaggatagcttggtggttagaagcaagatggagtcaactatgtcagatttctcttactgtcataagtcatctatatccctacttcacaccattttatttctctcttaaaagcaggtagtgtttgccttagtatccatatgaatcctaagggcacagggcaaagaaaagagacctgagtgcaggagccaggctgtggagcgtgtgtgtgggcctgcatctgggtctgggtctgaagctggagctggggctgggtctgaggctggaactggggcttgttctgacgctggatctgggtcttggcctggggctgaggctgagtgagacatgatccaggcctgagtctggtcctgggtttgggcctgggcctgggacttaggctgggtgagcctggggctgagatgagactgaagttgggacttgggctgagctgggcctggggtggtaagtttccacttgtaagaggaagtcagggctgctgctgagctccagaggccttgaccctcatcaagtcagcagatatcargagtcctatctatactttctctaataaggtcagtgaactatcagtgacagagaattctgctcctttcatatgcagactttcctttaaattcagaaatcttga

SEQ ID NO: 777124 - DNA, 614 bp, Homo sapiens
gaggctgagtgagacatgatccaggcctgagtctggtcctgggtttgggcctgggcctgggacttaggctgggtgagcctggggctgagatgagactgaagttgggacttgggctgagctgggcctggggtggtaagtttccacttgtaagaggaagtcagggctgctgctgagctccagaggccttgaccctcatcaagtcagcagatatcaagagtcctatctatactttctctaataaggtcagtgaactatcagtgacagagaattctgctcctttcatatgcagactttcctttaaattcagaaatcttgatatctggattaaaataaaagtttatcaagagaagaacaaaagtgaagrtacagcttcagtttgggcagagtcttaacaattagtttgtatacagaacacatttaggttttttagtttttttgaaccttgaaaactttcagttactaggtcttacaagttttaaagtaatatttttaactaaatatcccttttgtttgttaccgatatttttggaatcgagggattatttctgtaacttttgtttctaaaactttgtggatctatgattctataaaagtagctaatagtttttagttat

SEQ ID NO: 777125 - DNA, 606 bp, Homo sapiens
tatttcttgtgcctaaagaactttcaataggttagttgcaggtctgctggcaatgaattccctaagcttttgttggtctgagaaagtttttattttatctttattctgaaagctatttttgctggatatatcattatcagtttattgttgtgcttgttttattactttgaagatgttacatcatctgctgaactgcatagtttctaaaaagaagtctggtgtgattcttatcttcctccctatgtaatgtttcctttttcctyttctacatcaagatttttctctttaaacttgaatttcagcagtttgactacaattttcatagctgtgtttttaaaatttttgtttatattgcttagagttttctgagattctttggtctggttttttttttttgctttttgtttctgtttttgccttcaatttacttcagacaattcttgatcattacctcttcaaatatttctttggttcttgctgtcttcttattctggagatacaagtccatgtatattagactgtttggttttattccctaatttttggatgatctgttcttttttcccatgcatttaattatttaattttcagtagttcctgtcatca

SEQ ID NO: 777126 - DNA, 590 bp, Homo sapiens
gtaccacagagagtggagtgctgctgtaaagatacccaaaaatgtggaagtgattttagaactgggtaacaggcaaagattgaaactattcggaaggctcagaaaaagacagaaaaaatgtaggaaagtttggaacttcctagaaacttggagggctaagraaacaggaagatgtgggaaagtctgaaacttcctggaggcttgttgaatggctttgaccaaaatgctgatagtgatatggacaacaaagtccagggtgatctcagatggagatgagaaaattcttgggaactacagcaaaggtaactgttcttatgctttagcaaagagactggcagcattttgccactgccctagacatctgtgaaactttgaacttgaaagagagggcttagggtatctggcagaagaaatttctaagtggcaaaacattcgagagaaagcacagcataaaagtttggaaaatttgcaggctgacaatacgatagaaaagaaaaacccattttctggggagaaattcaagcctgctggagaaatttgcctaagtaacaaggtgcagaacgttaatcaccaagataacggggaaaatg

SEQ ID NO: 777127 - DNA, 590 bp, Homo sapiens
gtaccacagagagtggagtgctgctgtaaagatacccaaaaatgtggaagtgattttagaactgggtaacaggcaaagattgaaactattcggaaggctcagaaaaagacagaaaaaatgtaggaaagtttggaacttcctagaaacttggagggctaagaaaacaggaagatgtgggaaagtctgaaacttcctggaggcttgttgaatggctttgaccaaaatgctgatagtgatatggacaacaaagtccagggtgatctcagatggagatgagaaaattcttgggaactacagcaaaggtaactgttcttatgctttagcaaagagactggcagcattttgccmctgccctagacatctgtgaaactttgaacttgaaagagagggcttagggtatctggcagaagaaatttctaagtggcaaaacattcgagagaaagcacagcataaaagtttggaaaatttgcaggctgacaatacgatagaaaagaaaaacccattttctggggagaaattcaagcctgctggagaaatttgcctaagtaacaaggtgcagaacgttaatcaccaagataacggggaaaatg

SEQ ID NO: 777128 - DNA, 593 bp, Homo sapiens
cagcataaaagtttggaaaatttgcaggctgacaatacgatagaaaagaaaaacccattttctggggagaaattcaagcctgctggagaaatttgcctaagtaacaaggtgcagaacgttaatcaccaagataacggggaaaatgtctccagggtatgtccaagacctttgcaaaggcccctcccttcacaggcctggaagcctaggagggaaaaatagtttcatgggccaggctcagggcccccctcctctgtgcagccttgggacatggtgtcctgtgtcacagcagcttcagctccagccatggctaaaagggaccaaggtacagcttggatcatggcttcataaagtgcaagctccaagccttggcagcttccatatggtgttgagcctgcaggkgcacagaagtcaagaattgaggtttggaaatctctgcctagatttctgaggatgtatggaaatacctgcatgtccaggcagaagtttgctgcaggggcagagccctcagggagaacctctgctagggcaggcagaagggaaatgtgaggtcagagccccaacacagagtccccaatggggcactgcctagtgga

SEQ ID NO: 777129 - DNA, 523 bp, Homo sapiens
cctcttctttaaccctctgcatcctcactgcccatagtgctcccagaaacaacaataaagcctaccagactccaacatttcttaatgggcccatgagttacagcctttgttgaaacttattgctaagaagaatgttggtgattctttggtacaacctcttcaatttgtgaatggagaaatggaggtccagaaaggagacatgattgtcyaggggaaaaaaaaaaggtcatagagctagttagcggtagaattcaaacagatccatgtcttctgactttctctattagcctgcatctactgtgctatgctccggtcacaatggggaattctcatactttgcatgctttgaggggtaaattgtacactcttcacgtttggttcctacaaccactttgtaagaaggctatagccattagttcatcatgtgtgctaagttcaaagagaaggaatgtgctttgcttaagaatgcgagtttcaccagaaaggaagtagaaatttataaaataggaaagttcaggtttac

SEQ ID NO: 777130 - DNA, 599 bp, Homo sapiens
agtgtggggtaagctgtggggagcaggaaagcaatctatagtcatatacttaggtctcagtcctttagtgagtctatgcctttgaactgtgaacttcagaagtctttctcagtttttttcttcccttttaggtggaacagaatggctagagtgggatggagttgggtatttccttycccccaggtcagttagtttctgatgataccctagggggttagactctgattaattagtttattccggggaagatcttgttaagaacagaattccccggcctatttcaaaatggttccctttaccctccccctgatggaaacatgaggggatttttctcttaggcttactgtgggaacttggttgagctcctgagacccctaaagtttttaattatctggcttgtcagcgctgagtccccagtaattagtcaattacagttcaggtgttcctccacagcactagttcccatggcagtttctgctcatgagcatgtcctgggaagccatgattccctgtatttgcctctgtctccagtcttgtggatagcagtttgccttgtgtcttcccctctattatggatccaaaaagagttgttgattgtt

SEQ ID NO: 777131 - DNA, 502 bp, Homo sapiens
aattttcaaggaagtgatttcttttcagtattccattggatccttagggtgaatgtgtgtgtgtgtgtgtgtgtgtgtgtgtgtgtgtgtgtctgtgtatgtagggtgggtgttaagagattttcatatccctagaagagtggattctgatggagagctgcattaactttttcaggggaactgcctcatcttaaaaagttcaaataatactttaatattatttggggaagagagaacagaaatttgacctaagtatccagtatggtcaattaaattggaaataagcctatgagttgaaagctcattcttaccaatgtttactgttctttyacaaatatcttgaaattgcctcattcaagaattataaagcaatctaattctgaagcaaagcttgtaaagttttgggttgtgacattttggttgctcctttctatgaaatctgagtcattctgctgtagtatatagtaatcaactgacttccagggtttgcatcaatttgttt

SEQ ID NO: 777132 - DNA, 579 bp, Homo sapiens
tgtgtttcttctgtgtttcttgccagaaccccttgactgatccactcttacttgcttgtgttttaaattaaagtctatttctgctttcctgtttctcttctctacctctcagacaattaatctggagccttaactggtgacagtctaatgatatttctgcttcattttggcttggattatttatcttgcaggaattaaaagaattaaaaggcaaggaataagctattgcatctggtgcttcctmcagttaaaaaaaaaaaaaaaaaaaaaaggaaagaaaagaaaagcacaacgcctaatggggctctttggattttggaggcaacatattccccaactgggtgtgtaactccagcccatttgccaagtaactcatcctaccaaacatattatatagttagcttttttatagagctttctctgacttttccctccactcccaagcaggtttaaatgtttccttctctttgctagcagttattacatattccttcatcataatacttatcacattgttctgtgactgtttatatacacctctctccactagactataattcctgtgggactgtgtcctat

SEQ ID NO: 777133 - DNA, 665 bp, Homo sapiens
ctggaagaaaatactaaggaagaaagcagtatttgactggaaaggctgagatgagtgaccaaccaagaaaattgaaaaaaaaaattcctttttcagaaaaacaaaagtatcttaagaaaaactggctggacatggtggctcacgcctgtaatcccagcactttagaaggccgaggcaggcagatcacgaggtcaggaaatcgagaccatcctggttgacayggtgaaactccgtctctactaaaaatccaaaaaattagccgggcgtcgtggcgggcgcctgtgatcccagctacttgggaggctgaggcaggagaatgacgtgaacccaggaggtggaggttacagtgagctgagatcgcgccactgcactccagcccgggtgacagagcgagactctgtctcaaaaaaaaaaaaaaaaagaaagaaagaaaaagaaaaaccaaaagatagtgaatttgaggaaactggagtaagggggcagccaggggcatcccccaccagaatggcaattcactggtgatatctacaatgagtagacaaccactatgtgtaatgatctctgaaaaaacaattccatgccctctatagctaacacctcttatcaagggagcagttctgattaaaatttaaatttttcatcctaagatagacatttaattgctt

SEQ ID NO: 777134 - DNA, 618 bp, Homo sapiens
atcaaatgctgaaaaaaacagagtacccaagtactggccagtgagggtccccacagcaaacgctgaaaatcccagagcatcggggggcagccaacagtgaaccccaaaggcacaagacctaacgcaattggggccacagaacaacatgactctggtgtcccaggggtcaacacaacagaggacctcatacagccaaatgaccttccttaaacaatggcccaaagagccaaagcaaagactacaaatgtgacaaagaaataaggataagcatgcatttgggcattgagagaaaaaagtaaaatggtcagtcattggaaactaaagcaaaaaaggcctgagagaaggggcaacaacaggggttataaaggacttggccagccaggtgtgcttctgcctgtccaggactcccagaaaatgggagactgcatcaggctaccaagccaaaggcctcaaagccacttacccatctrtccaaaataaagaacataggaaaggacagatgtgcccaaatcaaagggaaataaaagtagcgagttgaatctggacaaagggagactcacccacccaccattcaggtctaaatggtgcccatgagtcttgatttggtgtcccgatggg

SEQ ID NO: 777135 - DNA, 591 bp, Homo sapiens
tccacaagtcacctttacaggtcctctagggaggcatgagggaggatctttggatctaagccacagttagaacctgcctctcagtaggtgttatccttctgaggaaaaaaatgactgatctatgaggaattaatcttggaaatagtcccktgtttcttaaatcagaaaattctatttcccaaaactcaatctttaacagaaataaattttctatgtcaggactgcttaaattcggcccaacaagttgtttttagaccttgatcaacggatgtaggtaaaagaaaacctcctattcagttcttccgatgttggatgcagtcaatgtacgggttaggtcaatacttcttgttttggaagcttagtcatctgtgtccatctggatctgtttcccatggtgtggccacagttcttcctatatcaaaattacctgggaggcttgctaacaaaacagatgcctggttgttgcctcacaggtgtgtggtgtcagacacttctcaggctgtgcatggttaatacatttcctgtgatgcttagacacaataaagtctggaaaccactgatctacacaaagtgacctttcttaataaacac

SEQ ID NO: 777136 - DNA, 564 bp, Homo sapiens
tgtatgattatgtttatatgaatgtctggaacaggaaaaaaccacctatgggacaggaatcagaagagtggttaaccagagactggcagggttgggaaaggaatgactgataaagcacacaaatggagtttctgacatgatggaaatgttctctatcttgatagaaacgtgaactatgcaggtgtakacaattgtcaaactcactgcattctacacatgagaactgatatacagtttcactaaattatatctcaatttttaaaaggaggaaaaaagtgaaaaaaagtattgttctacttagaatattaaacttacaggcaataaaaataattatcctcactgggtgtggtggttcacgcctgtaatcccagcactttgggaggccaaagtgggaggactgcttgagcccaggagttggagaccagccttggcaacatggtgagacactgtctctaccaaaaaacccacaaaaattagccaggcagggtggtgcaagcctgttgtcccaggtgctcaggaggctgaggtgggaggatccacttgagcccaggaggttgaaactgc

SEQ ID NO: 777137 - DNA, 483 bp, Homo sapiens
catttctccttgagagtagggactggtttttagtcattgttttatccccaaggcctaacttagaggcttgtatatattacacactctatgggatgaatgaatgtgtcccaacctcaaaaaagccccaaaatgaaggagtcccattcaaacatgctaatttgcattactccatttacacttttctcttggttaatgttaatccattaggttttagtaaatcaaacttttatattggttcatatttatataaaagtgtagcattgatgaggagggggcagtkaacagctttgcgtttggttgaatgtattattttagctggtccctcctgactcctactcatgcttatacgtttgtctgtatatatgcgtgtgtgtatgtgtgtgtgtctctgtatgtctctctgtgtgcatatatgtatgtgcatgtgtgtatatatgtatgtgtacatgtgcatgcatgtgtatgtttatgtttgcatatgtg

SEQ ID NO: 777138 - DNA, 594 bp, Homo sapiens
taatagtataagctcaaactgcaaattgtttatttttttcttctaagttgtcactgggttctttttcaattggaaaggtggaatgaatcagagagatggattagaaccataaaaaatgttccacatcactaatatcagagaaatgcaaattaaaaccacagtgagataccatctcacacgagtcaggatggctatggttaaaaagtcaaaraaacaacagatgctggcgaggctgcaaaggaaaaggaaaacttatactctgttagtgaaaatgtaaattcattcggcctctgtggaaagcagtttggagatttctcaaagaacttaaaacagagctaccatttgacccagcagtgccgttattgggtatacacatccaaaagaaaaccaatctttctactgagaaaacatgtaggttcatcacagcactattcacaatagcaaagacatggaatcaacccatcaacagtggattggataaagaaaatgtgctggaggccattatcctaagtgaattaatgcaggaatagaaaatcaaataccacatgttctcactttgaagtggaggctactagatgggagagggagggaggg

SEQ ID NO: 777139 - DNA, 594 bp, Homo sapiens
taatagtataagctcaaactgcaaattgtttatttttttcttctaagttgtcactgggttctttttcaattggaaaggtggaatgaatcagagagatggattagaaccataaaaaatgttccacatcactaatatcagagaaatgcaaattaaaaccacagtgagataccatctcacacgagtcaggatggctatggttaaaaagtcaaagaaacaacagatgctggcgaggctgcaaaggaaaaggaaaacttatactctgttagtgaaaatgtaaattcattcggcctctgtggaaagcagtttggagatytctcaaagaacttaaaacagagctaccatttgacccagcagtgccgttattgggtatacacatccaaaagaaaaccaatctttctactgagaaaacatgtaggttcatcacagcactattcacaatagcaaagacatggaatcaacccatcaacagtggattggataaagaaaatgtgctggaggccattatcctaagtgaattaatgcaggaatagaaaatcaaataccacatgttctcactttgaagtggaggctactagatgggagagggagggaggg

SEQ ID NO: 777140 - DNA, 572 bp, Homo sapiens
ttggaggaaaaggaaaggaagattcagcagctggaagctgagcggagtccccatcctccccaagaggtcaaggaccctccaggatgtttaccagaagccccagttttctctactcatgacatcccacctgtggtctctgatgagaatttgtagattcccaataagaaaacaataaaagtttattaagtgtcatccaggtaaagtctgataccaaatagtctcctaggtgacaaactcaagttcaagttcatgtgtttgaatgtatactatcatgttcgtattggaaggaaacaaaaaaaaggaaatgttcaasagcaaacactgaatgtttcccctttggacagtaatagtcacgtaaaccacgcagctgtagaatactatgtttttagacattcctggtagcagtgggggagggaagaaaacaaaactagacagatggtgaaagaacttagcattatcctcttagcagagatttgtcacactgcaagggaggggtggcaccaaccccgtttagtatgcagctctattgtgaacagaaagctgtcgcggagggccagcttcaaactcgtgaa

SEQ ID NO: 777141 - DNA, 530 bp, Homo sapiens
agttttctctactcatgacatcccacctgtggtctctgatgagaatttgtagattcccaataagaaaacaataaaagtttattaagtgtcatccaggtaaagtctgataccaaatagtctcctaggtgacaaactcaagttcaagttcatgtgtttgaatgtatactatcatgttcgtattggaaggaaacaaaaaaaaggaaatgttcaagagcaaacactgaatgtttcccctttggacagtaatagtcacgtaaaccacgcagctgtagaatactatgtttttagacattcctggtagcagtgggggagggaagaaaacaaaactagacagatggtgaaagaacttagcattatcctcttagcagagatttgtcwcactgcaagggaggggtggcaccaaccccgtttagtatgcagctctattgtgaacagaaagctgtcgcggagggccagcttcaaactcgtgaatgcgcgggtactaaagagcaggagctaaagagcaggagccgtcagcagagtaaatagcc

SEQ ID NO: 777142 - DNA, 621 bp, Homo sapiens
tcatttttattgtttgaattattttattaaaattgcatcttgtcagaattattttacatgttcatcactttcaaaattatttaggcttttaattcactgtcctattgtccaatggtgggcacatgcagagctcactaaataaatactgatttgaacttctttgaatgatctcttctggtctctgtttatattacattataaatataaaatagtaaactccttgagagcaaggacattatgttccatgtatcctccttatactacatgccatcrtacatatagcaattgcttcatattatttgaatggttgtttaggtagaaggataatatttttgtttgttttctttaccaaagcaaagctgtatttctgttaatattcagggggtacctgtggttgaaagctagtatttctttgcagatgacctgtttgtgctcctagaattaataaacctatgaatagaaaacctatattttctagatttgcaagatcagatcactgcagttagcaataagtgttacagtaagctgtataaaaaacaattcagttaaattttctgtctcagaaaatgtctcaatttttaatcaagacagagaacttgaaaatttctcttctatcataca

SEQ ID NO: 777143 - DNA, 586 bp, Homo sapiens
atcttgtcagaattattttacatgttcatcactttcaaaattatttaggcttttaattcactgtcctattgtccaatggtgggcacatgcagagctcactaaataaatactgatttgaacttctttgaatgatctcttctggtctctgtttatattacattataaatataaaatagtaaactccttgagagcaaggacattatgttccatgtatcctccttatactacatgccatcgtacatatagcaattgcttcatattatttgaatggttgtttaggtagaaggataatatttttgtttgttttcttyaccaaagcaaagctgtatttctgttaatattcagggggtacctgtggttgaaagctagtatttctttgcagatgacctgtttgtgctcctagaattaataaacctatgaatagaaaacctatattttctagatttgcaagatcagatcactgcagttagcaataagtgttacagtaagctgtataaaaaacaattcagttaaattttctgtctcagaaaatgtctcaatttttaatcaagacagagaacttgaaaatttctcttctatcatacac

SEQ ID NO: 777144 - DNA, 586 bp, Homo sapiens
atcttgtcagaattattttacatgttcatcactttcaaaattatttaggcttttaattcactgtcctattgtccaatggtgggcacatgcagagctcactaaataaatactgatttgaacttctttgaatgatctcttctggtctctgtttatattacattataaatataaaatagtaaactccttgagagcaaggacattatgttccatgtatcctccttatactacatgccatcgtacatatagcaattgcttcatattatttgaatggttgtttaggtagaaggataatatttttgtttgttttctttaccaaagcaaagctgtatttctgttaatattcagggggtacctgtggttgaaagctagtatttctttgcagatgacctgtttgtgctcctagaattaataaacctatgaataraaaacctatattttctagatttgcaagatcagatcactgcagttagcaataagtgttacagtaagctgtataaaaaacaattcagttaaattttctgtctcagaaaatgtctcaatttttaatcaagacagagaacttgaaaatttctcttctatcatacac

SEQ ID NO: 777145 - DNA, 410 bp, Homo sapiens
aggagcaatgcagaatcaaatggaggaggaggaagcaggcgatgtggtagtttcagaaagggagacactcccagcacctgactacatggtaaagcttttcatgtgaatttgatattcattttcaatttcgtatagtgctttcccaggattcaaatgccatgtaacattgtgaacttgaaacagttttttctttcaatraaacaacataaaggcagtttgtaaatttgcttttaccaccatgaaacctaaaagaataaaatccgtcacagaatattatccatttaaaagtccttattctgaggcattagccagattttccactggtttcattagaagaaactgacaatgattgtagagcacattggagaaagttccccagctcgcttacgagaagctttcaacttttcaat

SEQ ID NO: 777146 - DNA, 597 bp, Homo sapiens
cctccagaagaaatgcctgggttcatttgcggtcactttccttttccttctctgtctagcccttagtgaccactattctatttctgccttggtgcatttgcgtatttaatggaatcgtactgtatgtggccttctgtgtctggctttctttttttgttttttgtttttgtttttttgttttgagatggagtttcgctcttgttgcccaggctggagtacagtggcatgatctccactcactgcaacctccgcctcccgggttcaagcgattctcttgcctcagcctcctgagtagctgggattacaggcctgcgccaccacacccagctaattttgtatttttagtagagacggggtttctccatattggtcaggctggttttgaactcccgacctcaggtgatctgcccgcsttggcctcccaaagtgctgggattacaggcgtgagccaccatgcctggccttgccttttttcatttaatataatgttttcaagtaggattcatctgtattgtagcatgtatcagtacttcatttctttttatggctaaataatattctactatatagatatttcatattttgtgtatctgtatc

SEQ ID NO: 777147 - DNA, 502 bp, Homo sapiens
tttgtccactgatttttttccctcccctacttttttttttttttttgagagagaggatcttgcttgccctgtcacctaggctggagtgcagtgatgcaaacatgtctcactgcagcctcaacctcccaggctcagtcagtcattctgcctcagccatcctaagtagatgggaccacaggcacatgccaccatacccggttaattttttgaatttttgtagagacagagtcttgccctgtttcccaagctaatatcctacattatatgatacatgcagaaaaaaactttcttcccctttaccccgagtgccctttttagctactttttatcctttacccatacttggagtagtttatattatatrcaagtgctttttacaaattagtgaaataaggctctttattataagtgaaaaatgttagccttagttctaggtcattcagttagtttcccctcctttcctagagactcaattaacattgtagactttaacagtttacaa

SEQ ID NO: 777148 - DNA, 624 bp, Homo sapiens
cgccactcccagaagtagtgatacatccaacactatactgtgcaacatcagaaatagttaccttaaattgttttgtttttatttatataccagtaatttgcatttaaagtaattatataaacttgatgtaacctcatgttcacataatctagttcacatttgtgtttctgaaaatgatagtcagacttaaaataggacaaataagtttgttgaatgactatatgacccaagtttaggaacaggctttatttggaatatgtggaggtaacttggctttcccataaagaacgtcayggtaattgcatagtttgaggcctgaacttaatgtcagcacaggtatacctgatttttatacaagttctagcaaaattaactgggcatttgtaataatatctatcacagtgtttagcagtattgctatttaatctttcttcccctttttagggacagtctccctcaattcgccaacttatcatgcatgcaatggcagaatggtacatgagaggggagcagtatgatcaggccaaattgtctcgaatacttgatgtggcccaggacttgaaggtgagttcagagggacagactgacaccagtttatttactaatgagaaaaaaaggccgggc

SEQ ID NO: 777149 - DNA, 593 bp, Homo sapiens
cctaacactgtgccttcagtgctctgggcttcagcctgtctgtcttcaggtctcctggggagctccaaggacaccaatacaccaaaggagacatggcagcgctcatcaacattgaatttcactgtgaaagtgtgtcaggttgttattcttcatggatctctgagaatcaggcatcatggatgagggctcagagatgagaatttttggaatctggagcatgtagtggcagtgtgaggtccctgagcatctggaggtaagggaacatggtggtaggaaggctcagaggcccccctcaaagaatcagaatcagtcctgtgaaagtttttttttttttttttartcattatccttgcataaggataatgggccacaaaagggttacatttcttttataataaaagactacaaagggcgaccagtgttttattgatggttttcagaaacatccatcttacagtgattagatcgtgaaatgattagactggtgctaaacttagaagcggaaaaaggaaacatattctttaaaatttttaaggttcagaaaagcttcctgagaagcccattttccattttagtgagaaaaggagaagaat

SEQ ID NO: 777150 - DNA, 593 bp, Homo sapiens
cctaacactgtgccttcagtgctctgggcttcagcctgtctgtcttcaggtctcctggggagctccaaggacaccaatacaccaaaggagacatggcagcgctcatcaacattgaatttcactgtgaaagtgtgtcaggttgttattcttcatggatctctgagaatcaggcatcatggatgagggctcagagatgagaatttttggaatctggagcatgtagtggcagtgtgaggtccctgagcatctggaggtaagggaacatggtggtaggaaggctcagaggcccccctcaaagaatcagaatcagtcctgtgaaagtttttttttttttttttaatcattatycttgcataaggataatgggccacaaaagggttacatttcttttataataaaagactacaaagggcgaccagtgttttattgatggttttcagaaacatccatcttacagtgattagatcgtgaaatgattagactggtgctaaacttagaagcggaaaaaggaaacatattctttaaaatttttaaggttcagaaaagcttcctgagaagcccattttccattttagtgagaaaaggagaagaat

SEQ ID NO: 777151 - DNA, 639 bp, Homo sapiens
cataaaatcccccattctggatagaaattctgctattgagttaaagaaatcaaactccaggctattttgggaaacttttaaatgaaagaaaactagaagtttgggaatcaagtaatgaaaagagataacctagcattttatttaggtttatcttataaaacagcatagcattctatctaggtttrtctttctctgcctagcatgtagagaaaaatagcaagcaaaatagaaatcaggtgagcggcattgaaagacacatactgatcagatgaatttattaagaaaaggtgaatgatgaacctttataaacccagtaacataaatgtatgttgtataaagcaatttaatcaaaagaagggagaaatggacaattcataatccagtgtcttccagttggaagacattgaaaatcccaaaattttactcagaaatatatacctctagtagataaagtgaattagaatatacagttatgtccacaatttagtctaataactagatatacaacttgtaacctacagagtacagatatgcatgtcatattcacagaaaagtttggggaaaaaatctaaaatgtgaagttattaattaattagcattagaataactctgatggaaatttatactttttaatgcatt

SEQ ID NO: 777152 - DNA, 429 bp, Homo sapiens
ttgagagctatcctaaaatctagacttttgttttaaaaaatacactataatctaatgtctcaattttttaaattttgagaatggaatactagctattaaaaccatgaaactattttctatgatagggcggagcaacttttcttcattctgagttaatgcccttttcttattatagtccacacttttacgcttagattattgttaccaaattawtttattctaggtatctctcaatacctgtaatttattatcttccacatgttttactaagctgatagactaataaccatttgtgttaagtgctgtttataaaacggtatttgcaacatttattcaaggttgttttaaatttttattctcatttaatgtactttgatatctgtgtgtgtgcatgtgggtttaaggaagtatatattgaggtaatacttt

SEQ ID NO: 777153 - DNA, 619 bp, Homo sapiens; identical to SEQ ID NO: 757585

SEQ ID NO: 777154 - DNA, 495 bp, Homo sapiens
aagtgaacaactgagctttacacttaatcacataaaattcacaaaggccaataaatgataaaaataactctgcttgcaaataagaaggaaaattttctcaatgatcaggatgaaagtcgaatcatataaaagaaccagaaaaggccaggtgcagtgactcatgcttktaatctcaacactttgggagtccaaggcgggtggatcacctgaggttaggagttcaagaccagcctggtcaacatggtgaaaccccgtctctgctaaaaatacaaaaaaatagctgggtgtggtggtgtgggcctgtagtcccagctacagctacttgggaggctgaggcaggagaatcgcttgaacccaggaggcggaagctgcagtgagccgagatggcgccattgcgctccagcctgggtgacagagtgagactctgtctcaaaaaaaaaaaaaaaaaaagaaccagaaaagacagagatgaaggaattaaggagacaaggatcc

SEQ ID NO: 777155 - DNA, 495 bp, Homo sapiens
aagtgaacaactgagctttacacttaatcacataaaattcacaaaggccaataaatgataaaaataactctgcttgcaaataagaaggaaaattttctcaatgatcaggatgaaagtcgaatcatataaaagaaccagaaaaggccaggtgcagtgactcatgcttgtaatctcaacactttgggagkccaaggcgggtggatcacctgaggttaggagttcaagaccagcctggtcaacatggtgaaaccccgtctctgctaaaaatacaaaaaaatagctgggtgtggtggtgtgggcctgtagtcccagctacagctacttgggaggctgaggcaggagaatcgcttgaacccaggaggcggaagctgcagtgagccgagatggcgccattgcgctccagcctgggtgacagagtgagactctgtctcaaaaaaaaaaaaaaaaaaagaaccagaaaagacagagatgaaggaattaaggagacaaggatcc

SEQ ID NO: 777156 - DNA, 495 bp, Homo sapiens
aagtgaacaactgagctttacacttaatcacataaaattcacaaaggccaataaatgataaaaataactctgcttgcaaataagaaggaaaattttctcaatgatcaggatgaaagtcgaatcatataaaagaaccagaaaaggccaggtgcagtgactcatgcttgtaatctcaacactttgggagtccaaggcgggtggatcacctgaggttaggagttcaagaccagcctggtcaacatggtgaaacccygtctctgctaaaaatacaaaaaaatagctgggtgtggtggtgtgggcctgtagtcccagctacagctacttgggaggctgaggcaggagaatcgcttgaacccaggaggcggaagctgcagtgagccgagatggcgccattgcgctccagcctgggtgacagagtgagactctgtctcaaaaaaaaaaaaaaaaaaagaaccagaaaagacagagatgaaggaattaaggagacaaggatcc

SEQ ID NO: 777157 - DNA, 631 bp, Homo sapiens
agtatactgcatgatgctgaggtttggggtacaaatgatcctgtcacctaggtggtgagcacagtacccaataggaagtttttcagccattgtcccccttcctgcctcccccttcttgtagtccccagtgtcttttgttcccatctttatgtctgtgtatatccagtcttgagctgctgcttataagtgagacatgcagtatttggttttctatttctgcatcgattttcataagataatgaaccccagctgcatccatgtttctgcaaagaacatcagttcattcttttttacttaacccagtaattctgtaacacatacaacacttggaattaattgattaaaaaagaaagcccacatcacccacccwgatttaatgttattgcataggaagtctagtgtgttgtgaggaaatgtgggagattattccagtcagatccaagcagaaaatgactctttctaatcaaacaggtgataagtgtttcatcatctatcattacattataaagaaggctggtgtcactgtagagaaagaagctgctatagagaacagtgatgcagccacaggacagagagaggcagagagtagggcctcctgcagccattttcatcaacaagtccatgaggcacc

SEQ ID NO: 777158 - DNA, 434 bp, Homo sapiens
ccaccccttatgacagtgtggcctggatgtgagacatggagtcaaaatacattattttggagctttgagatcgaatgactgccctgctgggtttcagacttgtacagggcctgtcgcccctttgttttggccaatttctcccttttggaaggagaggatttacccaatgcctgtagctccattatatcttgaaagtaacttrctttttttttttttaaattttacaggctcataggcagaagggacttgccttgaatcagatgagactttggacttggacttttgagttaatgctggaatgttaagactttggggggactgttgggaaggcatgatcatgttttaaaatgtgagaagaacatgagatttgggagaggctaggggcagaatgatgtggtttgtttctgtatccccacctaatctcatgttgaatt

SEQ ID NO: 777159 - DNA, 513 bp, Homo sapiens
caatgctatcaggaaataataaatggccaaaataagaaatgtaagagagacttaaattataaagagaaaccaaacagaaattctacagctgaaaaataccataaattaaataaaaagtacaatagggagtataaatagcagaaytgatgaagcagaagaaagtatctgtgaacttgaagacaggttatttgaaaatatacatccagaggagaaaaagatgtaaaaaagaatgaagaaagctcacagaatttatgagacagcagtaagagggcaaatatttattataggaattagtgaaggagaagagaaagacaaagggcctagaaagcttatttaaagaaataatagtgaaaacctttccaaatttggagaaagatgtaactttccagatacaggaaggttaaaggtctccaatcagtttcaatccaaacaagacttcaccaagatatattataatcagactgtgaaaaatcaaggacaaagaaaggatcctgaaagtagcaagagaaaaga

SEQ ID NO: 777160 - DNA, 536 bp, Homo sapiens
tcaagaaaatatagataaacaattcaatgctatcaggaaataataaatggccaaaataagaaatgtaagagagacttaaattataaagagaaaccaaacagaaattctacagctgaaaaataccataaattaaataaaaagtacaatagggagtataaatagcagaactgatgaagcagaagaaagtatctgtgaacttgaagacaggttatttgaaaatatasatccagaggagaaaaagatgtaaaaaagaatgaagaaagctcacagaatttatgagacagcagtaagagggcaaatatttattataggaattagtgaaggagaagagaaagacaaagggcctagaaagcttatttaaagaaataatagtgaaaacctttccaaatttggagaaagatgtaactttccagatacaggaaggttaaaggtctccaatcagtttcaatccaaacaagacttcaccaagatatattataatcagactgtgaaaaatcaaggacaaagaaaggatcctgaaagtagcaagagaaaag

SEQ ID NO: 777161 - DNA, 536 bp, Homo sapiens
tcaagaaaatatagataaacaattcaatgctatcaggaaataataaatggccaaaataagaaatgtaagagagacttaaattataaagagaaaccaaacagaaattctacagctgaaaaataccataaattaaataaaaagtacaatagggagtataaatagcagaactgatgaagcagaagaaagtatctgtgaacttgaagacaggttatttgaaaatatacatccagaggagaaaaagatgtaaaaaagaatgaagaaagctcacagaatttatgagacagcagtaagagggcaaatatttattataggaattagtgaaggagaagagaaagacaaagggmctagaaagcttatttaaagaaataatagtgaaaacctttccaaatttggagaaagatgtaactttccagatacaggaaggttaaaggtctccaatcagtttcaatccaaacaagacttcaccaagatatattataatcagactgtgaaaaatcaaggacaaagaaaggatcctgaaagtagcaagagaaaag

SEQ ID NO: 777162 - DNA, 599 bp, Homo sapiens
attaaggattctcaactgggagtgattctaccccctaggggatgttgggcgatgtcaagagacatttctggtgttcccaaaactgagggttacaactggcatctagtggtagaagctggggatgttgctaaccaccctacagtgcataggacagcctaaatgtcagtagttttaaagctgagaaagcctggtctagaatatttgaatatattataattttttgaattatgaatggttttgtatatacccagaaactgtctaccacacgcaatactttattaaccagaaatccttttctgcaaccttactggagaataagtttaatacctgttattgaggtttacaccttaggaatatcttattgattacaaagtttgagatgacctggaataaataaatgattgaaaaaggatataggacacttttctagagtsctaagaaaggggatgtctctctctgtccaggaggcccatggcatagtctgagctagagggaacaggggatgttaaatgtttttgatgtttactttttgttattacttccagtcttaggatcctactttcacatgaacacctgaaatggcactgagcaccctggga

SEQ ID NO: 777163 - DNA, 624 bp, Homo sapiens
gggattacagctgtgagccactgcacctggcccatttagagttcttggtggaaaaaataatctaagctacatggatgttaagtctattttcctgaatgaggagattcatgggatgtcgcaaaggaatgagcagagattgagaataaaatgctgaaaatgtgcgtgtgtgtgtgtgtgkgtgtgtgtgtgtgtgtgtgttttgagatggagcctcactcagtcacccaggctggattgagtgcagtgaatgagcccaatctcagcttgctgcaccctctgcctcctgggttcaaccaattctcctgcctcagcctccctagtagctgggattacaggtgcccaccaccacgcccaggtaatttttgtatttttgtagagacaggatttcaccattgttgcgggaagtcagggaccctgaacggagggaccagctggagcctcagcagaggaaacataaattgtgaagatttcatggacatttatcacttacctaataatactcttataatttcttactcttgtcttactttactctcttaatcctattatctccataagctgaggatgtatatcacctcaggaccctgtgatgattgcgttaactgaacaaattgattgtaaaac

SEQ ID NO: 777164 - DNA, 543 bp, Homo sapiens
aggctgcttgaatagtttgctgtttggtgctcccaagccttggtagatgtgggtcagcttcatctgagttggagctaagtgcttggttacaaggaataaagttctcctggaattccctcaaaaagaaagaatgctggtcccagggctgtgtgtgtgtgatgatcataaggacagaatctcatggaaagctaggagcaggaagtgcaagaggacgtagactccctggaagcatagttatagggcatctgcatccaagctagcaccagggacctcttgcattcagaaattcatggattttcaccttagggttgcaccatcaatgtgatgggggctctctgtgtgtctgctcctctcatctccttgtgtctgatgggggactttttcccragagaggcagaggattggccccagctcatgatgctatgccagacatagacacgggctactggggacgggccccattcccaatccacttgtggttggcaaggggtgtacagaagaaagcagggtcataggatgccacatgtgatcccacaagcaggc

SEQ ID NO: 777165 - DNA, 625 bp, Homo sapiens
ttgagtgtgcccaggacacatgcccagggcggtctgtgagaccagtcctctcctactcagctccccgcgccagggctctgctcagatgcgaaagccacaattcgaagttcactggcatggtcctcagtcctgcatcatgaacagcagaatgtaatatttattgcccccctacagactgggtgtcaaggtgaaaaaaaagtaataattctaaatctcacacaagggctttggagatcartgaggtaatttacatgaaatagtttgggctctctgggaaacaaagtatggcataaattttggctttttcagtggatggatcctcatgccaataactcaccccagttaatgaaaaacttgcttggctgtgtagacagcaggaatgtgcaggctactatccgagttcagaatggaatattttggcccggcagggacttcctctaaccatgatgcagacacttgtcttacgattttttcaggctgggcacagtggttcacacctataatgccagcggttggggaggccgaagcgggcgggtcactttgaggtcaggagtttgagaccagcctggacaacatggtgaaactccatgtttactaaaaatacaaaaattagccagatgtggtg

SEQ ID NO: 777166 - DNA, 584 bp, Homo sapiens
tggggagctaaggagggagaatttcatgaggccaggaggtcgaggctgcggtgagctatgattgtgccattgtactccagccaaggcaacaaagcaagaccctatcttaaaaaaaaaaaaaaaaaaggttgaatcttgactcaaaaatgcccctataatgcaaaggcaaagttttgagtgccttcacagcgtgctaggtgctggcgatacagcaatggataaracaaaggtggttctgtgtatatttctcatctatttttgcactgaaataaatattttgtgggaaaatgcttaatgtaatgtctggaagctagggtgggcttaatcggtgtcagtgcaatgaataagtgaatacatgaataaaaatgataaagctagcaatttctctgattgtttagtaggggagcacagaaatcacctcattcagtattttccaattttctatcattttcataccatcatcatgattttgccgtacacacaaatcacattactattatttattgaatattcattcttaaagcctaatcacttgctttttgcctaaaaaattatttgaaatgaaaacatgctattactgtgac

SEQ ID NO: 777167 - DNA, 623 bp, Homo sapiens
tgtactaagattagagttaaatatacctgaagagagggcatgaaagcatcccttatctccactctcaggagcttatacacacacaatgaacaataccagccacaagtatctattgtaaattaatatttacctgaacacaaagaggcttccaaggataaaggggaccaatgtccagagcctttcctgatcaaatgattgctaattttggcaaccagtccagctgaggcctctgctgtccaggtttcagataaygttgactgagagtgcttttggtaggtagaagaaggagcatgaaaagatgtccatatcctaatccctaaacctatacatatgttcatttacatggaaaaggagacttggaagatgtgataaagttaagaatcctgagatgatccagaggggatgatcctaaattatttacatgtatccactgagatgactagggtccttacaagtgaaagagggaagcagaagaggcagaggcagattaagaagtgacgacagcaccagaagtccaagagatgtagcctcaagtcaaggaatgtgggccactcctagaagttagaaaatcaaggaatagattttcctctagaggatccagaccacagctctgttaatatttt

SEQ ID NO: 777168 - DNA, 623 bp, Homo sapiens
tgtactaagattagagttaaatatacctgaagagagggcatgaaagcatcccttatctccactctcaggagcttatacacacacaatgaacaataccagccacaagtatctattgtaaattaatatttacctgaacacaaagaggcttccaaggataaaggggaccaatgtccagagcctttcctgatcaaatgattgctaattttggcaaccagtccagctgaggcctctgctgtccaggtttcagataatgttgaytgagagtgcttttggtaggtagaagaaggagcatgaaaagatgtccatatcctaatccctaaacctatacatatgttcatttacatggaaaaggagacttggaagatgtgataaagttaagaatcctgagatgatccagaggggatgatcctaaattatttacatgtatccactgagatgactagggtccttacaagtgaaagagggaagcagaagaggcagaggcagattaagaagtgacgacagcaccagaagtccaagagatgtagcctcaagtcaaggaatgtgggccactcctagaagttagaaaatcaaggaatagattttcctctagaggatccagaccacagctctgttaatatttt

SEQ ID NO: 777169 - DNA, 652 bp, Homo sapiens
acttctttctttttcatggctgtgtactattctgtagtgtatatcttatcacattttcttcatccagtccaccactgatgagcacctgggtcaaatctatgtctttgtcattatgaacagtgctgcaataaacatacaagtgcaagtgtctttttggtggaatgatttatttattttcctttgagtatagtaatgggattgctgagacaaatggtaattctagttttagttatttgagaaatcttcaaactgctttccacaggggctaaactaatttgcattctcaccaacagtatataagcactcccttttctctacaaacttgccaccatgttattattttaactttttaattataacccttctgactggtgtgagatgtatgtcattgtggttttgatttgcatctctgatgattagtgatgctgagcatttcctaggttttcttctaggatttttatccttgaggtcttacatttaagtcwgatccatcttgggttaatttttatacagagtgagagatagggtccagttttcttattatctggaagcctttggaatctgatcatgcaatgagcacaaaggggctctgtccctgattagtttatagaatttggggatggttctgtctttcctgtttcatttttccacc

SEQ ID NO: 777170 - DNA, 510 bp, Homo sapiens
tgcagactactcttttataatccatgagctgagcatgattatttttttaccttttaaaaatattgttagacataagaatatgcaagcgagaccatgtgtggttcacaaagcctaaaatatttaacatctggctcttaatagaaaaatatgtcaaaccttgttctagagaaagggaccatatttcattaattgttacattcaatatgtgtttgataaagcaaaaaaaggataaagaatagaaaggctggaagatgcccaagaaaaatacatgtaaacactgtggaaggagcaattarttctgttcatgcacatcaaggaaggattctagtagatctttaaagatggcggtaatctcaatgaaggaggatgttttgatacattgtggtttggaactcagaaatatttcacagaggttactgaaatatataatgacaattttataaatttagtaaatccaaatattctctaggttcagcaaggtcaaatcctaggtaagaaaaatgtcccttg

SEQ ID NO: 777171 - DNA, 586 bp, Homo sapiens
ccctgaaactttctactcatgcttctggctctactctctggaccactgtagaaaaaaatactggacatgcaagacctacaaatatttgaggatacctttgctattttgcccaaagcctgtcttctttaattattcatgttggttttcatccagacctcctggtgaccattctctatgtgccaatataccttcgaagtatacagttcttcacgcagccgacctgtgatcaatatcacctaaaactcgattgttttggtaaacagtatttaatctcccattcatgtaccttgaagtcaagagacagacactgtctccataaataatgttgtagcataaatatttcctgatgaacgcttgatgctttctaatgatcgcaaatgaatactgcagagatcatagttaatttgacccaatcrtatttccttgagttctcctttcactcctttttaaaaacagaacatttgattattttcagttttattgtgtctgttccaatctgcatgacttctaatatcaaaaatgattcttcaattgtatatttaagctaatttgatacacagggcctaaaggcttaaactttcaaagt

SEQ ID NO: 777172 - DNA, 597 bp, Homo sapiens
atttactgattcctcttcctgagctgcacctctctgattatagggccaaggccctctcccctggatacaatgcttgtcaatgaactaacaaaacctttacatcagggccatttttagtaatacgttacaatggaaaaagaaaagrgagccagtgatcgagcacctgctatgtgctgcagatgcattttaatgcaccatcttctccagtcctcgcagcacgtccatgctatgatggtcctctacgcctccccactcccttgcagagctcccccattgtcagtccagtcttctgatgtgtatcaattcatctctatcttgacttatcttcattcttccatgtatttgaatctaatggttttcacattagctcgctctctcttattctggctttgataagcatgcttggatagaagagtactgtaattgccatctcactgcctgttttcctgtctctagttgtgcttgggtggttcatgccatttcaaggctctgatggttaccaccaatgcataagctcacatgtagctgggaactctggaatttcacttatcattataaaatagactttgactttacagtttaagaaatatttttcac

SEQ ID NO: 777173 - DNA, 599 bp, Homo sapiens
tatttagtgattgctaaattatgtctctctacttgttccataatgtctccagatatgtggaggcagtatgcattgaaggattgcctgaatgaaaaaaatattcgttcataaatgaataacctgaagtaagtctcttgattttctcctcactcagacccaggtagagccatattgagtttcctaatctccagaattttccttatcatcttattttgaaaaatgaactgtctttaatttctgtgaatctaatatataacaaatactaacctttgtttcaagttgaaggaaatgaatttagattgacattttttgttgtattcatccctcctgaaggcagagaaaacttctstactttatgttccttatgatgttccttcattcattctcttgtccatagaatgattgagggaatcttccactgtacccaaaattctagttaacaaacatcctatccaggactttgtaatcatcttaactccctgtttataaatcttccctaagcatgtcatttcaaaagtttgcctcagttcttcttgctagcatttaacacaagaaggccctgctcataacattagtctaggtagaataatgatggggat

SEQ ID NO: 777174 - DNA, 656 bp, Homo sapiens
ttgtatttctagttctagatccctgaggaatcaccacaccgtcttccacaatggttgaactagtttaccctcccaccaacagtgtaaaaacgttcctatttctccacattctctccagcacctgttgtttcctgactttttaatgatcaccattctaactggtgtgagatggtatctcattgtggttttgatttgcatttctctgatgaccagtgacaatragcattttttcatgtctgttggctgcataaatgttttattttgagaagtgtctgatcatagcctttgccactttttgatggggttgtttgatttttttcttgtaaatttgtttaagttctttgtagattctggatattagccctttgtcagatgggtagattgcaaaatttttctcccattctataggttgcctgttcactctgatggtagtttcttttgctgtgcagaagctctttagtttaattagatcccatttgtcaattttggcttttgttgccattgcttttggtgttttagtcatgaagtccttgcccatgcctatgtcctgaatggtattacctaggttttcttctagagtttttatggttttaggtctaaaatttaagtctttaatccattgtgaattaatttttgtataaggtgtaaggaaggga

SEQ ID NO: 777175 - DNA, 574 bp, Homo sapiens
tttcttctagagtttttatggttttaggtctaaaatttaagtctttaatccattgtgaattaatttttgtataaggtgtaaggaagggatccagtttcagctttctacatatggctagccagttttcccagcagcacttattaaatagggactcctttccccatttcatgtttttgtcaggtttgtcaaagatcagatagttgcagatgtgtggtgttatttctgaggactctgttctkttccattggtctatatctctgttttggtaccagtaccatgctgttttagttactgtagccttgtagtatagtttgaagtcaggtagcgtgatgccttcagcttggttctttttgcttaggattatcttggcaatgtgggctcttttttggttccgtatgaactttaaagtagtttttttccaattttatgaagaaagtcattggtagcctgatggggatagcattgaatctataaattaccttgggtagtatagccattttcacaatattgattcttcctattcatgaggatggaatgttcttccatttgtttgtgtcctcttttatttccttga

SEQ ID NO: 777176 - DNA, 574 bp, Homo sapiens
tttcttctagagtttttatggttttaggtctaaaatttaagtctttaatccattgtgaattaatttttgtataaggtgtaaggaagggatccagtttcagctttctacatatggctagccagttttcccagcagcacttattaaatagggactcctttccccatttcatgtttttgtcaggtttgtcaaagatcagatagttgcagatgtgtggtgttatttctgaggactctgttcttttccattggtctatatctctgttttggtaccagtaccatgctgttttagttactgtagccttgtagtatagtttgaagtcaggtagygtgatgccttcagcttggttctttttgcttaggattatcttggcaatgtgggctcttttttggttccgtatgaactttaaagtagtttttttccaattttatgaagaaagtcattggtagcctgatggggatagcattgaatctataaattaccttgggtagtatagccattttcacaatattgattcttcctattcatgaggatggaatgttcttccatttgtttgtgtcctcttttatttccttga

SEQ ID NO: 777177 - DNA, 615 bp, Homo sapiens
ttttcctttcttggttttcatctcttccctgtgggtttttttctagacatattagcttgtctatacctcaatgacaaaatctatattttcaaagttacattaattaagagagtgtgatattgatgtaggataggcaaatagatcaatggaagagaatagaaagtacatgaataaattcacctatataaggtcaactgatttttgacaaaggcaccagtgcaatttaatgggcaatctttctaagaaatgatgctagatcaactggatatatatgtgaaaaaagcattagccttgacccttacctaacaatataaaactattcacttgagatagattataaacaaatgaaaaagctaaaactatcaagttaaagcataggagaatatctttgtgacctaggggaaggcaaatgttttcttacacaaaattttaaaatcacaaaacrtgaaagaaaagaattaacttcgttttatagcagttttaaaaacctgctcattggaatatattattagaaaaacaaaaagtcctgtagactatgaggaaatagtctctctctgtatgtgttcaacaaaagattcctacaaataaataataattttaaaacaataaaagtgg

SEQ ID NO: 777178 - DNA, 719 bp, Homo sapiens
gggaggcttgtggacttgccctggacaggtcacccttctttgatcaggactgttgtaaatcagcttggcccttcctctctctgctagaaggtgaccaatcctcagggctcctcagctattgtcttactaacgagcctactttttgttatttttttctttgttattttatattagattcagaaagtatgtgtacaggtttgttacatgggtatattgcataatggtaaggtttgggcttctagtgaacacatcacataaatagtgaacattgtacccaatagagaattttttaaccctcacttctctcccaccttcctcacttttggggtccccagtgacatgctcttatacttagagaaacccaaaagattcctgcaaaagactcctagacctgataaacgactgcaatgaagcttcaggatacaaaattaacataaaaaatcaggtgcatttctatatactaacaacactaaagctgagaaccaagtgaagaactcaacctcatttacatggacatgaagatggaaataatragcctgctttaatgtgatccaaatgttcatgggaaactctaaagcagttttgaagaatcttagtgattcaaagaacatggctcaaaaactactcttcttcaggacatattgttaacccagtaattgcctgagtgattaactatgagggatattaaatccctagaacaaatcaaaaacacagtggcc

SEQ ID NO: 777179 - DNA, 719 bp, Homo sapiens
gggaggcttgtggacttgccctggacaggtcacccttctttgatcaggactgttgtaaatcagcttggcccttcctctctctgctagaaggtgaccaatcctcagggctcctcagctattgtcttactaacgagcctactttttgttatttttttctttgttattttatattagattcagaaagtatgtgtacaggtttgttacatgggtatattgcataatggtaaggtttgggcttctagtgaacacatcacataaatagtgaacattgtacccaatagagaattttttaaccctcacttctctcccaccttcctcacttttggggtccccagtgacatgctcttatacttagagaaacccaaaagattcctgcaaaagactcctagacctgataaacgactgcaatgaagcttcaggatacaaaattaacataaaaaatcaggtgcatttctatatactaacaacactaaagctgagaaccaagtgaagaactcaacctcatttacatggacatgaagatggaaataatgagcctgctttaatgtgatccaaatrttcatgggaaactctaaagcagttttgaagaatcttagtgattcaaagaacatggctcaaaaactactcttcttcaggacatattgttaacccagtaattgcctgagtgattaactatgagggatattaaatccctagaacaaatcaaaaacacagtggcc

SEQ ID NO: 777180 - DNA, 729 bp, Homo sapiens
ttggggtgcacatacatatttcagaggattactgcaggcctagccccaatctcaacatcactaagttgacagctgtctgtagttatttgttgaattcaaatgaaattatacaactgagtaaagcatagcatactactgtttactaagagtgagaccacctttccaaaaattatgacaatgacagaaagctagtcagcaaaatagctcactccattctgcttctaacctcccaagctaactcttctggatayaggccaacctaactatgggaggaatttagtttacagtttaattttaaagcaaggatgataatagccctttcccaaaactaaccccctccttgtttagggactgaaaaccacccttgtaaaactaatgaaaagcgacaaggttagaattatgggaggggcctgaattctgctaaaatgtaggagtaactaaatgataaccaaccattgtcccctagcttgcttttctataatttcttactgctcaggagccatctagccagaggtcacatgattggtaatgcccccaaattgctcctatagataacatcactattgtaaaacctaagattggtctttgagatatttttcagacttttgcattctggctactgactgactctacctggacccatgactcacaccagggaactgactcaactggtcctgtgactcctacccagaaactgactcagtgcatgaagacctcaatgatttcatc

SEQ ID NO: 777181 - DNA, 729 bp, Homo sapiens
ttggggtgcacatacatatttcagaggattactgcaggcctagccccaatctcaacatcactaagttgacagctgtctgtagttatttgttgaattcaaatgaaattatacaactgagtaaagcatagcatactactgtttactaagagtgagaccacctttccaaaaattatgacaatgacagaaagctagtcagcaaaatagctcactccattctgcttctaacctcccaagctaactcttctggatacaggccaacctaactatgggaggaatttagtttacagtttaattttaaagcaaggatgataatagccctttcccaaaactaaccccctccttgtttagggactgaaaaccacccttgtaaaactaatgaaaagcgacaaggttagaattatgggaggggcctgaattctgctaaaatgtaggagtaactaaatgataaccaaccattgtcccctagcttgcttttctataatttcttactgctcaggagccatctagccagaggtcacwtgattggtaatgcccccaaattgctcctatagataacatcactattgtaaaacctaagattggtctttgagatatttttcagacttttgcattctggctactgactgactctacctggacccatgactcacaccagggaactgactcaactggtcctgtgactcctacccagaaactgactcagtgcatgaagacctcaatgatttcatc

SEQ ID NO: 777182 - DNA, 621 bp, Homo sapiens
gtaaacaagggatcccgaatttatattttcttgtatgcattaagtgctacctttgttggactctcagcagctaggactggtctccataaaatttaaaacttaagaaacattttaacttaaagcactttaagcagcactttccaaagtttaaagtatgtaagtaaatctgtgtgagtagataactataaagaacaaactttcagccaatatcttcactttgagtggttactggggggcaaagaattagaaagccactatgtataaaattaaacatttttatttgttcatttctttaaagtacaacttattttccgagagaggaaagtactctcaccaaagaagatttttacagagagaaatcaggtcaacttgaaacttgtttgcaactctctatttgtaacaacctttgtggggttttcataaaaggattttccaagtcttttgtcttcaagaacataaattmgaggacactcttaccaggagtacatgcagtttaagtacccaaaaataagtttgtttaccacttagaatcatggagttcaagagaattttcaagtttgcaatcctgggtctctcccagggacattgagagggcagaatcgattctagttttgctaatgc

SEQ ID NO: 777183 - DNA, 590 bp, Homo sapiens
gaaatagatatttaagatataagtgaagaagtcagatttgattacactaaatatagtatgaccctatttttgcaaaaagcatagaatttttgctagaggaatacatgctatattattaacgttaggtatctttggtggtggtattataggaagtttgatttttctttttcctaaagcgaatggtttttggctgggcgtggtggctcatgcctgtaatcctgacactttaggagtctgaggcaggcaratcacttgagcccaggagttcaagaccagcctgggcaacatgatgaaaacccatttctacaaaattaataccaaaaaaattagccaggcatggtgatgcatgcctgtagccccagttacccaggaggctgaggtaggaggatcacctgagcccagggaagttgagtctgcagagggctgtgattgcatcactgcactcttgcctgggtgacagcatgaggccctgtctcaaaaataaaataaaaaataaacacagtgaatgtttttttaaaaatctaatttataatgggcccaaaacaagccaagggccacttcacatatcacaagactaaccctgaggttgc

SEQ ID NO: 777184 - DNA, 604 bp, Homo sapiens
ttaagatataagtgaagaagtcagatttgattacactaaatatagtatgaccctatttttgcaaaaagcatagaatttttgctagaggaatacatgctatattattaacgttaggtatctttggtggtggtattataggaagtttgatttttctttttcctaaagcgaatggtttttggctgggcgtggtggctcatgcctgtaatcctgacactttaggagtctgaggcaggcagatcacttgagcccaggagttcaagaccagcctgggcaacatgatgaaaacccatttctacaaaattaataccaaaaaaattagccaggcatggtgatgcatgcctgtagccccagttacccaggaggctgaggtaggaggatcacctgagcccagggaagttgagtctgcagagggctgtgattgcatcactgcactcttgcctsggtgacagcatgaggccctgtctcaaaaataaaataaaaaataaacacagtgaatgtttttttaaaaatctaatttataatgggcccaaaacaagccaagggccacttcacatatcacaagactaaccctgaggttgcaaaactcatatgccagagaatatca

SEQ ID NO: 777185 - DNA, 637 bp, Homo sapiens
ttctagtagaggaggaaataagtaaggaaaacttgcagaattttagattgtgataaaggccaaggagaaaaataaaatacacaaaaggatgggaagtgttggagtgttgcagctttggaataggtgctcaagaaagagctcctcgagaagatgacatttgagtaaagacggaaaggagatgagggattgaatcatatggatattgagggagagagcatgccagacagccagagctcagtgcccaaggcaagagagttcctggaacattgaggatctgtgaggaggagccagggcagctataatagagtcaagaaaataasgagagtggggatgaagccacgtgagaatggtgagcttgatcacttagcctcttatcactgcaggattttgcacatggcctgacatgctctgacttacctttcaatgagatcactctattatattcagaattccctgggggattgaggggttaggtgccagataggaggctattattaaaatggtgcctcagactaggtgatatggtttcactctgtgtccctacccaaatcgcatctcaaattataatccccacatggcaagggagggacctggtggtaggtgattagctcatggggaaggttctcccatgcttttc

SEQ ID NO: 777186 - DNA, 535 bp, Homo sapiens
gaacagtacaggaaagacctgcccccccatgattcaattacctcccactgggtccctttcacgacacaagggaattataggaggtacaattcaagatgagatttgggtgtggacacagccaaaccatatcagaggctgcagacagaaagggtgtgtgcagcaggtagaagcatgtgggtagcagttgagtggaagggcatctctgagagccaagggaagcctgaggcagccagaccctgtggggagatgctggagggaggggagtccctctaatattagtgggagtaggggggagagtctcatctggaaagccttcctagtggcttctytgcaagtagttctgacccttgctagtttcagggacaccactttcctctgaggtctcagtcccctcatgaatgaattagatgacttccatcacggaacacattactgcaaaaaagtgtttcaggcggacatccctcatctccctgaattctgagtgcctctgtgggtgcaatttgggtttctgagtgttttcaagtcaattcagcca

SEQ ID NO: 777187 - DNA, 584 bp, Homo sapiens
tttctattccctgagtttctccacgtcccaacctatccaaaatgctgcagtaagtgttaccattttgcctttctcaaaggcctttcaagcctgctgcacagcctatagaacacattctgaattttttagcatttcttttaaagccttccatgatctggaaaggactcactttttttttttttttaacttcaaccacttgctctcatacatggtatgttttaraataatgagcaatatttttccaaagtttctctgctgctgtgctggttcaagtctgttactccacccgtaacagtttttccccaacaaactttcttgttaaagtagatttagccctcaaaactcagtcaaacaccatcttctcttttacctaatttccctatctcttcaggtagcgatctaaaggtttgatttgtaccctacagggcacttaattctaactagagctatagttacttctccttctcaatagattactgcattttgttaatattttaatcacatacaatttctagcagagttgtttgcacatagccattgttaaataagaatatgttaaatagaactgaccaatgaggaagaaa

SEQ ID NO: 777188 - DNA, 584 bp, Homo sapiens
tttctattccctgagtttctccacgtcccaacctatccaaaatgctgcagtaagtgttaccattttgcctttctcaaaggcctttcaagcctgctgcacagcctatagaacacattctgaattttttagcatttcttttaaagccttccatgatctggaaaggactcactttttttttttttttaacttcaaccacttgctctcatacatggtatgttttaaaataatgagcaatatttttccaragtttctctgctgctgtgctggttcaagtctgttactccacccgtaacagtttttccccaacaaactttcttgttaaagtagatttagccctcaaaactcagtcaaacaccatcttctcttttacctaatttccctatctcttcaggtagcgatctaaaggtttgatttgtaccctacagggcacttaattctaactagagctatagttacttctccttctcaatagattactgcattttgttaatattttaatcacatacaatttctagcagagttgtttgcacatagccattgttaaataagaatatgttaaatagaactgaccaatgaggaagaaa

SEQ ID NO: 777189 - DNA, 618 bp, Homo sapiens
attcttgtcaaagaaccaacttctgactcctttcaccctctctatttaatgtatatttcacattatttttaatagttttctttattaccttgttctgtgtactttattggtgtatttatgctcttgctcttttgctaatttttaaaatctgacctttaccttattagttttgagtttttcctctcttccaaagtaaggatttaaggatatgaatttgcttcttcttctagatttgctagtttatttacatagaagcatttatagtattctctgatggtagtttgtatttctgtrgaatcaatgttgatatcccctttaacattctttattgcatctatttcattctcctctcttttctcctttattagtcttgctagtggtctatctattttgttgattgttttcaaaaaactagctcctgaattcattgattcattgattttttgaagagtttttcctgtctccatctccttcagttctgatctgatcttagttatttcttgtcttctgctcacttttgagtttgtttgctcttgcttctctagttcttttaattgtgatgttagggtgtcgattttagatctttcctgctttctcttgtgggcatttagtgctata

SEQ ID NO: 777190 - DNA, 607 bp, Homo sapiens
aacaaagagcttgtaaaccaataaataggcggagcccaagagctctgggccctgagcaagcctccaacactccggtcccctggacccgccttttgaactcttattctgtttctttctaactcctttgtctccgctggacttggggtaccgccgggtggtgtggggttggtttctccaacactgggactacaggtgtatgccaccaygcctggctaatttttgtattttttgtagaaacagggtttcaccatttttcctagactggtctcaaactcctgggctcaggtaattttcacacctcagcctcccaaagtgctgggattacaagtgtgagccaccgtgcccagtctcaaatagaatttgatagaaacaatgatttatggtacatctctgcttttcagaacaattaagcaaaacatatggaaatatatatatatatatgaactgaataatataattagtaagatagtgataacatgtgcttatcaaatacctgtccctgaattcagagaatgtcccttgtgattatgaaggttctctgggtaattgaaacaacttgagaataccttaggccaaaaagagaacctcaataaattgaaagatataa

SEQ ID NO: 777191 - DNA, 631 bp, Homo sapiens
tgttctctttaaatggtgctgggtaactggatatccacatgcagaacaataaaactaggcccttatctcatactgtatacaaaaattaactcaaaataagttaaataacttaaatgtaagacctcaaactttgaaactcctggaaggaaacataggggaaaagctgcatgacattggtctgagcaatgattttttttatatgaccctgaaagcacagacaaaaaaagtaaaaagagaaaaatgatattacattacactaacaagcttccacagagccaggaaatcrataacagaataaagaaacaacttacacaatgggagaaaatagttgtaacctgtacacctgataaggggttaatatccaaattacctgagtaactcaactcaataccaataaaattagtatccaattttgaaactgggcgagaacctgaacagacattttcagaaagaagatatacgaatggtcaactgatttaaaaaaaaacaaaaagtttaaccactaatgatcaggcaaatgccaattaaatctaacacatatgaggcatcacctcatatgtgttagaatggctattatcagaaccacaaaagattagtgttagcgaagacatgaagagaaagaaactcttgt

SEQ ID NO: 777192 - DNA, 581 bp, Homo sapiens
aagagagaaaacagaaactattattcattgctggttgaaatataaaattatacaaaaactcaagacaactgttaggccatttcttatcagtttaaatatatacataccctaaaacttgactattctgtttttttggtacgttatcccagagcaataaaaatatcaatgcacaaacwgatttttatagttacagcagccatgtttataacagcaaaaacctagaaacaaccacaatccatcaagaatggataaacacattttggtatcaaaaataaactactgtcaaaaacgcaacaacatgaatgaatttagaaaataatatattatacaaaagaaaccagacacaaaaacatgcatattatataattccatttatttgaaggccaaaaacaggcagaatataatttatgatgatagaaatcagaaagtgggtatcatagggacatggtagagatggactggacaagggcatgagggaaattttgcagtggtggaaactacattttgtttttggtggtagatatatgagtatacacaatcaacaaaattccttaaacttgaacaattaagatgtgtgaact

SEQ ID NO: 777193 - DNA, 620 bp, Homo sapiens
tgaaggccaaaaacaggcagaatataatttatgatgatagaaatcagaaagtgggtatcatagggacatggtagagatggactggacaagggcatgagggaaattttgcagtggtggaaactacattttgtttttggtggtagatatatgagtatacacaatcaacaaaattccttaaacttgaacaattaagatgtgtgaacttcattgtatgtcgcatatccctcattaaaaataaacaagaataattaaatataaaataattcttctggcaccaaaatatacacagtttactctcaaacaacataggttttaatgtgcaggtccacttatrcatagatttttaaaaataaatatatattacaaaaatttttggagatttgtgaccatttgaaaatctcacaggtgaaccacatagcctagaaattttgaaaaaaaagtcaggtatatcatgaaggcataaaatatttgtagatactagtttattttattatgtactaccataaaatatatacgaatctattataaaaagttatacttcatcaaatattaagcacacagttacagactagacatggcaccattcacagtcaagagaagtgtaaacaaacctaaagaag

SEQ ID NO: 777194 - DNA, 627 bp, Homo sapiens
agtggagaacaaagatctccactatttaattttacttttctggtgggcagttttgggatgaaagctcccatccatcatttcccagagacttgagtgaatttgtaacaaatatcagcagtgtatgtgaaggactttggaggaacaagggagaaaaatactttatgtttaagtgcacacacctgacagaaaagaaaaacaataagaagtaaaacaggaatataatgaaaattcagaagcaaaaagagaggacaagaagagattaaaggaaacaaattycatgtgaatcattagatgctgagggatgctgagttttttttatcatttttgaaatgagtatctgagccattttaatttaaatataaagtaagggttatcctataaagatgaagaaaaaatgtatacccagtcactaacactgaaataatttcagcattgtttcctgaagattagtagtttctaaatgtgagatttaaaacttagttatttaaatcttagttatttaaaacttaatcttagttatttcttttcaactttcaaacaaaattttgctatcacaatggagaggcacagaattacatccactaaaatgatcaaaaatttacacaggatgaataattactaaataag

SEQ ID NO: 777195 - DNA, 492 bp, Homo sapiens
atcctgatatcaaaagcacacaaagacacatttaaaaaaaaaagaaaactacaggccaatatttctgatgaatattgacacaaaagtcctcagcaaaatactagcaaaccaaattcaaaaataaattagaaagatcattcatcatgaccaaatgggatttattcccaggatgcacggatggttcaacatacacaaatcaaacaatgtgatacatcatatgaacagaatgwaagattgaaatatatgattatttcagttgatgctggaaaagaatttcacaaaattcaagaatcctttatgataaaaactctgaaaaacttgggatagaagagatataccaaagcataagaaaagctatgtaaaacagatccacagctggtatcatgctgaatggggagaaactaactgcttttcctctaaaatattgaacaagacaaggattcccactttaatcacaattacctttcatagtatttaaagatctgagtggag

SEQ ID NO: 777196 - DNA, 616 bp, Homo sapiens
ggaaaagaaagaaagcaagaaagaaagcaagaaaggaaggaaggaaggaaggaaggaaggaagggcgagtatcaaaattgaaatggaagaagtaaaattatccttgtttgcagattatagaatcttacatttggaaaaacctagagaygctaccaaaaaactattaaaactgatacacaaattcagtaaagttgcagatacaaaatcaacatacaaaacttcatggccaggcctgatggttcatgcctgtaatcccagcattttgggaggctgaggtggttggatcacgaggtcaggagattgaaacaatcctggctaacatggtgaaaccctgtatctactaaaaatacaaaaaaattagccaggcatgatggcatgtgcctgtaatcccagctactcgggaggcttcaatcacttgaagccaggaggtggaggttgcagtgagccgagatcgtgccattgccctccagcctgggcaacagagctagactctgtctcaaaaaaaaaaaaacaaaaaaattgtagcatttctgtatgccaacagtaaacaatcagaaaaaaaaattaaaagtaatcaaattagtaatagctacaaataaaatttaatatctagaaa

SEQ ID NO: 777197 - DNA, 616 bp, Homo sapiens
ggaaaagaaagaaagcaagaaagaaagcaagaaaggaaggaaggaaggaaggaaggaaggaagggcgagtatcaaaattgaaatggaagaagtaaaattatccttgtttgcagattatagaatcttacatttggaaaaacctagagacgctaccaaaaaactattaaaacygatacacaaattcagtaaagttgcagatacaaaatcaacatacaaaacttcatggccaggcctgatggttcatgcctgtaatcccagcattttgggaggctgaggtggttggatcacgaggtcaggagattgaaacaatcctggctaacatggtgaaaccctgtatctactaaaaatacaaaaaaattagccaggcatgatggcatgtgcctgtaatcccagctactcgggaggcttcaatcacttgaagccaggaggtggaggttgcagtgagccgagatcgtgccattgccctccagcctgggcaacagagctagactctgtctcaaaaaaaaaaaaacaaaaaaattgtagcatttctgtatgccaacagtaaacaatcagaaaaaaaaattaaaagtaatcaaattagtaatagctacaaataaaatttaatatctagaaa

SEQ ID NO: 777198 - DNA, 628 bp, Homo sapiens
aaaggcatccaagttggtaaagagaaagtgaaactgtcacagtttgttgataatataacagtatacctagaaaaccctaaagactcatcaaaaatgctcctagaactggtaaataaattcagcaaagtttcagaatacaaaattaatgtacacaaatcagtagctctgctgaacaccagcagagaccaagctgagaatcaaattaataactcaagcccttttaaaatagctgcaaaaaatwaccttaggaatatacctaaggaggtgaaattccactacaagaaaaattacaaaatactgctgaaaaaataatagatgacacaaacaaatggaaacacatcccatgctcatgtatgggtagagtcaatattgtgaaaatgaccatactgccaaaagcaacctacaaattctatgcaattctcatcaaaatgccaccgtcattcctcacagaactagaaaaaaaacttctaaaattcatatggaacgaaaatagagcccacataggcaaagcaatagtaagcaaaaagaacaaatctggaggcatcacattacccaacttcaaactatactttaaggccatagtcaccaaaacagcatggtactggtatgaaaaataggcacatagaag

SEQ ID NO: 777199 - DNA, 600 bp, Homo sapiens
acataataaaggatgaaaacgatattatttcaattaatgctgaaaatgcatttaataaaattgaatgtgacttcattataaaaatcctcattaaaatggaaatagaaggaacatctcaacaaaataaaagccatatacaacagacccacagctagtattatactgaatgagaaaaacctgaaagcctttctctaagatttagaacatgacaaggatgcccaccttcacacctgttattyaactagtactgtaagtactagctagaataatgacaaaagagaaagaaatggcatccaaatttgaatggaagaagtaaaattatccttgtttgcagatgatatgatgttatatttggacaaacctaaagactctaccaaaaaactgttagaattgatacacaaattcagtaaagttgcagatacaagatcaatgtacaaaaattcatagcatttctatatgccaacagtgaacaatcgaaaaaagaaattttaaaagtaatcaaatttataataaccaaaaataacattaaatatctagaaattaccttaatcaaatatgtaaaaggtctctataatacaaaatagaaaacactgataacag

SEQ ID NO: 777200 - DNA, 580 bp, Homo sapiens
caatcgaaaaaagaaattttaaaagtaatcaaatttataataaccaaaaataacattaaatatctagaaattaccttaatcaaatatgtaaaaggtctctataatacaaaatagaaaacactgataacagaaattgaagaggataccaaaaaatagagaaatattccatgttcatggattgaaagaatcaatattgttaaaatgtccataccaaccacagctatctacagatttaatgtaatccctatcagaataccaataacattattcacagaaatagaaaaacaaatcctaaaatttatatggaaccacaaaagacccagaayagccaacaatataacaagcaaaaagaacaaaactggagaaacacattaactgacttcaaattatactgcagagctatgctaaccaaagcagcatgctacaggaataaaaagagacatgtagaccaatagaacagaatagaaaacccagaaacacatccacacacccactgtgaactcacttacaataatagtgccaagaacatagactggtgaaaagacagtctcttcaataaatggtgctgggaaaaccagat

SEQ ID NO: 777201 - DNA, 373 bp, Homo sapiens
tcactccccactggaaatagcctcctcacccacagtggtatctaccttttcacctctgtctgaggggatcaactctgtattgcctgaggaaatggtaatggcctccactgaggcagttgccaagcaagacattgmtgattctctgcagaacccactcacatcacctctctttgcttctagacttataactatactcaagtcccagaaggcccttaaagatgacgtacaaggtgtgacccatgaagaggtgtgttacacttcaaaagaaccacttaagtttttttttttaaatttatgtaagcagaaacccagggaacatgtgttaagatggatattaagagtgtgggataatggtggaagaagtgtaaagtcg

SEQ ID NO: 777202 - DNA, 373 bp, Homo sapiens
tcactccccactggaaatagcctcctcacccacagtggtatctaccttttcacctctgtctgaggggatcaactctgtattgcctgaggaaatggtaatggcctccactgaggcagttgccaagcaagacattgctgattctctgcagaacccactcacatcacctctctttgyttctagacttataactatactcaagtcccagaaggcccttaaagatgacgtacaaggtgtgacccatgaagaggtgtgttacacttcaaaagaaccacttaagtttttttttttaaatttatgtaagcagaaacccagggaacatgtgttaagatggatattaagagtgtgggataatggtggaagaagtgtaaagtcg

SEQ ID NO: 777203 - DNA, 680 bp, Homo sapiens
catgagtacacaatgtttggcttccacttataagtgagaatatgtgttgtttggttttctgtttctgtgttaatttgcttagggtaatggcttccaatgacatccatgttgctgcaaaggacatgattctgttacttttatggctgcatagtatttcatggtatatatctgccacattttctttatccaatgtagtattcatgagcacctgggtggattccatgtgttggatattattaacactgctgtgagatacatataagtgcatgtacatgtgactttttggtagaatgatttattttcttttggatatataaccagtaacagaatagctgggtcaaatggtagttctaagttmtctgatgtatctctaaactgttttccacaatggctaaactaatttacatttccatcaacagtgtataagcattcccttttctctgcagctttgccatcaccttttgatttttgactttttagtaatagccattctgactggtgtgagatggtgtctcattgtgattttgatcaacatttctctgatagtgatgttgagcatttttcatgtttgctgactgcttgaatgtcttcctttgagaagtgtctgttcatgtcttttgcccacttttgaatggaattattatttgctttttgcttgttgaatctttaacttccttata

SEQ ID NO: 777204 - DNA, 503 bp, Homo sapiens
aacagacaacccacagagtgggagaaaatcttcacaatctatagtctgacaaaggactaatatccagaatatacaataaactcaaacaaataggtaagaaaaaccaagcaatcccttcaaaaactgggccaaggaaatgaatagacaattctcaaaagaagatatgcaaatggccaacaaacatatgaaaaaatgctcaacatcactaatgatcaggaaaatgcaagtcaaaaccacaatgggataccatcttactcctgcaagcatggccataataaaaaaaatcaaaaaacaatagacgttggcatggatgyggtgatcagggaacacttctatactgctggtgggaattaaactagtatagccgctatggaaaacagtgtggatattccttaaagaactaaaagtagaactaccatttaatccagcagccccactactgggtatctaccctggctgtattaggtcagaggaaaagaagtcgttatatgaaaaagatacct

SEQ ID NO: 777205 - DNA, 503 bp, Homo sapiens
aacagacaacccacagagtgggagaaaatcttcacaatctatagtctgacaaaggactaatatccagaatatacaataaactcaaacaaataggtaagaaaaaccaagcaatcccttcaaaaactgggccaaggaaatgaatagacaattctcaaaagaagatatgcaaatggccaacaaacatatgaaaaaatgctcaacatcactaatgatcaggaaaatgcaagtcaaaaccacaatgggataccatcttactcctgcaagcatggccataataaaaaaaatcaaaaaacaatagacgttggcatggatgcggwgatcagggaacacttctatactgctggtgggaattaaactagtatagccgctatggaaaacagtgtggatattccttaaagaactaaaagtagaactaccatttaatccagcagccccactactgggtatctaccctggctgtattaggtcagaggaaaagaagtcgttatatgaaaaagatacct

SEQ ID NO: 777206 - DNA, 548 bp, Homo sapiens
tagtccttcctgtgggagcctgggggaaataagtacaatttccttaatgctccttataattgccagaacttactttccaaagccctactttccgaaagcatatttgtctctctttttttttaatcttcaccgggtattgaagaacagaaattttccccaagatggccaactactaaaagggcttaactactgaccaagccacagaacaattgctaagccagaactccctgccctacttagttaccaggctgtctacctcaawctagagccttggttaaagacatgaaaagccaggagaatggtcagtgttacaggatttgagaaagttgctgattgaagggatgagcaaaaatgaggaatgatttctggggcccttacgaagaaattcaaattaaacttaccgatgaaggaaaatatgttcacagagaggggcaacatatcctgaactagacaattctttttgttaattgctgtattcaaagcaaatatttaatttgctgattgctctatgcaaagtaaataaagaatccccttgggcagggaaggga

SEQ ID NO: 777207 - DNA, 541 bp, Homo sapiens
tgaaatgtatgggatccaggaaacaaagattccagtgcagagaaaggcagtggaatctacaagatgatagtaaaggaagcttctaggacaataaatagcacacagcttagtctagactagagcaaggcgaaaagagattctggaggggtgtacctaagaaaaaagttacctggtttgtttaactgaaatcagagaaaaatgtaccactctgtccaagacttggggataagctagaacaaaaacagaaaactaagcaaacgaaaaagagaaggagagttaccaattccagagagaacaatatagtatgcaataaaggaaatagtatcatattgtayggcttagctgtaaaaaatatttacatagtcataaactttgaatattggtctaagtaaaatgaagatggagggaggaaggatgtggaagaaaactgaccctcatcatcacaagtaggaaactaatagataatacctaaagctgaaaagaaggatttttaatagtggtgtaaggatgtttctcaaaataatgatcacaaatactagaa

SEQ ID NO: 777208 - DNA, 627 bp, Homo sapiens
agcactgcttggatatgcattatattcagccaagcaataactgaacaaattcctctcttaaatttccccaagttcaagaatatggctttgagcatgccacagctttataaaacagccgagctgtaagtatgcaataatcgctcatttcctggccattaattcagacatcatgcaatcacccaaaggcatccattttcctttgctgctattttgggactgctgtcctattgtcatccctgcctcaracctctgacttaggcgtcttttaattagagccagtgagaatgacaggcagagtcagcccgctgagggtgatccatcacacagctctctttgctccctggcctcttagatgactgtttataagcaggacatcttggatatcaagatagctgcttaaggaaacagaagaataaatggtgaccatcttgtaagctactttcctgagattataaactctagtctagggctgtatttactaacacggtatgtaggttaaatacccaaataaacttttccagtgataattctttggaagatgttttatatctgagcttgccctcaaatgaactgatgccataatctaagagttgcccaaggtattaactgatatacttacaatttaac

SEQ ID NO: 777209 - DNA, 619 bp, Homo sapiens
ctgggttcatctccatggttcttctgcttatcttgcctcctggagtcacctatgtggcaattgattggtgggttgcttggaggctggctggtggggaccatctcattcatatgtgagtgaattgctggaacagcttgctgtctgggcctctctacttggccttatcctcaaggaagctagcttgggctttcctatatggtgatagcggtgtttcaraagagtgagagtggaagctgcaagatctcttaaggcctgggcttggaagcctcacaacaacacttctgttggtcaaagtaagtcacaagcgcagccctgattcaaggagtaggaaaatggattccatctctttaagaaaagagctgcaaataattcatggccctgcttcatctacgcaggtaggaggagtcagtgttagagccattggcccctataaatgtgggctgctgggatgtttctttaatgtcaggtgaaaattcactttgggaaaggagttgcaaagtgagcccaggttatggtctttctactgtcagatcaacccttggcaataagctcctgcactcttgccagatgatttttctaagattcaactctgattgtatcactctcaagctcatacctt

SEQ ID NO: 777210 - DNA, 593 bp, Homo sapiens
ttgaacttcttttttttttttgagaaagggtctcactttgtcactcaggctggagtgccatggcatgatcacaactcactatagcctcaaactcctgggcttaagtatcctcccacttcagcctcccgagtagctgggaccacaggcatgtaccaccaagcttggctgatttttaaattatttttgtagagatgtggtgtctctctgttttccagattggtctccaactcctgggctcaaacagtcctcctcccttggcctcccaaaatactgagattacaggcatgaatcaccatgcctggcctgggcttgaacttctggttcttcaaggaaaagccctagagaagcattcccagcctagggacatacataaacaaagacagcagtgggatttaactttggaatatagacactgcaaccttaggaactttttagagtatcgtggggtttaamcaaacaaaaagaaaaaactagcagtataggcaaaaggagtgaagggtcagcagttatggagtaaaaatacaaagacttactgtttgtagagtgcctactctcagtcatactctctactagcatctgaactatggagtcag

SEQ ID NO: 777211 - DNA, 610 bp, Homo sapiens
aggacctattcggtcttctattgaaattcgtggtttactctctcttctccagcagtccacaggcacccagctgcagagttctcccgaaggacgacctgtgtgtgcctcctccagggcacgtctgtggccaaccgggcgctcaggagcctgtggggtggagtccttctccgtcctctttggccctccctctgacactctccgcaacctttgttttggattttcctccctgtaagctgtcgctgtttcccgtgtctctgtcgccattccctcggtggccggtgcgcaggggataccaacgcagccgttgcctggggactgggccttgtgcggggccggtgctgcgggctgagagcgaggcgggcagccccaacagtgygaggaccggctggaaaggttgaaggagactcagattgccaacggggcggctactcttgctgcaaagggaacgaggacccgggctctcccggcctcacagctgctcccctcctggggattggcccagcctgcacggcctgagctgcagactgcctggagcagcttccgccgatggccgggacacggcctgccccctccccacagcggcgcttctgtccacagcagccgcccagcg

SEQ ID NO: 777212 - DNA, 622 bp, Homo sapiens
tgcctttacattttgtgctaaaatagcagctatatattaatgacataatagatatgtccagtattatttaagggcctatttcttcatatttttaatcaaagttttttatcaatgattataatgcattttctttaaaatgttattgctatcactgtattctagttattcaaactttgttgtcttcaatagcaatgacacaaaatcaatctagttgcccatcagtggtggattggataaatttgtggtacctatacactatgaaatactacacagccaaaaaaaattacgttctttgtaataacattgatgcagctgagagccattatctgaagtacattacaacaatacagatcaccagatactgcatgttcttacttataagtgagagctawatattggtatacattggatataaagatggatacaatagatgctggagaccactagcggaggatgggaggaaagagacaaggcctgaagagctacctattgggtgctgtgctatctacctgagtagtagtagcaatatccactacttagcatacatagtatacagtatgatcgtcaatgtatattgcagtatattatgctgtgtttgttgctgtgtagatgttgccctatg

SEQ ID NO: 777213 - DNA, 421 bp, Homo sapiens
tgaaataagatttctatctttattttttcatttttgctgaattatggcgattgtgataagactgtaatagtttctctgagattttctccttggacaatcctgttttctgtgaatatagttttatttcagcttttccaatctgtatgcctttttgttttgcttttgttttgccttactgcactaactagcacagtgcattgttcaatgggaatgaaaaaatggatgttcttaccttgtttgtggtmtcttaaggggcaagtattcagtctttcaccattaagtgtgagagtaggtttttgttgatgccctttactgagctgaggcagttcccttctaatcctggtctgccgagtgtttttttttttttttaaggtcatgaatagatggtatattttatcaaaggctttttctgcatccatcg

SEQ ID NO: 777214 - DNA, 612 bp, Homo sapiens
tattcggtttactttttgttgaaatctgtagaggaagtcaaggggaaactgatatcagacgtattgagaaaggtataattttcaactgcatggtacccccccctacataaaagttaggagaaaaaaagtccttcaggttttggttagtatgaagaattgtcctacaaaacaccagcttccatttgcctagatcctatgttctgtacagggatttttgatgataatttatgatgactctattaaataatagaatctaccaaaaacaaaaactaggattttgattggatttacattgaatttcagggttgttttagagagaatcattatttttacaaaattaagtctttatatccataaatgtgtcatgctaccatgtttaggctttttctaatgtccttcattgaagtttcatgattatctccatggagttcttgaccatcttttgttgattatgttcctgtgtgcctgttckctccatttctatttattataaatgatatttaattgaaatttaagatttttgctgtaaaaaatgttctcatgtatggaatccatctagtaaaatccttttgagctctcttattctaatgatctttctaaggatcctttgta

SEQ ID NO: 777215 - DNA, 659 bp, Homo sapiens
ttagaaagcctgatttgctattttctaggtgcaattagttggctttttcatcctttgggtattgtctgtccaagctttctacttcttgaatctatttgaataatccacagtttcctagaagataattgtgttatttgaaaaactttgtagaggacgcctcatcctacaagtttatgttctgtgtgtgtgtgtgyttcctaaaccatattttgtataaacatgttgctattagttaaaattgataaatatgtttgtgagtataggctatctaaagataagaatacttcatttgtaaaagataagcatttgctatgtacttaagatgtaaacctctaaaattttaattatgcttatgtaaaacataactcataagcaaaagatggaacttgtttattaggagtgtaaaggcactaataagacaatgtgatcttgagccaactgagtgtaagccatgtttaaaaagtgccttccccagttatctcaaatacctaacctgtcacaccagcaataaaaaattaagcattgcctttgcatcctcatagcttagctcccacatatgagtgagaatatgtgatgtttggttttccattcctgagttacttcacttagaataatagtctccagttccaaccaggtcactgcaaatgctattatttttt

SEQ ID NO: 777216 - DNA, 498 bp, Homo sapiens
cacaggcaactgggatccatgaaaacatgcgtaatctcaagacacaagacacatttttcactcgtcagtttggcaaaaactgtgaattatgaaaatgtttaggattggtggggtgtaaataggtgcagcatttctggagggcaattcgtccatagctactaatgtccccagtgtctagcaacatggaaaagtgtaaataaatgatccctattcggcagtttagaaatgaggtcgtcctatatgcawtaatatggattacattgctaagtggaaaaagcatgtcacagaagcttgaatccatgggacacttttcatgtcatccatttgtgttaactcacagatgaagctcaaattacacaaaagtgaattaagcagaagccctcaggagggacgtacactggagggttgccctgtcatctccagggagggccccaggcttggtagcggagagcaggtggcctcacgaggactgctactgcatttgaatgatctccctgc

SEQ ID NO: 777217 - DNA, 578 bp, Homo sapiens
caaatcaagatacagggacactcttcatggtgcctaaacatttcccaaggctctagccaacactttcccctactacttgttcctcgcagccactgagctgttctctatctccacagttttgcctttctagaatgtcatataaaagttcagtgggctgggggtcgtggctcatgcctgtaatcccagcactttgggaggctgaggcaggtgaatcacgaggtcagsagttcaagaccagcctggtcaagatagtgaaaccccatctctactagatatacaaaaaattagccaggtgtcgtggcaggagcctgcaatcccagctactcgggaggctgaggcaggagaatcacttaaacccgggaggtggaggttgcagtgagctaagattgcaccactgtcctccagcctgggagacagtgcaagactctgtctcaaaaaaaaaaaaaaaaaaagtccaatggatcatttgaagtctgacttatttcacttaacgcatctgagagttattcaagttgttgtattgaataatggcttgctcctttttactgctgagtagttgtccattgtatggatacacc

SEQ ID NO: 777218 - DNA, 591 bp, Homo sapiens
ggcttcagagacagcacttcagatgatgccggggtgaacatctcagacacgctcctgaagatgggaggggagatctcagcccagagccgaaggtgtagacgggtctgatgagtgggaagacaggaagggaaatgggaacttcacttggaaaaggagagatgccacatagttccgaagggcagggcactggccacagactgcccttcatgcccagctccacaagaaaccagggacccggcagaggatcagattccacacagggaccctcactgaggttgcacacacattatctcagtgacctttccagcccctacaggacttctggggaatccgaagccggatagctctgcacagccacccaccggtgacacaggcgtgcccacaaaacagtagagggccatgaattgagggccatggaggcttttytgaatcactgcccctccccagaggcccactgagagctttccaagctgaacatgaccctctccctgaataaggcagatcccatctacactgtggatgccagaaaaagaatcaatcccatggcccccggggacccccaaccttttggaattcatgtccttgtacaag

SEQ ID NO: 777219 - DNA, 616 bp, Homo sapiens
attttccatacaaacttgctgatggttttctaaggcaggaagcattgctttattgagagtgaggaattgtaccctttgaaagctgccccctgaaaagggagtggagagagatggctccagttggagttcaggatgggggtatctttcagtgaacttggggggagggctgagtggtggagcttggggctcatgtcccaggccttctctggtcaggaaagcagagttgaaaagggcccttttaatctggagggcccagaatggtccagccagttgccccggaaaggaagcctcatgtggcatgcrtgccagacgctgcacagcttgagttggtcctatgtgtgtggcacagccttacaaggttgaggtatttacctttattcctataaattgatggataaggggggttaattgatttctcttggcacttggcaagaacagaggtcagatttgaacctaggtctaggtttcagttgcacacccagcatgttctgctccacagccttttcctaaaatagtttagatgttggtataaacctgtgcgtactgaacgtgcctgaccgtgtgctagtatgatggcttttctacagtgtctccctagactccatgcttgcagacc

SEQ ID NO: 777220 - DNA, 594 bp, Homo sapiens
tcagttcccccataaaattaatattgagtaatagttcctagggagccacacacaagcaggtgaacgtgtgctcgcatacacacgcacaaacaatcacccataagaacagtgcagctcctgctgtacctagattgtttgcagactaagagaagcaactgcagaacaaattctggttctcactctgcctccataaaagaggtctggattagaggtgctcctcagttatttagagctggagcaaacagaaggcctaactgtgcagatgaacttctcattcttttatatgaggcagcaaaataaacaccttaacacttcatggttcccagagtgcattagttamtcggtccaatatcattctaattctcctcgtagttcattgaatttgagcctgttaggagataaaatgtatctttagctactatgtacttattccaatgactctttggttgatggatgactttctgattttttgaaacaatgccagcccagggccttgtggtggctgtacagtgcatgagacctcttgttgtgcttcggggtgcgggctggaagggagggagggaggaaaagagggaaggagggggctctgctgta

SEQ ID NO: 777221 - DNA, 656 bp, Homo sapiens
gtactgtaaaattcatgaaacatggacacactgatgaatgtaatatggtcctgctttaatgattcagaagaacatcaaggttatgctttaaggccataattttgagcaacagtcttaactgcagtagaaatatgtggatgatggctaatagaaaatctccattaaccaacagctagactggaagggactagctctttttcccttcacttaaaagttaataaataagtgaattgggatggcaattaagctcaccctttttgctttatacgccaatatttctgtacatgattgtagtctctgggtagggttgaggatgctgtatcagagaccacgagaggattttcctggtggcacaacttcagggccaacattgccctgggaatttttttctcattctccatgcatctccaraaatgatgcactcattctggagaaaaggatattatcacctctacagagatataagatgtattgctttaatgctcatgcagtttggatgggttgggatgcttagataaaatactatacaaaaatacaaaacagtgctcattggaatttcaaatcatctcccctgcacccttttaaactactttatatttattggttatgtcctgctggggccattagacctttgattgtatagtgtttccttttta

SEQ ID NO: 777222 - DNA, 661 bp, Homo sapiens
agcagatgcaaagaaatattatcctttagaacccatttgatcccttttttaaacccaagaaaacataaatgcaacaatagatcaatttgactgtaaatattatctaagtatgtcctttaaaagccaaaggaatgtcagatacaatttattttccaccagtgcaagctgagacattaagtggcaattctacttccattagctaaatctggcaaatatgcaactgtttaaaggcattgtcgatagccattcacaattaagtatttgtactgatgccttattaaattacccttttcaagtaggcataataaactaggagttcactgtgcagattttcatggggaaagtcagatcastatggaatttatttagagagaatttagtgcactgagtaatgaagtaaatgtcaaatgttttgaccaaataaatcttatcttccttaaaacttttttttgaggtcaagagacacagcaaaataaaaatcccagtgattataatggtcataatttataactttattgaaacaactttaaaactttgattgttttttaaataatgaaatctgttttctttttaactgacagcattgccctacacaggggatttctactcttcctttacaaagctggtttcttccaaacattaagatctcttacagggactg

SEQ ID NO: 777223 - DNA, 508 bp, Homo sapiens
atttgctgactgcattgtgctgaagtaaaattacaagagtgcattaaaatcctttgtaaagaaggttgaagacattacaaaaatgcgtgggcaccttgggcattaatatttgattcaatatcttttagttgcatatggcatattttgatggaggaggcgtgtacagatataaatacaaattggagaaccaccagggccactgctagctgyctataagactcctggctggcgggatccactcagcctcaccccatacacagactttctgaggccatattctgaagtaaaaagaatcaagggagacttttttctgtctactccattgtttataaatggaaacttccatccctcttcaggaggagctgggaacgtcatgcaacaaacaaccatatcacaccacacccagtaagtattgctagagcacctgctaaacatctactaagtccaaagtcctatgttcagatactgacatgggtgacaaaaagaaaagcttagtttctactcttca

SEQ ID NO: 777224 - DNA, 508 bp, Homo sapiens
atatcctcatgtgttagtggaataggtttatccagtggctttgaaggataccctgagtattttgcacgttatcatgtgtactaggtataatacttttgaaatagctccttttaatgctcttttatcagatgccttcatccatacactacatcaccattatggttggggcaggagtatgtaatttaaatgcaacctatgaatggaggagggtaggacatagggatgttctatcctaactggaagagtggagagaaagcccactgcycctggatctagggaaatgtagggagaatgagtgggtcagaggcagagtggagaagtcagcatgttctgaaggggcccccttcagtgaggaacacttatgattggcaatgggatgatgctgtgtagacctaaacctcctgtctcttctctatggttaaggcttcctctatacccaaacaccattttgaagtaggaggaaatctgaaatactgagtctttaaaccaaataagatgactgaatcgc

SEQ ID NO: 777225 - DNA, 631 bp, Homo sapiens
tacatttttgtatatatgagagtgtgtatgttaatttttgtttgagaaatctttcctgattgttggattagacaggagcaaaaatcaccttaaacttgaacttccttgttttaagactactttttatggtctttttagtgaagtaactacagatcaggtaaggccttattgtcatggaagaaggctawaccaagacttttggtgacttgagtgctttaaaagcaatctgttttaactctatgcctattgatgagcagattctaagatttatgtggaaatgtaaaccacctagaatagctaaaacaaatttgaaaaaaaggataacttgtaggattttcacttcccaatttcaaaactcaccctaatgctgcagttattaagacagtatgatactggataaggatagatgtagaccaatggaacatattgtgaatccagaaataaatcctgtatttagaatttagacttttttgtttgtttgttttacaaaggtgtcaatgcaattcactgggaaaaagtctcctcaacaaatggtgatgggacaatgggatatccatatgtgtgaaagtgaacttagaccctcaccttatacatgccatatacaaaaatgaactcaaaatgcatcacgaac

SEQ ID NO: 777226 - DNA, 435 bp, Homo sapiens
gagaatcacttgaacctgagaggcaaaaaagattgatttaaattatcatgattgtgttcattactcacaatattggtaccccagaattgttctcacctatttattttgacagcacaaacttggcctaacacatgaatttatcttcatttgtttyttttattcttccttagccaacatcaggttttgctgacctgcttgtttcatgttctgattttctgaattaggatgaaatttcgttactctaaacctgtctctctcccatatgggttacaatagaatccaccactttaaacaatccccaattggaataagaaaatcctcataaaccctgccttcttagagtgtgtacatgggacctcattctgtagattttcattacttcttgttgtgtttttttttattattagttttttaaaaaacaggaggagaaagaga

SEQ ID NO: 777227 - DNA, 659 bp, Homo sapiens
atgctcctgggccctctcatgtcaggtagatggaaagaatcttagtagaggaactctttgaatctgatacttgggtgaattgcttggcttttcttcatcagtcaatcaagcctccatccaaaaccaatgtctttaaatattgacctgttacttgggaacagtaagttgtcattgttatcattattatggtagaggaaaattttattcttcttgaggagttatcaagaagcagtttggcacagggataacagatagatgttggagtcagaagggaatgaacctctgaaacagagatacaactcagtacattagctgtgagcaccaccaattcactgctctgttattatgactccacctccrtccattaaatgcatcttactataccatattcactgtacacagcacaatgattaagaagataagctttgaagtaaaaccaatttgtgtcttaatcctcattctgtttcctgcaggttgagtccctcaggaaacactgagacagaatttagcagggaagatatttataaaggagtggctttgagatcaatatcatggagtaaagaggagagagtaagagtgggcagagagaagttgcattgtggccaaccttggctaagctgtgaggaggtttctgcagctaatatgacccttcatagtgg

SEQ ID NO: 777228 - DNA, 469 bp, Homo sapiens
ggccaagctctgcttcacttaactctcagccattgtttggaatcagcagaaacctctagaggaaatgccactacaaatgccaagcttgcattctggtttccttcctttcacagatcttaattttatgcttttcctagactttttytcaggaggaacatttatctgaataacctaatctgcaattgctagaagtgaaaatctcttctatttaattcttgttttcagggaattagagataagaaatagttcatcgtcaggtgaaaaaaaaaaaaaaaaaaaaaccatgagtaacagctaatgatggttggagaattagggcccaaaaagatagtttgagactagaacaataagcagattttaacagtaattctaaatttctaaggatcggtaatctcttagagaatctgattagagttgtggagccagaaaaatacacatggatacatttgccaaacatattaatataatt

SEQ ID NO: 777229 - DNA, 608 bp, Homo sapiens
atgggcggccaggcagagacgctcctcacttccaagacggggtggcggctgggcagaggctgcaaactcggcactttgggaggccaaggcaggcggctgggaggtggaggttgtagcgagccgagatcatgccactgcactccagcctgggcaacattgagcactgagtgagygagactccgtctgcaatcccggcacctcgggaggctgaggctggcagatccctcgtggtcaggagctggagaccagccaggccagcactgtgaaaccccgtctccaccaaaaaatacgaaaaccagtcaggcgtggtggcacgcctgcaatcccaggcactcggcaggctgaggcaggagaatcaggcagggaggttgcagcgagtggagatggtggcagtacagtccagcctgggcttggcatcagagggagaccgtgcaaagggagacgagggagagggagaagggtattttttttattctcttttatttttctactttatttttgcaaaaatatagaaatatttgattttaataaagtttagagacaaacctgtagaactcataggagttattggttctttgtggtaattataacatttgcaatcactcatc

SEQ ID NO: 777230 - DNA, 654 bp, Homo sapiens
aaattagaagcagataataaatattgacccactaaatctcttcttaggagacaatgaaacattttaagatatttaagaatgatgaattaacttatagttgatagaatatttattatgccatggtccacttggatgagcttgcctgacacttgaatctgtttgtccttcaacacaagactggtcagtggatcctaatgtccttaacattgaaagttcccaggaactttgaactctgtttgctcacagcgccagtcttcattgtctcttcttccctgtcttgttctccctgctgccacccctgtggcatcctgggatcacctcccaagccaattatctgcgttcagttgtctgtctcrggtgtccttttcaatgcctcccaatttagtcacacagtctttacttcccttctacagcctgtaagtgtcttggctttctgagaaattacctgatgaagaaccaatacattaatccaggttttccttgcactttgtgtattctgtgttgctacttggttttcccactggcttcctgactacccaagttcaatctttgtgttggcagctcagtttttgttttaccagttcaagccaaaactaatattggaccatacataaggttctgagaaaatgctttgttatgaataaagatgtataa

SEQ ID NO: 777231 - DNA, 615 bp, Homo sapiens
taagtttccggctgctgtacattgttgccagcatttggtgttgtcagtattttggattttggtcattctaatagttgtgtagtggtatctcattgttttaatttgcaattccctaattaaatataatgttgaacatttaaaaacatgctttrtgccatctttatatcttttttggtgagatacgtattcagagtttttgtctactttttaatagggttgatttcttactgagttttaaaagtcctttatatattttggatataagttcaatttaagatacatgttttgcaaaattctctcccagtatggtcttgtcttctgattctcttaacagtatcttacagaaaacggcagacattcatatttttaatagtttatttcatggattggttttttgtattgtatctataaactcattgccaaggagaaggtcatctagattttctcttgttttatcttctaggaattttatgttttgtgttttgcatttaggtctaccatccattttgagttaatttttgtgaaaggtatgaggtttgtatctagattcacttatttattttatttgtaaaaattccattgttccagcaccacttgttaaaaagcatcttttct

SEQ ID NO: 777232 - DNA, 631 bp, Homo sapiens
tccagatgcaggtatggacatattgacatatagtttagtttaaaaactagtagatgttgatgtcaggaagaacctcctgaaagggaagcatcaagatctttggtcatttgtgatttcttctttcacagaataaaatacctgtgacttagcacactaaggctgtaagatatatttcacacgcacaaggctgctttgcagctgcaagccagttggtgttgaatgtggatgactgtatgaaacccactgaacctttgagatggagactctcacaggggagcctcctagtcagagttaccacaatttatgatgcctgagttgagcgaaaagggaaaactggtgctttattaggttgtctctgtttcggttattgccayatagggaagttaagatgtggaattcatatttacttcttggcacaatgaaatttaattgttcaccagcatcagacattaacagaagtggttttggcatcttgaggactttagccctgtttccctggtaggaggtctgccaatgactgttttttctgacaagctctgagtgcaaaaggaaggcacccatgtagctttgcacaggtctttccagccaaataatagcaatgacttataataacaactttttgaaagattac

SEQ ID NO: 777233 - DNA, 613 bp, Homo sapiens
agcattgtcaacattgcctgtgaatctgtcagaaatacatattcttagatctcaccccagacctcctgaaccgggaactctgggaggtagtgctctgaaatctatgttttaggagcctccatatgattctaatatacccttacattgaaggactattagactattagattatctttaaagtcctttctttagttctttgctttccagataatgaaagactttaatagaatgaaagttgttcccaaagaaattttgtaaatagaacatcatggcaacatttatgagagggttttaatactatcttggatatttaatatatggtgatttgaaaagaatacaaaatttcattttgattatcagcctctcccattggctggcaatmttgaaaatgtttgaaaagttcctgttctcattattcatgctattcaaggcaaaattttccctccagtgtgaggagaatgaccaaatccaagtgtacatttctctattactattcttttgtgttctttgaaataatagcctgataatttatatagattgagaattaaagtttcatccttgtctgtaaagagatttaaacccacaaaaaacttgaatcaacagaaccactgtc

SEQ ID NO: 777234 - DNA, 432 bp, Homo sapiens
cttacttgtccacactgacatgtttgttagtgtattccaatttcattagtccaatggaacctttttaatgtcctttcacctggaaactttctggtctagtgccttgtggttttgctaatgaaactcttatcttgtccagccattgataccctctggcattatttatttaagctagtttttctttattatattcattacaatcagaaatctaagtatttyaatcatgttcccactttattatgtttatatgagcaacggcgtttctgaagacccctaccccccaatagcactccttatggagttctaaacaatttgaatatttaaaaaagatggaaagtgtagatgaataaacaattatcatccttgattttgtctgttctgctatgttttccatttcagtaatgtggaaaatcttacacatattggaatatg

SEQ ID NO: 777235 - DNA, 591 bp, Homo sapiens
tcctaggaaatcccggccaggctggctgcctcacttgcctcttctttcatgcctcaggtgttccctgtcatatctctgctgaattccagggttcttagattctctattcaaattatgattatccacttgctgttttggtccttctgggtggagaaggggagtcctggatgtggctagtcagctctctcgaacactccctcaaccataacttttatttaaaatccatagtgatttgaattgttaatgccctagaggtagggtttcagtttctgtcttggtctatgttgtgttgctataaaggaatacctgaggctggttaatttaaaaagaaaaggtttatttggctcatggttctgtaggctctatgggaagcatggcgccagcatctgtttctggtaaagacctcagaagatttcattagtggtggaagaagaaggaagaaygggcatgtcacatggcgagagagaaagaacaagagggaaggaggtgcttggctctttgtaacaatcagatgtcatgggaactaagagagcaggaagtcctcattaccagggaaatagcaccaagccattcatgagggatctgccccca

SEQ ID NO: 777236 - DNA, 472 bp, Homo sapiens
gaatatatgaggctgggtgatttatatataaaagagggttattttgctcacagttatgtaggctgtacaggaaggttggtgatggcatctgaatctagtgagagactcaggctgtttctactcatggcggaaggtgaaggggagccagtktgtgcaaatcatatggcaaaagatgaagcaagagcgacagagtggagatgccagactctttttaacaattggctctcaagagaactagcagagtgagagctcacttatccccaacccagggaaggaattaatctatgagaatccaaccccctcataactcaaacacctcccattaggccccatctccaacctcaaggaatcaaatttcaacctgaggtttgggaaaacaaacatccaaaatatagaatattgcttttcaaatcttgtttttcctcttttcttccacctagtaatttttcgaagtgcattagttaagcctctg

SEQ ID NO: 777237 - DNA, 545 bp, Homo sapiens
aaatttaactcttatctgaggtgaaagcagcactctgtcatcataatcttctggtttagaaacaaccaggggtgctcacaaggccagactgatataggtacttgctcacaggcagaaaggctagagggtctgggcctgctgaatcaggcattggttgtcttattctgggtaacattctyttcctcttccatagtaatagtctttggtaatcagtctttgttacaaatgatctttgtctttaataatttccatgaaaatgcctgacttattgcaccaagctaagaggattggcaaataaacacagacagggccaatagtctttgaaactgaatcttgagctcaggaacaaggagagaagacaattgaaacttattttaatgacaactcctaaaaacactctgttaattcctactggcttgttttcttgagcccctcaaaatttttagttagtttttatccctccaacttttgttattttttcttaagtcagccagcattgcctaaatccaagagactatgttgcattagttatactgcatatacta

SEQ ID NO: 777238 - DNA, 654 bp, Homo sapiens
acaaaaattttctctgtggtttctgtacctggaatatttgaaatactttgagccacagtttgtctacaactcatgaacaccgtaaatctggtatttgggccatgctgcatttttaattctgattgctaaaaatattcaaatcatttttttaccatcttcccctttcataaatgtatagacacttattatatgcattttgtatgatatgttaacattacttctggcattatgttaacctgaataaattagtcttttacatttttatttttcttgtatttttaattttacaatattttggtgacctataaagacaatatattcaaggatatcatgtgaagatatatatatatatatatatatatatayacacacacacacacacacacacacattgtgtaatgattaccacaatcaaattaattaacacatctatcaccacccatgctgttcattagatcctcaggattcattcatcttataactgaaagttataccctttaaccaacattaccctgtttccctcaatccatagacactgacaaccccactctactctctgcttctctgagtttgacttcttcagatacacataaaagtgagatcataccaatttactatttaatacttattaagtatgatgtatgtacagaaaca

SEQ ID NO: 777239 - DNA, 443 bp, Homo sapiens
ggcgtttacataacaaaggagaaccctctggcgagcctctccctgcttgcccccagagaaccatccggagtagttagcatgtttcatgtccagctgctgcttgccaaaaacattctcagaacaagagggactagcccaagagggaaagggctagtaggtatggtgaaaarggggcagggtggctgggtgcagtggctcccacctgtaatcacagcactttgggaggctgaggtgggtggattgcttaagctcaggagtttgagagcagcctgggcaacatggcaaaaccctgtctttaccaaaaataaaaaataaaatgaataaataaaatagctgggtggtggcatgcatctgtggtcccagctactaaggaggttgatgtgagaggatcacttgggcctgggaggcagatgttgcagtgagctgagattgcatcagtgcac

SEQ ID NO: 777240 - DNA, 589 bp, Homo sapiens
ctctgcctccagggttcaagcgattctcctgcctcagcctcccaagtagcagggattacaggcaagtgccaccacccctggctaatttttgtatttttagtagagacggggtttcaccatggctggtttctaggctggtctcgaactcctgacttcaagtgatctacccacctcagcctcccaaaatgctgggattacaggcgtgagccactgcgcccggccagaagtggctttgattaggatgtggcagtggagaaatagtgagatggctggattcttgacatattttaaaggagkaggtcatgggatttgcttacattacaaggggatgtggggtgtgaaggagagaggtggatgatggcaccaaggtgtttggcctgagaaactaaaaggaggtagtttcattaactgagatggggaagactgggaataaagcagattgaggaggaggtggatcagaagctccattctaatcatggtaagactgacagaccccggacacccaggtggatcgtggaagagccagctccctgactcgctgccattcagaatggcattgttgctataaaagccaaagttagaggccttg

SEQ ID NO: 777241 - DNA, 550 bp, Homo sapiens
cctataccctgcagagtctcagggatcatggtttatgggggttcagcttctatttttttttatttcaatagctttaggagtacaagtgggttttggttacatggataagttgtatagtgtttaagtcttggcttttagtgcacttgtcacccaaatagtgtacatggcacccaataagtgacattttatccctaacctctttccttctgagtctccaatgcccattataccactctgtttgcctttataaacccgtggcttagctmccacttataagtgagaatatgcagtatttggttttccattccagagttacttcattaggataatggcttccagttccatccgagttgctgcaaaagacattattttgttcttttttaggctgagtagtattccattacacacacacacacacacacacacacacacacacacacataaaacattttcttgatccagtcataagttaatgagcacttagtttgactccatatctttgcaattgtgaattgtgctgtgataaacaaacacattcaggtgtcttttt

SEQ ID NO: 777242 - DNA, 550 bp, Homo sapiens
cctataccctgcagagtctcagggatcatggtttatgggggttcagcttctatttttttttatttcaatagctttaggagtacaagtgggttttggttacatggataagttgtatagtgtttaagtcttggcttttagtgcacttgtcacccaaatagtgtacatggcacccaataagtgacattttatccctaacctctttccttctgagtctccaatgcccattataccactctgtttgcctttataaacccgtggcttagctaccacttataagtgagaatatgcagtatttggttttccattccagagttacttcattaggataatggcytccagttccatccgagttgctgcaaaagacattattttgttcttttttaggctgagtagtattccattacacacacacacacacacacacacacacacacacacacataaaacattttcttgatccagtcataagttaatgagcacttagtttgactccatatctttgcaattgtgaattgtgctgtgataaacaaacacattcaggtgtcttttt

SEQ ID NO: 777243 - DNA, 609 bp, Homo sapiens
ctgcccaaaacgccatctaatcttgtacttgagagaattcgtgctgctgcgtccagtgaatcagcaccaacttggacaaaccataacctccataaccattaggaattttacttcacaaaatcaacaaattaattaacacttacagagaacaaccgcatgaagggatgtgaagacatcgattcagtcgaaccaaatgtgtygcacttgaccgcctgtgaggcatctgtgctgccccaggagccaattcacgttcagcaaatcaacaagaacaaaggaacatttgtccctcgcaagccttaacgctgtgccagcaatttgatttcccaagtctcagttacccagagtattaaactcaaattgagaaatctgagagttgcttttttaaaagaggcttttggcttacactgagcgtgcttgtggctcttggctagggaggttcaatgcacaccagctgactgtgcacactgctcatgtacttcttgcctattcaacacctcctgagagcaagtatttcatgattatgtttcacatatccaaaagtatgtttaaccgccttttacatttttctttatgattggggcttgaaatagaacagaagggttccagttc

SEQ ID NO: 777244 - DNA, 635 bp, Homo sapiens
ttgtagtaactctttctataaatttaaatactatgggttttgtgattacctcactttttctttccggtggttataatttgtgctttctgtcctttcattatcagtcttatgaggggctaagtagtgttatttatcttttggcttttcaaaaattatctgtgactacaactctgcctgcttttaggggcatgtttaggaacacattgttattttaccatttgaatgagaacagcccttggtatcctagattttcaatcgctatggagatatcactatatttagagtcctgattaaacaaggagaaattccttactgaaacttcaatttgatgttaactcacacagcacttttttttttttacaacagaacacattaccttaataataatttttcattaaaaatacatattatgatccaaatktattattttctgcagtctttggttcagatttcctcttttcatgagaattaattgaagccatttggagacagataaaaattggggtgtatattaggatatactaagttgtgccatggtaataaacctcaaaatcctaatggcttaaaataacacaaattgagttttcggtcatttatcatatgtcctttgctggccagaagggggctctgctcat

SEQ ID NO: 777245 - DNA, 627 bp, Homo sapiens
ggttcagatttcctcttttcatgagaattaattgaagccatttggagacagataaaaattggggtgtatattaggatatactaagttgtgccatggtaataaacctcaaaatcctaatggcttaaaataacacaaattgagttttcggtcatttatyatatgtcctttgctggccagaagggggctctgctcattttagttaatcacagacccaagccagtggcacagccatcactttgaatgctgttgtttactgtattggctggaagaactcttgggagggttgcccatttaccaataaatgatctggttccaaaatggcatccattactctgatcataattaattgtttaaaaccttctaacacatgacctcatctaactaaaagatgagcagaaagtgaaatattcccatatgctcaaaagtgagaaaaccaaaattatttgataaacagcacttatgactatcaaagtttacactttgatttccacccagaaaagaagtataggagataagaaaaataatgttcttaccaattagcattaactgttaactatgcttatgaatacttttgtaaaaatgatctatatatgtgattttttaaaagtagaggataaaaaccattac

SEQ ID NO: 777246 - DNA, 632 bp, Homo sapiens
aaagttatttgcaatgaatatgtagtggcaaaaactttagacttcagagatggcattttaactagaactaaacataacctataatcatatattttagagcattgctaaactacatttacaaattactatacaagccaagatgatatctaaattccacaactaagttatcaatatcaaaagtataatgaagtgtgccaatatacgagtttcaggctgggctttagttccctaccttatcgggaaacaatcattgttctcttaattttatgaaaagtaaaaatgaatatgtttaaaatscatcatattaaaatgtgtgcaattacttaattaaaaatgtcaatttatgatttctctatattgacatgtatttctaaattgtagttgacattatttaatatattcaaatagcttatatgcatattaataaaacattataataaaaaatcattatatatatttacgaattaatgggatctttaaacatgttaaatttgttttggtgtaatattacgaaccatgttaggttttaaatttcatttgcatttcaatccctggcatgtagatatcaaagctaaatcccagtcttcgttgtaatgaagttcatgttttgaatgtgtttcatgcttagttct

SEQ ID NO: 777247 - DNA, 579 bp, Homo sapiens
gtctattcaaatcgtttgcccattgttgtagaggattgtttagttacttattactgagatttgagaggtttttcttttaaaaaaatatattctgaataaaagttatttttcatatatattatttttaatcttttctcctagtttgtggcctgtcttttcactcccttaacagcatctttctaaaaacagatrttttacattttgataggttccacttgatccatcttttctttaatgaagaagctaagaaatcttttgtctatatatttccttttctattctgttaataaggaatgttacatattgaaattataatggtaaaccttgcattactgagataaaccccacttggtcagatatattacccttgttgtgaattttggattcaatttggtaatactttgttaaatgtttttgcatccatattcatgagagatatttttctgtaatgtcttttttttctggttttagtatcagcataatgctggcttccaaaatgagttaggtaagtcctccctccttttccactttctagaaaggtctgtgtaatattggtaatattccttcctttaatgtttg

SEQ ID NO: 777248 - DNA, 579 bp, Homo sapiens
gtctattcaaatcgtttgcccattgttgtagaggattgtttagttacttattactgagatttgagaggtttttcttttaaaaaaatatattctgaataaaagttatttttcatatatattatttttaatcttttctcctagtttgtggcctgtcttttcactcccttaacagcatctttctaaaaacagatattttacattttgataggttccacttgatccatcttttctttaatgaagaagctaagaaatcttttgtctatatatttccttttctattctgttaataaggaatgttacrtattgaaattataatggtaaaccttgcattactgagataaaccccacttggtcagatatattacccttgttgtgaattttggattcaatttggtaatactttgttaaatgtttttgcatccatattcatgagagatatttttctgtaatgtcttttttttctggttttagtatcagcataatgctggcttccaaaatgagttaggtaagtcctccctccttttccactttctagaaaggtctgtgtaatattggtaatattccttcctttaatgtttg

SEQ ID NO: 777249 - DNA, 640 bp, Homo sapiens
catttctatgaaagtggacattacaattttgatagagattgcattgaatctctagatcattttgggtagtacaaacattttagcaatattaattcttccaatccatgaacatgggctattgttccatttatttgtgaattcttccatttctttcatcaatgttttatagttttcagtgtacaggtctttcatcttcttggttacatttacaygagtattttattatttttcacaactattgtgaatgacattgttttcttgatttctttgtcagatagttcattgagagtgtatagaggtaccataatttttgtatgttgattttgtatcctgcagctttactgtcttcatttatatgttctaacagttttctggtggagtctcacagtttttataaaatcatgtagtcagaaaacagtaaaaatgtcagttcttcttttcctatttggatgttttttatttctttttgttacctaattgctcttagaaggatttccaatactatgttgagtagaagtggccagaatgggcatccttgtttttttccaaatcttaggggacaggcttttaattttttattcttgagtataattttagctgtgggctgctcataaatggcctttattgtgttgaggtacat

SEQ ID NO: 777250 - DNA, 640 bp, Homo sapiens
catttctatgaaagtggacattacaattttgatagagattgcattgaatctctagatcattttgggtagtacaaacattttagcaatattaattcttccaatccatgaacatgggctattgttccatttatttgtgaattcttccatttctttcatcaatgttttatagttttcagtgtacaggtctttcatcttcttggttacatttacatgagtattttattatttttcacaactattgtgaatgacattgttttcttgatttctttgtcagatagttcattgagagtgtatagaggtaccataatttttgtatgttgattttgtatcctgcagctttactgtcttcatttatatgttctaacagttttctggtggagtctcacagtttttataaaatcatgtagtcagaaaacagtaaaaatgtcagtycttcttttcctatttggatgttttttatttctttttgttacctaattgctcttagaaggatttccaatactatgttgagtagaagtggccagaatgggcatccttgtttttttccaaatcttaggggacaggcttttaattttttattcttgagtataattttagctgtgggctgctcataaatggcctttattgtgttgaggtacat

SEQ ID NO: 777251 - DNA, 647 bp, Homo sapiens
gctgaagcagaggaatgatgaccaaggtgtggtatgtggaaggtctccagagtcaacaggacctgctgactagatgaagagtgtcaaggggagggaaaacatacaggtaaagctcctgtttgggcttcattataaataatcatccactaagataaagtgcatgatagggagaagatttggatgaaagaagagttcacrtttggacttatgaatgtgaaataaccatggggagacatctgggtggcagttagatacgtgggtcagttgcccataagacagaaaaaagctagaaataaaaatacgtctatcaccaaagaagagcactcagaaactgtggcagatgataaagatgggctcactcagcttaattttgttatccttgtagtatcccttaagctggagtctgaaaacctaaaggcacatttaacagatccttttatagcttaggttccacacatgacacagattctactgatcagatgcatcctcatgaggtctggcagcagaattcatccttatgagggagggacaaacttctactcctcctgctgcttctgctggcaagcccaattgtaagtgtggttggtttttgtgttggttgcagcagaagtcccatgttctagtctttagtttaatgtgtgtcaaga

SEQ ID NO: 777252 - DNA, 612 bp, Homo sapiens
aggtgtgtttgtgcccagagagagaaagagtcaagccgctgaccctgaagggagagccagccacacaactgtgtgtggaagcagccggagcaagcagctaagacagagcagacaatgtaggagagctgctgatgagagagagctgctgatgagagagctgctgaataaagccatgtcttatttactggtgtctctcaaatgttcttccagctccctgaccccatgcacccactccccttggacctcagctgaggctggaacctaaccctgagcatgacagagtgtccatcaataagaaaagaaattggactacaaggaaaacaacacccaaagtacagtaagytaagcagatggctatggagaaatcaaattatatcacttgggtgagtgtgactttttctccgttttgcatgatccccccgatatctttggggctttgaaaccttgctgtgtgcatactagtgtgatgtttgggtatgtcaatatgtgcaggataataattcatagtctaaattctgctgcttattcttcatgtccctcactaaatacctaccactttctgtacttcagtttcctatggaaaaaaatgaggataataatatcccttatgaa

SEQ ID NO: 777253 - DNA, 620 bp, Homo sapiens
aaaggagatactttaatgaggtttaactggcaacaaattgaagactgtggcaggatgcagtagctcacgcctgtaatcccagcattttgggaggccgagggggtggatcacctgaggtcaggagttcaagaccagcctgaccaacatggagaatcccgtctctactaagaatacaaaattagctgggcgtggtggcgcatgcctgtaatcccagctactcgggaggtgaggcaggagaatcgcttgaacccaggaggcacaagttgtagtgagccgagatccgccattgcactccagcctgggcaataagaataaaactccatctcaaaaaaaaaaaaagactgtatcagtaaaggtggtttgtaaatacaactattatgttaaataaggaggaagcagcaggaatagaagtgatggactgagcctctacactagaattagaattcaccattgaatggacatagttgttgacagagaakgtagagttaaagcagcaaattcaatcccaagtatctgggagtgtgattatatgataaacagaaataaataatcaagaaagacctatatgggtctttatgggaaagaagatgagcccaaatacaccaaacttctacaggaag

SEQ ID NO: 777254 - DNA, 612 bp, Homo sapiens
  misc_feature 222: n = A,T,C or G
ataggacacctatacatataacactgttatgtcttgtttcaaaataagtaaacaatttacttttataaaatgctcatctacctttggtacagtttttgttctgaagtctatgttgtctgacattgatatagctcctctagtttcttacgattagtttgtttttggtttctcttcttccatcttttaatttctgctttatgtctttatatttgaagtacattntattgttgtcagcatttcgttgggtcttgatagtatattcagyctaatgttttcttccttttaataggagcatttagatctgtgccatacagtgtggtactaactaaccaaatgtgactactcagcacttgaaaactggctagtccaaactaaggtgtgctataaatgtaaaatgcacataggattttgaaaacttgatatgaaaaaagaatgcaaactatctcaataatttttaatggattatacattaaagtggtatttttggttgcgttaaataaaatgtattatcgaaatgaatttacctgatttaatttttaaaaatatggctatcataaaattttaaattgctaatatgcttcttcttttatttcagttggaatgtttatacat

SEQ ID NO: 777255 - DNA, 554 bp, Homo sapiens
tcagccagctgcgaaataaagagagacagtacaaagacaggaattttacagctgggccactgggggtgacatcacatatcagtaggactgggatgcctgcctgagtctcagaccagcaagtttttattaagggtttcaaaaggggagggggtgtaaaaacagagagtaggtacaaagatcacatgcttcaaagggcaaaaagcagaactactaataagggtctaaaaagatcacatgcttctgagggcacaggacaaagggcaaaagcagaactactgataagcgtccaacaaagatcacaaggcaaagggcaaaagcagaactactgataagggtytatgttcagtggtgcatgtattgtcttgataaacatcttaaacaacagaaaacagggtttgagagcagagaaccagtctgaccacacatttaccagggcagagtttcccaaccctagtaaacctgagggtactgcaggagaccagggcatatctcagtccttatctcaactacataagacagacattcccagagtggccatttgtagacctcccccc

SEQ ID NO: 777256 - DNA, 474 bp, Homo sapiens
atgtttaccacctgcgcactgtcagcgctgagtaaaggggcccgaacccccggttccaggagcccctgctcgcctctccagccaccttcccaccagcccacaacgcacaaggaccacagcttccagaggcgccgtgcgctctctttccaggcgctttccccctgctggaatgctccaccccttccgctcggcgaactcctattcatccttctgkactccttcccagagctaactacagacctgaaagatttcttcttctgcgctctcagggaacaacagtccttaaagtccagctcacgctgctgtgctgcagcgtcgctctcggtcccctccactgcactgggtctccccactgcactgggccccctcttcactgcacccggccactccaccgcacccggtaccccggccctctatggcacccagttctctctcctcggcacccagttccccgcccccacctccgccccaacg

SEQ ID NO: 777257 - DNA, 372 bp, Homo sapiens
gtgttaggtgcatatatatttaggattatgttattttgctgtttggctagtccttttatcagttcataatgtccctctttgtctttaagtgctgttgctttatagttcatattgtctgatataggaatcactactcctgctcacttttggtgcccatttgtatggtgtwtcttttccacccctttaccttaagtttatgcgagttttatgtatcaggtgagtcccttgaagacagcagataattggttggtgaattcttatccattccgttattctgtatcttttaagtggagcatttaggccatttatattcaacattagtattgagatgtaaggtactattctattaatcatgctatttgttgcctaaat

SEQ ID NO: 777258 - DNA, 458 bp, Homo sapiens
aagatgagagtcaggaagtcaaaccttgatgtaaaattaatggaaactgactaagtcaagagggtatatttggtgggaaaatcttgtagcaagaaaccaggcagctgcccaggagctggatgagagagtggaaggaacactgaagtasaagtctaaaaacttgggttcaatcccaacccagccaagaacaagcccatgtgactttgcaaagatcatatgacttctctgaaagtcactttctttatttttaaagtgggaataatagcatttaccttgacagttactatatggatgaaataagattattgatgtaaaaactccaagcatataataaacacccagtatatgtttgggaatctgaaactatcctcctagtgagcccccaggtttcacacacaggtcaaatacctagtcatccaactctgtggtatcagaacctggcatcagggcaatgtgtc

SEQ ID NO: 777259 - DNA, 573 bp, Homo sapiens
gggcactatggtcatttcaatattaactcatccaatccatgagcatgaaacatttttccatttctttgcatcatcttcagtttcttttatgagtgttttgtaattttccttgtagagatttttcacctccttaaatatattcctagataattttttgtagctattgtaaatgataytgtcttcctgatttggttttcagcttgactattattagtgtatagaaatggtactggttacactgagaaaagtccacccttttcaataaatggtgttgaaaaaatgtattgccatatgcagaataatgaaactggacccctaactctcaacatatacaaatgttcaattcaaaatgtattaaagccttaaatttaagatctgaaactatgaaaatactataaaaaacctagggagatctcttctggacactgggctaggcaaaaagattataactaagacctcaaaagcaaaagcaacaaaaacaaaaacagactaacaggacttcattaaactaaatagcttctgcacagcaaaggaagtaataaagagtgaaaagacaacttgcagaatgggaga

SEQ ID NO: 777260 - DNA, 639 bp, Homo sapiens
agctactcgggaggatgagcaggagaatggcttgaacccgggaggcggagtttgcagtgagctgagatcgcaccattgcactctagcctgagcaacaaaagtaaaactctgtcccccaaaaaagataaaagaaaaaaaaaatccaactctcttccacatgcaattcctatttgcatcaggaatagttcctctaaagtgaatttatatacctctaattattggatgaaagcttaatcttttctgcaaaagcacttctaagttgattcatgatttttttgtctactaggactagaataaaggcaggggaaatgaattttctagtatctgtcacagaaagtatctgtttatagagagtcctataaaacttctattttagcagaaccctttgggatattmgtgcccagtctctaaaaactaccacaagaatttgaagaactggtgctattttaagtgagaagtaggtaccttcttaaacctttccctaaacgactatacttaacatatacatacttggaaatatagggttttttaatgatttagcattttatttgattgtatatactgtatttcagccccagaacaattgcagaaaaaaacgccattttaaatgcgtagaattgggcttgccaatgacagccc

SEQ ID NO: 777261 - DNA, 581 bp, Homo sapiens
gcacttaacaccattttgggcaaatagtaagtgcctgataaatgtgagctacaattattctagttgtctcatatccccaagcatagcactatcaattttaacccatctctcctgaggctccattctttccctcttgcctgcttattttcctcagcatagaagcaggttcaactctctccctctgcccagtgtccctggctgactactccccagcctcaccttttcctgtcatgcctccagggaggactagacagtttgtctcaccttcccaacgcaattggcttaacgcccaggaagcttctctgtaagtccactctcttaatggtgcttttcagccttgacacctcgtgccctttctgctgaccttgctgggtgccccctttctttgactatttgacctcccttactctgcttttmctctgatcgccccctaaatgctgctgctgctgctgggttccctcctcaccctctcatctactcactgacctctccccactgccatgagctcatctatgccctgactctttgttggcccccctgtgctgggatttccacgtctgagctccagcccagaactttat

SEQ ID NO: 777262 - DNA, 569 bp, Homo sapiens
acacggacctacttgagggtggagggtaggaggagggagaggatcagaaaaaaaaataacctgttgggtactgtgcttattatctgggtgactaaataatctgtacaccaaacccctgtgacatgcagtttacctgaataacaatcctgcacctgtacccctaaacctaaaattaaagttaaaaaaaaaagctttaaaaatgtctagtacacaccagtgttcattgtagcatcatacacaatagccaaaagaggaaaacaactcaggtatccatcaacagatgaatggataaacaaaatgtggtctatacatacaatgcaatattattcagccttaaacggaaggaaattgtggcacatgctacaacatggatgaaccttgaagccattatgttaagggctgatggttgcataacaatatgratgtacttaattgcactgaattacacaacgtctcactctattgcttgggctggagtgcagtggcgcaaaatttcggctcactgcagccttgatcaccggggtttaggtgatcctcccacctcagcctcccaggtagctgagactaca

SEQ ID NO: 777263 - DNA, 582 bp, Homo sapiens
tttcatggatacgtgtggatcacttaaagttatcaaaagtaaactagttgttatctaggaatgctttggagaaatttaacttggttacaggtatggctagaagttactggctatttcagcactatttttgctatcctttttcttgtcccaaaatctgagaaagaagtacctcacactttatggagtaaacatttattaaataggtactgagtacaggatgcactttgcaagttacaggacatacagctttgtgtggtatattcctaagttcccacaattgccagttctaactagtgtttattttttgagacggagttttgctctgtcggccaggctgsagtgcagtggtgtgatttcagctcactgcaacctccacatcccaggctcaagcaattcttgtgcctcagcctcccaaatagctaagattacaggcacgtgccaccatgcccagctaatttttgcatttttagtagaaagggggtttcgccatgttggccagggtggtctcgaactcctgatctcaagtgatccacctgcctcagcctcccaaagtgctgggattacaggcatgagccactgtgc

SEQ ID NO: 777264 - DNA, 654 bp, Homo sapiens
tccatccatattcctgcaaaagacatgatctcatttgtttttatggctgcaaaacattttaaaatagaaatatgggataataaatggcaatattaaacaaatctttttagttgaaggaatatagatatatgttatctatgggacatgttgataaatatataactgtatatctgcctgttttatactgtgtcatattgcctcacttctacactgattgcattgatattaaatgtatttgtgttccttaatgataaggatggtgcatggtagaaagaaaacatgggaaatcatttcgtgtggaragtcacaaacatgactagcacattagataatcaaaacataaataaaatttgatgaggtacaaacatgttctttgccatacaatttttgatggtgtttaggaaacttttctggaattctaataagtaacagtgtttttgtatgatagaacaagggcatctaaaaggcatttctcagctatagaaattagaaccccatgagtgacttcagggagtgaatctaccctacacagattagtaagagagtatatctaagaacatgcacttataagtgggagctgaacaatgacagcagatggacatagggagtggaacaacacaccctgagacctgtgggggtggtcaggggtaggga

SEQ ID NO: 777265 - DNA, 566 bp, Homo sapiens
tcatcgatctatggctgtaatcttatatgtcaagactttcagctaattggggtaagttatgaatgtttacattaccattatgatctataaaatgctattttgtctgaagctatatagatagacaaaggctttctagattataattcttagtgaatatttttttgccacagaagactctgctaaggtatacttgggaatattacattttgcaaatacacagaggaggtcaaaaatttccagttawtaattatgctgaactatgtaggtcataggatagtaagtagaaaaaatgtaaatggaaattgtttttacctaacttttgtaaaaagaatctagaggtgattaagctctagttttatgagttttaacgacaaaaatcaggatgcttttcaataaattttgtcttgatgtaattttttgtggtgtattctgcttatcaaatatttcattatttacatgcaaatacacatgaaaggtttacagagaatatttataacacagagtgtttagggactgatttcaaagtgctctcaatcagagggataaccaagtgtggaagtatatag

SEQ ID NO: 777266 - DNA, 635 bp, Homo sapiens
aagttgaaaacttaaatctctgcaaaaaagaaacttcaaggattcattccttgatacttggggaaagaagaaaaaaatctcaaagagatggccctaatctttgtcataaaattgccacaaaacttagtttcaaaactaacttcattatatttttttctcattttttttcctacatatcttcattgccccaacaacttctggttcttaaaagaaattttttaaaaaaatatttcttcatgtttgtcagtattcccctttttccattccactgaaaaatgwtttgctgggacttatcctcgagaggcctattagttaagggaagaacacaaaagagatctttggaaagactttgtactcaaaggaggctggattttaattctttgagggaaagaatgtctcattcatttgtatacctcttccactgtcaccaaacatttggtccctggcacttagtaggcaccatgctaatagaatggaaaacaaataggcaatgggcctcatcttgattcttcatgctgttcatctgtgctccttttcaattctcttgtgttcctgtattgtcagagcacatctttgctcagcagtagctgacatgccagggtattctcagagatgctagaaactggctacataaa

SEQ ID NO: 777267 - DNA, 571 bp, Homo sapiens
catttaacatggtccctgaaatgtatattttttcacccttttgaaacattgttcaaaataaattacaaatctccagtactttaaaacagaaacaaacaaacaaaacaacaacaaccaaaccaaacaaaaacaggaaaacctccctttcattaatcatattcttccctcaggaaaggctcaataggagcatcctatgtccactttggacttgggagaatattgggagggagatcccaagctatcaattagagcgccgtcagagcctgaatcatagtattttctctgatttaatgttaaccaatgtaatcaccacttaactacctatgatgtgccatagttgtctcaggctatcctcaaagcgtttttaaggtaggcctttgttactcccgytttacagatgaggaggctgagcttccaatagatgaaatacaatatttggccaacaagtgacagagctgggattccaaccccagcctgttaaactccaaagactgaggttcatcaggatccatgccacatggctatatgggggtgtgcttctgatatggggtaacctcagaaaatctcagga

SEQ ID NO: 777268 - DNA, 589 bp, Homo sapiens
tcatgataaataccctcaacagactaggcatcaaaagaacatatctcaaaataatagccatctatggccaggcgcggtggctcacacctgtaatcccagcactttgggaggcggaagcaggcagatgacctgaagtcgggagttccagatcagcctgaccaacatgaagaaaccctgtctctactaaaaatacaaaattagccaggcgtggtggcgcatgcctgtaatcccagctactcgggaggctgaagytggagaatcgcttgaaccaaggaggcagaggttgcagtaatccgagatcgcaccattacactccagcctgggcaacaggagcaaaactctgttgcaaaaataaacaaataaattaattaattaataaaaataatagccatctatgacaaacccacagccaacatcatactgaatgggtaaaagctagaatcatttcccatgagaactggaataagacaaggatgcctactcttaccactcctactcaacatagtattggaaatcccagcaagaggaatcaggcaacagaaagaaataaaaagcatccaaataggaaaagaagaagtcaaactatctc

SEQ ID NO: 777269 - DNA, 583 bp, Homo sapiens
ataaatggtgctcttcaataaatggtgccggaaaaactggatttccacgtgcaaaggaattggacccctattttacacaatacacaaaaatcaactaaaaatgtataaaagacctatatgttaagacctgagactataaaactcctagaagagaacataggaggaaagctttgtcatagtattttattattatgtgcacagtatcttgctatacttgctatatttcytcctctacaagatgtattctttgtctattttttttttttttgagtcaggatctcactctgctgcccagggtggagtatagtggcgcgatctcaggtcactgcaacctccatttcctggactcaagccattctccagcctcagccttcggagtagctgggactataggtgcacaacaccacacccagctaatttttgtattttttgtagagacagggtttcaccatgttgcccaggatggtctcaaactcctgagctcaaagtgatctgtccaccttggcctcccaaagtgctggaattacaggcatgagccactgtgcctggcccgtactttaatttataaataatttggggggtg

SEQ ID NO: 777270 - DNA, 582 bp, Homo sapiens
tgaaatatcattatgtggcacatgactgtatattaagatactggagattcagaagtgccccatgtggttggctgccccaggacctgaggcagggtaaggcagcatggtcacttactcagccaaaagtgctggatgatatcagtcttccctttcaggggctcagtcagtccaaaaggtaaactgcctggaaatatagtacactaaggcttttcagtgcctcctcacaaggccaataaaaaaggtaaacaacattttcttattgctgtgacaggacaaagcagcaaagaggaaataaaagaagttctattaacatagaaggtaatgctgagtgaagaaaaatgagatgattttaggcagrgtgcggtggctcacatctgtaatcccagcactctggtaggccaaggcgggccgatcacctgaggtcaggagttcgagacctggccaacgtggtgaaaccccatctctactaaaaacataaaaattagccagatgtggtggtgcacacctgtggtcctagctacttgggaggctgagatgagaggattgctttaacccgggaggtggaggtttcagtgagccaaa

SEQ ID NO: 777271 - DNA, 606 bp, Homo sapiens
tacacaaagcacaaaactataagggtactggaaattactaccttttaaaaaatattagggttgaaggaccttcctatgcatgatataaaacacaattaataaaaaatgttcagttccatgaacactaaacttttctatcaaaccaaaggcactacaacccaagttaaaattcagactaggataaaatatcttcaatataatttgcagagaagggggttagttacagaaaataacccagggcacggtggctcacacctgtaatcccagcactttggggggttgaggtgggtggatagcttgaggtcaggagttcgagatcagcctggccaacatggcgaaaccccatctctactaaaatacaaaaaattagctgggtgtggtggcaggtgcctgtaatcccagctattcgggacactgagacaggagaatcgcttgaacttgagaggcakaggttgcagtgagccgggatcgcaccactgcactcctgcctgggtgacagagcaagattccgtctcaaaagaaaaaaaaaaaactaacccaatagaatgttttgacatgaagacagacaacaactcatagaaggatcctcccacctcagcctcccaa

SEQ ID NO: 777272 - DNA, 631 bp, Homo sapiens
agtgtcccctggatatctggggaaagtgagagctatcactgcactgccaggaatcccaccagccagagctccagctctgtccttaccagacccctttgctcaggtaatgtttttccttctctgactctcttcttcctggcaagccttggtctagtttcttagcatccctgcctctcttcctcttggatccaggagcaattgaagaaagggaggagccagattagttggcagcaggaagtgtctctggggtggcaggagacaagggctctggagccaccatcccagggcccgcttcggtccaccttttctctgttggcctcggtcctctgtgcctgacctgctgcagactcagcgaggcattcagctcattcctgggactccctgaggaaaagtgctgcctcacccacactcaaccctgcacagcccactgaggagagcttcraaaccccttgcctgtgttctcagagaggacttaccacctccccttgcctagaggtgctctgagagacacttgaggctgtgctcttctggcaggcaaggggaggcctctcatggtgtccctggtcccatttggcttagtcataggtcatggctggaaactgtgttagttcaaacatatcctgtctctcct

SEQ ID NO: 777273 - DNA, 620 bp, Homo sapiens
atctaaaagcacagcacttgatcctttaccttgtctatgatgcaaacacctttgttcacgtgtttgtctgctgaccctctccccactattgtcttgtgaccctgacacatccccctctcggagaaacacccacgaatgatcaataaatactaagggaactcagaggctggcgggatcctccatatgctgaacgytggttccccgggcccccttatttctttctctatactttgtctctgtgtctttttcttttccaagtctctcattccaccttatgagaaacacccacaggtgtggaggggcaacccaccccttcatgagacaatatttaaaggtttggggaaatcctgtaaggcagtaatcacagcaattaactccgccttttgagcagaagtataagaggtagaaataagtttgtctgtaggacttacatagccagcattgccattactggagccatcagtgaacactgtaacagcctcaggaatgggttgatttttggttaatcaaggaaccacctaagaagtcatttttataaaatcaaataatttgttttttggataatgattgtcaataacgccaataaaatcagccaagtgaatttgccacagtacagaatg

SEQ ID NO: 777274 - DNA, 620 bp, Homo sapiens
atctaaaagcacagcacttgatcctttaccttgtctatgatgcaaacacctttgttcacgtgtttgtctgctgaccctctccccactattgtcttgtgaccctgacacatccccctctcggagaaacacccacgaatgatcaataaatactaagggaactcagaggctggcgggatcctccatatgctgaacgctggttccccgggcccccttatttctttctctatactttgtctctgtgtctttttcttttccaagtctctcrttccaccttatgagaaacacccacaggtgtggaggggcaacccaccccttcatgagacaatatttaaaggtttggggaaatcctgtaaggcagtaatcacagcaattaactccgccttttgagcagaagtataagaggtagaaataagtttgtctgtaggacttacatagccagcattgccattactggagccatcagtgaacactgtaacagcctcaggaatgggttgatttttggttaatcaaggaaccacctaagaagtcatttttataaaatcaaataatttgttttttggataatgattgtcaataacgccaataaaatcagccaagtgaatttgccacagtacagaatg

SEQ ID NO: 777275 - DNA, 309 bp, Homo sapiens
cccattagcctcatactacacctgagcctccccacctgtggtccaataaagatgctgccattggtcagaagggagggatgggtggctgcctgctggaattcctggcacttcagctatcacccaacattaaagccaactggacawcccagggtcatagagggcactgtgtagacccaggtagcttgtgaggtcatgaaaaagcatatgtggttaagagagtactggaattggagccagaagaactagattcaagtccctcctgcacttcacactagtcgtggatcctgagtaatttgttttgtcactctg

SEQ ID NO: 777276 - DNA, 606 bp, Homo sapiens
agacaataactatccgtatttattttttgtagatgaggaaactcgggcacgtaaagattaagtattttcccgagtaagtggtagggccaggatttgactacagctagtcttgtccctgatgctcttaaccgctgctcaatcctgccccctcccggctggcccctctttctctttcgctcaatactgagtgaaaatagataccttcattttggaaggtaaggaaactgaggcttagggattcataaggaggagagctagggtttgagcacagggttatcctacctcagaacccatacacttgaccacttggttatatcgccttttgaacagacaaaggccattaggggctattgarggttttagagaagtcagagttgagcttggcaaagtgatgagaggaaatagtctgcaaagaaactattagcatattttaggaaagaagtaacaaggaatgagaatgtctgttaataaggactggtaaagtaaattagttaaacaaatgtgtagaatggaataaatgggaatcagttttaatctacaaacattaatattgctgggatgtactgttaagatcaaaaagcaaggtttagaaaaaaagtgttatag

SEQ ID NO: 777277 - DNA, 637 bp, Homo sapiens
tggaactcagtgttgatggtcacagcagagagcaacaaaggccagagttgagctggcacccatggagggagcatttagaccagtcctagccagaggggaattgttcatctcagtggtcagaacctgagttctggctaggtctaccactacacactaaagtgctgtgggcccctaaataaaattgaagggcagtctaggccacaaggactgcaactcttgggcgagtcctgatgctattctgggttcagagccagagaacttagggtccatgcgacctagtgagacacaagctagggtggccaaagaagtgcttacatcacctctcccccaaccatagacagtgcagctcatagctctgggagagagtcctttcttccacttgacaagtgaaraagacagggagagagggaagagtaaagaggactttgtcttgcaacttggataccagctcagccataataaaatgacacacaaagcaaagtcctgagaccccattccaggccctcgctctcgaatgacatttatagacacactatagaacagaaaggaactcactgccttgaagagaagaatctagtcctgataggattaatcatctgctgactcaagacctcttaggtcttgaataaacactagt

SEQ ID NO: 777278 - DNA, 579 bp, Homo sapiens
cagagaggtagtggaatgaatactcttaccatgctaatataatagaaatttccccctttcgaggacaatttagcacagtttagtaataacaaaagtgtatgccatgttatatagcaaatctctttttatctaccctcgggaaaggagtacaatgtgctcaagaaagcatataaaaggaattttttttgcatcagtgcgatggtagcaraactagaaagaacctgtttttgttagtaggagtatggctcaataatctatggtaaatggataataagggaatactatgaataactatgtgaccacaaattagataacttagatgatatatatctctagaaaaacccaaactaaactgtatcaagaagaacaagaacatgtgactgaacttataagtagtaaaagatttaattagtaattaacatattcccaccaagaaatgcttaggccagatgacttcactttttaatcctgtcaaatatttaaagaagagttaataccaggcctgtacaaactcttctaaaaaattaaagagttcacacttctcaattcattctatgagattagtgttactctgatacc

SEQ ID NO: 777279 - DNA, 629 bp, Homo sapiens
aatcaccatatgatctggcaattgcatttctgagtatttaccaaaagtttaaaacccgtttgtcaaagaaatgtctgcactcccttgttcactgcaggcagcagtattcatgatagccaagtaatggaatcaacctgtttatcaatggatgaatggataaagaaaatgtagtacatagagagagtagaatactatgtagcctttaaaaatggaattctgtcacttgcaatgacatggatagaactgtagaacactatgctaagtgaaataagccaagcacagaaagacaaataccacatgttttcacttacatgtggaagataaaacaactgaactcatagaagcagakagcagaatgggggctgcacaggctgcaggtgggggtaataaagagatgatgtcaaaaagtataaaatctcagttattcacgaggaataaaggttttttgatatctactgtacagcatggtgaatataatagcatattgtacatttcaaaattgctatgagagtaaatttcaaatgttctcactataaaaagtgatatttgagctgatggatgtgttaattagctttaagtactccacattatattcgtaaatcataacattgctttataccccataataa

SEQ ID NO: 777280 - DNA, 629 bp, Homo sapiens
aatcaccatatgatctggcaattgcatttctgagtatttaccaaaagtttaaaacccgtttgtcaaagaaatgtctgcactcccttgttcactgcaggcagcagtattcatgatagccaagtaatggaatcaacctgtttatcaatggatgaatggataaagaaaatgtagtacatagagagagtagaatactatgtagcctttaaaaatggaattctgtcacttgcaatgacatggatagaactgtagaacactatgctaagtgaaataagccaagcacagaaagacaaataccacatgttttcacttacatgtggaagataaaacaactgaactcatagaagcagagagcagaatgggggctgcacaggctgcaggtgggggtaataargagatgatgtcaaaaagtataaaatctcagttattcacgaggaataaaggttttttgatatctactgtacagcatggtgaatataatagcatattgtacatttcaaaattgctatgagagtaaatttcaaatgttctcactataaaaagtgatatttgagctgatggatgtgttaattagctttaagtactccacattatattcgtaaatcataacattgctttataccccataataa

SEQ ID NO: 777281 - DNA, 595 bp, Homo sapiens
agcattcttaaagttttcaacttcctaatttctttggtcttctaaacgtttcctgagaaagtgcctttctgccattcaatctccaaatgacattaaaatttgggtgtaccttatttaatatgcttgctttcaaaaagggaggaaaaggtaagggaacagagggaaaaacagtaaaaagttatttatttatgactttacatttcatacagtccatatactactgccccaaattatttgttacagaatattaagcatatacacattctacatatttggcctcataaaatcaaccatcctttacagatgattggcagctcatgagcttcttaatatagttcatcaaattatgctattgaaagagaatatttggaaagcwtattaataaaactgccattattatcttccaaatgaactatatttttacatcgtgattgctacacataggattttgtctcagaaaaaaatcagaatgtgtcaccatttaagagtataatttttttagagaaaaataagattatttcattgaaatatttacttaaaaaaaggttttgatgctagtgaaggcatgttgatgatttgttaacatgtctttttg

SEQ ID NO: 777282 - DNA, 585 bp, Homo sapiens
tcacactccctcttctcagcttctctgtctcctacaaaatctaattggaattgccacagcctctctctttcatctcttccaaactttctacagtcctaaagtctacccaaagttcaacttccttgaggaattactgctgatgattccagctcacaagtaattttccattctcagaattcatgtataatatttctcaaactgtttcctgagaacactggtttcccaaaaattaggttctgtattgaaattaattataaatcctgcatattaaatctattttaggaactacccagtatgttttaatctattttaatcttgaatgagtattctccaggcactcctataattatayaacatcagcccaacccagctgctcgcatattatttttttcctctggtaagttatattatgaaataaattataatatttaatgtcattatcaagtagacaaattacatactgtgcatatgtaaattgtgtgtttatgtgtataagcatataggaactttaaatatttcaaaattaaataacagatattttagactattatttactgtctaaatccattaaaaaaaattctagag

SEQ ID NO: 777283 - DNA, 632 bp, Homo sapiens
tcaaattagcacagttgctcttatttgatttgtataacaaagattttttatattttaattcctaccacatttcactgctttgaatcttttttacactcgttgcatagatctacataataggtactggttttaaatttaatgtcgcttcgttcgttgattcttacacaaactaacgtcaattatgagactgaataaaaagcagaagtaatactaaatttgaaatgataaaagatcttgtgaaatttggaagtggataaataaagatctgtgtagtatagaatcttagagcycaaaaatattttctttttcattctcttttcacttttaacagataaagtgttttaaaaaaattaagctaaaaattaaatcgagaaacctcaaattaatgcagacctgggcaatagttatactatgtttattttaatagtcatgatgacgatattaaaatatttttgccttttccagacatagatttaacacttagaacagccacctgatagctatgtagataaaaatgggagggatcttccattttctcagtctttaaataattttaatattatagtttcacagtatgcattaaaataacatgtactactcctggtatgaagatgttcaattatatactacag

SEQ ID NO: 777284 - DNA, 577 bp, Homo sapiens
caaatacaatggttcctataaataggacaaaaccaaaagacaaagccagatgaatttgcttttgtgaaattgatgcagcctatgttcagggcaagtggcaatctcacaaatttttactgtctagcttaaagttgatgaatagcagaaatcaaatattaaaatatagtmcatccatagtaaaaatcaaatggcaatgctgctgtatttctaacaaagcaaaatatcttctaattcacatgtgaattacaggtgactagtggtaaagaaaggggaatttagcaaaaaaaaaaaaaaaccctcaaaactaaaaacaacaaaaaagccttaatgtccattatctgcacaggcattgttctcagtttatttgtaaccattatttctattaaattatgtaaacatttgctggacaatacaaagtttaacttgaacacaagccaagcatttaaaattactacaataatatctttggcaagctacttgagattgctctctccacctccattcctcatttactatccaatattttgaagcctctttcagaaacaaaaacagtaagtataattttaacaggaagatt

SEQ ID NO: 777285 - DNA, 633 bp, Homo sapiens
acaagttatgttctaatattgaaagaccattcaggtcccagaaatacctaggccagttcatgtcttcattgaatggcacctgctcggcttttgtgaattctgagatttgccttttgcagtcttctacctctgtctttccactgarctgtcagtcacacttaggcctttagctgttctatctattgggtggccagtgttcttcactacactgaaattgctgctgtgagttgcgaaaatagaaagtgaaagttattgaaaaccatgtcaaagactagtaaagaagctatgattcaggtcagagattgtgtgtgattctgtaagtaacttaaataaacttcagcgtgaggtctctattttggttgctcaggtgaccactgtcctctcttttgttgtttttctgatacgttctgtgcaatagatattactaaataaataggaggatattctatgcgaggataccttggaatgatgaaacatcacataaaaagtggagaaaaaatttagttatgaaaagctaagggaagacgtctagcagaaagaagacgatgagaatgatttacataaattaaaaaaggtattagtagtaataagtgcactggtataaaatttactgcaggttaaaagtatttttga

SEQ ID NO: 777286 - DNA, 633 bp, Homo sapiens
acaagttatgttctaatattgaaagaccattcaggtcccagaaatacctaggccagttcatgtcttcattgaatggcacctgctcggcttttgtgaattctgagatttgccttttgcagtcttctacctctgtctttccactgagctstcagtcacacttaggcctttagctgttctatctattgggtggccagtgttcttcactacactgaaattgctgctgtgagttgcgaaaatagaaagtgaaagttattgaaaaccatgtcaaagactagtaaagaagctatgattcaggtcagagattgtgtgtgattctgtaagtaacttaaataaacttcagcgtgaggtctctattttggttgctcaggtgaccactgtcctctcttttgttgtttttctgatacgttctgtgcaatagatattactaaataaataggaggatattctatgcgaggataccttggaatgatgaaacatcacataaaaagtggagaaaaaatttagttatgaaaagctaagggaagacgtctagcagaaagaagacgatgagaatgatttacataaattaaaaaaggtattagtagtaataagtgcactggtataaaatttactgcaggttaaaagtatttttga

SEQ ID NO: 777287 - DNA, 581 bp, Homo sapiens
actaccaaacagcctctggaatgtcatcttcattgagtctagatgtcatcatttgaaagaaacacaatcattgtcagtaccatgagaagagatcaaaattaaaaactgccaactcaactaggatgccccttaactttcaacagatatcttaactttaaggatgttaatattcaccaagctcacagccatcacagcagcaaaagtgaggatcackctcacttggttggccaagagaggctgtaatagtctttgcagctatgctattaccttactgtaattgatccacacacagcagccaatcatctttaaaaaatgcaaatcttatgccttcctgtgtaaatctttcattgatttcaaattcagaatatgagttttaaaaataacttttccatggtctacaatactttgcatgatcctgcccctgaccctacccaaaactaggtggcaagctgctttcattcattgactctgcctcagctcctttgccttaactatgataggcttgccgtggttctttttatcacaagtccaattcatcctcctgccctctaattctactcaacttctcaaatggctgcgat

SEQ ID NO: 777288 - DNA, 651 bp, Homo sapiens
tgcctgcctcgacctcccaaagtgttgggattacaggcatgagtcaccgtgcctggcttagaaaagtttttgaaatgtaacactttggggatattatttcaaaaaaatgaatagtttccattttccttaaaaaaaaaaaaagggccgggcgcagtggctcacgcctgtaatcccagcactctgggaggctgaggcaggyggatcacgaggtcagcagatcgagaccatcctggccaatacagtgaaaccctgtctctactaaaaaatacaaaaaattagccaggtgtggtggcgggcgcctgtagtcccagctatttgggaggctgaggcaggagaatggcgtgaacccgggaggcggagcttgcagtgagccgagatcgcgccacggcactccagcctgggcaacagagcgagactccctctcaaaaaaaaaaaaaaaaaaaaaaaaaaaaagatacgccaatgctgggaccacattctccacgtggtggctggggctgaggagtggccacctcctctggacaggccacgagtccctggggttccacagcccaccccaaccccttatctcctcctcactgtggccccagggtgagctgccaattttcatcatgtcaatgttgtttcttacttttaaaaaagagagaaata

SEQ ID NO: 777289 - DNA, 668 bp, Homo sapiens
aaaaaaaatcagaaggtcaggtataggtattatgaccacattttaatcactcataaaatggacattctggaatgctgtatcagctcagggcagagtactggggacactatattgagtaaggtgtggttctcctggctctatgaagaaagcagaggagaaaggctgtggctttcttgcttctgaaaggggcacattaaggatggggcggggcgggcagggagtgaggggcagcatgcccaaacccactccaaagccactcacccggcttgacagcagaatcaggactagaaccaaggcctcccaaggtgatggctgagtcttttccattctaccaggctgctccagaaaacgcagcccctggtcttatgctgctcaaacggaagcaagcaagtgaggtttgctgccgactctgacccttacctccaactcctccaggatcttcagagatcacctcatccaaacagctttctgggaacggccagccataacaaatgytaagcatttattatgtgccagacatggtggcaggtgctttgcagcattatctgagtgattctcacaattctatgtggtaggtgctaggattcccacatcacctccatattgcaggtgagaaaatcaatgttcagagagggaaagtgatttgcccgagaagacacagctagttt

SEQ ID NO: 777290 - DNA, 620 bp, Homo sapiens
ctttctctactcactctactgtcagattcagcagggagaggccctgggtcggcactgctggcggggagagcagccgagaagtgtggttcgcctgcctcctttccccagcggctgctccacagagttctcagcccaggccagccaagccccagcccaggtccagtgaacacaggagctggggtcacccccatgtcatactgactaggggcttccccrgaagacatatcctggggtcctctccctcaaggctcagtcctcggaactagtctggaaatggcccctcacctgtgggcttgatacctgggactttgatacatggaaactcctgaagaggcagatggcaggtgagtgggtgacaaaaaaatgcaggagtgtgggccagtgcattcttgggcttaaggccaggctgggttcagcgtctccaagacaaaggggtcagccaacaggcgtcggaagggagccagagctgatgggcacgggaacaagccggagatgcccaggccactctgacctgctgaggcgagggcttccctctaggcggagaggggagaagggacatttagagtgccagtgtggattgtgtcagccgatccggcaagatagttattaccatctgcttg

SEQ ID NO: 777291 - DNA, 596 bp, Homo sapiens
caacatgggattctgtaagtaacatcagtgaacttctacatgattggtaaattcaggaagacagcagcataacttctgagctgcattggtccgaaggtgatatttctcaggcatgggatcgggaagggttgaacattaactttcagcaagaaaggaaaagccctcagctcagctaatgcacacagcaggctggtcagctctactttttttttttttttgagacggagtctcactctcttgtccaggctggagtgcagtggtgccatcttggctcactgtaacctctgcctccagggttcaagtgattctcctgtttcagcttcccgagtagctgggattacaacaggcacccaccaccatgcccacttaattttygtatttttagtagagatggggttttgccatcttggccaggctggccttgaactcctgacctcaagtgacccgcctgcctcagcctcccaaagtgctgggattataggcatgagctaccgcacccagcctggtctgctctattttaagatgactgaaaatgagcgctcgcgcctggggcttcctctcctcacagaggcgccttccagccctgtaactctcag

SEQ ID NO: 777292 - DNA, 599 bp, Homo sapiens
cagagaacaaagttggggcccaatacaagtcccccagagttaaagcacacagtccaggtgttggtagctgagttttggacccctaaaatctctcagaaatgaagctagtcagaaatgccacaatcaaaccctcagggtcatcaaaaaggaaaaaagaaaaaaaaatctaagggttagcaacctcaaagattgaagctattaatagatgaacccacgaagatgagtaaaaatcagcacaagaaccctgaaaactcagaaagccagagtgccttctttcttccaaatgaccacatcacctcttcaacaagggttctgaacttggctgagagggctgaartgacagaaatagaattgagaatatgaataggaaggaagatcattcagctacaggagtgcattgaaacccaatgcagggaagccaaaaatcatgaaaaaaacattgcaagggctgacaaacaatatagccaatataaagaagaacataactgacctgagagagtagaaaaacacaccacaagaatttcataatgcaattacaagtattaatagcagaatagataaatgaagaaaggaatctcagaatgtgaagactgcctttc

SEQ ID NO: 777293 - DNA, 652 bp, Homo sapiens
cattttgaattgtggttaaagttgtgctcaatttaggttgtaaattgcaattattccaaagctcctctgtgagagactgccagatctaactgaacaacaccgcaaaaagattaattgttcagtaagtattattgcttcaactatatctcacagatatacaagcctatattgcttactttctgccaaaggaaatttaattttcgctaagaaataaaaggtaggagtcagaaagaattcatattatttttcaagaagaatttacttcgtttctcaaaccatcaataaaatgaggattagactttatgccctgcttctcttaaatatattgtgactgttgacttttgctatagtaaaaatattttctttgacagtgcaataaaattagatgtactcaaaatacttgagcaagcagtgaatgcttttaagtagagaaaatataatttttaaaatacaagcattaagattaaaaaagagccctactccaaaaaagaatatctgtcagaaaakttatttagataacataatattagtagcatctgaacagaaatgtatgttatgccttagctgtaatataacctgcatggaagaagagattaaatgtgagatttttaaatacctttaccttaaaaaaagaaatataatatgcattctt

SEQ ID NO: 777294 - DNA, 584 bp, Homo sapiens
tgaattggaatgatagtcccaaaggatttgtaggcatgtaagtgtgtaagcctttgagatatgaatgaccagaggcatttcagacagtcaggtagactaatctttaagcagtcaataaaacagtgaatggatgggtggatggaygaatggatgcatggatggctggatggatggatggatgggtaggtggatggatggatagatggatagacagatgaatgaataaactgatagcaattcattctaatagtcttcattcctgtgaatagtttacgcattgattcagcaaatagccatgacatgagctgctttaaacattgggaatataatgtaaacaacacaaagccccaaccctaaaaccctaaatagcttaatagtataatggctgcaaagctcttacatttgtctctactgcagttctctaagcaaaaacaatagtcacttgtgctaataagtctttctaagaaaggaactaaccgagagtaacttaggttctaaagtgatgcagtccattatctctcagcaatgtagcaattacatttttatgcatgacgagtggaagaggcatgtatctgccgttaaag

SEQ ID NO: 777295 - DNA, 514 bp, Homo sapiens
ttaatttttatatcaactacataggaaaaatgatctgttttgtacatgtaaaatatatgcatgcatatgtttatatatgtgtatgtgtattgcaatggtaacgtggctttcaaagtttcatcataaatgctatatttacctatttgtcataaaagtgttttcaaatgccatagaggcataccttttattttgaagctttgaatcttgaaagtcttcttttgttaatatttatctttttctaaaaataaaataagtaattttaaagaaaaaaacaaattaatacataaaattcacacacayacacacatatgtgtgtgtgtgtgtgtgtgtgtgtgtgtatatattctcttaattggaagtccaaaacgtcgaatatatacattgaatttagaaaactgaccctatgtaaattagcttctttagtttctctagtatctacatgagacttatttttgttccttcaattgattatacatttttttcaaatcctgattaaaatataatatataactat

SEQ ID NO: 777296 - DNA, 639 bp, Homo sapiens
acaacattccctattcaggcttctcctttcaccatatttctacctccacgtagtgtagtgaagaaaacgatagagcaggaaagaatagatgctgtggaaggtcatcacaacctatggttaaagttttcaaagctgccactcattcagaagaagggaacagagaataggcaaatcttgggcaggaatgaatactgggatgtacagatgttaactacgactttatttaagaaagttagacaaagccgttaggaaaagctgttgtctcacaagagcaggataagctaaatgaatccatgccatatgtatagaattaggctggctcttccagagtatgaaaaggggaaataaaataccatttgctcatgactgctatcaccagatactgattccagatctgagaawtggatgagaatgtgagcagacattgagataattgatgcaaggacgacctgtgaacagcagaatgagttaagttttccatcccacacaattcctggaaagtatgggaaggttatgatctttgtaatatctgttatacatgcaatgggggctgcttgcatgtgtcttgggagggaattatatataacgtatactggcaacaatctttcacagaagttatttttaagtgtagagaaaatg

SEQ ID NO: 777297 - DNA, 639 bp, Homo sapiens
acaacattccctattcaggcttctcctttcaccatatttctacctccacgtagtgtagtgaagaaaacgatagagcaggaaagaatagatgctgtggaaggtcatcacaacctatggttaaagttttcaaagctgccactcattcagaagaagggaacagagaataggcaaatcttgggcaggaatgaatactgggatgtacagatgttaactacgactttatttaagaaagttagacaaagccgttaggaaaagctgttgtctcacaagagcaggataagctaaatgaatccatgccatatgtatagaattaggctggctcttccagagtatgaaaaggggaaataaaataccatttgctcatgactgctatcaccagatactgattccagatctgagaaatggatgagaatgtgagcagacattgagataattgatgcaaggacgacctgtgaacagcmgaatgagttaagttttccatcccacacaattcctggaaagtatgggaaggttatgatctttgtaatatctgttatacatgcaatgggggctgcttgcatgtgtcttgggagggaattatatataacgtatactggcaacaatctttcacagaagttatttttaagtgtagagaaaatg

SEQ ID NO: 777298 - DNA, 619 bp, Homo sapiens
ctaagttctgcaaataacatagctctctttctcttccaaaacttcaataaattctagcctgtcattttaaagaaaattattaccaaaaaaaaaaaggaaaaatagaggccacattttgcctttctttctctttgcacaactggcagtctatatatcacttattttttatacaactaataggcaaatggaaattagaaaataacaataaaaatttaagggcaagcatgtcatttttgtcacaataaaaatggtaattgtaattttcattgccaatatccacagagtgatatttgctgaagtggtcaagagaccaagagactagaaagatctttaaacacagtacaatttgagagcawctccttaagctaattaataggcaaagagaaaaagactgtacaagagaagaaattttggacttcgtttgactttcagtttcatatatgacagactttgtacttgggagataggaaacatagtacgctttatgtttaactgtttgatatgtacatcttagtggctttccagtgcctttttcttaggagaacagtcctgcatgaggcctacaaagacctgcatggtttggcctctacctacttgtctaacttcttctaaaaccatg

SEQ ID NO: 777299 - DNA, 554 bp, Homo sapiens
aaacatgcaaattattttgaacagtcaaaatctatatttaaatgataaattttaaaagaaaataagaaaaagcttaaatgatataatccagagaacaatcaatattactaaatatgataagctgcaatttactaaatcatttaaagtttccttgtcctatataatttggtagataaatatttgtctaaagaagtttagatgactgattttatcccaatgtacttattgatcaatagcagtatgaacgactctggtagacstagtagaacaaagtactttatctgagaaatcaatgcaagaaaatacctgaaattttaataaatttcacataaaaaataagataattttaataaaaaagaataaatgctgttgctattgaaacaaaactttttcattagaggtgtgaaatttctctcttggacacaattcatttgagatttattttgctactttcaaaaaatcgaggctgtcttgagactttctgaaatgattagttctgcttcctatttccacctgacaggcagagacttgctctttattatctctgagattgc

SEQ ID NO: 777300 - DNA, 583 bp, Homo sapiens
  misc_feature 1, 2, 3, 4, 5, 6, 7, 8, 9, 10, 11, 12, 13, 14, 15, 16, 17,18, 19, 20, 21, 22: n = A,T,C or G
nnnnnnnnnnnnnnnnnnnnnnagatttgatgagcataaattctagttttgataaattcttttttttttttttttttttttctgagaccgagtcttgctttgttgcccaggctggagtgctgtggccagatctcagctcaccgcaacctccgccttccgggtttaagcaattctcctgcctcagcttcaggaatagctgggattacaggcacccaccaacatgcccagctaatttttgtatttttagtagagatggggttttaaccatgttaggcaggctggtctcraacatctgaccttgtgatccacccgccttggcctcccaaagtgctgagattataggtgtgagccctgcgcctggcctgaattcttataaattctaatctattttctttattggttggtgcattttgttctttctaaaaaatcctcttatattccaaggttattaggatgtccttctatgatttctcttagaagacttcactttaaatatatgtttcatctgacataaatttttgcgtataacttcaggtaggtgttgatgttagttttcttttctatgtggatatccagcagttct

SEQ ID NO: 777301 - DNA, 622 bp, Homo sapiens
ctacttatctgtcttgccctcttcacagtgccgcatagcgagagggttggctacccagggggcttcccaagcagaggaacctctcccctaggctctgatttcagcaatatctgcaccagatttgctctctgttgagtgtatcaaggcagactgcaatttggtggcactggaactttaatcgtccactgtttattatggcattatctttaataggatgcttattgtttacatttctgtgagctccgggaggaagcacgtgtgccatgctgaacatgactcttgggaaatgttctgtaatctggcaaagcagagacccagcaggcaattctcgagggtcagatgctgtgcgcggggcaaacagctccgcaaggcagaggccggcagtctgtgcctcaaagtggraaggcatcaggtgcctagtcttacttaatgaaaacatgaaagacttcacttaattgctccaagattatgcagggtggggtttttttcccccttcttttaggttgagcttgttaatttctacagctgtgatgttggcacagttgcagccccgagtcctgttttcacaacttgtaagcaaaattaaaacttccctttttaattaaaattcaaaccaagccag

SEQ ID NO: 777302 - DNA, 623 bp, Homo sapiens
agcggaatctatcaagctcccttttaattttacgattccctgctagaaaggaaccaaacaggacatgtcgtttccacagcaatggtttctgattagtaccactggataacataaaggtggagtatatatcttccccttggggcactgctggagaaaaggcagcttaggtcagcccgatatattattagatgtccccattgtcctacagaaacacagctgcaggtatattatttctggctggaacaatggtaatacaaaggaaaagcagagacatcaaatgaacctttactagctggctcatttttccttctctacatagcctgcatggagcagggcaatctggtcccagagtcaggggttccagctaaagccccatatgtaccaacacacagccagwgcctccacctccagccacgggtttgccccatgctccctccttgctgagctcctgcaaccttgcttacttcctagagaaagcaccagcctctgagtccccctgctcagccctttcccatctacaggaggtctcaccacccagtcttaggcccacgaaatggccttggcacctgccaaagactttctcaagtttgtgaaaagaaagggaaaaatatgatggaacaaag

SEQ ID NO: 777303 - DNA, 582 bp, Homo sapiens
gagctgagattgagccactgcactccagcctcggcgacagagcgagactctagctcaaaaaaaaaaagggatgggggtaggatagagagaattccaacaataattgtgtgtacgggtttatttatgtcccccaagccaccttgcctgtggtccctgatgctctcctccagccagtgtagacacctggctcccttccttctggcctccagcccagctgacyaccactgctggagagtgggtaggggctgtggctgctgcatccttcctagcccaacttctcctcctgccatgagcttggaattctgctaagtggccgcgggaaggggctgtatcacatgctgtttacttgtgggcagtttttgtttggcttttgagggtgtttgcttgcaatgagcaaacagcctcttccagaaccagctggaggattcaaatcctcccatcttggggcagcaggttcatggttctataagagccaggttgggtagggatttttccagaaatgccatcagccaaagaaccggtcaaaaacagcagaggggataagattagaagagagaaagggagagaaaaactgagaagagt

SEQ ID NO: 777304 - DNA, 612 bp, Homo sapiens
tccctccataccagttggaatgttctggctgtgggaagccaaaatcccaacccaacctggcttcagcaatgaggagttaccatttctcacagcaggatgtccagagatggggcttggagatgtcaccagggtcgtctgtatctctttggccatgccgtcctaggcactgtctttgcctcaagctggtttccgcatggtcagcagatggcagccagcagccttrggacaacaccttctttttctgtccagtgggtaggaacatggcatgcgacacctcattcctcagctgaattggtcccactcaggtaactttgccacggctgggccagtaactggcccaagaagtaggctctgctgacagtccacctgaggtgcaaggtctgagcttctctgagcctcgtgggtgtcagcaggagggtggctttctgggcacactagggatgttgttaggaaaaggaagagggcagtggctgctgggggaagcaacagtgtccattatgtcgtctgtcagtacactcgacctggacgcccaagaagcagagggttggcgactgaccaggcccaaggtgccaccaatgacatagtgacagcgttcactgtctggtctgtctc

SEQ ID NO: 777305 - DNA, 644 bp, Homo sapiens
gatcccaaggcacttttacaacctcctcatggcacatgctcagcctcctgttttggtagaaaccagatgacatcactttttgtttctatgaaaaagtctaattattaaatcacatgaattttgtgtgtttgtgtgtgtgtgtttgtgtgtgtgtgtgtgtcacggagttttgctcttgttgcccaggctggagtgcaatgacatgatctcggctcactgcaacctctgcctcctggatttaagcaattctsctgcctcagcctcccgagtagctgggattacaggtatgcaccaccatgcccggctaattttgtatttttagtagaaacggggtttcaccatgttggtcaggctgttcttgagctcgtgatctcaggtgatccatctgcctctgcctcccaaagtgctgggattacaggtgtgagtcaccgtgcccagccgatcattttgtttaagtttagaattgttagaggtgatgtacctaggtcaacaatcgatgtgtaaactatgccatcaacactatacaggcttcagaatggagactatactaggcataaggaagtggtctatttggatggctatacgtatcagctggacagagagaactatacagccaagaaagaaaggtggccaactaaagagaa

SEQ ID NO: 777306 - DNA, 606 bp, Homo sapiens
tttcttttatagttttgtgaaaaaaaaaactcttcaatattgcaaatttaaacctattagatgtcacaaaatgtttatctgagaaaaagtagtaacaaaatgtcttgtgaagttatcaactacaatatgcatgctgttcactgaggttagcaaattcttgtaaaaaccagggtgctgtctcaggaattacgatgatctcttctttttggagtaacactattgctgcaaattctgataaattgagatggtctcaaatggtgagtatcagcaaaaacgtgaaaaagaaaaaaaaaccttcaaacaargcatatcaaaaaagacaatcatctctactgattttaaacatcattccaaggctcagagatttacagaaaggaatgagtttcagccagcatatggttgcagtagtaatattgtcattaaatttgggtttgggaatacatgctaagcataaacaaacaagagctaacaagacctgtggcctaagcaaggatgaggaggagcaagagcagtgggcaagtctgagattttgagtgaccagcttccaacagcaatacgtaacagcaaaatgaaaaggaaaccacttgaaatcaggatcaaatatac

SEQ ID NO: 777307 - DNA, 604 bp, Homo sapiens
  misc_feature 363, 364: n = A,T,C or G
taagtagatgcaaatcccacctacaaatcagtttaagaatactggaggcagggagcggtggctcacacctgtgatcccagcactttttgggaggccgagatgggcggatcacgaggtcaggagatcgagaccatcctggctaacacggtgaaaccccgtctctattaaaaaaaaaattcaaaaaaaaaaaaaattagccgggcgtagtggcggttgcctgtagtcccagctactctggaagctgaggcaggagaatggcatgaacccgggaggcggaacttgtagtgagccgagatggcgccattgcactgtagcctgggcgactgagtgagactccgtctcaaaaaaaaaaaaaaaaaaaannaatactggaaatattattaaatagcctacaagtattttgaagatttcttcccttatcttcaagataatcataagcacatcccckttcagtaagatgcaaattaacttatttctgacacactagaagtaggaagggaaaggagttggattgcaaaatgatttcagcagccacctgtctttcaacccaaaataacacagaaatagatttcatctaatgatgaataatgatgcttttactatt

SEQ ID NO: 777308 - DNA, 578 bp, Homo sapiens
ccctttagcattttttgtaggacaggtctgatgttgaagaaatctctcagctttggtttgactggaaaagtctttatttctccttcttgtttgaaggatattttcactggatgtactattgaataataaaaggtttttttttctggcatttcaaatatgtcatgccactctctcctggcccataaggtttcctttgggaaggctgctgccggatgtgttggagctcttttgtacctcttttgctgctttaatgattctttctctttgacctttgggagttttattattacatgtcttgaggtagttatttgggttaaatctgctaggtgtgctctaaacttcttgtacttaaatatcaatatcttctctaggttttgaaattattctgtttatatccctttaaagaactttgtrtgctaatctctctacatcctctataaggtcaataactcttagattttgccttttgaggctatttgctatgtcgtgtagttttgctttattatttcttattattttttcttttgtctcctctgactgtgtgttttccaataggctgtgatatgatttggctgtgg

SEQ ID NO: 777309 - DNA, 432 bp, Homo sapiens
  misc_feature 176: n = A,T,C or G
taagtcatgcgctccagtccaaggatgagacagaattgactctgacaggagaacataaactaaaagtgatagagatgaaaatatagaaagattttggtatctgaaaacaacatatttctattactacctgcattagtctgttttcacactgctataaagatgctacctgaaactgngtaatttttttattttaaattttgaagaaacttaatttcctcatattctgctataccttactctgtatggaaaatatcttttttaaaatagtacattttctyaaaggttatgactcctatcttagagaaatttttatttttgcttattttaaaaaaaaattcctggactaataaatccaaaatctctgctatagctgagtctgatcctttttccttctgtatttcaatggttttgggggaaggagtggcgtttggt

SEQ ID NO: 777310 - DNA, 603 bp, Homo sapiens
cctctagtaaattagcagtaagcagtagctcacgtagtcgtaagtggccgcagggctccagagctgtgatggacagggcactgaatttggagtcagattatctgtgtttgatgctgcgctgatgctatgtgagtttgagcaactttcttagccgcttagaatgccattaagtagaaatgatagataataaggtgctttcacatagaacatcaagaattgtttattgaaaaacataatgaaatctaaattcatgtacaagttgtcactgtacttctcaagtacctcacttccctgtatggtatgtgtttaatttaaagyttaacattccaaaggattttgcccaactatgtgtttaccaacattgtttaacatccatagcccaaactctttgattaacattaacaatttctagtcttcttttaattatatttaaaatttaaccaaagcaagggacaaagtaatgcatcgtgttctactttatcttcccttgagaagcagtgatctaaaccaaacactattttgaactactaactgcctctcgcacaaatataagccttcacttaaatgcacaaattgttattctagagatagcccattgtttct

SEQ ID NO: 777311 - DNA, 603 bp, Homo sapiens
cctctagtaaattagcagtaagcagtagctcacgtagtcgtaagtggccgcagggctccagagctgtgatggacagggcactgaatttggagtcagattatctgtgtttgatgctgcgctgatgctatgtgagtttgagcaactttcttagccgcttagaatgccattaagtagaaatgatagataataaggtgctttcacatagaacatcaagaattgtttattgaaaaacataatgaaatctaaattcatgtacaagttgtcactgtacttctcaagtacctcacttccctgtatggtatgtgtttaatttaaagcttaacattccaaaggattttgcccaactatgtgtttaccaacattgtttaacatccatagcccaaactctttgattaacattaacaatttmtagtcttcttttaattatatttaaaatttaaccaaagcaagggacaaagtaatgcatcgtgttctactttatcttcccttgagaagcagtgatctaaaccaaacactattttgaactactaactgcctctcgcacaaatataagccttcacttaaatgcacaaattgttattctagagatagcccattgtttct

SEQ ID NO: 777312 - DNA, 635 bp, Homo sapiens
tacgttgtttactaagaatttacatcaaaacaacaagctattgattggctatacattattctttgtatcacaaattctggaaacataagataatggctgaggcaactagtcaggaatgaaatgtttttaaacaattgtccccaggcatgggtgtagagggcataactaaagtcccatactcatgtttctctgggcctgataaattttgtgtatctcacataattctyggattgttctgagctagttttctttttcatgtccctctgttggttaaaaatcttcccatagaagcattgatgatcgccctctgctgagattagagtaatagatacttttgccaggcgcagtggctcacgcctataatcccagcactttgggaagccgaggtgggcagatcacaaggtcaagagatcaagaccatcctggctaacacagtgaaaccccatctctactaaaaatacaaaaaaattagccgggcgtggtggcaggcgcctgtagtcccagctactagggaggctgaggcaggagaatggtgtgaacccgggaggcggagcttgcagtgagctgagatagggccactgcactccagcctgggcgacagagcgagactccgtctcaaaaaaagaaaaaaaaaa

SEQ ID NO: 777313 - DNA, 617 bp, Homo sapiens
ctcagatgatagagctgcacaaagactacacagcagtgctgtcactagtgccagtacctttgcacctcacccagaaagtgccctcacagcctccctcatttgggaaaggactttttacagagaaacaagtccataaactttggaataggtgactggaatacatcaaacatgcagacatcaatgtaaaaggcaaccagacacatgaaaaaccaaagagacaaaacatcaccaaaagaacayagtaatttcccagtagttaattccaagtaaatgaggatatacaaactgccaaaaagaatttaaaaataattgttttaagaaagcttagtaaacttcaaaaaatacagaaataattcaacaaaatcaagaaagtaagtaaatgtccaaaacaagaaatttatcagaatggttgaaattatatacattattaagaaacataaaatctgaagctgaaaaatatagtgaaatgaaaaatgtaatagagactgtcaatagcagaatttatcacgcagaagaaagaatctgtgaacttaaagactggctatttgaaaatatacagttagaggaaaagaaagaaaaaaataagaagaaatgaagaaagctgacaggatttatgg

SEQ ID NO: 777314 - DNA, 513 bp, Homo sapiens
tgacaagagattttggctgatggaatttaatactattcaattcatttcatagatcttgacaaagccatacctttgttagccatttatcttcagatgacagttacagaaacttaaacagcttaagcaacaaggagaatgtgttggcttctgtaactgagaagtcatgtttggctgcatccaagggttcagrcaatttcattactactctctctcgtactcactgttggctctattgttaggcagatccctccctgcttcataatggctggaactttcagagtatgtgccaacctcagcaacatctgcaggaagagagcttctctttcaacaattgtcccaataaaactcccatgattttctctgtttgcactaactgaggcttcaagctcttcccttaactaatcactgtggctggtagttgattcctggtcacttagttccatgaagccttttaaagtgcagaagtcttatttggccaaaccttacacaccaggtgttgtaggttccaaagtg

SEQ ID NO: 777315 - DNA, 630 bp, Homo sapiens
ttaggaaacctgctgggttaagaatttttgataggaaggctacaggttgtcagtggcctcagtgcttttgggctatgctcttgtttacactgacaacaaggtggtattggagtgttatagggttacagagaagaccttcaattatcaattatagattttacatttaccctggcttttaaaggaatagggtacactgtttcttctttactacttctgtctctttctgtctctttgacttcttctttctctctgacttcatgtctgtcwcttcctctctttccttctctctttgactttctgcctttctgtctgtctttgactttgtctctctgtctcttcctctctctgtttctttctctctctctctaactctctgctggtctttccctgcctctgccagctgcttatgctgctgttctcccctctccttccctttggatggcttcagcagtgtaagactgccacctctttgggtttttgcactgcatgcagtaactccatggtttccttgtgatatttaatgggggttcccctagaggttagaaactcgcttttttcccatattgcagcatgggcatgtaggattagataagcatacttactgtctatagcaaaatctcccaattacaa

SEQ ID NO: 777316 - DNA, 627 bp, Homo sapiens
ttttataggcttacaacatgttgtatagttttcttcaaagattagattcagtaattttcagaaaattactttctcatcatcatttaagtccagctaaagagtctttcagattattgctatagttagtaatgctttcttaagtgattcatctggcttatatatcccacattttcctaaataatttmttcattaaagtacatttatttagggcattctttatatgtaagactttacttttaaatcttttacaatataagcctatgatgtcatagctttatagcacaaacatagaatatctaacaataattaactagaaaaaaacagaagcaacctaaaaggataatttacattaacctctacttttaaaagcctattttacatttcctattgaatgattctttccagatgtaatagcacaaagaacactgttagagaaggggaaaaaagtgagaaaaatggaaataggagataaattgagggaaataaagaaaagcaaaatagcataaaacaccattctagctaatgcttttactttacattttatcaaatacactaatctgttgtttctctattcatgcgtttttgtaaaagtagcatcattatttggatctgatccctttgaaaatc

SEQ ID NO: 777317 - DNA, 632 bp, Homo sapiens
taaaaactaaagtttaaaacaaagtgtattttttatgtgttcctagcaatgtcttttttctatttttaaattttgaaatcttttattgacaaatacaaattgtgtatactcaaggcatacaacaagatgatttgatacatgtatacattggggaaccatcattatagctgtgtgacatcagacaagttacatgacctcgccatctccttaartttagggataataatctgccctgtatgataatcagaaggaagagcatacgatgaaattgctttgcaaactgaagcacattacaaattttagtcttaactaattatatatatacacacacatgcatatatatatatgtttataagtttacgtgagtgtgtgtctatatatgtataaatttgagactactgcaaaggggaaaaatttctctcttatagataatttagtggtgggtgtaaatcagccagattagtaatcctgcttcaactacggagtagctggaaggatgaaatcctttaggcttttcttagaaaagaaagttcatttcacagacaaggtggctgggaagccaagcctgaagaattcgtttctgttccccttccctctctggacctgattccatggcaagggatatccttggg

SEQ ID NO: 777318 - DNA, 605 bp, Homo sapiens
taggctcttcaggtttaaaatagtagcctgatacttttgtataatttttatcttgattactagctatctatggagctaatagaaaatcaaataaggttttgagaaatcaaaggtttccagcattctcctactttattgaaaaaaagaaagagaaaaaagataaaagagagagwctaaaaaaagaaatataaaggagatgatatgagaattgcagatagtagttagctattttccttccggctaaagggtttaaaagacaacctgtgagtccatatttttatagctttcatttgcaatatacaaaagtattattaggcaagcaagtaaattgctatatatatcacatgtggggaaaaattcttctttttctattacataaatatacatcttgaacaaaatctggtaagacattaaatgttggccccaaatatctgcattaccgcagcctatatcaataaaatgaaatcttaggtttgtgccatgaatctttattcagattattatttgtagattgatgacttgctgaaatgaaactaggatggcgggtcaagatttttctactgagttttcttcatgaactgtggaacatatggcattgctgtgac

SEQ ID NO: 777319 - DNA, 605 bp, Homo sapiens
taggctcttcaggtttaaaatagtagcctgatacttttgtataatttttatcttgattactagctatctatggagctaatagaaaatcaaataaggttttgagaaatcaaaggtttccagcattctcctactttattgaaaaaaagaaagagaaaaaagataaaagagagagactaaaaaaagwaatataaaggagatgatatgagaattgcagatagtagttagctattttccttccggctaaagggtttaaaagacaacctgtgagtccatatttttatagctttcatttgcaatatacaaaagtattattaggcaagcaagtaaattgctatatatatcacatgtggggaaaaattcttctttttctattacataaatatacatcttgaacaaaatctggtaagacattaaatgttggccccaaatatctgcattaccgcagcctatatcaataaaatgaaatcttaggtttgtgccatgaatctttattcagattattatttgtagattgatgacttgctgaaatgaaactaggatggcgggtcaagatttttctactgagttttcttcatgaactgtggaacatatggcattgctgtgac

SEQ ID NO: 777320 - DNA, 617 bp, Homo sapiens
gtatgtgattttctaatttaaagcaatcttagactccttgggtgagcaattttgacactggtgtgtttaaatattcactgatgagtttgatttgtaaatattacttaatattttctatctatgttcatacgtgacactggtttgcattttccttggctggttttcatgttaatgttatattaaccccacaaaatgaattagtgtatatyccctctttgcctatgctcttgaatagtttgtataatttagaatcatctgtcctttagatatttggtaaaatagttggcccaatttctttaatgttaattggggcaaccaatttttctacttcttgaaacagtacattaaatttacctaggatactgtccatgtcacctgagttttcaaatttaaataaaggaattcatggtatatataaatttttaaagtttctactataaacttcatttctaacattgcttatttgtgccttgtttctccttaactaatcctcataaagatttgccaactgcatcttttcaaaattgttgatcctaacaattccaatttctagttcacgtctgctcttattatttccttccaagttatttgaggtttgtccttttgtaactgtttga

SEQ ID NO: 777321 - DNA, 589 bp, Homo sapiens
tgagcaaaccagatacttactgctgaagtgagaaaaaaaaaaagacattatatcaactcccactcaaatcgagctgcagtaggcagctaggactcacaggcttagaaaatgagacggagcccactctattataccagctgctcagccctatacgtgtctaagtktttagtgctgggtagcactaaaggagatacaactatgtttatatccagcttatttcctagcaaatgtttctttataataaaaaaagaatacaaataaaaatcagctcaactattttaagctatttatcctattcccaaatatgacaagaaaaaaaaagaaacgcttacaaaagtttcttaaatgctttcttaatgatttagactaatagcataaaaggtagcacagaaattaaccaaatttagatgccaccttaatcctggattgtacttcataactaactttcggaatagaagtgaccagaatctaaaataaaaaggtaagtaggtacagaaatataatcaaggggaataaatacgtatagcacataacaatgaactcttaattcttgaaaattagaaggcttaactccacaataaaaaaataa

SEQ ID NO: 777322 - DNA, 623 bp, Homo sapiens
gccatcccattactgggtatatacccaaaggattataaatcatactgctataaagacacatgcacacatatgtttattgcggcactattcacaatagcaaagacttggaaccaacccaaatgtccaacaatgatagacattgtgtatgtggcacatatacaccatggaatactatgcagccataaaaaatgatgagttcatgtcctttgtagggacatggatgaagctggaaaccatcatactcagcaaactatcgcaaggacaaaaaaccaagcaccgcaygttctcactcataggtgggaattgaacaatgagaacccatggacacaggaaggggaacatcacacaccagggcctgttgtggggtggggggaggggaagggatagcattaggagatatacctaatgttaagtgacgagttaatgggtgcagcacaccaacatggcacatgtatgcatatgtaactaatctgcatgttgtgcacatgtaccctaaaacttaaagtacaataaaaaagaaaaagaaaaaaagaaaatattattttccaatttttatttattttgggggactcttttttctataaacatcttttaaattttctttatctgatgttctgcaattt

SEQ ID NO: 777323 - DNA, 525 bp, Homo sapiens
gtttccatgactgcataacattccttcatgcttcttcccctattctaatccccaggcaaccactgatctgctttctatcatcagatccatcagatacacaccattctgtctcttccagaatatcacacgaatcatacagtatgttctcttctgagtctaggttctctcactcaggatgtttttgagattcatctatattgttgtgtgtatcagtggttagtttctttttattgctaagtagtatttaattgtttggatataccacaatttgtttatgcattcaccagttcatgggcattttgttgtttccaagttttgactaytgtgaaattaaagcgctattaacattgttatacaagtctttgtgtgggtatgtttattctctctctctgttgaaatacctggccatgtgcagtggttcacgcctgtaattccagcaatttaggagggcaggattgcttgagctcaggagtttgagactagcctggacaacatggtgaaaccccgtctctgaatctaaaaaaa

SEQ ID NO: 777324 - DNA, 647 bp, Homo sapiens
ttgaataatctcctgcctggtaggtattcagctgtatctgttacatgtaatttgagtacttaggaacatttgtcgctgttccagctttcacttgaatttcaaaagctgctgcttttagtttgatagaaaaacttcatggtaaaaatcaccaagatgccatgaactacagttggtataaaaattatgcaaatattaatgctgtatgtgcagatgtatctcattaaggaattggagattgtaaggtctaattgggaagtttgacagctgttattaaactatcatgggttccctttgtggatgtactcactggtattttcattytagacatgcaggagaggattcattgactagctttttggaagagtatagattcattatgctttttaaattaaactgatgtgtctttaagtgaggaaaaatatgcatggtgtttctctaaaccttcatcagtttgctttttcccacaaatgggtttttagaaattcaagaaacagtacatgtagtgggtttcaaacaaacttcctacgcaaaacattgctccactgtggcccttttacatcctttttgggaattactgttgatgtaattacctgattcagtactgaatgccactgtgttgctgaccgggccttcaccaagcgggtttt

SEQ ID NO: 777325 - DNA, 647 bp, Homo sapiens
ttgaataatctcctgcctggtaggtattcagctgtatctgttacatgtaatttgagtacttaggaacatttgtcgctgttccagctttcacttgaatttcaaaagctgctgcttttagtttgatagaaaaacttcatggtaaaaatcaccaagatgccatgaactacagttggtataaaaattatgcaaatattaatgctgtatgtgcagatgtatctcattaaggaattggagattgtaaggtctaattgggaagtttgacagctgttattaaactatcatgggttccctttgtggatgtactcactggtattttcattctagacatgcaggrgaggattcattgactagctttttggaagagtatagattcattatgctttttaaattaaactgatgtgtctttaagtgaggaaaaatatgcatggtgtttctctaaaccttcatcagtttgctttttcccacaaatgggtttttagaaattcaagaaacagtacatgtagtgggtttcaaacaaacttcctacgcaaaacattgctccactgtggcccttttacatcctttttgggaattactgttgatgtaattacctgattcagtactgaatgccactgtgttgctgaccgggccttcaccaagcgggtttt

SEQ ID NO: 777326 - DNA, 647 bp, Homo sapiens
ttgaataatctcctgcctggtaggtattcagctgtatctgttacatgtaatttgagtacttaggaacatttgtcgctgttccagctttcacttgaatttcaaaagctgctgcttttagtttgatagaaaaacttcatggtaaaaatcaccaagatgccatgaactacagttggtataaaaattatgcaaatattaatgctgtatgtgcagatgtatctcattaaggaattggagattgtaaggtctaattgggaagtttgacagctgttattaaactatcatgggttccctttgtggatgtactcactggtattttcattctagacatgcaggagaggattcattgactagctttttggaagagtatagattcattatgctttttaaattaaactgatgtgtctttaagtgaggaaaaatatgcatggtgtttctctaaaccttcatcartttgctttttcccacaaatgggtttttagaaattcaagaaacagtacatgtagtgggtttcaaacaaacttcctacgcaaaacattgctccactgtggcccttttacatcctttttgggaattactgttgatgtaattacctgattcagtactgaatgccactgtgttgctgaccgggccttcaccaagcgggtttt

SEQ ID NO: 777327 - DNA, 611 bp, Homo sapiens
tatgggctttagaatatagttggggaaaaggctactggatacctggtattgctgcagaaaacttctttcagttgagcatcacagcaccaaatagcagctaatcaaataataaactctacttttctatagttcattattttgaactataggagtagttggtttttgtactcgctgcctacataagttatgctcccatgattattttccttgtattgaaaaacaaattaatgtccttaaagtctgcatagagrtctgcctaaatttcacttaagggcacatttctatgaacttgcagggctcatcaaaagggaaagaaatttagaataagggaatgccatttacacatttgttcattggatttctctgctctcatttgggacttagcttaatgcatgtgatgagatgatacagaggactaaaaaagaaccaaaaacccaaacaataaaccccactcaaaatcagctccattaatatgaagaaatatgcaagtactggacatcagacaaggtgaaaaggctgccaaagatctggcaagttatattagggatttctgctgttagcactgagcccagtggtatgagatgaacattggaaataaaataaaaaactag

SEQ ID NO: 777328 - DNA, 547 bp, Homo sapiens
acaaagtttgcatatctggctttaccattgaaacctcactgtcaaaccattcatagttggatgactcagtaatttgttccatatcctcccttaggatggcatctgcctgatctgatttatcagtagaggcagagattgctacagatgtcagtataagaggtgctttggtaactgagtaatcatcaacaccaggtacttctgatatgtgcttggggagggttagagacgcagattcagctgcagtatctgcgaagatgggcacagcaggcccactaagaggctcttcctctggaaagtgtrtggatctgtcatcatgttcatattttgagtgcttactaatttggtctgtggaatccattttgtcaactaaaactagtttcttgtcttcaatctcagctggcaaaagtgaatcatcatcttcaagccacggcttggacagtggttcagcgctcttctctgatgaagtctcactccatggccaagtaatcagatctaccttttgcccagaccctgaacctaaaccaccgtcaaatattaactctttttc

SEQ ID NO: 777329 - DNA, 739 bp, Homo sapiens
attataataaaattagataaggtaaataaggaaaacctgaatgaataatatggtttttttttttagagaggaaaagaaagaaatggtttcatgcaatagaatttacaggaagaataaagaaggccttggtgcctcatctgtatggccaagaagaggaggaatgcttcaaaaatgactttaatctttgaatttggccaggcacagtggctcatgcctgtaatcccagcactttgggaggccgtggtggtaggattgcttgagtccaagagtttgagaccattctgggcaacatatcaggacccctgttactgcaaaaaaataaaaaagaaattagtcgagtgtgatatgtgcctgtagtccagctacttgggaagctgaggtgggaggaccccttgagcccaggaggtcaaggctaccgtgaaccatgatcacccactgcattccagccttgatgacagagggcaatcctgtctctaaaaataaaatataaaaataagtaaggtttgaacttgagcarataatgtacattagatctaaaatcaaagataagttagcttttaataatttattttaaaatttagggttttttttttagcaactttattgaggtatattttacatattcacctattccaaacataccatttaatgatttttagtaactttaccaagtggtaccaccatcaccataaatcagttttataacatttttgtccccgaattggatccattatgctca

SEQ ID NO: 777330 - DNA, 498 bp, Homo sapiens
ttatatgtgttttaaataaattaagggaaataagcagtttttgatacttacccatttatttactttctattagtcttcatttcctcctaaagagccatgctttcatctgttgtcattccttttcagcctgaagaactttctttagtatttattgkaatgcaagtcttctgttgatatttgtttacttttcctttgtctcaaaaatgtccttattttactttcatttttgagggatgtttttgctgggtataaaattctaggttgaccttttgttttctttcaccatgttaagaatttcattccactgtcttctgatttccattatttttgataagaggtcagtagcaataatttgtatcattgttcccctgtatgtaatgtgttgttttttcctctgaatactttcaagatttctctttacctttagtttttatcaatttgactgtagtatttctaatcatggtcttcttaatatttatcttacttggtttgttgaac

SEQ ID NO: 777331 - DNA, 645 bp, Homo sapiens
cctcttaagtagctagtactgcaagtgttcaccacgaaacttggctaatttttttattctttattttttcttgagataaagtctcactatgttgaccaggctggcctcaaactcctggtctcaagcaatcctctggctttggccttccaaagcactaggattacaggagtgagccactgtgccaggccctagatcattacaatttttataagggataatgtctttgcattatgaaaacagatttttcttaatagcagagttgttaagttgaaattggatacaacattattttgttaaactgttattgagagtcaacaatcagaaataggaaacttgtcatggcatctcataattgcaatttgatttgatgatggtgaatgttatacatcctatctaagtcttctgtggattaacatattattggaccttctttacctacatcttgatccaaactscctaacatatagttgactggtataaaacctctttaaatatgtctttgaaaaattagttgtgaacaaatatgtaagtagccactagtgatgttctactactcattcttaaatcacagtgccatccttaaaaggggaatttggatgggattgatttaaatcaccagctaggaaaatttggtttcaggcagtt

SEQ ID NO: 777332 - DNA, 628 bp, Homo sapiens
tgactctgaagaaaatacgtgtgaaaaaaatagtaaatgcaaaaacaaagagaggaaaaaaattattaaaggctgttaaaaacaaccatgaaaccaagcacagattgaaataaactaagctgctaacttcttagttgtcataagaattgattttacacaattttgaataaaactcacatcctggacatatgaacaactccatttactttattaactaactttacttacaaatttgaatggtcctcaagaagaaagtacaagttcagagtaaagagatttcctacccagaccaaacaaacaaaaagccaaagaaactatattaaaatttaagatgttatttgtccctcattccttaaataagtatatttctgataaatcactctagaagtctctagagtaccaaagccaatatggagatctattataagcaaagaaacatttgataaaaaatgtggcactctagaacacccaatatataagcaataaatggayagcaagatgtcctattataccagataaatgctttcaatatctacagaataagaaaagtccctgcaacatctctacataaaatgaattactgacttaaaaaaacaatttgtcaagtttcttaattggctaataagtt

SEQ ID NO: 777333 - DNA, 605 bp, Homo sapiens
aacaatatcatgaaaattgcatgacatcttgtccttttttttaaacgttagcctgccaccatttcccctccattttaaaaaccattgtgccttataataaaacacacaaatctttctctagagggtgaaaggagggattggggaagggcagagaagggcccaagttcatgctatttgaatgactggacaatattartcatttattacagaagcaattttcaataaacttgtaactcatcaaaatgtatcagagaaacggatcacttgacatggcactgtttatgactagattatatgccagtcctcagatttaagatctgtaaactgcctaagaaattatgacagtaatatgacattaacatgacattaacattttatccacattaaagatattttaatttgcacacattcataggatgcactgtgtgttaaaaggaaagagaaagatttatggaattggtcttgtagaaagaagaaaaacttcatgctgtttcatctcatgatcacagtttgaggaaagtgtctgttttaatacgcagtttcaccctaaacctcaaatgtatattgtcttaggtgagaaaaatatattaaaatgttgggagaaa

SEQ ID NO: 777334 - DNA, 573 bp, Homo sapiens
actcttggactgaagcaatcctctcactcagcccccacctagtagttgggattataggcatgagcccctgtgcccacctaaggagcatttttatgtctactgctgaagctaaaagtggtttaggataaaagtggttgagggggttcttctcagtcagaaaaatttcagtattgatccctaatgtgaaacatcacaaytagactttaccactgttaagccatcaaactgctgccatgtgttggaataatcaggatattcagcatctgtatctgtcaaaaaaatcatacaaccaacaacggacaagtccacaagagcaagtgaggttcactgttgacacttctgattaaataccacattttacattcagatgtttttacaaagtttttgctgatgaataatgcagggaataactgtaggctttaaattttcgtagacttacattttcacaagctttgtagatttgtccaactaagcctctttccgctctctgttgttaactaccatgatatataacacatcttagcagattccacatcaggttgtactgaatgagtgttttctcaattttgttga

SEQ ID NO: 777335 - DNA, 693 bp, Homo sapiens
  misc_feature 225, 305: n = A,T,C or G
gttgctgaatagtattctattaaatattatggtttctatgaaacaatttgacttttcattcacctagtgagggatattttggttgttaccaatttttgactattacaaaaccagctgctgtgaaaattcatgtataagtctttgtatggacgtattctttcatttcttttgacagtagaatgtgtagatctatggtacatttatgcttcacttttttaaattaanaatttatttttatttttttggggcacgtagtaggtttatatattaatggagtacmtgagatattttgatatagtatatanagcgtaataatcacatcagaataaatggggtatccatcacctcaagcatttaccctttttgttacaaacaattcaattatactttttgttatttttgaatgtgtaataaattattaattactgtagcgatcctcttgtgctatcaaatactctttttcattctatctatatttctgtacccactaaccatcctgacttcccccaccacaccccactaccgttctcagcctctagtaagcatcattgtactctctccatgaattcaaatgttttaatttttgtctcccacaaataagtgagaacatgtgaagtttgtctttctgtgcttggcttatttcacttaacataatgaccgccagttccagctgtgttattgtaaattacagga

SEQ ID NO: 777336 - DNA, 693 bp, Homo sapiens
  misc_feature 225, 305: n = A,T,C or G
gttgctgaatagtattctattaaatattatggtttctatgaaacaatttgacttttcattcacctagtgagggatattttggttgttaccaatttttgactattacaaaaccagctgctgtgaaaattcatgtataagtctttgtatggacgtattctttcatttcttttgacagtagaatgtgtagatctatggtacatttatgcttcacttttttaaattaanaatttatttttatttttttggggcacgtagtaggtttatatattaatggagtacatgagatattttgatatagtatatanagcgtaataatcacatcagaataaatggggtatccatcacctcaagcatttaycctttttgttacaaacaattcaattatactttttgttatttttgaatgtgtaataaattattaattactgtagcgatcctcttgtgctatcaaatactctttttcattctatctatatttctgtacccactaaccatcctgacttcccccaccacaccccactaccgttctcagcctctagtaagcatcattgtactctctccatgaattcaaatgttttaatttttgtctcccacaaataagtgagaacatgtgaagtttgtctttctgtgcttggcttatttcacttaacataatgaccgccagttccagctgtgttattgtaaattacagga

SEQ ID NO: 777337 - DNA, 579 bp, Homo sapiens
ggggtttggtttggtcttctattttcttttgctttatgatgtatcgctggcttgttaaagcttttctgctttttttgatgtagattcttattcctgtaaactttcctcttcatactacttttgctgtatcccatagatttttggtgtgttgtgtttccatttttatttgtttcttgaaatttttttatttttctccttaatttcttcatcgagccactcatcattcagaagcatatcatctaatttccrtggtttgtatagtttacaaaattcctcttctttttgatttttaattttattccactgtagtaagagaagatacttgatatcattctaatgtctttgaagtttttacaacttgttttatggcttcatatatggtgtgtccttgagataatccatgagctgaggagaagagtgttctgcagccattagattaaattttctgtgaatatcaattaggtccgtttcctggatagtgcacataagttcaaattttctttgttgattttctctctacataatctgtccagtgctgaaattggggtgttaaaatctccggctattgtactgaaatct

SEQ ID NO: 777338 - DNA, 588 bp, Homo sapiens
ctgtgtatagggtcttcattgtgcctttgagttatcacagctttcttacttccagtatgcaaaactaaactaaactaaactaaactaaactaaactaaactaaactaaactaaactaaaaaggggaagagaggagaggraaaataaaaggcaagaaaacacagcaatgaaccaaacaaatttatagctgtagaagatggggaacatttaaggccatttatactatctaaccctttgacttgattcgatttctgtggaagtaaaataggcaagtcaaattattcccacgctagattttttttttactcatttcctttttgtaagtttttattttatttttaattgacacacataataactgtacagttttatcgggtacaatgtgatgctccttttttatttattttgagatggagtcttactctgtcgcccaggctggagtgcagtggcgccatctcggctcattgcaaccactgcctcccaggttcaagctattctcctgcctcagcctcccaagtagctggaattacaagcacccaccactacacctggctaatttttgtatttttagtagagacggtgtttcacc

SEQ ID NO: 777339 - DNA, 593 bp, Homo sapiens
aggtattccaatcatgacggaaagtaaagggagcaggtatatcacatagcaagaacaggagcaagatagagagtgagggaggggtattacacactttttttttttttttttttgagacagagtctttctctgtcgcccaggctagagtgcagtggcgcaatctcagctccctgtaagctccgcctcccaggttcacatcattctcctgactcagcctcccgagtagctgggactacaggcacccgccaccaggcctggctaattttttgtatttttagtagagacggggtttcaccgtgttagccaggatggtctcgatctcctgaccttgtgatctgcccrcctcggcctcccaaagtgctgggattacaggcatgagccaccccacctggcctacacacttttaaatgacaagatcttgtgataactcactcactatcacgaggacggcaccaagagaatggtgctaaactattcatgagaaatccacccacctaatccagtcacctcccaccaggctctatctccaacactggggattacaattcaacatgagatttggtggggacatacactgaaactatatcattcag

SEQ ID NO: 777340 - DNA, 593 bp, Homo sapiens
aggtattccaatcatgacggaaagtaaagggagcaggtatatcacatagcaagaacaggagcaagatagagagtgagggaggggtattacacactttttttttttttttttttgagacagagtctttctctgtcgcccaggctagagtgcagtggcgcaatctcagctccctgtaagctccgcctcccaggttcacatcattctcctgactcagcctcccgagtagctgggactacaggcacccgccaccaggcctggctaattttttgtatttttagtagagacggggtttcaccgtgttagccaggatggtctcgatctcctgaccttgtgatctgcccacctcggcctcccaaagtgctgggattacaggcatgagccaccccaccyggcctacacacttttaaatgacaagatcttgtgataactcactcactatcacgaggacggcaccaagagaatggtgctaaactattcatgagaaatccacccacctaatccagtcacctcccaccaggctctatctccaacactggggattacaattcaacatgagatttggtggggacatacactgaaactatatcattcag

SEQ ID NO: 777341 - DNA, 569 bp, Homo sapiens
agttgtctagcatttcaaggaatgaaagcctaaataaaggcattttcttatgtcttaaaaattccttctgactctatgcaactttggtttgccacctttccaaagaaaatgaaagaccaagatcattagtttacaaactttatgagtctctaaaattcttatgggttgcttttcatatcttagactccaaatcctcattgcaggactggggcagagttagctgctggaggagcagacacaaaacaaacatatcccaaatgggcatattattcttctttcaagaaacccttgggggatagttagtttgaggagccagaaggagggaagaccacatttatatctttcaagcgtacraaccttaatgccaaagagataatccaaggatggtagaggaaagaggtaagctgactaacaaagtggtctgtacacgaagtaggtgggagaaagcacacactgtaatatgaagagcaggtctaaatgctgcctgccccagatggaaatactaggttactctgaaatgattcattaaaactcaggatgatgggtgtggtggcttacacctgtaatcc

SEQ ID NO: 777342 - DNA, 574 bp, Homo sapiens
attattatcttcctgtcacctacactttaacccttggaatcacttctgattcttctttcccttaccatatcataattgtcaccctatataatattaagatctcctgaaatgctcttcccttctctgtttcttaagccctcattaattttctcctaatgtattcctttaatttttgaaaatatttttctatgttgagtcaattttattcattgatatcaaatcaatgttattgaaattcagccctgtttatcctctcaaaaaaatgacaatattttctgccatctgcaaaaaacaataaatgttctagayatattttatatcacttacctagtctggtcaaagcttatacataccaatttcccactaatttagagttatatgtcaaacgcatggaatttactgtcctgtttcatattttaggtaaatctgttggttttgcgggaaaagcatttctactaccttaatgagcaacctaaagatacttcttccatgaaattctgtttcctccaagattcctttaacatgtatcttcaatctcttatggtatttaccacttactagtgtgtattagggt

SEQ ID NO: 777343 - DNA, 622 bp, Homo sapiens
acccagttctgtatagttttggattacacaagaaagtagatgtcttaagcgactattatgttctgaaatattttttctaaggtcaaggaacagattgactgaatagcctttgaagatagggtaaagcccataaatctctattatgtcacagctctcctttcaaaaatgacaataatctgacttgatttgttaactaaataaaayagaataatccataccaaaaaacaattattttattcatggtattaagaactatagcctggcaatttagatgagctcgtattacaaagaaagacatctagggtaatacctttgcctagtgttactcacagagtcagtgaggcagagccatgaagaaatctcaagcctcttgattcccaggttagtataatatattttataccaaagaaagcggcctctaatctaggtggaaatgtctcctgcaactaattcaccaacattgagctaaataatttaaaccatcctatagcaaaaagactctgaatgaaaattcccttggaaggttccaaacacttgctttctaatattcaccacttattctgaatcccaaacaggcttcctatgaaaatattcttcccataagccttggtcttcaaagcat

SEQ ID NO: 777344 - DNA, 505 bp, Homo sapiens
gtaattgctgactgcatcaataaaggttctgtcagtgattagaaaacttattctctgacacctgctggccagccgtgtactccaaaaaggacagatttaatcactatggaaaataattctacaattctattcatgggttatcataaagatgagatagccaatttatggtgtgtttttccctgaaaacagtcccacacactctctctttcwcacacacacacacacacacacacacacacacacacacacagagctaccttttttgtgtggagacagcttgcttctttgcctacccatgagcctcacatgtaatgacacatgagaggtcctggaaagacctcacacgactaactgaaaattccttcaaatcaaggtgcttactcctattggaggcagcttttaaaatgcaaatgttattcaaggtgagaaatgtattctactcttaacacacattttcttcttgatttactctggttactttaggcagagcccagaaaacacatgc

SEQ ID NO: 777345 - DNA, 460 bp, Homo sapiens
atgccagcactctcttggctaccttagctggtatctcagtagattgtgtgcccccatccccccaagtccactgtctctgttcctagttcagcactaggattcacctaagattcgcagtccttatggcctagactgtctttcaagtttccttggaaacacagaayactcaagccatcagtggcgaggtttgccaaaactcaagcagggactgctggggttggcaattcccctctggctagggctggtttaaatgttccctctgtgttggggatgtcagttgagtttggtccgattttcctttctgctctaataccactgaggacaccactgtgttcaatgcctcacaattgctgtcctctccctcccccagtgcctggagatgctgtccacatcatgcagctgctcggggtaagggatggagagctggaggggtggcatctgtgtttactatctcttcaat

SEQ ID NO: 777346 - DNA, 460 bp, Homo sapiens
atgccagcactctcttggctaccttagctggtatctcagtagattgtgtgcccccatccccccaagtccactgtctctgttcctagttcagcactaggattcacctaagattcgcagtccttatggcctagactgtctttcaagtttccttggaaacacagaacactcaagccatcagtggcgaggtttgccaaaactcaagcagggactgctggggttggcaattcccctctggctagggctggtttaaatgttccctctgtgttggggatgwcagttgagtttggtccgattttcctttctgctctaataccactgaggacaccactgtgttcaatgcctcacaattgctgtcctctccctcccccagtgcctggagatgctgtccacatcatgcagctgctcggggtaagggatggagagctggaggggtggcatctgtgtttactatctcttcaat

SEQ ID NO: 777347 - DNA, 586 bp, Homo sapiens
ggaggaaaataagccctactttccctctaagctcctatgaacaaaacaaaacatcacagagctggagccaggcagtacattagcctgcattcagtaaagcagaaacaaagcagtattttacatttcctcttagaataataattaaaaaagaaactagcctttctctttttccttggaattgagccctgctgaccttaaatattttaccttttcccctatttagcagtccagtaggtaagaattactcgtggctagccagctggaaaagacagcctcccagmtccacctctgaaatttactttccttctctttttgaccatgtctgaagtggctccttctcagtccagcagtcagtattctttgaacatcaggactgctgtcacaagcagttgcaggtgtcaaatcccaataaatgtcaaagaaattgatttcactcattttgcatcttgggtttctcctagaagagtgagggttggtttaaaaaagagggtgtatgggaaaagctggcaaagtctttgtacatattggcaaagcataaagaaaggcaaagttggcaagagacagaataataattactaccatactc

SEQ ID NO: 777348 - DNA, 692 bp, Homo sapiens
aaatgggattctgtcatttgcaacaacatggaaggaactggaggtcaatatattatgtgaagtgtaagccaggcatagaaagacaatcatcacatgttctcacttatttgtggaagctaaaaattaaaacaatcgaacccgtggagatagggagtaggatgattaccagaggctgagaagagtattggaggttgagaggtggggaagtggggagtgtttgttaatggatacaaataaatagttagaaaaaataagacctagtatgcactggtacaaaagggagactattgtaaaaagaatttagttgtacattttaaaataactaaaagattataattggactgttacacaaaggataaatatttgaggggatggatacccaattttctgtgatgtgattattacgyattgcattcctgtgccaaagtacctcaggtactccataaatatatacacctcctattaatatgtacccacaaaaattaaaaattaagaaaatgataaaaataccttattgctaatgatcatcagaggcttcagtgagtgataaatttttactggtagtggtattcacctcaatattgttttttgctgacatcaggatggtggttgctgaaggctgtagtggttgtggcagtttcttaaaataagagaaaaataatgtttgtcacatcaacactttccttcacaaa

SEQ ID NO: 777349 - DNA, 612 bp, Homo sapiens
atcagtcaggagaaagaaataaaaggcatacaaataggaagagagaaagtcaaactatccctgtttgcagacaatgttattctgtatctagaaaacggcatagtcttagcccaagagctctttgatccaaaatacaacttcagcaaagttgcgggatacaaaatcaatatacaaaagtcactagcattcctatacaacaaaaacatccaagccaagagccaaatcaagaatgcaatcctactcacaaatgccacaaaaagaataaaatatctaggaatacagctaaccagggacataaaagattcytacagggagcattacaaaacactgctcaaagaaatcacggatgacagaaacaaatggaaaaatattccatgctcatggataggaagaatattgttaaaatggccatcctgcccaaaggaactattctatgagaccacagtaaacgaaatagcatggtactgttacaaaaacagacatataaaccaatggaacagaatagagatcccaaaaataatgatgtacacttaacaatgatccgttctttgacaaagctgacaaaaacaagcaatgaggaaattactccctattcaaattccattttttttt

SEQ ID NO: 777350 - DNA, 612 bp, Homo sapiens
atcagtcaggagaaagaaataaaaggcatacaaataggaagagagaaagtcaaactatccctgtttgcagacaatgttattctgtatctagaaaacggcatagtcttagcccaagagctctttgatccaaaatacaacttcagcaaagttgcgggatacaaaatcaatatacaaaagtcactagcattcctatacaacaaaaacatccaagccaagagccaaatcaagaatgcaatcctactcacaaatgccacaaaaagaataaaatatctaggaatacagctaaccagggacataaaagattcctacagggagcattacaaaacactgctcaaagaaatcacggatgacagaaacaaatggaaaaatattccatgctcatggataggaagaatattgttaaaatggccatcctgcccaaaggaactawtctatgagaccacagtaaacgaaatagcatggtactgttacaaaaacagacatataaaccaatggaacagaatagagatcccaaaaataatgatgtacacttaacaatgatccgttctttgacaaagctgacaaaaacaagcaatgaggaaattactccctattcaaattccattttttttt

SEQ ID NO: 777351 - DNA, 624 bp, Homo sapiens
tctaagatattttcaatctgcactttttgatcttcaggggatgataagaggaaagtgggaagggggcaaatacaatgaataatgagatgacttcccagattttgctccttcccaatgtctgtgaattcaccatgtctgtgaatctatttttattagcacaagaagctctcacagctcaagctcggcatttccataattaggtcaggaascaaaaagaatggcacaaactagctaaattcttgagtcataatgactcagtagcttatgaggccaaatcagagtttctgtgggaatagctagcttcataaacattcttggcatgattggcttcagggaccatgctttgaacaagcaacctaaggacaccgagcaaggtctagggacagagattctgactcaatccaagggcttcaacctcttctcagtctgtatgacacaaggcctctgactttggctagtgctgtgactgccacttactcttccttgctctcagttccacgtttacaagatgagatgctgtctaaagtcatttactgttctgttatttttatgggctctttagaatacgtaaaatatttggactctacaataaaacaaaatagtcaactccgattctctacgtgt

SEQ ID NO: 777352 - DNA, 594 bp, Homo sapiens
cctgaatgatcttgatgcttattagacatttgtcatgtctgggcattgaagagttaattatttattgtaatttttgccatctggtattctttgtactcattcttcataagagggctttccaagtatgcaaaaggacctgtgtgttgtgatgtaagccaaagctgtgttagagtgcatcacaagcacagtaataccgtggttcttccaacttacagaggtattgccttgatagtctgggacaagatccagaattctctggattatcagaaagagacttctgttaccttcccttagtttttcccaaatgaaatctctgtgtgtgttctgagccacctggmgctggggttggggtaacacaagtaccactatggtcactaccactaggcctgcactgtgtgtgacttgaagccagcacagcactgggtcttgcccaaggaccggtgtaaccactacctggataccgcctatgtttgctgggggtctacaatcagcaggttgtgaagccaaccaggcttctgtcctttccttcagggcagtgagttccctcagaccccaggtgggtacagtggtaccatctgggatccaggaactgga

SEQ ID NO: 777353 - DNA, 594 bp, Homo sapiens
cctgaatgatcttgatgcttattagacatttgtcatgtctgggcattgaagagttaattatttattgtaatttttgccatctggtattctttgtactcattcttcataagagggctttccaagtatgcaaaaggacctgtgtgttgtgatgtaagccaaagctgtgttagagtgcatcacaagcacagtaataccgtggttcttccaacttacagaggtattgccttgatagtctgggacaagatccagaattctctggattatcagaaagagacttctgttaccttcccttagtttttcccaaatgaaatctctgtgtgtgttctgagccacctggagctggggttggggtaacacaagtaccactatggycactaccactaggcctgcactgtgtgtgacttgaagccagcacagcactgggtcttgcccaaggaccggtgtaaccactacctggataccgcctatgtttgctgggggtctacaatcagcaggttgtgaagccaaccaggcttctgtcctttccttcagggcagtgagttccctcagaccccaggtgggtacagtggtaccatctgggatccaggaactgga

SEQ ID NO: 777354 - DNA, 614 bp, Homo sapiens
ttactgggaaatatagcctgttataatagtctctttctctgaatgcagtggttgggacatagaatatgagctttgttatcttttttagatattgctaaattgctctctgaaatggttgtaccagtttattttcctgccagtagtgtatgataattcttatttttctagattatttccagtgcttggtattgtcaagccttttaatttttcaagtgtgattaagaggaaatggttatacgtattgcatccatcttcttttggtatttttatgggatacaagttttgggtgttttttgtttgtttgtttttgagatggagtcttgctcttgttgtacaggctggagtgcartggcgcaatcttggttcactgcaacctctgcctcccggcttcaagcaatctcttgcctcaacctcctgaatagctgggattacaggcacccaccaccatgcctcactaattctttttgtatttttactagagacagtttcaccatgttggccaggctggtcttgaactcctgaactcaggtgattcacccgcctcagtctaccaaagtgttgggattacaggtgcgagccacggcgcccagcccagaattacctcttacgtaata

SEQ ID NO: 777355 - DNA, 614 bp, Homo sapiens
ttactgggaaatatagcctgttataatagtctctttctctgaatgcagtggttgggacatagaatatgagctttgttatcttttttagatattgctaaattgctctctgaaatggttgtaccagtttattttcctgccagtagtgtatgataattcttatttttctagattatttccagtgcttggtattgtcaagccttttaatttttcaagtgtgattaagaggaaatggttatacgtattgcatccatcttcttttggtatttttatgggatacaagttttgggtgttttttgtttgtttgtttttgagatggagtcttgctcttgttgtacaggctggagtgcaatggcgcaatcttggttcactgcaacctctgcctcccggcttcaagcaatctcttgcctcaacctcctgaatagctgggattacaggcacccaccaccatgcctcactaattctttytgtatttttactagagacagtttcaccatgttggccaggctggtcttgaactcctgaactcaggtgattcacccgcctcagtctaccaaagtgttgggattacaggtgcgagccacggcgcccagcccagaattacctcttacgtaata

SEQ ID NO: 777356 - DNA, 620 bp, Homo sapiens
agaataaacgattaacacacatatagataaatcttggaaacattacgttgaataacagaagccagacataaaagactacatactatataattccactgacatgaagttcaagaaagacaaaagctaatctatggtgaaagaaacagaaaaatggtgatagaaaaaaaaawtttttttttttttaagacagggtgttgctctatcgcccaggctggagagcagtggcaccatcatggctcactgtagcctcaacttcaaaggctcaagccatcctcccacctcagcctcctgaatggctgggaccacaggcatgtgccaccatggcccaggtagtttctttttttttgagacggagtcttgttctgtcgccaggctggagatctacgcttatgatctatgcattattttattatatctttaaggatgtggggctaaaaggaaaaagcatttaaagctttgaattttcttgagcctggtttgggttgtttccataggttttaatatcaagtactgttgtgatggttaattttatgtcaacttgagtgggctgagggatgcccagatacctggtaaaatatttctgcaagagaccagcatttggattagcagacagagtaaag

SEQ ID NO: 777357 - DNA, 616 bp, Homo sapiens
cgtggtggtgggcaccccagctactcgggaggctgaggcagcagaatcgcttgaacctgggagtcggaggttgcagtgagctgagatcgtgccactgcactctagcctggcgacagagcaagactctgtctaaacaataaataaataaaatgaaaacagtcccttaatcaaatattataaactatagcgtcacaaagaggaaacagtgcaggtttcggtaagcagacagatctggtttyccaggttagttatttttagttagtagctaggtaagttatttaacctctcttgagttttaccatcaatcccctcatctataaaatatgggtaacatttaccctccgaatcatgaagcaaaatgagaaaaagtatataggatgcctagctaacatgacagctgttgctgctcatcacaacacttcaactgaagaataataatccacaaggggatgtggagaccagcaaaggacagccaaaggacagacatttgtggctgtcttccgcattcggccaaggcagagaccttgatcttaacctctggattcagcaggtgaaacaaattaatcttgagtgaattatacaacatggggatccgcctgctactttaaaatattcc

SEQ ID NO: 777358 - DNA, 538 bp, Homo sapiens
tcacttgaaccagggaggcagaggttgtggtgagccgagatcacgccactgcactccagcctgggtgacaagagcaaaactccgtaaaaaaaaaagaaagaaaaaaacctaaaattccttggggtcttccaagcctctacacctgcattttaatattgttttagaaaacaaatgcaaagaaaagctgtaacttggcaagaatctactcatctgtgtcctgctgtacactggmaagacttctaacttactacccctaacatttggctgactttattggtcttccccgatagttggtaaaccactaaaggacagggactgtatttaattttatatccctggagcctaggcactaaataaataaatgaaagaaacaggcagctgcaatgtttcagtatatactctcttttaatagtactcacaactgatttgcaaaatttactcaatgaacacccagaatacaaaggaaaaattttcaataaaaacttaaaaaacaagcaaacaaacaaaaaacttgaataatttggcacaggcaaagaca

SEQ ID NO: 777359 - DNA, 591 bp, Homo sapiens
ctctttaatagtacagcatctgtagttacgtcttcttttgtatttctaatattatttgtgccttctctttttttaatttttaaaattaatttcgccaggtttgtgtatgttatgtttattttttcctttcatacgtatatcaatgtattcatcaatcaaatacttactaaatatatactgttagggtacaaagccagacaaggccaggcgtggtggctcatgcctgtaatctcagcacttttggaggccaaggcaggtagatcacccaaattcatgagttcaagaccagcctgatcaacacagtgaaaccccatctctactaagaatacaaaattatccaggtgtggcggtgcatgyctgtaatcccaactacttgtgaggctgacgcaggagaatcgcttgaaccctggaggtggagggtacagtgagctgagatcgcgccattgcactccaacctgggcaacaagagtaaaactccgtcttggaaaaacaaaacaaaacaaaaccagacaagacatagtttctaccctcaagagattccagtctgatttgagaaaaatatacgaaaatagaaaatggccacataatatg

SEQ ID NO: 777360 - DNA, 610 bp, Homo sapiens
aaagcatctgaatatacaagttatcagtatccctgaaaacagcaaattaaaggattagacaatatgaaatagatgaaaacttacatttggtcagagaattagacattcatatacagaaggttcaacaatccccaggtagatacaatgcaagaaggtcttctctatggtatgttataatcagaatccctaaagtcaaagayaaaatgtgagtcctaaaaacaacatgaaaaaggtgcctagtcacctataaaggaaacctcatcagactaaccacagatttctcagcagaaatcttacaggccagaagagaatgggatgatatattcaaagaactgaaggaaaacagctatcaaccaaggatactatctccagcaaaattatccttcataaatgaaggagaaatagtcttccagacaagaaaatgctaaggaaatttgttaccaatagactgaccctgcaagaactgcttaaggagtcctacactggaagtgaaaggagacatctaccatcatgaaaacacatgaaagcataaaactcgctgatgaaacaatcacacaaagaaggatgagaaagcctcaaacagtaccagtactaaaatccaccagaccgc

SEQ ID NO: 777361 - DNA, 461 bp, Homo sapiens
gaaatggtgcaagaaaaagaaacaaaaaccaatgcaaaaggatgaaaaaggaaaataaaaattaaaggtaagatagatagaaagctcaagatatgacaatgattataatcaatataatgaaccaaactcttcagttaaatgactaagattatcagactaaaatcctgaatgtttaaaataaaaactcaaaacttaaagacwcagaggagcagttgaataaaaggattgaaagagacaaatacaaaccaaaataagactatagtagccatattaatgccaaacccatattctgaggtgtaaaacattatcaggtataaagaaagacactatataataataaaagtttccactcacccagaaagatatcaaatgaacaaatgagtaaattgccatgaattaagttgcatcttccagtgattgggaaaacacatccacagataggaagcaggtctgtccaaacc

SEQ ID NO: 777362 - DNA, 549 bp, Homo sapiens
gaggaggagaggtgctctgatttttagagtttccagtttttctgctctgttttttacccatctttgtggtttcatctacctttggtctttgttgatggtgacatacagatgtggttttggtgtggatgtcctttctgtttgttagttttccttctaacagtcaggaccctcagctgcaggtctgttggagtttgctggargtccactccagaccctgtttgcctggatatcagcagcggaggctgcagaacagcggatattggtgaacagcaaatgttgctgcctgatcatttctctggaagttttgtctcagaggggcacccagctgtatgagctgtcagtcggcccctacttggaggtgtctcccagttaggctacttgggggtcagggacccacttgaggaggcagtctgtccattctcagatctccagctgcgtgctgggagaaccactactttcttcaaagctataagacagggacatttaagtgtgcagaggtttctgctgccttttgtttggctatgccctgcccccagaggtggagtctac

SEQ ID NO: 777363 - DNA, 509 bp, Homo sapiens
atctctagttttattctattgtggtcagagaagatgctttatattatttcagttttttaaaatgttttaagacttgttttgtgacataacatatggtccatccttgagaatgatccatgtgctgaggaaaaagaatgtgtactctgcagctttgggatgaaatgttatgtatgtatctattaggtccatttggtctgattagktccatttggtacagattaagtctgatgttcattgattttctctctggaagatctgtccaacgctgaaaatgggatgttgaagttaccagctattattatattggggtctgtctctctttttagctgtaacaatatttgctttatgtatctgggtgctccaacactggtatatggatccagtgttgggtccatatacaattacaattgttacatcttcttgctgaattgccccctttatcattatatagtgaccttctttgtctcttcttatagtttttgtcttgaaatctatttcgtctgatatac

SEQ ID NO: 777364 - DNA, 724 bp, Homo sapiens
aaactgtgaaatttgtaaaagaaaataaagagggaaatttttcaacattgaccttggcaatgaatttttgggtatgacaataaaacacaatcaataaatacaagatacacaagtggaattattcaaactagaaatcttccacacagaaaaaaaatcaacataatgaaaaggtaagctataaaatgaaagaaaaatatttgcaaaccatatacccaataagcagttaatatccaaacaactcagaagaaaaaaaatctgattaaaaaattagcaaaagaactggctagacatttttccaaagacatacaaatagccaataggtatatgagaaggtgctcaacatcaytaatcatcagggaaatgcaaataaaaactaccatgagatatcacctcacatctgttagaaaaactgtttatcatacacacacacacaaagacaaacattggtgaggatgaagagaaaagggaatccttgtacactgttggtgggaatgtaaatcggtgtggctactatgaaaaacatacagaaattcctaaaaaaatgaaaagtagaactaccatatgatccagtaattccactactgagtatatatccaaaggaattgaaatgaggatctcaaagtgatgtctgcatctccagcattattcacaatatccaagacatggaagcaatctaaatgtatactgatggacaactgaataaagaaaacatgatataagcatg

SEQ ID NO: 777365 - DNA, 634 bp, Homo sapiens
gggttaattgtgtcttatgatttctgcttatatcaactggccgatcatctgtttatgctgaggttaaaacaataacaataactagtgcagttgattttcctagttgcttttagaaacataacccagaaaacaggttctaattctaaagtcttataagagaatgaaaaagatggggttagacagtatttaatccaaatcacattattagtatctttttggtgaaaacaatgtcacgttttgtgactattggtttctcctagcytcatggcaacttgatgcacatgagaatatagcccctgcagtatggcatgtcctttcattagatttttaaaaacaatttatttttgaataattatagaattacagaggagttgcaaagataatatatccttcacaccattttgtttcttctcctaatgttaatatcttacatagccatggtaaagtttatcaaaactaggaaattaacagtgatacgtgctaattactaaattacagactttacttggctttcgtaatttatccactaatgtccttattttgttccagggtccagtccaggatccaacattgcatttagtcgcatatctcctgaggctcctctaatctgtgacagttcctctggctttccttg

SEQ ID NO: 777366 - DNA, 634 bp, Homo sapiens
gggttaattgtgtcttatgatttctgcttatatcaactggccgatcatctgtttatgctgaggttaaaacaataacaataactagtgcagttgattttcctagttgcttttagaaacataacccagaaaacaggttctaattctaaagtcttataagagaatgaaaaagatggggttagacagtatttaatccaaatcacattattagtatctttttggtgaaaacaatgtcacgttttgtgactattggtttctcctagcttcatggcaacttgatgcacatgagaatatagcccctgcagtatggcatgtcctttcattagatttttaaaaacaatttatttttgaataattatagaattacagaggagttgcaaagataatatatccttcacaccattttstttcttctcctaatgttaatatcttacatagccatggtaaagtttatcaaaactaggaaattaacagtgatacgtgctaattactaaattacagactttacttggctttcgtaatttatccactaatgtccttattttgttccagggtccagtccaggatccaacattgcatttagtcgcatatctcctgaggctcctctaatctgtgacagttcctctggctttccttg

SEQ ID NO: 777367 - DNA, 541 bp, Homo sapiens
aaattaaaattttatttgggtcattattcagtccatccttcattataaatacattcatgaagttatcgtcatggcagagagagcatgagaaatgtgacaatgttcccttgtacttagcatttactctttttattccatctcttttattctacatatattaaatttttcttagtatatattatgcaagatcgtaatatagtttcccaaatatttacaatagggttgtttatgtattagactgaaacattctttactccactggacacatactagatcttgcttctgaagagaaaggatgttaattacaaggacaggaaactgatgaaaaataaaargaatgaaagtttaagaaggcttaaaggaatattctaaaaataattaaggaagatattactctgaaacgggatgtaagttgagagaataggtagaagaacaggagagagtagaagagatttagacaagacaaaaatgttctcaatggtctcactttaatcagaaaaccaaggattgagttattttgccattacatgaatgtagaagt

SEQ ID NO: 777368 - DNA, 553 bp, Homo sapiens
aacaaagataactttcagtggaaaagaggggcttatcaccaaaacaaaaactccagactgaggagttggtgtaaaatcagaagtcttgggttttcaattttgtgttttctgtttatctgggcaaccttagacaagtcacccaacctctctgagcttcagttccttccctgtcttaacaggttactgtgagaagcagaatgagatgatgagggtgaaaggactctgttagtgtttctaacatcactactcccttgtatgcaataaatacctccacccagttaccatagacatacataaagtggcttctgccctattctaagatttcttctgatcctcttatttttaaatttctagtatstgcccttctatatggtcttgcttgactttgtacctctaattccctgttgtttaccatgcccctatctcattcaacagcagacatcaaatggcacactaccaggctcagacccacaatcccagaagagattgtgtttagaggctgacctttggctccatcaacactctgctagccaacactttggccgcaagttca

SEQ ID NO: 777369 - DNA, 583 bp, Homo sapiens
atagatgatagatagatagatagatagatagagatatactaggtacctactatgtgccaggcacaatgcccaggagtggaatacaattatgaacaagatggatatattccctgttttcacagagctttcaggcaagaagtagagagtcaagctaacaagtcactacactgtrgggtggtaagtgagagggtgtggggccaagggagtacataggagagaaacctcaccagaactgagatcataggagggccttatggtagagctggcacccaagctctgacctgaagtgtaaataggaatgaagcaggcaaagccctgcatgctattccacacagatcatggctcatccgtgaacatttgtctaatcgaacaattaagatactacttccctggatatagatgtggaaacactggcagattgtccaaaatcatattaggacaagagccccaattatttataggtgaagaagaaacactctatatactatcagcccatctttgatggttatatgaccttctggattgcccaggtaatagaaaggctcccctacttccctcaagcaagggtgaccacattaggcag

SEQ ID NO: 777370 - DNA, 635 bp, Homo sapiens
ttgggatatgagtttctaacaggctattttggagaacagaactctgagatgatttttatatccttcacactttctggtctattttcatctctgtggcttctccttaaacaattataagtgcctgttggggtagacccagctagtaaaamgaatgtaagattttgaaagttttcacttgccagtcaatttcttttctgggttcagtgtttactgacacagacactaaagaaatttttttttaaagaaactaactggtgtcatcttgtcttcacatagacttctacagctatagctgagtttccgtgattttgctttttattttttgctcattcatacatgcataggcagagttcagcttttatgctggtaagaggaattaaacttacatgtttactgagaattaaactttaagagaataacaaaagctcttgaaaaaaattgaatataacagatgaaacagtttcatatttatatttcaacataagacttttagttattgtcagaaagtaatgggaatccttcccattgttcacttatttagccttatataatattcatttaactaagcccaatatccaatatccagagatttacattttatttttaagggaagacagtatcatagtgagattatt

SEQ ID NO: 777371 - DNA, 621 bp, Homo sapiens
aaactgtcaaaaactttagtgttggcaagaaagcagagaaatgggaatgctatatgttaccgtagaaatataaatggatagaaccattttggagatttgtctcataagtcaatgtttgtctcataaaacttttaaaagcagttctaaatataggcatatatcctagcatggtttttgcattcatgctcaagaaaactatagaaagttaatcattacaacagtgcttaaaaataacaaaatagaagggacaaatgaaggtaayctaaatgagcatcgaaagtagacaattgatgtgacttattcataatatggaattctatacagcagttaaaagaaatgatttttttgcagctataattgcatatgtataaatacataccttcaacacgaaaacttatctgtgaaaaaataatttgcatatcaggagtaatatttttcatgtacattttctaaaaaggacaaataaaaatttattgaccaacatcttcaagtaataataattggatcattaaggtaattaagaaattaataattaaattatcattggattaattagtacaattaggacatatctgcaaaatagtaaatattgcttaattagaataattaattaggaaaata

SEQ ID NO: 777372 - DNA, 549 bp, Homo sapiens
tccttctttttctatggtttggaatagtttcagaaggaatggtaccagctcctctttgtacctctggtagaattcagctgtgaatccgtctggtcctgggatttttttttttttttttttttttttttttggttggtaggctattaattactgcctcaatttcagaacttgttattggtcgattcagggattcagcttcttcctggtttagtcttgggaagrtgtatgtgtccaggaatttgtccatttcttctagattttctagtttacttgcatagaggtgtttataatattctctgatggtagtttgtatttctgtgagatcagtggtaatatcccctttatcattttttattgtgtgtatttgattcttctcccttttcttctttattagtctggctagtagtctattttgttaatcttttcaaaaaaacagctcctggattcactgattttttaaagagttttttgtgtctctatctcctttagttctgctctcatcttagttatttcttgtcttctactagcttttgaaactgtttgctcttg

SEQ ID NO: 777373 - DNA, 481 bp, Homo sapiens
tcaaacttaatgaaaatatgaaaaaatagaaaacctctaaaagatatcactaatatccaaaacttcaatagatgagaaaatttctgtctattccacattggttttttaattgacttaaacataggaggaaaaaacattcaacaatggtgaagtaaagcgtgatgatttgtagatatgcttctttctgcaataaaataaataaagtacktgggttcttttaagtgttgtagcaaaaatctgaaataaagtcattcaatattaggatgttataggttcttagtcaaagtccaagagcacatggtcctctcttctaaaggcagtgccagactgcactgagccccaatctaagcacaaacccatctgagctctatcccataaatcactactaagattgtttttcttcaaaacaagactgcctgaatttgggaagtgtatttgtattccacaagattccttttattaaaatagatggatccaggag

SEQ ID NO: 777374 - DNA, 646 bp, Homo sapiens
tctatatggattaaatttcattaatatagttacctgttatgttagttcagtgaaacaaatattgaccaccatggtgtgggtagtcagcactctactaacaaatgtgcaagtgttaaataaagttgctcattggtgaagacggtctgatttttatttttttttaacatttctggatcatattccagtttgattccaaaagaactaatgactttttcctagtaaattagttgayctgccccttattgctgttttctggattctgaagatctgtatcataactttggttgaagttatgattcaatatgcactgggtttctgcttgcagcagatacccaaagagtggaattaaagtagcctctttgtatattaatacgtgttttctttctaggatcagttataaatctgagggaattggaatcttctcaatggtgatttgactattcgagacttttgaacattgtgagcaccagaatgtctctggtgttagaatatgcttgatattttgaatctcattttgaaccaatattaaatccagatatggcaggaaatatccatgtgtataaagcaagtagtgtttttacagtcactgagtagccatgtaaaaacttccaaataatttttcaattgtcaggattttagtttcaca

SEQ ID NO: 777375 - DNA, 625 bp, Homo sapiens
caaacagggatcgttgttataaagttgtatttagtccattgaactccttctcaaatttccacccaggcttcatgggttttttgttgttgttgttgttgttgttgttgttgttgttaaatgtgtagtttctggctgatggttttccattgtgagaaaaaggtagtaatgttgttactactctagacaatactactcttcagagcctatttatattgaagcaatatggactttacctctccagtaaaggcttccagtggctctctgagaggttgttcctgcacacaattgtaatcacacatggataacttacacagagtatggagggaaatgtgaaccttaatttgtttctagtcatgttgcatttcccattcagaattttagagcatgaacatagaataacacattttccaaccatatcttgaacttttttgtgctgtaatatctgccttcatggaatgkgatgtctgtaaatatagactgtacccctgccttctacatactgcctccaggagagaagaggtgactggtccttgggtggagagagaagagtggtctcatttatgcaaggaatattggtcccttaaccatacagattatagaaggtaggagagggcattgatcaaaa

SEQ ID NO: 777376 - DNA, 615 bp, Homo sapiens
ccgggcgcggtggctcatgcctgtagtcccagcactttgggaggccaaggtgggtggatcacaaggtcaggagtttgagaccagcctggccaatatggtgaaaccccgtctctactaaaaatacaaaaattagccaggcatggtgatcggtgcctgtaatcccaactactcaggaggcttaggtagaagaattgcttgaacccgggaggtggaggttgcagtgagccaagatcgcaccattgcactccagcctgggtgacaagagcaaaactccrtctcaaaaaaaaaaaaaaaaaaattcccttttatttcattattattttcttcttcactcaatcttatggataggccctaatgataaaatagggcattttcctggctttattaaacaagacccgtgataagatccaacaggcttagctcttagaaatgtatattggtggtttgagtatattgtctcatttaaaccatataactcccctgtggcataggtgctatcttttttcctattttacagaagaggaactgaggctctgcaaagggtaatcactatcccattgttgacttcaggcatgtggcagggcctaacactccttacatctctatatatagtga

SEQ ID NO: 777377 - DNA, 599 bp, Homo sapiens
gaacaggtgctagtatccacagctaagagacccatagatggttcacatcacaggactctgtgcagatataccccagtaccaacccagggcctggcagacatgcagggtagctagacctagaagagagataacaatcactacagctgatttttccttcctcaggaagccacgttcataggaaaagtggggaagtactacatcaagagaacaccccatgggacaaaaggatctgaacaacagctttcagccctagaccttccctctaacagagcctaccraaaagagaaggaaccagaaaatcaactctgctaatatgacaaaataaggatttttaacaccctccccaaaaaaatcacactacctcaccagcaatagatccaaaccaagaagaaatccctgatttacctgaaaaagaattcagaaggttaatcattaagctaatcagggaggcaccagcgaaaggcaaagcccaatgcaaggaaatccaaaaaacaatacaagaagtgaagggagaactattcaaggaaatagatagcataaataaaaaacaatcaaaactttaggaaacattggacatacttatggaaatgcaaaatgct

SEQ ID NO: 777378 - DNA, 606 bp, Homo sapiens
ccacagaatgagtctggggaccccctggacccactgtaagtcggacctgagctaaaactctattaattacctaacctccataagcacctactttaactggagggccacaatgacattttaggtaccctggaatcaacatcagctcagagccagcatccagtagtccccaaaatgtctgatcattttcctttccccattgttcagttaccctggtaaaaaaggctggaggtttccttggggaaggaagggaaaaagattaacagsataaattgtcagtagtttagtggggtccttcttcaaggggacccagtctccccttcactcaaggcattctgggtctgtacactggctcaagtctggaaattgattgaggggccatagttctctgtttttataattcaaattagtctcttgtccattggacctaggagttttctgcttatataaattaagtaggaatgcagtaggcttcctatcaatttcatttctaggaagaccatgattaattagccaatgccagagctctacatgagtcagactatcctgattgccactttgcctctgctgtccattacagtagctacacccaccttgcctttcatgggt

SEQ ID NO: 777379 - DNA, 613 bp, Homo sapiens
tctcgctctgtcacccaggccagagtgcagtggcacgattttggcttccaggttcaagcgattctcctgcctcagccttccgagtaactgggattacaggcgtgcgccaccaagcccagctaatttttgtgtttttagtagagatggggtttcaccatgttggccaggctggtctcgaacttctgacctcaagtgatccacctgcctcagcctcccagagtgctgggattacaggcgtgagccactgcaccgggactcactttgaatgaatgaatatggaccctaacacttgttctcccacccctgagtttttgcacaaactgctcctccagccttttctgataagcaggcttcacagagccctctgtgacctcccaggcaggtcctccttccctcatctggagtaccccagcccctgycccgctcctctcagtagtctgctggctctgggctgggaccacctgtgttctccgctggcaggccccagtctgactcccctccagattcctggcattgcccagcacaggataaggagcagggttggcgtgtgaggccttacctccgggagggcagccgccgacgcatgcggtgacagtccagcacccactcctta

SEQ ID NO: 777380 - DNA, 644 bp, Homo sapiens
tcccatcacctgagtattaaccccagcgtccattaggtatacttcctgatgctcttcctagccccccacccccaccccctgacaggccccagtgtgtgttgttcccctgatgtgttcttttttttttttctgaggcagagtctcactctgtcgcccaggctggagtgcagtggcatgatcttggctcactgcaacctctgcctcctgggttcaagggattcttgtgcctcagcctcccgagtagctgggattacaggcrtttgccaccacgcccagctaatttttgttttttagtagagggggttttgccacgttggccaggctggttttgaactgacctcaggtgatatgcccgcctccacctcccaaagtgctgggattacaggcgtgaggcaccatgcccggccatgtccatgtgttctcatcattcagctccaacttataagtgagaacatgcagtgtttgattttctgttcctgcgttagtttgctgaggataatggcttccagctccatccatgtccctgcaaaagatgtgatctcattccattttatggctgcatagtattccgtggtgtatatgtaccaaattttctttatccaatctatggacactttctactctctcactccttccaccacaac

SEQ ID NO: 777381 - DNA, 619 bp, Homo sapiens
ctaagacgcccagcaagggttggactgcagctccagagtacagagcaagtgcccaatgtcacagccacaactattgaggtagggaaacggtggtgaaaggcaaagacaacttaggccaggttttggcagtaaacagtcaacacttaaattgacaccatatggcagatacagggctaagcactttatgtagattagtccaccgaacccttgacacataagggggtgggtactagtayctcctccttggtacacatgaggcacagagaggttaaggaaacggcccaaagaaacacagcttgtatgtggtagagctggaatccatgagtttaaccactatccacagcaagggactctgggtagctgtttgaaatgtcagccaaaccattccaacagatgaggatgggacttcctgttgggcacaacttcctgtactaaagtgggactctgagcccctgtcagatttaaactaaaaatattgataatgtttccaaaatgtcaacttgtcaggatcggagagactgtgggagcaagtagggcttcccaaggcagatgatttcctataggaagggtgagatttcctagaccaaagtttgtttatgtccaaaaaaaaaaaaaggta

SEQ ID NO: 777382 - DNA, 619 bp, Homo sapiens
ctaagacgcccagcaagggttggactgcagctccagagtacagagcaagtgcccaatgtcacagccacaactattgaggtagggaaacggtggtgaaaggcaaagacaacttaggccaggttttggcagtaaacagtcaacacttaaattgacaccatatggcagatacagggctaagcactttatgtagattagtccaccgaacccttgacacataagggggtgggtactagtacctcctccttggtacacatgaggcacagagaggttaaggaaacggcccaaagaaacacagyttgtatgtggtagagctggaatccatgagtttaaccactatccacagcaagggactctgggtagctgtttgaaatgtcagccaaaccattccaacagatgaggatgggacttcctgttgggcacaacttcctgtactaaagtgggactctgagcccctgtcagatttaaactaaaaatattgataatgtttccaaaatgtcaacttgtcaggatcggagagactgtgggagcaagtagggcttcccaaggcagatgatttcctataggaagggtgagatttcctagaccaaagtttgtttatgtccaaaaaaaaaaaaaggta

SEQ ID NO: 777383 - DNA, 612 bp, Homo sapiens
ctctatctgcttgaagacttgcactattgaatcgggtaatgtggggatgggagagagaaggcggtgggctcctccttctcatcaaatagtctgggtcttcaacctcctcccttttgggaaccagggcactcatcctcccttctgcctcaaggcccctcccacctacctccccaccatccccggtccagttttggaggtggaacttgggagagggggattgaaaagtaggggcttaccatctcaaagaaagaaagaaaaaatattttatttccctcttagtgtgwttccctctctctctctctctctctctctctctttctttctttcttttttgacagagccttgctctgttgcccaggctggagtacagtgtctcggtcttggctcactgcaaactctgcctcctaggttcaagcaattctcctgcctcagccttctgagtagctgggattacaggggtgcaccaccacgcccagctatttttgtatttttagtagagacagggtttcaccatgttgccctgtctctagacagtctcgagacagtctcgagagtcacatgtagccctgtctcgagagttgctggtctcgaactcctgacctcatgatctgc

SEQ ID NO: 777384 - DNA, 626 bp, Homo sapiens
gaatgaaaatgagttgttatgtttaatgttttccaatggaagaatcttattttacgatggcttcatgtttcagaaaaaaaccaggggttaaattacattatgtagcatggtttaaaattcagggtagcagaagagacatttctctcatggaacagattaatacaagacctaatagaattttctgaccctaaaaaccaccaagagaagatttcatttatttctcttctgtatataaattttacatattataaaaattatttcagaaatgttattgccaacaaaaarcataaaatatagtatgaactaagataaaatggcagaataccatttgcaaatgattaatctagcctaacattgctttttaaaaaggccaacaactaggtttcatcttcagaatctgctttccaatcccagtgagcttgctcagttatgaatgcaacatccaagactgctggtttcacctccaacatgtgaatcattttaaagtcaccactcccattcataaaacaagaaaggagctcaacaaactgaaaacccacgacttttattatgcacatcagaaactgtaggtcacagcacagttacccccaaacctggagagacagggaaatatagataatcacaat

SEQ ID NO: 777385 - DNA, 626 bp, Homo sapiens
gaatgaaaatgagttgttatgtttaatgttttccaatggaagaatcttattttacgatggcttcatgtttcagaaaaaaaccaggggttaaattacattatgtagcatggtttaaaattcagggtagcagaagagacatttctctcatggaacagattaatacaagacctaatagaattttctgaccctaaaaaccaccaagagaagatttcatttatttctcttctgtatataaattttacatattataaaaattatttcagaaatgttattgccaacaaaaaacataaaatatagtatgaactaagataaaatgrcagaataccatttgcaaatgattaatctagcctaacattgctttttaaaaaggccaacaactaggtttcatcttcagaatctgctttccaatcccagtgagcttgctcagttatgaatgcaacatccaagactgctggtttcacctccaacatgtgaatcattttaaagtcaccactcccattcataaaacaagaaaggagctcaacaaactgaaaacccacgacttttattatgcacatcagaaactgtaggtcacagcacagttacccccaaacctggagagacagggaaatatagataatcacaat

SEQ ID NO: 777386 - DNA, 556 bp, Homo sapiens
ttaagagggaaatcaagtattcttttcaacccatacagaagtgattgtagagagatgtctggcaagaaaagtccagtcacaccaagaaacataaatgctacaagaatgactcaaaaacaaataaacaaacaaaacatctaaggcaattctacggaagccattctacagaagtctttatggggggaaaaargatttaaaataatttacttcagccaatagagaatgtgctcttcctgaagttaaaggacttttcttccagaactgaagagtcgcatcggattcatcagctccagagggaagaggtggctgtgatcctgctggagtcggagcagctccaaaggacactcacagagagaagaaggctgagactgcgtgtatcgtctctggattatatacagcatttagtttttagagcaataaaaatattagctataatttcctgagaacctaaaatgtaccaatccctcttctaggcactttctgtactttatttttgtctcattacaaaaactttttggagttgacattgtcatcattcccatttaaatgcaaggaa

SEQ ID NO: 777387 - DNA, 550 bp, Homo sapiens
gttacttcctagatacaaatggtgggggtacaggcattaggtaaatacaccctttccagatgggataaatgggccaaatttgtgagagagacattttaagtggagttttagcatgcttgaagagtgctatggttgctcttatctataggccagaccttacagtggagactgcagtcaatgaattgtgtaagctgaatgcaatgggtataattggattctgggaaagcagtagtgaagtggtgtcagtcagtcaccaaaggcagggtaggcatgtttatcataaaagtcagcacagtcagagcaacaatgagaatatgggtgtaccttggagatattgtgggtttggttccagaccaccacaataaagcaaatatcacaataaagtgagtcatacacactttttkgtttcccagtgaatataagttatgtttatagttttctgtagtctattccatctgtctacaatagcattatgtctaaaaatgtacacacctcaattaaaaatactttattgctaaaaaaaaatgctaacacttatctgagccatcag

SEQ ID NO: 777388 - DNA, 623 bp, Homo sapiens
tattttcagtcaatttttttctgtttatttctccctctctcctttctttctaagaatataattacccatactatattgaaattgttccagagctctctgggatcatcttcatttttttcatcactttttttttctcacaatttcagattgaatggggcctattgattcatcgccaagctcgttgattttttttttccyttgtcacattcactctctgattaagcagatatcttggatatatttctcagttttagaattctttttggttcttttacatattttttccattttgatgagatttactattcttccagttcactatgagcataatttcttcattgaccatagctaaaatatttactttaaagtctttgtctcatcatcccaacatcagggacattttgcagttgccatctggtgattaacttttccactgacagtgggtcatatttttgcagttctccatatgtttagtagttttaaaatgtttccaggacattataaatattgtgctgaagaggccctgggttccgctctaccctttagaaatgtgtggttgtttttgttttagcaggcaattaacttggtgccacgcaaactagaaacctgtttacctgcagagc

SEQ ID NO: 777389 - DNA, 574 bp, Homo sapiens
ttaatttctctgaaacacagttttcttgtctataaaacttggattagttgaacttaattcaaaaatttttgagattataattttaaaagtaaccaattaattcattgtacaataaacaatatatgcttaattcgtgttagtttatttacttttatctttgaasagcatactaccaagtaaagttgttatccagaactcagataacttccataacccagattattccattgggtactttgaattacataatggaccataatttgtcaaatgcgtgacaacttgccacctcagttgccaccttccttattcctttcatttcagtacatagctccatatgttatacttctatattagaataaaaaatatgatagcacaggattaaatacattaaaactgtaaaggatactaaagtaacattgatgcatctaaaaaatatttggcattcactccccttattttaccatcaggaaacaggcccagtgttgagctgaaaggccttgagatcatctgactgaaaaaatagaacagatgtgcgagtgagtcaatcattccagaactttgacactacaaatga

SEQ ID NO: 777390 - DNA, 471 bp, Homo sapiens
gctttttcaatagatataggaatcacagttcagaaaatctgtttactctgttaacaatggtgcataccctgtcattggtctgaaagtgatttctcagaacacaatgagaagaataaaacttctgtctttcatcatgtaatatmacctgccctcagcactactttttagccaccatgtcctccacagataattttaaaaaggaaagcacctgataaaaatgtattttccaaactcaggcctattcaattgtattagtttgtcacttagtaatatatttctccatacagacaatcctgtgcatatacttaattgagaaactatatctaaatgtccccttttgtaggaaacatcagtactataaaaatttccatatgtaacgaagatggtataaccagacacaagtccatctgccagccacttgctgagtcccatgagcaagaatgagatctggtggaaagtaagtggctttta

SEQ ID NO: 777391 - DNA, 652 bp, Homo sapiens
acagtctctcctagctctaggcagccattgggaggaaaagactctggcagttataaccccaacacctcagaagagctcagcttctccagcttctacagttcatttctttggctcaccatggctggtgttctggggatttccaaagtcccctgcctccgcttccagcacccacattcccaaaaagatcaccataagtagggggcttaggacagggaagccagagaaggacttcctgcagaagaacagtgatgtgaagattttgagtgcgtctggggagattctaactctgaaggactttagaataagataggggatgggagtcaagagaagaattctatttccagtttgggttcttaagacaagatgaaatttcgaaggaatgtgaggtcctaaggatgttggcagtcaggaaggagagaaaaggaagaaacaatgataagtcacctaccatagtcaagaagaagcaatttttamaaaggtggggggggatggaaatgggaggagaataaggtaaagggcaagatggacagagtaaaaggtgaagttggcacgcgcacacacacacacacacacacgcacaaaacatatgggggactgccaggtcttgatctctccacttcactaaactacaactggtggatccatgagcaac

SEQ ID NO: 777392 - DNA, 401 bp, Homo sapiens
tttgatagatctatcacattttcctccctcctctggggttctggaagaatgctatcttcccatctccgtccattgcacctggtagggtgcccacctgtggactcctgcagcacactgtccttctgacccccatcacagcattgatttcatgtgatagccaktttctgttcacttgcaggtcttctcctcaggctgtgagttccttgatgtcaggggccacattttatttgtctttttattgatagcacctggcagcatgcttagcacatggggtctcagtcaatagttgctaaacgtaaaagtgaacaactagggaggaaatagaaggaaggatttgggactatgagttagatttggatatcgatgaacgatgacaataccagtgcagacacctcattcct

SEQ ID NO: 777393 - DNA, 461 bp, Homo sapiens
ctctgcctcccaggttcaagcgattctcctgcctcagcctcccaagtggctgggactataggtgcacaccaccacacctggctaatttttatatttttagtagagacgaggtttcaatatgttggccaggttggtctcgaacttctgacctcaagtgatctgcccgcctcggcctcccaaagtgctgagccactgcgccagggctgagccactgcgccagrcctgaaatatccttctatcgctcaagaccaagaccaagtcatccacctttgctcctaattctactggctttggtttgaatgttcatgtcctccccaaatttatgtgttgaaatcctgacccttgtaaaagaggctcaagagagctagctagtcccttctactatgtgagggcacagcaagaagtctgaagtccacaatccagaagagagcattcaccagaacccaacaaagctggctctc

SEQ ID NO: 777394 - DNA, 603 bp, Homo sapiens
cgatcttttggatgttactgtcagcttgtgtgaactagccagctttttgcctgattctggcagagcaatccggccttttttttttgagatggtcttgcactgtcgcccagactggagcgcagtgacatgatctcagctcactgcaacctccacctcccaagttcaagtgattctcctgcctcagcctcctgaatagccatgactacaggtgtgyggcaccatgccctgctaacttattttttgtagagacggggtttcaccatgttacccaggctggtcttgaattcctggactcaagtgatcctcccaccttggcctcccaaaatgttaggattacaggcaatggccaccatgcccaactgcaatctggcctttggctgttaaatttggtgtgtccccccaaaacgatcaagtattacatcaaaacagttttcaaagcacacgcctgttagataaagaagaatgcatgtgcacaggatacagcacttcatactgaagaagccagtttgtcagtttatgcaagcctgttttgtatgcacatggagttatagaaacagaaatgtatcaaagatggtatcttactggtgagtggttggtagaaag

SEQ ID NO: 777395 - DNA, 601 bp, Homo sapiens
attatttgcagaatttttcttctgtaccttcttcggtgggcagaggtgtttaagggagttttaaaaactgaacaaaagaagctataaaatagtttaggacgggcacaatggctcacgtctgtaatcccagccctttgggaggccgaggcgggagaatcacttgagcccaggagtttgaggccagcctgggcaatttaagaccccatctcggccgggcacagtggctcrcgcctgtaatcccagcactttggacggctgaggcaggtggatcatgaggtcagatcgagaccatcctggctaacatggtaaaaccctgtcgctactaaaaatacaaaaaattcgccaggaatggtggcgcatgcctgtgctactcaggaggctgaggcagaagaattgcttgaacccgggagacagaggttgcagtgagctgagatcacgacactgcactccagcctgggcaacagaatgagacgccatctcaaaaaaaaaaaaaaagcccctgtctctactaaaaatcaaaaaaattagctgggtatggtggcaggtgcctgtaattctagcgacttgggaggctgaggcagaaggattgcttgagcctggg

SEQ ID NO: 777396 - DNA, 663 bp, Homo sapiens
tgagaacaatgcatagaaaacttagtttaggggttgtacaagctacagcgtaactcataaccttaaatgtttttcttcttagaaaaaatctaactcttcaactcaaaaaattagaatagctaaaacgaatctaagaaaagagaaaaggaaaataaatttaaagaaaataaaaacagtaaaaatgataaacccaatagcagatgttttgggggggaatacaaatgaaataagcatctttctgtcaaattcattctacaatacacacacacacacacacacacacacacacacacacacacacacacgaaaaaaaaaaccataagtaaaataagaaatcagcaacagtctggaaatttttaatgataaaataacaattattcgtatatgcagataaaacagaaatctcagtaaactagatgattaacataaagatataatggccaaaattgactcaacaagttgaaaacctaaaacttatggtgaaagaagaaartatttaagttatcaaagaaatatttgttagacatttcccaggctcagatagttttactgtttaattattttaaactttccatagctagacaaaaatacacaaaaatatgaagactaatttatgggccaaatattgtttatgcagcagaactcatctacatcacataattc

SEQ ID NO: 777397 - DNA, 670 bp, Homo sapiens
accaattagaagaaaaccctcagatattttcttaccactttaagatatgcggcgtgaagttcttctcttcaacctactgtgtcatttaagtgtctctcttacccatttttcagtgtctaccttgtgaaggaagtcagtttgagggttttcggaggaaatgtcatcctcatcatccgatctgtctaagatgtggtccactttgataatttcctttagcaaactgcaagccacacaatccaaacagaggctgttattatgcctttgggccagagcttgggcctgcactactcctttctaaagggagaacactgagatcttccccagtcccagggagcatctgctatccttgtactgagttctttctgggtgaataacacctcacatattatatctcacaagtagaaatagaggggctggataaataataattggctgaatccataaattaacagtgagattccaaattccaaagtaattgcagttctgtgcatatgtatgtataaaygagtgtgcacaatcaacaaataagtaaattaatatcctgttttaaaaagtggagtttaaaaaccttatgtggtttaaatgggcagagaggagtaggtctacagtgccctcttgatctccaccccgccagctgtcctcctcacaatgtttactagcttctttattt

SEQ ID NO: 777398 - DNA, 670 bp, Homo sapiens
accaattagaagaaaaccctcagatattttcttaccactttaagatatgcggcgtgaagttcttctcttcaacctactgtgtcatttaagtgtctctcttacccatttttcagtgtctaccttgtgaaggaagtcagtttgagggttttcggaggaaatgtcatcctcatcatccgatctgtctaagatgtggtccactttgataatttcctttagcaaactgcaagccacacaatccaaacagaggctgttattatgcctttgggccagagcttgggcctgcactactcctttctaaagggagaacactgagatcttccccagtcccagggagcatctgctatccttgtactgagttctttctgggtgaataacacctcacatattatatctcacaagtagaaatagaggggctggataaataataattggctgaatccataaattaacagtgagattccaaattccaaagtaattgcagttctgtgcatatgtatgtataaatragtgtgcacaatcaacaaataagtaaattaatatcctgttttaaaaagtggagtttaaaaaccttatgtggtttaaatgggcagagaggagtaggtctacagtgccctcttgatctccaccccgccagctgtcctcctcacaatgtttactagcttctttattt

SEQ ID NO: 777399 - DNA, 611 bp, Homo sapiens
ctccacagcatgcaggttttaatggtaaagttgatcaaaaagataataagcttggtaaacttataaactgtgttcttctgaaagcaatttgtgattttatactaaaagccctacaaatgtatcttatcttttgacccagaaaatgtgcctctaggaataatcagagatctttgtgaagacacctctctataaagatattcatagctattctatttgtaatagtaataaatatttcgatattcagaaagcttgtaccaatatgcccaccggactgttaaaatattaaaaatcatttgttatgaatgatagatagatgctacttggagtgcttctcccaaatgcccccacatgcctgcctcctggatyctcccatgaaattaggccctgccattcaaacaccaaggttaatgcctggaacagtctggggcctccagaacccagctctggcctgacagcctggtcatcctgagtggtgggtccatgccttcctggctgttaaatgctttctatgtattttcaatttaattcctagaaataatgtaaaagttcaacgataggaattgattaaaagaattatgataatggaaggccatgcagctattaaaaatggt

SEQ ID NO: 777400 - DNA, 596 bp, Homo sapiens
actaggaccccatgcatattatcttatttggaaaaagagtctttgcagatgaaactaagaatcttgatataagatcgtctcagattacttgaatgggttcctaaatccaatgacaaacatcctaatgagagacagaggaggagaagacagacaaagagaagaccatgtgaggatgaagacaagagaccaggagttatgtagctacaagccactgaaggcctggagtcccagaagcctgaagaaggattctctcctggaggctgcattaggggtgaatagctgaattctaytggaagataatctgtgaggagggggtatggtcatatggtgatttggtcatatggtgatttgctcgaaggtgagaaatgtcacagttatttcataaattcccgaggacaaaaataacatataattcacttttttttcttttttgttcgcatgggaaggctagtaagtccttcatgtggtaacagcagcatccagtgggaacaatgccatattccctgcctccctcctgatttcaagctttgaagttctgcaccaattagaagaaaaccctcagatattttcttaccactttaagatatgcggcgtga

SEQ ID NO: 777401 - DNA, 564 bp, Homo sapiens
aacaaatggaaatataaaactttctgtaaagataagaatatagtcaaattcaaaatactctaatactgtaatggtagtacataaatcactttgaattctaatagaaaagttaaaagacaaaagtattaaaaataattatagctacaataatttgttaatgaatacatgatatgtaaaagatatcaattgtgacatcagtaacataaaatgtggagagaaataaagtgtagagtttttatgtgcagctgaagttaaattatcagcttaaaatgtcctgttataatgacaaggtattttatgtaggcttcctaataactacaaataagttctttttccaagaaaaagaaaaaggaatcaaagcataccactacaaaaaaatcatcaaatcacaaaggaagacagtaagaraggaagaatggaacaaaggaactacaaaacagagaacaatgaacaatatagcctagtaggtactttactatcagtaattacatataaatggattaaattattcaatcaaagacagagtggctgaatggatttaaaaaataagatccaactgtgtgc

SEQ ID NO: 777402 - DNA, 600 bp, Homo sapiens
acacccaagtcctacaggtatgatgcaaagggcccagagggatgcctgcacatgcagtgggttttgttacaggaaaagaacattaggcttggggaggcttcatccaggctggagtgcagtggcgcagtcttggctcactgcaacctccgcctcctgagttcaagcaattcttgtgcttcagcctcctgagtagctgggattacaggcacacaccaccacacctggctaattttgtatctttagtaaagacggggttttgccatgttggccaggctgrtctcaaactcccgacctcaggtgatccacctatcttggcctcccaaagtgctgagattacaggtgtgagccaccacacccagctgagcctgctgtttgtttgttttatagcaagcactgagcgaggctgctctttgttccagaaggagacattaacttatccctcaaactgctcactacagacaaccctgaggaatggccagcataaaaagtggtcagcctggccaacatggtgaaatctcgtctctactaaaaatacaaaaattagccgggcgcagtgataggcacctataatcccagctacctgagaggctgagacaggag

SEQ ID NO: 777403 - DNA, 600 bp, Homo sapiens
acacccaagtcctacaggtatgatgcaaagggcccagagggatgcctgcacatgcagtgggttttgttacaggaaaagaacattaggcttggggaggcttcatccaggctggagtgcagtggcgcagtcttggctcactgcaacctccgcctcctgagttcaagcaattcttgtgcttcagcctcctgagtagctgggattacaggcacacaccaccacacctggctaattttgtatctttagtaaagacggggttttgccatgttggccaggctggtctcaaactccygacctcaggtgatccacctatcttggcctcccaaagtgctgagattacaggtgtgagccaccacacccagctgagcctgctgtttgtttgttttatagcaagcactgagcgaggctgctctttgttccagaaggagacattaacttatccctcaaactgctcactacagacaaccctgaggaatggccagcataaaaagtggtcagcctggccaacatggtgaaatctcgtctctactaaaaatacaaaaattagccgggcgcagtgataggcacctataatcccagctacctgagaggctgagacaggag

SEQ ID NO: 777404 - DNA, 617 bp, Homo sapiens
ttctatttcattattatacttgtgaccaccatttaactcaacccagtctctggtgaatttccctattgtggatctaagtggcttattgatgatcctgtggggtacaattcacctaatagcagagagactatgtggtttctgccctcaaataatagctctgctctatttggacagccactccccgagcccacagctttttctttcctatcatttctgttctagcacatagcaattctgtcccaaargcttcctgtgccttttcaactctgcaatcacacagcagttggtaagacctattaatatttcaacttgtttttttcaattgcagggccatgacactcatggaacacaaaccatctatttgtctaccacaaaatgcacccaagtgtctcaaagtgcccttctggttacaaaatgagacactgcttcaggaccttggagagcgcccttccaggttaacacaaggtcaatatctccaggacctccctgagatccacgggatggcattttctcttcttgacattagccagaaaaaacaaaacaaaaaagcaaaattaagcaaacaatatgggctggcgtgagaaaataatttatttcacttgaaatatggcaatctt

SEQ ID NO: 777405 - DNA, 579 bp, Homo sapiens
cagatacagagacatacagacacacacaaacagacacacagaaacctacagacacacacccctctgcccatttgtttcatttactgtctgtttaatcacaatatccgcagccttcagtttcaggtactggcacatagtaggtgctcaacaagtgtctgttggatgaataagcgcattagcggttcarttattctctctttgccctgtccctgaatattctggtacttgttctcttggcttgcctagatgcagttggaaaagagaaccagaagggattcctgcaatcatttcgggtagatgccaagctcctcagcgtggcttgtaaagtcctttgcgatgtggctcctgccaacttctcctgtctcattccccaaagccctctgatgtggccaacgccactctcagtggtttttaatcttttccaagacacagatttcttaaggagctgataaaagctgtagaccttctccaatatgtagtcacctgcgcattcaaacaatgttctggatttaatttttggggatccctaaggcctgtttatggatctccaaggagtacacaggacccaggttaagaacc

SEQ ID NO: 777406 - DNA, 608 bp, Homo sapiens
acagagagaagggaattggtctccactttttcctttaatccacattctgcccaacaccttcctgccatcagggatcaatttgtcatcccttcagactgagctccaggcaggattgattctgagaattaataattgcttggatgatctggttcaggatcatttttcatcagcacctctcagaggctggcttattctatttattcaacattcaacaatatatattaaacacctaccatgtatcagacactgtgcaactttaggaaacaggaacctttctgtagtgtgcctgtataatttttrgctgcccagtatccctttacaactctcaacagcatcgtaatgttttgggggcaccatctctctctcatttgtgtagctttgcagggcagaagagtctaggtgggtgcctcttaccagagagctcaatgggactagagactctgaagaaggcatacaacctctgttcaaccagtcgcaaggtctttactggtcttttgaatcttcagtaattgaactaaacacaggagtgaccttggcgttcactcattgcagcagtggtatgatgacgtgaatgtccataatatgaagccactgctaaagtttctctt

SEQ ID NO: 777407 - DNA, 608 bp, Homo sapiens
acagagagaagggaattggtctccactttttcctttaatccacattctgcccaacaccttcctgccatcagggatcaatttgtcatcccttcagactgagctccaggcaggattgattctgagaattaataattgcttggatgatctggttcaggatcatttttcatcagcacctctcagaggctggcttattctatttattcaacattcaacaatatatattaaacacctaccatgtatcagacactgtgcaactttaggaaacaggaacctttctgtagtgtgcctgtataatttttggctgcccagtatccctttacaactctcaacagcatcgtaatgttttgggggcaccatctctctctcatttgtgtagctttgcagggcagaagagtctaggtkggtgcctcttaccagagagctcaatgggactagagactctgaagaaggcatacaacctctgttcaaccagtcgcaaggtctttactggtcttttgaatcttcagtaattgaactaaacacaggagtgaccttggcgttcactcattgcagcagtggtatgatgacgtgaatgtccataatatgaagccactgctaaagtttctctt

SEQ ID NO: 777408 - DNA, 489 bp, Homo sapiens
taaataatatgatttttttttaataataagtgatttagcagtacttaaataatatgatcatgctggttttcattctgaaattcatgccaccctaactaaatagaagaataaatgaaagaacacaactgtgttgtgacttacgacacacttttataatcgacaaaagtgcagktgaggttatttttttattaatctcactgaacaaatgttccaaaactagacctctttttccaattaaacataatctctatttcataaattaaagttaacaaagtcaaatgcaatttagttatgaaaatctgtctttcttttctcagctcacagttgaccaatcccatgtgcataagataaaaggacagggaaacaagtggctttgctaaacattttggtatgcagagaaaccattacgccattgatgctgtgggactgcaatcacattcacatagaatgaaacatgctgcctgcaataaattactgggtatgttggag

SEQ ID NO: 777409 - DNA, 447 bp, Homo sapiens
  misc_feature 173: n = A,T,C or G
acccactgagctctaagccaagaagagaaatgaaattctgtctatacaatatcaagacagccaattgattcaatttgtttaaacaactatttacagagtactttctatatgccagacattcatgtaggtgataaggatatagcagtaaataagagagttccttaagtctgcanacttacagtctagtggtgactacaacccctaagattgtgtaaaagcacagtggttagcagacaggtaggtagtaaaagtctgaagtctgagttgaaattctaacaccatcatgtaatytcatgttacttaaattccaacttcctcaatttcttcatctgtaaaatagaaatgataattgtacttgactgacaggtctgttgtgaagattaagtgagaagatatatttaaatcacctagaatgacccctggtgtagagttaatactcaataactg

SEQ ID NO: 777410 - DNA, 510 bp, Homo sapiens
aagaggtttaattggacttacagtcccacgtggctggggaggcctcagaatcatagtgggaggcaaaaagcacttcttacatggcagtggcaagagaaaatgaggaataagcaaaagcagaaacccctgataaaaccatcagatctcatgagacttattcactaccatgagaacagtatggggaaaaccacccccatgattcaaattatctcccaccaggtccctcccacaacacatgggaattatgggagtatagttcaccatgagaattgggtggggacacagccaaaccatatcaacatatgtgatattgctagggactgaattgtgtcctccccaaaattcatacrttgaagttctaatttccaatgtgattgtatttagaaatagggcttttaggagataattaaggttacgtgagataatagagatgggttcctaatctgataggattgctcttcttataaaaagaaagagagagagaaagagagagatttctctaggaatagg

SEQ ID NO: 777411 - DNA, 622 bp, Homo sapiens
atttacaggataaattcttggaataagactgctagttcaacaggtatatacgtatgaattgtaactgatattgctaaatactctgcactccccacaggaaatatgtgagaataccaatttccacatgttaatatttctgttgtattattgaactttaatatttttgcccatttgaagggtgaaaaaaatctatctatatgtattttcakttgaatttcttctgtcataaccaagcttgaggttttttccatatatttaagagccatttgtattttctatcacttttgcccaattttttattgggttattagattttgacatatcaatgttcaagaaaaccttatgtcttaagatgataagcccttggtcaatattgtgagctacaaatatttttctcactttatcatttgccttttgagttttcttatgactttttgttatggagaattttttaatttcaattttagtcaaactcatcaatcttttctgttgcagtttattttgaaattctacatattttcttctaaatttttatcttttttatatttcatctttgatttgtttggaatttatcataatatcgtgtgtgaggaatggatccaacattgttattttttagttg

SEQ ID NO: 777412 - DNA, 622 bp, Homo sapiens
atttacaggataaattcttggaataagactgctagttcaacaggtatatacgtatgaattgtaactgatattgctaaatactctgcactccccacaggaaatatgtgagaataccaatttccacatgttaatatttctgttgtattattgaactttaatatttttgcccatttgaagggtgaaaaaaatctatctatatgtattttcatttgaatttctkctgtcataaccaagcttgaggttttttccatatatttaagagccatttgtattttctatcacttttgcccaattttttattgggttattagattttgacatatcaatgttcaagaaaaccttatgtcttaagatgataagcccttggtcaatattgtgagctacaaatatttttctcactttatcatttgccttttgagttttcttatgactttttgttatggagaattttttaatttcaattttagtcaaactcatcaatcttttctgttgcagtttattttgaaattctacatattttcttctaaatttttatcttttttatatttcatctttgatttgtttggaatttatcataatatcgtgtgtgaggaatggatccaacattgttattttttagttg

SEQ ID NO: 777413 - DNA, 632 bp, Homo sapiens
taaatattagttattaacataaccatcatcactattttttagcagacagacaaaaccagaacagtggttgaaataagagtgcacaaaaagataagagacaaaaagaagcatattcatgtcacacagtaagcctcggaaaacattttgatttatataagacctatgttcatctgcattattcattttaatcacttttattgattgtgtatctttgaattgaccttttaaaattgtattacaaagcagcacattacagtacttaagagtaaggtctgtggagtgagaatgcctggatatgaatgtagtttccaccattttcaagctatgctatttcagacaagttcccctctaaacctttgtttttatatccatgaagtaagagtaatactaatgcctccctcactggtttgttgtcaggatcaaataaactaatgcaygtaaagttctcagaacaaagtctaacacaagctaagcactcaagaaatgttatttcaaaatacagcgtgacaacgacagggatacatcttgagaaaagcatcattaggcattgcctgtgcaaacatcatggagtgtagtagtttcacaaacctatatgatatggcctactacacattgagggcatatggtatata

SEQ ID NO: 777414 - DNA, 460 bp, Homo sapiens
taaatatattttaggaaaaaatactgcaatcagactatatacaaataaagcaaggaaataatgaaaaaagctgggatcagttttcagccctaaatctatatttccctatgagacaaaaaaaggaagaaaggaaggaagagagggaagaagaaaggaagagagtaagctagtaatcgccttacatatatttgaattatgaatgatactaaattcatttctttttacatgcaaattacccccagggaataacagcaaactggcttaaaaatgtctrtttgtaacttaacattcattttagatgacttgtacaaatgaacttctttctctccatttttgttggcaacattcaagcaagaaaaggttaaatgacttgtgcactgggaagaaaaaaaaaaaaaacagttgtcatccgtggtgccaaaaatagaagttctgatttccagtcctgtgatctcaacag

SEQ ID NO: 777415 - DNA, 623 bp, Homo sapiens
atgtgtgtatgtatctttataatagaatgatttatatgcctttgaatctaaaagaaacataaacaaatttacaaaacaaacaaacaaaaacccaaacaacccctttaaaaagtgggcaaagtacatgaatagacacttctcaaaagaagacattcttgcaggcaacaaacatgaaaaaaaactcgacatcactgatcgttagagaaatgcaaatcaaaaccacagggagataccatctcatgccagtcagaatggcgattattaaaaagtcaagaaacaaaagatgctggtgyggttttgaagaaataggaacgcttttacactgttggtgggaatgtaaattagttcaagcattgtgggagacaatgtggcgattctttaaagatacagaaccagaaataccatctgactcagcaatcccattactgggcatatacccaaaggacatttttcaaaattgatatctaaagtgtggttaatgaatatttttccaagtaattcatttattcacataaacatattttatactgcatttgttcatttcaccaccattctagttgctaggagtaaaatcatacaatccctatttttggtcttttaaaaagatgcatgtcattgtctgg

SEQ ID NO: 777416 - DNA, 613 bp, Homo sapiens
gggggtcagtcaatggatgtggcaaagtcaagtgattctagctggtatgggtgggtttggggaggggatttgcacaatccattggatgggttcatgtcacatgagggctctgctcactggtatcaaaatctaaatgcagcaaattctgggaatgcctctttcattgggagacagcccctttaatcaatttcccactcctctccccatgccctgaaccctttytaactagaacaattatggggcttccaaatgtttcaggtacatgggcgtggaccctaattatggacacacgagggattaatatgggccagggacacgtttcttggcattgagggtcttcaatgaaagcagtggcaatctaagatcgacacacttgtgcagggaagaggacggacagagacctggcccatcacacacacacacacacacacacacacacacacaggcacgcacaaccaaaatgtcatcataaaaaaggagaaagggggacttcagtggctgagggactggctcagagagcttgtgcctagttcctgcagcctttccaggggaaccccagagaaaaaaacccccacagcgacggccatgttccagtggtttcatgcacccgtga

SEQ ID NO: 777417 - DNA, 481 bp, Homo sapiens
aacaaattgccctgaaacttagtggctgaaaacaactattaaaactatgtattatttttcaaaagtctacggattggctgggtagatcagtgattgatctggtccagactctgttgattttggtgaggctttctcwtgcatctgtagttacatctgaggggtcagctaaggtcagggtggtctaggatggtcctggctgagataactcaaccctgttccatgtggtctctcctcttccagcaagctagcttgggcttgttcacatgtagttgcagggttctaagagaatgagcagaaacatgcaagaactcttgaggcttagactcagagttgtcacagggtcatttctgccacatcctaagggtcaaaaccagcccagagtcaaggggttaagggataggttccacttcttcatggagaattgttgtaaagccacatctcaaagggtgtgaatacagggaggggaaaaattagggtcctg

SEQ ID NO: 777418 - DNA, 608 bp, Homo sapiens
taagagaatgagcagaaacatgcaagaactcttgaggcttagactcagagttgtcacagggtcatttctgccacatcctaagggtcaaaaccagcccagagtcaaggggttaagggataggttccacttcttcatggagaattgttgtaaagccacatctcaaagggtgtgaatacagggaggggaaaaattagggtcctgttttgcaatcagtctatcatagatgcattcaaatgagttactgtagccactctattagttcctccttgatcatcatgcaaaatctaaaaatatttcagattttagtaccaatgattctgattcctagtcaaaaagcttctgttcccaagatgagtagagcaaatactttaggaaccttaaaatgctacttattgttccttaacatgactatgatcatatccaccaaggatttgaagctggtacttgagaaactgcctctgggaattaarggccagataaactcaaccatgagtacgagatccaagcccacagcctaacacctgccactcttgggtaaaaccaagcaataccccaaatctcttgatcttccaggaaacgggatgcactgagtacatctgcatgggctc

SEQ ID NO: 777419 - DNA, 559 bp, Homo sapiens
tcctctctgaaggcttcacgttgtatccccactcaaccagacaagttaggcctttttatccccatgttctacaagcatacacacacacacacgcacaccaatcattgcctataaggctgaaaaggttatgccaaaattgtctcattctagcaaaaatacatttatagtttagaaaggccataggtcgggtgcagtggctcacacctgtaatcccagcaccttgggaggctgagaggggcagatcacaaggtcaggagatcaagaccatcctggctaacacagtgaagccccgtccctactaaaaatacaaaaaattagctgggcgtgctggcgcacacttgtacttgggaggctgaagcaggagaattgcttgaacccaggaggcggaggttgcagcgagccaacatcacaccacsgcactccagcctggataacaaagtgagactccatctcaaacaaagagagacagagagaaagaaggagagagagagagagagagagagagagagagagagagagagagagagagagggcataggccccttctgaacttattatt

SEQ ID NO: 777420 - DNA, 681 bp, Homo sapiens
gtcaagctaattaatatatccatcttctcccagttattttttatatgtgtgatgagaagaactgaaatctactctcttggcaaatcttgagtatacaatacgattatttatagtcattatgcttacatttggtctctaggcttactcattccagataacttcaactytctaccctcttatcaacatctccccatttctcccaccttcccaaccatggtaatcaattttctgctgtctgcctctatgtattttataagattccacatatatgtgagatcatgcagtatttgtctttctctgtttggcttattgcacttagcataatgttcatccaggttgtcccaaatcttctttctttttttttaaagctgaacaatattccataatatatacatactacaatgtctttatccgttaacccatcaatgaacacttgggttatttccatatcttggctattgtgaataattctgtaatcaacatgggaatgcagatatctctttgaggtactgatttcattttccttaggcatatacctagaagagggattgctagatcatatgataattctatttttaattttttgagaaacctccatactttttttccataatggccactaatttatatgcgcaccaacaatgtaagaacattatcccttttctcagtactgcattccaa

SEQ ID NO: 777421 - DNA, 681 bp, Homo sapiens
gtcaagctaattaatatatccatcttctcccagttattttttatatgtgtgatgagaagaactgaaatctactctcttggcaaatcttgagtatacaatacgattatttatagtcattatgcttacatttggtctctaggcttactcattccagataacttcaactttctaccctcttatcaacatctccccatttctcccaccttcccaaccatggtaatcaattttctgctgtctgcctctatgtattttataagattccacatatatgtgagatcatgcagtatttgtctttctctgtttggcttattgcacttagcataatgttcatccaggttgtcccaaatcttctttctttttttttaaagctgaacaatattccataatatatacatactacaatgtctttatccgttaacccatcaatgaacacttgggttatttccatatcttggctattgtgaataattctgtaatcaacatgggartgcagatatctctttgaggtactgatttcattttccttaggcatatacctagaagagggattgctagatcatatgataattctatttttaattttttgagaaacctccatactttttttccataatggccactaatttatatgcgcaccaacaatgtaagaacattatcccttttctcagtactgcattccaa

SEQ ID NO: 777422 - DNA, 662 bp, Homo sapiens
ttttaaaatgaacaattaaattattactgaccctattgtgctatcaaatgctaggccatatttattcattctaactattttttgtacctattaactatctcccccaccccaccgccccaacctactaaccttctagcctctggtaaccatccttctatctccatggttttaattgttttgatttttaggtcccacaaataagtaagaacatgcaatgtttgtcttttcatgcctgacttttttgcttaacctaatgacctccagttccatctatgttgttgcaaatgactgaatcttattcttttttatggctgaatagtactgcattgtgtacatgtgccacattttctttatccattcatctgttgatggacatttagattgcttccaaattttggctactgtgaagagacacacaatattggagtgcagatatttcttcaatatattgatttcctttcttttggrtatatacccagcagtgggattgctgaattgtatggtagctctatttttagtttttcaaggaacctccaaacttctccatagtggttgtactaatttacgttgtactaatttacaccaacattaaacgtgggttcccttttctccatatcctctccaacaggattgtttatcttttgtctatccaccagtttaag

SEQ ID NO: 777423 - DNA, 533 bp, Homo sapiens
aattggacctcctacaattatgggagctgattaacagtttctgtgaggctcttctcttccagtctgatgctggagaggcaatcaagagggaaaggcaggtggaaagtgagggacagcaagaacaagctggaacccacaagcacatccgcagctcacaaagccagctaaaacctgtgtcagttcctgctgcctctgaccgtaatggtatgggtgtcctggagaagccaggttcctttgtcgtgtagctaaacacacatacatgcctaggagtcagaaaaactaaagaaggatccagggaaaggtgctgcaattgcagatccagctgctgcctctcaccacgaggtgagctggcaggtaaatracaacgcacgtgaactacaaaatggctgctgcttcattttcagcctccaaatcccccaagactctctcttgtggtgcacatgaacagaaacataggaaagggaagtctaggcactgtatttcagcctagccgatttgacatatatcgaagccacggcagtctacctcttgtc

SEQ ID NO: 777424 - DNA, 598 bp, Homo sapiens; identical to SEQ ID NO: 742476

SEQ ID NO: 777425 - DNA, 641 bp, Homo sapiens
aactaccatcatgaaaataagtgaaagtataaaaatcattggtagaggtaaattcaaactcaaattcagaactagtagaggtacattcacgatcaaattcagaatattccatgaatacaatgacagaatacggaaatccttagtatgaatactaaaagacaaaatagtcagtgataactatagctataataagatgttaaggaacacacactgtaaaaaatgtaaattaaggtaagaaaatcataaattgttgaggggaagatagaagtctagagtatttgtatgcaacaaaagttaagttgctttatttatttaacaaatagtacctgccaattaacacaccagacacaaattatatgtataaattttacagcagaaaagtacctgaaaagttatttatttcaaatccttgattttacagctgaggagaaaccccaagtggtcaaattatgtmatgatattctatttgcttagtacagactgagtacccctaatccaaaaatctgaactccaaaatgtttcaaaatctgacactttttgaagccaacttgacaccaaaaatggaaaaatccacacctggcttcatgtgacagatcacagtcaaaacgctggtgcataacacttaatttattcagtatcct

SEQ ID NO: 777426 - DNA, 563 bp, Homo sapiens
tggttctttttatgttttctatctctttgttgaattttttattttgttcacgtattgtttttctgatattgtttatttgcttgtatgtcttctcttgcagcttactgagcttctttgcaactattactttgaattctttacaggggatttcatagatctccatttatttggggtcagctactggagttttgttttgctcctttggtgttatgtttccttgattcttcatgttccttgacatcttggattgctatcttcacatttgaaaaacagttctttcttctagtctttactgagactgctttaggagagaaagaccttaactcaagaaagcccagccagacattttggggtttttgcagggcttttctatggatgcaccctycccgctcctttttttccctcttggagaggaagtcttaggattgtgtgccttctcttaatcctgcaaaattgagccaggtgtggagaactttctgtttattttcctcatggcagtgcttgaaagtgttcaaggttgcactccttcttccgatctcacaagttgagctagctgctgctgt

SEQ ID NO: 777427 - DNA, 628 bp, Homo sapiens
taagctgcaaaatattattggttactatagttgtgcggaatatttgacccaaattttctggtggtcaaaatgaaaaagtgaacctgggcagtcatatagttcttagtgttcacaaataataaaaataagcacttactatgagataaatactaagcagtaaatactaagttctaagtggtttgtttgtgtgtatatatatatatrtacatgtatatatgtgcatagtttgtgtatatatatatgtacatgtatatgtgtgtacatatctacatgtatataactctatatctcaaatatatatgtgtgtatatatacgtatgtgtgtgtgtgtgtatatatatatatcttacacatggaccccctcccccaaacaactgattttgcaaatgaataataagagaggtgaagtagtttgtccaagatcatacagctcaaaattggtggatccacattttgaacccaagcagcctgaccccagggtctttgcttttcaccattgtactaggctgtttctaaaggaactcatctctgttcctgagagaaagaaaagctttttcaagtacttagttctgtctttttatgtgtggaacattatatagagaaccctgaaagacgtagtgaaccaagt

SEQ ID NO: 777428 - DNA, 628 bp, Homo sapiens
taagctgcaaaatattattggttactatagttgtgcggaatatttgacccaaattttctggtggtcaaaatgaaaaagtgaacctgggcagtcatatagttcttagtgttcacaaataataaaaataagcacttactatgagataaatactaagcagtaaatactaagttctaagtggtttgtttgtgtgtatatatatatatgtacatgtatatatgtgcatagtttgtgtatatatatatgtacatgtrtatgtgtgtacatatctacatgtatataactctatatctcaaatatatatgtgtgtatatatacgtatgtgtgtgtgtgtgtatatatatatatcttacacatggaccccctcccccaaacaactgattttgcaaatgaataataagagaggtgaagtagtttgtccaagatcatacagctcaaaattggtggatccacattttgaacccaagcagcctgaccccagggtctttgcttttcaccattgtactaggctgtttctaaaggaactcatctctgttcctgagagaaagaaaagctttttcaagtacttagttctgtctttttatgtgtggaacattatatagagaaccctgaaagacgtagtgaaccaagt

SEQ ID NO: 777429 - DNA, 628 bp, Homo sapiens
taagctgcaaaatattattggttactatagttgtgcggaatatttgacccaaattttctggtggtcaaaatgaaaaagtgaacctgggcagtcatatagttcttagtgttcacaaataataaaaataagcacttactatgagataaatactaagcagtaaatactaagttctaagtggtttgtttgtgtgtatatatatatatgtacatgtatatatgtgcatagtttgtgtatatatatatgtacatgtatatgtgtgtacatatctacatgtatataactctatatctcaaatatatatgtgtgtatatatacgtatrtgtgtgtgtgtgtatatatatatatcttacacatggaccccctcccccaaacaactgattttgcaaatgaataataagagaggtgaagtagtttgtccaagatcatacagctcaaaattggtggatccacattttgaacccaagcagcctgaccccagggtctttgcttttcaccattgtactaggctgtttctaaaggaactcatctctgttcctgagagaaagaaaagctttttcaagtacttagttctgtctttttatgtgtggaacattatatagagaaccctgaaagacgtagtgaaccaagt

SEQ ID NO: 777430 - DNA, 464 bp, Homo sapiens
gggttgaggcgtggacaggggacattgagggaacagacccaatttagtggatttctatggaaccaacagaaaggatccttgatagctgaaagctatggtagcagccagcaagataaagctttatctttatctcatgttccaggaggatcatcacagttgagaaggaactttaagtagctaatttgaagttacttagttagattttctgatttttctttacaaagtttaatgatggttacctttcagtctttaaccaatattttaaaattataacgtasaggtcactggaagaaaatacgtgcttccgtttccattttatgaagctcaagagaaaagaaaaagtcagtgtagtactcaagggaaatctgcttttaaaagccaatgatttcttctgtatgactgctccctaagttaatttaagcagcttgttatttgaaaactatgttatattttggaaggggtag

SEQ ID NO: 777431 - DNA, 528 bp, Homo sapiens
gtatttttctgcaacttgattttttttctttcatttttagtttacacataataattgtacataagatatagaatgatatttttgatgcacgtatacaatatgtaataatcaaattgaggtaattagcatacacatcccctcaaacatttatgatttatttgtgttgcaaacattcaaaatcctctcttctagcttttttaaaacatacaataaattatcattaactatgttcaccttacagtgcaatagagcactagaacttattcctcctcactagctataatgttgtacctgttaaccaacctctccctgtcctcccctcccctctacccttcccascctctaataactacagttctattttctacttctatgagatcagttttttagctcccacatatgagtgagaacctgtggtatttgtctttctgtgcctgacttatttcacttaacataatgtcctccaggcccatcatgttgtcatgagtgacagaatttcatcctttttatggataaatactactccat

SEQ ID NO: 777432 - DNA, 614 bp, Homo sapiens
ctatactactctagacaataccactctataccatttcactctacaatatactatgtgacactacactatattatactatgctatactacactataccatactatattatagcacaatataccacactaaatgttatatactatactgcaatatattatttatataaactatactatattacattacactgcattacactaactatactagtcagcagatttaagtaagcatcactgtttctggaacatacatacaaagtcattacagagaagatacctaacattygggtttgatttactgatcacgtggtatagcccccatgatacttagcatgcagtgctagtccagtagatttccagattctgttgtctgggaaatgtttaatggttttgctcaggcaattctacagtgcatggctaatggtagatccattttcagtttgggctctaagcagaaggaaaaatttttccctaaagagatttctaaacacctctgattttcatagttttggaagaacatattgtaacatgaaatatatgaatatactgcataaataacgttgttacgatgccaaaggaaattattctaaaataaagaccaatttacccgcaatt

SEQ ID NO: 777433 - DNA, 634 bp, Homo sapiens
ctatactagtcagcagatttaagtaagcatcactgtttctggaacatacatacaaagtcattacagagaagatacctaacattcgggtttgatttactgatcacgtggtatagcccccatgatacttagcatgcagtgctagtccagtagatttccagattctgttgtctgggaaatgtttaatggttttgctcaggcaattctacagtgcatggctaatggtagatccattttcagtttgggctctaagcagaaggaaaaatttttccctaaagagatttctaaacacctctgattttcatagttttggaagaacatattgtaacatgaaatatatgaatatactgcataaataacgttgttacgatgccaaaggaaattattctaaaataaagaccaatttacccgcaattattcttcgacaaatcaagcttttctttttcttttttctttcagtttgtgtccaaatgcatatttttayatgttaacatgatagcaagatataattttatatccagctttcattatactaagttttttaaaagaaatcattttaatgggggaaagaaagatacttccagtgatcatgtcaaaggaaactgcatggcaaagatgaaaaagttgatgaggcttg

SEQ ID NO: 777434 - DNA, 613 bp, Homo sapiens
atgatagcaagatataattttatatccagctttcattatactaagttttttaaaagaaatcattttaatgggggaaagaaagatacttccagtgatcatgtcaaaggaaactgcatggcaaagatgaaaaagttgatgaggcttgcctggaatatgaatgctttctgtacctagcaacaaacaaacacaaagaaaagaaaaccaacatcatctaatgtattatttccttttacttaagccacaaaattagaaccatatcgatactgagagtgagtgaaggccagcaagtaaagcccagcaagyaatccctgcttttcctgccataagacctttggcttatccaaagttaaatgctagccatctgtgttagattcccagccatccaaacccactaatattcataaaatatccccagagctggtcaagacagtagaccaaaatcaaaagcttctgccaagtaaaaaagatatatctgtagacaagtgtgatgctggaaggacataaacttcactgttctttgataaacaaaagtgaatgagtccatcagcctgcaccatgtacttggaggagtctgggatttcgtttttgtgtaggttgtgcctatacgacgtgt

SEQ ID NO: 777435 - DNA, 554 bp, Homo sapiens
gtttttgactgaactcctgcactaggcaccaagagaccagaccaaaccacaatggagtcactcatactaagtgccacataatcaaactgaagcattcagaaagcagatagatccccaaacagaccaatttttctgacaacaggagattccggtctacctgcatcagcataataaataagtttcctctgctttaamccttccaaaacaaaaaaagagaaagaaatctgaagtaacctgatgttaatcaatcagcttttttttttctattgctctgtttccttgttcccaccttataaagccccctgtcctgccacgccctgtgggagctccattctattttatagaatggaggctgccccattcatgaatggtgaataaaagtcaattaggtcgggtgccatggttcatgcctataatctgagtactttgagaggccgaggcaggaggattacttgagcccaggtgttcaagactagcctgtgcaacatggtgagacccacccacctataccaaaaaataacttaaaaattagccaggcatgggtattgtgttgg

SEQ ID NO: 777436 - DNA, 554 bp, Homo sapiens
gtttttgactgaactcctgcactaggcaccaagagaccagaccaaaccacaatggagtcactcatactaagtgccacataatcaaactgaagcattcagaaagcagatagatccccaaacagaccaatttttctgacaacaggagattccggtctacctgcatcagcataataaataagtttcctctgctttaaaccttccaaaacaaaaaaagagaaagaaatctgaagtaacctgatgttaatcaatcagcttttttttttctattgctctgtttccttgttcccaccttataaagccccctgtcctgccacgccctgtgggagctccattctattttatagaatggaggctgccccattcatgaatggtgaataaaagtcaattaggtcgggtgccatggttcrtgcctataatctgagtactttgagaggccgaggcaggaggattacttgagcccaggtgttcaagactagcctgtgcaacatggtgagacccacccacctataccaaaaaataacttaaaaattagccaggcatgggtattgtgttgg

SEQ ID NO: 777437 - DNA, 633 bp, Homo sapiens
ttcaagacaagtcttgctctgtcactcaagctggagtgcagtggcataatctcggctcactgcaacctccacctctcgggttcaagcgattttcctgcctccgcctcctgagtagctgagattacgggtgcatgccaccacacccagctaatttttgtatttttagtaaagacagggtttcaccacgttagccaggctggtctcgaactcctgacctcaagcaatccacccaccttggcctcctaaagtgctggaattacaggyatgagccaccttgcctggcctgatgttttcaatacttgatcagtgaactgtagtttctactaaaagatttaattcagcaagcacagcaatggtgtgaatagaagcctaaatgtttagcaaagcagatatatatttaaacacacacaacaacaacaacaacaacagcataatggcaaaatatcagggagtaaatattaagtccttaaaagaaaaatgttttaaactagataacaattttaacctacacggctacagagatagcttgcttcttgtgcaaacaactgctggaataagacacaataaaactatcaaaatctaatatcaattttacttctaaattatctttctctcatttgtttggatgaagtc

SEQ ID NO: 777438 - DNA, 622 bp, Homo sapiens
gtaattctgcctccaggattctgatgaaaggaaacaaccaggtatatgcataaagatatatatgtacaggaatgtgcctcaccacattagttatgagaccaaaaaattagaaacataaaactaaatttccaaccatatggggatgattcaattaattttggtggcatcacaatatgaactattatggacgattaaaatgatcacrtgaaactatatttattaacataaaaatatatttttattatataagcattttaaaggagattatgcaacacaatgcaggggcttcccattttgttgttaaaagacatgactgagtgagagaaagtcttaaaggccttgctcgtgtaataaaatcagttataaattcaattgtagaaggaaatgttgatgatccattattaagtttgagaagcaagtagcagaacagtattacagtctgtctctcagtaaataaaataatcatattattaatatatgtgcataatatttgttcattatatatatgcatgcatcagtaaataatgagaatatacaccaaaatgttaacaatggtaggattgcacatgggttttattttcatttttgtacctttctgaatttttctaaatttttacaaata

SEQ ID NO: 777439 - DNA, 571 bp, Homo sapiens
tggggatcctggcgctaggctacccaggagaggaggggaagggcaacccgcggtcccgcctgtggtgcccggctgtgctcatccccacgccccagaccccaaaaggggctggggaggggcacatctggcggacccctcgcgggggaccaagcgggtttagcaggtgcgccgcctggaacccctacgcccaccttccagggagaaaagtgcctctgcttctcgggaagttcccggcttttcagcacccgggacaacagcagcggcacctggggagaggctctccaccccgccccgcgctcgcttccagtcgccagcttcgtgatcttctgcccsgactttctctcacccgccgggcgctgcgtcctgcagtcccagcctcccttggggacagggagcaccttccccaaagccaggagaagaggtctccctggacaaggacatcctgcttgccctgcctgggtgtgtttagaggagccaccggcggtttaacttcacagcccatttattggcccgcacttacaaaaagccccaggtttaattcttggtttgggcctaggagctgaactggctt

SEQ ID NO: 777440 - DNA, 417 bp, Homo sapiens
tcagcctcccaagtagctgtgactaccggtgtgcgctgccacacctggctaatttttgtatttttagtagagacagggttttgccatattggccaggctggtctcgaactaccgaccttcagtgatccacctatcttgacctctcaaagtgcaggkattacaggcgcaagccaccatgcccagccaaaggtagtattttttaaactttgcttacactgtctaaatataaacaactttttaactggttacataaatagcagatcatgaagaaaaacccggaccctgaaaacccacctttaaaaactttgtgtgtaaattaatcatggtgttttcatctttgtttctgactttctaaagaaagagaagtatcctctgcagggcaaaggatctgcagaactataatccagcaatttgtaa

SEQ ID NO: 777441 - DNA, 578 bp, Homo sapiens
gagacttgttaaattgttgtgacaaaaatgctgatagtgatatagacaatgaagtccaagctaaagaggtatcagagggagatgaggaacttattgggaactggagcaaacgtcacttttgttatgctttagcaaagagactggctgcattgtgcccctgttccagggatctgtggaactttgaactttgagagtgatgatttagagtatctgacagaagaaatttctaagcaaaaaaatgacctgaaactggaacttatatttcaaagggaagcagagtataaatgtttggaaaatttgcrccctgtcatgtggtagaaaagaaaaacttattttctgaagaagaattcaagcaggctgaagaaatttgcataagtaaaaagaagccaaattttaatagccaaaacagaggggagacctcaaaggcatttcagagaccttcacagcagccactctcatcacaggcccagaggcctaggagggaagaatggttttatgggccaggccttgggccccactgccctgtgcagccttaggacatggcttcctgcatcccagctgctccaactctagctgtg

SEQ ID NO: 777442 - DNA, 587 bp, Homo sapiens
aatatgtcaaatatagcacccccctctcagtaatactggggcctctagaacatgattctcactctgagatgacgggctgattcagaatcctggaatcctggagtaggggaagataaattaaaaatctctacaggtgattctatgtatccttttatatgatcccaccttcctcaaggatgttttctttgtgccatggtcaatggtattagactttccccaaagaggtgagcattgtgaaatgataccccacttaataaatacaagtgcattctcttctttaatattcactggcatgccctaaccagttaaagtttataagctaaaaacacagatgctttttatttttgtaatagtgatttattaataattctcactcaaaatctctcrttgcatctttttttctgaagtttatttttcagcttttcaagtttgtctcaagtttgttttctaactgtggaacactgcaagatgttgattgtataaatttgtcaaaattaatatgactcagtcaactctgtccttttggtagcctacattcatccaaaggttcttttattagtaattaaatatcccaaatcaattagttt

SEQ ID NO: 777443 - DNA, 613 bp, Homo sapiens
tttgcaaaggtggaaggctctctcttaaggccttcagttgccatgtaagaagcctgattgcaaattgccttgaggctgccactttctgaggaagccctgctgctcctgtgccctgctgcttcaatttcagccactatctgacctcaacttcaagggaagccctaagccaaagtctttgagctgaggcctttctgagtgcctggccctaagacattatgagagacaaccaaatgatcattgtttttgtaaaccactaaatctgggggtgatttactacaaaacaatagataacttgagcaaatttattcctaaattttaaccttttctattgctattgtgataatttttaaaaaattgtctctgtaatcattktcaacttttgtgactttgtctcatgcaacttgcacatttgtatatcatatagtgtaatgctacctctaaactgattttcatttgccaaatttaagttttcatctctcagctaatgaacacacaacttaggctattttaaatgctaacctgcctccttaacagctggtagttgaattttgccgtctggatatttttgggtctatgtttgtggaaatacttgactacatgttgcattttttct

SEQ ID NO: 777444 - DNA, 589 bp, Homo sapiens
cctcacataatccccttatgatgcaactccatccattaaaacatgagatctacattccctcttcttgaaactggctggacttttgtggctggtccaagaaatagggtacagtggaagagatgctgcacgacttctgaggctaggttctgcctggcggctggacaatsacgatttgaaccctgagcctctacatatgcaagatattggccccaaagcagcaatgctgtgaagaagtccaaaacagcccacacatgagaacaaatgaaaagcccagaaacatcatgaagagaaatgtccagtcagctcccagctactccagcccctcattgttccagctacagctcctcaaaccagaatcatccagtcaagcccttcccaaactcctgacccacaaaaagcatgagagagaataaaatggttgctcctgttctaagtcacaggatttcagagtgccttgttacaaagcagtacataactagaacaatacctaatgtttattgagctatagaattgagcatgtaatattttattcaatttattgaacacatagtatttgtgtagtcaggattcaaggatttcacatgtatta

SEQ ID NO: 777445 - DNA, 570 bp, Homo sapiens
tccatggcatccaaatcatccatgcagaattttgtccaacataacctcagatgacaggaaataatttcaaatgttgagttttctcatcaaaggttttttagaactatattctagggaatttttagtattaacaatcaatcttgtgtaatatttggaatatgtctccaagttacaaaggttatagttaattcacaaatggccaatactattggctctattcttttcatggtgtcmcagatcacaagcagtcttcagggtggcaattttcaaaattccatagttactccacttcagcctaagaaacttcaatattatgtttataaacttgttctggtcatcaattgttatttaacaactcaaaaactaaatgagatttttttaaagaaaacacccattttattacgctcacagcttctgtgagaatcaggaattaagacagcacatatcagggatggcttttctctgtgttatgatgcttggggcctcagatgaaaagactcatacagttgggggtgactcaaatggatgtggaaggaaccccagagtctgggttgaaaaggtttgactgag

SEQ ID NO: 777446 - DNA, 681 bp, Homo sapiens
aagtagcaaggaattctgaacttagggtctggggtgccccttcacacagggagagtctggcactcactgtgtcccagtggccattaatataatcatctgtgtttatttaacaaacatgcacagaacacccaacagaggctgaggcgcccttgcgcactttccaatattgccttgtccagtcctcaagtgaagcctgcggggcaggggccgcaggggctgctgcctgctgatgcccctgaggtggggaggagctgggagggagggagtcagaccagtttcctcttggacaatcacatgttagttcagatgatattagccatgggcccaggacccaggcccgaggggtgtccacctggtctgatcagaggccagtggggagctcagggaacagttttacctgccagcgagtgactgcccctgagccaggctgggaggccgaggaggcagcagccctgaggggcctgagagaggggacttacacaggtggtggacacatcagargtcttgcagagaaggggcctggagttcccaggtaagtgctatcgccacaggcttggggagtcaccagggccttggagaacctgggcgtcccaggatcagatctgagctgatgtcatgaggctgatcatctgctggactgagctcctcgccaggcccctgtgtgtgtatatgtggatcctg

SEQ ID NO: 777447 - DNA, 629 bp, Homo sapiens
cccttgggggccccaggaaggatccccccaacaatccctgcaggctcgagggtgtcttctcccgctgcctggcctctctccagcccccgctcccatcttggagcaggagctggggctgagcctggggcatcacaaatggcatcaggaggcagactgattcctgggcagaagagggtgggtccccagtaaggccccacctttggaccagggtgggcctgaaggctgggggccaagctgccagtcgggcagatgggagtggggactcctggtgcctctccccgcctgcccatggtcacccatggaccaatcagcatgcacttcctcccctctgaggtccataaaagccctgggctcagccagaacagggcagaggaggaagargacagagagaagatgggatggggtgaccagctgcagagaggagtatcctctaagctgagagctacagagatgacctgccgggagagaggaaccaccctctcagctgagagcttcagagacctccaagagcttcagagacctgcagagatatccgaatgacttgcttgaggagaggggccaccctctccagggcctcctgtctgctgagagctgaacacttgaagggaccacctgcctacagagaggag

SEQ ID NO: 777448 - DNA, 600 bp, Homo sapiens
tggtggcttatgcctgtaatcccagcactttgggagtttcaggcaggtggatcacgaggtcaagagattgagaccatcctggccaacatggtgaaacctcatctctactaaaaatacaaaaattagctgggagtggtggcgtgcgcctgtagtcccagctacttgggaagctgaggcaggagaatcgcttgaatcagggaggcagaggttgcagtaagccaagatcgtgccactgcactccagcctggtgacagagtgagactctgtctaaaaaaaaaaaaaaaaaaaaaaaaatttttcatcattctgaaagacataaatcctaaagcctttytaattcccccaccccagtcagttatgatctttgctcctcagcacttgcactacattttctattgttacatgacactctcatttaataaagcttacttttatttatcctaatagtagcagtttcactgtaaataactttttgaaaaaatagaaaagaataaagaacattaaaatcccttttaattcatcacccagacagccactactaccattttagagtattccagttttttacatgtgtactttttcagaaaactcaatttgtat

SEQ ID NO: 777449 - DNA, 541 bp, Homo sapiens
ggaagttggagggtggttagaggggactctgaaccccaagtttacctccaccctgcccttccaagacaagggtgttcagataaaagcatatacttatcatgacagttggcagccagctgagctgggccaggccaacccttgtcccagatcatctgggctcctctccaaacatgggcggggaggatgtcaggcactacatcttggtgcagacttaggagattcagagacagaagcctctcatctctggcttcacagcctggcaagagttcaagtcctgcctcctggcagcccagggcctgagytgaggcctgactgcttgaagcaggaagaaagaatccagccccaaccccgctgaggattaccttcgtcagattctggggataaagagcccagctggaggagcaaacctagaagctgggctcagcttaggaggacagagcggaggcacaggggatgaggctgagaggggccttgagctgacggggtccaggcaggggagggcagagcaaggggatcctgagtggagtccttgttctgccct

SEQ ID NO: 777450 - DNA, 566 bp, Homo sapiens
ggggagggcagagcaaggggatcctgagtggagtccttgttctgccctgtcctttctctgactgtgggcagtgtggccatcctgggctcaggcttcccatctgggaaatgggatgtcagatgaggccttagagggtgacggaggaaggctcctaagaaaagggagctccaaaaagagggactgaagggaaggggatgacaactagyacttgagctgctgtgtgcctgtctctactccatgcgaaagactgtacggaaagcactactgtgtgcacctactgtgtgccagtctcactatataaagtgcacttactgtgtatcagatactctacataaattctgtctactatgtgccaggtatgccacataaagctcacctactgtgtgcagcatgctgtacataatgtaagcttactttatgcagagtacttcatataaagcgtgcctactctgtgccatgtgctgtatataaagcatacctactgtgtgtcaggtgctccacattgagcatgtctactatgtacctggtgacccacagaaagcgcacctactctgcatcaagtaatc

SEQ ID NO: 777451 - DNA, 636 bp, Homo sapiens
gaagggcagtgatagaagataaggctttaattttttaatattcataccaaatggaaataaataacaaatttcatgaagtagagggaggaaaaataaggatatattatatgtgctgaactcttcacactttataagggatgtccattaagccactccttaatactgataaattaaaaatagaaatatgtttatatccagagctcataattttaaaaagtaagaataaaaagggtagcaaagggaagcctctggagaacagatttagggagtctttcactttgtatgtactacgttgtcatttggaattaaaatacacacatagatgcattatcactgtgatcatgaaaacataccaaaaaaaggctgtgactgcccgggcgctgacggcggcggcggggggtgcggtgaggacgcccgcggtgccggctggggcatcaccgtgggcctcgaacccgaaaggctctgctgaccgaacacctgctgaagccgytgcccgcggacaagcagatcgagactgggcccttcctcgaggcggtgtcccacctgccgcccttcttcgattgccttgggtccccagtgtttactcccatcaaggcagacataagcagcaacatcacaaaaatcaaagctgtgtac

SEQ ID NO: 777452 - DNA, 697 bp, Homo sapiens
cttaaagaactacaaaaacaggaggaaacccaagaccaaaattggtagcagaaaacaaatagtaacgatcagaacagagataaaagaaattgaagtgaagaaaagaatacaaaaatcaatgaaacaaaaagtaggttttttgaaaagttaaacaaaactggcaaacctttagccagactaactagactaactaaaaaaaaaatagaatatccaaataaataaaatcagaaatgaaaaaggagacattataactgaccctgcagaaactcaaaagatcattagtggctatcatgagcaactatatgccaataaatttgaaaatctagaagaaatggacaaattcctagactcatacataacctaccaatattgaaccagggagaaatccaaaacctgaasaaaaacaatagcaagtcataagatcaaaaccgtaataaaaagtcccccagtaaacaaaagcctgggacttggtggcttctctgctgaattctaccaaacatttaaagaagaactaacaccaatcctactcaaaatattccaaaatatagaggaggaggaggaaatactttcaaacacattctatgaggccagtattaccctgataccaaaaccagacaaagacatgtcaaaaaaaataaaactacagaccaatatctctgatgaatattgatgcaaaaatcctcagcaaaatactagc

SEQ ID NO: 777453 - DNA, 620 bp, Homo sapiens
cgctgcttgtcctcagtctttttctgttagttcattactacacaattaccattcacgcttcattagagtctctgtttctttttgttttgtttttttctttcgcttaaagcaaaactctccccccttttatcataccaatacccattgggaagcagtcaatgtgctaattagctgccacttttcatgtattcgggccgaattctttacgtttcgtgggggaggggaggaaggattaatataaaaaagatgaatacttattggatttttcaaaaaatctaaatcggatttttccctctttmtcaaaatagtaaagcacctcattttcatctaaagaatgcaaaagccactgaaatgataaaagcttaggggagaaacacagtggcctcggctggatattttatttttattttagtaatttattttttctattgctgttttagttgatgtacgcaggtttgtttccctaagtccactgaatggaaaaacgaaacaggctattgtgggggctgttttctctgtttccgtggttttacctaatccgggtttgcacggttgaaagggaaagttgtttgggcggaaagcgcctttcactctcgcaggtttgtaggttcgtggcctat

SEQ ID NO: 777454 - DNA, 632 bp, Homo sapiens
cctaaccatttgaaagtaagttacagatatcatgacaactcaacccttaactatatcagcatcatcacctggtatgaaaatgagagatggtcactcttatttgacatatgagaaaatgggatctcagcaatgttaagtagattcctcagagtctcagaactaaaagcacaaggccaatatttgagcataaggctgtccaactcccaaactcatgctctttctacactaccatttttgttaatcatgctttcaacagttttggtggggcagggtgagatgggggtcccatgaatggaaaatacattttccactgaatatatttgaataaagcatgcaaggcagaaaaacaatagacaggtaaacagataagttactgagatcatttcagggctttatgatgaagaatgactggtggaagaatgggaatgttgagcctgaaagataaaaaaaaacatagcatatggcctctgccttaaagaaggctgcaacrgagcaggattcttagaaatgaggactgggactcttagcagtgaggaacctgtcttccatcctttctcaagaagcttcaggaagatgtgggaagatgtgttttaccaaaagagggtataaaccaagaaagaagacatagggtt

SEQ ID NO: 777455 - DNA, 607 bp, Homo sapiens
agtcctccatcactaggggtgcactgctgtccgacaagccataatcccataagcttttcatttgcatgtacctcattagctgattaaaacttgaagaaggcaggtttttgcagctggcgggcccattccttcacactgcctgcctgggtggctttggtaatgaagtcatgtgggtggatgtgaggtttatatgtatggaagrgattaagagtattagaatttgtgtgagctgatgttgccatattctctctactggagcccagtaattggatgggaggagaaatggcagacccattagttttgtctgtttactcaggagcagggtgctagagattcaattttgctttctttggctccctcgcctttgtgaagcaggcctgctttgtctcctctggccctgagcacctccaaacaccagccccgctaaggcgattcagcctcaaagaagagacatcggtgactaggggcccagggaggagaaaatgcagccctgactcaagtactacttgaaggcaacctcatcccgtctagtccaatcctgggatagagagcaaaagataattgaaatttataaacacttctgaggccttttttgattattttatta

SEQ ID NO: 777456 - DNA, 607 bp, Homo sapiens
agtcctccatcactaggggtgcactgctgtccgacaagccataatcccataagcttttcatttgcatgtacctcattagctgattaaaacttgaagaaggcaggtttttgcagctggcgggcccattccttcacactgcctgcctgggtggctttggtaatgaagtcatgtgggtggatgtgaggtttatatgtatggaagagattaagagtattagaatttgtgtgagctgatgttgccatattctctctactggagcccagtaattggatgggaggagaaatggcagacccattagttttgtctgtttactcaggagcagggtgctagagattcaattttgctttctttggctccctygcctttgtgaagcaggcctgctttgtctcctctggccctgagcacctccaaacaccagccccgctaaggcgattcagcctcaaagaagagacatcggtgactaggggcccagggaggagaaaatgcagccctgactcaagtactacttgaaggcaacctcatcccgtctagtccaatcctgggatagagagcaaaagataattgaaatttataaacacttctgaggccttttttgattattttatta

SEQ ID NO: 777457 - DNA, 489 bp, Homo sapiens
tgttttgtgatgtgcgcattcatcttgcagagtcaaatctctttttgatggagcagtttggaaacactgcttttatggaatctgcaaagagatatttgggagcacatcaaagactatggcagaaaaggaaataagagaaaaaatataaagatgytttctgagaaactatttgttgtgtgtgcagtcatcttacagagtgaaacgtttttgtgatgaagcagtttggaaatattgttgtcacaaattctgcaaagggatatttgagagtgcattgagtcctatggtgacaaaggaaatatcttcagaaaaaaaacaaaaaaaatgtcttctgagaaaccattttgtgatctgtgcattcatctcaaaggaataaacctttcttttgatggagcagtttggaaatactgtttttgtagaaactctgagggatattttggagctcattgaggcctatggtcaaaaaggaaatatttttagataaaaactaga

SEQ ID NO: 777458 - DNA, 495 bp, Homo sapiens
aatcttaaaaaggttttaactctgtgagatgaatccacacatcacaaagcagtttcacagataacttttttctagtttttattgtgggatgttcagtttttaactataggccttactgttctctaaaacgtctctatgtggatcctacaaaaagaatatttccaaactgctgaatcaaaagaatggtttatctctttgagatgaatgcacacatcacaaagcagtttcacagtaaagttttttgtagttttttttttgcaggatattcagtttttcactattggccttaccttgctccaaagtgtccatcagcaaatcctacaaaaagattgtttccaaaytactgaatcaaaagaaaggtttaactctgtgagatgaatccacacatagcaaagcagtttcactgatagcattttttcatattttattgtggaatattcgtttttttcaccatagtccacgttggggtcaaatgtctctttgaagattctacaa

SEQ ID NO: 777459 - DNA, 605 bp, Homo sapiens
ggccctcagtcccctgtgcctgcaagatggtggctgggccagcagcagggacccccgtgtccggcctcatgccctccggtcccgtccctgcgtggcgtcctgctgtgcgcccacagtgcgagtattccccagattgttcggggatgccaggtgggtcatcagggcagaacccccactcggtgtgtgcgtcggaggagctgcagcccggggcgtccccagtctctcttgttaaaaatwaaaggggattccatgttaaaacgttaaccactttatttgagcaaacagtgattggtgaaatggaaagcacccagccatgatttgtggtccacccgaggggcatgaaggaaaggcttttacaaggtgcataagaaagcaacccaatttcaagaaatggttagagttggcagggcacggtggctcacacctgtaatcccagcactttgggaggccgaggtggccagaccacctgagatcgggagttcagaccagcctgaccaacatggtgaaaccctgtctctactaaaaatacaaaattagccgggcgtggtggcgcatgcctgtaatcccagctactcgggaggctgaggcaggagaatcagttgaac

SEQ ID NO: 777460 - DNA, 636 bp, Homo sapiens
cagcctattaggaaaactgaatatttccaggtaaactggacagaagctatctgtgatactgctttgtgatctgtggattcctcttacagggttaaaccattttttttgattcagcaggttggaagtactctttttgaagaatctgygaggaaaggttgggagcccattgagacctatggggaataacagaatatctccagataaaaacaagaaagaaattatctgtgcaactgctttgtgatgtgtggattcacctcacagagttaaacctttcttttgattcagcatgtgggaaaccctgtttttgcatgttctgcgaagagacagttaagagcccattgaggcctatggggaaaaccaaatatccccagataaaaactagaaagaagatatctgttaaactgttttgtttgtgaggatttacataacgagttaaaattttcttttgactcaggacgttggaaacactctttttggagaatctgcgaagaaacatttggaagcccgttgctgcctatctggaaataccaaatatctccagatgaaaattagacagaagctatctgtgaaacttctttgtgatgtgtggattcatctcacggattaaagctttcttttgattcagcaggttggaaa

SEQ ID NO: 777461 - DNA, 636 bp, Homo sapiens
cagcctattaggaaaactgaatatttccaggtaaactggacagaagctatctgtgatactgctttgtgatctgtggattcctcttacagggttaaaccattttttttgattcagcaggttggaagtactctttttgaagaatctgtgaggaaaggttgggagcccattgagacctatggggaataacagaatatctccagataaaaacaagaaagaaattatctgtgcaactgctttgtgatgtgtggattcacctcacagagttaaacctttcttttgattcagcatgtkggaaaccctgtttttgcatgttctgcgaagagacagttaagagcccattgaggcctatggggaaaaccaaatatccccagataaaaactagaaagaagatatctgttaaactgttttgtttgtgaggatttacataacgagttaaaattttcttttgactcaggacgttggaaacactctttttggagaatctgcgaagaaacatttggaagcccgttgctgcctatctggaaataccaaatatctccagatgaaaattagacagaagctatctgtgaaacttctttgtgatgtgtggattcatctcacggattaaagctttcttttgattcagcaggttggaaa

SEQ ID NO: 777462 - DNA, 595 bp, Homo sapiens
tgtgatgtgttgattcatctcacagagttagacctttcttttgattcagcatgttgaaaacactctatttaaagaatctgcaaagggacatttgggagccttttgaggcctatggagtaaaactgaatatccccacataaaaactagaaagaagatatctgtgaaactgctttgtgatgtatggattcatcttgcagagtttaacctttctttttattcagcctgttggaagtactcttttcagagaatctgcaaatggacattttggaactcattgaggtctacagtgaaaaaatgaatatccccagatataaacaagaatgaagctatttgtgagacagttttgtgatgtgtggattcatccaacagagttaaacctttcttttgattcttcaggttggaaatattctttttggagaatctatgaagggacatttggragcccattttggcctatggggaaaatacgaatatccccagattaaaaactagaaggaagctatctgtgcaactgcttagttatgtgtcgatatgcctcacagatataaacctttcttttcattcagaaggttggaaatgctctttttgtacaatc

SEQ ID NO: 777463 - DNA, 647 bp, Homo sapiens
cacattaccatataatgtgtcatgatcatgatggcacaccctgtaggtattcactgacatcaccttaatggctgaatgggactccattgtataaaaatacaaaatactcatgacctattattctataaacatttggaatcacaaacgtatgtgaaaaatatattttttaacaagcttatgaaaagataaacataagcctgtaatcccagcactttgggaggccaaggcgggtggatcacttgaggccaggagttcaagaccagtttggccaacatggcgaaaccgcatctctactaaaaatacaaaaaattagtcaagcaycatagcaggtgcctgtaatctcagctactcggatggctgaggtaagagaatcacttgaacctgggaggcaaaggttgcagtgagccaagatcatgccactgcactccagcctgggcgacagagcgaaactctgtttcaaaaattaaaaaaaagaatattaaaaaatatattaaatatatgaatatatttttaaaagtatttcattttttctgatctagtcattcttacacaatctgaagtcaaaattgttctgtagagaagctgccacttacaacaaatagttttgcttgtttcttcagtttactttcacatttctaaacttgatg

SEQ ID NO: 777464 - DNA, 628 bp, Homo sapiens
tgttctttaagttattacataatttttaattttctgtctgatagatcaacaatcaatatgtattgaaatttccttttcatgacagattgatcgatttctacctccatttttatgtgttttttctttatacgctttgcagtggtttaatcaaaagtatataagcataaaattgtacctatttgttatatgtaatgagcctctctctaacaaggctttttgactgaaagtcgattttgtctgatattaaaatggctctgccaatattcttttggttgacatctgcccacccaaacaactacacaaaaatctacaatttccaaactacattgtgaccagggttcattcatcacaacccctacatacgtacggtattttgcttgtgaactctcttcccctcttcctaccaaattttcttacagctttgaaatttgcctggacttcctaaaatgacaatgtcccagggaaatgttcaataatctgggtaagsagagacacacataggctcaaaataaagggatggaggaagatctaccaagcaaatggaaaacaaaaaaaggcaggggttgcaatcctggtctctaataaaacagactttaaaccaacaaagatcaaaagagacaaagaaggt

SEQ ID NO: 777465 - DNA, 549 bp, Homo sapiens
tatgaatgggagtttaccattttcttcctgtgccccagtggattaatgtgcacacccacgctggagaccactccaaacttctgacaaacataaggtcttttagatcttaggctgtaaaagtaaagtagtctgcagcctaaggtctaaattgcttagcttggcatttgaaggcctccaagtaccagctccatctccggataccctcctgcttggctggagtgaagctcacygatctctgactcacggataagtgttgccctttctcccctccaagcctttcttcccaggttaactgtctctactcctatcccccaaccaagccccactcttcctctgggtttctggcaacttcacccgccaccgcaaagctcttctaatgttttcgtgtatttcattcatcctatgttattgagcacctactatgtaccaggcactccacctttcaccgttcatccttcccctcctctgacctcatacccactaccagctagcattagacgtcacacattacctcgcaatgagcactcctggacactgtgatccagccac

SEQ ID NO: 777466 - DNA, 549 bp, Homo sapiens
tatgaatgggagtttaccattttcttcctgtgccccagtggattaatgtgcacacccacgctggagaccactccaaacttctgacaaacataaggtcttttagatcttaggctgtaaaagtaaagtagtctgcagcctaaggtctaaattgcttagcttggcatttgaaggcctccaagtaccagctccatctccggataccctcctgcttggctggagtgaagctcactgatctctgactcacggataagtgttgccytttctcccctccaagcctttcttcccaggttaactgtctctactcctatcccccaaccaagccccactcttcctctgggtttctggcaacttcacccgccaccgcaaagctcttctaatgttttcgtgtatttcattcatcctatgttattgagcacctactatgtaccaggcactccacctttcaccgttcatccttcccctcctctgacctcatacccactaccagctagcattagacgtcacacattacctcgcaatgagcactcctggacactgtgatccagccac

SEQ ID NO: 777467 - DNA, 486 bp, Homo sapiens
aaatgttttctcccactctgtgacttatcttttcattctctgttaaaagaatgaaaaggaagaggaaatgtttttaattttaagttaaacttaccaattttatctttcatggctcatcatttcggtgttgtatctaaaaacttatccccaaaccccatgttgattttttcttatattttcttttattayagttttttatgttgtattaatgtaatgaactcttttgagtttattttttaagtaaggaatagatttgcctacaaataccctttttttgaaaaagacttattctttctctattaaattgcctttatacctttgtcaaaaatcagttgagtatatttatgtgaatctattacgatactttctgttccattctattgatgatctgtgtgtgtattcttaggcaaatactatgctgtcttgattactataaatttatagaaagtcttgaatttgggtagtgtgagtcctccaactttgttt

SEQ ID NO: 777468 - DNA, 569 bp, Homo sapiens
agttagtattttattaaaacaatattccaaccagtagtgaaaaaaattatccatcaatggataccggactatccatgaaaaaaaaatctactcctagatatttacccaagagaatgaaaacatacatccatacaaagctttgtatgtaaatgtttataacaatgtattattttcataattgccaggaactggaaacaactcaagtgtccttcaactgaaaatggttaagcagattgtagtgtatctgtacaatggaatactattcagcaattcaaacgaacaaattactgatatacacacagcaatatggatcagtctcaaaagaattatgctaagtgaaagaagccagacttaagaggcaacatactatatttttccattcgtatgacttcctgggaaatgcaaaactatagaggagacrgatcagttgttgccaggggctaggagtgtaaggaaggtattaaacacaagggatcatgaaggagcttttagaagtggtgaaaatattctgtatttttattttgatgaaagttatgactgcataaatttgttaaacttaacattttact

SEQ ID NO: 777469 - DNA, 543 bp, Homo sapiens
ttgctcacacttgtaatctcagtgcttttggaggccgaggcaggaggatcccttttgaggccaggagttccagacaagcctgggcataatcctgcagagacagtgagacccccatctctacaaaaaattaaaaaaaaacagccaagcatggtggtgcatgcctgtagtcctagcaactcaggaggctgaggcaggaggatcgattgagcccaggaatttgaggctgcagtgagtcctgattacaccactgtactgtagcctgggggaccaagtgagaccctaagtcttaaaaaaaagtattaagtatgtatgcttatatttgtgcttgaattamagtacttttttagacctttttttttcaaaagtaggacaaaagattaaaatggaaattaaaatagataccacagttattattctttaaccatctcataaatattatattgagagtggcactgttgccttccttaggtgcctgctaaactgacatatggaaagagatgggggcaggggagaaagaaatattcagatagaaggaatatggaa

SEQ ID NO: 777470 - DNA, 720 bp, Homo sapiens
taaagtaaaggatctcaagatgagatcaccctggatttagggtggatcctaaatcccaagacaagtgtccttataagaggagagccaaggaaaatgtgagagagagtgtactagtctgttttcatgctgctgataaagacatacccaagattgggcagtttacaaaacaaagaggtttaatggacttacagttccatgtagctggggaggcctcacaatcactgtggaaggtgaaaggcaygtctaacatggcagcagacaagagagcttgcgcagggaaattcccatttataaaaccatcagatctcatgagacccactcactatcacaagaacaccatgggaaagacccacccccatgatttaactgcctcccaccaggttcctcccacaacacatgggaattgtgggagttacaattcaagatgagatttgggtggggacacagccaaaccatatcagacagaaacactgagaagaaggccgagtgaagaaagaggcagaaagcagagttatgctgccacaagatgggagccaccggaagctggaagagggggcatagccctgcacagccttgatttctgactctagtctccagaactgtgagagagtaaatatctgttgttttaagtcaccaagtttatggccattcattgcagcagccctgggtagtgaatgcagttacttctcattgactttctcagaaatgtttcattatgct

SEQ ID NO: 777471 - DNA, 625 bp, Homo sapiens
gattagttatcatttgtgtctatttttaacgtaatgcagaaggcaagactatcacctagtaatgatgaaaagagtagatgatagagatttaatcaaggatgatgcatagtcgtgttgccgaagcaagtaggtgaatgatgtgccttttcttttctttctttctttctttttttttttttttttttgagacggagtgtcgctcttttgcccaggccggagtgcggtggcgctatctcggctcactgcaagctctgcctcccgggttcacgccattctcctgcctcagcctccsgagtggctgggactacaggcgcccaccaccacgcccggctaatcttttgtatttttagtggagacggggtttcaccgtgttagccaggatggtctcgatctcctgacctggtggtgatcagcccgcctcggcctcccaaagtgctgggattacaggcgtgagccaccacgccaggccacctttttttaaaataggcacatttaaacttaaacaagacatggaaatgggggagtagggaaataagtagttctgttttgaccaagttaagtttgaaatgactactggacatccaagtggcagtggcgatagaagtcaggagctcagctgagaagg

SEQ ID NO: 777472 - DNA, 625 bp, Homo sapiens
gattagttatcatttgtgtctatttttaacgtaatgcagaaggcaagactatcacctagtaatgatgaaaagagtagatgatagagatttaatcaaggatgatgcatagtcgtgttgccgaagcaagtaggtgaatgatgtgccttttcttttctttctttctttctttttttttttttttttttgagacggagtgtcgctcttttgcccaggccggagtgcggtggcgctatctcggctcactgcaagctctgcctcccgggttcacgccattctcctgcctcagcctcccgagtggctgggactacaggcgcccaccaccacgcccggctaatcttttgtatttttagtggagacggggtttcaccrtgttagccaggatggtctcgatctcctgacctggtggtgatcagcccgcctcggcctcccaaagtgctgggattacaggcgtgagccaccacgccaggccacctttttttaaaataggcacatttaaacttaaacaagacatggaaatgggggagtagggaaataagtagttctgttttgaccaagttaagtttgaaatgactactggacatccaagtggcagtggcgatagaagtcaggagctcagctgagaagg

SEQ ID NO: 777473 - DNA, 589 bp, Homo sapiens
ttcatcttcacacatagaggattttttaaattttttatttctgtaggtttttggggaacaggtggtgtttggttacaagagtaagttgtttagtggtgatttgtgagattttggtgcacccataccccggacagtacacactgaacccaatttgtagtcttttatccctcacccccttcccaccctctcccttgagtccccaaagtccattgtgtccttcttaggcctttgcatcctcgtagcttagctcccacttatcagtgagarcataggatatccaacataggggatttttttaaaaaagttatacctttgtgactaatttctaattttactgagtaaactacaatttctactttaataaattacaagttgcaagttctctagggagattttttttttttttcctctccagagcctcagcagaaaccatgcatgtccttgatctcctcctgggtgaattcggccctccccaagcctggcttgtgtgagagagctcacttattcctccagcctctgcccccaaggcagctgtggcaacaggcaaaaccgctctggttttcagtacccctttaattcttagcacctg

SEQ ID NO: 777474 - DNA, 641 bp, Homo sapiens
ataaatcattctattataaagacacacacatgtgtatgtttattgtggcactactcacaataccaaagacatggaatcaacttaaatgtccaccaatgatagactaaagaaaatatgatacatatacaccatggaatactatgcagccataagaaagaatgagatcatgtcctttgcagaaacatggatggagccagaggccgttatccttagcacactaatgcargaacaggaaaccaaataccacaatgttctcacttataagggggagctgaatgatgagagcacatcaacacacagaagggagcaatacacactgggacctatcaaagggagaagagtgggaggagggataggatcagaaaaaagaactaacggatactaggcttaatacctgggtgattaaataatctatacaacaaaccaacacgcatgacacatgtttacctaggtaacaaacctgcacatcctgcccatgaagccctgaacttaaaataagttttttttttttaaaaaaagaatcactgtatcatcaaatgctctatttatacttaaatcgtttggtttgcttggttcattgatttgttttcccccctttagtcagcccagtttctgttaacacagcatatctgaaaccacta

SEQ ID NO: 777475 - DNA, 641 bp, Homo sapiens
ataaatcattctattataaagacacacacatgtgtatgtttattgtggcactactcacaataccaaagacatggaatcaacttaaatgtccaccaatgatagactaaagaaaatatgatacatatacaccatggaatactatgcagccataagaaagaatgagatcatgtcctttgcagaaacatggatggagccagaggccgttatccttagcacactaatgcaggaacaggaaaycaaataccacaatgttctcacttataagggggagctgaatgatgagagcacatcaacacacagaagggagcaatacacactgggacctatcaaagggagaagagtgggaggagggataggatcagaaaaaagaactaacggatactaggcttaatacctgggtgattaaataatctatacaacaaaccaacacgcatgacacatgtttacctaggtaacaaacctgcacatcctgcccatgaagccctgaacttaaaataagttttttttttttaaaaaaagaatcactgtatcatcaaatgctctatttatacttaaatcgtttggtttgcttggttcattgatttgttttcccccctttagtcagcccagtttctgttaacacagcatatctgaaaccacta

SEQ ID NO: 777476 - DNA, 641 bp, Homo sapiens
ataaatcattctattataaagacacacacatgtgtatgtttattgtggcactactcacaataccaaagacatggaatcaacttaaatgtccaccaatgatagactaaagaaaatatgatacatatacaccatggaatactatgcagccataagaaagaatgagatcatgtcctttgcagaaacatggatggagccagaggccgttatccttagcacactaatgcaggaacaggaaaccaaataccacaatgttctcacttataagggggagctgaatgatgagagcacatcaacacacagaagggagcaatacacactgggacctatcaaagggagaagagtgggaggagggataggatcagaaaaaagaactaacggatactaggcttaatacctgggtgattaaataatctatacaacaaaccaacacgcatgacacatgtttacctaggtaacaaacctgcacatcctgcccatgaagccctgaacttaaaataagttttttttttwtaaaaaaagaatcactgtatcatcaaatgctctatttatacttaaatcgtttggtttgcttggttcattgatttgttttcccccctttagtcagcccagtttctgttaacacagcatatctgaaaccacta

SEQ ID NO: 777477 - DNA, 571 bp, Homo sapiens
atttaaggtcaagttgaagttagacccatgaatctgcagtaggctttatcttcatggattgcttgattttcttttcctagaagaattaggtaggggaggaagggaagtgaaaatggcagtaagaaatcaaccaaggaggtctattctggggagaaaaaaaggaaaggccagaagtgagctgataagccaataaaatgggaagaatcaagggattaaaaattcatttgagttaaaagagcaagtatastatgagtgagttaatgagaaagctgagagcataagagactgtctccagaagttgcaatcttcaaatattatattttagaggtagagaagatccaggtcttgaagagattcaagggggtaaagaacgtctctggcattaaataaactcaggaacctctaagctaagatataggatgagttgtccattaacattgatgctgaaatttcttaggatgatggtaggagttggagagaagaagatttagtatcagatgccaaagtttatgagtgagggagagtgcttgggagctgagtaggtggcagtgggtgaaggagataaatgaca

SEQ ID NO: 777478 - DNA, 571 bp, Homo sapiens
atttaaggtcaagttgaagttagacccatgaatctgcagtaggctttatcttcatggattgcttgattttcttttcctagaagaattaggtaggggaggaagggaagtgaaaatggcagtaagaaatcaaccaaggaggtctattctggggagaaaaaaaggaaaggccagaagtgagctgataagccaataaaatgggaagaatcaagggattaaaaattcatttgagttaaaagagcaagtatagtatgagtgagttaatgagaaagctgagagcataagagactgtctccagaagttgcaatcttcaaatattatattttagaggtagagaagatccaggtcttgaagagattcaagggggtaaagaacgtctctggcattaaataaactcaggaacctctaagctaagatrtaggatgagttgtccattaacattgatgctgaaatttcttaggatgatggtaggagttggagagaagaagatttagtatcagatgccaaagtttatgagtgagggagagtgcttgggagctgagtaggtggcagtgggtgaaggagataaatgaca

SEQ ID NO: 777479 - DNA, 564 bp, Homo sapiens
gtaaaacacaataacttttgcaccgacctaatgtttttaatttttgagacagggtctccttctgtcacccaggctgtggtgcagtggtgcgatctcggctcactgtagcctcaaactctccaactcaagagatccccccacctcaacctcccaagtaggtgggactataggtgcgggccaccacgcctggctaatttttatactttatgtagagacggagttttgccatgttgcccaagcwggtcttgaactcctgagctccagcaatccacccatgtccacctcccaaagtgttgggattacatgtagaaccactgtgcccgcctactatttttatgatttagcctgtatctaaggccttttaaaattgtattttgtttaggtctcagagttattcaaaagacagttgtattgtagaacagtgtgaaggtgtgagaatcaggccaaatctatggtatcatggaaaacaacggattctctgaccttttagcaattggtgttcagaataaatagcaggtgtgggcttgttgcttatcatttctctcttttaagaaaggggctgtg

SEQ ID NO: 777480 - DNA, 601 bp, Homo sapiens
agataactctatggcagtgtacagggacctttctctttcctcttacagctacataataatcctttttgtgaaagttatagtcatcagactgttattgatagacatttgggttgtttacagtcctttgctatttcaaatagtacagcaatgactaacattggccatgtggtcatttcataattttgcccatgtgtctgggagagatttctagaagtggggctgctgggccaaagtgtgaatgtacatataattttgctagatactgcaaaataccactgtatggggmtgtgcaaattggatatttgagttcctgttttcccactgcctcctttagaggatatgttatctaactttggaacgtctgactctctgataagcagagatatggtatctcagtgtagtttgcttttttaacttcttactgacataatatccatatagaaaagtgtacatatatatacagatggaaacttcacaaaccaaacacacctggtaaccagcacactgatgaagaaacagaaaattatcagatgtctagaacctcccacagactctcttagtaaactgtaatgtgtctttcgcttacttcgagcaaaggtaa

SEQ ID NO: 777481 - DNA, 649 bp, Homo sapiens
agagtaaagagacaagttacagaaagggagaaaatattcataaactatgtatctgacaaagcatcaatataggaactcaaactcaatagcaaaaaaacaaataatccaaataagaaaaaacctcaataggcatttctcaaaagaagacatacgaatgaccaacaggtgtacgaaaaaaatgcccaataccactaatcagggaaatgcacatcaaaaccacaatatcaccttgcccagttttttatttttggttatcaaaaagacaaaccaaaaacaaatgctggtgagaatctagagaaaggagaactctcatagcctgctagtaagaatataaattagtataccattatagacaaccatatgaagtttctcaaaaaattaaaagtagaacaaaagctccaacaatcccactactgggtctrcgtcaaaaggaaatgaaatcagtatgtcaaagagatacttgcactcccatgtttattgcagcactattcacaatagccaagatatggaatcaacctagttgtccaacaatgaatcaatcaagaaaatgtggtgtatatacacaatagaatattattcagacataaaaagtataatatcctgtcatttgcaataaaaaaaattgctggtgagaatctggagaaaggag

SEQ ID NO: 777482 - DNA, 652 bp, Homo sapiens
aatagcaaacccttgttctctttcttttcttttcttttctttctttctttctttctttctttctttctttctttctttctttctttctttttcttctttctttcttcctttctctctttctttctctctctctttctctctctcttttctttctctttccttctttccttccttccttctttctttctttctttctttctttcyttccttccttccttccttccttccttccttccttccttccttccttccttcttctttctttttctttttttgtggagatgaggtctcactatatcattctggtcttgagctgggattataggcatgagccactgcacctggcctagaatagcaagccattcctaaaattttcatggaaatgcaaataacctagaatagacaaaacaattttgaaaaataagaaccaagttggaatacttacactatctaatttaagatttgctatgcaatattcaggaaaggtatttgtgtagagatagacatatagatcaaagggacaggatgtcagccagaatggcagagtaagcgcctctgaaaattctttcctccaggacaatgagatgactgcttgacttatgatggggttacgtcctgataaatccattgtaagttgaaaatgtaagtcaaa

SEQ ID NO: 777483 - DNA, 491 bp, Homo sapiens
ggatccatttcctcagtgcagcaaaaccagatatgcacactgaggttttgcagtggtagaaaggaaggcatttatttgcacagtgccaagcaaggagaaccaggcagctagtgctcaaatcctgacctcctctacggcttgcaggtgacagtttttaaaggcaggggtagatttcaggatagcaaagtcacaggcaaatttgtaaatcaatacatagaggttatacattggttttggccaaaaagggcaggatatcttgaagtggggacttacaggtcatagacagatacaaaggttttctgatttgcaattggttaagaaagcaragctttgtccaaaaatttggaatcagcagtaaagaatgttaactggcttgtgggtgtgactccctccaggcccctcctgaagaaatttagaacaaacagcagaggtcagagttcagtccttggtttcctctcatctgaggtccatgtgccagtggaactatttgg

SEQ ID NO: 777484 - DNA, 621 bp, Homo sapiens
acccaagcaaaaagaaatgctcactgcggagacagccaggtgggaaggggtccccagagaaactctaaccagcctgcacactggaaggagtgcaccctggagtggagccacagaagtttgtgctgtttgacggggaggagcccggcccctccccttcctgtgtggcacctgcgattcagtttgcgaggtgggaagcacactgacagggagtctggcttcgctaagagtctctttttcccctttatttcatttttcacccaataaaaccctgccttactcacccttaaaattgtctgcgagcctaatctttcgtggccgtgggacraggaccccgtctttagctgaactaaggaaaaatctcgcaacactgctatgaatacaatgtaggacacttgtcccactgacaagggtgggagatgcagggatggggcccagccctgaagcggccttagaaggcctgggtcttgtttcttctgatgatgaatatgtcactgtcagatttccttaaattactgtggtgtgaagttgactctgagaaaacaaggctagttgcatgttgagtgacaggtgaaaaagaagataaaccccctgctgggcataggcttttaaaactggagacct

SEQ ID NO: 777485 - DNA, 639 bp, Homo sapiens
cagaattttgggaggttgaggtgggtggatcacctgaggtcaggagttcaagaccagcctgaccaacatggtaaaaccccatctgtactaaaaatacaaaattagccaggcgtggtggtgggcacctgtattccctgttactcaggaggctgaggcaggagaattgcttgaacccaggaggaggaggttgccactgcactccagcctgggtgacagagtgagactctgtctcaaaaaayaaaaataaaaataattagttgggtgtggtggcctgagcttgtagtcccagctactctggaggctgaggcaagagaatcgcttgagcccaggaggcagaggttgcagtgagctgagattgcaccactgcactccagcctgggtgacagggcgagactctgtctcaaaaaaaagagaaaaaaaattagccgggtgtggtggagcacgtgtgtagtccagctactcagaaggctgaggtgggaggatcactggagcctgggaggtcaaagctgcagtaagccatgatcacgccactgccctcaagcctgggtgacatagtaagaccctgtcttaaaaaacaaaacacgaaacaggcttggtgcggtggctcacgcctgtaatcccagcgctttgggaggccga

SEQ ID NO: 777486 - DNA, 639 bp, Homo sapiens
cagaattttgggaggttgaggtgggtggatcacctgaggtcaggagttcaagaccagcctgaccaacatggtaaaaccccatctgtactaaaaatacaaaattagccaggcgtggtggtgggcacctgtattccctgttactcaggaggctgaggcaggagaattgcttgaacccaggaggaggaggttgccactgcactccagcctgggtgacagagtgagactctgtctcaaaaaacaaaaataaaaataattagttgggtgtggtggcctgagcttgtagtcccagctactctggaggctgaggyaagagaatcgcttgagcccaggaggcagaggttgcagtgagctgagattgcaccactgcactccagcctgggtgacagggcgagactctgtctcaaaaaaaagagaaaaaaaattagccgggtgtggtggagcacgtgtgtagtccagctactcagaaggctgaggtgggaggatcactggagcctgggaggtcaaagctgcagtaagccatgatcacgccactgccctcaagcctgggtgacatagtaagaccctgtcttaaaaaacaaaacacgaaacaggcttggtgcggtggctcacgcctgtaatcccagcgctttgggaggccga

SEQ ID NO: 777487 - DNA, 532 bp, Homo sapiens
cacttatataacctcttttcagaggggtgggggagatggggaatataggtagttcagtagaggggcattaagtgatgatttaggtgaataaatggatgggggaacacagattgacttgcaaatagttttctttggaagttaaatgaacctgagagacagacattattttgcaaaaggattgggcctgctctggttaccttcctcaccttctttcctgcaatagataatgagataacagggaagggaagaaaaagcaattgttctcttgggggctctgggtctttatgtagattggggaaaaatctcttccaaggcctgataatctctaagagtttttattttatttatttatttattatttwatttatttatttatttatttatttatttatttatttatttattttcagacagggtctcactctgtttgttgcccaggatggagtgtactggctcccttgaggctcattgcagcctccacctcctggatcaaaggatcttcccacctcagcttcccgagcagctgggataa

SEQ ID NO: 777488 - DNA, 532 bp, Homo sapiens
cacttatataacctcttttcagaggggtgggggagatggggaatataggtagttcagtagaggggcattaagtgatgatttaggtgaataaatggatgggggaacacagattgacttgcaaatagttttctttggaagttaaatgaacctgagagacagacattattttgcaaaaggattgggcctgctctggttaccttcctcaccttctttcctgcaatagataatgagataacagggaagggaagaaaaagcaattgttctcttgggggctctgggtctttatgtagattggggaaaaatctcttccaaggcctgataatctctaagagtttttattttatttatttatttattattttwtttatttatttatttatttatttatttatttatttatttattttcagacagggtctcactctgtttgttgcccaggatggagtgtactggctcccttgaggctcattgcagcctccacctcctggatcaaaggatcttcccacctcagcttcccgagcagctgggataa

SEQ ID NO: 777489 - DNA, 631 bp, Homo sapiens
tactgccttccaccctactagcatgaaagctccatgagagcaggggctttgtccactttgaattctcagcacctggcacggcgcttggcacactcagtgaaagtgtgctgcatgaataagagagtcttggccttggtagccatgaagggagctgctcctctggcccatccccacccaggctgctcaccgacgctgggagggctgcagttctgtggccaccttgtcctcgcagaatttccgcatggtaagagtggccagtgcctggtccgccctggggatagcaaggccagtgttggggattagggattaatcttcatcctggcctcccatccctaagccccaggggatggaggagaaatatgattctctaagtctagaagaagcccagagtagtggtaatgagaatgagaagcaccatgtacagtcactttactagttgttgrgcctcaggcaattgttccctgaactttagttttttcatctgtaaaacagggcaacaaaaccatcttatgggttgaattatatccccccaaaagacatgtacctcagaatgtgaccttatttggaaatagggccgttgcagacataattagttaagatgagaccatactgaaggagggtggaccctgaa

SEQ ID NO: 777490 - DNA, 497 bp, Homo sapiens
ggcttggttatttgtagtgataatctggggagtgtattttttttttcccctttttgggaagtgtggttttgacaagtcagaattctttcaagacttaaggcagctgctgtaggctatctttgaggatagtcatggagcagtagtgtttggaatgatgctgactttgctttgcatcaggatcatgtacattggcagtcttataagggactgtagatcctgtacatactcagatcttctttgttttaacttcttttggatcttgtttcctatmtagagtggtgcacgtatcaacatctcagaagggaattgtcctgagagaattatcactttggctggacccactaatgccatcttcaaagcctttgctatgatcattgacaaactggaagaggtttgttgtctcccactccctcattcttcatttttaagtgcttccagagagcttgttgattttctaagagctttttaaattcaaggacacactggaccttgagact

SEQ ID NO: 777491 - DNA, 672 bp, Homo sapiens
ccgtccccgcgggcgccaccgtgactgcagcctccacgcgccccaatacacagccgacgagctagggccggggccaagcccggagtcgcggccggtagggcccgccgcggggcacgctgggatatggagtcccccgcccaccctacttcgtgagcctccatctggaggggagctatccgccccacaaccctctgcgtgcgtggctcgcccgggcaggctgcaccgccttctgggaggagcgggccctccgccgtcgcttctcgagaaggccgtatttttttgtttgtaataccgtsccgcctccttccttccgcgccccctctctcccggtccgtgaagctgtggacatgcgtactagcggaggggaagccgctgggtagggaggcggtaaggactcacttgggcacggagccttttggatcgcgagaaaactacagaacccaagagcccgcgcgccatctgtgtcgcagctggagaggcagggtcaagcacgcacgagaagcttcatggcgtcattggttactcccattgcgattacttcccctaggtgcactgagattggttacttcgactaaaggggcggagacaaggaaaagtcagccccccccgaccccgcctccttgatgaaggaaggttgtgattggtccggagaggctgccgtcggatcctggc

SEQ ID NO: 777492 - DNA, 645 bp, Homo sapiens
aatcaagatacagaactagtacattagcacaaagatttcttcatagtacccctttataataacattcaccctccaccccaccaccatctctgactcctagcaaccactaatctgttatccagctccacaattttgtcacttttaaaatattatataaacagaatcatgcagtatgaggccatttagtattgactcctttcattgagcatttctttgaaaccaattcaagtcatttcatatatcaacagtccattcctttttattgctgagtggtatttcgttatggaggtagtacagtttgtttactcacatattgaaggacattttggttgcttccagtttgagggtgttaaaaataaagcagccatgaacatttgtgtacaggtctctgtatggacattagtttttctttctctaatgtaagtgctcagaagagaaattgcttcattgtatgataagtataaaattacttctattattattaytatattttaagttttaggatacatgcgcacaacgtgcaggtttgttacatatgtatataattacttttttaaagaaaatgccaaaaaatttccccaaatagctgtgtgctcttacatctccatcaacaatgtatgagagatgcagttttccagtttttca

SEQ ID NO: 777493 - DNA, 605 bp, Homo sapiens
agcaattccaatcaagaatttcatatccagctaaactaagcttcataagcaaagaaataaaatacttttaagacaagcaaatgctataaaaatttgttaccaccagacctccttataagaggtcctgaagagagtgctaaatatggaaaaaaaaagactgttactgaccaccacaaaaacacacttaagtacatagaccatcaacactataaagcaactacacaatcaagtctacataacatccagctaacaatatgatgataggatcaaatctgcacatatcaatattaaccttgaacataagtgggttaaacaccccacttaaaaggcacagagtagaaagttggataaagaagcaagaccctagtgtgtactatcttcaagagacccatctcacatgcagtgaaaaccataggctcaaagtaaagggatggaaaaacwtctatcaatctatcaagcaaatggaaaacaaaaaagagcaggggttactatttcagacaaatcaaattttaaaccaacaacaatcaaaaaggacaaattaggggcataatgacaaaggattcaatccaacaaggcataattttcctaaatatatatgcaccaaa

SEQ ID NO: 777494 - DNA, 624 bp, Homo sapiens
ttggaaatgttcaattaaataatgagttaacaattagtattataatagtgaatcctgctattccttggccatatctatatggttctataaggtctgaagtgctatttgttagtggaactacaacagtgccaagagtaaatttgtatcagactcttcactggaagattataaagcatgttattggccaattcaaaattttatttcattatgctattgaaacagctcaaataaaaattaaaagaataatcaaagataaagacagyttactaatgttactatgtcaagtcatgtcctctgagagtcatccagtaagggcaaaagaaacccacaagatgatcatgaggtgtgtttccgcacagtatcattgaaacatgcacattgtgttttctttcacaagtggaatgacatgtttttaggaaggatatttgactgagtttaatcaagcaattaaataacaactatggcaataataccaacagcaccaacaacctcaaataagccactttcttcaggggttggggagtgacctactgtgtgttggggggaggggttatgatagagaggatgacttgcatcacattatacaggtgttgtgagtcagttatcttattacagataaaatgt

SEQ ID NO: 777495 - DNA, 624 bp, Homo sapiens
ttggaaatgttcaattaaataatgagttaacaattagtattataatagtgaatcctgctattccttggccatatctatatggttctataaggtctgaagtgctatttgttagtggaactacaacagtgccaagagtaaatttgtatcagactcttcactggaagattataaagcatgttattggccaattcaaaattttatttcattatgctattgaaacagctcaaataaaaattaaaagaataatcaaagataaagacagtttactaatgttactatgtcaagtcatgtcctctgagagtcatccagtaagggcaaaagaaacccacaagatgatcatgaggtgtgtttccgcacagtatcattgaaacatgcacattgtgttttctttcacaagtggaatgrcatgtttttaggaaggatatttgactgagtttaatcaagcaattaaataacaactatggcaataataccaacagcaccaacaacctcaaataagccactttcttcaggggttggggagtgacctactgtgtgttggggggaggggttatgatagagaggatgacttgcatcacattatacaggtgttgtgagtcagttatcttattacagataaaatgt

SEQ ID NO: 777496 - DNA, 536 bp, Homo sapiens
aatatgataaaaggtaataaaccagagaaggaaatagaaaagatagctggcatattaaaatgagaaagacaaaatgcaacaggaagtggtttccacttccagtaatgatagataagcctattacaaaccagcactgctgccaaggacaattataaactccagaaaatgttttaaaatacttgtttgaagacatcagaaagcttaccaaattakcaaaggcttcaagggccaagattccagagggaaacaaagttcctagataagtctaacatttaagcaatttttcctttgaggtatttgccagttttcaaacagagaagcaccaggcctgtcatagtgaactctgctagcaggctgtcctccacagcctcagactccaagcccattccagtaggccagcctttgtagaaccaggaccagacctgcactacagacctaggctccaggtcccctgcagaatgacctttaagtatacacacacaaactgaaaatgaagggatagaaaaatatattttatgcaaatggaaacccaaaga

SEQ ID NO: 777497 - DNA, 536 bp, Homo sapiens
aatatgataaaaggtaataaaccagagaaggaaatagaaaagatagctggcatattaaaatgagaaagacaaaatgcaacaggaagtggtttccacttccagtaatgatagataagcctattacaaaccagcactgctgccaaggacaattataaactccagaaaatgttttaaaatacttgtttgaagacatcagaaagcttaccaaattagcaaaggcttcaagggccaagattccagagggaarcaaagttcctagataagtctaacatttaagcaatttttcctttgaggtatttgccagttttcaaacagagaagcaccaggcctgtcatagtgaactctgctagcaggctgtcctccacagcctcagactccaagcccattccagtaggccagcctttgtagaaccaggaccagacctgcactacagacctaggctccaggtcccctgcagaatgacctttaagtatacacacacaaactgaaaatgaagggatagaaaaatatattttatgcaaatggaaacccaaaga

SEQ ID NO: 777498 - DNA, 627 bp, Homo sapiens
ataatttaataaaacacatgtcccacaagagtgatggagaatatggccaaaggctgaaattggaggcatacatgatctgggggtgtaacttcatttgtaaaatgaatcacagtctaaacttggactcggttgacttattgaaatcatacttttgcacgaaatgttgtttttcctatargggcactttttccagcttatttttagttgagttcttttgaacaaagcactctagtgtttactaggggccagctaaggacactttttaagacctttctcttcatatttaattttctttgaaccacctccaaaatttctccaaccacactgactccctctcccccattctcttcaaattaactgcagaaaacaaatgttttgaaatttttcaaaatttatgtttagttggcttctgtaatcactcctaaccccaagcaaaagacagtgcagtgtggtgggaaaaatacaggagcagggtaacaggatagtagagtcctaagtctggcactgacattaatgatctggggacagtgagaaagccactccattgatcttatcctcagtgtttttcatccctacagagtagaatgaaccaggggaatcttaaaccaaggaactaaactataacac

SEQ ID NO: 777499 - DNA, 586 bp, Homo sapiens
tgtgtagctccctgctctcttgataacacctttacttggttggtgatttacctcccaatcaatgtagtgcaaggtgttttgggatacaggccaggttatagagtgattgcaggatgggcttatagcttcacaccttgaacaagacaggagcttaaacacagctttttggggctgaaacctcagtggtgtcaaatggatgattgtagtagaagtttacatatagcacaatgaaaggtgtcatcattwttctgtgggtaaacttggagaacatgagtatgggacatgtggacccagttgaaattttcccagacatttgtatttccagatgcttaaaaatgcatgcaatttttcttatagtacaagaatgcctaaacaaactgaatgtaaattaagcaattaattaaggcacatgatttgcattacatagactgttattagatatgaaaagaagataatttcatatttaaaatattaaacatgtgtgttccttttctccctaaatcataatgtcctgcagctctctgccattatagctccaagaaagaaggacaaaatttctgctctgggaaagacactgtcaagataa

SEQ ID NO: 777500 - DNA, 591 bp, Homo sapiens
gtgctgttcaataaatgtcgccaggcccagtgagagggatcctgtctgtcttagtaccaagaacactagtacctcttctgagtaatgggtttttaacatatatacacacatatatattatatatacacatatactatatattcatatgtaatatatacatatatagtatatatatgtagtgtatatatatactacatagtatagtagttttttctaattccgtgaagaaagtcaatggtagcttgatggggatagcactgaatctataaattactttgggcagtatggccattttcacaatattgattatatataatatattatacataatatatatacataatatatatataygatggaccctgggaattgtgtaattgaccaggtttcccttttcatgctggcagtgagagaaaagaattctaatatgcagccttctcctagcagtgtataggtctttttattattattattattattattattattattattattattatactttaagttctgggatacatgtgcagaacgtgcatgtttgttacatagatttacacttgccatggtggtttgctgcacccatcaacc

SEQ ID NO: 777501 - DNA, 560 bp, Homo sapiens
gggaaatgcctggaatggagtaggcactcatcatacactagcttaaaagtttacggtatctttaaaataatcggatgattacattgcaattttatccaaagctagccatgtgcttagaacaactgtgctctttcctcatcggattcagtgagcagtcaaggaaagcgaaggtgcagctttttctcactcccctcccacagaagctaattgagatgggagctcttttggcttctcagtggttctctaatcacattactgtacagacacgtcaaggcagccaaggctttagaaaagtaattcgcctcttcattgttgcaaatatttctaaagggaaattaaggtgtaatttttctaaatcaatcsagtgattgccaagacagagtaaataaagggtttttttcacaggaaaaaaaaaaaatcagcaaccagattgctgataattcacccctttcattcccagattcactggagccttgattcagccaaacctgggtttctctgattttgacccatgtcttcagttctacagtttggggaaaaggataggggatgtgaaaacc

SEQ ID NO: 777502 - DNA, 573 bp, Homo sapiens
atattaatttccttctatgggctataaagcaataccatcattattcattttgttactcagtttgtcttcactttggccatgtggaactctttcacactggtgcttgtgcccttcaacatgcgccatcttttttgagcacttccttactttgtgacaccacaaaatgctccgaaccaggagctttggcttcccttggccacattgaaagaagaaaaattgccttcgtccacacacaaaatacactaamgatagctgatgagctaaaaaaaaaaaaaaaaaaaagcaaaaaaatctcaaaatggtttaagaaagtttacaaatttgtgttgggccacattcaaagctgccctgggccatgtccggcctgccagtcacaggctggacaagtttgctctaaactcattttaattttctctatcgcagatctctcgaaaccactttaccaagaagccattgtttcttttgttgaaaaataacatttagaaactaagttctgggtctaggtgtgctgactgctactgggtgacattacttcttaaccctttcaatagacagagctagaaaatatatgtg

SEQ ID NO: 777503 - DNA, 493 bp, Homo sapiens
taccatcattattcattttgttactcagtttgtcttcactttggccatgtggaactctttcacactggtgcttgtgcccttcaacatgcgccatcttttttgagcacttccttactttgtgacaccacaaaatgctccgaaccaggagctttggcttcccttggccacattgaaagaagaaaaattgccttcgtccacacacaaaatacactaaagatagctgatgagctaaaaaaaaaaaaaaaaaaaagcaaaaaaatctyaaaatggtttaagaaagtttacaaatttgtgttgggccacattcaaagctgccctgggccatgtccggcctgccagtcacaggctggacaagtttgctctaaactcattttaattttctctatcgcagatctctcgaaaccactttaccaagaagccattgtttcttttgttgaaaaataacatttagaaactaagttctgggtctaggtgtgctgactgctactgggtg

SEQ ID NO: 777504 - DNA, 584 bp, Homo sapiens
tattaatttccttctatgggctataaagcaataccatcattattcattttgttactcagtttgtcttcactttggccatgtggaactctttcacactggtgcttgtgcccttcaacatgcgccatcttttttgagcacttccttactttgtgacaccacaaaatgctccgaaccaggagctttggcttcccttggccacattgaaagaagaaaaattgccttcgtccacacacaaaatacactaaagatagctgatgagctaaaaaaaaaaaaaaaaaaaagcaaaaaaatctcaaaatggtttaagaaagtttacaaatttgtgttgggccacattcaaagctgccctgggccatgtccgrcctgccagtcacaggctggacaagtttgctctaaactcattttaattttctctatcgcagatctctcgaaaccactttaccaagaagccattgtttcttttgttgaaaaataacatttagaaactaagttctgggtctaggtgtgctgactgctactgggtgacattacttcttaaccctttcaatagacagagctagaaaatatatgtgtgtataatgaca

SEQ ID NO: 777505 - DNA, 608 bp, Homo sapiens
aaaaaaaaaaaaaaaggaaagtaaaagaaaaagaaatacaggacaagtgaagtattttaggtaatgctaatgtagactgtatgaataatatgtttgtaaatcttgtcaatgaaaatataaatagattttcaatcatcactttcgtctaacaatcagtttttcttttattttcagcagctactcatgagcataaagtccaaattcgttcagatggtataaaaagcctttcatcctccagccctgcctacctgtccccactcagcctctgtcaccaccaattcccgatatattctacactctatttgcgatttcctaatgagctttgtagtttaagtccctaggtttttgcataggctattttttttaagaatacattacctcctccctatagacatctagagtgmcccactggccccaagtcagaccaaccccttaccctggctccagtagctcaatctgctctacaaggatgattttaccaaagccaggtgaaacacattgcccattccttctgaatatttgcagcccagccttggaaaggctgggtatgtgtatgtatatggtgtataatcttttagaactctctgttgtctccatcctctggactc

SEQ ID NO: 777506 - DNA, 599 bp, Homo sapiens
tgtcagatgcataattagcaaatattttctcccattctgtaggttgtctgtttattctgttgatagtttcttttggtgtgaagaagctcattagtttaattcagtgccatttgtcaatttttagttttgttttatttgcttgtagggtcttagttataaattctttgcataggccaatgtctagaagagttttttctaggctttcttctagaaattttcaggtattgatttaagtctctgatctatgtttagtttatttttgtgtatggtaagatatagggatccagtttaattcccctacatgtagtatccagttttgccaacaccatttattgaatagggagtcctttccccccactgtatgtttttgtccactttgttgaagatcagatggttgtaagtatttggctttatttctgggttttrttttctgttccattggtctatgtatctacttttataccactactatgctattttggttactacaggcttgtgttaggttggtgcaaaaataattgaggtttttgcattgcttttgcaacaacctaatagtacaatttgaagtgtaatgtcttcagatttattctttttgctta

SEQ ID NO: 777507 - DNA, 646 bp, Homo sapiens
tacaagctccacctcctgggttcacgccattctcctacctcagtctcccgagtagctgggactacaggtgcccgccaccacacccggctaattttttttttgtatttttagtagagacggggttttgccatggtggccaggctggtcttgaactcctgacctcagatgatccacccgcctcrgcctcccaaagtgctgggattacaggcgtgagccactgtgcccaccccaataattctttatatttgttggttaataaagtgcctaagagcattgagaaaaattgagaagaatgacaacagaggtgacggcaccagagaagaacttctgggttaaagatagccaacttctcactctctctttatttatttgtggcaaatataaataccaccagtacaaatattagccaaattattctactttacaagattaatgggtagctctaaaagtttgatcatgtccctacatcttgaggggcaaatgactaaggatttctttcattttgagttctatcttgtagtaaaacctgatagtttaatgaatgaattctttgatttcttggaggagaaatatttttacaacttaaaacaacttaatgtgcttttctcagcttgtctttttttcagcttcttttggctccaatttt

SEQ ID NO: 777508 - DNA, 561 bp, Homo sapiens
tgtaaatgacaaatacccatatactccttatcgatgctgaccaattgtcatatttaccttattttcttcttaaagcatttgaaagtgaattccatgtttattcacccttacattctttagtatacatctagaatataaggatttttttcttaactaagtacaatacttttgtcattaacacatctgaaaaattaataataattctctgatactttctaatatccartatacatttaggtgccctcagctgcccccaaagagtgtcttccagctaagttgctcaaaccagaatctaatcaatgacctgcatgagagtctagcatattttaagcactggaaaaaccttcagtaaatgagacagacaaggttcctgtattcacaaagcttacataatagcatagaaggaagacagtggtcaagtaaacaaataagattattttagaggtaaatgtcacgaagaaaataaaatgggaagtgagagctaatcgagataaaacttttctaaagaggtaatttttaagctgggtctaaaataatgaacaacaacccaagcaagcaaag

SEQ ID NO: 777509 - DNA, 487 bp, Homo sapiens
tcaatcattgcaagattttttataagaagcacttttaaaaatttttttacagttttgcaaagtatgaagaaatgacttagaataataaatttgaaaaatgaagggtctttaaatgttaaattcttgattttacagactcgtgaaattgaaagacaaagagataggtgacctgcacaaagttgtagttagaagtatactgagaactcagtattccagacagcatgtagcattttcttttttttataatttcaatttttattttagaytcagtgggtacatgtgcaagtttgtcacatgggtatactgcatgattatgaggtttggagtatgaatgatcccatcactcagatagtgagcacagtacacaataggtactttttcagtccttaaacgcctccctctctcctgcctttaatggttgccagtgtctattgtttccatatttatgtgcacgtgtagccaaagcttagctcccacttataagtga

SEQ ID NO: 777510 - DNA, 646 bp, Homo sapiens
tgaaggacctgaattaatatattcaaagtattttgataggtatatatccacttaggcttttatataaattaaaactttcactcaagagtgaaaattaaacattctcgggcatataaactgtaattttttttacagtataaatcttaattggaatttcaaaaggttgtaaaagcaatagaagaaaagaatgtgaagcaagaaacataacagaagcatgttttaatcaaacatataggtctttgaaattaaatatttacatgtaaaacaataaccactttttgtggtaaattagaaacaagtaacttttttgtaatagtccatattggcttctataacaaaatacctcaaatgtggtagcttataaataacatacagttatttctcccatttctaaaggctgggaaatcgaaactgamggcaccagatttggtgtctcagagatgcccagtttattggtataaaccaaggtgtctataaagacacatttcttactgttacttcacatggtagaagagccagagggtctttcttggtcccatttatgagggccgcatccccatgacttaattgcctcctgaagaccccacctcctaccatttgcatgggagttagggtttcagcaaagtaattttggggaaacacaaac

SEQ ID NO: 777511 - DNA, 620 bp, Homo sapiens
attacattttatattggtagaacaaatatcatcccaaatagtcaaaatggcatttgagttgattgatgaagtccatatattatttttcttttgattgagcttcctctgaattacataactttcttctttctggaatttcagcactctaggtattgtttagagttgtatattcattatgtaaagaatgcataatatgagttttcaaattctgaaakataattccagaagaaaatagtttgttatggttttcccatgatctttctgacataatttattcatcactttttaactggcttatttaattaatttaagtaattccaaattttatcatatatactccaattttccctttaagaattattagcttgtttaagcattcccttttctctgcagccttgccagcatctgctattttttgacattttagcaatagccatcctgactggtgtgagatgatttctctttgtgatggccatggcaggccatctggaatagctgctgggaggacaccaccttcagtgggggaggtgcgaccagggctgcttactccacggagctggtgggggccaggaacaggcaggaactgtgcctcctacctagtttgtgggcaggaactcctg

SEQ ID NO: 777512 - DNA, 597 bp, Homo sapiens
tttttccagttctcactcttttttctgttatacaaaagactgtatcctgagcagttggcatcagaactttcagtaacccgagtttacttaccatgtttctgccatctcttgaaggaaattccctacaatgcggacctttgattccaatgctgttagaatctaacctggccaggagaggctgcttctgaaatcacattgccaaggtacagacatcctttcaaagtctatttgagggtctgttggccaacagtagagaaatatttgaagcaggatcccatagctgtttctttcttattttttcatccagaaacaacaattattaagacaaatgtgtgaatgatttcatgaatgcacacatggcaacagaattytatatgctccatcaactctggaaagcagaaggatgtgactaagagcacaaaaaataatgtcccattcaatatatagttactggctgcattatttactgttttattttattttgttttttaattgtggtaatggcacttaatgagaactaccttttaaacaatttttaagtgtccgatacagtatcattaactgtaggcacagtgttgtacagcctttagaacttat

SEQ ID NO: 777513 - DNA, 597 bp, Homo sapiens
tttttccagttctcactcttttttctgttatacaaaagactgtatcctgagcagttggcatcagaactttcagtaacccgagtttacttaccatgtttctgccatctcttgaaggaaattccctacaatgcggacctttgattccaatgctgttagaatctaacctggccaggagaggctgcttctgaaatcacattgccaaggtacagacatcctttcaaagtctatttgagggtctgttggccaacagtagagaaatatttgaagcaggatcccatagctgtttctttcttattttttcatccagaaacaacaattattaagacaaatgtgtgaatgatttcatgaatgcacacatggcaacagaattctatatgctccatcaactytggaaagcagaaggatgtgactaagagcacaaaaaataatgtcccattcaatatatagttactggctgcattatttactgttttattttattttgttttttaattgtggtaatggcacttaatgagaactaccttttaaacaatttttaagtgtccgatacagtatcattaactgtaggcacagtgttgtacagcctttagaacttat

SEQ ID NO: 777514 - DNA, 674 bp, Homo sapiens
cagacatcattgctgttctttacagctgaagaaggcatatgaagactatactacttaatgcacccataatcaaatttaaagtgccctgctcagccaacagcataaatacatctttataaaaaagtcttcctctaagaaagcaaatcccaaaatggaagaagygaccgttacaccatatgcacaaatatcaatataagaactcaagaaaaataaaaaagcaaggaaatatgtttcatccaaaggatcccagtgatttttcagcaacagatttcaataaaaaaagtatgaaatgccagaaaaaagaattcaaaataatgatattaaagaagttccatgaaaacaaaaagacacagacaaaataatacaaataaattgaaaacttattcatgtcctacgtgagaaattcaacaaagtgatagatatcataaaaaagaatcaaatagaaatcccagaaatgaagaatttaatacatgaaacaaaaaataaatttaagagcttcaacaatagactagattaagtagaataaagaattttagaatttaaagacagtttttgaaataacccagtcagataaaaagtttttaaaagaatacacaaaatctatgtcacatatagaacatcataaagcaataaaatatttaaatttgggatgttccaaaggcaaagagatacaa

SEQ ID NO: 777515 - DNA, 674 bp, Homo sapiens
cagacatcattgctgttctttacagctgaagaaggcatatgaagactatactacttaatgcacccataatcaaatttaaagtgccctgctcagccaacagcataaatacatctttataaaaaagtcttcctctaagaaagcaaatcccaaaatggaagaagcgacygttacaccatatgcacaaatatcaatataagaactcaagaaaaataaaaaagcaaggaaatatgtttcatccaaaggatcccagtgatttttcagcaacagatttcaataaaaaaagtatgaaatgccagaaaaaagaattcaaaataatgatattaaagaagttccatgaaaacaaaaagacacagacaaaataatacaaataaattgaaaacttattcatgtcctacgtgagaaattcaacaaagtgatagatatcataaaaaagaatcaaatagaaatcccagaaatgaagaatttaatacatgaaacaaaaaataaatttaagagcttcaacaatagactagattaagtagaataaagaattttagaatttaaagacagtttttgaaataacccagtcagataaaaagtttttaaaagaatacacaaaatctatgtcacatatagaacatcataaagcaataaaatatttaaatttgggatgttccaaaggcaaagagatacaa

SEQ ID NO: 777516 - DNA, 610 bp, Homo sapiens
gctgagcagaagcattttagtttaatatagtcacatttgtctatttttgattttgtttcatgtgctgttgaggtcttagccataaaattttggcctaggccaatgtcctaaaatgtttcacctatgtttcattatagtagttttgcagttttgggtcctaagtgtaagtctttagtacattttgagttgatatttgtacatggtgagagaaagcagtctagtttcattcttctgcrtatggatattaagtttcctagcaccatttattgaagacagtttcctttccctctatcagtgttcttggtacctttcttaaaaaattatatggctgtaaataagtggttttatttctgggttctctattctgttccattggtctacgtgcctgtttttataccaataccttgttattttggttactgttagccttgtaatatattctgaagtcaggtaatataatgcctccagctttgttcttttggctcaagattgctttatctgtttggcctcttatatggttccatatgaatatgaggatagatttttttttctgtttctgtaaaaaatggcaatggtattttgataggaattgcattcaatcaagattgat

SEQ ID NO: 777517 - DNA, 633 bp, Homo sapiens
tatgcaaaataaatgcatttgaaacgcctgatttactgctcagaagaggcaagaagtttagtgactctatacataatacctttgactatatgtggagatccaaggaacataatgaagctggttggttactcctaagttcagtgcacaaagtgatgaaagaaaattatgaactgagagattctatctcctggcttcagaagcagatactgagcctcaaatttgctaagattgccctgagtgagattcttatctcctgtagagaaacagctgaaattgcggaaaaacagacataagctcttatcatgtgagtggctgacctgcagtgaaagatgcatgcacgacctcgccaggtatctactgttaaattgagggcattgactggaaaagaaggggaccctgaaacttggaatggggacatgtgggaggaccccaataaacctggggatgctgrgtttgtaaactctggtgaatattttttggccagaatgaagagcttccccatccccagtagtggcgacatccactccccaacccatgctgctgtcagcctttctacctttggctgagaacataaactctgtgctgcctgaggcaacggcaacagtgatggcctcccctgaggtagttgccagg

SEQ ID NO: 777518 - DNA, 555 bp, Homo sapiens
aggtcatactgatagttgaagggtagtgaaggcagagaattttattgagtgaccaaacagctctcagcggagaagagatgggagagttgggttgtctctcttgaagtcaggtcatctctctgtgtggctgagtctgcagcttttataggcataggataaagaagtatgtactgatccattcaagagtttggaaaaaggttaaaacaaaggcaccagtcaaaggtgggaacagtgtaaaaacaattaggaaagggtaggtatatgtaaaataggtgaagggtgaagctcaatcaaaggaaagcactacaaagaggaagacaggttctctatctggtctgtgaatttgacttgtagcttggtcttcaggctttgaactgtctttggcttgaagatgaggtttcatgggatrcccacccctggtatgcctaggatttctctgcctcctgcctgtgtcatttcctcctctgaagaggtgcatctaactgctgttagaatagggatcatgaccgatattagctactccctgctgacaggggatgctgttttgggaaaacg

SEQ ID NO: 777519 - DNA, 652 bp, Homo sapiens
tcaacactatggccttccaaggattagactggatggtgccagatctgccagggatgggccactttgtcctggtccatgatgacccccacctactttgagatctggtcattgttctctctcccagtcctctctcacatgggcatcagttaggcatcaggtataggttgaggccctaagaaaggacttagcacatgttgccaaaacaactctgtgcaccraactcagtctaccctgcatggactgttgcttccattcccaaaacaaaatcactgaaaaggaaatcatatatttcccaaccacagggctctgccactgagagaagttaattggcttttggaaaaaaaacaacttggcttagtgagatctttttgttctcataaactctaaccactcactgaggatgcaaagtttgacgtcaaaagaagaggacatttagatttataaaaaaattctgagaaagataagtagaaacaatgaggcacagattaagagacataaaacaaataagaaagattctgttttgaaagtgaaggaaattgtactgtcacttgattgaaacaaaagaaaacagtttgacaagcatttattgagtactacctgtgtaccaggccctgtgctaaaagttagagatgtgaattagtcacagtctttg

SEQ ID NO: 777520 - DNA, 530 bp, Homo sapiens
tttgttttctaaggaacaaagccacttatcaacagggttttaggcaggctcaccttttcctcccttcaagtttcattccctgaaatgattttgaaatggcttgttattgagactgataggaaacagctgatgaagtacacacacacacacacacacacacagagagagagagagagagagagagagagagagacagagttctgatacctttttacagtacttgyttaggaactgagatgttatcagtagaggctaccattttcccattactttttaaaaaaaattttatttttaatcaggcagccccaaactagaataggttcagagactccccattttcacattacattttaaagtagatatttttgtttttaaaacaattagatttttgaagagtatattatatgcatcttttggctaaccagctaatttacagaataattaaaatacacaagcagaaatcatgcaaaaataccttcctccttgtacttaacaaaaaactgaaaccaaagtaaaacaaaaccttgaag

SEQ ID NO: 777521 - DNA, 651 bp, Homo sapiens
gtggacgttgaacccgtcaaaaggcctgaaggccaggtctgaatcacttgtacttcccacgtggccctttctacggtgattagtgaagcctccccacataaagagagctaatgaaagagatttattcggaagaatctgctcatgcgattgtggaggttggcaagtccaaaatctgcaaggcaggccagcagaatggaaattccagaagaagcgctatcgcagtcttgagtctgaatgcagcctggagcagaatgccttcctctttaggggagctcagttatttttcttacagccctcaaatgattgaacgaggcccacacagattataaagggtaatctgttttattcaaacctactggcttatatgttaatcatatcttttaaaatatctttacagcaacatctagactgatgtttgaccaaactactgggtgctataacctggccacgttgacacataaaattaaccatcacacatrattaagtgctcaagaaattgatgtgatttgatatcccaagacagacatatttctgagacactatttcttcagctgaacaatgtagagattagactttattattctaactctgacagtcaaagggcaaaatttaagtcttgagaatatgagagacactgcaacttctggtctc

SEQ ID NO: 777522 - DNA, 604 bp, Homo sapiens
attattttttagatgattatatcaaataatcttgattcttggtattaaataaggcaaggcatgagtttggggaatcacattagctcaggatgtatccatcccagaagtaaagttctactgcactttaattttctgtttatttgtatgcttcagatattaaattctggggtcctgaatggggtgagagctcttttatctgtatccctagtgccttacatctgccagagattcagttaatatttgttgaaaagatgaatgtgtatttttaatttaatacagaaawtttttttttttcaaaaatctggctttgcccctgagccatggtttgtggtgctgaccctcttcccaggaaaatacacgcatggcttatttcagaaggtttaaggtacagaccttgccctagaagatggcctcctgtttagtcaaagagaagagaagaagaaatgtgtttctttcaatactaaatatgactgatttaataaaaagtctcaattggaattcaactccttttagatatatacgaccccattctatctttgcccagtaacttcttggagaaggtgatatgattcatgcactttagacagaggcaaatttggatcct

SEQ ID NO: 777523 - DNA, 517 bp, Homo sapiens
ttttgactttcaactcttattatttgagaaatatattttgcatggttatagttgccatatatagtgattcctctgctcgatctgagcaaggtaaattgaaaatcttttagaaaggactcactgttttaggtgtcattaagaacattagtgattcatgaaaggtcaaaatatccacattaacaggaatttggaagaagttgattccaacccccagggatgactgtgaggagtttgagacatcagtggaggaagtaactatagatgtggtagaaatggcaagagaactagaattagaagtggagcctgaagatgtccctgaattgctgcaatctcatgataaaactttaacagktgaggagttgtctcttatggatgaccaaaaagagcagtttcttgagatggaatctactggtgaagacgctgtaatcattgttgaaatggcaacaaaagatttaggatatttcataaacttagttgataaaggagcagcagtgtttgagaggattatcccccattt

SEQ ID NO: 777524 - DNA, 594 bp, Homo sapiens
aaaacgtgtgggggcccacaggaacctaagaaggctcttcagtttgttgtctagtgaagcagcagccaacactccatcactgatctcacaggcataagggaaaaccaaaggcattccggagatgccagtcctgatagcatcaagccttgacactgaggcaagcagaagtctacttgtgagaaaaattaactcctccttgtttcccatttgtatggtatgtaagtacttgcagctaaaattattcttaattgatgaggaatgaaaaaataacatcaccttttaacycctccatcattccaaatgcccagagtttattattcaggaaagcacttttatttcttcctctttctgtctctgtctctgtctctatctctctttcacacacacacacacgtgtatatatgcattaatgtatgtgcacatgtacatatatttatctaccttgctttctgaaaatgaaaatatatatttaaatttttccttctataacttgtttttattttaaaagtaatggcatgattatctttattggttcatgtaattctatcatattctttttaacagctttattgagatataattcatgtagcataa

SEQ ID NO: 777525 - DNA, 594 bp, Homo sapiens
aaaacgtgtgggggcccacaggaacctaagaaggctcttcagtttgttgtctagtgaagcagcagccaacactccatcactgatctcacaggcataagggaaaaccaaaggcattccggagatgccagtcctgatagcatcaagccttgacactgaggcaagcagaagtctacttgtgagaaaaattaactcctccttgtttcccatttgtatggtatgtaagtacttgcagctaaaattattcttaattgatgaggaatgaaaaaataacatcaccttttaacccctscatcattccaaatgcccagagtttattattcaggaaagcacttttatttcttcctctttctgtctctgtctctgtctctatctctctttcacacacacacacacgtgtatatatgcattaatgtatgtgcacatgtacatatatttatctaccttgctttctgaaaatgaaaatatatatttaaatttttccttctataacttgtttttattttaaaagtaatggcatgattatctttattggttcatgtaattctatcatattctttttaacagctttattgagatataattcatgtagcataa

SEQ ID NO: 777526 - DNA, 600 bp, Homo sapiens
actccatctcaaaaaaaaaaaaaaaaaaaaaaaaaaaatgtgggaccactaggttaaggagaaacattgctaggagaggttttgcaggttgttactgaatgctttctcactttccctgtgccaatttggaaaccagggaacactgcaatatkcatgctgacctggaggctataaaatgcatcctcccaaagattggcagaagatgtaaaaacactggaaacaggactcagtgaaacttgaggagtttatagtcatgttggctgcatccaaatgtagcttaggcatttaggtgcctaaatattttatcgaagacagtagaggtcaaacactccttctttaagtccaagtaatatatggacttataatttccatggattcagatggaatcaggaggcaagaaaatattaggcggccaccttaggaatgtgaaaattgcctcatgcaagagtttctacaggtagagaacaagttacaaccttccctttcagcagctatacaccaaaaggttaaaaattgacccccaaagtggaaaaaaaataggcttcagctcacttcctctcttttctcaggtggagtatacaatagggacgagatatggat

SEQ ID NO: 777527 - DNA, 603 bp, Homo sapiens
catcttcccacctcagcctcctaactagctagtactagaggtgcatgccaccatggccagctatttttttattttttattttttgtagagacgtagtctccctatgttgcccaggctggcctttttaatttttaaaaaatcattttagccaagctttattgaatgcttgctgtgtaccaggtgccaggctggtcttaaactcctgggctcaagtgatccattaacctcagcctcccaaagtgttgggattaccagcrtgagctatcacacctggcctcaacagattattaattcactaagttcatcatgctgtgtaacattattttcaccattattgtttttgaaatttatcttatttaatttttgtttaggcagggtctcgctctgttgcccaggttggagtgcagtagcacgatcatggctcactgaaagttcatactcctgggctcaactgatctcccacttcagcctccccagtagctgggactacaggtacacatcaccatgcctgactaatcttttaatttttacttttagtagagatggtgtctcatattatttcccaggctggtctctaacttctggtgacaagcaatccacctg

SEQ ID NO: 777528 - DNA, 636 bp, Homo sapiens
gaatttgagcaacaaaataaataaagtagtattggattataactcaaagtacaaaataaatatccatgaatccatgttgacataaatacataaatgaataaatacatggggaagaagaaaaaaaatctcccatacagaagaattccaaataaagtatgtagaactccacttctaacagatggagcataactcccactctgtctgtgtgggctgtgcttagtgacttccttcaaaagagtacagtatggcttgggcatcgtggctcatgcctgtaatsccagcactttgggaggccaaggtgggcagatcacctgaggtcaggcgttcgagaccagcctggccaacatggcaaaaccctgtctctgctaaaaatacaaaaattagccgggtatggtggtgcacacctgtagtcccagctactcgggaggctgaggcagaagacaggagaatcacttgatcccgggagatgaaggttgcagtgagctgggattgcgccactgcactccagagtgagactctgtttcaaaaacaaacaaacaaaaaaagagtaccttcacagtggagacagttgacaaacacttcctcaggcagtgaggtgatcaagattgactcaacagtaataagtcatgccaatag

SEQ ID NO: 777529 - DNA, 578 bp, Homo sapiens
taaaccaaggcaccaagaagccaacgaagccccagaacatgctcatcacagcgaaaggcaccatgaggccataatatgcatggtcactgcctgagctgccagcctctgccccaccgcttcatttcccaaattccttcttttttgtttgttttgtttgttttttagacagagtctcactctttcacccaggctggagtgcagtggcacaatttcagctcactgcaacctccacctcccaggttcaagcaattytcctgccttggcctccccagtagctaggattacaggtgcacgccaccatgcctggctaattttttttttttttttttttttttagtagaaacagggtttcaccatgttggtcaggctgctctcgaactcctgaccttatgatccacccacctcggcatcccaaagtgctggggttacaggcatgagccactacctctggcccccaaattccttcttaatttcttcactgacccactattcaggagcatattgtttactttccatgtatttgtaaagtttctaaaattcttattaatttctagttttaatccatagtggtcagaaaa

SEQ ID NO: 777530 - DNA, 486 bp, Homo sapiens
cacacaatcaacagaaatacagaaatgcccgttttagcacctcatgtaaaccctacacttttacatttcatgtcaatcctctagataatctttttgttgttattgaggcggagtcttgctctgttgcccaggctggcatggagtggtgtgatcttggctcactgcaccctctgcctcctgggttctrgtgattctcctgactcatcctgggattacaggtgcatgccactacacctggctaatttttgtatttttagtacagacagggtttcaacatattggccaggctggtctcgaactcctgacctcaagatatccatctgccttggcctcttaaagtgctgggattataggtgtgagccaccatgcctggcctctaggtaaccttttatttgaagttgagatttgccttgattagtacaatggttcttgccctcactgggcgtcagattcacatggataacttaagaagtacagaagaccggg

SEQ ID NO: 777531 - DNA, 550 bp, Homo sapiens
agaactgaagcacctaactttcagatgctacatacacctgtttttctaggattttcccatgtagagaggttttggccccaaagaaaagtccctagttgcaaaggccgtcggttctgcctctgcctgtgagtttttggtatcttgaatgctttctggctctacagcctgagatgaatcaaagtagagttcagtgcagccagtgcagstgtgaatgctcaaaactggatactactgtggacctttcctttcagttctattctaggaaaactttggaaagaaaagctttgacagataaaggacagtaaaattatttgtgaaaatcattcaatcaaccaatcacaatcactgattatgttagacacatttctgggcatcggagaagaaatagaaagataccattcttatagttttcctgaattctaagttcccagtttcctttctctgcttgtcttccatccaaagatgggcttaatgcaatcatctggacccaaaagagaaaatgtgaagtttctcatggattccagtgtgatcgctttccagagctagattt

SEQ ID NO: 777532 - DNA, 482 bp, Homo sapiens
ttgtttgcactacagggatactatgctgtagtgcaaactatgcatgtgagggatctaggttgtgtgctccttatgagaatctaatgcctgatgatctgtcactgtctcctgtctcccccagatgggaccatctagttgcaggaaaacaagctcagggctcccacagattctatattatggtgagttgtataattatttcgttatatgttacaatgtaagaataataaaaataaagtgcacaataaaggtaatgtgcttgaattatcccagaatcatccccaaactccactggtctgtggaaaaattgtcttccacgaaactggttcctggtgcrgttcctggggactgctgctttaagccactaagtttgtggtagttacaaaggtcataggaaaaaacccaggaacccacttgttgttagagagaccgacttcctggttcaaagcctgggataacacactattgcaaatacttagaaagtc

SEQ ID NO: 777533 - DNA, 489 bp, Homo sapiens
ctctgaatttgtttggttaccagatagaagtgagaggatttgatatttaaatggactgctgaatttaaattattttttggtagtagaatggaaatttcacttgctgctgaaatttaatagattttcagacttgtaccaccarcaacagttttttaaaggacacggtagaatgagaattgatgatctacaattgcacacagcaatagctcatgttcagtgaaagaagccaatcacaggagcatacggtctgtgtaatcatttacataaagtaccaaaacaggcagaaccagtggatgctttcagaagccgaggaagtggttatgctgggcagcaggtagtgagtggagaggagcctctggaaccctggtaatttcctgtgatttggtgcagatgctgattacaagagaaattcatttggtgcaaatttgtcaagctccatacctgtaccacatgtgccttcctgtaggtttaatatacctcagaaaaaaa

SEQ ID NO: 777534 - DNA, 556 bp, Homo sapiens
ccatgtgaagtattctggtgtctcatctaagagccaaagaaagtcatagatatgttttaagtatgagataaggacatcatcaaaaatgaagttataaaagattaccatctacagtatagaaaatagtgtggagagagattaagagtagttgaaacatttgtaatggtttacactagaaaaaagaatagtttggagtacaataggggcagtggatacaggaagaaagggatagatttgaaaaatacataaatccatcttttttcaggtaaaatcaacaggacttggtattgggttggatataaggacatgcgaaagaggagtaccaataatgacttaaatgaataataaaatgaaagcgagccacccactagacattatttatacaaatctatctatctayctacctacctacctacctacctgtcatctatctctgtatacataacatttatagctttattatctttttctctatcatctatattcataaccatactttacccacatatttatctattatgtctatttatatagaaaagcatgggtttccctaaga

SEQ ID NO: 777535 - DNA, 626 bp, Homo sapiens
agtgctgagagggacccctttcacttggggaaaagggagaaaagaaagctaaagactttgcctgggaaccttatcttccccaagtccaccagggctggatcgcgaggatttgcagcacacatgggcttagagtgccctctagtgctgaaatggctacagttacccacaggcttaagtaaatactcagtacccttaacaattattggaagaccctctgaaggactggaacaaggcctgactacaaagactggaataaatacttaaagtcttcaatgcctaggcatcaacaaacatacacaagcatcaagaacattcaggaacatatgacttcaccawatttactaaataagttcccagtaaccaaccctggagtcatagagatacataatctctcaagcaaggaattcaaaatacctattttggggatactcaatgaacttcaagaaatcacagagaaggaattcagatatttatcagaaaaaaaggcagcatggaaactgaactaattaaacaaatcctggagctggaaacatcaatgattaaaagaaatgcattagaatgtctccgtgtggaattgatgaaggagaagaatcagtaactcgaagacaggctatttgaaaattcgc

SEQ ID NO: 777536 - DNA, 588 bp, Homo sapiens
agatgatcagatgttacttctctgaacactgaaaattaatgtaaataacttcacagtttttaatgttttcccagtgtctagtcaggccagagttcccattagcagtccagggaagttttctaacttgactgtatatttttgcctccatcactatgatgaagtcagttaccaagactctctcaccttatcctaaaaatgtgctatttctttacttcccaattgtcattatgttagttacattgctggaggaaatcaagggagtgaaatataatggatcagagacctatcaagtaaagtaatcaagaatggatttctggacaaccctgtttaaaataagaasccttgcaataaaagtgcataaatgtttcactctgtgttacacaataatacctcaaaatccactttctggtagttcagatctctgagttacaaccctgagcaaagaagtaactgaagaccttcaagtgtccaaatgagtttcccccaaatcttctaccaaaccctgcattcaagcagtattgtctctacagttcttatttatttgattttctaatccaaagcacattagaaaatacatttagcagagag

SEQ ID NO: 777537 - DNA, 635 bp, Homo sapiens
agaccagttatgaggctgcgttccagtttcaaaaatagcagtttatataaagagattgaaatttctgagaagattaatagaattcagacctgagaagaccgctcaagtcaagggacagtgccagaagcgagcatacccctagctgtgttatcgctgcctggtgatatcctrtgggtctttttattttataatatttcagagatgtgttctgtaactcatatatagggagtcaaattctgttatttctattcatgcctggcatataagactgatatgatcttactgttagacttttcatgaagaatggatgttagattcaggtatatatttttgaagttaaatggcccttgttacagatgtaccagagctccccaatatagaagcagttcttccaatattaattactatgtgttgtatattacaagttgccaaggtaccaatagaaaacacacaaagtcactgaatggaaaccccccaaataatgtaaaaaatatcacctcttttagctcttagaaaatgatgtcgacttctttctaaaggatattgttactggagggatgaggaaaaaactcaatttggaggaaattagaaaataatttgcagtttagaagggggttatcttatatacatgttgg

SEQ ID NO: 777538 - DNA, 643 bp, Homo sapiens
ataagaattcaacgtgcttggttggattttgttacagacatatcgggtggttgtaaacaggagattgtatttatgtaatttttatatcaatgtgttaaaggagaaaaatatgtttatataaaagagtctggaaagaaataatgattatttcataatggaaaaaaagcaatgtcactgacactatgatcattcaacatttttttaaaataaattaattttttttagttttagggattaggcctcactctcttgcccaggctggagtgaagtggcgcagtggcacagtcatagctcactctaaccttgaactaactcctcaactcaactgatcctcctgcctcagcctsccaagcagctgggattatagacatgagccaccttgcccagctcagtatcatttttcacattcaagctaatgaaataattcaatagaattaaacaaatgcttttcaaaaatgaagttggaacaattagtcatccatagacacaaaacaaaataaaccagcagacaaacaaaacttcatattaagcctcatgccatgtgtgaagatatacaaaaagtaactcaaaatagagcagggaggaatatgtgaaataaaactataacattttttaggaaaaagccataggagaaagtttcaag

SEQ ID NO: 777539 - DNA, 502 bp, Homo sapiens
caaatagaagacactcaataaatatttgttgaatgaataaatgaataaaaaaacttcattaaatattttgaagggattttcatataaaagaaaaagaaatgctgaacttttcagcaaagtaacccatgtatttgagataaaaytaactcctccactttaagtttgatttacgcaaaaaaattgtacatttttaaactataattgtaacctgataaatatattttctaaataagttaataaattttggaaaacatttgatgcaagatatactgtgagagagccatgagatctggccagttgaccatgttactattggaaatgttaataaaacagtaagattgctgatgttgctttccattagaaaaaaatatcagagaaacatatgctaaggggataaacaaaaatgaggagtctagagtctacttgatcttagttattgagacaattctattaacaagagagtggggggccaatataatgtggtctattaacaagagagtta

SEQ ID NO: 777540 - DNA, 573 bp, Homo sapiens
gagattagttaatttcacttaacataatggcttctagttccatccatgtttctgcaaatgacaagattttattctttttatggctgactaatatttctatacacacgcacacatatatatatatatatgtatcacatttctgtattcattcatctgttattccatatattggctattgtgtatagtgctgtaataaacctaagagtgcagatatctcttcaacatgctgatttcctttcttaggctgtgtacccagcagcgagattgaataatatggtagttttatttttagttttctggggaaggaacactatattgcttgtttttcatagtggctgtactaatttacattcccaccaacagtgtgcaacagtgtgcragagttaccctttctccaatcctcgttaccattcataatttttgtctatttgataacagctcttttaactgtgatgagatggtgtctcactgtggtttgattctaatttccctgatgattagtgatgtgcaacattctttcatatgcctgttgaccatctttatgtcttcttttgagaaatgtctgttcgggtc

SEQ ID NO: 777541 - DNA, 482 bp, Homo sapiens
gaactttgaacttgagagagatgatttagggtatctgggggaagaaatttctaagcagcaaagcattcaaaaggcaacttgggtgctgttaaaagcattatgttttaaaagggaaacagagcattaaagttcagaaaatttgcagcctggtgatgcagtgggaaaaaaaccatttttttcagaagaaattcaaactggctgccagaatgtgcgtaagtagcaagaagcctaatgttaatccccaagaccatgaggaaaatgtctccagrccatgtcagagaccttcatggcagcccctcccatcacaggcctggaggcccaggaggaaaaagtggtttcatgggccaggcccagggtgcccctgctatgtgcagcctagggacttggtgccctgtgtcccagccactctagctgtggatgaaaggggccaacacagagctcaagctgtggcttcagagggtgggagccccaagccttggcag

SEQ ID NO: 777542 - DNA, 530 bp, Homo sapiens
ctgatataaaaatctgtgtgcgagttttttttttttttgtggacataaatttttaactcctttgggaacattccaaggaccatgattgctgcctcatatggtgagagtatgttttatttagtaagaaactgccaaactgtctttcaaaatgactaacattttgcattctcaccagcaatgaatgagagttcttgttgcaccacatccttgcaagcatttggtattgtcagcgtttcagattttggccattctaataaatgtgtaatgatagctcagtgttgtgttgttttaatttgcatttccctgataacaaatgatgtagaacatcttttgatatgcatacttgccatctgtatgtcttctttgatgagrtatctgttaaggtctttggactattttttactcaggttgttttcttactgtcgacttttaagttttttatagattttggataatggtcctttgtcaaatatgtcttttgaaaatattttttcccaatctgtggattgtcttcttattctcttgacctg

SEQ ID NO: 777543 - DNA, 514 bp, Homo sapiens
caaaccactataacaaacaataagagaaaggaacaaagaatatataaagcaaccagaaaaccrttaatatgacagaaaaaaggctcacatataattaataactgcatgtaaatggagttaagctctcctcttaaaagatacaggctggctaaaaggataaaaaacataatccgactacgtgctgcccacaaaaaatgcactttccctgtaaagagacatacagactgaaagttaaagcatggaaaaagatattccatgcaaatagaaaccaaatgagcagagagaacaaaaggattagaaaatctatttagtggccaggcacggtggctcatgcttgtaatcccagcactttggaaagctgagatgggtggatcacctgaggtcaggagctcaagaccagcctggccaacatggtgaaaccctgtctctaccaaaaatgcaaaaaattagctgggcatggtagcagatggctataatcccagctacttgggaggctgaggcaggatcacttgaa

SEQ ID NO: 777544 - DNA, 514 bp, Homo sapiens
caaaccactataacaaacaataagagaaaggaacaaagaatatataaagcaaccagaaaaccgttaatatgacagaaaaaaggctcacatataattaataactgcatgtaaatggagttaagctctcctcttaaaagatacaggctggctaaaaggataaaaaacataatccgactacgtgctgcccacaaaaaatgcactttccctgtaaagagacatacagactgaaagttaaagcatggaaaaagatattccatgcaaatagaaaccaaatgagcagagagaacaaaaggattagaaaatctatttagtggccaggcacggtggctcatgcttgtaatcccagcactttggaaagctgagaygggtggatcacctgaggtcaggagctcaagaccagcctggccaacatggtgaaaccctgtctctaccaaaaatgcaaaaaattagctgggcatggtagcagatggctataatcccagctacttgggaggctgaggcaggatcacttgaa

SEQ ID NO: 777545 - DNA, 640 bp, Homo sapiens
cctgagggaatctcctggtctgcgggttgcaaagatcataggaaaagtgtagtatctgggctggaatgcaccattcctcatggcacagtccctcaaggcttcccttggctatgggagggagttccctgaccccttgtgcttctcaggtgaggtgatgccccaccctgatttggctagccctctctgggctgcatccactgtctaaccagtcccaatgagatgagctgggtacctcagttggaaatgcagaaatcacccaccttctgcactgatcttgctgggagctgcaractggagctattcctattcagccatcttgccagccacctctttaatctctttaaatccaaaaaacttatctttcatgaccttgacattttttaagacaacaggcctgtaattttatagggtctcccttagtttgggtgtgcaggttctgcggttttgccagcattaccaatgaagccatgttgtgtcatatcatgaggcatatgatgttgatatatcctgctattggtgatgttaacagtgaccatttcattagggtggtgtctgccaggttcctcaccataaagttatgatttttttccattgtcatgaataagtatcttgtgggagatgccttgacactatataaata

SEQ ID NO: 777546 - DNA, 493 bp, Homo sapiens
ctgcttacaaaggtggcttcacaattcaattcccaaaaggcagtatttcctatgaattttagcaaaaaaatatttacaaagtggtattttactacctctacatttaacatacattgggcacttctaaacatctaggtgtttcaagtaaggggttaatttgtccactrtgtacacagcagtcttgaataaactgcaaacatgtaacagcagttataatttgaaagagtcttccaaatgtgaacattctggcctagaacccttcccatctccatccatccaatgggcaagaatgctcagattttcagaagacaatctttcttaggacttgtaaaacaaaatgtacaaagcatattagtttactaactctacttttgtcatatactggcaacctctttgttagaagtaaatgctcggtgccaccaagtgaaaatagcactcaggcaaaagttttctcagcaaggcaatttacttctatagaagggtgcatctcaca

SEQ ID NO: 777547 - DNA, 438 bp, Homo sapiens
tacatctagataggtgagtgtcctttgtgggcccagaaagcaggatctgctcctcctaatttgggaaattttaagctgaatttccattttgtaggttgaacaaggccaactgactgagagggagaagcattctgactgtttcagtttggacatttttggggcttctttgtaattgtgtgttttgtgtctgggcaagtgagtgtcttttgtggataccagacaatgggatcagttcctcttaatttgagaattttttttttttttaagacrgagtcttgctgtgttgcctaggctggagttcagtggcatgatctcggctcactgcaagctccgcctctcccgagttcatgccattctcctgcctcagcctcctgagtagctggggctacaggcgccagccacaacacccggctaattttttgtatttttggtagagac

SEQ ID NO: 777548 - DNA, 508 bp, Homo sapiens
aacaaagaccagaactggcataaactgattttggccagtcaaaacaggtccaagctggtcaaattcactatagtctcactaaataggttctggccagttgaagccattctaaaccagtcagaaccagcgatgaaaaattagaactggcataaaccgatacttattggtccaaactggctgtagctggtcagcactttgtaagtgttgtatatctgtgtgtgtatttgtgtgggatgtgtttgtgtgtgtgtcttctctttgtggtatctrgtgggacaaatgtgccttgtgcactggagggggtttctttcgtcaggcttccttttggtttacctctccttgtgtttctgcttgggctgtgtgtaatctgttttctgtgtggttccagcttgtgttttgttaaggcctgggcgaggtgggggcctgcttggcaccaggaggaataaaaatagccttgtctctggagaggccaacttttctaaaataaggtgacgataccacatccaac

SEQ ID NO: 777549 - DNA, 508 bp, Homo sapiens
aacaaagaccagaactggcataaactgattttggccagtcaaaacaggtccaagctggtcaaattcactatagtctcactaaataggttctggccagttgaagccattctaaaccagtcagaaccagcgatgaaaaattagaactggcataaaccgatacttattggtccaaactggctgtagctggtcagcactttgtaagtgttgtatatctgtgtgtgtatttgtgtgggatgtgtttgtgtgtgtgtcttctctttgtggtatctagtgggacaaatgtgccttgtgcactggagggggtttctttcgtcwggcttccttttggtttacctctccttgtgtttctgcttgggctgtgtgtaatctgttttctgtgtggttccagcttgtgttttgttaaggcctgggcgaggtgggggcctgcttggcaccaggaggaataaaaatagccttgtctctggagaggccaacttttctaaaataaggtgacgataccacatccaac

SEQ ID NO: 777550 - DNA, 626 bp, Homo sapiens
cttgatcttcctgttgagaatgagcaacatgtgggtaatgtcttcgtctctggaggccatctgtgcgacagtggagaggtggactattaagaaaaactgttgtttattttgtcatcacactacattgatctttgggctgtggatagattttcctggttagaagtcacttttctgtgggattttcaaagtatttctcttgtttcttcctaaactgcctcctcaaacacaaatattttctttctttcttttttttttttttttacatttctgtttttcggatattggttctccatttttttccctctactgttttctatttctttgctgctctctttttcaggaagctttgtcacatttgccttccagcccttcttttgagtttckcgttaccactatcaacattttaattcaacgttttaatttttaataactgtaatttattttctaaatattctttttgattagcatcttgttcttatttcatgggtataattttatttcttatgcctctggagatattgtgatagtgtattaggaaagtttagttttctgaatagggaatatatacacttcgttcaaaaataatattggtaaaatgggaataatagtaaaaaataaaaattaaa

SEQ ID NO: 777551 - DNA, 626 bp, Homo sapiens
tgatttgttctgtgggatgtgacttaccggtgtgtttttcacgtttataaagctgaatacttctgtatgtcagcttagcacccctagcatcagccatgctactctcctgctgtgcatagatgggggcctgtcccctgctgaatctcctgggttcctgctgtcaacacctgaargtacccaccagatgtgtctgtcacttccctccatccacctctcttgtgtttctcatgtttctgcctccctagagaccatttctctctagagcagtgctttccaatagaaatacaatgccagacacatacgtcattttagattttctagtagtcactttagaaaagttaaaaagaggctgggcatggtagctcacacctgtaatcccagcactttgggaggctgaggtgggcagattagctgaggtcaggagttcgagaccagcctggccaacatggtgaaacccgtcactactaaaaatacaaaaattagccgggtatggtagcaggtgcctgggattacagcctcccgagtaggctgagacatgagaatcacttgattctgggaggtggaggctgcagtgagccgaggtcatgtgcaccactgcaatccaaccttggcaacagagcaagact

SEQ ID NO: 777552 - DNA, 616 bp, Homo sapiens
cactgtatgatctacataagtgtgtcctctccaccaaggaccactcccctctcaaataaacatacaatcctagtaaaagctgtgtgcttgctgtgaaaatacagctggagaacaagcttccctatctgcaatcacactatactgaataagcctctgtactacagaaattctaaagcttcccagcctgcctttggaatcccggaccggtagcctggccattaaaatatttctttattttatggagtatttttactctacgtcttttctggccaatcattcagttagaaatcacatttcatggcaggacagggcaaggatttctgatggaatttttactatccaaatgatacaacacactttttttccctctccaaacactgttaatgagtatgtcagtgctggggtacaaaatctcctcatgaatattctatgttggttttggtttttgtttttatgstaggggatatcatcttcacagtctagcaccgtttttgacatttttaatcttctttccagaaacagagttgcaagattgatagcagagacataaccatggtgttttatgtgtcatgacacctttcatttacccttagtctaagaaaatatgagacatgga

SEQ ID NO: 777553 - DNA, 526 bp, Homo sapiens
aaactataggctaggagaaacgatatacaaatcatatatctcgtaacaaacttgtatccagaatacatatacacgctcacacatgcacgcacacacacacacactccgtctcgctctctctctttcagagctcaataataagaaaacaacctaataacagtcggcagaagattgaacagaatttctctgcagataacatatatgactagctaataagcacaatgaaaaaatcaataataattagaaaatgcaaatcaaaataattgtacaatagctaccactacatatatactcaaatgactaaaaaataaaattaaattaaaagctgaaaataccaactgctgggaagaagktagagtagctggaagattgatatattggtggtaggattataaaagaatgcagccattttgaaaaatagtttggtaatttattataaagtaaaacatccacttaccacataacccagaaatcccatatttacccaaataaaataataacctatatttacacaaaatctgtatgt

SEQ ID NO: 777554 - DNA, 585 bp, Homo sapiens
cctgtaggttcagtctagtggttacaaattctgtcagcatttacttgtatgagaagactttatttcttcttcatttttgcagcttcaggcagggtatgtttatagagaaatatacagaaaaacactgtatttcctttagtgtttttctttcagcactttgaatatgccatcccattctctaatcacctgtaaggtttctgctgaaaagtttactgttagtctaatgggatttcctgtataggtgactagayacttttctcttgctaattttaatattacttctttcactttaacttttgacattctgactataatatgtttggtgaagtcatttttgcaatgtctttgcctgggggtcaccgggtctcctatatctgaatgtctaaatctcttgctagagttgggaagatattattgattattcccttaaatagcttttctaaactttttaatctctcttgctgccgggaataccaataattcctaagtccagtcactttatgtggtttctggtgtcttgaaggcttcattcattctattttatccttttttccttatttttatctgacggattatttaaaagga

SEQ ID NO: 777555 - DNA, 632 bp, Homo sapiens
cttgtgggctagaaattgttagcttacctcctaataaatattctctccttttcttattagtaagaaagtgtttagctcagcaaatagacaacactgcattttctttttccattgaaactgtatttctgtgatgaattctatgtgtggaagtactstgaacaacaccctgattagagtcttagaaggaaattttctcttttcatcctgcttgctggtaagaataagtacctaatgttgagccataatggttcatgaaagaaagacaataactttgcaacggtggagaaaaagatagctacatcctggatccctgggaaaccttgtggagcagagccattattccatctgttcttcctacttccagattgatattaatgagagatataaacttaacttaaaccagagctattttggctcacagttacacctacagcttaacatatatcttacctaataaacaatacctcatctttgcttatcttttattaattattaaaacacacatttaaccaaattataggcagcatacaataaaagtataaatatgggcttttgacgctcctggtcctaacaattcacagaaaataaaaagcatagaagagcttgtaaaacacttctatgatgtattcaga

SEQ ID NO: 777556 - DNA, 588 bp, Homo sapiens
ttcctctgtgtttttcagaattcattgagctttcttacaacaggtattttgaattttttgtctgaaaaaacattacacacatctctgtcactttaagatcagtctctggaaccttattttgtccttttgtttatgggttatgttctttacgtttttttttttttttttttgagagagagaatctcactccgtcacccaggctggagtgcagtggtgcaatcttggctcactacagccctcatcttctgggttcaagcgatcctcccamctcagactcctgagtaacaggaactacagattctcacaaccacatctggctaattcttatatttccttcttggtagagacaggttttcaccatgttggtcaggctgctctcaaagtcctgggttgaagtgattcgcccactttggcctcccaaattgatgagattacaggcatgagccactgcacccagctcccttaatgttcttgatgcttgtagacatgtgacaatttctgtacattgtggtatcaggtattctttccagtccttgcagtttggctttgtttgttcttgttcttctttaattcttcagattctaagta

SEQ ID NO: 777557 - DNA, 536 bp, Homo sapiens
gctttaaaaaaaagaactcttctacgtgcctggagacgtttgcaagagaagagccttgcatctcaccaggcatctttctccctacctgaaagaaatgctaaggcctgcctctgctgctaacagaatagaaaaccaaagagtttctacaagatcttaacatgtctccttacacttgccatcttcttatttggaaattctgaagatagcaggctagctggagctattcayatgcacagagcaaagagaagagaatgcagttatgagatcaaagtgcccctctgccatataatgcagcaaggttatatgagcttcctttggccatatagacactttgcatgatcagctagaatggtcttcgaaggatattgcccaagagagctgcctgcaggatgagggaccacagcagaaaggggccgtgtgggatatatcactgaaaggcaacagtgaaagggagtcagaagcggtcaaagagtgcattttcttggtcagtatggcagatgactagttgtccccacaaaattattttcccttcttgt

SEQ ID NO: 777558 - DNA, 603 bp, Homo sapiens
taaaggtaatttaaataaaattttgttaagatttttccaacaaaggtgactctaaatttgaatgaattgaattctagtatcaaaaatgaattacattttaaagtcagaatatgtttcccgtaagaaaacacattcctggggaattgagatgaaaatgtttaacaagaccacagaaagataacacggccctgggaactctgtttcaaaaaaccacagatcagctctctggctgcccacatccactcttgggcatcatgaaacttgaataattctgcccattctraatgagggctccctcagccagtgacctcactcacctaaaagccttactattacctggaaatctcctggttccccttcccaatatctattactttaaatggaattctgacaaaacagaattcttcccattttctctttggcaggatatttcaatagctcatagagctggttacacattcctttaatcaatcattattatttatcactcaataaacacttttctccttttgtaaattctttaattaaaaattaaaggtattttgttttcttcatgtgtgaattaatcatgcaaaagcatggcaagcagcctaaaaagtttca

SEQ ID NO: 777559 - DNA, 557 bp, Homo sapiens
ttcagtgttgccagtgatacatatgttataggagctctatccttgagaagccatgtgtgaaagaatgacaattcctttcattttaatgtaaaatggaaagaatgtagaagaggaaacattcattgaattatgatagtacgctcartattttagtattgtaaattattttatttcatttgattctcatcctggaagtagatattattaattacaaccaatttaatcttttggggacactgattttcaggaaagttaagtagcttgaccaagatccatttagaaagcagtgaattcagccttaagttgcctaaaaagctattgagagttggtggctgctggtagatatgctgtgggactcttccacaccactgaattttttcaaggattatgtggtatataatgaatgttaaggcccctagcatagtgcttggacacagtcaaaattcagcaaatgttagtttctttctttaaaatgaaggcctccagccagtctcgtattaagcaagaaggaatgatctatttacatctccaacttcaacttcagactccttgaggat

SEQ ID NO: 777560 - DNA, 624 bp, Homo sapiens
cactagtttacagtcccaccaacagtgtaaaagtgttcctatttctccacattctctccagcacctgttgtttcctgactttttaataattgccattctaacttgtgtgagatggtatctcattgtggttttgatttgcatttctctgatggccagtgatgatgagcattttttcatgtgtctgttggctgcataaatatcttcttttgagaagtgtctgttcatatcctttgcccactttttgatggggttgtttttttcttgtaaatttgtttaagttctttctagattctggatattagccctttgtcaaatgggtagattttaaaaattttctcccattctgtaggttgcctgttcactctgatggtaatttcttttgctgtgcagaagctctttagtttaattagatcccatttgtcaattttggcttytgttgccattgcttttggtgttttagacatgaagtacttctccatgcctatgccctgaatggtattcccaggtttttttctagggtttttatggttttaggtctaacatttaagtctttaatccatcttgaattaatttctgtataaggggtaaggaagggatccagtttcagctttctacatatggcta

SEQ ID NO: 777561 - DNA, 659 bp, Homo sapiens
attaaatgcctgaatgtttacaccatacagcaaatatcccatactgggccccaacagatgactcagttggctgttaatgaacgatttggtcaaaggtgagaaaatggacttatattatttaaaggaaagaagagtgtcttttttttccttgaacaagtgcagggactgacraagattctttccttgatgaaactcttaagtagactctttcaaactctcttctcaattaaacgttgaattttgggcttctgtgttcatctttgcatcctttgtccaattttagcaagaatcctgctaacttagtttagccagccttaacctgtccatgatacttgatcaccctagacacctgacagagttcctcctccaccatcccccaggtgatgtctgatcaccctggcctgtcttcagcaagaagcctgttgggttggtttagcctgaaaactccttacctattgtttcctcttagtgatttttcatccagtgatgcccaccctgcttcttgtctataaattcccacttctccttattgtataagaagatgagctcattctctttctctcactgcagtggtccctacttgtattgcaatagtctcctcgaacaaagtcagccttgcagttctttagcaagtatcattgaataattgtttctttaac

SEQ ID NO: 777562 - DNA, 542 bp, Homo sapiens
tacctatcatttatctatccatctttctatcatctctatatgtggataggtgcttttttttttttttttttttttttttttttgccaaacactagttttcaaagatgaagtgctatttttaaagggactctattatcctggggaaaaatgtttacgtatattagtgaggaggaatttttaatgattaaraaagattatgtctgttacacatactaccatttgatatatgacagcttaactttttttttttttttttgagacagagtctcgctctgtcacccaggctggagtgcagtggtgcaatcttggctcactgcgagctctgcctcctgggttcacgccattctcctgcctcagcctcccgagtagctgggactacagcacctgccactacgcctggctaatttttgtatttttagtagagacagggtttcaccatgttagccaggatggtctaaatctcgtgatctgcctgccttggcctcccaaagtgctgggattacagagcaagaacatcgccatcttggacaagcccctcattc

SEQ ID NO: 777563 - DNA, 571 bp, Homo sapiens
aggttggtgtatgtggcatgtaaataatacattgatttagatggacttttactatgggggaaagctcatcaagcctcacgtaatgagttagtgtctacccttttctttgaaaatttcattttcattacaatgggttttgggcatttgtactttgttatctcttcaagttcatacaattaaartggaactcgacttcttttgcttggagatactaaaaattctgtgcagtggaaggaactgtgacctttcttaaatgggtccatcttctagctcaaaaaaataattcttagatggtgctttaacgcctagttttagtgcaagacagattgtcagggtaataaattaaaggcacctcactgcagcgctgttggccaatgttctaccacaggcccatattaatattttattccctttaatattattacatgatgcaggctttatttaaatggatttgatgggtctcttggttggcttgacaaccagagggaaaaattaatgttctgcatttaatctcagctcaaggcactaaattattttggaggtcaaaatcgtcatgcatatcatgctaaat

SEQ ID NO: 777564 - DNA, 541 bp, Homo sapiens
tactggtataaaaactgacatatggaccaatgaaatcaaaataaattcacacatctacagtgaacttatttttaacaaaggttacaagaacccacactggggaaaggatagtcttttcaataaattgtgatgagaaaactggatatccacatgcggaagaatgaaactagatctctaccattcaccatatatagaaattaaataaaatggattaaagactaaaatataagacctaaaactatgaatctgctagaaaaaacctggggaaatacttcgggatattggtctgggcaaagattkttttttgttttaaaaacaagacctaaaaagcacaggcaacaaaaggaaaaattgacaaatgggatttcatcaatctaaaagcttcagcacagcaaagtgagaaattaacagaatgtagacaacctacaaaatgggagaaaatatttgcaaactattcatctgacaaaggactaataatcagaatacataaggaacacaaatgactcaataggaaaaataaacaaataatccaattaaaaaa

SEQ ID NO: 777565 - DNA, 624 bp, Homo sapiens
ttggctacatgtatgtgtttttttttgaaaagtgcctgttcatgtcctttgctcaccttttagtgggttgtttcatttcttttcgtgtaaatttaagttctttatagatacagggtattagagctttgtcagatgcatagtttgcaaatattttctcccatctgtaggttgtctgtttactctgttggtagtttcttttgctgtgcagaagcccgtaagtttaattacataccatttgtcagtttttagtttggttgtgattgcttttggcatcttcatcatgaaatctttgcccatgcctctgttcagaatggtattgcctaggttgtcttccagagctttcttttttttctgtttttttttttttttttttttttgagatggagtctcactstgttgcccaggctggagtgcagcggcacgatctcgactcactgcaagctctgcctcccagttcacgtcattctcctgcctcagcctcccaggtagctgggactacaggtgcctgccaccatgcctggctaatttttttgtatttttagtagagacggggtttcaccgtgttagccaggatggtctccatctcctgacctcatgaacctcccacctcggcctcccaaagtt

SEQ ID NO: 777566 - DNA, 624 bp, Homo sapiens
ttggctacatgtatgtgtttttttttgaaaagtgcctgttcatgtcctttgctcaccttttagtgggttgtttcatttcttttcgtgtaaatttaagttctttatagatacagggtattagagctttgtcagatgcatagtttgcaaatattttctcccatctgtaggttgtctgtttactctgttggtagtttcttttgctgtgcagaagcccgtaagtttaattacataccatttgtcagtttttagtttggttgtgattgcttttggcatcttcatcatgaaatctttgcccatgcctctgttcagaatggtattgcctaggttgtcttccagagctttcttttttttctgtttttttttttttttttttttttgagatggagtctcactctgttgcccaggctggagtgcagyggcacgatctcgactcactgcaagctctgcctcccagttcacgtcattctcctgcctcagcctcccaggtagctgggactacaggtgcctgccaccatgcctggctaatttttttgtatttttagtagagacggggtttcaccgtgttagccaggatggtctccatctcctgacctcatgaacctcccacctcggcctcccaaagtt

SEQ ID NO: 777567 - DNA, 627 bp, Homo sapiens
ttcacctggaagggcaccacccatgtgtgctgaggttctcagctttgtgttttccaagcacgagaaacaccacacagctcctccctccccaaaccctactcctctcccttcgctcacttctgtctcctctttcagcaagtcaaacatgttctccatgtcaatgaagttggtctggatcatcctgcaaaaaggtgctggttaggacttctctgagtagccaggaaataataatgtgccctggacaggtgagggccagggctcagattacctgtagtaggtgccaaaccaattgaggggcatgtacagctggataatgtaggtgccaaagagcacatagtccccaacctgtggcaatcaaggaagcagagcatgtcacggggggcctgcaggccgctcttcttgtgtcaccctgcccacttcctaccgaagagcctggtgaccagacacaggccycaggcccccttttccttgtgccccactctctcatccaagatcctgcctcacctgtagcttctgctcagtgacaaagtatgcgcaaagcagggagccggcgaggagcccgagcccaatcaccaggttctgggtctgatttagtaaaaccagtgaagcgctcgacttccactccaa

SEQ ID NO: 777568 - DNA, 509 bp, Homo sapiens
ctgccctgtaacacagggaacaagaagaaaatctagctttgtccagcccaggaagaacagccaggagtgagatctgaatccaagaccctgtattatatgccttgtgaacagtatcaaaactgtcagaaggctctgccctccttccacacatcttgaagagctgagtgtccgtccttccacagcagcctcctttcctgaattctctaagttcatccaragttgaatcctgagttcagtctaatccatccaaatgctagagagtgaaagataggttttggctatcaaggacaccagccaacagttaagtaaagagcctatgtctttgagcaagcatctaagcacccttggattcatgtgtttgccttttcctagggtctatttgttagattatctgtccatttatttgtgttactactctagtcatccacaaaaaagtacccaggcaggaggcacgctcagaactaaacttctaaaaattcttttctagcacttaccaaatacattttaag

SEQ ID NO: 777569 - DNA, 548 bp, Homo sapiens
gcctgtgtcaaagtcccattctgggcaccagagggtgggatccattccacctgaattaaatagactgaggcagtggagtggtggctccctaaggaaattcaagatgccatttcaagaatgagggataaaccccaagagtttccttacctaaatacctgtttccttctctttcagagggacctcccagtgagcactcaggcatrtcccgtaacgccatcatcttcctggttctgggaatcctggtttttctgatcctgctggggatcgggatttatttctattggtccaaatgttcccgtgaggtcctttggcactgtcatctgtgtccctcgagtgagcatcaccagagctgccgtaattgagcacctactacgggctctgtgctgagtccttccagtgtgcctctcactgaatcctcaccccactgccatgaggtttcccccatttgactgatgagggtgcagagccagggagccttgttcactggttcattgattacatttacaaatattatttacagagtgggagaagagcgtatagggtcttaa

SEQ ID NO: 777570 - DNA, 561 bp, Homo sapiens
gctgttaatcattgattcttttcaattagggcaagaacaagacgtagttttttctcccaagtaaaggtggatgtctgtctatgtgggctttttcttcaatgtcatcttgttgtttcttaaaataagttatccatttgtaaactgttgatttctttgagacattgycttcataaactttttgtaaaatatcaaggatttcattattcttccactcaagcttcatattaatttgatgtttttttcttgcttcaattttgacagaaaatatattgctctgataggtgctttttttcaaactaatatcttatttttcttagttcctcgaacttgatcctgttcagatatgttataaaaagttagtacgagtttattttgtggaaaaaaatgaaatctatgcactgtttctttcataatatgcattttcacgaacattttgaagtcctctcatacttaattttggcctgaagtattttctttaatatttaagatgggtcagctagtatcaaattctctgtttttatctatctgggaaagtgtttcttttttgtttgtttgtttgtt

SEQ ID NO: 777571 - DNA, 439 bp, Homo sapiens
tgataaaatatttctgactgaaactagcctacattaaatttgcaccacctataactagactacaggaatgaccccttaattagtgtatgcccatcatcagggctgctacactcagttccatagtccattattatctaaaaataaaatataactaggccacctccctccacattcaaaatytgttggtgtttgcacatacaagctaaagctcaaccttcatagcatccatacaagcttcttgctcacctggaccttgccttcttctccagcctcatttttcaaggctccccaaccctaccctcacctgtgccccttgctaggagctttttcctctgagaatctcaaagtatggtactctgagctgaatttacttggtgtgactgaggtttcatcagacttatttctgtttcaaagcagacaatgtttctctttattacat

SEQ ID NO: 777572 - DNA, 483 bp, Homo sapiens
actttaataagcttggtcctttagaggcttgtttctaatttttgttgtcatgagtctaaagtagccattactatgggactagtttagtcctgtaacttctttttttcttcccttctgggtcatttgttggatgtcctgtgtgttccacaagctctctccactttgttgctatctccaatatctcccagctatgtattatctctaataatgctttagcttacagatctctagtagttatttcttgctctttttgggatagtcttactgtgcaagaggagcttcgatatttggcwaaagagtcaagaagacttaaatgcagatttaaagagctttttatctatatagcttcttattgagacactggcttacaaattccagctgtcacagcattcctaaaccctaattttttttttctcagctcagtgaaaccattgtgctttgtgtttgcttttcatgtgtaaaggttcagaaaatttctccaga

SEQ ID NO: 777573 - DNA, 477 bp, Homo sapiens
acttagaaaaactggaatagtgggtagtcaatgttatgagaaatgtagacatgttgatgaattttagctcaatgtcataccaaagttttaattttttaatattttcttgtaattaaatatattaccttgtgtaattaataataatcttcaataagagatacagtaacactctgttagtaatgctgagaaaaaaaagttctcatataaacaaaaargtgaattagagggccaatgaaattcttcaaaatatgatctgtagaagtggaggctaaagatgaatgtgtacagaatctggataatgaaagtaaaattgccccctgtatgagccttgtgtactataaaacatccatttcttatccatgatcctggccacttgggaacatggctgaagttagaaaacaatactttcactgtactcagtataagtggcctgatttatcacctccccacttttcgcaccatagaacatattagctg

SEQ ID NO: 777574 - DNA, 547 bp, Homo sapiens
tggcctgatttatcacctccccacttttcgcaccatagaacatattagctgaagtgagaatgagtacagttctcttattcatttgtcaagagtatcattctgtccatgttctggtgtaggaaattaatatcattagagaagaagaaaaggttctgttattttccaattctagtcatcatcctagtatttccytgactcaaagtaatgtagcaatttcaattacctactggctagtattgagatgattttacttacaactcatggaaatattttgttttgtttatttccattttggaattggaattctagaggatatttatctccctgtgtttctgcttgactactttccttgtgtaaaaatatccaaattatttgtttaagttccccactgtcagaaaaggttatgtaaatgaatatgtgacctatatataggaagtagtcccttatggtttaatccctcttacaatcactgacttaataaaacaaatccttgcaggaaatgtgatgctgacctacctttcaaaataatgtattaaaaaacagccct

SEQ ID NO: 777575 - DNA, 547 bp, Homo sapiens
tggcctgatttatcacctccccacttttcgcaccatagaacatattagctgaagtgagaatgagtacagttctcttattcatttgtcaagagtatcattctgtccatgttctggtgtaggaaattaatatcattagagaagaagaaaaggttctgttattttccaattctagtcatcatcctagtatttccctgactcaaagtaatgtagcaatttcaattacytactggctagtattgagatgattttacttacaactcatggaaatattttgttttgtttatttccattttggaattggaattctagaggatatttatctccctgtgtttctgcttgactactttccttgtgtaaaaatatccaaattatttgtttaagttccccactgtcagaaaaggttatgtaaatgaatatgtgacctatatataggaagtagtcccttatggtttaatccctcttacaatcactgacttaataaaacaaatccttgcaggaaatgtgatgctgacctacctttcaaaataatgtattaaaaaacagccct

SEQ ID NO: 777576 - DNA, 637 bp, Homo sapiens
tatttggttgaagtatgtactctgcctcagcttacctcccttcttccttacccaaacatgctggagtaaccttagcatatccctggagtttaagggctatgctgaaataatcgctgttctgtgtcatctctggttaaatttctccaagctggctcaggactcccaaaaacctctctttcagcaggtaaagctctcaagacgtaagatagtatggcaagaaatyagtagggatagaagaaattatttagtttcatcttaaatgtttatagcatattgcatcattaaacttttacatgaatttgtttgggatagttttactaatggtaaaaataatatctttacattgagctaaatttgcctccatgtaattcctatggattgtttcctaactgaattgcagggaagaataatgtaagtgtaattcttccaagttacaaatttttaaatatttagaagtgaccatctcaccccagttttctgttttacatgaaataattacaggtcctttacctgtctattttatggcatcagttctgcagcctttatcttcctcaataccttttgaaaatatggtacctagaaggtaatttaatttcccaggtgtgctctgagcattagattaggaatgctctccatt

SEQ ID NO: 777577 - DNA, 628 bp, Homo sapiens
ttcccatcttttcactattgtgaataatgtgctataaacatccaagtacaagtttttgcttggacatatgttttcacgtctccaatgtacatgtcattctaatgggcggaaagagctattccactgtggtttggatttgcagttcccttatgattaatgacatgaaatacttgcaagtgcttattggctttcatatatcttccacggggaaatttctattttgatcttttacccatttttcatgagatttttgactttyttatttactttattgagttgtaatagtatttaatatagataaaactttcagatcagatatatgatttgcaaatattttcccattctgcgggttgccttctccctttcttaataatgtctgttgaatggaatactatgcagccacaaaaagaatgagatcatgtccttttcaaggacatggatggcgctagaggccattatccttaacgaattaacacagcaacagaaaacgaaatactgcatgttcttgcttataaatgggagctaaattatgagaacacacagacacatagaggggaacaacgcacacgggggaccctcagagggtagaggttgggaggtgggtgaggatcaggaaaaataagtaatg

SEQ ID NO: 777578 - DNA, 629 bp, Homo sapiens
actttgatatgctaatgtgcaatgtgagtcttcctgaaggagagataatataaccaagaggttttctctcttgggcttgttgtgggcaagcacaggtttcaggtcagaaaattcccttgggttgcgattttagaagctgtttcttatcactgatgtctcttccctggcacttctcacttggtgatgaggcccctactcactgtattgtaccttaacaagtgaaagtccagaaagtcattgctcaataggctgttgctctctctcgctctttgactctmtaaccctcagcctcccagaaccaccacttcagaaaatcaacgttatgtttgtgtgtgtatacatatacgtagctttctttactgaaggactgggtgattttatttattcattttttcttcctatttatttgtttttatttgtataaaatcataggataaaagtgcaattttgctaaattgatatattgcattgtggtgaactcagggacgtcagtgcacccatcactggagccatgaacattgcacccaccaagcaaccgtcaatcatctacccccgtcccatccccttcccttccaagtccccattgtccatcattccacactctgcttctgtgtgtacatattatttag

SEQ ID NO: 777579 - DNA, 512 bp, Homo sapiens
aaatcagaaccccttttccagaaagccggccataaaacctaaaaatgttctatgtaaaaactggccataaagaaatcttacttaacttgtttgactgtgggtcataagacccccattccagagagggtcctatccgcacctggaaagaaagaatgcatgttcagagaggccaagaagagtctaggcaggcattgctgggtttttccactcagcctgttagcawgagatcataccctttttgtgtaatcacttttctacatagctgtccatactttgttgaacctaagcacaaaaatgggcaaatttcccctgtgtctttgggtcttcattctgaatcctcctgtgtatacacgttaaataaatttgtatgtcttttcttctagcaatccatctgccttatgtcagtgatttttcagcaaacatttagggggccaagtttcttagctcctacagagacttacttggtaaccagaatgttctcctttcttgagttattttgcatacaactatat

SEQ ID NO: 777580 - DNA, 587 bp, Homo sapiens
gcctccttatgcaatttggtcactgtgtgaacatcatagagtgtactgatataaccctagataacatagcctaataaacacatagtttctatgatagagcccttggctcctaggctaccaacctatactgcatgctactttactgaacactgtaggcaactgtaactcaatggtgtctctttgtgtatctaaacatattaatatagaaaagttacagtaaaaatatgatataaaagataaaaagagggcacttaacatagatggagtatgccggcatgraagttcctcttagtgagtcagtgaatgagtagcaagtgaatggaaaggcccggggcattactagacactatgtagactttgaaaacattggacacctagattatattaattttttttaattttttattcagtaatgaattaaccttagcttactgtaacttctttataaacattttatttattttaatttttgactcttgtagaaacacttagcttaaaacacaaatacattgtacgactatagaaagatattttcattctttatgtcctaattctatggcatttttctatttttaattttattttac

SEQ ID NO: 777581 - DNA, 677 bp, Homo sapiens
ctggaatgagccaccgtaccctgccaggttttcaatctgtctgactattgagctaggttacagttcatccacaaggactgaaatatggaaggacagagtccttctcaggccatatttagtttgctttaacaattttccccttttggtcattttctcaattttgagagaatgaccataacctttagtatcattatcgtaaatgtacttctatggttttgaacctcactggaaacaatagtgggttttgcaaggagggaggactaagtagagggtacctccttaggctggcacattctgtttacaggagaaaaaacaaaacctggtctgttctaggatctatgtattttcttgaagccttagtttgattatgtcacatttagcatgagtgactccattttagtttggtttggtttgttggggactagtgcatacgctcagttcaaaataatggcctccaataayttggttttaaaagatgcccccctttttgccaggttctcacttaggtgagagtgtgaccaaaacttagggccttagcaccactctcagttaccatcattttgggtttccagtctcagtacgtcagtcataggatatggtgtcctcatggtggcacacttctttcagcttttgtcattccagttggagaaaaatcatttgacatccgggaaatggat

SEQ ID NO: 777582 - DNA, 576 bp, Homo sapiens
acaacccacagaatggaagaaaatatttgcaaactatccatctgacaagagattaataaccagaatatgtaagaagctcaaacaattcaagagaaaaaaataatatgatttttaaaagggcaaaaggtcagaatagacatttctcaaaagaagacatacaaatggcaaacaggcatataaaaacgtgctcaatatcactaatcctcagrgaaattcaaatcaaaactacaatggaatatttcacttcagttaaatggcttttatccaaaagacaggcaataatgaattctggtgtggtgcaaagggaagcttcctacaatgttggtgggaatgtaaattagtacagccactaagatgttcctcaaaaaactaaatatagaactaacatatgaaccagaaatcccactgtgaggtatatagccaaaagaaagcaaataagtatattaaacagatatcttcattcccacatttattgcaaaactattcacaaaagccataatttggaagcaatgtgtctttcaattgacgaatagataaagaatatacacaatagagtactattcagccatacaaaat

SEQ ID NO: 777583 - DNA, 630 bp, Homo sapiens
aaaaaaaatacatcatgatcaagtgagaattatcttgggaatgcaagaatggttcaatatacacaaatcaataatgtaatatgttacatcaacagaatgaagaactaaaacaatctgatcatcataatcgatgcagagaaaacatttgataaaatttagcatccttcattttaaaaactctcaacaagctaagcatagaaggagcatacttcagcataataaaggccctatgtgacaaatccacagataamatcacattgtatggagaaaagctgaaagccaggtgggggcggggccaactggaagcagaggtgatcaaggctcccatagaaaagaaccaaaacagcgtgggaatcctgcacaggcaactgaggtatccaagttctgtcatcaggactgactaggcagctggcatgacccacagagaggaaggaagagcagtgtggtgcggcagcccacctgagagccacacccccagcaaagggaggtagtgactgaacatactacccagtctgggaaactgtgctttttccacggaaatgtgcaacccatggttcggaatatcccactcatgatcctaccccaccggcgccttggatcccagccatggagctgcacagattctcaaca

SEQ ID NO: 777584 - DNA, 534 bp, Homo sapiens
ctctcatacagacaggaacatacacacagataaatatacaaaaattcaagacagttttctataggaggtgtatagtagagattgtatgataaccaacagagattagtaaaataaacttgaatatccttaatgcaatacatcacagtttttaagtaattttgtacttcttatttaactcttctaagtagagtacatatgaagcttcacttatatattaaacctacataactgttcttaaaattaaagttaaaataatkttaaatattggatgtttcagtcccagggttattttgatcatatataatttttatggatattatttttttcaatttccctttaagtttttaactttgaaattattccaaatatggtgtgatatggtttggatatttgttctctggaaatctcatgttcaagtgtaattcccagtgttggaagtggggtctggtaggaggtaattagatcctgggggtggattccccaggaatggcttatcaccatccccttggtgataagttagttcttgctcagtta

SEQ ID NO: 777585 - DNA, 534 bp, Homo sapiens
ctctcatacagacaggaacatacacacagataaatatacaaaaattcaagacagttttctataggaggtgtatagtagagattgtatgataaccaacagagattagtaaaataaacttgaatatccttaatgcaatacatcacagtttttaagtaattttgtacttcttatttaactcttctaagtagagtacatatgaagcttcacttatatattaaacctacataactgttcttaaaattaaagttaaaataattttaaatattggatgtttcagtcccagggttattttgatcatatataatttttatggatattatttttttyaatttccctttaagtttttaactttgaaattattccaaatatggtgtgatatggtttggatatttgttctctggaaatctcatgttcaagtgtaattcccagtgttggaagtggggtctggtaggaggtaattagatcctgggggtggattccccaggaatggcttatcaccatccccttggtgataagttagttcttgctcagtta

SEQ ID NO: 777586 - DNA, 621 bp, Homo sapiens
aatcggatcccacgtctcccatgtttcgtcttcctatatttaagcatcaagtccagtagtttaaacctcttaatatttcctaagtcttcatcatttaactctatgtttccactactactgacttattctatttatttgtctttctatcacagcttgcttagtattctgtctttaagtacaatgtaaactatcttcgacagcctggctagtgattgtttaaattgcattactgataatgtcaaatttaaaatatttctttctctcctcatcacttcttagatcaactgaaagtttctaaacatttctcattaaaatatgacatgatttggtgctaggatctggtgcccagccttggatctcataactctactactccacccacttccccccaacctcctccaccctgatcccacttaagtttaggcatatagaactacttgatattccatggcttcatgacatgtcaggttyatctgttgattagtgatagggaaaagattataacacagaaatttaccttttcaatttagaagtctctccagtgtgccgcagtgttagttttatgtgtattacccacatcatgaactgccttgataatctttctaatgctgtcagttgggt

SEQ ID NO: 777587 - DNA, 655 bp, Homo sapiens
ctaccaagactgaattacaaggaagtggaaaatctgaacagagcaatagcaaaaggagattgaatgagtaatcaaaaaaatctcccaacaaagaatattccagaaccagataatttcatgaataaattatgtcaagcatttaaataatgattaatccaatctttctttaattcytctaaaaaaattaaagagggagacaacttcaaaactttttcataaggctagcattatcctcaaagcaatgccatccaagaacactgcaagacaagaacactacaggctgaagaacttgataaagatggatgcgaatttcctcaaatatattagcaaactgactcaacagtacactaaaatgatcatctaccttattcaggtaaaatttattcctgggatgcaaggatagtttaacttattcaaatcaatacaagtgatactccttattaacagaatgaagggctaaacgtcacatgatcatctcaattgatgcagaaaaagcatttgacaatattcaacatcctttcatgataaaaactctcaacaaatatcgtatagaagtaatgtgcctcaacacagtaaaagccatgtagacagcttacagttaaaattatattcagtagtgaaaagctgaaagctctttaggaaaacaagtgtgccc

SEQ ID NO: 777588 - DNA, 622 bp, Homo sapiens
gcttgcaccctcaacctcaaaaagttccagtcactcaatgccagcccatgagagcaactataggggctgaaccctgcaaagccttaggggcagagctgctcaaggctttgggagcccacttcttgcatcagtgtgccctgaatgtgagacatggagtcaaaggagatgattttggagttttaagattgaataactgccctgcccggtttcagacttgtagagcctgcagcccctttcttttgaccaatttctcccttttcaaacaggaatatttaccaaatgcctgtactttcattgtatcttggaagtaaccaatctgtttttgattttacaygctcataggtcgaagggactagctttgtctcagatagactttggacttttgactaatgctgaaaggagttaagactttgagggactgttgggaaggcatgattgtattttgcaacatgagaaggacatgaaattgggaagggtccaggggtggaatgatatttttggatctgtgtccccactcaaatatcatgttaaattgtaatccccagtgttggaggtgggccaggtgggaggtaattggatcacgggggagggtttctcatgaatggtttagcaccatcccctt

SEQ ID NO: 777589 - DNA, 615 bp, Homo sapiens
ctggtctctttgctgactctctgtccactatttcagttgagaatgtatttagctgtaggtaacagaaaaccaaatttatagtgacttaaacaaatacggggtcatttttctcacctaacaagttcagcagtaggcaagagtcaaagggtcaatgatgttgacaagtacccagaccaggttttttctgtcctcactctgccagccttagcctgtcccgtcatggctgtgaggctcctgcactctcaggtgtcctctttacatttcaggcagggagaagggcagagagctgcgccasgtgactgtgtccctttttatcagcaaagacaaactttctccgaaggtctcccacctctccctcactggccagaccagggtcttgcggcccatcctcaacagagaccaggaacaggagggaaactgctgggtcagccccaaatcagcatctgccccacctgcactttctgatccatcttccatgtaacagctaggataattctttttttaaagttttatttatttatttttgagacagtcttgttctgtcactcaggttggagtacagcgtacttcactgtaacttcaaacttttgggctcaacagtcctcttacttcagc

SEQ ID NO: 777590 - DNA, 615 bp, Homo sapiens
ctggtctctttgctgactctctgtccactatttcagttgagaatgtatttagctgtaggtaacagaaaaccaaatttatagtgacttaaacaaatacggggtcatttttctcacctaacaagttcagcagtaggcaagagtcaaagggtcaatgatgttgacaagtacccagaccaggttttttctgtcctcactctgccagccttagcctgtcccgtcatggctgtgaggctcctgcactctcaggtgtcctctttacatttcaggcagggagaagggcagagagctgcgccacstgactgtgtccctttttatcagcaaagacaaactttctccgaaggtctcccacctctccctcactggccagaccagggtcttgcggcccatcctcaacagagaccaggaacaggagggaaactgctgggtcagccccaaatcagcatctgccccacctgcactttctgatccatcttccatgtaacagctaggataattctttttttaaagttttatttatttatttttgagacagtcttgttctgtcactcaggttggagtacagcgtacttcactgtaacttcaaacttttgggctcaacagtcctcttacttcagc

SEQ ID NO: 777591 - DNA, 608 bp, Homo sapiens
tcacatctcttctttatttggaaagagtcctctttactcctggctacccattctgtaaaccgcccctcccgctgaaactacccttcctgcctttgccgcaccctgacatgcccaaacatgccttgtactataacagacagcctctcccttcccacctaaagagacagattcaattttaaacagtagccaatcaggtcagtttagattttgccatctgactccagctaatggggacaggacacagaggcagtgactaaccacrttagggataaaaaccccttccctcctttgttcggtgtgctcttgctgttgtgactgatgcaggcagcaccattctgcagaagcaatttgccttgctaagaagtcttttgtttgagtgctcattttctttgcaactccgagcccttgtttctaacacagagaacaaatgatttcagcagattagccaaaaatgattaggatctaacctagggaagtgaaggtggagatggagaaaggcaaaaagtgacagaaattgatgactgagtccatacgatgaagtgtttaacagcagaagaaattgtaaacattaatttggatatttacttgttctagatagtgaattaata

SEQ ID NO: 777592 - DNA, 564 bp, Homo sapiens
gctgtttgtgcaaggactaagttctcttcaattaacaagtaatggatcctgccaggactgaatccttcctttcaaggcagctggttcccctctggcctaggttgtttctagaaatgtgaaatgggaatgagagcctgcaacaggggcctcatgactctaaccagtgccctatcctgctgtggttgaactggtatcaatgatacatgatagagtcctcctctgtcttccctttgctctcctcaagtggaaggaaggggtctcttttggagctgcaagctgtgcagcctggagttagggaaggcgtgatgccatcccagctggtgtctcagtaggtcacatggcccaccccaccaattcactkcctgtttacccagttcagcactaggacacacctaagaatttcagtccttatggcatagactgctttcaagtttacttagcaacccagagtgctttgtcccttggtggcaaggtttgcagaaactgaagtttgggcaactggcactggtgactcccctctggctaggactggtttaaatgctccctctgtgggtgggcatcagc

SEQ ID NO: 777593 - DNA, 506 bp, Homo sapiens
cttccttccttcctcctttccttcctcaggagaaaggcctctctctccgtgttcacagcggaccttgatttaaatgtccatacaattaaggcacgcggtgaatgccaagaatggggctggctgagcaccgtgggtcggcgagggcccgccaaggaaggagcgaccgaccgagccaggcgccctccgcagacctccgcgcagccgcgggcgcgaggggaggggtctggagctccctccggctgcctgtcccgcaccggagcccgtggggtggggaggtgtgcagcctgtgacagacaggggcttagagatgcaaasagactcagggagagaaacagaagctgattctgtgacagaagcagatctgtgcagcacagatgcggtgtgcgtggggagggggtcgcctgggagcgcattgcggagtgcttgtgtgtgcagatttttctctgggctcaggactcattgtatgtgggtcaacaccttcctccgtgactgtgtttttgttctga

SEQ ID NO: 777594 - DNA, 487 bp, Homo sapiens
ggcttccaagtgtgggtatcgtaacatcttggtcaggaatgatctcttcctcgccatagcattgatgctgatggatttcaaatttacatcttctgccccgacctcccactgtgtttcagacctgaacagcctgctgcctaaggaatatcaatcccaccccataggaacccaaacgtgaatgcttccaaaaccaaatttgttgtgtttgctgcttcctagctgctttccctcctctgtggtctatctcagtgagacactcagcraatctcagggacacctgcccccacctttataagccagaaacctgtgaattatcctaaactcctctgtatgtgtaagcttttatatccaagtcacaaggacctgtgtattatacttgctcaatatttctcaatcccatgcccacttctccatctttattaccactagtttcatctgcaaacccttgtaatgtcttgtctggaatatattactagccacctaactg

SEQ ID NO: 777595 - DNA, 538 bp, Homo sapiens
tctccttcttctctactggacaaatagctatgtactactttatgaatcctttctatggcatcttgcgttgccaattagatgtcttattgcacggaactcgcacaatctgtctcatctccccatgtagtgagctcacagcacttcaccaagagtgctgcccaccaagaactcacagcacttcaccaagagtgcagtcaatagtgttttatgaacgttgggaagaatatggttaatgcctgagaacaaagaccagaaatgtcatcttttcgtgtgaccatcatgatacagagaagttaacagagctgccccattgtccatggggcatgttcygagtttttccagtagtggtgatagattttggctgatttctctgaacttttccctgagttatttttgtgactttggccaggatgaagggtggggaacccctcatctttaaatctctgagcagagacttgctaggcatctgcagcagtggtggggaagaggtcattaagctcagtgcagtccacgtggggccttggcctgcgatcttcag

SEQ ID NO: 777596 - DNA, 575 bp, Homo sapiens
tttctttctttatttttttagacaaggtcttactctgttgcctcacctagaatgcagtggaaagattccagttcactgcaacctctgcctcctgggttcaagcgattctcttacctcaatctcccaagtagctgggactacaggtgcctgccactacacttggctaattttttgtatttttagtagagacggggtttcatcatgttggccaggctagttttgatctcctaacctcaagtgatctacctacctctgcctcccaaagtgttgggattacaggcatgagctaccacacctgaccctttttcytgatcttttaaacttgatggggcaaaccatggctctcatgtaaattccaacttacctgtaacagtgccagtggtgtgatagccttagctttcacgccaggcaggagaagagaagagagggagcaggttctgccacaggggtggaggcatcagcctcactccttgtctgaccctacagagaactgtccctgtcccctctctgctctcccactatgatcctggggaggagaatgagatcatgtctgaaaagtaaacagaacttcttag

SEQ ID NO: 777597 - DNA, 730 bp, Homo sapiens
acctgactggagctgcagaggggtggagcttctggggaaaggatccctcctagggggagtgtcttgggcctggggccacgtggcagggacagagacgggtccatggcagtgtctgctcttctctgtgaaggcaaaaagcctctgagggagtattacagccgcctcatccaccagaagcatttccagcagatccaggtctgcaccccctgactgcagggccaaggactacccccgcttctaggtgagaggccagcaggaggctcagggaggaggcggggccttaagcagggggagcaggggtgggcatgatgtactttttctgaaaaggtggctctggaggccacttggggacaggacmtgggctctggctgaactcccgggaggaggctacttcctggtgtgccagcccctccctgccaggtcgccccagaggccctttaccaaggggtttgaggaggccacgtcctttcagtctgccacgccctccattgcatcctcttccttcctccaggaggctgggcctgggtttggggccactgttgcccaggtgggggagggcagtggctttgggaggaacagggacgatgtgtcaaacagcatcgcctctcccagtgagatggttctcctttgcctccgtctctttccccattgatttctccaagtggggagtcatggcttggtcctgatacgtctctagagctgcatcttccagcttcgagtgagcagagca

SEQ ID NO: 777598 - DNA, 622 bp, Homo sapiens
gtccccatttaacaaggttttctggccaaaactgtgcacccacatcattctaatgaactggctgtccaataaaaaaaaggactctcagtcttcccataaaagcaattttgcgtgcatagaacacctctatctgtgactatccctaatgaggtacagaaagacccttcttatccaaacagagacattccactggtgctagacagccacagacggaagttttctctgcctcctggaaatgaagcccaactytcttctttcttcagccgtgaggattgctgtcctcctcttcaccattttcttctttatgagccaagttctaccaggtaacaaaataaacttggtaagagtagagtgcctaacaccttacagggattcaatactcaaagagaaatcaccatcacctgtgaccagaaaagggggtctcataggaaatctggaagacacattggctgagaggcctgcagccatctaattcgttaattctccatagcaactcagttaaatgaagtcaatggtgtttcaagtctttgaaaccctcttattccatctccatattaggcaagtttactagcagttactagaccgcaaaaattaaaaatcaggcattattctactaaatttt

SEQ ID NO: 777599 - DNA, 594 bp, Homo sapiens
tgaagccatctagtcctgggtttttctttgtcaagaggtttttgattatgttgttagtccccttactagttatagatttgtttagattttctgtttcttcatgactcagtcttcataggttgtatatttttgagagtttatccatttcttctagtttatccaaattgttggcatataatggttatagtagtctcttataacaatttttatttctgtggcatcagttataatgtctcctctttcagttttttattttatttatttgagtcttctcccttttattcttagtccagctaagggtttgtcaattttgttgatcttttttattttttattcctattctttatttcatttatctctgctctgatctttatcrttcgtttccttctgctaacttttggcttagttttattttttctatcttcttgaggtgtaaaattaggttgtttacttaagatccatcttcttattaaatctagacatttaccactacaaatttctctcttaatactacttttgctgctacccataagttgtagtgttttgtattttcatttttgtctgaagatatttttgaatttcccttttaatttc

SEQ ID NO: 777600 - DNA, 692 bp, Homo sapiens
aaaaaacagttacctctcccagtctttataaactagctttatactgagaaagacattcactaattagcccaactggagattctgtgggcttctcaaaccttttctgtgaatatatcttctctaaacttgtgcatatacatttcccattagagaggttttgtcaggttctcttgctctgacaagtgagtgtcacaaatttccgtaccggtttcaatgcagttgatttcacmctcacttgggatgcatgaacctcttaactgctctctggatttctaacaaagataatttgtctgtgtattgttattgaatcagtgtctccactggggaaggaggtaatggagctttctattttggcatcttgctgatgtcctccctcaaagcataattaattgtataaataagaacaaatttctctaaagtatcaaatagttattagagcacacaggttacaaaagggtatttttgatagagcaaagttccatccttccttttctacctctcttttccaacttacactgtagttgaacttggggtttggattgcaaagcaaatttctaaggaaaagggaccttacaaggaaattttagaataagtcttactgatatttttagagcatccaaaataagtctcttgggaagtaagtttctaaaatttcatcactcagtcttttcttcatcactcagtcttgaagt

SEQ ID NO: 777601 - DNA, 554 bp, Homo sapiens
ttggttccatatgaattttaagatttttttctagttctgtgaagaatgttgatggtattttgatgggaattacattgaatttgtagattacttttggcactatggtcattttcacaatattgattctacccatccatgagcttgggatgtgtttctatttgtttgtgtcttctrtgatttttttcagcagtgttttgtagttttccttgtagaagtctttcacctccttggttaggtatattcctaagtgtttttttttttaattcagttattgtgaaaggggttgagttcttgatttaatcctcaacttgtttgctgttggtgtagaacagagagactaatttgtgtacattaattttgtatcctgaaactttttcatttaccagttctaggagcttttggatgagtctttagggttttctaggtatacaattttacaatcaacaaacaatgacagtttgacttcctctttgctgatttggatgccatttatttctttctctcgtctgattgctctggctaggacttcccatactacgttgaatagaagtggt

SEQ ID NO: 777602 - DNA, 643 bp, Homo sapiens
tggtacatacacaccatagaatactatgcagtcataaaaaggaaagagattatgtcctttgcagggacatgaatgaagctggaagccattatcctctgcaaactaatgcaggaacagaaaaccaaaaaccacatgtgctcacttataaaaggaagccgaacaatgagaacacatggacacagggaggggacaacacacactgggatctgtcagtggaaggtggcgtgagagaacaatatcagaaaaattagctagtgtatgccgggcttcatacctaggtgatgggttgacaggtgcaataaaccatyatggcacacatatacctatgtaacaaacctctacatcctgcacaggtacccttgtacttaaaataaaatcaaattaaaattaaatacacagatgggccacacacactggatattctgaattaattagtctgaggtgggaccagggaataggtgttttaaaaatctccagtggtggttctgatgcatagtgatgtttgagaaccattgatctcagtaagagcagaaaaagcccaatggaggaaagtgatggatcaaccacacgtagcactggaactacagctgaggtttgtggacagctagtaagcaccctttaaaatctcactgtgtccttatgt

SEQ ID NO: 777603 - DNA, 482 bp, Homo sapiens
ccactgcatatgggaaacaggaaatctcattgcattaatactttttttttttttttgagacggagtctcactcttgttgcccaggctggagtgcagtagcgtgatctcggctcactgcaacctccgcctcccaagttcaagcgattctcctgcctcagcctcccgagtagctgggattataggcgtctgccaccatgcccagctaattttttgtatttttgtagagatggggtttcaccatgttggccaggctggtcttgaactcctgacctcaggtgattcacccgtctyggcctccgaaagtactgggattacaggcgtgagccactgcgccccaccctcatttctacttttagaatggaattcctgatttcccgttgtgaactgaaaaggagttgattgggaggctgtaatctagcgatgggtgtggagggggacggggcaagtagataagactgtcttaaaaatgaagataaactgtg

SEQ ID NO: 777604 - DNA, 482 bp, Homo sapiens
ccactgcatatgggaaacaggaaatctcattgcattaatactttttttttttttttgagacggagtctcactcttgttgcccaggctggagtgcagtagcgtgatctcggctcactgcaacctccgcctcccaagttcaagcgattctcctgcctcagcctcccgagtagctgggattataggcgtctgccaccatgcccagctaattttttgtatttttgtagagatggggtttcaccatgttggccaggctggtcttgaactcctgacctcaggtgattcacccgtcttggcctccgaaagtactgggattacaggcgtgagccactgcrccccaccctcatttctacttttagaatggaattcctgatttcccgttgtgaactgaaaaggagttgattgggaggctgtaatctagcgatgggtgtggagggggacggggcaagtagataagactgtcttaaaaatgaagataaactgtg

SEQ ID NO: 777605 - DNA, 538 bp, Homo sapiens
agacacagagcactgatgggtgcatttacaaaccttgagctagacacagagtgcttattggtgtatttacaaaccttgagctagacacagagtgctgattggtgtatttacaatcccctagctagacataaaagttttccaagtccccaccagattagctagatacagagtgctgattggtgcayccacaaaccccaagctagacacagagtgctgattggtgtgtttacaatcccttagctagacataaaggtttctccaagtccccaccagattagctacttacagagtgctgattggtgtatttacaaaccttgagctagacacagagtgctgattggtgtatttataatcccttagctagacataaaggttctccaagtgcccactagattagctagatacagagtgctgattggtgcatttacaaaccttgaggaagacacaggatgctgattggtgtgtatacaatcctccagctacacatagaagttctgcaagtccccactaaactcaggagcccagctggtttcaccta

SEQ ID NO: 777606 - DNA, 547 bp, Homo sapiens
ataggtatgtggccctaatctaatagaattggtgcccttttaagaagagtaagggtcaccaagggtgtggaagcacagaaaaaagatatagatcttataatattaacatttttgtctttatgtctacacagtgtaaaatcaaatttcatgaagaaaaaggaccacacaggcaaatgtaccctagtgtccaagaaagttgtaatgcagctctgatctttggccctcagtcttcttatctgtaaataggggctgaatatgaatagcggatcttatgacagaattctaggactcataggcatttgtaagatattgatagagtctgcaaattctttttgatattctataagtcccaacacttagggtaaacgtatctgttgaatggactcctkatgttgaaagcacattaattttgaaataacagacctggttcaaatcatgggggtcggttgttcatttgctgtgtgaatttcgacacaccctcagtactgagacttaggttctttacctataatatgtaaaatgtgaaaacaagtatttttggggtttt

SEQ ID NO: 777607 - DNA, 606 bp, Homo sapiens
ataaagaactctctcctcaaggatgatgaagtctatgacagagaagttaaatgcagaatcatggaagtgtgtattcatctgagcgctctttctgctctcacttcacctctaaaactcctctccagaatacaagatttattttacctttttcatcaggagagttgcttcctttctgtcattccaaagcacattgtttagccattaattaatttgtrcatgcactcattttttccactaatctagcaggtctcattaaggtggggatttttgaatgatttctatactgctatagttgtagcatctagaaaagcactggcatttagtaggagcttattattttgttagattaacaaattaattcaatacattgcaccgaaaatttactgtaggctaggcattgtacaggcagtagggacacagaagttaagaaagacatacatggagcttccacatggagcatgggaaaatccaagaaatcaagtgttactaagtgttatcctgctagcaaatcctaagacccatcctcctgcttcagatagggatatggacatgttaacagctgctgttatcatagggataaatgcaaggtactccatgagcacagtg

SEQ ID NO: 777608 - DNA, 606 bp, Homo sapiens
ataaagaactctctcctcaaggatgatgaagtctatgacagagaagttaaatgcagaatcatggaagtgtgtattcatctgagcgctctttctgctctcacttcacctctaaaactcctctccagaatacaagatttattttacctttttcatcaggagagttgcttcctttctgtcattccaaagcacattgtttagccattaattaatttgtacatgcactcattttttccactaatctagcaggtctcattaaggtggggatttttgaatgatttctatactgctatagttgtagcatctagaaaagcactggcatttagtaggagcttattattttgttagattaacaaattaattcaatacattgcaccgaaaatttactgtaggctaggcattgtacaggcagtagggacacagaagttaagaaagacatacatggagcttccacatggagcatgggaraatccaagaaatcaagtgttactaagtgttatcctgctagcaaatcctaagacccatcctcctgcttcagatagggatatggacatgttaacagctgctgttatcatagggataaatgcaaggtactccatgagcacagtg

SEQ ID NO: 777609 - DNA, 610 bp, Homo sapiens
  misc_feature 610: n = A,T,C or G
tgaagtctcatctgagataaggcaagtcccttccacctgtgagcctgtattatcaaatgcaagctagttacttcctagatacaactggggtacaggtattgggtaaatacggccattccaaatgggagaaattggcccaaacaaaggggttacaggccccatacatgtccaacaaccagcaagacagtcaaattttaaagctccaaaatgawcaactttgactccagggttctcacatccaggtcacactgatgcaagaggtgggttcccatagtcttgggcagctctgcccctgtggctttgcaggatatagcccccttcccggctgctttcacaggctagtgttgagtatctgtgactttcccaggtgcacagtgcaagctttcggtcaaactacagttctggggtctggatgacggtggccctctgctcacagctccactaggcagtgcacaagtagggattctgtgtgggggctccaaccccacatttcgcttctgcactgccctagcagagtttctccatgagggccccaccctgcagcaaacttttgcttgggcatccaggcatttccatacactttccaacatctaggtggaggttcccaaan

SEQ ID NO: 777610 - DNA, 603 bp, Homo sapiens
ttcatcaatattttgatttccattaattaaatctacataattaaatgtaattaattattataattggttaaattattaaaattaaattgagttgaattaacaaagaaacccaaaacaaaagcaaaatgcaggttctcgcataaaacaagagaactattttattttagggaatattggttgcaatagttcaagtactttgatatacttggtccaaatcaatactaatttctaatgtgctaatatattatattacttactgatgatgataaatttaaaaatcatctgcaaatgccttctrcatttcttgttatggtttcatagctttagttgtatgacaaagaattaaaagtgatgcagaccatattgcttgatttcaattatacaagtgaaaaatagaaaaaattatacactcatataaatatatagtatggggtagtgactagaagggggcctgctagggattgtacagatactggtaatgttctgttccttaaaaaattcatgttcatcatattaaatttttttacaatatgttgtcttttttgcattaagaataagtagatttttgtttgtaaccctagagatgaaagaaagagaaagaaa

SEQ ID NO: 777611 - DNA, 538 bp, Homo sapiens
tttatttattttcacataaaataagataatactctgactaaatgtatgagaattcttcacatgaatcataggtgacagactcatttaatagctgaaaacactatacgctatttctaatgagcaagttgattagatatgattgaaatagattttacacttactaacaaaaaaattatactacttagaatacattttggaatttggggtctttgaattgctatttgattctataatctcaccatacagaatattcttgatttatatttkacatttatttttaaagttcataaggtcaatagggtatacagtgttataacaataaaatatttatctttatcttatttaaagttgcatattcttgtttttcttaatgttttctccctccagtcttactttctgccagaacttctgtttcactaacactgacactcattttattgcatgaaaaatgaagcaaacatgctattagccattcttggaaaatgttacaaaaaatttatccaaaaatgttactcaaagatgattaagaggttcttag

SEQ ID NO: 777612 - DNA, 646 bp, Homo sapiens
ttcttatttatttatttatttatttgagatggagtttcacccttgttgcccgggctggagtgcaatggtgtgatatcagctcaccgcaacctctgcggttcaagcaattctcccaggttcaagcaattctcctgtctcagcctgcagagtagctgggattacaggcatgtgcccccaggcctggctaattttttttgtattttactagagaggggatttctctgtgttggtcaggctggtctggaactcccgacctcaggtgatctgcccacctcggcatcccaaaatgccgggattacaggcgtgagccaccatgcccggcctgaagtgattatttttaaggaaggtgataggatagttaaaaaccacacaactttttcatattctccacccaccagccactctgcaattatcagtwggtagcaaagccctgaacttggtcttatatcttattttaggtacagcaacagactaaattgtaatcataatatctgcctcaggaatctgctccaattttgatacaattgtatattttgtagtatggagtaactatcggctgagctttgattctgtgatctggctccctttcaacttgtgatctttggaggtggaatagattatatattttccaattgcaagaggatta

SEQ ID NO: 777613 - DNA, 620 bp, Homo sapiens
agaagactcccatttcaaatggcacatttcaaatattatctgttttgtgttgtagatttctgaataaaatctgttttgagaaataattatttgctaaaaatgtttgaacagctcatagatgataggttgatgatagatagatagatagatctatcatatagatttatggatttattatatttttaatttaatcattgcactttgataataaacatatgtgcatattttggggaagaaaatttaataagcttgatttcaaaataaattgaatttcagtgtracttgaaagaatcttaggcaaatagctcatatcattgaattgtctcacaaggatctacacacacatacacacatactcatgtatacagtcatgcattacttaatgagggggatatattctaagaaatgtgtcattaggcaattttatcattgtgtgaacatcatacagtgcacttacacaaacctagatggtatcacctactacacacctaggttacattttacagtctattccttctcagccacaaatttatacagcatgtccctatattaaatactgtagcctgttataactccttggtaagtatttgtgtatctaagcatagaaaagattcaataaa

SEQ ID NO: 777614 - DNA, 620 bp, Homo sapiens
agaagactcccatttcaaatggcacatttcaaatattatctgttttgtgttgtagatttctgaataaaatctgttttgagaaataattatttgctaaaaatgtttgaacagctcatagatgataggttgatgatagatagatagatagatctatcatatagatttatggatttattatatttttaatttaatcattgcactttgataataaacatatgtgcatattttggggaagaaaatttaataagcttgatttcaaaataaattgaatttcagtgtarcttgaaagaatcttaggcaaatagctcatatcattgaattgtctcacaaggatctacacacacatacacacatactcatgtatacagtcatgcattacttaatgagggggatatattctaagaaatgtgtcattaggcaattttatcattgtgtgaacatcatacagtgcacttacacaaacctagatggtatcacctactacacacctaggttacattttacagtctattccttctcagccacaaatttatacagcatgtccctatattaaatactgtagcctgttataactccttggtaagtatttgtgtatctaagcatagaaaagattcaataaa

SEQ ID NO: 777615 - DNA, 585 bp, Homo sapiens
ctgggaaatgaggtgggtgcagcacagataatatgtaaggatcagttcaccattctggctgtaataacagatggaatgaggagaaacaggacttctgtaataacatatggaatgagcagaaacaggacatagtccaggtatgtagggctgtcttgaaggcagtaagaaagcagggctcagtctgtgtgtcacttggggccagagaagaatttctctcttggttctggatacctcaatggaatagaaaaaccgaagcastcaggagacccttacacaggggaccagatgggcaggctggcctttgctggaggatgggataccatccattttttgtgtaaaatcagggtttcctactttaaaatgaagatctggaaaagatgatttcccaactccattggctgttgacagcctctggatttgtctgatgttaggagaactaatcaggatggcattaggactgagatcaggaactgatgctgtgtgcaaggactaatgagggccaacagaaaggggaagaggagagaaccaatattaaaagcatgagcacaatcttataggcaaaggagtttgagagtaatcactagc

SEQ ID NO: 777616 - DNA, 608 bp, Homo sapiens
atccagttccctgtggcagtaggactgaggtcttgttttctcactggctgtcggctggaggtcactctcagcttctagaggttgcttttagtttcctttcacatgacctcttctaccttcaaagccagcagtggcagtacattgagtccttcttatgtttgaatctctgacttcttctcccatcagctggagaaaattctgattaagttagccccatctggaccrtctccttttcttaaacttaactgtgccatataacaaaacttaattgtgagagtaatatttcatcatatcacaaattccaccctttccaaagggcagggcttatagaagggcgaatgttattgcagggtcatcttagaagtctgccagccccagctgggataatgattaaaaatgatgatcagtttcttgtgcattgaaataaatctcttgagtatagagatcagctgttcagaatatggtaataggaataaaatgtttaatttttataaagtagaaaggcaccattacattctctccatagaataagagagagaactagagaaaggcaagatcaaagaaaaaaaaattgctgaaggagtgataaacttctgatgtgtgatttt

SEQ ID NO: 777617 - DNA, 655 bp, Homo sapiens
acattttttatctattcatcaagtgatcattgtttgggatgtttcccctttctaactattatgaataatgctcctttgaatatttttacatgtttttgagtgagcatctgttttcaattctcttggttatatacctaggcatgtaattgctgcatcctatacaactttatattgaactttttgaggaactaatgaactgtattccaagctcagtggccacaccatattatattcctgctagcaattacaggaattccattttctccacaatctccccartgtgtgttgtctttttttgtttgttttagtcatactagtgtgtatgaagtggtatcttattttggtttagctttacattttcctactgacaaataacattaaacatctttgcatgtgcttattggccatttatatgtatcctttagagaaatgtctattcaaaccccttttcccaatgttaaattgagttatttggtttttttgttgctcagttataagaattctttgtatgttctggatacaggacccttgtcagatatatgatttgcaaatatttctcccattatgtgtattatcttttcacttccttgataatgtcccttgaagtataaaattttttaatcttaataaagttgaatttatctacttcgggttg

SEQ ID NO: 777618 - DNA, 623 bp, Homo sapiens
aatcaagaagagatcggagtgggagaaacatggacagcactttttagtctttcttcctaccagaaaagatttccctattgtttatttaatttttgcctctgttctctgtctttccatttttacttctggtagttccattgttatctatcctctcagtctatcttttttcttgtagttgtcttatttatttgtttgtttatttacttattttttagagacagagtcttgctctcttgyccaggctagagtgcagtggcaggatcatagctcacttcagccttgaactcctgggctcaagcgatcctcctgcctaagccttcttagtaactgggactgcaggcatgcaccacttgccttgctttagattgtatctttttataattttgctttaagactttttttttttttgcacccagtttgttcagaccacaatctcaggtctcaacaatgctcattatctttttcaaatccccttttgaatcgttcagttgttaaattgtgtgtggggtgggatttgagttttcttaagttgaatcgttcagttcttaaatcgtgtgtggggtgggatttgagttttcttaagtgctctccttatttattttttatttatttgtattttttga

SEQ ID NO: 777619 - DNA, 637 bp, Homo sapiens
atttcttgaattatacagatgattttgggtggctgtcactatattgccatggtaaggggtctcagagtatagtggaaaccctgcaattacacaggaaagcagaccaagaataaaggaacaccattagttttttgatagatgacctctgtactcaagagggtcaaacttaaagctttagtcgggggagktaagttttagatatatatatatagagagagagagagagatagatcgatagtttagatatatagatcaaccttttgctgttttgcagttcaaggttccattaagctcaagatttttcaggaccacattccccgtgacagctgaggtaaattcctgtaggtcatcattttcataaaatattttttgttaagtaattatctttactgatttttgtttttcactgatcacttatctgatgaccaaaacctcaatgtttgtcttaaaatccaaaggaaggctcattggaaacttttttttttcttcatcgtaagtgtcatgatgcagtcaacattctgagtgttagtaattatttcatgtacaaccagatgacttgataaaaaaatctccattttgggttccttacagatattgatcaatgggaccatctttgcaagaatgtctcctgggcaga

SEQ ID NO: 777620 - DNA, 596 bp, Homo sapiens
ggtccatgatacatgttgattgaatgatgacttctaataaagaataccatttgtatggtagaaaagcaaagggtaaattagaaaaggataaaatcttaaataagtatgttagagttttatctttgcttttcaaacaaatgcttctttagccactgggttgctgtttattctctgatcctcaaactagaggttttcttagtacttttcttttgcaggtgagatgcatcaaagtgcagaaaataagatatgtttggaactacttagaaggacagttccagaaaattgggtaagttgttttagcaagtacagccaaagaagaaaaatgttatctcaaaaatattattgctaaatatgttcttttcattattattattttagttctttggaagactggctyagttctgccaagatacatcaaaaatttggatcaggcttgacaagagaagaacaggagattaggtaccatgcatattattgcctatactagctcaaaaggattattatcagttagccaaatagacagctagtaaatagttatcttaatggattaatatcagaaaatattataatgctctatttagtattattaaattaaa

SEQ ID NO: 777621 - DNA, 477 bp, Homo sapiens
gcagtatcatgcccagctaattttttttttttttttttgagacagagtcttgctctgttgccaagctggatttcagtggctctatctggactcacttcaacctccacctcccaggttcaagcgattctcctgcctcagcctcccgagtagctgggactacaggtgcatgccaccacgcccagctcatttattgagctggtttcaccctgttggcctggctgctcttgaactcctgacatcaggtgatccatccacctrcctcagcctcccaaagtgctgggattacaggagccactgcaaacggccggaactggtttcaaatgcaaatctgatctatcactcagcctctgcctcccaggttccagcgattctcttgcctcagcctcctgagtagctgggattacaggaacatgccatcacacccggctaatttttgtatttttagtgcagacagggtttcaccatgttgtcgaggct

SEQ ID NO: 777622 - DNA, 642 bp, Homo sapiens
acttataatgtggtatacctacataaacaacattgccccatttcccaaagactctttcaatccagctgtgattaacatttttgggaagtaactcctatgataaattaaaagcaatgttagagtttttcacaatcagaatgtcaataaatttttaacttaattaaaaaaagactttytcttttaagtcagattgatttgacatgattcgatggttttgtttgagaagtaattatatcagaaatttagaatgcatctcatcacagctacaatcaaaatgttagagaagtgttggcgaggatgtagagaaattgcaccccacacgcttggttggtgaaatacaaaatggtgcagctgcttttgggaaacagcctggcccttcctcaaatggttcaatacagagttcccatagagtgggtcggcagttccgctcctctttcttcctctctcccgcttcccacatactttcagacccttcacaccggagtgtagactctgtgagaaccaggtctggtcctttgcgtcactgtctctctccaacatctggaacgagttcagcacacagcagtgactcaacatatttttaatcgaataaatcaataaggaagaggcatacatacagtgaggtcattaagagaatgggct

SEQ ID NO: 777623 - DNA, 633 bp, Homo sapiens
ggctccttcccagatctcatcaataaactctctagaggagtctaggaatctcctccagggcctacttttgataggaaagtgtagcaaaaagacttaatgacctctcctttgtcatggatcattgatagccttatattattacttgcctgtttcctctgtattcctcctcattaagataatatattcctcaggtatggggactatatttatatttattctgtttgctacttcatgcctaacattatgctgatagtagatgctttacaaattcctactacatatatggatcacctggtaaaaattttgcttagacaaaccttttcaaaaaatgctatttgcaatgttggtccctagtagaaatatttatgaagaacaaaagctttttagtttaagatgctcttgtttatttggttaggaaagtaatagaaaagtaaattaacaacttcaatgttacaagtgaaaatgggcatgaaggattgtttargagtaaattctggttaaatgcttgctcctccaagagcttctatatttaaacactggtgttggaaccaattcaagaaaaagaaaatccttcattaatatttaagtaaggcaggaataggaaatgaaaaagtgaggtctatgaaacaggag

SEQ ID NO: 777624 - DNA, 351 bp, Homo sapiens
ggagtggggccgcaatctgcatttaaaacattctctaattatttctgatgttcactcttatttggaaactatccgtaccaatgcaaacagctgagattgggaaccaggcagatttgcttttaattcctgtttggttgttcattagctggcaacttacaaccttgggcaagtccattaacctctctaagctgtttttacatctgtaaatgrgggataatatggcattgacttcacggtcccacagttaagtgtagtggtcactcacctctaccctgaagtcagactgctggagtttggatcccaactcctccattggataattgtgaatcattgagcagattattctaaccc

SEQ ID NO: 777625 - DNA, 694 bp, Homo sapiens
ggggctgctggattttagtggctccttaccagcatgctcacaattgcctttgcatctgtgagtgggtcttaggttcggggtgtattttgagttcagagaccaggcaccagttagcatatttctgggcttggagctttcccagcaagatgaattccatgaaaatggaactggagcacaacagttttagagtaggcaatggcgaattggaggaccaaggttgaaacagtgctttttgtacccgaattttctgtcctcatttgccctcataagattattcactgacctttggccttggaccaggggacctattgtctgttatattgttttcggcccatacttctgactgcttccagtggagatgttctacagttctaatcactgatcccagacaggaaagatagtaattaaagtagcctctacaatctggagtaagtttaggccaacaaaaggaaaaatgtcctaggccttctatcagcactgacrtgccttttgatgtcccggatagtgccgagggtacaggttatgagggacaagtcctgtgtaaggatattgatacccatctgcataagaataagcctgggggcccgatgagcaagggtctttggattgcttcgctactcgacttaggctcctagccaaaagattcttagactcaggggtaggaaggatcctggaggatagagcctcaagaaag

SEQ ID NO: 777626 - DNA, 610 bp, Homo sapiens
ccatattcaataagttaaaaataacatacttcaatgttaagggtgaaagagaagaaagaaatagaaagggaatcattaggagtaagagatgaggacagacctcaagagtgagacagagaaagaataacaaaaggatattttcaaaagaaagagacaaggaaagatgctgtgagaagcacagagacacacaggaaaagagacctttaaatgaaaaaagcagtcactgcagagtgagtgttccgcasaggccagtgttgtcttcccaagaaagatttctagagggtcaagagaagggctggggtcctttttgggtggtgatagaatagatgggccagctgagggaaatcgtgaattggacttagggaacttacagctcagactctggacaaagctaggcaggcagggcagggtggatggtttcaaatacaacttgatgttccctctcatagctcctgaggcttagtgccaaagggctgtctctcaacttcctgtggaaggcactgtaagagactgaagatggaggttaccaatggaagggtacactagaagccagtgacaaagcatgtccctcctgtgtcagaccatatttgtcagctccagctgccataac

SEQ ID NO: 777627 - DNA, 535 bp, Homo sapiens
acaagaaaggaaggctgttagagaggtccagtagcaattacactaaagatataagagtactatataggaaataatgattatcaatgttcactgcctacctgatgtctgtttccactccctttctttgcaaaaagaaaaaagaaagaaagaaaaggaagaggggaaggaagaagagaattaggagaaagaaggaagaaaaaagaagaaaggtaggaaataaataagtgttgtttcaatagtgatgtcccaggtaaatgtttttatttttcagccttycttatagcgagacatggttgtgtggcactgactgcctggaaaattgcattaaaggcccaaattcttcactcttcctgtggccatgtggtttgtcatggaaatttgctgtgctctccaactctgactctgagttcatccatgtaatttgttttggccaacagaatgatccttgccaattctaagcttggctttcaagaggtttcaagaggctttgcatatatatatttgcttaatcttgcacctctgctctgctgggata

SEQ ID NO: 777628 - DNA, 641 bp, Homo sapiens
gatcatgatgtataaatgtttattgttgtatgctattgaagttttgtagttgtttgttatgcatcaaaaactaatatgctgataaataagacacatagaaatccaatagcagagaaaggagagatattaagaaagcctttttccctaaaacaagagtactgcatttactctttcctcatctcgctgccttaaatcagayttaatatctgaaggtgcaaaagtcatcttgtgatcaagtgtatataaataaagatgctaaagatggcggggtaaaaagacagaaaagctctggtctctgatggcattgtgatgcaatgtacaagtcctggtttatctaattctggattaggtatgagaaatggaatataaaactctgatttgttaagctactgtattcaaagtttctgttatagatagcaaaaaacatccttaacacaagaatcaaagcatgactccatttctggatggggcatatggtggaaacaaatagaaatataccagtgagtgaaaacaaatagtaaaggatagaacaaggagcagaggagacctgacaccagaccacagttcctactgttttagaattcattatttccagttcgtagtgacgggactgagcccagagaaagggaagagtgaagcac

SEQ ID NO: 777629 - DNA, 628 bp, Homo sapiens
aaaaaacatcaatttagaatagtacctggaacatagtaaaatctataaatattagctattgcatgtatacagcgatagccaattgttccaccacgatttgtagaatccttttccctctgattttatttttatttatttatttatttatttatttatttatttattttgacacggagtttcgctgttgttgcccmggctggagtgcaatggcgggatcttggctcactgcaacctccgctttccaggttcaagtgattctcttgcctcggcctcctgagtagctgggatttacaggcgtgagccactgcgcccggccaacatacaaatttttcttatatatttaaggtatgtttccatcactgtattcttttaagtaggaattgttttaggggagaatagtttggaagccaagactcctctcaacttttctcaattcactacataagaaagaaagattttacatctgtttcattttaggtatctagggagaaatcacccagattcttcctacctctcagagggtgctgtgaggatagatgagatgctagacagaaagttcagaaagctgagtaacataaagctgcaaaaggagagaacagagattccatagataatattttaagtcaac

SEQ ID NO: 777630 - DNA, 616 bp, Homo sapiens
ctgcttttgtcacatggagcaaacatccggggtcagacctgggtctcttgacacccactgaccttccccctgccatgcttggcctcgatatcctctcagttaatctgaaagtcctgggccttgcccatctgacctgccctttttccactggcctgtgatcctgccacacctcagtaggacctcttaggatttaatgccctagtaagtcaggccccagctctctcaggcagctgacattcagcaagctgcrctcttgttgaggagacagaaagcccaaggcatcatggagctgagatacaaatccacagagagaaactgatgggccctggctctctggagcttatgctagaggctgaggcctggcagggaagtgtgtgccaggggctggacagggccctgtgccaccctggcagctctggtggggcagtggggttgatcaagggcagggggcaaagtgcaggcccgggctctgagtctgggactgggattccctggcttggcactctgactctggagcctcttttgcatcctgtcccgggagtggtagggggtgcaccatgctggccataggggtggggagagagccaggcgtcagggagcctgccgctttgagcag

SEQ ID NO: 777631 - DNA, 560 bp, Homo sapiens
ggctagagtaataaaatcagtgtagcattggcacaggaatgccctcataagatgctataagataactgaaacatagcataaaacataaaagagaactcaacgtttacatgtgataaaaacgacaccacaaatcaagggagagagaattgtttaatagatggagttatcttgctaaatggagaaaaaaataaggttggatcctttattagtctgttcaggttgctttaacaaaatacacaggctggatgggttacacaacagaaatgtattttctcacagttctggaagctagaaatccaaaatcaaggtgtcagcaggrttggtctccagagaggcctctctccttggcttgtagatggtaccttctgactgtgtcctcacgtgtccttttcttgtgcaggcacagagagagagagttctggtgtctcttcctcttcttataaggacaacagttctattggattagggccctatcctgccctaataacttcatttaaccttaattacctccttaaaggccctgtctccaaacacagtcatttttggtgtcagggcttcaa

SEQ ID NO: 777632 - DNA, 553 bp, Homo sapiens
gtagcacaaacttgtgttgttcaagggtcaactgtatacccaggaatggtatcatgaggccaaatggcgtaggaatacccatttttactaagtaatgctaaaaagtctatgccagtttatacttctacaagaactgcacaagagttcttattcccccacacccttgacaactcttagcattatccacttttctcattttgccattttgatggatgttagttggtatgtcacttacatgtacatttctctgattactagtgagtttgagcattccattctatactcgttagccatttgggcttcctcttttgtaaattaactctgcatgtctctcgcctgtttttctcttgggtcttactgatttgcaagagttttttrtatattgtagatattaacgcctcaacagttttaaggactgtaaatatctccttccagtctaccatctatctatgagttttattaatttttcaatgttaaatatatatagtgtataattgaagagtgaactgatatagtcatgttcatatttttttttacagtttgcacttcaagg

SEQ ID NO: 777633 - DNA, 627 bp, Homo sapiens
aataactacagaaataactccctttcctttgagccagaaacggaaccccacaaccctcctgtgcatctgccctgccaagacccagacactgcacctgaccctagaaccctcagctatagcctcaagccctgtggggtggggatgctcttccaattcctgcccagacctgccacctgctggctgacagtggcctcgcagtaacaagacccttgctgaggctggggtgattggtgctagaagtagcttctctgggcttggggaaaagaggatttgaaaagcaaaatgtgaaatccccattcacctacctacgtgttcttatgtctctctgcacaggttaaaaagactctgtccctaggccrggcacggtggctcacccttataataccagcactttgggagcccgaggcaggcggatcacgaggtcaggagttcaagaccagcctggccagcatggtgaaaccccgtctctactaaaaatacaaaaattagctgggcatatttgcacgcctgtagtcccagctactcaggagactgaggcaggagaatcacttgaacccgggaggtggaggttgcagtgaaccaagatcgggccactgtattctagcctgggcaacagagtgagactcc

SEQ ID NO: 777634 - DNA, 627 bp, Homo sapiens
aataactacagaaataactccctttcctttgagccagaaacggaaccccacaaccctcctgtgcatctgccctgccaagacccagacactgcacctgaccctagaaccctcagctatagcctcaagccctgtggggtggggatgctcttccaattcctgcccagacctgccacctgctggctgacagtggcctcgcagtaacaagacccttgctgaggctggggtgattggtgctagaagtagcttctctgggcttggggaaaagaggatttgaaaagcaaaatgtgaaatccccattcacctacctacgtgttcttatgtctctctgcacaggttaaaaagactctgtccctaggccgggcacggtggctcacccttrtaataccagcactttgggagcccgaggcaggcggatcacgaggtcaggagttcaagaccagcctggccagcatggtgaaaccccgtctctactaaaaatacaaaaattagctgggcatatttgcacgcctgtagtcccagctactcaggagactgaggcaggagaatcacttgaacccgggaggtggaggttgcagtgaaccaagatcgggccactgtattctagcctgggcaacagagtgagactcc

SEQ ID NO: 777635 - DNA, 615 bp, Homo sapiens
atagtccctcacgtctgggtccctggcaatactccctcatgtctagtttttttctaggctttacatcctttatttcactcctgtttactttcagctgattctatttgtgtgttttctatatatcacacctgttgctaaagagatttgtttacacattgatatggcctggctctgtgttaccacccgamtctcatgttgaattgcaattcttaatgttgggggaggggcctggtggtaggtgattggatcatgtggacagatttccccctgctgtgctcatgatagtaagtgagttctcataagatctggttgtttagaagtatgtggcacttcccccttcactctctctcctgctgccatgagcagatatacttgcttcctcttcacccttctgtcatgattttaagtttcgtgagggctccccagtcatgcttcccatacagcctgcagaactgtaagtcaattaaacctcttttattcataaattatccagtctcaagtacttctttatagcagtgtgagaactaatacagaaaattgataccaaagaagtgaggcattgctataaagatacctgaaaatgtggaagtgactttggaattgggtaatgggcag

SEQ ID NO: 777636 - DNA, 615 bp, Homo sapiens
atagtccctcacgtctgggtccctggcaatactccctcatgtctagtttttttctaggctttacatcctttatttcactcctgtttactttcagctgattctatttgtgtgttttctatatatcacacctgttgctaaagagatttgtttacacattgatatggcctggctctgtgttaccacccgactctcatgttgaattgcaattcttaatgttgggggaggggcctggtggtaggtgattggatcatgtggacagatttccccctgctgtgctcatgatagtaagtgagttctcataagatctggttgtttaraagtatgtggcacttcccccttcactctctctcctgctgccatgagcagatatacttgcttcctcttcacccttctgtcatgattttaagtttcgtgagggctccccagtcatgcttcccatacagcctgcagaactgtaagtcaattaaacctcttttattcataaattatccagtctcaagtacttctttatagcagtgtgagaactaatacagaaaattgataccaaagaagtgaggcattgctataaagatacctgaaaatgtggaagtgactttggaattgggtaatgggcag

SEQ ID NO: 777637 - DNA, 620 bp, Homo sapiens
ctcttgctttgttctgggacaaggttaagttccttgggagcagtttgtttttagtcggtcttcctttttttttttttttttttgagacggagtcccgctctgtcacccaggctggagtgcagtggcaagatctcggctgactgcaacaacctccacctcctggattcaagccattcttgtgcctcagcctctcaagtagctgggactataggcgtgtgccaccacgcctggctactttttgtatttttagtagagacggggtttcacagtgttagccaggatggtctcaatctcctgacctcgtgatctgcctgcctcggcctcccaaagtgcygggattacaggcatgagccaccgcacccagccgtgggtcttacttttttttttttgagacggagtctcgctctgtcgcccaggccggactacggactgcagtggcgcaatctcggctcactgcaagctccgcctcccgggttcacgccattctcctgcctcagcctcccgagtagctgggactacaggcgcccgccaccgcgcccggctaattttttttttgtatttttagtagagacggggtctcaccttgttagccaggatggtcttgatctcctgacctcatg

SEQ ID NO: 777638 - DNA, 584 bp, Homo sapiens
aggacaggccttcaaatcaagtgctctgaggattaaaaaatggccgctgggaaatggtaacagaagtccctaaatccacagaagagacgtgcagggaggcctcccagactcttagcgcgttgatttctctggacagtggtgctgccttgaggtgctgtctgtacttggcactgcacagcagcactgctgctctgcttcccacaagcttatgtcatttccccaacgacaccagaaatggcccacagtcaggactgtgtcttcacacccagctcactgcccttggtagccacacgcagcaccttacaatcagattcctgggacttcataattatgcatgccacattttttgaaccagatactgggaccatagcctaaaaaaaaaatggatctctgtgctacttctgcatgtaagaggctgcytaagagacacaatctagatgcagatctattggaatttctaagacattaaaagatttagggatacaacaggaaagctatttaaaatctctcccttctagaaaatttatggacatatggtcaatgcaactctgaagcagccacaatagccttattctctacctgca

SEQ ID NO: 777639 - DNA, 626 bp, Homo sapiens
atacaaatgcaaattgtatatatgtacccctttgagtctgacttcttttcatttagcataatgcatttgaagttcatctgtgttattgcatatatcaataatacattccttttttattgctgaagagtgttcccttctatgggtgtaccgcatttggtttctttgtagtggacatttgggatatttccagttttgagcaattaggaataaagtttacataaaaatatataaatgttcacctataaaacatggacatgttttcatttctcttgagttggtaattttgacatagtctgatttatcgatcttttttttacagataagtatgttagctaagaaagctttgcttataagggcacaaaaattttgtcctatttcttctagaatttttatggttacttgtgtttgggtctgtgattcattttcagttaatatttgtacatggtatggggtaagaatcgaggttcacttttttgcatatggatgtccarttgttccagcatcatatattgaagactgtcctttccctattgagttatcttggcacctatgctgaaaataaatactccaaaaacgtgtaggtctatttggactctctcatctgtttcactgatctgcatttctat

SEQ ID NO: 777640 - DNA, 609 bp, Homo sapiens
tagttgcgattcaaaaacactgtttcaattttaaattcaagactttttatttgaaaaccatcagactcaaagaattatgaggctcagttaatattattatgccacattatttacatttgttaactgtcatttaccygctctatgttaatctttttagaaaaaatttgcatttcagaaacaaaaagcacggatagatatataatatcaaaatattcccaaaggattttgatgttccatctatgcttgttaaaatgtatgattatgattaaactttttatcattcttattttccttggcatccataatcatggaaaattacaagcttgcagtaaacatcctaacttaacttaacttttaaacgatagcatttattgtatttggttttgatctgccaggcttatagatggtataaaattttcaggggataatttttcacatcaaaattccttctctcccacattatacattttaaagtatgcacaaggcagaaaatatagggtttgggtttttttccttcgttttattccacctgatctccttatagtcccagagaaggaagactcaatgtacatttctctcagaaatatgacaggtctgtgtttttgttgg

SEQ ID NO: 777641 - DNA, 561 bp, Homo sapiens
ttactctttactgagatggttttatttttaaaatgaacataattttttttatttttaaaatgaaactaataaaactgcttattctttgagatggttttataaaataaaatttataaaatatttatatttatttacatatttaaaatatttataaagtaaaaccatctcaataaagagtaagcagttttattagtttcattttacaaatgaagacactgatttaragaacttaaaggaaaactttaaaagcatacagttaataaagaggcaaaactagaagtaaaacttgggtcctaaatacctacctctaaggtatacaaagtttctcagaaaacagttactattctagatcatattacttgtaatgaaggttgtactccctttaggctctagtttcttttgaactaaatattacaatgcaaacttaattttaaaagacttactttggctattccgtatagtcattaaactataacaaaaaagacatcatatcattgtcaaaggcactgaaaacacaaatctctgaaataaaagtcactgaataatcacagatgatttatc

SEQ ID NO: 777642 - DNA, 627 bp, Homo sapiens
ttttgttttgttttgtttttgacatgcaatcttcctctgtcacccaggctggagtgcagtggcactgtgtcagctgactgcaaactctgcctccagggttcaggtgattctcttgtctcagcctcccgagtaactgggagtacaggcgtgcaccaccacagccrgctaattttgtatttttagtagagacagggtttcaccatgttggccaggctggtcttgaactcctaacctcaggtgatccacctgcctcggcctcccaaactgctggtattataggcatgagccaccacgcctggctgattctcctttttaaagccatcttctgcctctcagatcctgcctttgtcgccagcatcccccaactcaccttacattctattactgcgttctctcttcaccctggcattcaaggcctgccagagttgatctgttggggaaatgtgtattatttaaagatgctctcttaccctaacctagtcttgaccatcaaaaatgtatttcaagtgtaagtagaggtgactgatcttggaattttagcaactccatggaacagcctcccaaaaacgcaaaggaaatcagagcctcatgtttattatataaccaaatgcttttataacatgtccg

SEQ ID NO: 777643 - DNA, 609 bp, Homo sapiens
agaaattaatcatagaagaaagcatatggtgaccaataatttgaattattattgtgcccaatctgaatggcctccctgaaagtcagctctggaaattcctacttagtatatccatgttctctccttttcctgatccacatgcttctctccaaattttatttcccaggtcatgggcttattctgcctcatgaatgtggattagctggttccaaacaggaaaaatgawtgggaaattccacctacagctactagcgtgtgcctgctcagttcccgagtcaaactggctaacatacatttataaagggagagacatggggacagagaattaggagacaggcaatggagagaatcagaaggttttgaaataaggctaatatatggtaaaagataatgttaaatagattgaatgggatcaaattatggatgactttgaagaaccatgttttatttttgagacataatatagcaggcaatggaacctatggtaggtttgcagaagagaagtgatgtgatgaaaatgaatttttagggctctcagttcaaagttcaattggaagggaaatgcccagagacgtcaactttccaggtgattttatctgttgctgtttg

SEQ ID NO: 777644 - DNA, 609 bp, Homo sapiens
agaaattaatcatagaagaaagcatatggtgaccaataatttgaattattattgtgcccaatctgaatggcctccctgaaagtcagctctggaaattcctacttagtatatccatgttctctccttttcctgatccacatgcttctctccaaattttatttcccaggtcatgggcttattctgcctcatgaatgtggattagctggttccaaacaggaaaaatgaatgggaaattccacctacagctactagcgtgtgcctgctcagttcccgagtcaaactggctaacatacatttataaagggagagacatggggamagagaattaggagacaggcaatggagagaatcagaaggttttgaaataaggctaatatatggtaaaagataatgttaaatagattgaatgggatcaaattatggatgactttgaagaaccatgttttatttttgagacataatatagcaggcaatggaacctatggtaggtttgcagaagagaagtgatgtgatgaaaatgaatttttagggctctcagttcaaagttcaattggaagggaaatgcccagagacgtcaactttccaggtgattttatctgttgctgtttg

SEQ ID NO: 777645 - DNA, 609 bp, Homo sapiens
agaaattaatcatagaagaaagcatatggtgaccaataatttgaattattattgtgcccaatctgaatggcctccctgaaagtcagctctggaaattcctacttagtatatccatgttctctccttttcctgatccacatgcttctctccaaattttatttcccaggtcatgggcttattctgcctcatgaatgtggattagctggttccaaacaggaaaaatgaatgggaaattccacctacagctactagcgtgtgcctgctcagttcccgagtcaaactggctaacatacatttataaagggagagacatggggacagaraattaggagacaggcaatggagagaatcagaaggttttgaaataaggctaatatatggtaaaagataatgttaaatagattgaatgggatcaaattatggatgactttgaagaaccatgttttatttttgagacataatatagcaggcaatggaacctatggtaggtttgcagaagagaagtgatgtgatgaaaatgaatttttagggctctcagttcaaagttcaattggaagggaaatgcccagagacgtcaactttccaggtgattttatctgttgctgtttg

SEQ ID NO: 777646 - DNA, 609 bp, Homo sapiens
agaaattaatcatagaagaaagcatatggtgaccaataatttgaattattattgtgcccaatctgaatggcctccctgaaagtcagctctggaaattcctacttagtatatccatgttctctccttttcctgatccacatgcttctctccaaattttatttcccaggtcatgggcttattctgcctcatgaatgtggattagctggttccaaacaggaaaaatgaatgggaaattccacctacagctactagcgtgtgcctgctcagttcccgagtcaaactggctaacatacatttataaagggagagacatggggacagagaattaggagacaggcaatggasagaatcagaaggttttgaaataaggctaatatatggtaaaagataatgttaaatagattgaatgggatcaaattatggatgactttgaagaaccatgttttatttttgagacataatatagcaggcaatggaacctatggtaggtttgcagaagagaagtgatgtgatgaaaatgaatttttagggctctcagttcaaagttcaattggaagggaaatgcccagagacgtcaactttccaggtgattttatctgttgctgtttg

SEQ ID NO: 777647 - DNA, 623 bp, Homo sapiens
atagagtgaacgacaaaacagaaatgtcgctaattagctctcacttactaacgaagccagttaaaacttgaaaataatttcacaatctttcagggagacagggaaaggtacagtcaccaataatacatttagagataaatgtaggcaataaaagaaagtgagacgaggcaaacttttaaaggtatgaagaacatttagctagacgattaaaaatttgtgtgtataaaaaatcctcaagaccacatgaattaccatattgatgttcctcagtttcaggcaatcaatggggttattttccaccatcagctctgtagatagcacagatttttcttyttttttttttcagacagactcttgctctgttgcccagtctagagtgagcaagcagcctctcactagagttcactgcagcctggagttcctggggtcaagtaatcctcctgcctcagcccgccagagcgctggtattacagatgtgaaccactgcatctggccaactgttcttttaaatcatgtcactttacaaagcaattataggaatcttataaccatatataataatttccaaattgtatggctactataagttgattaaaagtctagagaacaacagatttgaggct

SEQ ID NO: 777648 - DNA, 466 bp, Homo sapiens
ttttggtgctccacctccccctgtgttgctaatatcagcctgacaaaatacgcaattaggctcctctatcttagcatagttcttttgacaagaaacaacactgtgaacctctgtgttaacatgaacaggtgataaagggggtcaaatagccaatcgcagctgccaataggagagtttcatgaaacatgcaaatctcaaagccagctatttagctgaagccccagggagcggagtttgctttctaactctcawtgtgttctcctcttcccagtcctgccacaagccctttctctctatatagcttggcagcccattaaagcaaaaaatgctttagtcgctgaagcaataaagttgaataattgctgccttgagtctttctccaactcatttgaaggatgaccattgtaagatagatttacttctggtaaatgatctaccttaaagagtgggttatagaacagccggg

SEQ ID NO: 777649 - DNA, 466 bp, Homo sapiens
ttttggtgctccacctccccctgtgttgctaatatcagcctgacaaaatacgcaattaggctcctctatcttagcatagttcttttgacaagaaacaacactgtgaacctctgtgttaacatgaacaggtgataaagggggtcaaatagccaatcgcagctgccaataggagagtttcatgaaacatgcaaatctcaaagccagctatttagctgaagccccagggagcggagtttgctttctaactctcatkgtgttctcctcttcccagtcctgccacaagccctttctctctatatagcttggcagcccattaaagcaaaaaatgctttagtcgctgaagcaataaagttgaataattgctgccttgagtctttctccaactcatttgaaggatgaccattgtaagatagatttacttctggtaaatgatctaccttaaagagtgggttatagaacagccggg

SEQ ID NO: 777650 - DNA, 605 bp, Homo sapiens
aagctggacatgaggtgcatggatatctatggctcacctgaacatgcagtgcatggatatctatggctcacctggacatacggtgcatgggtatctatggctcacatggacatgaggtgcatgggtatctatgggtaacctggacatgygatgcatgtatatctatgtctcacctagacatgcagtgcacggatatctatggctaacatggacatgcgatgcatggatactatgggtaaccgggacatgcggtgcatggatatctatggctcaccttgatacacagaacgtaagccagtgaccctggcagcagcatcacaaagttcaacctatgaaactaaccagcatccaccgtaaactactaagccaattaatttagaatatactattttgagtagattagaaaggatctttctggatcattacaataatgttttcccatgggaaaaataaatgttaagtattataatacagagtccaagaaaaaaaaaagagtaatgttttatttaaaggaataacttagtcatatgttgagtaaagaaatgtttggtattttagttgtttatttgttgcagaccatttggagtgtagattaactgaaaatt

SEQ ID NO: 777651 - DNA, 648 bp, Homo sapiens
tattaagagtatagtatatgatattgaccaccttttcaaatacttatgtgatatatatataatcacaaatatataaaatatatatcacatatataaatatataccacaaatatatatatacacatttatatatatatatatatwtttttttaaagctgactggtcaaatcttttgctcatttttaaattggatggtttgtattattattatcgagttataagggttttgtgtattccagatacaagttcatcattagatgcacacttttcaaatatttttccccagtctttggcttgttttttcattcccgtaacaatgttgtattcattctctatggctgctgtaacaaattaccacaaaagcctaaaattgtagagatataatctcacacatttctgaaggccagattccaaaatctatttcactgggctgaaagcaaggtgttggttgggcaatacactctccagatgctcaagggaagcacctgttcctgcccccttccagcttctagaggctgttggaattccttggcttgtagccacatcactacaatctctgcatttgtggttatattgtgatcacttttgtctatataaaatttatttctactttttttatagaggtgattacatttagtgtctaccttc

SEQ ID NO: 777652 - DNA, 648 bp, Homo sapiens
ttcccccatttctgtaggttctctgtttactctcttgatagtttattttgctgtgcacaatctgtttagttatgttccacttgtcaatttttatttttgttgtattttcttttgaggacttagtcataaattattttccaagrctgatgtccagaatggtgtttcctaggttttcttctaggattcttataatttgaggtctgaggtcttacatttaaatctttaatccatattgagttaatttttgtatatggtgaatagtaagggtccagtttcatgattctgcctatggcttaccagttatctcagcactatttattgaatagggagtcctttcaccattgcttatttttgttgactttgttggagattgcatggctgtaagtgtgaggcttcatttcagggttctgtattctattccactggtctatacacttttgtacgaggaccatgctgttttggttactgtagccttcttgtatagtttgaagctgggtagcatgatgactctcactttgctctttttgcttggaattgctttggctatttgggatcttttttgcctccatatggattttagcattgtttattccaattctgtgaaaaatgtcattgatagcttgataggaataatgttgaaaatgtaga

SEQ ID NO: 777653 - DNA, 648 bp, Homo sapiens
ttcccccatttctgtaggttctctgtttactctcttgatagtttattttgctgtgcacaatctgtttagttatgttccacttgtcaatttttatttttgttgtattttcttttgaggacttagtcataaattattttccaagactgatgtccagaatggtgtttcctaggttttcttctaggattcttataatttgaggtctgaggtcttacatttaaatctttaatccatattgagttaatttttgtatatggtgaatagtaagggtccagtttcatgattctgcctatggcttaccagttatctcagcactatttattgaatagggagtcctttcaccattgcttatttttgttgactttgttggagattgcatggctgtaagtgtgaggcttcatttcagggttcygtattctattccactggtctatacacttttgtacgaggaccatgctgttttggttactgtagccttcttgtatagtttgaagctgggtagcatgatgactctcactttgctctttttgcttggaattgctttggctatttgggatcttttttgcctccatatggattttagcattgtttattccaattctgtgaaaaatgtcattgatagcttgataggaataatgttgaaaatgtaga

SEQ ID NO: 777654 - DNA, 595 bp, Homo sapiens
tatgctgaatggttttccaaataccagttttgctaataccatttattcagctatttagtgtatgctcaccaatgaaaaatttcattattatttatgaccattattacataatctttatattctttgctaaattcattattccatcttgttgatttgtttattcttatacaagcatcacactgaaactctcatctttttcttctcactttttacaacatattttgttgttttattgcattgtctgaaacttttaaggaaagtggtaaaaaactggagcgatagtatgtatctttgttttaytcattcatttaagatgtttgcatctgggcctgcactttccaatataatagccactagctaatgtgatatttacatatatatttaagttaccttaaatgcaatttaaaattcttattaacatttcaatggatcaacagccttatttgacgactgccaccgtattgaacattgcagagaacattatcaatattgatttaaattctattggacagcattgctatagaatttcaccattaaacttgatgcttactgttggtccaaatggaaaatttttaatcacgttatcagaagtatg

SEQ ID NO: 777655 - DNA, 595 bp, Homo sapiens
tatgctgaatggttttccaaataccagttttgctaataccatttattcagctatttagtgtatgctcaccaatgaaaaatttcattattatttatgaccattattacataatctttatattctttgctaaattcattattccatcttgttgatttgtttattcttatacaagcatcacactgaaactctcatctttttcttctcactttttacaacatattttgttgttttattgcattgtctgaaacttttaaggaaagtggtaaaaaactggagcgatagtatgtatctttgttttactcattmatttaagatgtttgcatctgggcctgcactttccaatataatagccactagctaatgtgatatttacatatatatttaagttaccttaaatgcaatttaaaattcttattaacatttcaatggatcaacagccttatttgacgactgccaccgtattgaacattgcagagaacattatcaatattgatttaaattctattggacagcattgctatagaatttcaccattaaacttgatgcttactgttggtccaaatggaaaatttttaatcacgttatcagaagtatg

SEQ ID NO: 777656 - DNA, 531 bp, Homo sapiens
ccttccttacaccttatacaaaaattaactttagatggattaaagacttaaatgttagacctaaaaccataaaaaccctagaagaaaacctaggcaataccattcaggacatagacatgggcaaggacttcatgtctaaaacaccaaaagcaatggcaacaaaagccaaaattgacaattgggatcaaattaaactcaagagcttctgcacagcaaaagaaactaccatcagagtgaacaggcaacctacagaatgggagaaawtttttgcaatctactcatctgacaaaggactaatatccagaatctacaataaactcaaatttacaagaaaaaaacaacccgatcaacaagtgggagaaggatatgaacagacacttctcaaaaaaacacatgtatgcagccaacagacacatgaaaaaatgctcatcatcactggccatcagagaaatgcaaatcaaaaccacaatgagataccatctcacactagttagaatggcaatcattaaaaagtcaggaaacaacagctgt

SEQ ID NO: 777657 - DNA, 610 bp, Homo sapiens
aacatgtgctttcttagctcacacaactcactcctgaccccttttttatattgcaagtgcatagtcattagtaaaaagaaggatttttgatgatactgacctcatcttgaatttaattaggctcatatgacagaattccatagatggaattgacatcctaggtcatatagtccaagtccttgtttatatttgatacctagtgagattaaagggacattaaaaagtaaagaaaggaaagaccycatatttcttaccttccagtagagaaatctttctatgaaatcagaggaaagaattagaggaccagaatttttcctaaaatcaactttcatacatcttttttcatataaaaggcatagctgcatacaatgctaaaatattgcattacatttcctttatattgatgggaggaagggggtaaattgcagaaaacattgtaaatttagatatgcttgggcctctgacagtgcctagcaaatatcaggagatcaataatgaaataaatattatcaaagagtagtcttcttgatgaaccttctctgagtatcacaactgctttaggaacctctagattcaaggtctagtaattgcaaacagtgagctgataaga

SEQ ID NO: 777658 - DNA, 555 bp, Homo sapiens
acatattctataggtaggagctatgttttattatcagttgcaatcccacaagcatcagcataccttatccatagtaggctttccacaattatatgacaggcacaatgggacaattttatttcttgatctagtaaactttatgctctcctacacagtctttgaatttcttatagagattgtcacaatgccaagcatataatagacaacccatttggtagacttagtgaattattatatcagtgtattccaagaagataatagtgttttttttttaatgrtaatacagcactattatttccttttgtcatgtagtcaacaaaatcagccattttttttcaaagaaaatatattaaatcaagtttttccccattctataagttaaatctaaaaacttaatgcaagattttacattaatccatacttaatcacgtcatactaatttgaacccatttgccaggctgtcaaaaattttttgaatcctctatgatggtttttgcctcctactttatcatctgtaaatgtcatctgtcctttttctgtacactggcctaaaat

SEQ ID NO: 777659 - DNA, 626 bp, Homo sapiens
cccacaagttgtggggacactataatgctgcatcatctcattttagtagctggagtaattatttatgttaaataaccacaaagcgattattgccaacataatgattaaggtttatggtgcaatgtagaaggccaaacttgttatataaatggtaaacctcaataattcagtttttaaataacactttgagatttaatcaacacagagtaattgcattaaatctgaattaagttcacatcggagacatgataatatcaagcaaagcatctcattcttttttctaatatataaaacagatctcgtgatctcacgaatcaatgcagttcagttcaagttcactgcaaaagcagttttctactaaaggccatggattgtatarccccatcaatcttgacatatggagcttaccagtaaggcagagatatgtcttgggacattactcaaagcatgagttttctctatacattttattcaaatacattaaaattgtttttagcactatcaggtgttatttttctaatctaggccaatgcagctcaaattttagcacaaaaaattactgatcacataaaagaaatatactgtttccccaggaatttggatatacagctcaccaaaactttacc

SEQ ID NO: 777660 - DNA, 626 bp, Homo sapiens
cccacaagttgtggggacactataatgctgcatcatctcattttagtagctggagtaattatttatgttaaataaccacaaagcgattattgccaacataatgattaaggtttatggtgcaatgtagaaggccaaacttgttatataaatggtaaacctcaataattcagtttttaaataacactttgagatttaatcaacacagagtaattgcattaaatctgaattaagttcacatcggagacatgataatatcaagcaaagcatctcattcttttttctaatatataaaacagatctcgtgatctcacgaatcaatgcagttcagttcaagttcactgcaaaagcagttttctactaaaggccatggattgtatagccccatcaatcttgacatatggagcttacyagtaaggcagagatatgtcttgggacattactcaaagcatgagttttctctatacattttattcaaatacattaaaattgtttttagcactatcaggtgttatttttctaatctaggccaatgcagctcaaattttagcacaaaaaattactgatcacataaaagaaatatactgtttccccaggaatttggatatacagctcaccaaaactttacc

SEQ ID NO: 777661 - DNA, 627 bp, Homo sapiens
aatatatggtcgtttatgataagcatatttcacttaccgtgttttcacggttcatccgtgtcatagcaagtatttcattcttgtaatggctgaatagtatgtcagcataagaatacaccacatttatcttattcatgagctgatggacatagactttttggctatcattataaatcatgccgctgtgaacattcatgtacaagttcttatgtatgtatgttttgaattcttttgggtgtgtacctaagagtggaattgctggaacatataccactttgtgtttaaacttttgaggaacttctagactgctttccaaagcagtcgcagtattttacatttccatcagcagtgtatgagagctctratttatccacttcatgccaacaattgttattatctccttttttcatcatagttcttctagcaggtgtgatttgatcctggttttgatttgcatttccctgatggctaatgatgctttttatgtgctgttggacatttgtatatcctctttggagagaagtgtgtgaaaagactcaaattctttgcccatttttataatgagttttttaattattgagttgtaagagtcttttttatactctagatgtgtcccttatatatgat

SEQ ID NO: 777662 - DNA, 626 bp, Homo sapiens
tgtacatattgaatttaatctactcataactcaggcaaaaattgcttccttttttttttttctttataaatggagtcttttagggcctcttgctgaaaaaagaaactaactctggataacataagcaagcaagaatgtattagaaggatcttgaggaaactaacaaatttgaagagagggccgcagagtcagtctcagaaaaggcaggaacctggacwttccagagctgtgggtggcaggaacagtgtggctgaaccactcaacccccgtccttccccagaatcaaggcattaaccctgaccgttttttctgtctttcatttctccactcagttgaaaatcctaacaaaaggaggcttcagggtctccgttagcttctaggacttatcatcataccaagactgcgcccactggaggaagggaaattccccaaaaagaactaggtatactgctgagaaagggaatgaatattactagcaaacaacaacaagtataaatttagagtttccagtgcaggatctacaggtgtatcctgtccttcagatcacaaataggcaaggaccgaagcttcagatagcgtggtaattaattggcgagttcaggattagtaacagaaaggcacacaca

SEQ ID NO: 777663 - DNA, 536 bp, Homo sapiens
ttaaacctctttcctttataaattacccagtctcgggtatgtctttattagcagcgtgagaatggactaatacatttaggagacagtgaatttaaaggatgcaatacatttttgtgttctaaaattgcttcaggtgtattccctttttgtctatgtccctagtataatccttaaccttctttcagtgaattttcagtctgcatcttcctacccaaatgtgttcctgctcccacttttggcrggagaaatggaccaccaacatcaggaggagatgcactgccagagatgtgatgttttacctttgctatgaaaattgcatttctgcttgttttaaaaacacaccaagccattacttgagttttaaaaatctgccaatatccttggcatagtaaggatgccccaaattaatgctgattcgcttttggacagcaaatgaacccatctgttttaatgaaaggggaaaaaaatttccctcttactggccacatagaaccagaaatactgactgcagtatcagggaatggttactgtccttc

SEQ ID NO: 777664 - DNA, 523 bp, Homo sapiens
ttcacagttgaattataattgactaaatttagtatatgctaaaactagggcaattcttgtccttaatttctacatgtaaatatttggtcacaatccttatagtgatgttacatcttgtaaactacatttccgtttatctgacataaaggatttatttcagaggtgggaaatatagggatcttgtaggccttcgacaaattatcagagtaacttcagttttatttccacaacttcacaacattgtaatgagaatctgctctgctcaactcctccactagactttaggtaaaatttgattagattctaratattagtcccttgtcagatgtatgctttgcaaataccttcttccattctataggttgtctttctgttgacgacttttttttgttgttcagaagctttttagtttagttcagtcccgtttatttattcttgcttttgaggcatttgcttttgggatttactcacaaattctttgcctaggccaatgtccagaagagtttttcctccagaagttttt

SEQ ID NO: 777665 - DNA, 506 bp, Homo sapiens
ctcccgccacctttccccaggacagacaccagtgtgtgttgtttccccgaccaaccccacgtgtccatgtgttctcattgttcaactcccacttatgaatgaaaacatgtggtgtttggttttatgttcctgcattagtttgctgaggataatgccttccagctctatccatgtccctgtaaaggacatgatctcatttcttttcatggctgcatagtattccatggtatatatgtaccacattttctttatccagtctaccattgatgagtatttgggttgattccatgtctttgctattgtgaatagtgctgcaatgaacataagttttccctgttcttawaaataaattttctatgccaaagtatagaagagccttattttttaaaaaatcaggttggtgactagttcatttgttagagccaaatttttagctgccaaagagaccaaaatcttacttccgagcctgtgtatgccagttggcaatgctggttccactgccacaa

SEQ ID NO: 777666 - DNA, 506 bp, Homo sapiens
ctcccgccacctttccccaggacagacaccagtgtgtgttgtttccccgaccaaccccacgtgtccatgtgttctcattgttcaactcccacttatgaatgaaaacatgtggtgtttggttttatgttcctgcattagtttgctgaggataatgccttccagctctatccatgtccctgtaaaggacatgatctcatttcttttcatggctgcatagtattccatggtatatatgtaccacattttctttatccagtctaccattgatgagtatttgggttgattccatgtctttgctattgtgaatagtgctgcaatgaacataagttttccctgttcttataaatmaattttctatgccaaagtatagaagagccttattttttaaaaaatcaggttggtgactagttcatttgttagagccaaatttttagctgccaaagagaccaaaatcttacttccgagcctgtgtatgccagttggcaatgctggttccactgccacaa

SEQ ID NO: 777667 - DNA, 615 bp, Homo sapiens
tgatgttaaatgcttgagtctgactcgcccactgctaagagtgttgagtaggtatagctgatattctgtccccattgtaggccagcactaagacatctttactaatgtccagcaatagaaagacatctaaacccaagatatagtttaatgttacaaattcataaccactcatctttgctcataagcttgtctatgggctgaattgctggacatatatcttctaatatacatatacccactcttcagtagtgtacttttgtctttaatgaattccttattcactactttggaagggcaattatacacaactttacattcagaaaatatactaaatggtaactgtgggagaaaagtctatgagcttagcaatcgtagttgaacaacgttgtatatctgtacgcactactattctttacagtgccttagamggcccagtgaggaaaaggtgttccaggtagcagagtgagctaatccacacgaaagtgtgatatgaactgtagagtgcccaaataatgcagtttattgtaacttattttcattagttcccacatggttcacaatgggcacagatctgtagaagtaaattgtgcacatacttcccactgccaatgtcat

SEQ ID NO: 777668 - DNA, 589 bp, Homo sapiens
ttttcccagcaccatttattgaataggagatcctttccccattgcttgtttttgtcaggtttgtcaaagaccggatgtttatagatgtgtggtgttatttctgaggcctctgttctgttccattggtctatatcttttttgatactatgcttaaaacagtaccgtgctgttttggttactgtaaccttgtagtataatttgaagtcgggtagtgtgatgcctctagctttgttctttttgcttaggattgtcttggctgtatggggtgttctttgattccatatgaaatttaaagtarttttctctaattctgcgaagaaagtcagtggtaggttgattgtaatagtatttaatctataaattactttgggcagtatggccattttcatgatattgattcttcttatccatgagaatggaatgtttttccacttgttggtgtcctctcttatttccttgagcagttgtttatagttctccttggagaggtccttcacatcccttgctagcttggtattttattctctttatagtgattcacactgattaatttcatcagtcccttcatataggtcagaagtttaccctt

SEQ ID NO: 777669 - DNA, 580 bp, Homo sapiens
tcgacagtgtctgttaaatactatttaccttaatatttagtaaatttgcaaaaggtgtgagtgaatgctccttttttctaatattttatttttaaaattagctttaatattaaatacaataagacaagaataaaatttggtttctattttaaacaagattttcatgaagtatttgaggtttttttttttaacttttatttcaggttcaggggtccacgtgcaggtttcttacgtaggtaaacttgcgtcatgggggtttgttgtacagattatttcaccacccaggtacccaatagttattktttctgatcctctctctcctccaaccctcgactcccaagtaggccccagtgtctttcattcgcctctgtatttatccatgtgttttcatcgtttagctcccacttataagtgagaacatgaggtatttcattttctgatcctgtgttagtttgctaatggcctttggctccatccatgttcctgtaaaggacttgatttctttcttttttatagctgcatagtattccatggtgtacatgtaccacattttggacatttgatggacatttaggttgat

SEQ ID NO: 777670 - DNA, 623 bp, Homo sapiens
tgagccaacatcacaactctgtgaaactgcccaaaaacaacagctttgggggaaaaaaacagtcaaatgctaggctgccaccaatttccatcctggaatctacaaaaagactcatttaacaatataaaatgaaacaattttgtagtttttggttagaaaagacttgattacagaaacaagcatatcttgtagaattttataaatggatacattttttatggtatttggagaaaaatatgacttctgttagtgttttataaatattggctaaaaatgaaataatgaacttgagaagggaaatccagagaaagctaaaagctagagttttgcatattctcttctatactggcactttgctttttctgttttgaatatattttcaatgccccagtgaacttggtaacactgccaacaataaaaaaaattgtaaaggacttagatctttaatataaygtgaaaatctggaaattaaacagaataacatagatgaagaaattaattttcagattttttaaaaagatttttgctggcccctatttttctattataatttcaaaattttttttcaaattggtggctacatgtgcaggtttgttactcatcctgtaaccccaactgttata

SEQ ID NO: 777671 - DNA, 590 bp, Homo sapiens
ttctgtctgggagtacaatggcttctccccctaggaagaaaaccatgaaaaaacaaggatgattttgttttcccccaccttcttctcttcaagttttcacatttacacaacttagcaaggtctagagacctgatgtggcctgttcaaggacccattgctagactaaggagcaaagttgtgtgttggcatcccaccccacagttctgctcactttatgggattgacatgcccattttgtcctggcagtaaagttgtctgccagggaacattactttgctctcacacatttagtacttacagatccatayagcaaaggccaatagcctggatatacacagcagcacatccttgctagctaacactcttttgttggtgctacgacacctgccacctaccttcctctactcagcagctggcttccagcacattcattactcttgagagaggtggatggagttgggatggggtattctgcttacctactctgccttggtggaggaaaagttccccagcatatctgcctgtttcttgttcccctaagcagatgtacatttactacccttacttagcaacttctttgcactaacatg

SEQ ID NO: 777672 - DNA, 602 bp, Homo sapiens
tttccttcaattcagctctgattttggttatttcttgttttctgctgaatttggtgttgatttgtttttgcttctttggttctttcagttatgatgttagattattaatttaagatttttctgcctttttgatgtggacacctggtgctatgaaattcccttttaacactgycttagctgtgtcccagggatactggtatgttgtatctttgttctcgtttgtttagaaggacttcttgacctctgctttaatttaattatttacccagaagtgattcgggatcatgttgtttaatttccatgtaattgcatggttttgagcaattttcttagtcttaacttctatttttattgcactgtcatccaagagtgtgtttgggatggttttggttctttttcatttgtggaagattgctttatgtccaattatgtggtcagttttagagtatgaaccatttggtgatgaaaagaacgtatattctgttgttttggggtagaaagttctgtagaggtctatcaggtccatttggtccattgctgagttcaggtcctgcatatctttgttaattttctgcctcaatgatctatctaatactctcagt

SEQ ID NO: 777673 - DNA, 573 bp, Homo sapiens
attgagtttaactcacagagctgaacattcctttgggtggagcagttttgaaacacactttttgtagactctgcaggtggatatttggacctctctgaggatttcgttggaaacgggataacgtcacctaactaaacagaagctttcgcagaaaaatctttctgacgtttgcattcaaagtccagagttgagccttcctttggtagttcacgtttgaaacactctttttggaggacatgcaagtggatatttggagcactttgtggccttcgttcgaaacggctrtatcttcacataaaatctagacagaagccttctcagaaacttctctgtgatgattgcatgcaactcacagagttgaacattccttttgatagagcaattttgaaactctcttttgctagcatctgcaaatggataggtggaactctgtgaagacttctttggaaacgggaatatcctcacgtaaaaagtaaacagaagcattctcagaaactcctttgtggggcttgtgttcaactcccagagtataacattgcttttcatagagcagttttgaaacattcttttcgt

SEQ ID NO: 777674 - DNA, 608 bp, Homo sapiens
aacattcttttcgtagattctccaagtggacatttggagcgctttcaggcctgtggtggaaaaggaaatatcttcacataaaaactagagagaagcattgtcagaaacttctttgtgatgattgcatggaactcacggagttgaggattccttttgatacagcagtttggaaacacwctttcggtggaatctgcaagcggatatgcggacctctttgaacatttcgatggaaaagggataatctttccataaaagctaaacggaagcatgctcaggaacttctttttgatgtttgcattcaactcacagagttgtactttccttttgatagagcagctttgaaaccctctctttctggcatctgcaaggggacatttggagggcttcgaggcctggggtggaaaaggaaatatcttctcataaaagctacatggaagcattctcagaaactgctttgtgatgattgcattcaagtcacagagttgaacattccctttgatagagccatttggaaacacacttttggtagaatctgaaaggggagatttggaccgctgtgaggcctatggcagtagaggatataactgcacataaaaactagacagtag

SEQ ID NO: 777675 - DNA, 608 bp, Homo sapiens
aacattcttttcgtagattctccaagtggacatttggagcgctttcaggcctgtggtggaaaaggaaatatcttcacataaaaactagagagaagcattgtcagaaacttctttgtgatgattgcatggaactcacggagttgaggattccttttgatacagcagtttggaaacacactttcggtggaatctgcaagcggatatgcggacctctttgaacatttcgatggaaaagggataatcttyccataaaagctaaacggaagcatgctcaggaacttctttttgatgtttgcattcaactcacagagttgtactttccttttgatagagcagctttgaaaccctctctttctggcatctgcaaggggacatttggagggcttcgaggcctggggtggaaaaggaaatatcttctcataaaagctacatggaagcattctcagaaactgctttgtgatgattgcattcaagtcacagagttgaacattccctttgatagagccatttggaaacacacttttggtagaatctgaaaggggagatttggaccgctgtgaggcctatggcagtagaggatataactgcacataaaaactagacagtag

SEQ ID NO: 777676 - DNA, 503 bp, Homo sapiens
ctgaatcccatgtaaggctcactaccctttaagaggaggccgccatggagtctcccgggagaacaagaggcaggcttttctccagaggttgtttgcagggacccacagggaggagaggctggctccgggtctctctaaaggaatctcccctcccccagtgcggggccctggcatccaggagggcacagggccatgggcggtcgcgagctactggctcgcccagctcctgcccctgtgcctgggaagcaggcagggctgggggcggggaacaraggggcctgaaagtgcccatatatagtcactggggtgaacggcaaagccatgctgcagagatgcctcccaagcccagggctggccggccccagctcagccaccggggccccgagggcagcccggccctgggctgggggtggcctccctggtagtctgtgaaggggtagagcatcagcctccgcatagtcatgcctcaagaaatgtttgttgattgaaaataaaagtcgccc

SEQ ID NO: 777677 - DNA, 524 bp, Homo sapiens
cgttggtggcttgcttgtcaagttcaacatacacttatgaccctagcgaattatacttgctaggtatttgccgcaagaaaaaatgggagtttatctccaaagacagcctgcacaggaacgcttatcccgtctctactcttgaatgccccaggctagaygcagcccggatgtcctgcaatgggcatgcagataaagacactgtgaaccatccacatgacgtgttaccgcttggctgtgaaaaggaacaaatgattggcacacaacctggatggatctcaaatcgtgctgttacacagaagacgtaaaatgattacatactggtgatcccatttgtatgacattgtccaggaaactaaacttgggggacagagaatcatttccattgtggccaccaggggctggggtgcggacaagcctcaagggcagcatggaggggtttggcgagggagccattgtgaatgaggaaaggtcgggctacacacctgtccccacgggggcagcctgcacgactctaggtggcctct

SEQ ID NO: 777678 - DNA, 604 bp, Homo sapiens
cagcccttcggggatcccagacccaggaggtccgtgagccggggctgtgacaccttctttggggctctgcagttcctggcatctccaagcttccaggtgccaccgtgtttcccagtgtcagcagaagctgcttgaggtatgcctggtacagctgcagccctgcagggagccggcgcctgtgccagtgcctggagctgcccaccccactgcagccagtgtgcctggctgtgcacagtggctgggcctggagcttgctcgctcacacaccccttgctgctctgtgcctggctcaccctcagaggtgtgggatccgggccggtagtgcaaacctggcacagcctgctgggccgaacgggtggaatgagcccagcaggcacgagcaaaacttgggtaaaggcaccaccggccacagaggtttctggcrggtgaagcgacaccccaaggatcctgtgacacacactgcacctgcttaattttcgtaattttagtagacatggagtttcaccatgatagccaggctggtcttgaactcctgacctcaagtgagccacacgcctcagcttcccaaagtgctgggattacaggcatgagacaccacacccag

SEQ ID NO: 777679 - DNA, 643 bp, Homo sapiens
ggttcctgctggacgaggcggcctcctgcagtggccgagtaagcctgggcgagagcgcggacacccgagaggttccgcgcccgcagtgcaggcgcacctccagcccgcggtgtccgagacaggcccccttcccccagaaaaggacataatcctgatttaatmgggaatcttcagtaggtacaagcgggctctgaaagggtgatgtggaaggaaacagccattctgagcacatttgggttctcattgttcgggaaaagacacagagggacccaggccgaggttggtggagccaaacaaaaccggagtggagctttttccagacggtgcttcccaggtctggctgattcaggtgtgggaaggaggctccccaggccgttcccaggtagcagtgaagtcgagccccgtgcctggttgaccgaacctacctccacgtcagggagtgactgaaacagctccccaggtggaaagagagctggttctccgtccccacctcggcatagcggccccagcgttggtgtcccgccctggccccccttgggctcatgttcacaggaattcatcatttcccagcctctagattactctggggctgattaaattagcgaatgcaatcacaatctgaagcaagttaattgagagaatt

SEQ ID NO: 777680 - DNA, 702 bp, Homo sapiens
atattacagggtgccttgtttccagatcataacttgacttcaagtttcatgtttcggaaagtacaaaccttctattaactattcatcttaagaaatgcctgttgctttatgtggcttgaagtaacataataacaaaggaaagaagtaacaaaggaaaaggcagacatctctgatagtcacttctagttcttctcactaagcaggtggtgataaccttctttttaatagtcaaagaaaatataatgttttccaaccaaggtgtgaagmaggaaaaatcaactaacccaatattgaattgtggtagcaatttaatactaggtccatgattttttaaaataaatttttttctgttgttttttctaattcctactgtccaaatctgtaaaacacggccaataatgtactaacatcatagagttgcataaggattaaaagaaataacatttgcaaagtacttagtgctatgcaaagtaattagcatttggaaaagaataaataataaatgtttaatataattgttcttataattatcatttaattaaaagttttaaaatgtagacctcacccttggagaaaaattttactattcgcttgaaattttaccttcaaatatgtatttttgtttcattcattagaagatttatggagctcttctttcttccggcattttgccagacaaaggatacgatcatgatcaaaaca

SEQ ID NO: 777681 - DNA, 617 bp, Homo sapiens
caaagtgacatgcaagaaaaaaattaacattagatatcatgaataagatggtggtgctaagtgaaatcaagtgaaaaaatattttttaatttaaatgtatttaaaaattggaggcccagatatgttcagtggtgtattctagcaaacatttaagaaaaaaataccaattctctacaatctcttccagaagataaatactttgtaactcattctgaatccagaattgtcctaatatcaacaccagatgaatacattacaggaaaagaaaaatataggcaataaatctaataaatatagacgtaaaaaccctcaacaaaattttagcaaaccaaatccaacaatgtacacaaakaataatatattctgaccaagtgggatctcttctgaatatgaatatgcaaagttggtcctacattagaaacttaatgtattctattgaataaacgggttaaggaagataaatcacgtgaccatataaacagatgtagactgaacatttgaagaaaatccaacatttatttgtgataaaagctatcagcacactaggaatagaggagtatttttataacttgataaagaatatctacaaaaaacctacagctaacatcatacttatt

SEQ ID NO: 777682 - DNA, 637 bp, Homo sapiens
ttattttttggcatgaataccacagctgggatgtcatcttctcaatgcatagtggagatatgcaatgtcagtctgtccaactcctggtcctgttagttcaggtggtggcagcggctgccggggcttctcccctacatagttactgttttccctttgtcatccataaataccttggggagatacttccagactaagtgaatgtctgtttcacttccaagttttacccacttttttttttttttttgagatggagtctcacttttgccgaggctgtagtgcaatggcgccatctcagctcactgcaacctccgcctcccaggttcaagcaattccccygtctcagcctcccaagtagctgggattacaggcacgcgccaccatgcccaggtaattttttttatttttagtagagacggggtttcaccgtgttgcccaggctggtctccaactcctgagctcaggcagtccacctgcctcagcctcccaaggtgctaggattacaggcgtgagccaccgtgcccggcctacccactaattaatttcagcatccactggtgggtcttgcaatgcagtaattattaacttagttttcaaaggtgatttttgcattttcctcattcctttgacgtttattaat

SEQ ID NO: 777683 - DNA, 435 bp, Homo sapiens
cacttctgtcgtgtcgtgtctgagaacagcatttgtgtgaataccatagaccttccaaatctgagcctctgggagcagtagccaccaatctaaatgtgaacccaatccctggtcattcttatttaaccagcctaatgtttaggaaacacttggcaagagaaacaaaagacaaaagaagaaaaaggatggaggarggggaggtacaaacatatagttaatagaagaaataagtcctagtgttcgacaacacagtagggtgacgatagttaataataatttattgtgtatttcaaaataactagaagagaggatttgaaatgttctaacactaagaaatagcaaatgtttgaggtgatgagcctcctaattaccctgatgtgatccttacacattgcatgcataattcaaaatatcatatgtacctcataacaacat

SEQ ID NO: 777684 - DNA, 702 bp, Homo sapiens
gacgctcagcagatgacttggcatctagcatttgctctataaatgatggctaatattaactcatcagtgatagctacaattaaattgttactaacaatagcctaaaggattattgcctagagagtaacatatggagtaatcaggcaggggatgagggaaaagaaggagttagccagcagggaaggggttgactgtggaacaagtgttcaggatcaggaggcagaagacctttgcagaaagaggaggagggcctgtgattaggccagcaatggmagggtggagtcaggccaggaccagagctgatggctaaggcactcaagtagaagccgctagagtatctgtggggaagcctggggtatagaggtgatacaagactcaccattttaaaaaatgttttttagtgaccggatctcactctggcacctagactggagggtactggcatgaactcctgggctcagatgtcctcccacctccaccttctgagtagccggaattacaggaatgaaccatcatgctcaggtaattttttaatttttttttcttttgtaaacacaaggcctcactatgttgcgcaggctagtcttgagctcctggcctcaagcaattctcctccttcagcttcccaaaatgctggaattacaggtgttagctgccacacccagcccaaagctccccattttttacttactttcatctccg

SEQ ID NO: 777685 - DNA, 602 bp, Homo sapiens
tcttaaaaaaaaaaaagaaagaaagaaagaaagaaaagatcctataacctgagcagaaaaaatcatggtcacctccagagcagagaatctgtctactcagagcctttgagcctttgactttggacctgcagatacctgggcaatgcaggcttctgcaatcctctggtccttctgtcacattgttgcgtcttagtgtgatgcgtctctctttgggatctacgtagtcttagaagcatgcaactattcatgtgggaggatgcaaaagtttaggataagaatwttgcgtactcttgaaatgtcaacttcacttaaaggtttttaattttttttcatatttgtattaaagccaatatgattaggttatggagtgaatgtaaaatttgtatgtactcttaagatagaacataagatgctgaagaaatgccatttctttgctgtgggccattgtgggcacttcagtgggaaggttggagaatcatggtgtgaagtgacaacaaggccacatctgtgcttggtcactgggggtgaccatgtttttgtttgctcaggttacaggatccctccttgaggaaacgactcggaagtgggctcagtacaaacag

SEQ ID NO: 777686 - DNA, 640 bp, Homo sapiens
gtcactgcacattctcccgtagcatcatcccatccacagaaacctccagaggtgggtagggttgcagtcccaacctcacatgaaaccaggatggcaacgtggaaatcatacctctccattggcaaaaccatactgcaaggccaccaggaacccctgaaacaaaaggaggacatggcataaaatctgactccggagaagatgtgtctgagagttactggcaacgtccaaagccctgcacaggtcgtaaggagtctccagaagaggcgtgcaactgcattgcttacactaactagaattagtcatactggttacattaacttggatttccatggcatctgttcttactttgacatccagcgccccgcccgccctgctccgcctatatcagcctaggtgtttgcktagattgttcacaggtgcacatgggtcaatgatgattaaacccccaagaccttgtgtcattcattcaattatacaaatattgggcaaggtcactgttgcatctctacttggtcatagtgggcactggctaatgtttgtttatttgtttgtttgttagagatggagtttcactcttgtcgccaggctagagtgcagtggctcaacctcggctcactgcaacctccgcctcccgagttca

SEQ ID NO: 777687 - DNA, 529 bp, Homo sapiens
gaatagtatcttgctattgcaaccagaatttctcccactacaaatgatgctgatttttttttttttttttttttttgagatggagtttcactcttgttgcccaggctggagtgcagtggcacaatctcggctcaccgcaacctccgcctcccgggttcaagcaattctcctgcctcagcctcccgagtagytgggattacaggcgtgagccaccatgcccggctacttttgtatttttagtagggatggggtttctccatattggtcaggctggtctcaaactcctgacctcaggtgatccgcccgcctcagcctctcaaagtgctgggattacaggcgtgagccaccgtgccaagctgatgctgaatattttaacctatgcttgtatttcttctgtgaactaatgttcatctctgtggttcatttcaccaagggtatttatctccttaattttcaagagctggaaaattcgaggatggacataaatccttcacctctcacatggcataaatatctttcctcatttgtc

SEQ ID NO: 777688 - DNA, 529 bp, Homo sapiens
gaatagtatcttgctattgcaaccagaatttctcccactacaaatgatgctgatttttttttttttttttttttttgagatggagtttcactcttgttgcccaggctggagtgcagtggcacaatctcggctcaccgcaacctccgcctcccgggttcaagcaattctcctgcctcagcctcccgagtagttgggattacaggcgtgagccaccatgccyggctacttttgtatttttagtagggatggggtttctccatattggtcaggctggtctcaaactcctgacctcaggtgatccgcccgcctcagcctctcaaagtgctgggattacaggcgtgagccaccgtgccaagctgatgctgaatattttaacctatgcttgtatttcttctgtgaactaatgttcatctctgtggttcatttcaccaagggtatttatctccttaattttcaagagctggaaaattcgaggatggacataaatccttcacctctcacatggcataaatatctttcctcatttgtc

SEQ ID NO: 777689 - DNA, 569 bp, Homo sapiens
ccctttcaaggagtttacggcttagtgatggtgtcacagtgagcagaagaacttacgtgatttttaaaatgctttgttgtacaaaattttgaggctgcagaaaagtttaaagaaaataaagcgaaaacaaataaacccctataatcgcactgcccagaggggacctctgttaccattttggaaggtttctgaaaacacaaaattcctcctttctcctcccgcagtggacgacccaccggagcccgtgtacgcgaacatagagaggcagccccgggccacttcaccgggcgccgctgcagcccccsttcccagcccggtgtgggagacgcacacggacgcgggcaccgggcgcccctactactacaacccagacacgggagttaccacctgggagtcgccctttgaggctgccgagggtgccgccagcccagccacctcccctgcctcggtggacagccacgtgagccttgagaccgagtggggccagtactgggatgaggagagccgcagggtgttcttctacaacccgctgacgggcgagacggcctgggaggacgaggccgagaacg

SEQ ID NO: 777690 - DNA, 601 bp, Homo sapiens
agagcaagtcctagaactcacactgccttttgggagttaaactgaaacgaactcacaacccccagatcccagacatgcatcacccttgagaggcccctactccctgcacctctccttcccagtgcttagcacaagtgtaattatgatgtggataatcatttgtctaatttaatgtctgtccccaaagggmctttgtctgtcctgttgtatcactctacccctaggacctaacatggtgcttggcttatagtaggtgctttgggttcaatgaattaaaaataaatgtttttaaaagaaagactgaatgggtctctacactataaaacttgacagcgaccccaacatctcccccaaaataacatcaaataaaaagcacgtggctaactgatagaagtacagaaagatgaggaccacaggggcagacatgcagggcacagcctggcactgtccacaggccaggagcccagcaggcccacatgagctggcaggctattcagtggcacctggtgactacctactgaataagcagtgaatgaatccacaacttccctgtgagacagacacaggacgggggcaggatccgagattctcacatcggatt

SEQ ID NO: 777691 - DNA, 601 bp, Homo sapiens
agagcaagtcctagaactcacactgccttttgggagttaaactgaaacgaactcacaacccccagatcccagacatgcatcacccttgagaggcccctactccctgcacctctccttcccagtgcttagcacaagtgtaattatgatgtggataatcatttgtctaatttaatgtctgtccccaaagggcctttgtctgtcctgttgtatcactctacycctaggacctaacatggtgcttggcttatagtaggtgctttgggttcaatgaattaaaaataaatgtttttaaaagaaagactgaatgggtctctacactataaaacttgacagcgaccccaacatctcccccaaaataacatcaaataaaaagcacgtggctaactgatagaagtacagaaagatgaggaccacaggggcagacatgcagggcacagcctggcactgtccacaggccaggagcccagcaggcccacatgagctggcaggctattcagtggcacctggtgactacctactgaataagcagtgaatgaatccacaacttccctgtgagacagacacaggacgggggcaggatccgagattctcacatcggatt

SEQ ID NO: 777692 - DNA, 526 bp, Homo sapiens
ttcacagaaatttccaaggaaactatatttcttacattgatggaaatgtatggaaagcatacagttggactgagaaactgtgagtatattctctccaaatatgacaaaaagctaactgcattgtaagatccttcttggtccagaattttgaggtcggtacctctgaggaaagatatttctcctccatgccccaaatcaaccactgttgattgcaattgtatggtcattttaaaattaaatttggtaggctctctttaaaataagaggcaatttaaatttattttttatcatacaaatagtacatggttatattcctttttgttctcttttttktttttttttcagagacagggtcttactttgtcctctgggctgcagtgcagtggcacaatcacagctcactgcagccttcacctcccaggcccaagtgatcctctcacctcagcctccccagtagctgggaccacaggtgcatgccaccacacccacctaattttgtattttttgtagagacagggtcttccta

SEQ ID NO: 777693 - DNA, 621 bp, Homo sapiens
gcatagcatgctacagcccagaattcctggactcgaaggatccttcttcctttgcctcccgagtatctgggactacaggcatgtgcccagtgagccttcagacatttaaaaccatgttgtaagtgacatcagtgaaaatggtggaataaagacatcgaggctgggcgcagtggctcacgcctgtaatcccagcactttgggaggctgaggcaggtggatcacgaggtcaggggatcgagaccatcctggctaacaaggcgaaaccccgtctgtactaaatatacaaaaattagctgggcgtggtggcaggcgcctgtagtcccagccactcgggaggctgaggcaggagaattgtgtgaacccaggaggtggagcttgcagtgagacgagattgcrccactgcacactccagcctgggcaacagagtgagactctgtctcaaaaaaaaaaaaaaaaaaaaaaaaaaaaaaaaaaaaaagagacatccaaaaattcatcccttcataaaagcaacaaacaccaagaaaagggcaaaaaaaaaaattgaccataataaactttttcagaactctagaaatgtaaccaaagtcttgcagcaacccgaggagcatttattcaaga

SEQ ID NO: 777694 - DNA, 644 bp, Homo sapiens
ggtccctttttctgggagattgatataggggagtgtgagttagaagggaggcattgaggatcagtcatttaaagcagcatccaaggatgttcaaggctagagatccacaggtgtattttcagaaactgaatttcctggcggggcacagtgactcatgcctgtaatcctagcactttgggaggccaaggtgrgcagatcacttgaggtcaggagttcaagactagcctggccaacatggtgaaactgtttttagagaaaaaaaaaattggccaggcatggtggtgggtgcctgtaatcccagctattcgggaggctgaggcaggagaatcactggaacccggaaggcagaggttgcagtcaaccgagatcacgctactgcactccagcctgggtgacagagactgtctccaaaaacaaacaaacaaacacaaaaaaaccccaaaacccaaaacaagccaggcgtggtagctcgcacctgtaatctcagccctttgggaggccagggcgggtggattacctgaggtcaggagttcgagaccagcctgaccaacatggtgaaaccccgtctctactaaaaatacaaaaattagccgggcatggtggcgcatgcctgtaaccccagctactagggaggctgaggcagg

SEQ ID NO: 777695 - DNA, 644 bp, Homo sapiens
ggtccctttttctgggagattgatataggggagtgtgagttagaagggaggcattgaggatcagtcatttaaagcagcatccaaggatgttcaaggctagagatccacaggtgtattttcagaaactgaatttcctggcggggcacagtgactcatgcctgtaatcctagcactttgggaggccaaggtgagcagatcacttgaggtcaggagttcaagactagcctggccaacatggtgaaactgtttttagagaaaaaaaaaattggccaggcatggtggtgggtgcctgtaatcccagctattcgggaggctgaggcaggagaatcactggaacccrgaaggcagaggttgcagtcaaccgagatcacgctactgcactccagcctgggtgacagagactgtctccaaaaacaaacaaacaaacacaaaaaaaccccaaaacccaaaacaagccaggcgtggtagctcgcacctgtaatctcagccctttgggaggccagggcgggtggattacctgaggtcaggagttcgagaccagcctgaccaacatggtgaaaccccgtctctactaaaaatacaaaaattagccgggcatggtggcgcatgcctgtaaccccagctactagggaggctgaggcagg

SEQ ID NO: 777696 - DNA, 639 bp, Homo sapiens
aaatcgctaatttttgttcctttagatatgatacagttgaaggcatgtaaggcggggaattgtttttccaaagacatagtagttttactatacagggatttttaatacttaaattttgaatttaaaagaagtttttttttcccttcgagatggagccctgctctgtcacccaggctggagtgcagtggcacgatcttggctcactgcaacttttgcctcctgggttcaagcaattctgctgcctcagcctcccaagtagctgggattacaggtgtgcaccagcacatctggctaatttttgtatttttagtagagatgaggtttcaccatgttgtccaggctggttttgaactcctgaccttgtgatctggmggccttggcctgcccagaagtgctgggattacaggtgtgagccactgtgcctggcctaaaagaagattttgaaacatcattgcatgttttctctgcagtctcttattttccccttgtagttatttaaataataatttaggtagcaaaattacctgctccttcccaaggataaagtaaaataaacattttatagatgagttatataagtaggactagatatttaattatatctgatttctaatttaatgtatttacaatcacaattat

SEQ ID NO: 777697 - DNA, 663 bp, Homo sapiens
gcattttctacgtatagtcatgtcatctgcaagcagattccttctcagtctgtatgccttctgttttctttcttgtcttactgccttccagtaaaatgttgaatagaaatggtgagagaggatattctcgccatgcttctcatcttagagagcatttagtttccctccattaggtatatcaagctatgggtattttgcaaaattttttaaatcaaactgaggtgttgtcttctattgccagttcactgagagtttttttaaaaaaccaggaatgggtgttagacttaaataatttttctgcatcaattgataygattatataatttttcttctttatcctgttgatttgatgaaatttcatgaattaattttggaatactaaaacagccttgtatatctggaaaaaatccaatgcagttttagtatataattctttccattcattattgaattcaatgtgctaatatttgttgggggtttatacatctatattaatgagaaatattggtctgtaattttctttttctattacgtctttgtctgggtctggtattcaggtaatgctggcctacagaatgagttagaaagtgttccttctgcttctgtcttctggaagagattgtagagaactggtgtaatttcttccttaaatatttggtagaa

SEQ ID NO: 777698 - DNA, 432 bp, Homo sapiens
aaagaaggggccagcctgagaaggagccagcactagcagtgcacccacactccaggctcagaaccaggctcagacccaggcatcaggcacctggggccagcctgacccagggttcccctccacaatcacttcccactccccactgcctgctgccggtctcctcatytgatctgtctctacgtcttgcagaccactgggtctggacacaggcaactctgacgagccatgcagggccatggcatgtcctgccagaggccctgaagaggggctgcagtttgtaagtattgtatgaaacgggtgtcccttggtcactcgcaaaattggagaatttctatgtctgattaagcccaggcatttctacctgtctcccagggagcagaaacctgcaggctccggctgtcactgctccacacagattaaccacaaacaccc

SEQ ID NO: 777699 - DNA, 610 bp, Homo sapiens
gtcatatttagactgtaggctcaaggttgtataattgatggctgcaagggcctgtttctgagtctctggtgttggagatgcaggtgacccccatgaagtaggaccacatgggatgtgtgtcccacatataaacttgtcataagtctgaggcccttgtgttggtgatgcaagtggcccctgtgacgtgcaggcttggaaaattacacacagytacagtccaaacatatctttctctatgaaggtctctgggggaagttaaacaaacacagaacatgtttgccttagtctcgatagtagctgatggtttatttacctccttagccatggttgatagtcacagatgtgaacaatatttttgaccttttccccatttattggatacttgttagatttacatttgctttaatacccatgtatatttgggagactggccacacccctttgaattgatgagaaacacctgccaaggcccagtctcattccaccttcacctgtggagggacagggccccttctctggatgtcagttttcttaacaggaacatgaactggttgaactaagcatacagttccttcatccatttccagaagactgtggggcagcatggagg

SEQ ID NO: 777700 - DNA, 552 bp, Homo sapiens
atggtactggtataaaaacagacatatagaccaatagaacagaatagagaacccagaagtaaatccatgtaattttagccaactgatttttgacaaaggtgccaagaacatacattggggaaaagacaatctcttcaataaatggtgctgggaaaactggatatgcatatgcagaaaatgaaactagatccctatctcttaccatacacaaaaataaactcaaaatggatcagacataaatgtaagacccagactatgaaatttctggaagaaaacatagtggaaatacttctggatattggtctgggcagatgttttatggctaagacctcaaaagcacaggcaataagacaaaaactagagaaatgggattatatcaaactgaaaartttctgcacaacaaaggaaacaatcaacagagtgaatagacaacagaaggataggataaaacatttgtaaactattcatttgacaagggattaatatccagaatatacaaggaactcaatagcaagaaaacaaataatctgattttaaaatggcaaagcatct

SEQ ID NO: 777701 - DNA, 616 bp, Homo sapiens
gttgcagtcctgtatttcatgaataggtttgttcaaccaatttacaaaactaatgtgtaccatttcattcttgtattactataaaggaatacctaaggctggataatttacagagaaaagaggttggcttactgttctgcaggctgtacaagcatggcaccaacatctgctcagcttctggtgaggaactcaggagcttacaagaagtgggamtaggcatgtcacgtgataagagtgggaacaacaaggtgggggcgaggagggaggtctcagacttttaaacaaccagatctacagtgaactgaatgagaactcacttatcaccaaagtcatagtgcaaaaccattcatgagagatccaccccatgattcagttacctcccacaagaccccacctccaacactgggaatcacatttcaacgtgagatttggaggggacaaacatccaaacaaaatcacagtgctttcaaagttcatgtacattggagtctctgaaaatttgacctcaaggcacagaaatatatttgtattactatgtacagtttttgtcatttcttttataggtttctatttataccccataatagataaccacttatttcactgcttcttaaaa

SEQ ID NO: 777702 - DNA, 616 bp, Homo sapiens
gttgcagtcctgtatttcatgaataggtttgttcaaccaatttacaaaactaatgtgtaccatttcattcttgtattactataaaggaatacctaaggctggataatttacagagaaaagaggttggcttactgttctgcaggctgtacaagcatggcaccaacatctgctcagcttctggtgaggaactcaggagcttacaagaagtgggaataggcatgtcacgtgataagagtgggaacaacaaggtgggggcgaggagggaggtctcagacttttaaacaaccagatctacagtgaactgartgagaactcacttatcaccaaagtcatagtgcaaaaccattcatgagagatccaccccatgattcagttacctcccacaagaccccacctccaacactgggaatcacatttcaacgtgagatttggaggggacaaacatccaaacaaaatcacagtgctttcaaagttcatgtacattggagtctctgaaaatttgacctcaaggcacagaaatatatttgtattactatgtacagtttttgtcatttcttttataggtttctatttataccccataatagataaccacttatttcactgcttcttaaaa

SEQ ID NO: 777703 - DNA, 585 bp, Homo sapiens
gtcatttcttttataggtttctatttataccccataatagataaccacttatttcactgcttcttaaaataagcagttgatctacaaaaaacactatgcctgcaattgtgaaatacctctgaaataatgagtaaatctgtgtttaatttatttttctttttaaaaaccggtgtgtttgatgaccttttaattatcccaaattcactttgtttgaaggtatatctctctcaagcagtactttgatgttcaaaattaagtagttcaaaaggagctttgtaattctacagagttttaagaagtyatacatatgtaactttctcaggggtgattctgagaagaaacctccttaaaagtggacatattttattttactattataacaaattagcctagtgatttcagaattgtaattttatttatcatagctttaatatatgaagaatattacatgtaatatgtgagacaagatggtagtacttatttctcagtaaaacatactagtgtccaatattcttatttttgatgtctctgacaatcattaacctctttttatagagttctgtatattcagaaaaattattcctg

SEQ ID NO: 777704 - DNA, 592 bp, Homo sapiens
tatgaatatgaatgcccatttacatacttcattgatggaatagagtatcatctaatctcttagataaaaaataatatgtaattatttggccatttgtatttctttttctatatactattcctcgtgttctttgcctgttacttaatttgtttatgtgtttctaattaatttttatccatttttgcaaattagaaatgtaaccctatctctgtaatattatttaraaatgtttttccggccgggcgccgtggctaatgcctgtagtcccagcactttgggaggcccgaggcgggtggatcacgaggtcaggagatcgagaccatcctggctaacgcagtgaaaccccgtctctactaaaaatacaaaaagttagccgggcatggtggctggcgcctgtagtcccagctacttgggaggctgaggcaggagaatggcgtgaacccgggaggcggagctcgcagtgagccaagatcgcgccactgcactccagcttgggtgacagagccagactccgtctcaaaaaaacaaaaaaaaaaaaaaaaaaaaaaaaaaaaaaaaaaaaaaatgtttttccaatctagctcttacattt

SEQ ID NO: 777705 - DNA, 566 bp, Homo sapiens
tgtagtcccagctacttgggaggctgaggcaggagaatggcgtgaacccgggaggcggagctcgcagtgagccaagatcgcgccactgcactccagcttgggtgacagagccagactccgtctcaaaaaaacaaaaaaaaaaaaaaaaaaaaaaaaaaaaaaaaaaaaaaatgtttttccaatctagctcttacatttaggtccacttcaagttawctggtgcaaccattacttgtttttaatctagttgatttctcattggctgacagtgataatgtacattttactactatttgtttcctgttatattaagttattcttgcacttctggaacttttgatttatgaattgtattgattacattttctgatgtttatatatttatgacagttatacacattatggaacgaatcttttttgctataaagtgaaacattttgtgtagtttacacaaattaaggtatgatattaatattataactatctaaaatctgttaatatttgtctggaaagtctctttccaggatttattttcctcagccacctgagtttattttttctcagtc

SEQ ID NO: 777706 - DNA, 639 bp, Homo sapiens
gaaatttcaattaattttaaatcacattttaaaattctatgatctgtattcttttctccagatgtgatattctcttgaatatttggagttattaatatttttaattttttaaaattctgtttgttctataaaatcttttatttggtgctgatttttctgtttcaatttggtacatttctttcaacatcttggttttcttcaaatgtttggtgcttcaaggctatctgttaattttcacatttgagttgtcctaataatctatatccattgtttattgtatcctatctagagattatgagatagaggaagatataatracaggctatcttttagtcacctagtaagtgtcttggttaacagatcaactagtgtggtatcacagtacttgtgtccaatagctcttattcttaacaatggccctaaagctcaggagtagtgatgtaaaacactttctcattgttttactctttgcagtttcaattacccatgatcaattatggtacaaaagcattacatagaaaattccaaaaataaataattcataattttaaagagcatgccattctgagtagcatgatgaaatctcacaccatccccctccatctcacccatggtgcggattatagctttgcccagggt

SEQ ID NO: 777707 - DNA, 529 bp, Homo sapiens
atgaaatcccagcgcttttgtaggctgagctgggcagataacctgagctcaggaattcgagaccagcccggccaacatagtgaaacctcatctctactaaaaatacaaaaattagcctggcgtggtggtgcatgcctgtagttccatctacttgggaggctgaggcacgagaattacttgaacctgggaggcggaggttgtggtgaactgaaattgtgccactgcactccagcctgggcgacagggcaatactctgtctcaaaaaaaaaaaaaattctttgaactgaacggtaatagtgacacaatttatcaaaacatctgggatacaggaaaagcgttgctaagagaaaagttcatagcgtcaatckaggaaaatgacaagcaaaagcctcaatcattttaggaaatttatttgccaaaattaaggacacccctgggagacaattctatgcctttctccgaagatgattttgagggctccaaatttaaaggggaaaagatggtatattgagaagcatacagttttcat

SEQ ID NO: 777708 - DNA, 648 bp, Homo sapiens
gaggttaggggtttttgagaatagttaggtgggcaaaggactatggaatgggtgctgctaattggttggggatgaaatcatagggatgtggaaagtagttatcctgcattgagtcagtctctgggtagggagtgggtattcactattaggacaygagtcacaagtccaggtggaattagacagtcttcagaaatgcaaaagtctgaaaagatatccaaaaggcaaatcttaagttccacaatagtgatgttatctaacattaggcatcattagagaaggtacaaatcttgtgctttctggaacaatggccggttgtcatttgctgacacctagatcttagcaaaattcagatccctctcataatcctaactttgtgacctttcattagctcttttttctttttctttcttttttttttttttttttttttgtctgagacagagtttcactcttgtccaggctggagggcaatggcatgatttcagctcactgcaacctcttcctcctggagtcaagtgattctcctgcctcagcttcctgagtagttgggatcacaggtgcctgctaccacgtctagataatttttgtatttttagtagagacggggtttcatcatgttggccaggctggtctcaaactgctgacttc

SEQ ID NO: 777709 - DNA, 648 bp, Homo sapiens
gaggttaggggtttttgagaatagttaggtgggcaaaggactatggaatgggtgctgctaattggttggggatgaaatcatagggatgtggaaagtagttatcctgcattgagtcagtctctgggtagggagtgggtattcactattaggacacgagtcacaagtccaggtggaattagacagtcttcagaaatgcaaaagtctgaaaagatatccaaaaggcaaatcttaagttccacaatagtgatgttatctaacattaggcatcattagagaaggtacaaatcttgtgctttctggaacaatggccggttgtcatttgctgacacctagatcttagcaaaattcagatccctctcataatcctaactttgtgacctttcattagctcttttttctttttctttcttytttttttttttttttttttgtctgagacagagtttcactcttgtccaggctggagggcaatggcatgatttcagctcactgcaacctcttcctcctggagtcaagtgattctcctgcctcagcttcctgagtagttgggatcacaggtgcctgctaccacgtctagataatttttgtatttttagtagagacggggtttcatcatgttggccaggctggtctcaaactgctgacttc

SEQ ID NO: 777710 - DNA, 631 bp, Homo sapiens
taccaccacacctaattttttttttttttttttttttttttagtcttgctctgtcacccaggctggagtgcagtggcgcaatcttggctcactgtaacctctgcctcccgggttcagctgattctcctgccttagcctcccaagtagatggggttacaggcacccaccacaatgcccagctagtttttgtatttttagtagagatggggtttcaccacattggccaggttggtctcaaactcctgacctcaagtgatgtcccccccgccttggcctccaaagtgctgagattacaggcatgagccactgcacccagccagaagagttttattctgagctaaatatgagtaactatggccagaggcatagtgctcaagaagtcctgaraacatgtgcccaaggtggttgggttaccgcttgatgtttttacatttgaggaagacttaagacataaatcaatatgtgtgaagtttacattggctcagtctggaaaggtgggacaactcaaagtggttgcataaaggtcatagatgcattcaaagattttctgattggcagttgattgaaagagtttaattattatctaaagaataattatgatctaaagaatcaataaagaggattggatggg

SEQ ID NO: 777711 - DNA, 624 bp, Homo sapiens
agatggagggactcatgcaattcaggaaatggaattcaacactagaaaagggtgtgatgacctgtttctacccgaggtgaaaagtgattagcctgcttgcagagaaggttagccagagtggaacaagtcaggtagcaccatgagggatttcatcaaaagatacggaactgattaagagataattaatttgataacactaagaggagttttataatactgagggggcattagtatagaattgctactaagaacatgaaaaataaaaccaatatgtaaaactagaaaatgattatctctaaggaraacaaaatgtgggggaaagaaaaagcaatcgcaatgtaatgcattactaaagttcaccctagaaaaacatgggggttagtggcacttagccctgcaaagtcaaaaatccacatataacttttgacttcccccaaacttgactactaaaaatagcctactatttatcagaagccttactgttaacatacatagtcaattaacacatattttgtaggttatctgtactacatactgtattcttacaataaagtaagctagagaaaagaaaatggcattaggaaaatcataagaaagagaaaacatatttactatttattaggt

SEQ ID NO: 777712 - DNA, 655 bp, Homo sapiens
atatggatccccactgggaccccgactcagatcatggggactggagttgaaaacatctgttgacctgttttctagaaggactaaggagaattaggaaaaagcccatgaagtattcaatgatgaccaccataactcagggaaaggaagaaaatccttctgccttcctcgagcggctaygagaggccttaagaaaatatactcccctgtcacccaactcactagaagctcaattgatcctaaaagataagtttattactcaatcagctgccgatattaggagaaagctccaaaagtgagatctgggccctgaacaaaatctggaggcattattaaacctggcaacctcggtgttctacaatagggaccaagaggaacaggcccaaaaggaaaaccaagatcagagaaaggctgcagccttagtcatggctctcagacaaacaaacattggtggttcagagaggacagaaaatggagcaggccaatcaccctgtagggcttgttatccagtatggtttacagtgacactttaaaaaagattgtccagtgtgaaacaagccaccctcttgtccatgtccactatcttgaggtaatcactggaaggtgcactgccccagaggacaaaggttctctgggccagaagcccctaaccagatga

SEQ ID NO: 777713 - DNA, 586 bp, Homo sapiens
tgtcaaaagataaaatgaacaaacaaaataaaataaataagaataattagcaactttgaaatttttgctttgcagaagggaggaatagcctggctatcacgtgaggagattcatgaatataatgacaatattaaaatgaggaattcttaacattttatatcttccttgaataagaacacaaagaaaagctatctatgtaattaaaatgtaatcaaaccctcccaactattatataaaataggttaaagaatacttggaatatttaagcataygcaaatttaaaaagcgggatactcataggaagaaaatcaataaattgaggtagtcatttgtaattgtttttgaaaaattgtgcaggattgaagaaatagtataaacttaattaatttatttatttatttattttagccattttaggtggtaggaagtgatagcccattgtgattttgactttttatttttaaatttttttgagacagagtcttgctctgtcacccaggctggagtgcagtggtatgatcttggcttactgcaacctccacctcccaggtgattctcctgcttcagcctcctgagtagctgggat

SEQ ID NO: 777714 - DNA, 671 bp, Homo sapiens
ttctgttccaagttatatactaaatgttattaatttaaaacattgttttatttatagctcccacacaattgtcactaggattaagtctacattcacatagttctatgtgaacacataatatgctcaccacccacacggtgggacgtgtagatcactaaaaggcccytattgctggtgtctagtattttacaaaatcggtccttcggattgagtcattatttaaaagccaaaggcctggcaggggaacactgtgattttcatcattcattattcctttcatgtggttttatttcccagattctcgtattgaatgccagccatatattggactttccatctgtgatctttaatcattacaaccaaatccttttatataggagaatcccaaggctccaagagggtactagaagcacccaagctacaacatggggcaaccaggatgcacagcatgtttcatctgattttaaagctcatactcttttcttctacgtgaagagtctcatttcttaaccctcttaataagtttaaccagtctactcaatcatagtatccattaagcaacacattcccatttattttaccctgttctcagattaatagaaaaaaaattgtggctctagaaccagggatccatctaatttcagactccctccccaaccattttaataact

SEQ ID NO: 777715 - DNA, 631 bp, Homo sapiens
ctctctcttgtcccaccaccccctcagactcacacacacacagagtaattattgtcctcatgtttttttttcttttatttttttaaagagatgggtctctaatgttgctcaggctggtctcaaactcctgggctcaagcaatcctcccccgatcaacctcccaagtagctgggaccataggcatgagccaccattcctggcatgatcatcattttaaagataggtagtgtaagtttcaaaaaggctaaatggcttgcytaaggtcacctaattattaagcaatgaagttggaattaaatcccaatcacggaccttatagacccttatcaggctgtctccaaagctgggacatgttttgggacacggatggtggaaagggaggcaaaggccactgcagaaataaaaaaaaatgaaaaactataccatgcggacaaatgaaaaggaaactggcaaggctggaatatagagggtgtagggcacacaaagtttaaaaagttataggacaaattaagaaggatctcaaatgccaaactgtagagctggtttttactctataactacactgtccattacagtccctacgcatggccatgtaggtagtctgaactggcatgggctttgggcataaatt

SEQ ID NO: 777716 - DNA, 583 bp, Homo sapiens
ttgtccatgaaatcttcacaatttatgttcagagattcagtaaagacaggcgtaagacattataaaagtattaatttggggaactaataaatgtccttgaaatcttcaccatccacgttcttctgccatggcttcagcyggtccttccattcggggtccctgacttcctacaacacagaatcttcaaggaactcaaagaaatcagcaaggaaaaaacaatcctatcaaaaagtgggcaaagggcatgaatgaacaattctcaaaagaagatatacaaatagccaacaaacatatgaaaaaatcctcaacatcactaattatcagggaaatgcaaattaaaaccacaatgagataccaccttacttctgtaagagtggcaacaatttaaaaaaattaaaaatattattaaatgttggcatggatgtggtaaaaagggaatacttttacactgctagtgggaatgtaaactagtataatcactgtggaaaacactatggagattccttaaataactaaaaatagaataccatttaatccactactgggtatctacccaaaggaaaaaatgtcattgtataaaaaa

SEQ ID NO: 777717 - DNA, 626 bp, Homo sapiens
agctatttttatcaaactataaatgacattcttcacagaattagaaaaaactattctaaaattcatatggaaccaaaaaggagcccaaatagcaaaagcaattataagcaaaaggcacaaagctagaggcatcacattacccaacttcaaactatactgaagggctacagttaccaaaacagcagggtactgggacaaaaacaaacaaacagaccaatggaacaggatacagaaccaagaaaaaaagctgcaaatgtacaaccatccaatctttgacaaagccaacgataacaaaaaatgggaaaaggattccctattcaataatgggtgctgggataactggctagccatatgcagaagattgaaactggaccccttcctttctccrtatacaaaaatcaactcaagatagattaaagacttaaaagtaaaacctaaagctaaaaaaatcatagaagaaaacccaggaagtaccattcaggacatcagccctggcaaagatttcatgacaaagactctaaaagcaattaccatgaaaacaaaattgacaagtgggacctgattaaactgaagagcttctgcacagaaaaagaaactatcaacagagtaaacagacaacctaaaga

SEQ ID NO: 777718 - DNA, 548 bp, Homo sapiens
tcctgggtggatttgaaagagattaacatttactctatgctgtgcatagcttgacctagtgtcctggtacctgcagcaaccagctaacgaaaatcccaacaggaatccagttaaataaaaagggaagatctgatgcaatacttcaaatggcagaaaacatatacaaaaaaaaaaamaaaaaacaaaaaaaaaacagagaaactcaagactcgtgttcaattggctgggatgagagtggggtacaggaccaagttaaccgggttaatttagctgtgccccacacatccccttcaatcagaccccgtgttcctcctgtacaatgagagtgctgagctcgttcattcctcatatgtgaccatcagctttcgctgcagaggtcaaagcacttcgggcattcatgccatcatatacacttgtaccagaggacctaggatatgccaaaatcccacttacaaaatgtcactgggagcaactacattgtcgaaataagctgttaagacagcaatcacaatttaccagaagtagacacatcccagctttatggcttc

SEQ ID NO: 777719 - DNA, 548 bp, Homo sapiens
tcctgggtggatttgaaagagattaacatttactctatgctgtgcatagcttgacctagtgtcctggtacctgcagcaaccagctaacgaaaatcccaacaggaatccagttaaataaaaagggaagatctgatgcaatacttcaaatggcagaaaacatatacaaaaaaaaaaaaaaaaaacaaaaaaaaaacagagaaactcaagactcrtgttcaattggctgggatgagagtggggtacaggaccaagttaaccgggttaatttagctgtgccccacacatccccttcaatcagaccccgtgttcctcctgtacaatgagagtgctgagctcgttcattcctcatatgtgaccatcagctttcgctgcagaggtcaaagcacttcgggcattcatgccatcatatacacttgtaccagaggacctaggatatgccaaaatcccacttacaaaatgtcactgggagcaactacattgtcgaaataagctgttaagacagcaatcacaatttaccagaagtagacacatcccagctttatggcttc

SEQ ID NO: 777720 - DNA, 530 bp, Homo sapiens
aaatgaacaccagattttgaaggttttatacaaaaaatatgtatatataaaaaataccttaatttttctatttattacatgatgacatgaaaatatattagatttatttgtctaaataaattatataaaatatctaatatatataacttaaartaatttaatataaacatattattagaatcacttttaactattcctttttttgcctttgcatattgatacataatatttgtacatattcatggcatacatgtgatattttgatacatacaatgtgtaatgatcaaatcaggacttttagggggtccatcaccttgaacatttatcatttctttgtgttgagaacatttcaaatctaggtattttcaaaaatataatgttgttggctatcatcaccctactgtgctatcaaacagtagaacttatttcttctatccaactgtaggtttgtacccattaaccaacctctcctcatgtcccctctccaacacacctctccaagcctctggtaagtattatgctactctctg

SEQ ID NO: 777721 - DNA, 687 bp, Homo sapiens
agatccactccccttaccttcgtcctcatcggagacaggagcccttccatggtggcagaatcctcatgccagtttctgtctcctgcaagttactctctctgtgtgccgtgcttaagcatcccacatgaaaagagccatgtcgggagccgtggtggctcccctctcccgggtggcgcctctgcaccgccacccggtctaacttgaatccccagcgcctgcaaagcgccgttcctggagaagcctgctcctctcctcgccctggtcccctctctctttctccctctcccgcgctctctctcctccctctctctcctccctctctctttccataatctgcctacagctctctgtgtaccctgctcacttgacaaatgatctctgtcttaggtaacgcatttgaaccaagaacagtgatctgtamcaacccacagggcagctcatccagggcaggaggcgaggggggctgagccggagcatccagccgctttgggctctgtagcttgttctctccagagctgagagcactgttgcgtttgttcgttcattcattcattcattcattcattcattcgttcatcattccttcctctcttaagaagtgggactcccacaggaatggatctagttgacaccattactgagctgcttttctggtctgtgtacagaaagctgaaaaagaaatcccac

SEQ ID NO: 777722 - DNA, 608 bp, Homo sapiens
gaaaactaatcaccgcaataattaaaaacattggccaagtttcagccatgttaaaactctagttttttttttttttttttttttttttttttttttgagatggagtctcactgtctcccaggctggagtgcattggcgtgatctcggctcacagcaagctccacctcccagattcacgccattctcctgcctcagcctcccgagtagctgggactacaggtgcccaccaccacgcctggctaattttttgtatttttagtagagacggggtttcaccgtgttagccagtctggtctcgatctcctgacctcgtgatccacycgcctcagactcccaaagtgctgggattacaggtgtgagccactgcacccggcctaacaactctagtttttaaaataagcttttcattttagagcaatgttaaatttacagaataattacaaagatagtacagagagctcccatgtatactctacatatagtttcctttatatttaatgtcttacagcttaaggtatggttgtcacaattaatgaagcaatattaatgtgtaattattaactgaagtccatactcttttcctaatgtcatttttctgttctgggatc

SEQ ID NO: 777723 - DNA, 538 bp, Homo sapiens
tgtattccattattttaaagcaagtcacagtgaatgagagaggattacacaagcgcatgtataccaggaagttgagacaatgttaaggtttgtctaccacagaacaaaaaagaagaagaaaaagaaagaagaaaaaaggaagaagaaagaagaggaagaaggaggaggaggaggaggargaagaggaggaggaagttaaaatcaataatggaagatgagcaaatgccaaaaatattgctgataaatttctgtgcaaagctaaatttctttatcttactttatctaccattgtgaaggtatgacctcaatatattttcatggaacaaggtatttaattgtttagaccctgggcatacagattagttatctctggcttcaatttaccacatatacctttaccttgtattatacagacatagccaaagggtaaacattaagagcaactcagattacagagagttgtcagctagaccagttgagttgcattccactctagaagcacaagcataaacagtttctgtatagacattcatgattt

SEQ ID NO: 777724 - DNA, 538 bp, Homo sapiens
tgtattccattattttaaagcaagtcacagtgaatgagagaggattacacaagcgcatgtataccaggaagttgagacaatgttaaggtttgtctaccacagaacaaaaaagaagaagaaaaagaaagaagaaaaaaggaagaagaaagaagaggaagaaggaggaggaggaggaggaggargaggaggaggaagttaaaatcaataatggaagatgagcaaatgccaaaaatattgctgataaatttctgtgcaaagctaaatttctttatcttactttatctaccattgtgaaggtatgacctcaatatattttcatggaacaaggtatttaattgtttagaccctgggcatacagattagttatctctggcttcaatttaccacatatacctttaccttgtattatacagacatagccaaagggtaaacattaagagcaactcagattacagagagttgtcagctagaccagttgagttgcattccactctagaagcacaagcataaacagtttctgtatagacattcatgattt

SEQ ID NO: 777725 - DNA, 643 bp, Homo sapiens
tttacactgcggtggtagattttttttatgtgcagaacattatccgtttataaccacaattgtttgtttttgttttagtgcatctgcttttgaggtcttatctatgataaaattgtttcccagaccaattttctaaaaatgtttttccagttttcttctagtagtattagagttttgggtcctaagtttaaatctttaagccactttgatttggtttttgtgtatggtgagagacagggatctagtttcatttttctgcatagaaatatccagttttcccaacaccattcatggaagagactgccattttctcaatgcaggttcttggctcctctgtgaaaaattagttggctgtaaatacctggatttatacatggtttctctattctgttccattagtctatgtatcagttttaaggtgagtaccacgctgttttagtcactacagctttgtagtatattttgaaatctggtagtgtgaygcctccagcctcatttttgtttgggattgctttggctattcagagtcatttttggttccatacaaatttcataatgttttttctatttctattgagaatgtcattgatattttgactgagaatgcattgaatctatagatctttttgggaaatatggttgt

SEQ ID NO: 777726 - DNA, 595 bp, Homo sapiens
attccttggttcctagtgtgtgctaatagaaactattatgccttctatttctgttacaactattaccagggaaaagtacacggaagtttcattaacagatttataacatattgttaataagaacaaaattcccaaactttctttgttgaaaaacaactcattctctcatttacrctgtgtgaatcacacgtgaactcaaaatgtttttttctattttctcactcaacaaccaataacatgcataggggacttttgtgaccaaatatgtgtttgttttttttttctctcacacaccaagcaaacaatcaattctgcagtggatagaagctgagtctcctccaattcaattctggcactatctacctaaagacagcatcagatctcaccagttgaaggctcagtccccacgaccacctcctgctccacttcaggtataagtcataagtctgggcatcaagaatatctgaccaaccagcttcaagttggggttgccacaataccctctttgagtttgattaagttgttcagcaactctcagaactcagggaaacatgtgcttacatttaccagttaattataaaggatattacaaaga

SEQ ID NO: 777727 - DNA, 536 bp, Homo sapiens
gcacgttccattctttttggataatgtgaggatttgtagatgccaggtgagcagcttcagtcacatggtcacatggtggctctgggctacccagagggctgcttttgagggtgtgcgattctctactccaagctgcttggcttctccctgggcactttccccaagctccactggcacgttttccaccagtgagacgcggagacagcagtgtgtgggggtcatgcggcccaggtggcagggccctctccacttgggacccgctcatgctgctcaaaagaccatagttcccactgtggcttccactcctgggactgaggaatgaaaaacatgtgtctctgtgacacagcrgtactatcaagctcctgtatcagaaacgcattagacacagaacctaagattgtgatattatacatttttaaaatacagagattgttgatgcatcattagaatgaattttgatcttgtactcacagccatttataagtactgttgtatatcctgaaatgtatgaaggcaagctgtatagggcatatata

SEQ ID NO: 777728 - DNA, 587 bp, Homo sapiens
ctgagcataatgaataatcttgaacattatgagtagaacaagcattagacagctcagaaggcagactggctggggcctcaggatgcaagaatggcacagaggtgagttcttggactcacctcagggcagaggactccagcaatatagaaatgctaacaggcacaaagaaagccctggcagaagaaaggagcagcctacccagacagaaaacttagacagtacccactcgactccagccacaacacatgcaaaacactgctgcccttccccatccacacaagccagatggggccccagactctcacccccacctggcagtaacaagccatcagtcacttctaagccagagcagtatcaaaggaaccagctgcaacagaaggttccagtgagataagtaagacccagagtcttctgacatagtaygaaatgtgcacctctttcaatagaaaatccctgtcatgccaagaagcagcaagatcacaaagtggatgaaacaaggcaagccatagatgccaacatccagcatagaggtgctatcatagagtgacctcacagggacttaaagcagccacagtaaagatacttca

SEQ ID NO: 777729 - DNA, 586 bp, Homo sapiens
tcaccctgagtgaggcctctccacactatttactaccaaccaacataagaaaactccgtgctttccatccagaagctacacccactgggaaacatttttttagatataattgatattcaactttgaaactgctctgaaaaatacaagaaggtaaaattgtccaaatgtacatcacgctgtgtgattcacactgagtgtttctcttaaagagaactgaaaactgttcccggaatttctgccaaatttctctgagctcttcacagcagcagctccgtcaagctggcttgattcaaaccaagcgtttgccagggaagctctttcacatgtgggagtagctgaggccctgawatgattacatccctgaacatcgctggttagcaactcgcagaggaaaagagcatggtgtgtttgagactcaggctgtgcgagcgcctgccctcgggagctcatccaagcccctgtggaaagtcagggtggggcttggtctcctgctctccttcctggtgtctttgtgggattaaattcccccttctgcagatttctcggggttatctcccgccctcctacctcctctttcaatatgcta

SEQ ID NO: 777730 - DNA, 568 bp, Homo sapiens
attaaaagccaagaagcacatttctgacacttaaaacatagcaaaagataattaatgcacagaaaaaatgaaaagagacaagagaggccaaagcacgtgaaatacaaatgagtgccacagggaaaaaattaaaaccaaattgcaaatgttctgcttacacactgaaatgaggcttctattagggacactgaaaaagagcttttgaaaaagtgtattctgggatggctrctcattgtatgacctttttaagaaataaatccaaaaacaccaagttccccagcaacccattaaattacagaggcaaaataggtacaattgtttcagagaacaagacaagtttatccaatataagattgctatgaatatgtgtgtttgtggatgtcacagatatgcctatataatagataatactgagaagtttgtctcttgtatgatcaatttaatcattttaaactgcatgtatttctgttcctggtttaatttagtgtgcaaatatctaggtatataatataaagatttaatattttgatattaaaataatttttaaatttcatagcatcattcctct

SEQ ID NO: 777731 - DNA, 670 bp, Homo sapiens
aatcctaactggcgcttctcaaactttagtgtgcataaaatcacctagaaaactggttaaaacacacattcagggccccacccctcagatattctgattcattaagtctgaggtgagccccaaaatttgcttttctaataagctcgcaaatgatgctgattctgttggtccaggaacyatgctttgaatagccctgcaaatcgtaattttttattcgatatttgtaaagagatgaaagaaaattaaaaggcttggcaagcaaaaagaaatgaaaagtaatgtgtactcggtgttcatataggaaataaaacagtgtaatgactacttcgaaggaaaaaaattcttccaaaacgtaggccacatctacccaacagtatgcaaacatttggagaggaaattaattggtacatatggctgtaggtgttcatttctaactaaactaaacagtccatcaaagcctttctttcagacatttaattaagtaattctgaggagattatgtcatttaaatatttcttgtctgggggtcagggacccacttaggttcaggtatctcttctgctcatctctaaatccttgtttagcaactccacccagaccattaacaaaatccagggtaagcttgtcagttaggagtaaaggagagctgtttgggacaaatagtataatt

SEQ ID NO: 777732 - DNA, 670 bp, Homo sapiens
aatcctaactggcgcttctcaaactttagtgtgcataaaatcacctagaaaactggttaaaacacacattcagggccccacccctcagatattctgattcattaagtctgaggtgagccccaaaatttgcttttctaataagctcgcaaatgatgctgattctgttggtccaggaactatgctttgaatagccctgcaaatcgtaattttttattcgatatttgtaaagagatgaaagaaaattaaaaggcttggcaagcaaaaagaaatgaaaagtaatgtgtactcggtgttcatataggaaataaaacagtgtaatgactacttygaaggaaaaaaattcttccaaaacgtaggccacatctacccaacagtatgcaaacatttggagaggaaattaattggtacatatggctgtaggtgttcatttctaactaaactaaacagtccatcaaagcctttctttcagacatttaattaagtaattctgaggagattatgtcatttaaatatttcttgtctgggggtcagggacccacttaggttcaggtatctcttctgctcatctctaaatccttgtttagcaactccacccagaccattaacaaaatccagggtaagcttgtcagttaggagtaaaggagagctgtttgggacaaatagtataatt

SEQ ID NO: 777733 - DNA, 533 bp, Homo sapiens
actcctggctttttttttttcagaaactgataagctgatcctaaaatttatatggaaatgtaatggacccaacatagccaaagcaacatttgaaaaaacaaagtttgaggacttgcattttctgacatcaaaacttactacaaagctacattaatcaagacaatatgggactggcataagggtagaaatatagataagtagaaaagaackgagatcccaggaataaatcattaaatttatggttaattgattttttaacataggtgccaagacagttcaatggaggaggaatatattttcaacaaataatgccagaacaactctctacccatatgcaaaagaatgaatttgaacccctatatcataccatacacaaaaattcaggctaaatggatcatatatctaaatggaagagtgaaaactataaaactcttagaagaagagattggagtaaatctttatgactttacattaggcagtggtaccttagctataacatcaaaattcaaaatctttgtgccttaaaggacatc

SEQ ID NO: 777734 - DNA, 499 bp, Homo sapiens
agtcactttgcaaaacagcctcgtagtttctcaaaatgttgaccatagcattaccatatgacccaccaactctacccttaggcagatacaccaagagaatcagaaaagcttatgttgacataaaaatttatacgtgactatttatagcagtattagtcacaataggcaaaaagtgaaaaccactcaaatgtccattaactgatgaatggccaaacaaactgttgtgtatccatatactggaatacttttttatatgaccattaaaataaattaagtacagatacatagtacgacatggataaatcttgaaaacattattgtaagtgaaaraagccacacacaaaaggctacatattgtataattccatctatatcaaatgttcaaaataggcaaatccataaaaacagagcagaatagtggttgccagggactggggaaaagggggaaaatggtgaatgactcccggtggatatggggttttgagagagagagataaaa

SEQ ID NO: 777735 - DNA, 664 bp, Homo sapiens; identical to SEQ ID NO: 744215

SEQ ID NO: 777736 - DNA, 600 bp, Homo sapiens
agtgtttgactaaattagaaacattctctgagtcttagaagcgtgaatgatttaaatgaggttccagcatagtattgcatgtggtttctattttagagttttcccacttgaaaacaaactttgaggatttttattgaagtccatcagttttaacttactcaaagcttagcagccaccttttgcttttcttcccgttccccccacctcatgctgtgaagaaagtcatacaccattgtggtgttgattgaaacctttatttctccaggtctcctctcataaactgggctaagaaacacaaaggacatttgacacttcatgactacataagatgtgctgttcctctctctttctgtttgaaagtgacttggcagggtgaagttgagaaccccttggaaaggaggaagccgaaatgcaaacaaagttgaatcatgargtgatgtcactctgaaccaattggagcagtggtgtcatgtgcctggcagctacttcaaatgcccacaaaacaggagtaatggtttaagctgtttccctcttcccctcccaccaccaatcagcagcagactgctagaggacagatgcaaaacagttattagaccaggc

SEQ ID NO: 777737 - DNA, 631 bp, Homo sapiens
aatttatacgttgggataagagaaccatgagaaaaggtatattctaagtcctgaacatctttctataccctgaagatgtttttatagctcttctgctgactccctgccaaaaaaactatttacggtttggggtagggggcgtgtcatgccatacagctaaatacacttttttcctaatctaggaggcatgtctacttacaaataaattgcttaaactagttaggcttgtgtaaatgtaactgacatttccttgagatcagaaaaagttttgctgattaactatatttgtgtgtgtgtgtgtgtgtgtgtatttagagagaaggagggattttataattattacaatttgatttgaaatgtctagagaaagtgagagattatggaaattaccataaatgctccctttttcatagatttagatctgttaattgcaagmaatctttttttaagtgaatcaatgggaactttttatttcttccctaagattcatttagccttgaaaaggccaaaagttgaatgaagcttctaaatgccaatctttccctccttctgttaaagagtatgcttcaactataattacatttgcattgtttaaaatattagtaattctacagccagacctctgagatag

SEQ ID NO: 777738 - DNA, 600 bp, Homo sapiens
aaaggcggaacagttcactctttttcttttttttggacacaaattctcactccctcacccaggtcagagtgcagtagcatgatctcggctcactgcaacctctacctcctgggttcaagtgattctcatccctcagtttcccaagtagctgggatttcaggcrcgtaccaccatgcctggctattatttgcatttttagtaaagacagggttttaccatgttggctaggctggtctcgaactcctgacctcaagtgatccttctgccttggactcccaaagtgctgggattaaggtatgagccaccttgcccggctaccggacagtccactctttacaggggggcgtcttggtataagtatggaaagctccgtagatgccgtgtcagtccataccctcaccaccttcttgaccctgtgccgataaactaagagatgtgggcagtgtaccatctggaaaggaaaaggctttggagccaggtagtcctgcctgcatttgaatctgctttctaccacttacttacatcaggttttccttgtctataaaatggaagtccttgtacccaccacctagaatggaagtgaggattaatccagaccaa

SEQ ID NO: 777739 - DNA, 584 bp, Homo sapiens
agtgatcacaacttatgtgaaatacagaccatcacccacagtttacgtgttcacactaaagtgccagtctctctatgggttttagagctgatttagatacatgcattgctaatacagtcagcccagccaagatagtgccatcctccgcaagcatccactaaggcatggagtcagcttccgtcattgttagatcagtacttgtttctttsccttgcttatttttcctaacctctctgaacctgctgtgttggaagcttaaggaacatcatcctctgttgggcagaattcttccatggccaccccagcattatgccccacaccatttgacttactcatttgtgaatgccaactcagaatgtattgctttgattcttgattaggatctcaacctctatttattgttaagactatcaccctttgattcccccccatcccattgtgtccttctaaaggcacagaatagaacatcttctgccagaaataacatacaaatttatcatcatacaactgtacaatatgcaaataacttgctagatgatattactgaagattctacatccaattaaaataaaaagagaaaacac

SEQ ID NO: 777740 - DNA, 618 bp, Homo sapiens
catgttgctgttctgaacgctgtaggcaatggtaacacagtggtaagtatttctgaatctaagcatagataaggtgcagtaaaaaatatagtgtaaaagataaaaaaatggtacacctgtatagggcacttactaggagtcaggcttgcaggaccagaagttgctctgggtgagtcagtgagtcagtggtgagtaattgtgaaggcctggataaatactgtacacttaggctacacttagtgaatattacattttatttatttatttatttatttatgagatagggtcttgctctgtcccccaggctggagtgcagtggtgcaatcacagctcactgcagcctcgaccgccaaggctcaagcgatcctcttacctcagcctcctgagtagccgggactagacgcacacaccaccatgsctgactaatttttgtgtttgtagtagggatgaggtttcaccatgttgcccaggctgatctcaaactcctgaccttaagtgatccacccgcctcggcctcccaaagcactgggattacaggcatgagccacggcgcctggccacagttaacttttttaataagtagaaggtgtacactcttaaataactataaaaagtata

SEQ ID NO: 777741 - DNA, 593 bp, Homo sapiens
tgggagatcatgaggggctcccctgtgtacaaactctgaaagcctagtaatcctaagtacccaatttctcattcataggaccccagctctggcaggaggaaagagtacaagatgctgtcataaggtgcctctggttgctgctctttggaagccacacatctgggagagagaactatgggattaacatgggacctgggtaagggggatggctaagtagaccggggtagccacctggatatagaaggcaaaggaaggaagagggagatcaaagagggctgcagtcgggaggaataagcctcggctgcttagatgggkgaatgtcatgtgatcacacaggaaaagctcccaacagagtctaggagaagtcacaaaaggctcaagacatgaaggttgttctctctccacttttcttcgcttgtttggaaggctcatgacctagagcagagggccacagcttgggagaggcacacagagagagagacaggaataagatgatacaaaagagccacgtgcctgcagggtgttcctggagtaggcctagtaggtaaggaggctgaaacgatatttcagtgaagtcccccatcatcgttcat

SEQ ID NO: 777742 - DNA, 613 bp, Homo sapiens
ctatggatcctattttatgtttactgccccttgacatttcttaaaaggagtcttcaaagcagaaggtcctattctgaagataggtttctgggcagtaaagttgacagggtttaacatcaggaaaataaacctaatagaaaaagaaagaagcataaacaactccagytacattccacagtggcctttgatgggaagaggccttgtttatggagatctacgggcagcctagacggttcacatcctctggtgttgtgcagtgtgaggtctgtttcctaccctccccattagatgaccccagcatttgtagcagcggctacatattaaagccattagataaaatcatgccaatgagacttcaatgtttactcacagaatttctcaaattggggcactgttgacttattcctccctcatctatttctcccttagctcagccaatcccagtgctctctcttcttcagccaaccaatgcctgcatatttagtgaattttgcatttatgttattgaacttgaaagcaacttgcttaatataaccaaggaagtacctaaaaagctttatttcagtaagcacgatattggtaaataaggagagtgttgtcttatggtccttgg

SEQ ID NO: 777743 - DNA, 656 bp, Homo sapiens
tttaagaaactttggattgttcaaaatttcaaacatacaagcgttgccagaatgtaataaattgccagcgaccagtttcaactcatggcctatcttgtttcatccataccccaaacccacattccctttccatattatagaaarcacatgccagaacttatatctgtgaatactgtggagtgtacctttaaaagttatggcctattttcaacaatatagccataataccattatcacatctaaaacatatttaataataatccctaatatcatcaaatattgaatgagtgttaaaatttacagttgccccaattcttttgcactaagatgttcaacagtaaaagtacattataacttcattcaactcataaacaaattgccctatttaaataaaagctctgaattcatatcctatagaaccataacattcctcaggacaagacacatgaagtctcattttaatacaatgccctaattatgctgctgaagttttattaaacatttgtcctatggagatatgtaaaataatttgttttcagttcattacctttctactcaaagattttatcccataaaaacttccatatgagttagcactatttttgagttattcatagctcataacaatacattttatttttaagtcttaaattact

SEQ ID NO: 777744 - DNA, 476 bp, Homo sapiens
acaataactaaatgtctttgattatatatagttctcttgaaaaacacatgcaatagataaaatgcaaacaaaatatagaacttattaattcttccctggatcatatccttgtttgcaatgtaaaagaaaaacaagaatgtctctataaaaatatgtctgactacacaattaaattgttctttttattgtttcattatctaaaagccaattttgaaagctgaaatatttttaaaaaacaaaggtcaaaattatgccaattacttagatakaatacaactaatttctgccactcatttacttgattctcataaagataaacaataacttcttatttgtattttctaatatttaaaatttccattattactactttccttaaggtcttcttatttcttgatattaatattaaatgaaccactgaatggaaataagaagtaacacacatagatacaaggtgagacttcaaccagagtgat

SEQ ID NO: 777745 - DNA, 634 bp, Homo sapiens
ttctaattaagggtatattcatataaattggtagtaaacagaaagaaaagagaggtaggcatattattaaacaaactcaggaggcttacgtttgtgtgcaaatgatggacgaactctgactttgcataaatttgaacccaaagagcatctctggacacagtggtcttcagaaataattaagaataattgagatcttaacagtctatattatagaattcacccatataattgtagtaattgtagtttccttttttttaacagtaatttccattgctctccaaggatgtccaaataacaccatttcctactaaacttgagcttatctgcccaaatttacctatttgttagaaaatgtttatctaaataaatctatgctttaagctgttttagagatttgcmtacctaagtcagtaacttttaaataatgtttgccaaattgtttatattattattgagtcatctattgggggatccttagggagttagcctgttgtccaatgatgtcatttttggatatgacagtacaattatgtcataaacttggaaaaaatgtgtctattctcagtaaaaggatggcatacatccagctcatccaaaatgatcattgagtaatcacagtaaaaattaaacacag

SEQ ID NO: 777746 - DNA, 629 bp, Homo sapiens
tgtaggacacagtgataattgttgccagcaagatctgctgatgaatgaccaagtcagtatgcaaaatgggaggaataaagccatatctgtattgtctcaaaagccatatctgtattactaatttatttaattaatatttaaccattacaaagaaaaaaagttttaacattatggtggagaaacttggtaggcaccgccttacccaggtgatccaagtaagcatcaatrgtaataagacacggtgatataatgtgcctgagagaggcacaacataacttctgtgttattttaacaaaaatgcataatattctagtaaagagaaaacactgggctaacccaaactgactaaggttaatcgaagatgtcaagatcatgagagggaaggaaaggatgaggagctgttaaggatgagagaagactaaggagatatgaaaaattaaatgcaatgtcaaattctggattggatgctggaacataggacaaaatataaaaatatattaggagaaaaatggtgaaattcaaataaagtctatagcttagttaataatattattgtattaatgttgatttcgttgtcttaaatatactatggctgtataacatattagcttagggaaagtgaagtaaag

SEQ ID NO: 777747 - DNA, 629 bp, Homo sapiens
tgtaggacacagtgataattgttgccagcaagatctgctgatgaatgaccaagtcagtatgcaaaatgggaggaataaagccatatctgtattgtctcaaaagccatatctgtattactaatttatttaattaatatttaaccattacaaagaaaaaaagttttaacattatggtggagaaacttggtaggcaccgccttacccaggtgatccaagtaagcatcaatggtaataagacacggtgatataatgtgcctgagagaggcacaacataacttctgtgttattttaacaaaaatgcataatattctagtaaagagaaaacactgggctaacccaaactgactaaggttaatcgaagatgtcaagatcatgagagggaaggaaaggatgagragctgttaaggatgagagaagactaaggagatatgaaaaattaaatgcaatgtcaaattctggattggatgctggaacataggacaaaatataaaaatatattaggagaaaaatggtgaaattcaaataaagtctatagcttagttaataatattattgtattaatgttgatttcgttgtcttaaatatactatggctgtataacatattagcttagggaaagtgaagtaaag

SEQ ID NO: 777748 - DNA, 598 bp, Homo sapiens
atcatggaaaatacaacttttatttctctttctctcctcttcccacctctgtgctccagataaataatggaggttataaatgaaacgtgactgccagcaatagcaccactagcatgccccatctacttttctcaaaatcctttcacaaaacaacactgatatgaggcaaaattgcacccttctgcaactcttttcaggattttcattactgattaaataaaatatrtgctcaccttcaaggcagctgactgtacagccaaagtgagttgcttaactttgtttatgattttgcataaagtatcaaatcatggccgtgatcattgcaaagcaggaattgtttttccagctgaccctcgcccctagtttcaacaaatctcttcgatccctttcagttggtttccatgccagctatttgctggtctgcattgctgagtctatgcacagcagggtttatcagagggccatctgctcttcttgataactccagtacagcaaacatctgctgtagaactggaaagagctagttcaagccagtttttcttaattgcactgtttttttttggcagacaattaccttctccttaatttccccctacaa

SEQ ID NO: 777749 - DNA, 598 bp, Homo sapiens
atcatggaaaatacaacttttatttctctttctctcctcttcccacctctgtgctccagataaataatggaggttataaatgaaacgtgactgccagcaatagcaccactagcatgccccatctacttttctcaaaatcctttcacaaaacaacactgatatgaggcaaaattgcacccttctgcaactcttttcaggattttcattactgattaaataaaatatatgctcaccttcaaggcagctgactgtacagccaaagtgagttgcttaactttgtttatgattttgcataaagtatcaaatcatggcygtgatcattgcaaagcaggaattgtttttccagctgaccctcgcccctagtttcaacaaatctcttcgatccctttcagttggtttccatgccagctatttgctggtctgcattgctgagtctatgcacagcagggtttatcagagggccatctgctcttcttgataactccagtacagcaaacatctgctgtagaactggaaagagctagttcaagccagtttttcttaattgcactgtttttttttggcagacaattaccttctccttaatttccccctacaa

SEQ ID NO: 777750 - DNA, 536 bp, Homo sapiens
tagcatccactccaaccgtttcctattaagacagagaaagatgaactaagacatctattagcagctcacaaagatgatagaaattaagatttgaatggctattccaagaacttagtgcttctgttttccaatgcctatcaaaaacaacaacatttcagaatgactaggcaacccaagggttacacacagtgcagaagtcatggggtatttggtggggtagcctggtcaggacagactrttttctgtctgtcactaactgtatgtccaatgaattggaacttctgaccaggagaagggacctctgggtcgggccaggtgagtgggaatgtccatgagtcagatgaggttataaaaagtttggggagcttttgagaaaaacaatctactgaaaagaaagcatagagtaactctaaagagtgtgatctctggcttcattcggcccagctgacgtcctctctcagctctgtgcttactattgacatgatcttgggaaagttctcatctggcctccatgggcctcagcactgtcatcagta

SEQ ID NO: 777751 - DNA, 410 bp, Homo sapiens
gagagggcacctagtaatgacacatgcagactggttctaggtcagcaatcttgtacttgcagcatgtctcatcacaaaagagaaacaacagctctagcagctctcctctgcaccatgattttgaggtggcaaaagcacaattctggtgcctagttttccagtgctttccataattctggctatgaaggttcttaacccactccagagcaggcagtttaaactctggcctgagactcaaaarcctgcatagccatgttcccaagtcaccaaagaatggctgactttgtatgcacctgtattaaaaatggcatcctgccatcagtcctgggtctgtgaaaatgtctgcagatgttcccagtgtctttccttcatagtgtctcatagcctctccccaggttagcttcaaggct

SEQ ID NO: 777752 - DNA, 640 bp, Homo sapiens
aatggactcacagtttcacatggctggggagacctcacaatcatggcagaagacgaaggaaggggaaaggaacttcttacatggctgcagacatgagggcatgtgcaggaggactcccatttatagaaccatcagatctcctgagacttattcactaccacaagaacagtatggaggaaaatgctcccaccattcaattatctccatctggcctgcctttgacatatggggtttattacaattcaaggtgagattccagtggggacacagccaaaccatatcaaccttgaaattagtagtttcttaatcttctttaaacatcagttttcttatcaacaaaatagatattataataatacttaacctcattttagaattgggaagactattaacaaatatattacgtaaaatcccctgattagaaaggtgtacagttatgactgcagatttccmtgccactaattctgtttcagaatgttgttcaaaactatgccttctaaaacacaatctttggagaagatgtacaagcactatatgggaaattgtgggaaatttacattatatgccctaagtaaatccaagagcaattactgaaagaatcactagtataataccaacaaggagatataaaaacgtcttc

SEQ ID NO: 777753 - DNA, 603 bp, Homo sapiens
tttagatcgttactaacttccacgttgctataaatatctttcttacattttgtcaaaatacttccagcaacattctcattttgtacctctcttaacgtaaccatggattcatccaacaattctaaagacccgttgactttctacacacacttatttttcactctctattaaatgaaaattctcctgaggaaaaaatgctttgtggttttatatttaatccctaaaaataatctttgcaaaatcagttcaaagacgccggagcttactagaayacttagttactaggcaaacttctctttatagtttaacagatataatcccacatgataagtaatgctcaaacagtttaagcaatttaatcagggtcgtggattccagtgccctgggtaaagagaatgaaagttcatttctgactccaaagacaagactaacttccaacacacatggaaaaggaataagttgagacatgtaccttgtgattgttttcttttctttttctttcttaaacatacttttcttccccacatagataattttctcccgtggtcttacttaatttgataatttttaaattctgcaacagttaaggtaatttttatgtat

SEQ ID NO: 777754 - DNA, 628 bp, Homo sapiens
tatgttcaggtctctctgattctgggatattgagataattctttatatatttttctagaacaaaatcaaccagtattatcagttcaccttgccccaatatgtaaaagctgtttatcaatatcacaaaattatgaaaccatggaaaaacatgaagacaaatgcttaccaagttatccccactctggtgagtgctctctttttatttgcaacttaaaaatagttatctkttgtgctaaaagtaagctagggggatgaaactgacataatcccaataaactcaagtagaagttgaaacaaataaaaatgcctaagctaaaaattaaataataaatcatatgcaaatacagcataataaataaaaataataatgttacaaaagtagatgaaattgtaaaaagtagctggaccaagttctagttaacatttatcctttatcttatttaaaaaaaaaaaaagagatttgacctagggaacatttcttctaacatgaagaatgaatgagagaacaggacattgaacccacagaactaaaatgtattataaacaacatgggttttggaatcagaagacctaatataaataggcttttgaacataggcaagtcacatcatttctctggaatttttta

SEQ ID NO: 777755 - DNA, 612 bp, Homo sapiens
tgatcctttcacataatttcatagcagttaagacaatacaaacatcactcactttacacttggagatgaaaaaataatactcacatggaaaataatttataattgataaaaatacacctcattaatcaaacacaacattaacagatgaattttacctgactggtttggaagaccatattattgttaagcttaaacttctggaaaaaataaataatattcattttatagctatataaaaatgacaaattatttaaaaacatttaatgtaagaagttatgacttacttcttggtagatgctggcagattacttagaaaaataaattaatawtacatttgattacttgtgaaatattttattcatactacccaaattagcatcaattcatactcattatacagtagctcaagataaaatacttggtcttttcctgaattacagagtgaatctgaccaaaaattttactctccttaattaacttattattatattctagttaaataacttgatctgaactcttaatatacttgtgggataagccagatacaatatttttgcaaatgctaacagcaaacagcaaaggaataattttatttgtcttctgcacagtttt

SEQ ID NO: 777756 - DNA, 465 bp, Homo sapiens
tttgtattgattacttttcttctttctttgtttttcagaatgtaatgaataagatgcacacaatcagcgtaccctactctgttatgaaaacctgtcctctctcttgggtccaaagagtacatgctcacaaaggtagtcacctgcaacatctgagctttaattatgtgactgtttgaattaagatttcagggatttcagagattttcaaattgcccttgtatgcccctgtcccttaacagattgtagagtttagttactacagaattaggtaccttkcctgttcatctcactgatgtcctctcttaagcattgagatgaattttttccaaatgcgagccttgaattagatttgactgtcttggtattcacagtttccttggctgggacactgtgacctgcctagagggtctcagtgaacaaacaattgtaggtccagtcagttgtctaaatgtgataatttctgcc

SEQ ID NO: 777757 - DNA, 521 bp, Homo sapiens
agcaaaaatcctgttatgaaaggaacttgtttatatctccattaatctatagttgtgaactgagtatagcctcttgcataaggagatattaatagctaaatctatgagcagttattagtgccaggcatattccacktgttttacatgtattatttctttaatcctgataaacctatgaagtggaaataccattgttatcttcattttaagattaacaaaactaagacatagcaaggtcatttagccaataaatggtagagtcagaatttgaacctaggcagtctgatcccagagtccatgccctttacgactacaatataactgccaaagaatccctgactaccaatactgaactcgtagcaacgttttctttccacttctactactaataaagtgggagcatttctttttacacaattattgatagattctcccattgacgtttttacacttctgatggtgcaactaatggcagaggacacattggggtaaggcagacatttagcattgtttcattttta

SEQ ID NO: 777758 - DNA, 521 bp, Homo sapiens
agcaaaaatcctgttatgaaaggaacttgtttatatctccattaatctatagttgtgaactgagtatagcctcttgcataaggagatattaatagctaaatctatgagcagttattagtgccaggcatattccacttgttttacatgtattatttctttaatcctgataaacctatgaagtggaaataccattgttatcttcattttaagattaacaaaactaagacatagcaaggtcatttagccaataaatggtagagtcagaatttgaacctaggcagtctgatcccagagtccatgccctttacgactacaatataactgccaaagaatccctgactaccaatactgaactcgtagcaacrttttctttccacttctactactaataaagtgggagcatttctttttacacaattattgatagattctcccattgacgtttttacacttctgatggtgcaactaatggcagaggacacattggggtaaggcagacatttagcattgtttcattttta

SEQ ID NO: 777759 - DNA, 530 bp, Homo sapiens
ccatgccttagtacacgttgctttctcttggccagaaatgctcttcctcccctccccgtttagccaaatcctactcatccttcaaattctggaacttcattttacaccttcgctaaatattgatttagaaaccttcccttcttctgtaacatcccatgctttcttatgtcgtggcactaattgcactacaccaaaaccttcagttaggtctcctcctctagyagtctttcataatagtaatgtgttacttattgagcattccagggaatttacttacattatttctaatccccaatacaactgtcaaaagtacctatcttcagctacaattttaagctgaggaaactgaggcttagaaagtgaagcaataagtccatggccctgtaattataatggcagcattacactcgcatctgtttctataatgtcttattgactctgtctcttcaccaccaagcacagtgcctgagagtttcctggttagatggatgtggatggatgcatggtctgggttgaaatagatcctagtt

SEQ ID NO: 777760 - DNA, 616 bp, Homo sapiens
tagtcatccgtctaaaaatggaaggaacaggcacaaaggggcacttgtcttcacagggagcccagccagcaaagcctgtagaccgactagaagagctgggccgaagatcagcctcaagggtgctcccccaggcactcagtctgtccaactgtagggcagatgccaggtgcagaaaagaaaaaccagatcctggacgtacatagttactaaacgccacatttttgattttgaagttttatcttccctgtgtccctgagcatattatctacctgtcttccttgagggaaagagaaaagaatgaatgtccactggatacctactatgaaccaagacatgttctagayggttttcctttctaaatgtattttaattgtattagcatttttaatctccattttacaaatgaggagagtggggatcagagaggctaagtcactagctcaattttacacaaccagtagatgatagagccaagatatggttctagggagatgctatcttaaagtccatgcttgttccatttttgctactgctgatacagttgtaaaaatcaaattttggggtttgtgtaccagaatcaacagctaatattacccacccacttataaccttattg

SEQ ID NO: 777761 - DNA, 625 bp, Homo sapiens
atagtatttgtgcatatttctgtctcccccaggctctgagcttctgagggaaggtattgtgccatttttattctcagtatttattagactatttcaaatactgtagttcatccattttacaattatttattgaatacctactatatgccaggcactattttaggtgctggatatatagcagtgagcaaaacctggcaartctctgatttcatggaacttacattctagttggataggacaaattcagtgaatatggtattaactccaatttaaagatggagaaactaagattcagcaatgttactgggtatagcttccccagtcatcaggccataaagtggcagagttgggaccagtaatctagtcatgatttgtagcttcatgaattttgctctttattacactgtcttcaaatatatagactccttaatttatattctgactttctaaaagctcaacctacttgacatacattctcatgttctcaaagtagaagttaaatcatgcatgcaaagataggttttatagtaaagttaaattcataaccatagcttttgactgccacttttgtgctagtctataagtaaattttttcaaaatctggtcctaggacccatgcacatca

SEQ ID NO: 777762 - DNA, 625 bp, Homo sapiens
atagtatttgtgcatatttctgtctcccccaggctctgagcttctgagggaaggtattgtgccatttttattctcagtatttattagactatttcaaatactgtagttcatccattttacaattatttattgaatacctactatatgccaggcactattttaggtgctggatatatagcagtgagcaaaacctggcaagtctctgatttcatggaacttacattctagttggataggacaaattcagtgaatatggtattaactccaatttaaagatggagaaactaagattcagcaatgttactgggtatagcttccccagtcatcaggccataaagtggcagagttgggaccagwaatctagtcatgatttgtagcttcatgaattttgctctttattacactgtcttcaaatatatagactccttaatttatattctgactttctaaaagctcaacctacttgacatacattctcatgttctcaaagtagaagttaaatcatgcatgcaaagataggttttatagtaaagttaaattcataaccatagcttttgactgccacttttgtgctagtctataagtaaattttttcaaaatctggtcctaggacccatgcacatca

SEQ ID NO: 777763 - DNA, 639 bp, Homo sapiens
atgatttttgactactggtttacctgaagtttcttacattttgtattagtataactttacagcctttcatatccagaatgcttttacacacattatctgaagagtgaggttttcaggttattatctgaatggtgaaaattgggtttctatcgtagtaattatgggtgaaggggaaatatgtgttttttaaaactggacatttgtaatgttgctgtctgagcctatagccccctaccttcacctctttatgctgtggagtcaggcaactacactagcagtcaaatgcctgaggttcgcagtttgccctatcagtgctcttgagggttctcatgtgagtgaaaggagtgactatcccatgccctgcaccatttctgtggtggtagtggtggttgagggaagaagtttcatcttcacatttcaggtatttagaaagcccatctggagatttagttatgggactacctggctatagtcttggctagggcgttagtagatcartgaaattttctcatcaacacgaagggctctaagtgttaaagggagacagtgcccacatcaaccatgactaggagtttcacatgtccatatttcatacattttagtactctggaaatagaatcccactttcctcatccccat

SEQ ID NO: 777764 - DNA, 470 bp, Homo sapiens
tgagttctgaaagtggcacttctttcagaatttaatttattttacatagatgaagggaatacactgtcaaatagatataagctagagaaatgtaaaataattgtatgaattatacacttagaaaaggatcatcggccagatgttttgcaggaaaccaaaaactagacatagggaaactagacataaaaaaggattgagggaacttttaattaggagagtaagatcatttttaaatgcatttttatctgtgaataaatctgaatggataagaccatgttttaattatgaaacaggrgacttgggatggagcaagacagtggaatagaaggcactacaaattgctcccatccccacccaggacaccaatttaacaactatctcccccaaaaaaaaaaaaaaaaaaaaaaaaaaaaagcaccttcataagaaccaaagatagggtgagcactcgcggtgcctggttttaactt

SEQ ID NO: 777765 - DNA, 573 bp, Homo sapiens
agaatccaagattaagatgcaaaccaccatgcccagtcacatcaatcagaatggctattactaaaaagtcaaaaaataacagatgctgtatcctgataccaaagcctggcagagacacaacaaaaaaagagaattttagaccaatatccctgatgaacatcgatgcaaaaatcctcaataaaatactggcaaaccgaatccagcaacacatcaraaagcttatccaccatgatcaagtgggcttcatccctggaatgcaagactgattcaacatatgcaaatcaataaacataatccagcatataaacagaaccaacgacaaaaaccacatgattatctcaatagatgcagaaaaggcctttgacaaaatttaacagcccttcatgctaaaaactctcaataaattaggtattgatgggacatatctcaaaataataagagctatttatgacaaacccacagccagtatcatactgaatgggcaaaaactggaagcattccctttgaaaatgggcacaagacagggatgccctctctcaccactcctattcaacatagtgttggaagttctgg

SEQ ID NO: 777766 - DNA, 536 bp, Homo sapiens
ttgctttgtcacccaggctggagtgcagtggctcgatctcagctcactgcaacttctacctcgcaggttcaagcaattctcctgcctcagtcttccaagctgggactataggcatccaccaccagcctggctattttttttttttttttttttttttttttttgtwttttagtagagacagggtttcaccatgttacctaggctggtcttgaactcctgagctcaggtaatccacctgcctcagcctcccaaagtgctaggattacaggcgtgaaccaccgcaccaggccagcattgcaattaattcaatttattggctatagtttaacccaatttcaatttctatcctatatttattttaaatgaaaatctgtattcagcccaataaaattcagttttatcttcctatctgcaaaatgaggtttttaaacaaaattatctttaagtacttttccatttataagaagaaaaaaccattaatatacacttgaaaacagtttcatttcctgaacaaaactaaaatatttaaatattta

SEQ ID NO: 777767 - DNA, 620 bp, Homo sapiens
ttttttcatttcagtaaaactgatatgtagatttatttgaatttttataaagaatccctgcacttataataatattttcatttgtgttttccatacataggaactccctgtagctacacattgcttataggattgtgttactgcagtaaacagaatatactctagctagattaggcagaaatggtatcaattagagggttgctaattagaagatattaagattaatcagagggtataaatcatatgtgttaagtattcatcagagstacctcacatttaccattagatagatcacagaaactgtgggagggccagtagagatacagatggcaaataaacatatgaaaaaagtgctcagcttgggcgacattgccaaacccctgtttctactaaaaatacaaaaattagccagacgtggtggtgcacacctgtagtcccagctacttgggaggctgaagtgggaggataacttgagcccaggaggtcaaggctgcagtgagctgtgtttctgccactgcactccagtctggatgacaaagcaataccttgtcttaaaaaaataaaaagctcaatattattagtcattaggaacatgcaaattaaaaccacaatgaggccag

SEQ ID NO: 777768 - DNA, 512 bp, Homo sapiens
aactcaggggtgcccaacccccgggccacagacttttacccgtctgtggcctgttaagaaccgggccgcacagcaggaggcgatggagggtgagcgagcattaccccctgagctccgcctcccatcagatcagccatggtattagactctcataggagcacgaatcctgttgtgaattgtacatttgagggatctaggttgtgtgctccttatgagaatctaactaacgcctgatgatctgaggtggargtttcatatccccacccccaaatccataggaaaattgtcttccacaaaacgggtacctggtgccaaaaagattgaggagcactgatataactaataaacgaatgtaaccttaagttgtaactccatataggtgggatcatagtggcagagctaagagtagaatccaggtctttgaacagtccttcttgtcgccactgtctctagagctgaagagataagaaaagatagttgattgcaataaataaggactcacagaatgagaa

SEQ ID NO: 777769 - DNA, 585 bp, Homo sapiens
tagatgagcagttgtataccaattcatgggctatagccagtggtttggctggatggtcagggacatgaaaggaacatgattagagaactggtgacaaagcaatttgggaaggagttactggctagacctctctgagtgggcaaaagacatgaagatatttgtgtcccatgtgaatgctcaccaaagggtcacttcagcacaggaaaactttggtaatcaagtggctagaatgacctgttctgtggataccaattggcttcttaccctagtcacccctgtcaatggccaatgggctcaygaacaaagtggccacggtgggagggatgaacaatatggattgggctcagcatcatggactttcacccaccaagatgggcctggctacagccactgctgagtgtccaatatgccagcagcagagaccagcactgagcccctgatatggcatcattccccagagtagtcaaccagttacatgggacacttccatcatggaaggggcagcattttatctttactggaatagacgctctggatatggatgtgccttctctgcacacagtgcttctgccaaaactaccatcc

SEQ ID NO: 777770 - DNA, 585 bp, Homo sapiens
tagatgagcagttgtataccaattcatgggctatagccagtggtttggctggatggtcagggacatgaaaggaacatgattagagaactggtgacaaagcaatttgggaaggagttactggctagacctctctgagtgggcaaaagacatgaagatatttgtgtcccatgtgaatgctcaccaaagggtcacttcagcacaggaaaactttggtaatcaagtggctagaatgacctgttctgtggataccaattggcttcttaccctagtcacccctgtcaatggccaatgggctcacgaacaaagtggccayggtgggagggatgaacaatatggattgggctcagcatcatggactttcacccaccaagatgggcctggctacagccactgctgagtgtccaatatgccagcagcagagaccagcactgagcccctgatatggcatcattccccagagtagtcaaccagttacatgggacacttccatcatggaaggggcagcattttatctttactggaatagacgctctggatatggatgtgccttctctgcacacagtgcttctgccaaaactaccatcc

SEQ ID NO: 777771 - DNA, 602 bp, Homo sapiens
aaaaagcagacatttagtgcctaagggaatttgcactagaaaacccttttcttctacaggttgatgcccggtgaaagtaaaaacatgcctgtgccttgcagctagatagatatagatttgaattgcaattctgccacttcctggctgtaatcatctcagacatcagacaagagactttaacgtcttggggcatccatttcatcatctctaaaacagggacaaagccaggcrtggtggttcatgcctgtaatcccagcactttaggaagccaaggcgggcagatcgcttgaggacaagagtcggagaccagcctgaccaacatagtgaaaccccatctctattgaaaatacaaaaattagccaggcatggtggctcctgcctgtaatcccagctacttaggaggctgaggcaggagaatcacttgaatccgggagggggaggttgcagtgagccaagattgtgccactgcactccatccagcctgggtgacagagcgaggctctgtctcacaaaaagaaataaaataaaataaaaataaaacagggacaataccaagggtggccataaaggccaaaagagataatgtagctgctgcctaccac

SEQ ID NO: 777772 - DNA, 602 bp, Homo sapiens
aaaaagcagacatttagtgcctaagggaatttgcactagaaaacccttttcttctacaggttgatgcccggtgaaagtaaaaacatgcctgtgccttgcagctagatagatatagatttgaattgcaattctgccacttcctggctgtaatcatctcagacatcagacaagagactttaacgtcttggggcatccatttcatcatctctaaaacagggacaaagccaggcatggtggytcatgcctgtaatcccagcactttaggaagccaaggcgggcagatcgcttgaggacaagagtcggagaccagcctgaccaacatagtgaaaccccatctctattgaaaatacaaaaattagccaggcatggtggctcctgcctgtaatcccagctacttaggaggctgaggcaggagaatcacttgaatccgggagggggaggttgcagtgagccaagattgtgccactgcactccatccagcctgggtgacagagcgaggctctgtctcacaaaaagaaataaaataaaataaaaataaaacagggacaataccaagggtggccataaaggccaaaagagataatgtagctgctgcctaccac

SEQ ID NO: 777773 - DNA, 538 bp, Homo sapiens
ttaatgcaaatctaactgttgtccttttgcatggttcaagataactcagaagttagcaaacaaggtgactgacagtacctctaacctccatatagacattgccttctttttgaaaagtgcttttaatatacattccaatgacttcaaaaggaaagtagtaatttctagaaatgtaaatagaattattcaaaaaggaaagttaagacaaaatctttcaaaataaataggatttagttaawagagaagaaaaatcaatagtttaatcacattttactaataagattctttaaatcatcttactttgtcaaatggagaaagcagaaactttagattatctcattactctctcaaatcaaaccagaggcctatttatgtcttcctgttcccagaagagcacacacgtgttgctgaatgcgtgaggtattcaataagcagactgaaggggaccacccctgcagtatcagaaggaccctgtgtgtctggggaagctacagtggttgcctaaggttaagggtcaggaacagtaaccctctccagg

SEQ ID NO: 777774 - DNA, 528 bp, Homo sapiens
ctttcaaacattgcttggtggaagggagcagattacaacacaaatggaaagaaatttggcaacatctacaaaattgcatacacactcatctttcatttcaataattcctctcctagaaattaaccctgaagatatacttccaacaaattgaaaatatatatgcacaaggctattaactacagcattacttgttatggcaaaatattagaaactacctaaatgtccaaatrtaagaaattagataaatagataatggtacatacaaataatggagtattatgcagctgggaacagagcaaggttgatctctatgactgataaagagtaatttccaggagatattgttaaatgaaaaagacaaaagaacaaatacagtatgctaccttttgtataagactaaaggggaaataatatgcatacatgtgtttatctctacaaaaagaaatacagaaaggataaccaaagtcaatgaacctacaagagtaggaaggaatgggatggaatgaacatggaaggtagtggcacttc

SEQ ID NO: 777775 - DNA, 606 bp, Homo sapiens
gtggccagagaagggccggagtgatacttgttggtttcttactgccactctcctggtcacatgagacacacaagttaacaaaccaaagtgcttgaacttatagggctatattctgggaaaaagagacaggttacgaatactaaatctgataaatgtatgaatgatatagtgtagtagaaggtaagaagtactgggaaaatatgagaattgaagcaggtaaaagtgtaggggctacagtgttcaacaggtttatcagggttggcctcaactgagaaggtgatatttgagcaaaaacttgaaggtagtgagggagtttgccaagaagataacaagatgaagggaaactcaggtttttaagggtataatgcacaatttaaggtagaactatacttttcatgtgaaagagaactgatgactagatcatacactgcagttcyaacataattataataagagccataaaatgtaattgaaaatgttttgccacaataagaagataaaaagaaacaactgttattaactttaataatacattttatttaacttaatttatctcaaatgttatcatttcatcatataatcttcaaaatccagagtgtattttgt

SEQ ID NO: 777776 - DNA, 606 bp, Homo sapiens
gtggccagagaagggccggagtgatacttgttggtttcttactgccactctcctggtcacatgagacacacaagttaacaaaccaaagtgcttgaacttatagggctatattctgggaaaaagagacaggttacgaatactaaatctgataaatgtatgaatgatatagtgtagtagaaggtaagaagtactgggaaaatatgagaattgaagcaggtaaaagtgtaggggctacagtgttcaacaggtttatcagggttggcctcaactgagaaggtgatatttgagcaaaaacttgaaggtagtgagggagtttgccaagaagataacaagatgaagggaaactcaggtttttaagggtataatgcacaatttaaggtagaactatacttttcatgtgaaagagaactgatgactagatcatacactgcagttctaacakaattataataagagccataaaatgtaattgaaaatgttttgccacaataagaagataaaaagaaacaactgttattaactttaataatacattttatttaacttaatttatctcaaatgttatcatttcatcatataatcttcaaaatccagagtgtattttgt

SEQ ID NO: 777777 - DNA, 667 bp, Homo sapiens
tagaaaaaggagaactccaataatgtattaataccagtcgatagaaacatatattcgaaaagaggaaatgttataattaagggatcagagattataatggccatttcagcaaattttgctgggacttattctcagacaactgattcgttagagaactgatgagtggatttatagaactgwatgaaggggaaatgagaatttctcctcctgctgtaccaagaatcagagataataaggagagaaatctgaggagaaataagccaaaataagtggtggggttgggcgttcagggaatagaatcatcctttctcctctgctcacatgttttcagtcatgactggcaagatgatctgctcagggcatataattcagctcccttaatttatgaccccttcaggaatcttaaagatgcctcactctttgaagaacattctatttaatccctagagcatcctttagaaaatattaggggaagcctagcattatggaatttctcaggaaacttccctacttggaaccttaaacctttgtgatcattcttactttttcttaagatacagtaaaatctgtcttctcccttccctaagagaggaagcttatatatcctaaggaaaaaaatgtataagggagacaaacccccttgcttaaagctcatctattgaggaag

SEQ ID NO: 777778 - DNA, 460 bp, Homo sapiens
tatataaataaaacatatttgagtaaaaatatcacacatataggtttttcagtcacctataaggttcctaatagtgaagtttaaattgaacattgtcttgataattttatttaaaataataaacagaatattcatcgttgagctcacaatataatattttatactgtagatamcagaacctctataactacttgtgaaaagaatactgaataagtgtatgaacaaattcgtcactcaaaacaacttctaatgtaggaaaagaaatttcaaacctatttatttttagcagccacattaatagtgaattattataaacacaccatttaaaatgcatcaaaaactttctagttggtaaatattaaaaatcagtgtacatgatgctaaatggtgggcacaatctttcaaaatggaatatgaatctcctcccagaatattaaaacatgttttttcgatattattg

SEQ ID NO: 777779 - DNA, 460 bp, Homo sapiens
tatataaataaaacatatttgagtaaaaatatcacacatataggtttttcagtcacctataaggttcctaatagtgaagtttaaattgaacattgtcttgataattttatttaaaataataaacagaatattcatcgttgagctcacaatataatattttatactgtagataccagaacctctataactacttgtgaaaagaatactgaataagtgtatgaacaaattcgtcactcaaaacaacttctaatgtaggaaaagaaatttcaaacctatttatttttagcagccacattaatagtgaattattayaaacacaccatttaaaatgcatcaaaaactttctagttggtaaatattaaaaatcagtgtacatgatgctaaatggtgggcacaatctttcaaaatggaatatgaatctcctcccagaatattaaaacatgttttttcgatattattg

SEQ ID NO: 777780 - DNA, 621 bp, Homo sapiens
agcctcaagtgatcctctcacctcagcctcccaaagtgctggaataatagacaggagccaccgtacccagccttaagtaattcttttgatgctagtgtaaatcgaattgttttcttaattttatttttggaatttcattgcttgtataaagaaatacagtttatttgttatattgtcttatgttctgcaatcttgctgaacttgtgctaattctaatagtttttttgtgtatttcgtaaaatgtttatataagatcatttcatctacagatagagaaacttttcttcttcattccaatctgaatgtttaaaccgaacaccttttaaaaataaacttaatggctctaattagaacctccagtacaatatttaatagaagcagaaggwgtaaacgtatttgccttgttcctgatcgggagtggggaagcattaagtctttcatcattaagtatgatgttagctgtgggttttttatagatgtccgtttcaggttgttagtttcactctaatcctagttcatttaatttttttataatgatgttggatttttcttaaatgctctttctgtaccaattgagatgaccatattgattttttattaatgtgatgaattacattcatt

SEQ ID NO: 777781 - DNA, 621 bp, Homo sapiens
agcctcaagtgatcctctcacctcagcctcccaaagtgctggaataatagacaggagccaccgtacccagccttaagtaattcttttgatgctagtgtaaatcgaattgttttcttaattttatttttggaatttcattgcttgtataaagaaatacagtttatttgttatattgtcttatgttctgcaatcttgctgaacttgtgctaattctaatagtttttttgtgtatttcgtaaaatgtttatataagatcatttcatctacagatagagaaacttttcttcttcattccaatctgaatgtttaaaccgaacaccttttaaaaataaacttaatggctctaattagaacctccagtacaatatttaatagaagcagaaggagtaaacrtatttgccttgttcctgatcgggagtggggaagcattaagtctttcatcattaagtatgatgttagctgtgggttttttatagatgtccgtttcaggttgttagtttcactctaatcctagttcatttaatttttttataatgatgttggatttttcttaaatgctctttctgtaccaattgagatgaccatattgattttttattaatgtgatgaattacattcatt

SEQ ID NO: 777782 - DNA, 552 bp, Homo sapiens
taagaacaaaatcaaggaagaaactataatgccacataaagaataaaatacctatgaatacagctgactaggtaggtggaagagatctacaaggaaaactacaaacccctgctcaaagaagtcagagatgacacaaacaaatagaaaaacattccatgctcatggataggaagaatcaatatcattaaaatggtcatactgcccaaagcaatttatagactcaatgctattcctattcaactaccattgacattcttcacagaattagagaaaactattttaaaatgcatrtggaaccaaataagacctgcatagccaaggcaatcctaagcaaaaagaacaaagctggaggcatcatgctacctgacttcaaagtatagtacaaggctacagtaaccaacacagcaaggtaccggtgaaaaagcagacacatagacaaatagagaacagaatagagaacccagaaaaaagaccacactcctgcaactatctgatattcaacaaaggtgacagaaacaagcaatggagaaatgactcctgattcaataaatg

SEQ ID NO: 777783 - DNA, 642 bp, Homo sapiens
ctaaaaagaatgattcttcaactctctttcctatgcttgtctactctttagttctacttttgacaaaattatgcttctggtaatccttaaacttaattttaaagaaaagtatttattttcaataggtatttcttcttttacatttttctttctcctgggccactttaatcaggtgttgatagccaagagagtagaagtacaagttagttgtttgaaaagtatttagccttccctgccataatacacattatactgttttattaggttcagtgaaatgtttaatcatttgttcaccttttaaattgaagtttatccttccatgaacacatgctccataaaagaagagaccttgtttatctgtttacctctgattcttactatctggatcaatccctaactcaataatgttcattaattggaatattagatgatttatacatctwtgcccattatgaactcaccacatagttactgaacctccattttcttttcaaattacagacatcaaatcaattctgttttgcaattttctttaatatatgtcttcaaatatagaagagttgctaacatgctgagagtgagattcctcaacgtgacatttaatcgcaaccttattttgaagacactaagatataatgaggt

SEQ ID NO: 777784 - DNA, 590 bp, Homo sapiens
gagcagccgtgtcatctcgataccgctccccaccatctgtattataatttctcttcaatccaatgctttcttaaagaatgttcttaaacttcctatcttgtgaatgttcatttagttaaaattaacaatattatctacagaaaccacttaaccaggaatgcaacctgtgatactcagcaatatgctgaaagcaaaccaataagtgagagaggacgctgttgyctatcctctgcacaatggggttcccactcttccctaagagcaccacgtgctagcagtttcatctggtacactggacctgcgcacagactaaataagaccatcaatgaggaaagcttacttcattttctattatcttcgattaaaaggtatatacagagcaaaattctaaccgatgaccttgtagtgaagagcactttgggaactgctgtgttacattctaataaattctaaaaatccaaacctacttaaaactctttagtggctggtttttgcctgtaggtttaggtgtaaattcttttgtatggcattcaaggccatttggaatctgtctctggcctctaccttaaatgtatgctatgctgcaatga

SEQ ID NO: 777785 - DNA, 590 bp, Homo sapiens
tatagtcttcgtcatgtgatgagttaaattatagataagcaaaaatagttatactaagacaaattttaaaaccaaaacaaaatatatgtaattattatataattatttaattccgtaaatggcttttctatgcctaaaataagtgatgtaattttatgggttagtcagatatacactaacacatttgaaaaataggcaaaggatatggtaattggcagaaaattatgctacgatactctttaattttaacaccaatcartggagtattttaatgagtctaagataccctttttcaaggtttctggaaaagtcacatggtaacatttgctaggatattatgaaccttattagaaagcaaatttcagtagattttgagtatttggagtattgactctcaatggtggtttttcttgactttcatgtcttttttgagaaaatcattgaatatgtacataaatattttcttcccaggttattacggtagtgttatttttaagagggaaaattggaatcactgacctttgaaataatgtaagcactaaaggaattatggtgtatccatgaaatggagtactacgtactctataatg

SEQ ID NO: 777786 - DNA, 643 bp, Homo sapiens
ctaaccaagcaacacatagacagaaagatgctgtaaagatagaaagttgtgtaagtggatggttggagctaagggtagctctcaggtggacacagacagaaatgcagacagatgtcttggcttatgagtgcatgaacagcctgccctgattttctggggcattctgctagatcttggatctatggtgttggcattgacttacgtcctctttggagtcagagatgactcctctcgctcagtgccctgcaccacacttcccttcagctgggccggccactgctgcacaagtggctgcagaaatccctcctggcagggactaaggaaggcagsctgggctgctgtgcaccccaggccattttctgagttgggaaaaggttgctgtccaggtggtgtggtccgtgtaaaggcagtaaagggtttcaagaggcctgtcagtgcatatcatctggagtagggtgtgtgctggggagcagggaggaggaggagagagaaagcaggaaactttgagcttgcctgaggaagaccacccgcatggattgtgaaggatggctcatattgactgtattttcattcaaatgtgcaaaactatttactgaattttttttactgactgaaaataactcctgacttacagaatattttc

SEQ ID NO: 777787 - DNA, 619 bp, Homo sapiens
caatattttgaagagaatctttttttctgagcaataggtctcaatcacaggcttaaagtgttcagtaaaccatactgtaaacagatgagctgtcatccaggccctgttgcattcacagagcacaggcagagttaatttagcttaattcttaagggccctaggattttcagaatggtaartgagcactggcttcaacataaagtcaccagctgcattagcccctaacaaaagagtcagcttgtcctttgaaacttggaagccaggcattgacttgtcctttctagctatgaaagtcctaggtagcatcttatttcaatagaaggctgtttcatctaaattgaagatgtgttgtttagtgtagccacctttatcaatgatgttatctagatcttctggagaacttgctgcagcttctacatcagcacttgctgctttacctggcacttttacgttatgaagacagcttctttctttcagtctcatgaacaacctctgttagacttcaacttctcttctgcagcttcctcatctctcagggttcatggaattgaagagagttagagtcttgctctggatgaggctttgacccacagctggttccacacctctaaaactttct

SEQ ID NO: 777788 - DNA, 619 bp, Homo sapiens
caatattttgaagagaatctttttttctgagcaataggtctcaatcacaggcttaaagtgttcagtaaaccatactgtaaacagatgagctgtcatccaggccctgttgcattcacagagcacaggcagagttaatttagcttaattcttaagggccctaggattttcagaatggtaagtgagcactggcttcaacataaagtcaccagctgcattagcccctaacaaragagtcagcttgtcctttgaaacttggaagccaggcattgacttgtcctttctagctatgaaagtcctaggtagcatcttatttcaatagaaggctgtttcatctaaattgaagatgtgttgtttagtgtagccacctttatcaatgatgttatctagatcttctggagaacttgctgcagcttctacatcagcacttgctgctttacctggcacttttacgttatgaagacagcttctttctttcagtctcatgaacaacctctgttagacttcaacttctcttctgcagcttcctcatctctcagggttcatggaattgaagagagttagagtcttgctctggatgaggctttgacccacagctggttccacacctctaaaactttct

SEQ ID NO: 777789 - DNA, 491 bp, Homo sapiens
cactctaagtaaagagataacccaaacataagccccacaaacaggcttccataccattcttaatttggtcctgtaattctttgttgctgtattaactttctgatgcttttaaggatgttttataacaaattgtttagytttttccaatggaatgtttattctgaattatctaattcatattgtaagtatatagggagtttaatataaaattattaaactaatatttgtgaaagaatgtatttgtgcatttaacaaatatgttaatcctcaaactgttattgggcagctgagcatacagcaatgaaaataacataatttttatgtgtacaatatttatggaatacgttactggaacaaataaataatttagttaataacatgacaaagaacagaaatggtatacactacagagcacagtaatggaataatgaatgattaaagttattaatattaggtagaaaatgaagggtatctttgagagcagatctcag

SEQ ID NO: 777790 - DNA, 596 bp, Homo sapiens
attccactaaagaaactacagagaaactctgaaaacatgcttcagaaaggttgaagttctgaaatcaaagaatgaacacagagcaaaatacattgtaaacatacagatagacctaaataaaaaattaggtgttgaaacaaaaagatatttaaaattagataagcacggaaatatgtatgttaggaagcaacttattagggctgaagtattcaaagaccccttaattgtctgacaagagcagaaaggtgagtatgactttgsaagtttttttttttttttttttttttgcgtaggagtctcactcactctttcgcccaggctggagtgctgtggcgccatctcggctcactgcaacctctgcctcccaggttcaagcaattctcctgcctcagcctcctgagtaggggggattacagccgcgttccaccatgcctggctaatttttgtatttttagtagagacggggtttcaccatgttggtcaggccagtctccaactcctgacctcgtgatccacacgcctcggcctcccgaagttttgagattacaggggtgagccaccatgtgcggccgactttggaactgtaataaattcac

SEQ ID NO: 777791 - DNA, 596 bp, Homo sapiens
attccactaaagaaactacagagaaactctgaaaacatgcttcagaaaggttgaagttctgaaatcaaagaatgaacacagagcaaaatacattgtaaacatacagatagacctaaataaaaaattaggtgttgaaacaaaaagatatttaaaattagataagcacggaaatatgtatgttaggaagcaacttattagggctgaagtattcaaagaccccttaattgtctgacaagagcagaaaggtgagtatgactttggaastttttttttttttttttttttttgcgtaggagtctcactcactctttcgcccaggctggagtgctgtggcgccatctcggctcactgcaacctctgcctcccaggttcaagcaattctcctgcctcagcctcctgagtaggggggattacagccgcgttccaccatgcctggctaatttttgtatttttagtagagacggggtttcaccatgttggtcaggccagtctccaactcctgacctcgtgatccacacgcctcggcctcccgaagttttgagattacaggggtgagccaccatgtgcggccgactttggaactgtaataaattcac

SEQ ID NO: 777792 - DNA, 596 bp, Homo sapiens
attccactaaagaaactacagagaaactctgaaaacatgcttcagaaaggttgaagttctgaaatcaaagaatgaacacagagcaaaatacattgtaaacatacagatagacctaaataaaaaattaggtgttgaaacaaaaagatatttaaaattagataagcacggaaatatgtatgttaggaagcaacttattagggctgaagtattcaaagaccccttaattgtctgacaagagcagaaaggtgagtatgactttggaagtttttttttttttttttttttttgcgtaggagtctcactcactctttcgcccaggctggagtgctgtggcgccatctcggctcactgcaamctctgcctcccaggttcaagcaattctcctgcctcagcctcctgagtaggggggattacagccgcgttccaccatgcctggctaatttttgtatttttagtagagacggggtttcaccatgttggtcaggccagtctccaactcctgacctcgtgatccacacgcctcggcctcccgaagttttgagattacaggggtgagccaccatgtgcggccgactttggaactgtaataaattcac

SEQ ID NO: 777793 - DNA, 618 bp, Homo sapiens
ccattaggagacaaaatggatgtcaacaaccaagagaatcaactaataaatgataagtaataaaagttcataaagatgtatggatacaaaatttttatgtaaaaataagttttctcacacaggagcagtaagagaaaatgtaatggaaaaaatctcctttttacaattgtgtaaaaaaaaactgtaaaacatttataatgattttgaaacactgtacatctacgtaaataaaaytgtacaattatttatagacatcaactaagacttacaaatgtcaaattccaagtgatacaaacccaattcaaacaatcctaaccaactgaaagaaatgtcattggcttgtggtaataggaattacaggggttacagctggtcttaggcacagctgggtcttaagaaagtccctgggcctttgttatgctggacatttgttttatttatcctgtgctcctttcacggactgctcctccccaaatccacttatgtaattccagtagaactactaattacagttcctaccttctatttacagattgaacacataatctagttcctaaagtacctaaaattgatttgtgtatgctgtataaactaaagatccaagttctttgttcttcc

SEQ ID NO: 777794 - DNA, 470 bp, Homo sapiens
ccttgcaatactttggcggcgtcttgtatggtaaggctgaattgatgattttctagttacctctttttgtttgtttgtttttggccattcataatagttgattgatgagtgtttgatagaatttccacactgttgataaactcaataataaggtgattataacaaccagaggtttttgaactttctatattctcagagacttgaaccgaaactaattakattaactttactgtaatcttgtcagatgcttgattttcagttgctattttgattcttttttttagtatttgctttttcaagaaattttcaacttttatcttacatacgggggatacatgtgcagatttgttatatggtaatattgtgtgatgctgaggtttggagtacatatcctgtcaccctggtagtgggcatagtacctgataggtagttttttaacctccctgcctaccctctagtagcacacagca

SEQ ID NO: 777795 - DNA, 506 bp, Homo sapiens
gattatcccaaaggagtaaatactgcatagttttgacagggccagatttgatggtttacattttctttataataatagcaatcattacaacaaatttcaacacaaacataaaagcatgattagctgtaagctagtaagagaaggaggtggaggaagagaggaaatggtccaagtaccgagaagagcccaggaagaagcctcaacgtagaaacaggaacaagttgggaatgggttgcaggatcacaccttgtaaaggagctctgtgagttggcttgggcctgaaagtagtgatatgycattgaccgctcttaagggaggcagacgcctgatgagatgtgaattttagaaataattctaactggattgaagacggcagaaagtaagaaaaggagaatggtaggtaggctgctacaggagttcagttaaaaatgctgaaggccgtggcagggcatagtggggatggggcagcagaaaaacatgtgaggaccattttggagggaaagcct

SEQ ID NO: 777796 - DNA, 637 bp, Homo sapiens
ttctgtgcaaccccactcaccgcagtgggagccaagttgaaatgattctcagggactctttgggtagaggctgtagcatcaagcaaacaaagaaagcctgagctggcccctaagctagctagaacctcattgactcatcaccatctgcctggacatgtcaagctctcagcagttcataaggaagatagcagatgtctgttagcccatggacaatgtgcaaatgcattgctgaggtgggggtgaaggccaggccttggaaaacaacagamggaaatcgtggataaaaatccctctgtatagatggtagtcccagtgtgatgaggcatttttttccacaaaattcaaatatacaagtttaaagaaaggatacattaagaagatgaaagtgtgaatagtaatagtgaccaatgctgcctgctaagaaggttaagacattttctcagcagagcctgggctgagttgcatttacctggcattaaggcagcacccaccttccagtaaggacttcctgtcttaaaagcagtaacctggagtatcacctttatgaagcacctggattaaaagaacttggaagttgaaaagttactctttacaaagcatcaaatggatttcccttttttttttttaataaggataa

SEQ ID NO: 777797 - DNA, 624 bp, Homo sapiens
tgttatatctatgttacttattctagtaatttaacttttaaataaagaatataaatattcataaaaattattaatttataaagtgaggtttaagaaccacatgtattctatgatgcagttttggcttgaaaatatacatttgtatatttgtgcatatttgtatgaagtgtctatgtctattcgatgagaaattatgaaagtttacacagcaacttctcagtaatgccctttgggagagcaattaaagataacaagtaaagaaatttggcttttttattatatacttgtgtattaattgaactttccaatgagcaattayagtttttgttacctattttcaaaaatttgctttaacaattgtatatgatcccatcaaaaacagccataaactattcaaaatacaagaacataaatacaacaaaatgaatttttattatttcaatatattttatcttatcttttatctagttaacataaactatatggaaaaaaaaacttctctatacagagcactaaagcaatagtgagtaacccagcaggaacttctccatattcaagagactaagagtaaaagcagtgcaggtaattgccaaggtctactgacaaatactaagtcagggtata

SEQ ID NO: 777798 - DNA, 624 bp, Homo sapiens
tgttatatctatgttacttattctagtaatttaacttttaaataaagaatataaatattcataaaaattattaatttataaagtgaggtttaagaaccacatgtattctatgatgcagttttggcttgaaaatatacatttgtatatttgtgcatatttgtatgaagtgtctatgtctattcgatgagaaattatgaaagtttacacagcaacttctcagtaatgccctttgggagagcaattaaagataacaagtaaagaaatttggcttttttattatatacttgtgtattaattgaactttccaatgagcaattatagtttttgttacctattttcaaaaatttgctttaacaattgtatatgatcccatcaaaaacagccataaactattcaaaatacaagaacataaatacaacaaaatgaatttttattatttcaatatattttatcttatcttttatctagttaacataaactatatggraaaaaaaacttctctatacagagcactaaagcaatagtgagtaacccagcaggaacttctccatattcaagagactaagagtaaaagcagtgcaggtaattgccaaggtctactgacaaatactaagtcagggtata

SEQ ID NO: 777799 - DNA, 611 bp, Homo sapiens
atcttgtattttaaagccatctaaatcaggtatgagtgagacttggggtataatccatcttggagcaaagtcattattcatttgtgaatctgtgaaactaaaaaacaagttatcttcttcaaaaatgccatggtggaacaaacattgaataggcattctaattccaaaaggaaaaaaaaaagggaagggataaagaggttactggtcccaagcaagtttgaaatccagcaaggaatgttccactaggttacaagacatgagaataatcctctgtggctcaaggctctaccctctgggctcacagcagctctgtcctctgcctctgtgcctgctgyctcttcctcagccccactggcttctgctccttccatgtcagactcggcctctgcactggctacatcagacccacaaacccaggtggcctctgttcacagcagttctgtcattggagttattctttctgtttcttgaaggacagaataggtttgtagccaagtaattctgttagttcactcctgtttgtacaatcctagaaatctgacagccttctgtatttcatctcttctctgtctccttcagctcaagctggcagtatttctgctgatacaaca

SEQ ID NO: 777800 - DNA, 501 bp, Homo sapiens
accatttgctgatatagatggaatttgaagactcgatgtttacagaataaaggacgaggcagccatgcctctgtgcctatagtaaatttgatttttgtttcacatatttaaaaattataccatccatttaaatcctcctttmtaaccagatgattttggtgtgaacctcagttttaataatgtttatgaaagaagtctaaattttactctgcctcagctccattattgataagattagaaactagacctgaaataatgtcaatagaaaactcagttgcttagtgtacttagacattgttacgagtttgagataaactaaatcttatcaaaagtcaattctacctatactatatttttgtggtatatatttaaatagtatgaacttatatactatatatccatatacatactataaaatgatgcttttagaaagttttatatttgacctcttattattaaatttaaaaaaatcagtttccagttatgaattatgttttaaaa

SEQ ID NO: 777801 - DNA, 635 bp, Homo sapiens
tataaatcaagttgggaagaaacaactgagaatacacattttctaatttagcttgtcatatgcaaaaattcacatatgttcaaagaaaccttacaaatgataatatcccaccttataaatgatatccctataaaataacacctggaaaacatattttaatgttttcactgaaaactcaccaaatgtttattttcagtttccaaatcttaaagtactaatctatggccatttattatttgtacaatttgaatgtgaaggccagctacttttgcctgaggccacatgggcartgcatacagttgtgagtgtgcagagattcagtatcttgattcattgacctatgaagtaagaaatccttgattttctttctgtaagtagaggcaaaggggagaaagagaaaacacgagagccagaacaaaaataatgtctttcggaatttctttttccccatggatttctaaattctctgaaatggatatcttccatgtgttcttaaaaaaggatttttgttagccagagaaactttccatcagctttcttgcttgccagcattattaagacctcctgacatgatgtgtgttagcccaataaaaacaaactctacttctaaaagtttagctgtatgtagaaaagca

SEQ ID NO: 777802 - DNA, 634 bp, Homo sapiens
gcaggctgaaggttgtttactgcaggaattgtaagtgcaaaccattcacagtcttgctcagctaaagggatagtaaagaaacagtcttttaaatctatgatgattaaaggccaattttttggaatcaaagcaggagaaggcagtcctggctacaatgctcccataggttgtataactgaattaatggctctaagatatgtcaacattctccatttacctgattttttcttaattacaaaaactggakaattccaaggggaaaatgttggcgctatatgtcctttttctaattgtttaataagtaagtcctctaaagcctccagtttctctttgcctagcagccattgttctatccaaattggtttatctgttaaccattttaaaggtataggttctggaggcttaacaatggccaccataaaaaatgatatcctaaaccttggcaagaactttgtctttctgctttaagcggttctttcaaaccttgcaaattttttcctagtcccataccaggacatgccccatttcatgcatcatatgttgactttgagggctatataattgttctggaattagaacctgtgctccccattgctgtaataaatctcttccccataaatttataggtacagaa

SEQ ID NO: 777803 - DNA, 643 bp, Homo sapiens
aaggcaagatgcttctatttatcagggaatcttcttcttattagtaagcaccatatcttatgcaacattatgatcttactaatgccaggattttaaaggccagatgaatacatttattcaacaaatatttattgaacaccaagtagatgctaggcactgtgacagcactgaggatacagtagttaagaagacaaacactgagaataataatactaaaatgataataacagtaactacattgaactaagcacctactatgggcaaaatactatattaagtagcctagatgtacttgctttttttttttttttttttttttgkgagacagagtctcactatgtagccttaggctggagtacaggggtgccatctcggctcactggaacctccacctcctgggttcaagcgattctgctgtctcagccttctgagtagctgggattacaggcacgtgtcaccacgcccagctaatttttggatttttagtagagacggggtttcaccatgttggccaggctggtcttgaacgcctggtctcaagcaatccacttgcctcggcctctcaaagtgctgggattacaggagtgagccacagtgcccagcccactggctctaattcttaaacaacactacaaagaagggt

SEQ ID NO: 777804 - DNA, 643 bp, Homo sapiens
aaggcaagatgcttctatttatcagggaatcttcttcttattagtaagcaccatatcttatgcaacattatgatcttactaatgccaggattttaaaggccagatgaatacatttattcaacaaatatttattgaacaccaagtagatgctaggcactgtgacagcactgaggatacagtagttaagaagacaaacactgagaataataatactaaaatgataataacagtaactacattgaactaagcacctactatgggcaaaatactatattaagtagcctagatgtacttgctttttttttttttttttttttttgggagacagagtctcactatgtagccttaggctggagtacagkggtgccatctcggctcactggaacctccacctcctgggttcaagcgattctgctgtctcagccttctgagtagctgggattacaggcacgtgtcaccacgcccagctaatttttggatttttagtagagacggggtttcaccatgttggccaggctggtcttgaacgcctggtctcaagcaatccacttgcctcggcctctcaaagtgctgggattacaggagtgagccacagtgcccagcccactggctctaattcttaaacaacactacaaagaagggt

SEQ ID NO: 777805 - DNA, 643 bp, Homo sapiens
aaggcaagatgcttctatttatcagggaatcttcttcttattagtaagcaccatatcttatgcaacattatgatcttactaatgccaggattttaaaggccagatgaatacatttattcaacaaatatttattgaacaccaagtagatgctaggcactgtgacagcactgaggatacagtagttaagaagacaaacactgagaataataatactaaaatgataataacagtaactacattgaactaagcacctactatgggcaaaatactatattaagtagcctagatgtacttgctttttttttttttttttttttttgggagacagagtctcactatgtagccttaggctggagtacaggggtgccatctcggctcactgsaacctccacctcctgggttcaagcgattctgctgtctcagccttctgagtagctgggattacaggcacgtgtcaccacgcccagctaatttttggatttttagtagagacggggtttcaccatgttggccaggctggtcttgaacgcctggtctcaagcaatccacttgcctcggcctctcaaagtgctgggattacaggagtgagccacagtgcccagcccactggctctaattcttaaacaacactacaaagaagggt

SEQ ID NO: 777806 - DNA, 643 bp, Homo sapiens
aaggcaagatgcttctatttatcagggaatcttcttcttattagtaagcaccatatcttatgcaacattatgatcttactaatgccaggattttaaaggccagatgaatacatttattcaacaaatatttattgaacaccaagtagatgctaggcactgtgacagcactgaggatacagtagttaagaagacaaacactgagaataataatactaaaatgataataacagtaactacattgaactaagcacctactatgggcaaaatactatattaagtagcctagatgtacttgctttttttttttttttttttttttgggagacagagtctcactatgtagccttaggctggagtacaggggtgccatctcggctcactggaacctccacctcctgggttcaagcgattctgctgtctcagccttctgagtagctgggattacaggcacgtgtcaccacgcccagctaatttttgkatttttagtagagacggggtttcaccatgttggccaggctggtcttgaacgcctggtctcaagcaatccacttgcctcggcctctcaaagtgctgggattacaggagtgagccacagtgcccagcccactggctctaattcttaaacaacactacaaagaagggt

SEQ ID NO: 777807 - DNA, 481 bp, Homo sapiens
tgaccagaaaaacgtgagcattctcagaagtgacttgtttcttttttcacaaagagagacctatgcaaaaaatgccattgctgcttgcactagttactatcttagaatccatcacagaaagcccaaaagatagcacaaccttttgtacctacagtcttagatattgttagatagccattcagttttgtttgcattgtgtatgaratgaatatttcttgagacttttttgtttgctctactaaagaaatcaaccaagggaaaaaaaatccaaaaaacaaaacaaacaaaaaacaccctctaactcatgtgaagcatgcagggtgttgtaatttcagtttgcaaagcggtgtgatacaatgttgctgagccaaaagcacacgatagatttaatgtagccaattgtgtacttttgaaaaaaagagtaactgttccctgtgagttaattttggatttcttcaaaatctctcttttaggctttgtg

SEQ ID NO: 777808 - DNA, 519 bp, Homo sapiens
attttaagttagaaatgccaaaaatataaaaaccatgaagaaaaatttctatagaagttaggaaattaaaaatcgatcataagggaagcatctcaggtttttattgcagtatttggagatgaaaaatgactttctattgacacgatttgttatttcagcaaaatagaagtctgtcagtctaatgttggatgatctgatagtctttgcaagaaataattgcagagagtttctgcaatcactgggaaatakaaatctataaaaacatctgaaaaagtgtgagactggggctctgcctagggggatagccctgttatttttattgacagggaaaaaaaaaaaaaaaaactctgaaaaggaaattcttaattcctgtattgacagtgcctttttcagtaggtttttcctgcaaagggtgcttgtcagttactttgctttaatggataaaatctcaatttccaggccaaatgtaactttttttggtcttacatcttgatttacttgtacttaagaggttttttc

SEQ ID NO: 777809 - DNA, 484 bp, Homo sapiens
acttgggggatgggggcatgagaccccatgggctttgctgatggggggcccacaaggaggcaaagcaccataatgaaacattctgggctagaaacccacatccaaattctagccctagacttggagaaggctggagctgaaaaggccctcctcaagtctactgaatcactgtgtgaggggtagagttcaggaaacaagatttctttttctttaatctctctatgcgatactgaagtacatgttttgaaaaccatcagtctagtccacccaacattattgttgcccttgcccccattttatagatggaaaactgagtcaggagaragcacgtgccttggtccccagctgctcaactgggagtcccatcaggtctccagaggagatccaagcctgcacacctcctccctcagccactgcctctgcaagggctaagcacagcagctcggtgtgacctgggagggaagaggttacctgcagccctgta

SEQ ID NO: 777810 - DNA, 572 bp, Homo sapiens
catacatatcacatgcatatacacacacacctatagaaagacaatacttattcttggatttagagcccacgatcacgatccaggaggatcccatcaacatccttaatttaattacatttgaatagatgcttttttcctaatawggtaactttcactagttccagggctttgatgtagatatcctttaggggacaatatttctgcctatcactccaacataatcattattgatctcaagtgttttccctcatttatatgaagaaatatagtaatgcacattttttccagcaccaaaggctgattttacttccaatattgttgcttattataattcagagctgagacctatacactaggatgaaatattacaataaccaaagccaagagtagatctcaaaattattggtcttaattaatagcatattgcttctaagagtgattaaacttggtgtgtgtgtacacacatgtgtatacatacacacatatatataaatgtatatatacatgtgcacacacacatatataaaaattgaaacagcatcaggagatgtgttatttgttagcaacatatg

SEQ ID NO: 777811 - DNA, 643 bp, Homo sapiens
tttgctttatttagatagtgcttacatgaacctgcaaaatccttagaatggaacaatgttttctttgctgacccattctgggtttgcttagaattctgacagactgataattctaatgaatgtttatctctcactggctgagcatggaaaactataccaaaaatgctttcagaaatcacataattaaaatgttttgtttttatgtctgtttatatatttatttttctatatctcaactagagatatagattttatttttctatatttcaactatatgtctggtatactacaatacatattgtgaaataaatggacaaaaaataaatcaataaatttttctttgaataagcaaacaaataaacaattgaataataaaacaagtctcacctcttatagcttgtrtatcttggatttaataattttcccatgacacttacctttaatttggggtgatctattgggatatcatggacttaaaaatcagcaaccacacaagtaaatccaagtttcatcacattgtataatcttggatatatctcagttctacttttccatttttttatctgtaaatgcaataattttgatgtttccatgtttctctgagatagattgaaatatcaaattatcatcacctagctatgta

SEQ ID NO: 777812 - DNA, 564 bp, Homo sapiens
aaggtatccatcacctcgagcatttatcctttctctgtgttacaaactatccaattacactattttcattttaaaatatacaataaattattggtgactgtagtaactgtgttgtgctatcaagtactagatcttattcattctatctgactgtaattttgtacccattaaccattcctaccgccccccatccccattaccctttccagcytctggtaaccatcattctactctttatctccatgagttcagttgttttaatttttagttcccacaaataagtgagaacatgcaaagtttgtgtttctgtggctggcttatttcatcaaacataatgtcctccagttccatccatgtctcaaatgacaggatcttactcttttttatggctgaatagtactccattgtgtataggtaccacattgtttttaccctttcctctgttgatgaacacttaggttgattccaaatcttggctattgtgaataatgctgcagtacacataggagtgccgctatttcttcaatatactgattttttttttattttacgtatatatctagc

SEQ ID NO: 777813 - DNA, 569 bp, Homo sapiens
atatacagaataaggaatcgccattactctccctgggctggaaagtggtagtgtcatatcaaattgatatacttacttaaatttttattggtttctgctatcttagatcgaagtccacataccttacaatggaatgtcatttgtgatgcagcatgcctataattttcagaatcattttctatcctgtcatayttaccatatgttctaaatataacaagcctttacaaatcctataatgtatcgtgctttttcttaaagcacgtcttgtctgtttctattgcctgcaccttttttcctatcccatccctctaccttatttactaaaaacctacttatccttcaaaacacagcttgaaatttacctcctctgaaaaacaaagagtctgcttttctagatagagaaccatgcagagaggggcctcttacgcaaaaccgagtgcttcctttctactgttttaaccttgtatgcacttcttttacaatacaattcatgacttacctacatatctagctccttttcttgactacgagccaccttaggccaaagatttgcttagtttactatttaa

SEQ ID NO: 777814 - DNA, 569 bp, Homo sapiens
atatacagaataaggaatcgccattactctccctgggctggaaagtggtagtgtcatatcaaattgatatacttacttaaatttttattggtttctgctatcttagatcgaagtccacataccttacaatggaatgtcatttgtgatgcagcatgcctataattttcagaatcattttctatcctgtcatacttaccatatgttctaaatataacaagcctttacaaatcctataatgtatcgtgctttttcttaaagcacgtcttgtctgtttctattgcctgcaccttttttcctatcccatccctctaccttatttactaaaaacctacttatccttcaaaacacagcttgaaatttacctcctctgaaaaacaaagagtctgcttttctagatagagaaccatgcagaraggggcctcttacgcaaaaccgagtgcttcctttctactgttttaaccttgtatgcacttcttttacaatacaattcatgacttacctacatatctagctccttttcttgactacgagccaccttaggccaaagatttgcttagtttactatttaa

SEQ ID NO: 777815 - DNA, 569 bp, Homo sapiens
atatacagaataaggaatcgccattactctccctgggctggaaagtggtagtgtcatatcaaattgatatacttacttaaatttttattggtttctgctatcttagatcgaagtccacataccttacaatggaatgtcatttgtgatgcagcatgcctataattttcagaatcattttctatcctgtcatacttaccatatgttctaaatataacaagcctttacaaatcctataatgtatcgtgctttttcttaaagcacgtcttgtctgtttctattgcctgcaccttttttcctatcccatccctctaccttatttactaaaaacctacttatccttcaaaacacagcttgaaatttacctcctctgaaaaacaaagagtctgcttttctagatagagaaccatgcagagaggggcctcttacgcaaaaccgagtgcttcctttctactgttttaaccttgtatgcacttctkttacaatacaattcatgacttacctacatatctagctccttttcttgactacgagccaccttaggccaaagatttgcttagtttactatttaa

SEQ ID NO: 777816 - DNA, 631 bp, Homo sapiens
cctgaatggcacttctggacccactcagggcctaagggaccctgacacactaaaggaagaacacaggcttggctggcttttccacctgctgattgtagagccccaggaccttgaacaaacagagacagtagccagggagtagttacagcaggccttgggcaagttccagcactgtgctagctacaggtctgacccagcacagtaatagtggcggtggtcacaggggtgcttgtgttactccaccttcctcccagctttaggtggctcagaacagagagagagagagagagagagagagagaaagagagagagactctktatgtttgggagaaagtaaacaaagaaaaagagaacaagaatctcttcattgtaatctatagaaattcctcacatattatccaagacaatcaagacagtacctctatgagtctacaagaatcacagtgctactgggttgaggtgctccttaaagcagaaacagcttagatcatagcacccaagttctttcaaatatctggaaagcctttccaagaaggatggtgaaaaataagcccagacagcaaagactacaataaatatctaactcttcagtgcccagaaaccaaagaacatctacttgcatcagcaccac

SEQ ID NO: 777817 - DNA, 601 bp, Homo sapiens
atggaggggtcgcatgtactctttatgcagttttcccccaataataacatagaatatactctaaaattaataaatataataaataaaataataaaacataaaatatactacaaaattacagcaggatattgacattgatgcaatccatggatttctttttttttttttttttttttgaaacagagtctcattctcaatggctccatctcggcccactgcaacctgcacctcctgggttcaagccactctcctgcctcagcttcctgagtagctgggactacagggtgcccgccaccacgccyagctaattttttttatttttagtagagatggggttttactgtgttagccaagatggtctcgatttcctgacctcatgatctgcccgcctcggcctcccaaagtgctggagttacaggactgagccaccacgcccagccttaatctatggatcttacccagatttttccagttgtgtgtatgtgtgtatgtttagttctatgctatttatcatgggtaagtttgtgtatctactgctacaataatgatacagaacagttctgtcaccacaaggatccctggtactgccctgttataacca

SEQ ID NO: 777818 - DNA, 601 bp, Homo sapiens
atggaggggtcgcatgtactctttatgcagttttcccccaataataacatagaatatactctaaaattaataaatataataaataaaataataaaacataaaatatactacaaaattacagcaggatattgacattgatgcaatccatggatttctttttttttttttttttttttgaaacagagtctcattctcaatggctccatctcggcccactgcaacctgcacctcctgggttcaagccactctcctgcctcagcttcctgagtagctgggactacagggtgcccgccaccacgcccrgctaattttttttatttttagtagagatggggttttactgtgttagccaagatggtctcgatttcctgacctcatgatctgcccgcctcggcctcccaaagtgctggagttacaggactgagccaccacgcccagccttaatctatggatcttacccagatttttccagttgtgtgtatgtgtgtatgtttagttctatgctatttatcatgggtaagtttgtgtatctactgctacaataatgatacagaacagttctgtcaccacaaggatccctggtactgccctgttataacca

SEQ ID NO: 777819 - DNA, 615 bp, Homo sapiens
ttgttggtccctctggcaaccagcctccatccgccaagagtcactacattagcataaactcaggtatggttgaaagaggcttattatgaataaccaaaaagctcctcttaccctaaccattctggaaactccaagggttttagaagctactgttccagaaactgaggcagagaacaaatatatatttcttcttatgccacactggcatatagtcatcactaaaaaatagtgtttgttttcttattgttaatgaattactatttttaataaagaaatatgttaaaaaaggaattgtgtccccygaaattcatattgaagccccataacccctgtacctcagaatgtgactgcatttggacacaaggcttttaaataggtgatgaagttaaaatgaggctgttagggtgggccctaatccaatctgactggagtccttttaagaagaggaaatttggacacagatgaagccgcctttgcaaaaataataacagtgagacaattagacagtgaaagggagcttacctaactactccatcttgcttctaacctgcaagctccccttgttattcctgggcgtaggccaaactaactttgggaggaacttagtttatagtt

SEQ ID NO: 777820 - DNA, 621 bp, Homo sapiens
ctgggttcacgccattctcctgccttagcctcccaagtagctgggactacaggtgcccgccaccacgcttggctaattttttgtattattagtagagatggggtttcaccatgttagccaggatggtctcgatctcctgacctcatgatccacctgccttggcctcccaaagtcctgggattataggcgtgagccaccacgcccggccctttttacacttttagaaagaatcccaaatagcttytgtgtatgtaggtatatctatcaatattttgtttatgtaggtttatctatcaatagtcaccatattatgaattaaaacagatattttaaaatatttattaatccatttaaaattaacaataaacctattatgtgtttacatacaaagttttaaaatgaaaaatatatgttccccaaacaaaaataatttagtgagaagacatagttttttaaaaaaattacagctttactgggatataattcaaataccacacaattcacccatttaaagtgtacaattcaatggctttcactatgttcagcgctgtgcaaccatcaccacagtcagtgtcagaacattctcatcattcaacaaagaaacctcatattctttaatta

SEQ ID NO: 777821 - DNA, 621 bp, Homo sapiens
cagcccagcttccccacaggaaccagctgcccttagaaagagccatgggcttatcaggcatcatgactccccttctgggatctgggcagtctggtggaggactgcgggggatactagatctattccagcaactctagtaggcctgtgaagatttgttattgaaacttggactcgggtcctgtatctgaatgtatcctatatccttgatcacatatagtgagtcctgatctcatccagggcccagggaaggtgggcatgaggctctctgttgcattggagagttctaggatgtccctgggactgactccagaacaatgctgctgttccgcagaggaatccaaccgggatccaggcaagcctatgtggtcccattgttgtggcaggtgtgattygggtcctatcctgtggtcacactgaggctcgtgtgttgtgagtctgagaagctctgggtagctctggttggtctcagcatcattctggggatgtccaagttgtgatcctggcctcatcacagcagctccagtgttgcccccagtgtgagtctggtttttactctgcagctttggagggatctgtctctggcctctgcccaaccttgtaactctgaggaagctcaggtgg

SEQ ID NO: 777822 - DNA, 407 bp, Homo sapiens
atacagattaaagcttcactaggatataaggcccaggagggtgaggatgtttgtctatttcatttacgaccatatctccaggcccaataatagcactgggtacacaagaagtcctcaaaaaattttttgaatgattgttgaatsaattcttgcaataacataggctgagggaagaacatagcttaagaaagtggctttagaatttcagcaaagactaaaatagtacatatcaataactgtgaagagcctgaggttttatcacttttacaagctgatgagttaagctgccagtttcatggatgctggcagaagacacaagactcctgggtcagagaaaaaggactgtgtgactcactgtaataacaacagtcagagtatcagcagatttttttgtcccacaggataat

SEQ ID NO: 777823 - DNA, 628 bp, Homo sapiens
cagcagggtggacagcttcagggattggtgcaggggccagctctgtgcgaggcagaagctggaccaggcatactgcaagtagctttcactgtgagcactggggaatgtggtggcacccaaaagcttggagacactaggaacaatagagccccaaagatggtgtcacagccttggctaagggagtccctaggtctgggctcccaaaagggccacagctcttctctccttcttgtcacctacaacrtggtgagcagggggcatttcagcctggtttgtgttacagctttttcaatcctgccattcagtgggtcctgagttcttgccccatgttcaggaacaatgaggtacatggacaactggaggatgagcaaggcagacctccttaattgagcaatggaatagctctcaggagacccaaagtcagtagctccattctggagccaggtcattctgaagattgtccagctcttggaggagaggagacccatagtgggtagctcctttccacaggcaggtcatcctgataaattgaggagactaaaaatgggtagcttcttcccagagctggtagtcccaacatccttgtgagtctgtctcatacaccctgagtccagggtttttatgggcc

SEQ ID NO: 777824 - DNA, 637 bp, Homo sapiens
tagcattcgagctctgataagcgacagactgcctcctcagtgggtccctgacccccgtgcctccagactgggacacatctcccagcaggagtcgacagacacctcatacaggagtgctccaactggcatctggcaggtggccctctgggatgaagcttccagaggaaagaacaggcagcaatctttgctgttctgtagcctcgactggtgatactcaggcaaacaagacctggagtggacctccagcaaattccagcagacctgcagcagaggggcatgactgttaaaaggaaaactaacaaatagaaaggaatagcgtcaacatcaacaaaaaggatgtccgcacaaaaaccccatccaaaggtcaccaacatcaaagaccaaaggtagataaatccacgaagatgaggaaaaactagcgcagaaaggctgaaaattccaaaagtgakaatatttcttctcctccaaaggaggagtgtttagaaggaaatttatagcactaaatgccgacaggagaaagcaggaaagatttctaaaatcaacaccctaacatcacaattaaaagaactagagaagcaagagcaaacaaattcaaaagctagcagaagacaagaaataactaagatcagagcagaaa

SEQ ID NO: 777825 - DNA, 595 bp, Homo sapiens
ccaggaagtttaaggagatggttgccaggttgatacatatctacattctgcttcagagggagcagaagccaagttaagagctgcaaaggcaagatgctctagacgtttagcaaagataaatattagtatttttcatattttaaaatgaggttctctagcaaacttaagagtccggttctcttataaggattaaaattaactggttaccaattaacattttttttaaaagacctatgcctraggcagaaactttagaatgtgaaaacagagcctctcccagttttcatagcaattaacctcagtatttgccaatatacccttgatttaacactacctgtttataaggcaaatctaaaatttgccttataaatataaacatatatatttatatctgcctgtatattctaacatacacacacattttgccaaaaaggtatttaatttaatcctgacatatagctaaatatatggatcattttaaaataaaattttaaaaagcaatgcacaaaagttaaacagtccagaagtatacacaaagccaactgctcaacaattcccatttatttttcctctttctgggcatataaacagattt

SEQ ID NO: 777826 - DNA, 484 bp, Homo sapiens
aaaactctaacacaaccagtacaaatttattgccttgcagattgcctttcttatactaaaaaaattaggttacaattgttctagttatgtcctttaatgcttttcctttgtacatatttatattggttgaaatatgcaatgattttacttttcagcatactagtttcatttcttgatctatcatctctatatctttgtctacatatttgtwataaaacgggtacaaacatattgagttcctattgcaaccattaataatgtgttggcttatttatattattttgagtaataatgctatgtgggcttaaaatgtactttattcgaattcacttgaattcccattcttctttaaaaagggtttcataaccttggctcaaattctgctttagtaactcaccatcagtgtaacttctgacaatttacctaacctaccaaaccctgaaattatctactttggacacttgatgttatagtgcagtcagtg

SEQ ID NO: 777827 - DNA, 562 bp, Homo sapiens
atcatatggtagttctatgtgtagttttttgaggaagctccttactgttatccataatgactatactaatttatatctctaccagtaatgtaaaagggttcacttttctctgcatccttgccagcatttcttattgttgtgwttttgataataaccatcctttctgcggtgagatgatatctcactgtggtttggatttgcatttccctgatgattagcgatgctaagcatttttagatatatttgttggccatttttatgtattcttttgagaaatgtttttcagaccatttgctcattttttaaatcagattttgtttctgttgagatgtttgaattctttgtatattctggatattaatctgctctcaaatgagtagtctgcaaatatttcctcccatttggtaagctgtcattttactctgttggttgttttcttgcttttgctgtgcagaagcttcatagtttgatataatttaatttgtttatttttgattttgttgcctctgcttttgaagtcttatccctacaatcttttcctgaccaatgtcctgaagcattt

SEQ ID NO: 777828 - DNA, 632 bp, Homo sapiens
ggaacatcacctctttctgcctgatagccttcacagtgagacattggcttttcctattctgcaacagtttcagactttggactcaaaattggacatcacttctatagatgttaggcttgccagacctcctccataatcatgtaagttaattccttataataaataagtctctctccctctcttccatatatatgccatatatactattagttctatttttctggagaattctaactaaaacagatgcctaaggargggaggctattgaattcctactttagattacagaggcatgtttacctttggtatcccagagcagggggtgtctttctgcagacttattcaattcataaagaagtgttgtaatcagaaaaaaattggttgccatggtctgcagtatccagttaaacccaggagtcttcttaattatcatttcacatgggatgtaaaataagtttggatagtctttaatctatcagaagaggtcattttccctcttagatacatcatgtactaaacaatatgttctcatggttgcaatttatctttgaaattatatgtctttttttctgctactgctgagggccagtaaatggaatcattttgcaggcttccttgttctctcagtaaaa

SEQ ID NO: 777829 - DNA, 619 bp, Homo sapiens
attatatagaagaattgaaacaaattatcctgttaagtgggaggagaacaatatggctcctccaagcccaaaaatgattgatccaattataagtccagaacatccagaattgtgaaaattaatgatggctcaaaccccaatttgkatttggaaaggagaatataaaacagagacccatagtaaaaaacttcgatttgttgtagccataacctctaatcggatggccccattgcagagttgtgttaaacctccttttatgctggcagtgggaaaaattagtatcctatctgactctcaaaccatatcgtgcctcaactgtcatctttttacctacattaattctacctttaataaaaataatagcattttactggttagggcccaagaaggagtttggatacctgtttccctcaataggcattgggaggcctctccctctatacatattatcactgaagtactaaaaggaatacttaatagatcaaagagattcatatttactttaatagctgtgatcatgggccttatagctgtcatagctactgctgctgctgctgttgttgctttgcactcgtctattcaaactgcaggctttgtagatagttggcagaaaaattct

SEQ ID NO: 777830 - DNA, 619 bp, Homo sapiens
attatatagaagaattgaaacaaattatcctgttaagtgggaggagaacaatatggctcctccaagcccaaaaatgattgatccaattataagtccagaacatccagaattgtgaaaattaatgatggctcaaaccccaatttggatttggaaaggagaatataaaacagagacccatagtaaaaaacttcgatttgttgtagccataacctctaatcggatggccccattgcagagttgtgttaaacctccttttatgctggcagtgggaaaaattagtatcctatctgactctcaaaccatatcgtgcctcaactgtcatctttttacctacattaattctacctttaataaaaataatagcattttactggttagggcccaagaaggagtttggatacctgtttccctcaataggcrttgggaggcctctccctctatacatattatcactgaagtactaaaaggaatacttaatagatcaaagagattcatatttactttaatagctgtgatcatgggccttatagctgtcatagctactgctgctgctgctgttgttgctttgcactcgtctattcaaactgcaggctttgtagatagttggcagaaaaattct

SEQ ID NO: 777831 - DNA, 584 bp, Homo sapiens
caaatagttaacttggaacatgtttgccattggtaggagccaagctaaccccagagaaactgaacaggggcagccatgcctcttcagccaccagaacactccatgtccagacaaggtgggcagagcagacccaaaagcagtgtatggacaagaaacccttcctcaacagccaagaagctcctcaatctttgcctatacccagagcatataatgagatggtagataaaaagtgacctcctgagacagtagagatagcttggttagtttaaaccttgacttgtactgagtgggaaattagcctgatgttgccatagactccaagaccaggcaatacactgtcagcctattccggaggccattgaacagaaagactcacagatccaaccacactcttcatttaatagatygaagcacacaaaaggaagcaaggagagaatgactgggtagattaacacttcaaagtgactttggagaggctgcaggtgagaaacaaggaccacaatatctgaatcctgggatccatgatgttcacatatcctgcctgtctctaaggattggtcttccccactgatgatggacttagg

SEQ ID NO: 777832 - DNA, 579 bp, Homo sapiens
agtgtctccaataggcagccaaattaaggtctcatattcatgaagtcttcatgtatgtttagtgcttctttatagttaacacctcctgaatacttagtatgcaacaaacttttagctctcaggcacctcatgattattaggtaccgttggatccttccatcccttcctgtgttcagcacacacatgccctacaaactaacctgttatctatacttaacataactgaaaatatttctattatcaaagatgagtaagtcttacaactcgtcttcagtaatagaaatgaatgttctctaaaagcaaatgctcattacaacttgatagcctatttacctggtaggtaatttttacattakaaataaataaaatatctctgattgacaagtttaagatttcctttttcttttctcctgggaatgagaggccaagagatgggtgagaacgttcacagacaatgaaagccacccgattttctacttctgagccgtaaagagtcaacagcattttgcagagctgaatggtgtttttactcactctgtggcatttctctcttccaaatcttgtccccttcccccacat

SEQ ID NO: 777833 - DNA, 602 bp, Homo sapiens
acataactgagcactttctatgcagtgggaatatttccatgtattcacacatatcctcacactctgggcctattctgaaagattgaaccacaccactcttccctaaatgtccttgtaaccaattatgtcatcctgctttattcaaaaccttgaccatccaaggaaattatttaccattgttgattaatcagcatatctttgaacttcaagctacctctttattccaggcagggtggaaaactagatktgctacttggccggaatgacttctgtttcctattgtctttctgctactaatgtgcctctcgcactcatattctgaatgaggctatactgttgcagtattctatttctgtgcataactgggatgtgaggggttgtctataatgtgggctcattttctgcttcttgataactgatcctgggtattgagcaaaagtaagtccatctggcctcattataattcctagggtgccattttttcccccaaataattctttatctttcatataagaaatatagaaaggctttgaattcagcaactcacagctacccatggatttgaattttgagtctgtgtttcagctatctcagccctgtgg

SEQ ID NO: 777834 - DNA, 606 bp, Homo sapiens
ctacatcttttccaactaacactctgtacctgttaaatactgactcccctttctcccctttccccatcccctggcaaccaccattctcctttcttcctccaagaatttgattacttaacgtacctcatagaagtggaatcatacaacgttgtccttttatgactggcttatttcacttaggataatttcttcaaggctcatccatattgtagcatgtgccagttttctttttttaaggctsagtaatattcattacacacacacacacacacacacacacacacacaccccacattttgtttatccattcatctgtgcatggacatatgggtggcttctactttttgtgtattgtaaataatgctgctgtgtacatgggtgtacaaacacctgtttgagtatatcatatttcattttcttataaatccggaaatgaaattgccaaatcatatggtaattctattttgaatatattggggaattgccatactgttttccgtagtggctataccaccagaaatacacaaatgttctaatttctccacatctttaccaaattcaaatacatttatatatgtatagatattatatacatgtaaatatatt

SEQ ID NO: 777835 - DNA, 600 bp, Homo sapiens
atattactaatagtattccatatttacgtagcaattaaagattttcaaaacgtcttcaccacaattattggacataattatcataacttttacacgtgggctgaataaatatttctatttctgtttgacggaccagtacctctaccttttgctttggggaaccattttaactattttaagctatgtggcttgtatagaaatgacccacttttcagtctctggagtggggcctaattgatagaagccaatcagcatcagtgattggctcacggacaagacgatgataagctagatattgccaataaaatgtaaaggtatatttcctgaggactgttttgtttgggttttggttttgagagagagagattctttttttgtttagrgacgactgcaggagactcttctcttcctgtgaagaggtgtgaaaaagaaatgtgagtttttgaactgtgtcaaccattctaatcagctcagaaaaagttgctggagctgctgggaaatcaacatatgaaaattgaaagtgaagttgaaattatggaaggcaggatggaaaagaaacttgatctctagtgacattgtttgaaatgttgattgaatttt

SEQ ID NO: 777836 - DNA, 485 bp, Homo sapiens
accttcgcccccaggggagctcacgctgctgccccgcctggctcgcgtcaaccctgagctggggacctgtgaacttaaacactgcagagcagcaccccagttttgctcgtagggactgtgcatttctctgaaggtcaagcaggctcttctgagcggttctgyacatcacggcctgctcccaacccagcctctcagggcgcctctcctaaaaagaagttgcaagaactcaacagaagacgcgagcacagaggtccaaattttaaggcttccagtgaagccgtccccgggtggagggcggcgtgcagcctgcctgccgggctccacacctacaggcactccatcaatacttgccgggcagggccgcctgaggtgccttcccagcaggaagaggctagcacgtgagcagagttgttttaactcaggacccaggcccccctgagggcactctcccaacccagcgggaaaacttccgggctcactccacg

SEQ ID NO: 777837 - DNA, 485 bp, Homo sapiens
accttcgcccccaggggagctcacgctgctgccccgcctggctcgcgtcaaccctgagctggggacctgtgaacttaaacactgcagagcagcaccccagttttgctcgtagggactgtgcatttctctgaaggtcaagcaggctcttctgagcggttctgcacatcacggcctgctcccaacccagcctctcagggcgcctctcctaaaaagaagytgcaagaactcaacagaagacgcgagcacagaggtccaaattttaaggcttccagtgaagccgtccccgggtggagggcggcgtgcagcctgcctgccgggctccacacctacaggcactccatcaatacttgccgggcagggccgcctgaggtgccttcccagcaggaagaggctagcacgtgagcagagttgttttaactcaggacccaggcccccctgagggcactctcccaacccagcgggaaaacttccgggctcactccacg

SEQ ID NO: 777838 - DNA, 512 bp, Homo sapiens
gctgctgccccgcctggctcgcgtcaaccctgagctggggacctgtgaacttaaacactgcagagcagcaccccagttttgctcgtagggactgtgcatttctctgaaggtcaagcaggctcttctgagcggttctgcacatcacggcctgctcccaacccagcctctcagggcgcctctcctaaaaagaagttgcaagaactcaacagaagacgcgagcacagaggtccaaattttaaggcttccagtgaagccgtccccgggtggagggcggcgtgcagcctgcctgccgggctccacacctacaggsactccatcaatacttgccgggcagggccgcctgaggtgccttcccagcaggaagaggctagcacgtgagcagagttgttttaactcaggacccaggcccccctgagggcactctcccaacccagcgggaaaacttccgggctcactccacggggatccccccgagggtgctccccaaccccagccggaatcctcccggactc

SEQ ID NO: 777839 - DNA, 621 bp, Homo sapiens
gggcagtctgcaccccatccgcccacgtctcagagacagtctgtgcattgtcgccctgttccaagaacagctgccgtgcagccagcaggcacattccagggtttggccaaaagccaatgcaaaccctcatactgctggcactagcagcaccgagtgggggcagacgcagggactgaccgaggtggggcacgaggggagaatggggacccacagtttggagccgtgtgctcaaagccttccctgtacacacaggggcctggagagcagggggtgtcggggtgtgggagcccagtccccgacagaggcatgtcctggaccagctgccagagggmccagcgagtgtgcaggctggaggaatgttccagggccctccaccgcgttgccatttcctgcccaggctgccttggccacccacccactggctgcccgggctgggacacatggcggcctggctgtcagatgtgtcagcatcgccttgggacagggtcccaaggccagagaagtgggggacagaggcaggcagtaggggtgtgacacctctgggggctgcagacccctgcccctgctccaaacctggctgggacgctgggtgctgtgaggctgtggcccagggagggagcc

SEQ ID NO: 777840 - DNA, 633 bp, Homo sapiens
ggaaggaggggcagccgtcagaccagaagaaagaaccaaagagcccattcaggcttcctggtccgggagcccatgagcagtccctggaatgacacggtcttccttctcggggagcatggccacagccaccagttgatggacaggcccaccaagctgcccctccatggaggaagggtggttccttgcaggggaggggacacaggcmaggcccaggcccagagccttctgcaaggggaggatttcttgtttgtcctaacacagtgccactcaggctcgccatgcaccatggcctggccccgttcaacatcagcatctcttccctgcaggctcctctttgggacacactggcgctgccgtcgggggtcgggtgctgcccaaggacctgagatcctattccattcctgactcccccggagcttgcaccctccaagagacgggtctgatctcactttcaaatcaaagtctttctgcatgaggtctggtcatacagaaagcggcccctgtgggcccccggtttggggacacagaaatcctttcacttgtgcaacctcccaaatgcgctttgagcagttgtgttatgggctaaattgtgtcctctcaaaattcacatgttgcaatcctagttctcggtgc

SEQ ID NO: 777841 - DNA, 643 bp, Homo sapiens
tagaccaatgtcctgaagtgttttacctatgttttcttttggtagttttatagtattgagtcttatgttgaagactttaatccattttgatttgatttttgcatatggtgagagatacaggcccagttttattattttggatgtggctatacaatatacccagcaatatttattgaagagartatggtttcaccaagtatgtagttggtatatttatcaaaaacaatttggctgtaaatacatggatttatatctgaactctctattttctttctttggtctatgtgtctatttacataaccataacatgctgttttgttactatagccttataatacattttaacatcaggtaatgtgatgtctccagttttgctctttttgctcagcttgttttggctactaaggctgtttttggtttcatacaaattttaggatttctttttaatactgtgaataatcacattggtagttggataaaaattgcattgaatctgtaaattgctttgggcagtatggtcattttaatgatataaatttttacaatccatgaatatggggtgtctttccaatttttgtgtgctctttaatttctttttattactggattatagttttctggtagagattttcaattccttgat

SEQ ID NO: 777842 - DNA, 570 bp, Homo sapiens
ttctgtaattataataaattcaaattaaaggttgtagttgtccaaaattgaccctttgtcactatgctctatgtgtggtgtctctaactggctagatgttgagcagaatacagaacttagagtactgacaaatggtctaaccaaagtaagggctgagattycatagggagtattaacatttatgggaaaactgactgtgagggagtggaagataattaaaccagggctaatagcaacagacttgaatttcagagggccacctggatatcttgttctcagtcactttctctcatgtttcattttcctcatttgaacaggtcaacagtcattaaaatttttcataacatctgaagcaaatcattgcattcatttctttgtaaggtttaaaaatccacatattttattgttagcattcaaaacatttacttttcaccttttttttctttttcttgattttttataaagttgaaatagtctgggaatcattaagtgccaaatgctttcatcaggcccataaacaatggaagattccatagaaaatgcagttacttcttgggaagtttcaacaaa

SEQ ID NO: 777843 - DNA, 607 bp, Homo sapiens
agggagtagaggttggcaaaagggtccctaccttgtaagataggtctcttctaataatttgccagaacttgaaactgtgtattggaataactttcatacttgagaatctactgcaggtaaactggtcattgcttgactttattattactaatttttatggtatatatctacttcactggttgatgattccattcttggctatagagagatttggttctgcttttctaatgtgtcaacygcagatgaagtgcttgccaaatatttaataatgggttataaagtcatttatgttggagattattactgccacagtctaggaaatggaaattcaatgaaatacaaatgactctactgtctcaatacaatgccagacttgaatgagataatttatgaacaagaaaatggctatattaaaaagcattattagatgagaatgatgtccacacagtagctgacacatactctgcaatatcaataagaaggaatttttccactaaacgggatttgtaactggacctgcgtctggagtttgttgtattaagtaaagacaataaatatttcctgcctccttccttccatccttccccttccttccttcccatctttt

SEQ ID NO: 777844 - DNA, 507 bp, Homo sapiens
agcagtgttttagatatatatttttttaagatatatatatttttggtcaaaatattttctatttctctgtgtgtgcactttagttttgtttgtttattggttggctggtacttctgtgcatgtccatgctatttttagacaactttttgggaagtattttaaagggtttaaagttgagaytgaacatttaaatcactggtttcttgcacactacagcatatgttattggcttgcagagttctaccctattgcccactgcagttgtgtacacatattgagaaaacactgtgtgaagatcggttggcaaattaatttcctctccaggttgctggctgcttagaggagcaggacaaatttacactcccaatcacataaaagattacctgtgggaacattatttaactctctgaccctttaaaagggccctggagaaaattcatcaagttgttagacacagaagctacaagaggggagtcaaagaattctcgtaattttccaacctgggtg

SEQ ID NO: 777845 - DNA, 529 bp, Homo sapiens
cttttgcaacaacatacatggaactggagatcattatgttaagtgaaataagccagacacagaaagacaaacattgtaagttctcacttatttttgggaaccaaaaaaataaaacaaacaattttaatattaattaaaattaaaataaaaaataaaaacaagtaaatggacagagagagtagaaggatggttaccagaggctggggagggtattgggggattaggaggaagttgggatggttaataggtwcaaaaattagtttgaaaggatgaataagacctagtatctgatagcacaactgggtaactatagtcaataatagtttaattgtagattttaaaataactaaaataatataactgggttgtttgtaacacagttgagaggatggatacctcatttgctatgattattatgcatttcatgcctgtatcaaagtacctcatgtaccccatacatatatgcacctagtaagtaccgacaaaaattaaaaattaaaaaagaataaattcctagtaacggaataac

SEQ ID NO: 777846 - DNA, 529 bp, Homo sapiens
cttttgcaacaacatacatggaactggagatcattatgttaagtgaaataagccagacacagaaagacaaacattgtaagttctcacttatttttgggaaccaaaaaaataaaacaaacaattttaatattaattaaaattaaaataaaaaataaaaacaagtaaatggacagagagagtagaaggatggttaccagaggctggggagggtattgggggattaggaggaagttgggatggttaataggttcaaaaattagtttgaaaggatgartaagacctagtatctgatagcacaactgggtaactatagtcaataatagtttaattgtagattttaaaataactaaaataatataactgggttgtttgtaacacagttgagaggatggatacctcatttgctatgattattatgcatttcatgcctgtatcaaagtacctcatgtaccccatacatatatgcacctagtaagtaccgacaaaaattaaaaattaaaaaagaataaattcctagtaacggaataac

SEQ ID NO: 777847 - DNA, 609 bp, Homo sapiens
acacgccaactgtgctcagcctcagggcctctgcacctgctagtccaaccatctgcagtatccttacccaagataccatcgtggctctttgtaggcattctttcagtcaatgctccaaagtcaccctcttgatcagctcttccacatccatgctgtgtaaaactgaaaccttttctccacttccttaaactcttcctgtttcctttactgctttattttcaactattggaaatgtaaatatttgtatattmtgtacacaaatatatactttcattttatttatatttatagaaacttatattttaaatatatattaagataattgtatgtaaaataaatatatttaatcaaactctatgtagttatgtatttttaaaaattcatcccctactataatgtcaagccagggaggtcagagtggtttttcctctgttgttaactgctttgtcctgcctttagagaacagtgtcagcactgggtagacacttagtgcatggctgttgaagacatgaaagagtgaaactcttccccaaatcctcctgacataccagtccaggatcatgaagtcttgcatctctgagacacctcaggacatgtttcccccgtata

SEQ ID NO: 777848 - DNA, 609 bp, Homo sapiens
acacgccaactgtgctcagcctcagggcctctgcacctgctagtccaaccatctgcagtatccttacccaagataccatcgtggctctttgtaggcattctttcagtcaatgctccaaagtcaccctcttgatcagctcttccacatccatgctgtgtaaaactgaaaccttttctccacttccttaaactcttcctgtttcctttactgctttattttcaactattggaaatgtaaatatttgtatattctgtacacaaatatatactttcattttatttatatttatagaaacttatattttaaatatatattaagataatwgtatgtaaaataaatatatttaatcaaactctatgtagttatgtatttttaaaaattcatcccctactataatgtcaagccagggaggtcagagtggtttttcctctgttgttaactgctttgtcctgcctttagagaacagtgtcagcactgggtagacacttagtgcatggctgttgaagacatgaaagagtgaaactcttccccaaatcctcctgacataccagtccaggatcatgaagtcttgcatctctgagacacctcaggacatgtttcccccgtata

SEQ ID NO: 777849 - DNA, 552 bp, Homo sapiens
atttgtttaaaagcatcctttaaggatgtcatttattgtatccaatgtaagcatctaatgagttttcagccaagggataactctttgttaatcatgttgtttgcaggtagttcgttatttggctggttgtggactgcaaagttgccagatgctggtgtctaagggctatccagacattgggtggaacccagttgaaggagagagatatcttgactttctyagatttgctgtcttctgtaatggtaggacttgatttcttgaggtcttttgagttatcattaaaactgcatagagatataataaggattcatctcagcactttcatgaaggaagtattagtaaagaaatcacatattttataatcgataggggtttttcacagtaaccacttataatacaatatttgtttacatacttctttccttatttaaattaaaatttttaggcatctaagttctcctaaattttttattttgaattctaataatagtttggattatgacatcattctataataataacaagttagtgagaatcaatagtttatgcctc

SEQ ID NO: 777850 - DNA, 499 bp, Homo sapiens
tagtagtggtattttatacataattgctgtaattcttttatttcttttttgtttgtacatatttatggggtacatatgtaattttgttatatgcatggattgtgtagtctaatcagagtttttagggtatccatcacccaaataacatacattgtaccattaaccaatttctcattatcctgatctccataccctatctttctgtgtctccattatctataattccmcctctacctccatgtgaacacattttgtatcacctatgtcatgagtgagaatatgtgatatttgactttctgtgcctggctagtttcatttaacataaaatctccagttccatccatcttactgcaaaatacatgatatagttcttttttatgactgaatagcatcctattgtgtatatataccaaattttctttaaccattcatccattgatggacacttagcttgattccatgtgatggttaatgttaagtgtcaacttgattgaatgaa

SEQ ID NO: 777851 - DNA, 535 bp, Homo sapiens
tgatctccaattgcagctcagcagggacaaaaggggatgggcatgtaaaaatctggatgaacactctatttctgagcaattatcctgcaaatcctgctgggtgatgagaataagttgggtgcccatcacccagaggtttcctttttggaaaaataagaccaagggagctaatcaaagccaagccccatacacccaaatcttagcatagcttagcaactatagccaccagttatctgggcatgtcacaagacatccttttatctcccttgttggaggaggactaaattttccagcttcaccttagcrtttggcttatgataaggaatccatgcaacaacccaccctcacccctgctggagacacatttttgtcccaaactcaattccaagcttcaggtcaaatccctaggaaagaaatctggatctgagggatccagaggcagacaataatggaagttaaaaggtgcagcataggtgaacatgactaattcttgtcaattaaaccaagactcccatttcatggataaaggtcatgc

SEQ ID NO: 777852 - DNA, 602 bp, Homo sapiens
ctctggggcagtgtgccttccagggattgcctcggcatagtggacatggactggggggtggcttgtttctcattggacaatcttttttaaagtgtccttgcaaaccacactgataaaaagccctactgggtgattggccggctccattttctgtcatctctgaaccaccaaggtttgtttgtctgagggccatgactaaggctgcagcctttctctgatgttgcttttccttttgggcctgttcctcttggtccttattatagaacaccgaggttgccaggtttaakaattcctccagattttgttcagggcctagggctcgcttttggagctttctcctgatatctgcagctgattgggtaataaacttatcttttaggatcaattgaaccttgagtgagccgggtgacaggggagtatattttcttaaggcctcctatagctgctcaaggaaggcagaaggattttcttcctttccctgagttatggtggacatcattgaataattcatgggctttttcctaattctccttagtctttctagaaaacaggtcaacctgtgttttgactgcagtggccctgatctgagttgaggtcccagt

SEQ ID NO: 777853 - DNA, 602 bp, Homo sapiens
ctctggggcagtgtgccttccagggattgcctcggcatagtggacatggactggggggtggcttgtttctcattggacaatcttttttaaagtgtccttgcaaaccacactgataaaaagccctactgggtgattggccggctccattttctgtcatctctgaaccaccaaggtttgtttgtctgagggccatgactaaggctgcagcctttctctgatgttgcttttccttttgggcctgttcctcttggtccttattatagaacaccgaggttgccaggtttaataattcytccagattttgttcagggcctagggctcgcttttggagctttctcctgatatctgcagctgattgggtaataaacttatcttttaggatcaattgaaccttgagtgagccgggtgacaggggagtatattttcttaaggcctcctatagctgctcaaggaaggcagaaggattttcttcctttccctgagttatggtggacatcattgaataattcatgggctttttcctaattctccttagtctttctagaaaacaggtcaacctgtgttttgactgcagtggccctgatctgagttgaggtcccagt

SEQ ID NO: 777854 - DNA, 572 bp, Homo sapiens
gcttgtttctcattggacaatcttttttaaagtgtccttgcaaaccacactgataaaaagccctactgggtgattggccggctccattttctgtcatctctgaaccaccaaggtttgtttgtctgagggccatgactaaggctgcagcctttctctgatgttgcttttccttttgggcctgttcctcttggtccttattatagaacaccgaggttgccaggtttaataattcctccagattttgttcagggcctagggctcgyttttggagctttctcctgatatctgcagctgattgggtaataaacttatcttttaggatcaattgaaccttgagtgagccgggtgacaggggagtatattttcttaaggcctcctatagctgctcaaggaaggcagaaggattttcttcctttccctgagttatggtggacatcattgaataattcatgggctttttcctaattctccttagtctttctagaaaacaggtcaacctgtgttttgactgcagtggccctgatctgagttgaggtcccagtggggatcctatactggagacagcttgctgg

SEQ ID NO: 777855 - DNA, 538 bp, Homo sapiens
actgataaaaagccctactgggtgattggccggctccattttctgtcatctctgaaccaccaaggtttgtttgtctgagggccatgactaaggctgcagcctttctctgatgttgcttttccttttgggcctgttcctcttggtccttattatagaacaccgaggttgccaggtttaataattcctccagattttgttcagggcctagggctcgcttttggagctttctcctgatatctgcagctgattgggtaataaacttatcttttaggatcaattgaaccttgagtgagccrggtgacaggggagtatattttcttaaggcctcctatagctgctcaaggaaggcagaaggattttcttcctttccctgagttatggtggacatcattgaataattcatgggctttttcctaattctccttagtctttctagaaaacaggtcaacctgtgttttgactgcagtggccctgatctgagttgaggtcccagtggggatcctatactggagacagcttgctggccggtagggaattt

SEQ ID NO: 777856 - DNA, 642 bp, Homo sapiens
tgagatcgtatatttttccagccacctgaaattgaggtttaatctgtatttttatctgtgtttaatgcacattcctcacttcgtccccagggttctccttaatagtttatttcctgagtcttcctccacttactctaaccagggatatatcttcaaaggtccaaatgacaacaaaattttgtgtatatcttgactctttgataacacactcagtgtccttctctctctcttatgttactgtctgaactcaaggcttaatttatcaaattacatctgactactatttaggtcctccattttcttagatagggaagatcaccagttataccaactataattatttttataccacacyttttacaagtaaactttaaaatactataggaactttaaaaattaaagaaaaaccaagacaaaatgtgtcaatcattaaataagtttttgagattccagttagccaaggcaaaaagagaaagctaatgaattaacattatccaatgttaatggatcgtatccattaccaaaggaaggcatcagttcctcaaatagcatttttctaaattttgatttcttaatgtaattgatagattacaacatttcaataaacctagtatctcccatgttctccgatactctcatata

SEQ ID NO: 777857 - DNA, 612 bp, Homo sapiens
ccctttttatcagatctcatgtctacactgttgtcaatcatgcctacccaatgaagtctccataaaaggcccaagaagacagggagctttcagatagctgaacacatggaggttcctggaggatggtgagccccggagggtggtgagccttggaagctccacagctctccccataccttgccctgtgtaactcttcayctgtatcctttctaatatcctttctgataaaccagtaaatgtgtttccttgtgttctgtgagctgttctcacaaattattcaaatctaaggggctggatgtcatgagacctctgattcatagccagtcgatcagaagcacaagaataacaacctggggttagcaactggtctcagaagctgggctggggtggggtaatcttagggactgagccctcactctgtgggatctaacactatttccaggtaggtagtgtcagaattgagttgaattagatggcacgcagtggtgtctgctgcagaattgattgcttgctttttggtggggaaaaacccccacatatttggtagcagaagtcttctgtgatgattgattgttactgtggttgagagcagaagaaaaacaattttagttt

SEQ ID NO: 777858 - DNA, 612 bp, Homo sapiens
ccctttttatcagatctcatgtctacactgttgtcaatcatgcctacccaatgaagtctccataaaaggcccaagaagacagggagctttcagatagctgaacacatggaggttcctggaggatggtgagccccggagggtggtgagccttggaagctccacagctctccccataccttgccctgtgtaactcttcatctgtatcctttctaatatcctttctgataaaccagtaaatgtgtttccttgtgttctgtgagctgttctcacaaattattcaaatctaaggggctggatgtcatgagacctctgattcatagccagtcgatcagaagcacaagaataacaacctggggttagcaactggyctcagaagctgggctggggtggggtaatcttagggactgagccctcactctgtgggatctaacactatttccaggtaggtagtgtcagaattgagttgaattagatggcacgcagtggtgtctgctgcagaattgattgcttgctttttggtggggaaaaacccccacatatttggtagcagaagtcttctgtgatgattgattgttactgtggttgagagcagaagaaaaacaattttagttt

SEQ ID NO: 777859 - DNA, 610 bp, Homo sapiens
ccatggaaagtgcagagaagaaacccaacacgagatgcaccagagaataggtgggaccctttagattgggtggccaaagaagaccatcttgagaaggtgacatttaaactcacacagggatagttagccagagctcgccatcacaacaagggaagagtgttgtgggcagagaggcagtatgtgaggagacttctagtcagggaaagtgtggtgaattctgagaattgcatgaggctagtgtggagaaagggcacaaggtgattttggaaaagtgggcaggggtaagaacatttggattatcaaggtgagtgtctcacttgaaggaaaaaattaataagtacttgttgggtttccaggtgatgattctattccaactgcaaaattcttcaacttacaaaattgaggccyttaaaattaagagaaagtctagaattgaagtctccacatacccagttgagtgttctttctagtatcactatagggagttaagtaccaatgattccatagcatctgaaaatgactgatgaccactacatcttctatcatgcacagattgaatgtgagagacatatattaattgacagtcttttatcagcatgtgtgaatgatt

SEQ ID NO: 777860 - DNA, 546 bp, Homo sapiens
cctgtttgtagacaacatgatcttatatatagaaaatcctaaaaactccataaaaatctgttagcactaataaatgcagtaaagctgcatgataaaaattaacatacaaataaaaaacatttctacacactaaaaaagaatacctgaaaagatagttaggaaaacaatcccatttacaatagcaccaagatgaataaaatatttaagtaaggatgtaaaagacttatgtmaatgtgtgcctaagagatattatgggtacagttctagaacactgaaataaagcaaatttttcaataaaatgggtaacgcaaattctttggtttcccagtgcatatataaaagttgtttacattatcctatagtttattaagtgtgtgatcacattgtctttaaaaagtatacgtcttaactaaaaaatactttattgctaaaaaaatgctaacaatcatctgaaccttcagtgagtcataatgtttttgcttgtggagggccctgactcaatgttgatggctgtctactgatcaaagtagtaattgttaatggttg

SEQ ID NO: 777861 - DNA, 546 bp, Homo sapiens
cctgtttgtagacaacatgatcttatatatagaaaatcctaaaaactccataaaaatctgttagcactaataaatgcagtaaagctgcatgataaaaattaacatacaaataaaaaacatttctacacactaaaaaagaatacctgaaaagatagttaggaaaacaatcccatttacaatagcaccaagatgaataaaatatttaagtaaggatgtaaaagacttatgtaaatgtgtgcctaagagatattatgggtacagttctagaacactgaaataaagcaaatttttcaataaaatgggtaacgcaaattctttggtttcycagtgcatatataaaagttgtttacattatcctatagtttattaagtgtgtgatcacattgtctttaaaaagtatacgtcttaactaaaaaatactttattgctaaaaaaatgctaacaatcatctgaaccttcagtgagtcataatgtttttgcttgtggagggccctgactcaatgttgatggctgtctactgatcaaagtagtaattgttaatggttg

SEQ ID NO: 777862 - DNA, 559 bp, Homo sapiens
aatgtaagactggttccacatatgcaaattaataagcattatagatcacattagcagaaccaagaacaaagaccatatgatcttttcaatagacattgaaaaagtgtttgataaaattcaatattcctttattttaaaaaccctcaaaaactcagtatacatggagtataataataataaaggccataaatttacagcaaacttcatactgaatggagaaaaattgaaagcctttcccctaaaatctggaaaaaaccaagaatgctcactttcaccatttttatgcaacataatctggaagtcctggccagattaattaggtgagagaaagaaataaaaggcattccagtcaaaagggaagcagtcaaattatctacattcacrgacaacatgatcttgaatttataaaaacttaaagatgccactaaaatattcttaggactgataagtgaatttagcaattttgcaggataaaaaatcaatatacaaaaattagtagcatttatatacgccaacagcgaacaatctgaaaaaaatttcaagaaagcagttccattta

SEQ ID NO: 777863 - DNA, 644 bp, Homo sapiens
ttttccactgaattagagctaataagagatgaattaggggttaaaacttttactatctgggtctaaatttctccacattttagttttaatgatttagattttttcaataaatatttcagtttttcttatagcaggcttcaccaataacytagatattgccaatgaaaatctttttactcttagtaaaatttgaatatgtatctcaacattaacacacttttcagaaatgaagtcatttaagatcttttattgaattcctacttttcataagaactatttttatagcagtttcttggccttaatgagcagtagcattttgacgtgatgagtagcagaattttaatggtacgttgtaaagaaattgaagtatgttggtaagaaaagcgctttttgttgatcattatccttttcttagagtatttagtttgaatgaaatatgttggtttacatatcagaatttgaacatttgctttttgtatttttaaattatggtgtacatatatatgtgtgtgtgtgtatacatatatatatatatttgtggccatgccatgacaacataaagcccttttttctgttgtttcttttggtatctaaaagcatgtgagtcaggatctggaagcctcgtcatgttcttcaacacaagg

SEQ ID NO: 777864 - DNA, 644 bp, Homo sapiens
ttttccactgaattagagctaataagagatgaattaggggttaaaacttttactatctgggtctaaatttctccacattttagttttaatgatttagattttttcaataaatatttcagtttttcttatagcaggcttcaccaataacctagatattgccaatgaaaatctttttactcttagtaaaatttgaatatgtatctcaacattaacacacttttcagaaatgaagtcatttaagatcttttattgaattcctacttttcataagaactatttttatagcagtttcttggcyttaatgagcagtagcattttgacgtgatgagtagcagaattttaatggtacgttgtaaagaaattgaagtatgttggtaagaaaagcgctttttgttgatcattatccttttcttagagtatttagtttgaatgaaatatgttggtttacatatcagaatttgaacatttgctttttgtatttttaaattatggtgtacatatatatgtgtgtgtgtgtatacatatatatatatatttgtggccatgccatgacaacataaagcccttttttctgttgtttcttttggtatctaaaagcatgtgagtcaggatctggaagcctcgtcatgttcttcaacacaagg

SEQ ID NO: 777865 - DNA, 627 bp, Homo sapiens
taatacctaatacaatgtaaatgctatatatatagttgttatactgtattgcttttcatttgttttatttttattgttgtgtttcaagaataatttcacagtgggagtgttattttaaaaaataagtatcaatgcagccgtaaataagaatgagttcatgttctttgcagggtcatggatgaagctggaaaccatcattctcagcaaactaacacaggaacagaaaactaaactcactcataaatgggagttgaataatgagaacacatggacacagggaggggaacatcacacacyggggcctgtcagaggtggggggcaaggggagagatagcattaggacaaatacctaatgcatgcagggctgaaaacctagatgacgggttgacaggtgcaccaaaccaccatggtacatgtatacccgtgtaacaaacctgcatgttctgcacatgtaacccagaacttaaagtaaaattaaaaaagtatctaattccattagttgctggtgctgttttagttttgttattattcattaggtcttgctcttgggcattactcattcatttctgatgctaataaagttgccatgtgtcatttcaggtgtcattctattagaagaccatccca

SEQ ID NO: 777866 - DNA, 627 bp, Homo sapiens
taatacctaatacaatgtaaatgctatatatatagttgttatactgtattgcttttcatttgttttatttttattgttgtgtttcaagaataatttcacagtgggagtgttattttaaaaaataagtatcaatgcagccgtaaataagaatgagttcatgttctttgcagggtcatggatgaagctggaaaccatcattctcagcaaactaacacaggaacagaaaactaaactcactcataaatgggagttgaataatgagaacacatggacacagggaggggaacatcacacactggggcctgtcagaggtggggggcaaggggagagatagcattaggacaaatacctaatgcatgcagggctgaaaacctagatgacgggttgacaggtgcaccaaaccaccatggtacatgtatacccgtgtaacaaacctgcatgttctgcacatgtaacccagaacttaaagtaaaattwaaaaagtatctaattccattagttgctggtgctgttttagttttgttattattcattaggtcttgctcttgggcattactcattcatttctgatgctaataaagttgccatgtgtcatttcaggtgtcattctattagaagaccatccca

SEQ ID NO: 777867 - DNA, 606 bp, Homo sapiens
catttccgcaggtagaattctggtgataataaattctctcagcatctgtttgtctaaaatgccttcattttgaaagaattcttttctgggttaagaaacctagaaaaaacagactggtttgtttttcctttcagaacagctaagccctttstccattattttctggcttgcatagttcctaaagtgttgcctactgtcaattttttgtgtgtttctctgcatagtgtgtcttttctctgcctgttttatactttttctttatcactgttttttatcaatttttttttctttttttctttttttcttttttttttttttaagaaacggagtctcgctctcgctctgttgcccaggctggagtgcagtggtgcgatctctgctcactgcaagctccgcctcccgggttcacgccattctcctgcctcagcctcccgagtagatgggaccacaggcgcccaccaccacgtccggctatttttttgtatttttagtagagatggggtttcaccgtgttagccaggatggtctcgatctcctgaccttgtggtccgcccacctcggcctcccaaagtgctgggattacaggcgtgagtcaccgcccccggc

SEQ ID NO: 777868 - DNA, 588 bp, Homo sapiens
aataaatataatgatttatactgaaaaaagagcagtgagtataatggcccaaacagtgctgtcttttattacgttaccatagtaaaaaatagcagagccattcacaccgttatatttaaggttgtagcagcaattccattatcattcctgtttttcagaagtttataacttggtcttgacaatacactccagcctgaaactagcctttttttttttttttttttagtcaaaagctggtttttcttgattgccatgctattattgaataatcagattggaaaattaaatagcatttttactattttttctgtctatattttgactacatatatcttgaaaacctcttttataacatgcacacatacacagacacagatacatatgcacacacamatacatatacttcattggcttgcctacacattcaacacttgtatttagaacaatggagagcattgagtacatttgatgttcattaactggatggccaccatagtaacttactacaaaatgcctcaaaagcatatgttaaaatttttttacagatattttctaattctgtaaataataggatatttgtttgattaa

SEQ ID NO: 777869 - DNA, 604 bp, Homo sapiens
aatctttctgtgcttgtatttctacaactgtagaataataggttgcaatatcatagactcttcatgtagagaatctaattctattactataaaatctaattctaataccattggtttggtgttagcaatgaaggtgatagcaactgaaaagtaagaagagcagtgactaaaagctcataggttttgataaatgggcactattactattataatatttattgtgttaaaatacaaattatgtacagcactcctctgaacactgacctacaatagttaccagttgcttgttggacttcttgaaccagacttgaccaggcaaagagaatttgagaacctctatttcactaaaaaggtggtatctacaatatcttgccactgtagcatctgctatgtgtaatgagatgcttgggcctgctggtggtcacctattttctaggtatacgcattggcttttgtggtgtygccatatatatatatatatatatatatatatatatatataaaatatgtattatatatataatatatatacatgatatagatataattaaatgttatattcaattaaaataaatataattttaaattaaatataaggaacatg

SEQ ID NO: 777870 - DNA, 597 bp, Homo sapiens
ccatttatttttatcctctttagtttctctcatttgtggttttccttgtagagatctttactaccttggttacattattgtatttaattatttttgtagctattgtaaatgggattgccttcttgctttgtttttcakctagtttgttgttcatgtataaaaatgctactgatttttcatgtcaattttgtatcctgaaaatttactgaatttgttgatcaattctaagagtttttttggtagaatgtttaggtttttctatatatgtgaccatgtcatctacaaacagggataatttgacttccttctttccagtttagctgttctttttttttttcttgcctagttgctctggcttattcaaaggttgttgacacatacatagatacctattttaaaagagtggcatgtgagaaaaatacaggaaatagagcccaataagatatgaatatttgaatttgctgatccattctttcatataggactataagatttaactcttaaaacttcaaaatttttctgtatgtactttccatcttgtaaagttataatagacgcgtgtcgttcttattggagtcaatgaattgggctctgtca

SEQ ID NO: 777871 - DNA, 597 bp, Homo sapiens
ccatttatttttatcctctttagtttctctcatttgtggttttccttgtagagatctttactaccttggttacattattgtatttaattatttttgtagctattgtaaatgggattgccttcttgctttgtttttcagctagtttgttgttcatgtataaaaatgctactgatttttcatgtcaattttgtatcctgaaaatttactgaatttgttgatcaattctaagagtttttttggtagaatgtttaggtttytctatatatgtgaccatgtcatctacaaacagggataatttgacttccttctttccagtttagctgttctttttttttttcttgcctagttgctctggcttattcaaaggttgttgacacatacatagatacctattttaaaagagtggcatgtgagaaaaatacaggaaatagagcccaataagatatgaatatttgaatttgctgatccattctttcatataggactataagatttaactcttaaaacttcaaaatttttctgtatgtactttccatcttgtaaagttataatagacgcgtgtcgttcttattggagtcaatgaattgggctctgtca

SEQ ID NO: 777872 - DNA, 563 bp, Homo sapiens
cagagtgatctctgagaagcccctctggcagtttatgtttatgatatccctgaaggaatggttgagggtggaagatacatgcagcccaccaacaactattcccaaactcactttctcttggactccttattttccaggatcttcttactttagcttgtaatgagaggaaagattttagcatttcagggactttctccaaaggtggtctcttctttcctcttaaacaaagagtgagtgatctaaagttggcaaagccagtttcacaattgagtagcatgttttgcatttaatctctcactctaagatctaaaaatatttggtgtcaattgtgttgttcttagactttgagatctcagcgtaaggcagagtaatctcatttaaacatttgtgggagataytgaatattgcagctgaaagttggtcgcctcatgcccgggcatataatagttctttatttaaaagaaacacaatgctaacctctagaaaatataaaaagcattaaagagtagtttaaaactttacaatttggtttcaccaaaaaattctgaagctggaattatact

SEQ ID NO: 777873 - DNA, 671 bp, Homo sapiens
gatttattcatgtcttttcatggcttcatagctcatttctttttattactaaataatattacattgtatggatgtacatcgtttatccattggcttattgaatgacatcttggctttttacaatttggagtaattatgtttctttaagcattcaaatgcaggtttttacatggacataaatttcaactagttttattattgttgtaatgctagcttcacagaataaattaggaagtgttccctctagttctattttctgaaagatactgtaaagaattggtattatttcctctttaaatgttcagtaaaactcacccataacaccatctgagcctggtgctttctttttctgaaaagttactaattattgatttaatttcttcaggaaatataggcctatttagattatctaattttctttgcatgagtttttatagtttgtatcttcaatgaattggtccattttattttagttattaaagttttaggtatatgtytctgtgctgtgaccataagtgcatctctaatatcataacattttttcacccttaggtaagatgccaaggctcaagagagctgaagtaagagcagtgtgcttaccccagctgagataacgctctgctataagatatagtcttccttggagagtagacctttgttatggagaatgc

SEQ ID NO: 777874 - DNA, 617 bp, Homo sapiens
tattacaaaaataaccatgtaagaacctttaaaaagtataattctatttacttgctgtcctttgctttcttctggtcatgtattttatttacttataggtaacgacacaaaatgtgttactatttttgctttaaacagtcacaagtttttaaaatatgaatagataggtaggtagatgatgatagatatgtaggtaggtagacagatggtaattttttaaaaggtcttttatacttayccagatatttagtcatttatccactctaataattttcagttctccttgtagattcaggctttcagcaagaattcaccttgaaaactttccttgtctcttatagtatgtatttgctaaaaataaacactctcaacctttctcatcttatttcaccctcatgttgaaagatatatttgttgaacatagaattctagattaagagttgctttccttcaatactttgcagatattgcatcgtcttaaggcagtcaatattttagttgaaaactcagacatcatacctaaggttgttgcctgtgtgaaatgtctttttcctctggctgcttttaagatttaccctttatccttgtttttcaatagtttaatcacaaaatgcctc

SEQ ID NO: 777875 - DNA, 617 bp, Homo sapiens
tattacaaaaataaccatgtaagaacctttaaaaagtataattctatttacttgctgtcctttgctttcttctggtcatgtattttatttacttataggtaacgacacaaaatgtgttactatttttgctttaaacagtcacaagtttttaaaatatgaatagataggtaggtagatgatgatagatatgtaggtaggtagacagatggtaattttttaaaaggtcttttatacttatccagatatttagtcatttatccactctaataatkttcagttctccttgtagattcaggctttcagcaagaattcaccttgaaaactttccttgtctcttatagtatgtatttgctaaaaataaacactctcaacctttctcatcttatttcaccctcatgttgaaagatatatttgttgaacatagaattctagattaagagttgctttccttcaatactttgcagatattgcatcgtcttaaggcagtcaatattttagttgaaaactcagacatcatacctaaggttgttgcctgtgtgaaatgtctttttcctctggctgcttttaagatttaccctttatccttgtttttcaatagtttaatcacaaaatgcctc

SEQ ID NO: 777876 - DNA, 617 bp, Homo sapiens
tattacaaaaataaccatgtaagaacctttaaaaagtataattctatttacttgctgtcctttgctttcttctggtcatgtattttatttacttataggtaacgacacaaaatgtgttactatttttgctttaaacagtcacaagtttttaaaatatgaatagataggtaggtagatgatgatagatatgtaggtaggtagacagatggtaattttttaaaaggtcttttatacttatccagatatttagtcatttatccactctaataattttcagttctccttgtagattcaggctttcagcaagaattcaccttgaaaactttccttgtctcttatagtaygtatttgctaaaaataaacactctcaacctttctcatcttatttcaccctcatgttgaaagatatatttgttgaacatagaattctagattaagagttgctttccttcaatactttgcagatattgcatcgtcttaaggcagtcaatattttagttgaaaactcagacatcatacctaaggttgttgcctgtgtgaaatgtctttttcctctggctgcttttaagatttaccctttatccttgtttttcaatagtttaatcacaaaatgcctc

SEQ ID NO: 777877 - DNA, 589 bp, Homo sapiens
tttccaatactatttaaactgttctacactacaaagaaaaaagaaaaagttcctaagtatttttgtaaagctattaccaatgaaaatataatacacaaaagccaagacaaccttatgggtcaatctcacttgtaagtatcaagggaaagttcttaataaaattttaacaaatagaattgagagtatatactaagaataataaaaagctaycaggcatggtggctgggtacctgtggtcccagctacacgggaggctgagagaagagaattacttgagtccaggtgtttgagactctcctgggcaacatagcaagaccttgtcccttagtagtagtaataataataataataatagtaataatattaagaagaaatactccttgatgacaaatgagattcattttaagaatgcaagaatggttcgacattaatactaaacataatatctatgaagcaaaggaggcaacatatcataagattatgtcctagtttctaaaggaacattttataatattcaacataatattgtgcaacaattacccctgacgttttgaaactcccaataaattataagtagatgactgtttct

SEQ ID NO: 777878 - DNA, 589 bp, Homo sapiens
tttccaatactatttaaactgttctacactacaaagaaaaaagaaaaagttcctaagtatttttgtaaagctattaccaatgaaaatataatacacaaaagccaagacaaccttatgggtcaatctcacttgtaagtatcaagggaaagttcttaataaaattttaacaaatagaattgagagtatatactaagaataataaaaagctaccaggcatggtggctgggtacctgtggtcccagctacacgggaggctgagagaagagaattacttgagtccaggtgtttgagactmtcctgggcaacatagcaagaccttgtcccttagtagtagtaataataataataataatagtaataatattaagaagaaatactccttgatgacaaatgagattcattttaagaatgcaagaatggttcgacattaatactaaacataatatctatgaagcaaaggaggcaacatatcataagattatgtcctagtttctaaaggaacattttataatattcaacataatattgtgcaacaattacccctgacgttttgaaactcccaataaattataagtagatgactgtttct

SEQ ID NO: 777879 - DNA, 566 bp, Homo sapiens
cctctccaaaaaaaaaaaacacacattagctggcctccgcttgctgcgtgtctatggtttcacctacttggaggctgaggtagaaggactgattgagctgtggaggtggaagttaaagggagccaaattgacatcactgcccttccacctggccaacagagtaagactctgtctcaaaaaactaacaatcattgtcattatatttggttctctgaggtccatgcatgagtgggtgcttttctgggtcttcctagttggaggaagaaaggagcatgggccttgggcatcctgtggacggggagctgttttcagagagaaaaaagacatccttttaagagactatggtggattcacactgaatcctgaagttgctatgactttggatgtttttgctcaaatgtgattttaargagataaaacaaacagtaagtcttcccttacaatactctatccagaaggtcccgggctttctaagagcactggaatagttaccttgtaaacatttaatacttttccataacttttcctgggaaatcaaccaactgtttttcagcttgcaaaaataa

SEQ ID NO: 777880 - DNA, 602 bp, Homo sapiens
acaatttatagaattccatgcagaaacatctctctaattactccatcttgggacttagaaatgtgttttatggggaaatgccataagcttattttttagatacaggaacatttctgaacataaggcttcaactttagtacaactttagtrtttagtacaaaaacttgaaacttgaaaatctagaaagttaaatttacaaggcattttaccttttctctgcgggtaaccttattattgtgtcttgtctgtgatactcagtgatattacagtttcagaagctggctataaaagcataataccataattcaggtgtcatcaccctttcaatagatatcatacttgatttcctagaatgctgatttgattactgggattaaaaattctaaatttttacaacctactttatcatgtccaggcttaccttagtaacccaatcatattcatattgtataggtttaaaagcaattttagaaatggcttataataaatgaacatttcctaattcaagatgaagatttggatatgattaatacattttgaactcaaattataccacagttcaggggaattttccattaagcttaaaggcaaatttaaaaata

SEQ ID NO: 777881 - DNA, 549 bp, Homo sapiens
gttattggctaccatggagctgttgtcatttataaagccattaatttgaaagccttttaagcctttaaaaaaaaaaaaaaaaaaaaaaaaaaaaaccttggttggaatgccattagcagtgagttttatctcaacacctccagaaaagtcagctgattaaacttaggcagaaaaaaatagagagatagagaacttataagactctacatgttaactgtacagttgtactttcctaatttgatactaaraaaaaacaagcttgggaaactcaaatgatccctgtgatggccattgatccaaaatgtacatgaaggaaaagctttgtagcaagctggagtctcagaaaacctggtatgccttaatgtttgagaatctcatttcattttttattgatctcctaaaagcaaagaaaatcctacaaatcctgtcagactgtcaggagcttgggctggtgttttaaatggtgatgactgtcttaatgtcttttagctgcacctaccatttaaaatgcttatttttgctctcagaagagtttcagaaacaaacaag

SEQ ID NO: 777882 - DNA, 653 bp, Homo sapiens
attccttcccaaacattcattttatgatgggtagacacagtcttaatggcaagttaaaactgtatttgagggattgtttttgaaaattggaggcacattaggcatgaatctcatttatgtagaactagaaagaagagctatgctacttacaaagcattagaacaaaatgcgtatcataaataaaataaaaagtcagacttagggttttatggctaaattgattatgctgatttgggtaccttttctttcctgttctgaaaaatatttaagtaataaagttttaattgctatgtgtaccaattaagagttctaggcaaaatctttccaagcaaataataaatgattcaaagctataaataaaatgaaaataggctaaaatagcawtgatagactgtacatacaaatgagcacactgggggcttccctgaagaagaaaagaaaaaccccccttttttttaccatcatcactttttaatgcagcgagggaaaaggcagcgttagcaaacaaaaattgcttttcactttgccaacaagataaatagaatgaaatttcaatgaaaatgactggaaaaatgcatgattgatgctaaatttgcaaaaattccaaagatatgggtacagtttgtcataaaaatgatgtcaaaatctttttg

SEQ ID NO: 777883 - DNA, 548 bp, Homo sapiens
tgttacagtatgtagctagtcagtcatgagcagggcagaagagggccacccctgaaccaggaatgtcaggcgactatcaggtgatagtcaggtggttgttacactgtttctctaaaataataattggtcaacatggtgtcaaggaaaggcagtctcccaacagatagaaaaaaacctgaaactggttatcagcagcttcccaataagatctcaggagttgggtgagtgggctcaagcatgcttattaagaggcaaaattgtgaagtttaactgttaaatgtccttctaggagcattcaactggtaagggaagaaggcctcaagtgagyatgcatacaactccaataaacacactgcaagtgcagccccacccaagtgctagcaggcactacgcatgcagacagcccacctcaagggaagaatcgggagaagggatgcaagacctcggaagtatgccaacatacaaaaccccaagtcaaaggtcagaccaggcacttgatctctcaagttgcccgcttggccatcttccaagtaactttcattcttgcg

SEQ ID NO: 777884 - DNA, 621 bp, Homo sapiens
aactgatggcccaaaaaggagcctactacaaactagtcaccactggatcccccatcagttgacccaatgcaagaatctcagacacacatgacgcaccagttacaggggttgtttttaaagaaaaaaacaatcccagcaggagggattgctgggattgttttttctttaaagaagaatgttaatattttacttttacagtcattttcctacatcggaatccaagctaatttctaatggccttccataataattctgctttagatgtgtatacagaaaatgaaagaaactagggtccatatgagggaaaacccaatgtcaagtggcagctcagccaccactcagtgcttctctgtgcaggagccagtcctgattaatatgtgggaattagtgagacatcagggagtaagtgacactttgaactcctcaaggrcagagaactgtctttcatttttgaaccctcggtgtacacagaggcgggtctataacaggcaatcaacaaacgtttcttgagctagaccaaggtcagatttgaaaagaacagaaggactgaagaccagctgtgtttcttaactaaatttgtctttcaagtgaaaccagcttccttcatctctaaggctaagg

SEQ ID NO: 777885 - DNA, 637 bp, Homo sapiens
tttcttttagttacagtgcccattttgaaattgcctatacagtcttagtgaccatttaaaccggacgaactaggtgtttaattttcactcttcatgttcaattagcagttcaaattaaagaagatggttattggagaacttttttgaatggttttgtattaaattgctttgaaatagatttcatttyttgtgcacacagccaagatttcttcaatgggtgtgagctagttgagggttaaccttgtaggttgcagagtgtatttgtttgtttgtttgtttttctctgtgatgaggtcagtgctctgattttgaaggaggatattcactgaagctcatagttataaacaaggaaatcactgttaagaatgggaatttgtcctgtgttctgggaataacataaagagagcaactgatttcagccaggttttgccactaccctataattagtgcagtcttatgttataaaagaaagaagttaactatatttggggacaaaaaaatatttcaagagttgataaagattacctgtgcagtgcagagcactttaatgcaaccagctttcaagaaaaagccctatctagtacttgatgttgatgtttttattttgctgagcaaaataaagccaatgggagaaaga

SEQ ID NO: 777886 - DNA, 585 bp, Homo sapiens
ggaagaaatgcattgactgaccattaacatcttttggggtgctttttaaattgccataactgtgttccacctgagatcagttatatttctggtaatggaatttgggcattggtattattaaaatacttctcaagtggttccaatgtggtataaggggcttagaatcattgcactaaggcaattcatataaggaattatccttgactaattagagtctatgcttctggcttttctttgttttgcatattcaggttctgtaatttccataatctctttaatgagccatgaggaagagcataacttccctttattctttttctaaaaagtgtttgatctacgtaattcataatactcattttcttcagaaatgtcttatccttaaatcaggatgtgaatgatatcaaatacattttgtcttccamttaaaaattaaacttcctgctcttcagcacctcagagtctgtgattagcctttcatctatggtagttaatttagaaagattttctctcgagaactacctggttctgtagactgtgggataattaagtgaagcaaaagcatcttgatttctttcaccctttaac

SEQ ID NO: 777887 - DNA, 520 bp, Homo sapiens
ttgtttttctgttgataatctaactcgtttttcagaagagtatctcaactaagaacttgaaaagcgacagaaaagaaattatgttttctcccctacaacctactaattcaggatgcaaccaatccatggcatctttggtcttatggcacacattcattattttaaatttgaaatggttttaacagtcttctgaaggtctctttagagttgcwtattacggagctatctagaggtagggctcaaggcctaataggtcccttataaccacattcactccatggggatacgcatttcaagcagggccttcataactttcttgactgagttaaatgtgctcatcacagcacagtgaaaagcattagcacatgatcctctctaatactaagaagacgaggctgagaatggtgacttttcattcatccacctgacagtgactaaggaaatcacaaaggccaggctctaagaggtcagcatacaatgatgagtaagactgcctctgcccttcgaggggagagaaaac

SEQ ID NO: 777888 - DNA, 563 bp, Homo sapiens
aaactttttaaaattagccaggtgtggtgatgcacgcccatagtcctagctactagggaggccaaggtaggaggattgcttgagcccaggaagctacagtgagctatgatcatgccactgtactccagcctgggcaacagagcaagaccgtatcccctgagcccctctccccaccaaaaagaaaaaaataagtaatgaaaataaaataaaataggggaaataaaatagccaaggatgagaacaggttggtcataggacacatagatatgaaaaaactgagactcagaaaagttaagtgataaagggcttgagagccctgttcatgtcctgytgctgctcttggggttggagtccagttcctgttccctgctgggtttgaggacaacagctcagatagttaatggtcccatgagcagtatctcactttaacacaaaggataatgctacccagtccctcatggcatagcgggaggattagggagtgtgatgtcatttttcttccacagtggccccatgtagtctgccttcaacagtcaggatagtaagtccaatcacatcaagaa

SEQ ID NO: 777889 - DNA, 550 bp, Homo sapiens
gtttctgttcaagaatcttttcattttcaatattgtaggtcctcaacctggaatctgcaagaagagactcctcttttgaattcatagtaacttttaatttttcaattttctcagtgaatggatgttgaaaatataaatgtgaatgtcagcataaatgtgaatgtcgtaaagagaaccttatacttacaggtggggaacttatagtctaaaccatggcattattcacgatcattcctatctttagctctgccccccaagatgcaaagtatctacccagcaagtgtatgtgtaatagaggacaatgatcttttatccttatacsccattatcattcaccctttggagaaagaattaagttttcaggggaggagcaatggagcattcaatctgagcaagactataaccaccatccagaaacacctccagcctgggaacatgtggcatctttctattccccaccctgcagaaacccaaccctgggtcacagaccgtatatcccagagaaggcagtgctcagctcagtacctggcacaaaatagaaactcaataa

SEQ ID NO: 777890 - DNA, 550 bp, Homo sapiens
gtttctgttcaagaatcttttcattttcaatattgtaggtcctcaacctggaatctgcaagaagagactcctcttttgaattcatagtaacttttaatttttcaattttctcagtgaatggatgttgaaaatataaatgtgaatgtcagcataaatgtgaatgtcgtaaagagaaccttatacttacaggtggggaacttatagtctaaaccatggcattattcacgatcattcctatctttagctctgccccccaagatgcaaagtatctacccagcaagtgtatgtgtaatagaggacaatgatcttttatccttatacgccattatcattcacccwttggagaaagaattaagttttcaggggaggagcaatggagcattcaatctgagcaagactataaccaccatccagaaacacctccagcctgggaacatgtggcatctttctattccccaccctgcagaaacccaaccctgggtcacagaccgtatatcccagagaaggcagtgctcagctcagtacctggcacaaaatagaaactcaataa

SEQ ID NO: 777891 - DNA, 562 bp, Homo sapiens
acgaccacaccatttgatgagaggatgcagagcaacagggactctcattcatttttggcaggaatgcaaaatggcacaaccacttcagaagacaatctggcagcctctcacaaagctaaacatagcattaccatatgatccagcaatcacactcctaggtatttagccaactgttttgaaaactgaagtccacacacacagtctgcacatgaatggtaacatatgctttgctcctactcgagaaaaactgtcagcaaccaagatgtccttcagtaggtgaacgatgcattgtggtacatccacataatggaatactattcagcaatcaaatgaaatgggctatcaaggcctgcaaaaacatggaggaagtttaaatgtgtattactaagagaaagacgccactctgaaaacactaygtactgcacaatccaatttatataacattctggaaaaggcaaaatgatagagactcaatggttgccaggggtttggggacatggagggttgaataggtaagtgcagaggatttcttttgagggtagttaaaggatcctgtgtgata

SEQ ID NO: 777892 - DNA, 568 bp, Homo sapiens
catatttaagagattgtgaataacactgctatgaccacgggtgtaccagtatatttttgagagcatgcttttagttcttttgggcatatgccaagaaggggaattacttgatgacgtgtaatcttatttttattttttgatgaactgctggactgctctccacagcagctgtaccattttacattcccaccaacgctgtgcaaggcttccacgtctcaacattttcaccaacacttttctgttttttyaattttatagtagtcatcctaatgggtataacgtggtattttattgtagttttagtttgcatttcgccaattagtgatgttcaactgtggtttttaacttcacttttaaattataatcacagacttctgcaggggttctgacagagtgaataattctggacatgtactactcccttttaaaaacaagaactttggtcaaaatgtatgaaacaatgggtctcagacattgaacaacaattttcaatatatgtaagaggattgaaatcctacaaagcatgttttccaatataaacagtattaaactgaaaattagtataaga

SEQ ID NO: 777893 - DNA, 588 bp, Homo sapiens
ctcctgcatagcgaaggacacaggatgaaacatctatggaagaggagacaatatttgcaaaccatatattgaataaggggctgatatcgaaatatacaacatattcctacaacttaagagaaaaaagaattccccaatcccaaataatctaatttttaaacggcaagggatttgaatatacatttctccaaagaatacatgcaaatggccaacaggtgtataaaaagttgcacagcattataaatcatcaattaattgtacatcaaaaccacaatgagacatcaccttgtatctgttacaatggctagcatcaaaaaaaggcmaaaaaaaaaggagaaatcacaaccttcatacactgttggtgggaatgagaaacaatgtagccacaatggaaaacagtacgcaggttcctcaaagaattaaaaatatgagtaccatataatccagcaatcctacttctgggtatacatacataaaatggaatattactcagccttataaaaaaagaaattatactattaatgacaacatggataaaccctgaggacactatgtaaagttacatgagataatcacagaaggataaac

SEQ ID NO: 777894 - DNA, 588 bp, Homo sapiens
ctcctgcatagcgaaggacacaggatgaaacatctatggaagaggagacaatatttgcaaaccatatattgaataaggggctgatatcgaaatatacaacatattcctacaacttaagagaaaaaagaattccccaatcccaaataatctaatttttaaacggcaagggatttgaatatacatttctccaaagaatacatgcaaatggccaacaggtgtataaaaagttgcacagcattataaatcatcaattaattgtacatcaaaaccacaatgagacatcaccttgtatctgttacaatggctagcatcaaaaaaaggcaaaaaaaaaaggagaaatcacaaccttcatacactgttggtgggaatgagaaacaatgtagccacaatggaaaacagtacgcaggttcctcaaaraattaaaaatatgagtaccatataatccagcaatcctacttctgggtatacatacataaaatggaatattactcagccttataaaaaaagaaattatactattaatgacaacatggataaaccctgaggacactatgtaaagttacatgagataatcacagaaggataaac

SEQ ID NO: 777895 - DNA, 626 bp, Homo sapiens
tcggggatccgctgggtgaagccagctgggcttctgagtctggtggggacgtggagaacctttatgtctagctcaggggttgtaaatacaccaatcggcactctgtatctagctcaaggtttgtaaacacaccaatcagcaccctgtgtctaactcagggtttgtgaatgcaccaatcgacactctgtatctagctactctggtggggccttggagagcctttgtgtgacactctgtatctagctaatctggtggggaggtggagaacctttgtgtctagctcagggattgtaaacacaccaatcagcgccctgtcaaaacagaccactsggctctaccaaccagcaggatgtgggtggggccagataagagaataaaagcaggctgcctgaaccagcagtggcaatgggctggggtcccttccacactgtggaagctttgttttttcgctttttgtaataaatcttgctactgctcaccttttgggtccacagtgcttttatgagctgtaacactcaccacgaaggtctgccccttcactcctgaagccagcgagaccaggagcccagcaggaggaaggaacaactccagacgcgctgccttaagagctgtaacactcactgcga

SEQ ID NO: 777896 - DNA, 722 bp, Homo sapiens
taggatcctaagatggaaacttagattattgttttagattttttctttttcaatatatgtgaagtatatcttatatcttttaatttaatttatacgtatctttttaaaattaaaagtgggtgtcttgtagacaacaacacatagttttttaatttgccgtttgtgtcttttaattggtgcacttagaccagagacgttcatagtgattgttgatacaattgcattaataccaaccatatttcttactgttttatatttgctgttcttgttctttgtttatatttttgtattctactctttctgcattgtgtgatttcaattgaatattttatattccattcttatcctttattagcatatcagcaataaacttkttaaagtaatttctctagagaataaaagcttttatttttccttgtgtgaattgattcaacagataagagctggttgaaaacaataatagcaacaattgacttttttatgtatgtttatatatatgctccaatataggtgacatgaatgaataatgatacaagctacaggacagaggatttaggattgttctcttattataagatactcacaatacttgtgaaataatgtagttttatttgtaaatgtatattgcaacttctggggcaggctattagaccaagggcctcagcgccttgctggctgttggcctaaggctgcattcagttcttctcatgttggtttatccc

SEQ ID NO: 777897 - DNA, 643 bp, Homo sapiens
agtatctgacacccagttttgcccttactgacatcttacataggtatggtacatttattacagtgaatgaaccaatattggtgtattattaactaaaatgcacacttattcaaatttccctggtgtccatctaatstgtgctttgtctcttccaggatctcagtctgaattccaaaccccatttactcatcatgtttccttaggatcctctagactgtgatggcttttttagactttccttgtttttgataactttgacactttttagaattactggtcaaatattttgtaaaacatccatcaattgggatctattttatgattttctcattattagactggtgctatggattttgagggagaaggttcatcaagatatactgccagttttataacatcctatcaatggtatatgttatcaacatgaattatcactgttgatgttgaccttcaacacctggtttggacaatgattctcagggttctccactgtaaaagtatttatttttctccatttccatactatactccttagaaggaagtcactatgagaagcccacacttaagtcataagatatgctctacctcctcaaggggagattatctatataaattatttggaattctgactccttcaggctgg

SEQ ID NO: 777898 - DNA, 597 bp, Homo sapiens
atatatgccagcactttgggaggccaaggtgggaggatcacttgaaaccaggagattgagaccagccttggcttactacaaagtgatagtaatcaagacagtgtgctattgcttagtacaaagacagacatacagatcaatgcaatggaattgagagccccaaaattaacccttacacttgtagtcaagattttacaatgttaccaaaacaattcaatttgcaaaaatatttttttcaacaaatgttgctggcacaaatggatagctacatgcaagttggatgccaatatacctaagtgactcaaaatggatcatagacataaatgtaagcactaaaactacaaacccmaataggataacattggtataaatttctctggtcttggattaaataatgctttctagaatatgacaccaaaaaaactgacaaaaaatagataaattcacaagaaaagctgtttaatacctttagtcattaggtgatatagtttggatatttatcccttccaaatataatgttgaaatgtgatccccagtgttggagttggggtccggtgaaatgacccatggggtggatcccttatgaatggcttggtg

SEQ ID NO: 777899 - DNA, 602 bp, Homo sapiens
attacatgagatggaaaatataagaaaatacattaccaaagtattttccaaaatttatacctttcggattaaactcttctgaatcacttttcaactcatcttgtctgtaactttccccacagtttcatcatctatgctaattagaagatttggcaatgccacatttcttgagyaagtcctgtgctactcttttgtgaatgtatttttccaatctactgacagactctgcaggttttgtttttcgttatctcacccaaaggtattcatagaagcttttcagaccatgtttgtgtatgtgcatgcaaagacaatcacattacaactgtcttcccaccagtagtgtttgacactgttaattttcacatgaatctgtgtttgagataggtgggatgtatgcagtaacatcaatggaatgcactactttctcagcaattgctcattctcagtgtatagtcattgcagctcatttgctgtattctgctctatcattgaggaaacatgcttaaatattgtttctgactagctattagagacagtaaaattattagtgggctaccaaatatcataatttacctgaggagagttgcttttataaactgtga

SEQ ID NO: 777900 - DNA, 615 bp, Homo sapiens
ttgagtcattctggcagcccaacctgggattgtctttacacaatcctgcatgcaattttgtatttacaataatcaggagcatttcatcttttattccgtagcaatagtttcagggggtctcctatatctgtgcatggcttatttcacttaacataatgacctccggttccaaccctgttgttgcaaatgacaggatctcattgcttttgatagctgattagcactccattgtgtgtatgtaccacatttgctttatgcattyatctgttgagggacatttcggttgttttcgaattttggctattgtgaatggtgctgcaatagacacaggggtacaggtacctctttaatatactgacttcctttcttttgggccaagaacatacattggagaaaggtcagtctcttcaataaatggtgctgggaaaactggaaatccatatgcagaagaatgaaactagagccatagctctcaccatatgcaaaagtaaaaaatgtattaaagacttaaatttaagatctcaaactatgaaactacattggggaaactcttcaggacattggactgcctaaagatttcttgaccaagcacagtcaagcaaagcaaaaaagaac

SEQ ID NO: 777901 - DNA, 538 bp, Homo sapiens
atctaatccagcaccacataaatcaatctacccattcccactacttgcatgtaacctccgctgtaacagtgagacagttggctccattaatttaatccttccatccctaaatactgtagatagatattggtttcagaactggtaattcataccctcagggagagcaactttacaaataaacatagcatatacatacatctcctttgtcctttaggctttgaatctccacttatttcctaaatgtcttcastgagccctgattgctaccattttcttcagtgaggttatttcgtacacgttaatatatttatatttctttttctgcgtccctccctgggattcccccaacttagcacatattttatttttaatttgtatacatttaggttcattcttcgtgttatacatttctggccaggcgtggtggctcagtcctgtaatcccagcactttgggaggccgaggtgggtcgatcatctgaggccaggagtttgaaaccatcctggccaacatgaaaccccgtctctactaaaaacaca

SEQ ID NO: 777902 - DNA, 639 bp, Homo sapiens
ctgtgttaggtcctgtatttccttacctactttgtatctgttttttctatccactattgagtgtagggtattgaattctccaactattattgtagaaactcctatttataccttcagtgtgtgagtttttgctggctttgatgatctgttatgaggtgcataaatgttaataattatatctttctattttactattattacttgtaatatataatatcatttacctattataaccttttaaattttaaagtgaattttggctaatattaataaagccatccattacccaattttgattgcaatattcttgcaatatcattttccatcctctcactttcaatctatttaaatctttggatctaaagtgagtctcttgtagacagtgtataattcgatcattcttttaaatccattctgccaatcttgatcttactataaaaagtttaatttatatttaaagtagttattcataaagakgaatttacttgtcatttttctgtttattttttataattcttatagctcttttgtgcctcattttctacagctctgcattcttttttgttcagctgatttttttgtaaaaaaatgattaaatttcttctttgttttttgtatatattctatatttattttcct

SEQ ID NO: 777903 - DNA, 639 bp, Homo sapiens
ctgtgttaggtcctgtatttccttacctactttgtatctgttttttctatccactattgagtgtagggtattgaattctccaactattattgtagaaactcctatttataccttcagtgtgtgagtttttgctggctttgatgatctgttatgaggtgcataaatgttaataattatatctttctattttactattattacttgtaatatataatatcatttacctattataaccttttaaattttaaagtgaattttggctaatattaataaagccatccattacccaattttgattgcaatattcttgcaatatcattttccatcctctcactttcaatctatttaaatctttggatctaaagtgagtctcttgtagacagtgtataattcgatcattcttttaaatccattctgccaatcttgatcttactataaaaagtttaatttatatttaaagtagttattcataaagaggaatttacttgtcattttkctgtttattttttataattcttatagctcttttgtgcctcattttctacagctctgcattcttttttgttcagctgatttttttgtaaaaaaatgattaaatttcttctttgttttttgtatatattctatatttattttcct

SEQ ID NO: 777904 - DNA, 667 bp, Homo sapiens
ctctctcctctcgggtgttaaatagcttgcaaactccagccactttggttcttctgtattctcaactttatctccttaacataggtagtttgctgagatccgcctggttctcccaccctaactcatagcctggaaactgttgtataatcataaggcttacttgatttgtttcccgtctcagtgactgctgatattggttgcctatctagtgtctatacagaagytgtttaaaatattttatagcctcttatggttgctgcatttgagggggtgggatttattccttgttactgcatctaggacagagcaaaaatttatcagctataaagtatctaaggaggagtgacattagaaagatggcaaaatagaaaatgttagtctattaacattaatagactagttaaacagaaagtttaactagcagctacccacagaccaaaacatctttttgaaaaccttaatacttgaaaacaagcctgatacactagtatgatctgcagcagctgcattcaaccaaaaaacccacccaatgattccacccacacaggctgacaaaaactccttggaattttcaagaagcatatgtgctagaactgcttgacccaggaagtaaaacagctgttcaactcaggcagaaaccctcacgatacctgcaacctgatggtga

SEQ ID NO: 777905 - DNA, 624 bp, Homo sapiens
atagatacaaaagaaccagtgcaagagccctggcaactcaaaaagccaatgtgtcctcttacctccaaacaaccacattagctccccttcaattattcttaaccagactgaaatggttgaaatgacagacacagaattcrgaatcttgatagcagtgaaaattatcaagattcaagagaaattcaaaactcaatccaaggaatctaagaaatccaataagatgatataagagctgaaaaacaaaatgaccatcttaagaaagaatcatacttatctgatagagcctgaaaaactcactaaaaaattttcataataaaatcagaagtagtaacagcagaatagatcaaattgagcaaataatctcagagctcaaaaacaagttctttgaatcaattcagtcagaaaaaaataaagaaaaataatgaacaaaatcttcaagaaatatgagattatgtaaagaaagcaaacccatgactcattggcatcactgaaagagatgaggagagaacttgcagcatggaaaacatatttgaggatactgtccatgaaaatgtcccaacctcagtagagaggtcacattcaaattcaagaaattaagacaacccttgtgagatactctataag

SEQ ID NO: 777906 - DNA, 624 bp, Homo sapiens
atagatacaaaagaaccagtgcaagagccctggcaactcaaaaagccaatgtgtcctcttacctccaaacaaccacattagctccccttcaattattcttaaccagactgaaatggttgaaatgacagacacagaattcggaatcttgatagcagtgaaaattatcaagattcaagagaaattcaaaactcaatccaaggaatctaagaaatccaataagatgatataagagctgaaaaacaaaatgaccatcttaagaaagaatcatacttatctgatagagcctgaaaaactcactaaaaaawtttcataataaaatcagaagtagtaacagcagaatagatcaaattgagcaaataatctcagagctcaaaaacaagttctttgaatcaattcagtcagaaaaaaataaagaaaaataatgaacaaaatcttcaagaaatatgagattatgtaaagaaagcaaacccatgactcattggcatcactgaaagagatgaggagagaacttgcagcatggaaaacatatttgaggatactgtccatgaaaatgtcccaacctcagtagagaggtcacattcaaattcaagaaattaagacaacccttgtgagatactctataag

SEQ ID NO: 777907 - DNA, 584 bp, Homo sapiens
gatgtattggatatttcctggatcctcaaatgcagcaattaacactattgaagtttgggtggggttataaatcaagtgcattttttttggtaaggttaagatggtttgacactgaatgaatgccttttatgtttattttatgtatatgaattaattcaatatagatttaytaattacctaccatatgccagatgtgatggttaatactgagtgtcaaattgattggattgaaggatgcaaagtattgatcctgagtgtgtcagtgagggtgttgctaaaggagattaacatttgagtcagtgagctgggaaaggcagacccactcttaatctgggtgggcacaatctaatcagctgccagtgcacccagaatataaaacaggcagaaaacatgaaaagactaggctggcttagcatcccagcctacatctttctcccatcctattagttctgtcccactagagatccctgactaatatactagacatacagttaggcactgatgatgcatactgttaagaaacaattagacattatagatatatgtatatgtatacacctaaacacagaagagagagattggaa

SEQ ID NO: 777908 - DNA, 540 bp, Homo sapiens
gaatcctatagcaggtctagctgcttacttcaggttttgtgtttttgttttcagatactattttaaaatgaaagacaaatcagaaatatttgggtctcttctcaagatcatatttctacgttcttatacccaaatctcatcaaatttctaataatagccataagtctttttctgttttacttcgattggaagtttcatggattttcataaaaatcaaggatgtaatgarctcacagatattactggactttaacttagcatacttgttcattactgaagacagagcaattgttttaacagtttaaatactaatgcttgttatatctgcaaccattttatagtgtggtatataggtgtaaagatttagcaagaaataaactgtacatgtatggaaagtaaactcttattgcatgataatagaatgagttcctgagtactaaagtggctctccagcctagttttatggaaaataatgcacgcatcgttcttagttcctctggtcttgatgatatctcatttcacgttggttgtactgacctc

SEQ ID NO: 777909 - DNA, 585 bp, Homo sapiens
ggggatatttaactatcttaaacataaggaagtataaagtcaaatcatgtgctgtagccatctttatggggataaatgacggtaaaatatcatgaaaattatatatacattaaatatgtacaataaatatataagtaatacaataaaatcaaacacacatacatgcggtgtttgcatgcttctcccttttggcaactctggcttcgtaaggcaatctaaaagtcagcttctttaccttgctactttcccaaagatagtcatgaaactgaagcaccaattgtctttgaggaaatcttwttttttacatttattttagtatttaatgttttatatttattttagtgtagtgagcagtgggatgtcatttataatatacataaaatatttatatttagtattttatatttattttagtgtagtgagcagtgggatgtcatttctctctgaagcttgcttgactcttgctctttgtcttttttgttttgcttggtttcattctgtttagtggatagcaatgcattaaatagtatgttttaaacagatctagatgttctatagtggactatcccttaagaatatttagaa

SEQ ID NO: 777910 - DNA, 613 bp, Homo sapiens
atgtgaagataaagcaggtggatatgttgaataaaagtgtgatacattaggtcataatacacaggcaaagtctggaatggaagaagtaatttaggttctgtctgcagttaaatggtatttaaggctcatgacaatgmgtgagattgccaagaaagtaggtatagacagcaaaaggaagaaaagataaagccaaaatctgggagattctaatgattaaaaacgagataggaagaatattagaaagagtatgacaggccatagtttcgtagaagagtccagttccctgtgaattaagtggaaaaaggtgtcacaaaatagtgactaactgtgtctaacttatttatggattaagaaatatgaggaatattatgaagcatgaaaatataaatggatattttaaaaccctcctgtggttaggacaattacaagtttgaaaaactaaaaggtaagattagccataaagtatgattcacacatacactgaataataataaccacttcattttaggtgtattggaaatagtttaatgatttataaataaatttaataatcatgaatctaagtattttaatctaggggacaataatttaggaactatccaattcaaaatca

SEQ ID NO: 777911 - DNA, 613 bp, Homo sapiens
atgtgaagataaagcaggtggatatgttgaataaaagtgtgatacattaggtcataatacacaggcaaagtctggaatggaagaagtaatttaggttctgtctgcagttaaatggtatttaaggctcatgacaatgcgtgagattgccaagaaagtaggtatagacagcaaaaggaagaaaagataaagccaaaatctgggagattctaatgattaaaaacragataggaagaatattagaaagagtatgacaggccatagtttcgtagaagagtccagttccctgtgaattaagtggaaaaaggtgtcacaaaatagtgactaactgtgtctaacttatttatggattaagaaatatgaggaatattatgaagcatgaaaatataaatggatattttaaaaccctcctgtggttaggacaattacaagtttgaaaaactaaaaggtaagattagccataaagtatgattcacacatacactgaataataataaccacttcattttaggtgtattggaaatagtttaatgatttataaataaatttaataatcatgaatctaagtattttaatctaggggacaataatttaggaactatccaattcaaaatca

SEQ ID NO: 777912 - DNA, 606 bp, Homo sapiens
cttgttataggtctgtttcttctttagtcagtttaggcagtttgtgtttttctcagatcttgtctatttcattctggttatctaatttgttagcactgctagtagcattctcatgagttttgctatttctgtcagattagtattagcaatgcctgctctttcattccccatcttattaacctaagtcttctttgtcctgtattttgtagtcagaacgtagctaaatttttgtcaattttgttgatttttttaaaaagctcactattttatttattttctcctttcttctactccaatgtattcatttcttattttcgttaattccttccttctacttttttatttagttmatttctcttttcctcatttcttaaggtaaaatattagttattggtttaacatatttttttctttttggtataatagtttctaggtataaactttcatcaaagtacttcttttagttgtattccataaggtttggtatgttataaacattttgagataatgtttatttaggtgtgagattttaatttccaaatattttttgaatttctcaaagttatttctattatttgtttgtaatttaataacattgcagatgaa

SEQ ID NO: 777913 - DNA, 634 bp, Homo sapiens
ttaagtgccaggctctggaaactggatgtgagttagtagtcaatgggatcactgaaggttctctaataggggagaatgtgatcaaaacagtgcactggggaggttaacacaggaggtggccaggctgccttttgagaagacagagactagaggcagggaggcagatgtggaagctcctcttaacatctaggactaagttgacagaagctagagctcagtgatgcttgaaggaatggaaaaaggaagggaggctattatacaccaggaaaagggcttcaatccaaggcacttacttatgagcccaaaggagagaaaagacaaatgtaatttcaatatacaatgtttcataacagtcatgagactaattttcagatgtagtttwtagaattaccctcttcattatacaggcacatataaaaaaaggctataattccattgttgatgggccattatctgtgaaggcacgcacaggagtggaagagccaaactggttcacaaatgtcatgagcacatcagagcccagaggagaaagtgttcctaactctcaggtctcaatggaatgtcctcactaggtcacagcacaaggttttccaagctgggggaaggtcactttcccctcaaatgattgaagtgt

SEQ ID NO: 777914 - DNA, 599 bp, Homo sapiens
aaaaaggctataattccattgttgatgggccattatctgtgaaggcacgcacaggagtggaagagccaaactggttcacaaatgtcatgagcacatcagagcccagaggagaaagtgttcctaactctcaggtctcaatggaatgtcctcaytaggtcacagcacaaggttttccaagctgggggaaggtcactttcccctcaaatgattgaagtgttctaaatgctgaaccatgcaatgccctgagcacatgtagcagatggagcagagggggcaagaggggcttttggaaaatccacttttatttcagtagcttgataataattgttcctttgaagcatttacaagctagacttttcacccatcccaacacagatgcaggcaaccagtgctcaccttgttggaaagaggcacagactttctgcagcctccttaagaggcttataaaatatttattccaataagctggtggttaaaactaaaattcttaagcttttcagaaatcatcacattcagatgcacatcactttaggtgaatctagtctgaatttctccttgccttttgtcacgattttcatgttactttcccctttcatttt

SEQ ID NO: 777915 - DNA, 599 bp, Homo sapiens
aaaaaggctataattccattgttgatgggccattatctgtgaaggcacgcacaggagtggaagagccaaactggttcacaaatgtcatgagcacatcagagcccagaggagaaagtgttcctaactctcaggtctcaatggaatgtcctcactaggtcacagcacaaggttttccaagctgggggaaggtcactttcccctcaaatgattgaagtgttctaaatgctgaaccatgcaatgccctgagcacatgtagcagatggagcagagggggcaagaggggcttttggaaaatccacttttatttcagtagcttgataataattgttcctttgaagcatttacaagctagacttttcacccatcccaacacagatgcaggcaaccagtgctcaccttgytggaaagaggcacagactttctgcagcctccttaagaggcttataaaatatttattccaataagctggtggttaaaactaaaattcttaagcttttcagaaatcatcacattcagatgcacatcactttaggtgaatctagtctgaatttctccttgccttttgtcacgattttcatgttactttcccctttcatttt

SEQ ID NO: 777916 - DNA, 604 bp, Homo sapiens
ttagtgatagaattggcttttattagtaattcatgaatcaggcagcaccctatctatgaaatttaaaggtgctttgatgagctgagcagaggaggtgagctttataggcagaaaaggctgaagaaagcagaaacaaggaataaaacacagatcagtcatttcaaagctactttctttatggggttaaagcagaggagactttcttatcatgccagctgaggttgactggacycctttggactgcttgctgtgaatctcctgttttcttgaaaaacaggcctgtttgtaagttcagtgcttacgtagcacccagcacaagtgactcactccattttggtttgggctggtatcttggggcctagtgcagaagttcagtccaaaacaacagtgtcccataaattttatttaatactccttccaacagagaatcttatttgccagaaaagacttcttgagacacctcatctaagttgacctcaactccaccccactatgttatctgggtttgtctccttcatagcatgtgtcacataattttctgtgagtgtttacactttatcgaggtgtaatttatacacaataaaatgtgttcattataagtatg

SEQ ID NO: 777917 - DNA, 600 bp, Homo sapiens
tgaaaaacaggcctgtttgtaagttcagtgcttacgtagcacccagcacaagtgactcactccattttggtttgggctggtatcttggggcctagtgcagaagttcagtccaaaacaacagtgtcccataaattttatttaatactccttccaacagagaatcttatttgccagaaaagacttcttgagacacctcatctaagttgacctcaactccaccccactatgttatctgggtttgtctccttcatagcatgtgtcacataattttctgtgagtgtttacactttatcraggtgtaatttatacacaataaaatgtgttcattataagtatgcaattcaattagttttgacaaatatatataactttcatcctaatcaaaatatagtacattttaaatcacccccatatttcctcctgatcctccaaattcaatcttctgtaccttaaccccagacaatcctctatcactgtagatgagtcccgtctgctctggcatttcatattaaccataattcaagctatttgattgcttatctagtttgtttttgtctctactactggcctttttcttcacaccatggttttctagcacaa

SEQ ID NO: 777918 - DNA, 623 bp, Homo sapiens
agatcaagaaagaattcagtatgcttaatgcaaagtaactgctggggtccttgtgtgttaaatattcttatgcgaggaaactgtcttcatgttttatatttgccttcattttcttttattatttccagaccacctctattggttatgctaagtaatccttgtctctttttggagtttaaactttttaaggaaacaaaaactaaagaacagaaagccagacacattggaaatacaaactcttcttttactgcataagaaatgagaagaaaaacttagtgtgaaattctggagtctaaaattaaaatgtaaacagagaatgctcagtgaccttttcttaggaggctcacatgaaggaatgtcatggtacattgaccaaacttttattcatttgcattttcaggatgttgygattaataccacatgacactcaataaattacactacgacattttgtacaaatcacttcacttctggtttcctcttcggctgttacttcaccctctggttacctgtagggaaaaaaaatgtattttggggctttatctttaaagggcgattcacagttctagccaatgtaaagatattggttcccaaggaaatagctacctaagttatgttttttt

SEQ ID NO: 777919 - DNA, 622 bp, Homo sapiens
ccaaggctgccataacagaataccatagacttgggtggctgtattagtctgttttcatgctgctaataaagacatacctgagactgggcaatttataaaggaaagaggtttaattgactcacagttcagcacggctggggaggcctcaggaaacttacaatcgtggtggaagkggaagcaaacatgtccttctccacatggtggccggaaggagaagtgccaagaaaagcggggaaaagccccttatgaagctatcagatctcatgagcactcactcattatcaatcatgagaacagcatgagggtaaccgcccccatgattcaattacctctcactgggtccctccacgacatgtggggattatgggaactacaattcaagatgagatttgggtgaggacacagccaaaccatatcagtggcttaaacaacagacatttacttctcacagttctggaggctggatgtctaagatcaaggtgtcagcaggcttctttcctcagcttacagatgggtcgccttctggctctgccctcacatggcttttcctctgtgcttgtactcctggtgtctcttctccctcttagaagaacaccagtcttattggattagggcctcacac

SEQ ID NO: 777920 - DNA, 622 bp, Homo sapiens
ccaaggctgccataacagaataccatagacttgggtggctgtattagtctgttttcatgctgctaataaagacatacctgagactgggcaatttataaaggaaagaggtttaattgactcacagttcagcacggctggggaggcctcaggaaacttacaatcgtggtggaagtkgaagcaaacatgtccttctccacatggtggccggaaggagaagtgccaagaaaagcggggaaaagccccttatgaagctatcagatctcatgagcactcactcattatcaatcatgagaacagcatgagggtaaccgcccccatgattcaattacctctcactgggtccctccacgacatgtggggattatgggaactacaattcaagatgagatttgggtgaggacacagccaaaccatatcagtggcttaaacaacagacatttacttctcacagttctggaggctggatgtctaagatcaaggtgtcagcaggcttctttcctcagcttacagatgggtcgccttctggctctgccctcacatggcttttcctctgtgcttgtactcctggtgtctcttctccctcttagaagaacaccagtcttattggattagggcctcacac

SEQ ID NO: 777921 - DNA, 618 bp, Homo sapiens
catcaataaaattcaattaagtctattcaaacacttctgtgaatgctaacagttcactggcaattaatttgaaaacaaaaatctgtaaggcttctgcaatctagttgaaatctacctttcccagtggattttctaaaattcatcagcacctaccagcctgccccatgtcttgtatcctggcttctgccacacttccttctgctgagatgtcctctctgctcttctcacctccctaattcctgaccattctytaagacccagacccacatacatctccttaaagcctccaggccacacgcactgggggattatgtgtaggtgtgtgaactcctcgaggatggaacacattcaattcttttcaacgctgcccctagcagccttcccaccatactttgcagagagctctgcacagagcaaagcaaacactgtggctctcgcctccccttgctccctcaggacctcgcagccttcagttcactcaacccaagatctcaagatttcaaagaaacgaagagattgaaggcttctgtctcgcaagttagtcactgatcaggcagaagtgtttggctcctgcttcctcacatttgttttgcacacacacaatggtcttgatatgtt

SEQ ID NO: 777922 - DNA, 634 bp, Homo sapiens
ttagaaggaaaactaacaaacagaaaagacatccaaagcaaaaccccatctgtatgtcaccatcatcaaagaccaaaggtagataaaaccacaaagatggggaaaaaacagagcagaaaaactggaaactctaaaaatcagagtgcctctccttctccaaaggaatgcagctccttgccagcaatggaacaaagctgaatggagaatgactttgacgagttgagagaagaaggcttcagacgatcaaactactccgagctaaaggaggaagttcgaaccatggcaaasaagttaaaaaccttgaaaaaaaattagacgaatggctaactagaataaccaatgcagagaaggccttaaaggacctgatggagctgaaaaccaaggcacgagaactacgtgatgaatgcacaagcctcagtagccgatcaactggaagaaagggtaccagtgatgcaagatcaaatgaatgaaatgaagcgagaagagaagtttagagacaaacgaataaaaaataaatgaacaaagcctccaagaaatatgggactatgtgaaaagaccaaatctacatctgattggtgtacctgaaagtgatggggagaatggaaacaagttggaaaacactctgcaggatatt

SEQ ID NO: 777923 - DNA, 634 bp, Homo sapiens
ttagaaggaaaactaacaaacagaaaagacatccaaagcaaaaccccatctgtatgtcaccatcatcaaagaccaaaggtagataaaaccacaaagatggggaaaaaacagagcagaaaaactggaaactctaaaaatcagagtgcctctccttctccaaaggaatgcagctccttgccagcaatggaacaaagctgaatggagaatgactttgacgagttgagagaagaaggcttcagacgatcaaactactccgagctaaaggaggaagttcgaaccatggcaaacaagttaaaaaccttgaaaaaaaattagacgaatggctaactagaataaccaatgcagagaaggccttaaaggacctgatggagctgaaaamcaaggcacgagaactacgtgatgaatgcacaagcctcagtagccgatcaactggaagaaagggtaccagtgatgcaagatcaaatgaatgaaatgaagcgagaagagaagtttagagacaaacgaataaaaaataaatgaacaaagcctccaagaaatatgggactatgtgaaaagaccaaatctacatctgattggtgtacctgaaagtgatggggagaatggaaacaagttggaaaacactctgcaggatatt

SEQ ID NO: 777924 - DNA, 599 bp, Homo sapiens
tattatttaggtttagacaatataataggtttccattcatagcatctggatgcacgagtgggagccaggccatttgcttctaggtaataattaggtttttcctttctcaaaaaataaagaactttttgatattagcacttctctatggctttatactagggaatttatatgaacaaagaggcctaacggttctgtggctttttggagtctctttctttatcaaatccctgtcaatctagttttatcatcaaagtatattctttagaggcctttggtgacagctggaagtcagagttgcagttggttatatttatgcaaagtattttytaaaagattcttgatgggaaaaatttaaattgaaaaaaaaaaaaactctggagaaattactattgctttggaagagtgtaagtagtcatgatgactctgaaaaagtatatcctatgatgagggtttctcttacaatggaagttccagacagactcttctatgcacatcatcagtacttctctgtacccatagaaatttatggcctgaacatctattcactttaaaatcaaagaattatcattatacctatagattcctgaaaggctttaaaa

SEQ ID NO: 777925 - DNA, 599 bp, Homo sapiens
tattatttaggtttagacaatataataggtttccattcatagcatctggatgcacgagtgggagccaggccatttgcttctaggtaataattaggtttttcctttctcaaaaaataaagaactttttgatattagcacttctctatggctttatactagggaatttatatgaacaaagaggcctaacggttctgtggctttttggagtctctttctttatcaaatccctgtcaatctagttttatcatcaaagtatattctttagaggcctttggtgacagctggaagtcagagttgcagttggttatatttatgcaaagtattttctaaaagattcttgatgggaaaaatttaaattgaaaaaaaaaaaaactctggagaaattactattgctttggaagagtgtaagtagtcatgatgactytgaaaaagtatatcctatgatgagggtttctcttacaatggaagttccagacagactcttctatgcacatcatcagtacttctctgtacccatagaaatttatggcctgaacatctattcactttaaaatcaaagaattatcattatacctatagattcctgaaaggctttaaaa

SEQ ID NO: 777926 - DNA, 633 bp, Homo sapiens
tgaaatgcctggtccacagttcacttgattttttattttgaatggtcccatgtgcttgaactcctctgactattatgttattctctttccagcatcccatcccccatctgctcatccacacttttttggttcctgccacaagcccctgataattgtgcatgtcccataacctgctggttactcctgagctcactttgatagttctgcatgtgctacagtctctgcttgtctcgctgggatcaattcactccatgctggtcctgggtccatctgagaccctccctaccccagcttctagccatcaatgcctacatatggacctacattggagaaattatctgttctttgttcctgaaagatatttccagttcaytggctttattggcttattctgtgtatttgaggtatgtatcttatgcttttcccactttctacacactctcagacacagttaattgcccctgctcttttccatttccccccatatattcattggcttatattattgtcttatgatgtgcctcttacatttgacaatttcacatgaaggcatatccaacatctggcctttaagtttatggtccaaatttctacactaaacttatgaatgcttcagtcatatacttgggaatt

SEQ ID NO: 777927 - DNA, 602 bp, Homo sapiens
ctaaaaattaaaataaagtacctagtaattaaccaaagaagtgaaagatctctaccgtgaaaactataaaatgttgacacaagaagttgaagaggccacaaaaaaaaaatgaaagatattccatgcttatagattggaagaatgttcatactacccaaagcaatctacagattcaatgcaatacctaacaaaataccaatgacattcttcacagaaatagaaaaaaaaaattctaaaatttacatggaaccacaaaagacccagagtagccaaagctatctgaagcaaaaagaataaatcaggaggaatcatattatctgacttcaaattataccacasctatagcaacccaaatagcatagtactggcatgaaaacagacacatagaccagtggaacagaatagagaaacaagaaataaattcatacatctacagtgaactaatttttgacaaaagagccaagaatataaaggaaaagacaatcccttcaataaattgtgctgggaaaactggatatccatatgcagatgaatgaaactagactcctatctcttgctatatacaaaaatcaagtcaaaatggactttgagacatcaaacca

SEQ ID NO: 777928 - DNA, 602 bp, Homo sapiens
ctaaaaattaaaataaagtacctagtaattaaccaaagaagtgaaagatctctaccgtgaaaactataaaatgttgacacaagaagttgaagaggccacaaaaaaaaaatgaaagatattccatgcttatagattggaagaatgttcatactacccaaagcaatctacagattcaatgcaatacctaacaaaataccaatgacattcttcacagaaatagaaaaaaaaaattctaaaatttacatggaaccacaaaagacccagagtagccaaagctatctgaagcaaaaagaataaatcaggaggaatcatattatctgacttcaaattataccacagctatagcaacccaaatagcatagtactggcatgaaaacagacacatagaccagtggaacagaatagagaaacaagaaataaaytcatacatctacagtgaactaatttttgacaaaagagccaagaatataaaggaaaagacaatcccttcaataaattgtgctgggaaaactggatatccatatgcagatgaatgaaactagactcctatctcttgctatatacaaaaatcaagtcaaaatggactttgagacatcaaacca

SEQ ID NO: 777929 - DNA, 545 bp, Homo sapiens
gcatgtgctccaataaaaggcgcgctattattgtttgagcaattggtggaatctttgcaggatgtgtgactctgcaccacattgaaatctactgggtcgtatatcaggtgtctgatctccccagaaaggggtttctctaccagtgcagactcaacaagcatttattgaacaatgtgccagatgctatggaaacagatgctacctgagttctttggattctccactaccaagtcagaccttctcstttctccttcttttggcgtttgcgacccttgagtcaggggatagactcttgttagcaattgagaaggaaactttctgggaactaagaactaatcactcttgctctcaatatgtccctgttttgaatctagcatctgttcttttgttcttctcttcagcatgtttggtatggcgtgcctcatctgcaacagaaaggaggattaccctttgctgggtaggtagtaggccttgattttaaacttctttattgaactaaaacaaaacatgcagaaaagtacatcaatgataactgtgcagcttaa

SEQ ID NO: 777930 - DNA, 545 bp, Homo sapiens
gcatgtgctccaataaaaggcgcgctattattgtttgagcaattggtggaatctttgcaggatgtgtgactctgcaccacattgaaatctactgggtcgtatatcaggtgtctgatctccccagaaaggggtttctctaccagtgcagactcaacaagcatttattgaacaatgtgccagatgctatggaaacagatgctacctgagttctttggattctccactaccaagtcagaccttctcctttctccttcttttggcgtttgcgacccktgagtcaggggatagactcttgttagcaattgagaaggaaactttctgggaactaagaactaatcactcttgctctcaatatgtccctgttttgaatctagcatctgttcttttgttcttctcttcagcatgtttggtatggcgtgcctcatctgcaacagaaaggaggattaccctttgctgggtaggtagtaggccttgattttaaacttctttattgaactaaaacaaaacatgcagaaaagtacatcaatgataactgtgcagcttaa

SEQ ID NO: 777931 - DNA, 615 bp, Homo sapiens
catcaggaactgggtctgtaggcactaattctcgggcttcttatgccattgatctcttattacagtttctccacaaatgtaacatgaggtgacatttagagactgggctgcatgctcggctaattgcaaaaacaaatttctggtttttcctggagtctctggtactggcacatttagttaatcatagaaagtctgaaatactggttccggagagagtttacgaacctcctcttttactaaggtatttactctaggakctagtccttttttatcgacgcccagagatacgtgtacttctttttttctaccttgggtttaagggatttgtaattactaatttcaaggggttgcagcttccactcgtacaggaggggctgccttctcctttttggagctaaacagggtctttttcatcctttttctaagtagcctagatgacacaagaccagtaattacacacatttgcacatgagcttaattcgtggcagatatacttatttcctgctgtgtaacttttttttttttcagtttaaagaaccgcatcttattctatgccgattgctattgatagtggcacaagcattaaattttagtgttacatgcttggggatccct

SEQ ID NO: 777932 - DNA, 627 bp, Homo sapiens
aaatactatttctaaattttatacatttgtttactttgtttacttgttcaataaatgtttatatagtatccgttatgagcttttttttttgagacagagtctcactctgtcgcccaggctggggtgcagtggaacgatctcggctcactgcaatctccgtctcctgsgctcaagcagttctcctgcctcagcctcccatgtagcaaggattacaggcatgcaccactaccgcccagctaattttcatatttttagtagagacagggttttgccatgttggccaggctggtcttgaactcctgacctcaagtgatctgcccgcctcgggctcccaaaatgctgggtttacaggtgtgagccactgcacctggccctgttatgagctttttaaaacacaatcaggtgtcttctctatttaaaacccttcagtgtcttttgtgtcttaattttaaaaaactgaaattaaggagagattctggttacataatattgtgaatgcactacaggccgctgaattgtatactttaaaataattaattgcatgttaggtgaatttcacttcaattaaaaaaataaatatgatacataatcctggactggatcctatactggaagaaaagagaatgt

SEQ ID NO: 777933 - DNA, 658 bp, Homo sapiens
cacagaatggaactattaatctgtggatttaatttatgcttaaagaattcaactatatatgctctggggagagaatgagaagggggtgtgctgggcagtgggggagacagagagcaagtgagactgatttaaatactgaggcattctgtccctgagtgagcatgaaatgaaagatgtgaaatctgttgcctctgtgatggctctctgttcccacatgcctctcaaagtgtgagcttctcacagccctgagtgtgattctgctgttaacagagatacctctttctttatacaatctgtcccccaaacacatgtcatctccttcatctggtgctcaaactgagaaagcagsccaagccttcaacgaagcagaaacagctgcctggaccacatattcctgaaaatggtctgtcagtctccagcgtggcaccttcccagggatttttcaggggtaacttgggctttaagccatttttgctctatgagctacctttagatggaagccccgggggagctgctcttgcactgtccttgcattattgctctgtataagcatcttagtcccctccttgactccttaaggataagtacttgaagtgaggctaaatcctagagggaatggccttgccctgcctcacccttccctagaaattagggtctt

SEQ ID NO: 777934 - DNA, 550 bp, Homo sapiens
ctctacccatatacaactactgcaaatattttggtgtatttgctttcatgtatatctaatgaatatcatatttccatataattgattagtgtatattcaattttaatctacttttatattacaactttcccatataattaaatattcttaatttttttttttattcttagagacagggtctcgctctgttgctcagggtggagtgcagtggcatgatcacagctcactgtaactttgaactcccgggctcaagggacctcccacctcagcctcctgaatagctgaggctacaggtgtacaccaccacacccagctaatgttttaaaatttttctttttgtagagacagggtcttgtcatgttgctcargcaggtctcaaactcttggcctcaagcaattctcctgcctcaacttcccaaagtgttgacatgacaggcataagctgccacgcctggcctaaatgttcttaaaaatgattttaggctagatgtggtagcttatgtgtataatcccaggactttgggaggctgaggcaggcagatcgcttgag

SEQ ID NO: 777935 - DNA, 612 bp, Homo sapiens
tgctgacatatttaaaaactaaaatatgtaacattagagattcaatgccagagatagcaagactacgatccctcatgataatttagcaagcattaaaggaatgaaaggaatgaaatggtggctttagaccagtatggttctctgccagaaacaattttggctctcaagcaaaatttgataatgtctggagacatatttggttgtcacaacttggagagggagtattaccaacatctaatagktagaggccaaggtactgttaaacatcttacaaagcataagatagattcccacaagaaagaattactgatcctaaaatgtaagtagtgtaaaaattcaaaaatcttgccttagagaaacagattaaaaatagaattattagtatatcatagtccccccttatcctcagaggatttattcaaagtcctccagaggatgcttgaaactgtggatagtactggactctatatatactgttgtctcctttacacacatactgatgataagttttataatttaggcacagtaagagattaacaacaataataataacatcaaacaattataacaatatgccagcatcactactcttgaacttcagggccattttta

SEQ ID NO: 777936 - DNA, 556 bp, Homo sapiens
tagccaagcaccatggcatatacctatagtcccagccacttgggaggctggaggatcacttgagttcaggagttcaagaccagcctgggcaacatagcaagccctcatctctacaaaaaataaaaaattagcagggcatggtggcacatgtctgtagtcccagatcctcgggwggcaggaggatttcttgagcctaggagttcaaggcaaacctgggtgacatagtgagattccatttcaaaaatatgtatcagtaggttaatccagatgttgtcacatgggccaagcaaccaaagtcacatcttagagttgtggactgtgtaatcagataagtgtggctacagtcacagaaggtcagggtagaaagaggcttggagaggggcacacttctagccagagctttcctactgagctccttaaagctcaggggaaagtgggacagggttggggggcgacctaaatcccacaccctcccatcttcaaccagagcaaccccatttgtatctgctcagcagtatcatgcatccatgtaaaattttatttgaaaatggccttc

SEQ ID NO: 777937 - DNA, 556 bp, Homo sapiens
tagccaagcaccatggcatatacctatagtcccagccacttgggaggctggaggatcacttgagttcaggagttcaagaccagcctgggcaacatagcaagccctcatctctacaaaaaataaaaaattagcagggcatggtggcacatgtctgtagtcccagatcctcgggaggcaggaggatttcttgagcctaggagttcaaggcaaacctgggygacatagtgagattccatttcaaaaatatgtatcagtaggttaatccagatgttgtcacatgggccaagcaaccaaagtcacatcttagagttgtggactgtgtaatcagataagtgtggctacagtcacagaaggtcagggtagaaagaggcttggagaggggcacacttctagccagagctttcctactgagctccttaaagctcaggggaaagtgggacagggttggggggcgacctaaatcccacaccctcccatcttcaaccagagcaaccccatttgtatctgctcagcagtatcatgcatccatgtaaaattttatttgaaaatggccttc

SEQ ID NO: 777938 - DNA, 336 bp, Homo sapiens
ccctggagaaaaaaaagggtctctctgtgagtatgatacaggacaggtctgtccccaggaccctgggagagggaagcccaatggcccaccaggttggcagggctggggaagggaaagtgttatggtagccccaagackaaaaagaggcagcagagggagcaggacatcactcccattgaactcatgccgctgcctaagtgaggtgagggaggagtgcacccgagtgacatgagggggcagagaggcacggttccagggcggctttcacccttacttcctgccatgttactctgatcccctgcaggtgagcctgcccacttttggcttagggctgct

SEQ ID NO: 777939 - DNA, 598 bp, Homo sapiens
ggggcttgtcccagcccgctaagagcacgggttggtgagaggcggctggtttgtccctgaaggagcttatcttggctgaattctcctaatcctcttgcaggattaaggaaactcaatgcacgtcccgttgataatgccctttaaggatttaataagctttgggctttccaagagaaagccttggawgaggaatttgaaaaacttgcctcagctccagactttgcttctcactcactgggtgaccttgatctgtggctccgtttctctacctgcaaagaaaaggggtgagtggtggcctgtggtccctgtgctgttgtgtgtcttaggggagggctgcacacaacagctgggactacaggtgcacaccaccacgcctggctaacttttgtatttttagtagggggggcggtttcaccatgttggccaggatggtctcaatctcttgaccttgtgatctgccgcttcagcctcccaaagtggctataatgtgtattggtttgggaagcttccaccccacccgccctggggggaggtagggctgtgagtcaccaaagcatcactgaggccagtcatgggacagtatccattggaacacaga

SEQ ID NO: 777940 - DNA, 598 bp, Homo sapiens
ggggcttgtcccagcccgctaagagcacgggttggtgagaggcggctggtttgtccctgaaggagcttatcttggctgaattctcctaatcctcttgcaggattaaggaaactcaatgcacgtcccgttgataatgccctttaaggatttaataagctttgggctttccaagagaaagccttggaagaggaatttgaaaaacttgcctcagctccagactttgcttctcactcactgggtgaccttgatctgtggctccgtttctctacctgcaaagaaaaggggtgagtggtggcctgtggtccctgygctgttgtgtgtcttaggggagggctgcacacaacagctgggactacaggtgcacaccaccacgcctggctaacttttgtatttttagtagggggggcggtttcaccatgttggccaggatggtctcaatctcttgaccttgtgatctgccgcttcagcctcccaaagtggctataatgtgtattggtttgggaagcttccaccccacccgccctggggggaggtagggctgtgagtcaccaaagcatcactgaggccagtcatgggacagtatccattggaacacaga

SEQ ID NO: 777941 - DNA, 598 bp, Homo sapiens
ggggcttgtcccagcccgctaagagcacgggttggtgagaggcggctggtttgtccctgaaggagcttatcttggctgaattctcctaatcctcttgcaggattaaggaaactcaatgcacgtcccgttgataatgccctttaaggatttaataagctttgggctttccaagagaaagccttggaagaggaatttgaaaaacttgcctcagctccagactttgcttctcactcactgggtgaccttgatctgtggctccgtttctctacctgcaaagaaaaggggtgagtggtggcctgtggtccctgtgctgttgtgtgtcttaggggagggctgcacacaacagctgggactacaggtgcacaccaccacgcctggctaacttttgtatttttagtagggggggcggtttcaccatgttggccaggatggtctcaatctcttgaccttgtgatctgccgcytcagcctcccaaagtggctataatgtgtattggtttgggaagcttccaccccacccgccctggggggaggtagggctgtgagtcaccaaagcatcactgaggccagtcatgggacagtatccattggaacacaga

SEQ ID NO: 777942 - DNA, 567 bp, Homo sapiens
cagaggggcaggggcttaggctgagtgtgttttctccttgcagttcagggcgaggtctggatttgccacggctgtggcctgcagggcttgtggccagcaggctcccaggaggccctgctgggtggtacttaagtgagtgataaatgagatggactgtctgcatcgatccaccctgggcctcacagaatgggaactgtcggatagatactgtggctgcccaggagacggggccttctgggagcagctgttatcgtggctgcagctgcctcggcccccaccactcaggcaggccttggccatagtcgtggtggggaagcacccaggccctgtagctcaagggctccaggccgcccacccagatctgygtgatcagtttcacagcagcccccacaccaccctcctggggaaaggcgggaacgtagcatcatctgctgactcagtggattccggggggaccctgctccaccagctccaggataatcctctccaagcgggaccaaggccaggaagtgtgttcgtttacttcttactctctcttttcaaaatggctttatttaggcctggtgt

SEQ ID NO: 777943 - DNA, 521 bp, Homo sapiens
gctgaaggagagtccctgaggatgtcaactgaggaggggcatgaagtgatcacttaggactagatggcaactggtggtagacagaccagtccaggaaagggaggaggctgattccagcgaggttagggaaatagaattcacagggtcatagcggactgtggtggcatgcacctgtagtcccagctactygggagattgaggtgggaagatcagttgaacccaggagttcgaggctgcaatgagctatgatggaaccaatgcactccagcctgggcagcagagcaagagcccaacacaataataatagtaaataagaagaagaagaaggagaagaagaagtcacaggatctaatactgagcatggcttctcccagagttctggccagggtgacttaggggctggttaccgctcctgaaatggggcatgcagaggtgcccgtgtttacatgagaagtgaagattattaggtgcccaaagggaggcctgacgttggatgacaggcccaggccagaggcaaaaat

SEQ ID NO: 777944 - DNA, 490 bp, Homo sapiens
  misc_feature 1, 2, 3, 4, 5, 6, 7, 8, 9, 10, 11, 12, 13, 14, 15, 16, 17,18, 19, 20, 21, 22, 23: n = A,T,C or G
nnnnnnnnnnnnnnnnnnnnnnntgcagtcgacttataggttccctggcaatcatttacacaattctgtgcaagtcaatacttggcctctagaatataacctttctgtataattcttattgttctgttttagtctaagtgattattgcttgattttcccccacttctccatttacttcattgtttcatacccactttttccactcatgcctttgaattggattatagactggctatggccggcattttgaaattactaaaggaactggtmtcttcaatcaagaagcctaataaagagtgaaaatcctagaccaatactgctaccaggcaaaaaatttaaaaaggtgaaggtatataaatcaagatagatagaaaatgaagaaattacaaacaggccaacttcttaagcactttatcgatagatgagaacaaacatttagtaggcaaataaatatttgagcatctgctctgtggttgtcattatgcctttc

SEQ ID NO: 777945 - DNA, 618 bp, Homo sapiens
tgatgacttacatgtattagtttaagctttcaatcataaacaaacatggtactgggtactctgagtgggtgaagtagtttcccatccttgagataaggaagtggttagggtggggcatatcagaaaaatggatggaaaaattttgtggctcaccttataaaggaaggaaattctggcctgacgtggtggcycatgcctgtaatcccagtactttgggaggctgagattggcagatcacttgaggccaggagttcgagactagcctagccaacatggtgaaacccaatctctactaaaaatgcaaaaattagccgggtgtggtggcgcgcgcctgtagtcccagctatttgggaggctgaggcgggaaaatcgcttcaacctgggaggtggaagttgcagtgagccgagattgtgccatggcactccagcctgggcgacagggtgagactccatctcaaaaaaaaaaaaaaaaaggaaattctgatacatgctacaatgtggatgaaccttgcagacattattgctaagtgaaatacgccagtcacaaaagcacaaaaacgctatgactccacttatatgaggtacctagagtagccaaattcagagagacagaaagga

SEQ ID NO: 777946 - DNA, 626 bp, Homo sapiens
tgcaaagtgcctagcatagcaatgatagtgcttgactcctattttcctgtgagttcttttttttcctttgagatggagtctcactctgttgccaggctagagtgcagtggcgcaatctcagctcactgcaacctccacctcctgggttcaagtaattctcctgcctcagcctcccaagtagctgggattacaggyatgcaccaccatgcctggctaatttttttgtatttttagtagagacagggtttcaccatattggccaggctagtcttgaactcctgacctcaggtgatccacccacatcggcctcccaaagtgctgggattataggcatgagccaccgcgcccggccttcctgtgggttctttacacacaccctcactaggaaagactaggaatggccagggctaccagtaaattactgatagccagtgacctccccaagggaccctagaacccaggatcccactttccacacctgcaggtcacccgttggctgccagatccatgtcaggttcctttgagttcagctgcagcctgctgacttgggcacttcccccaacagcctgcttggctgaccacatcccccagatggttccaaactgtcagccttttgagcccacaga

SEQ ID NO: 777947 - DNA, 573 bp, Homo sapiens
aaaaagagattttacactttataatagaattaaaatactcagaattggaataactctaaaaatgaatacaagtaatttaaaggaaaatatgtactggatttagtcaataaagtagtataaaaatatacaagctacaggtaggtgctgtagtttaaaattaagcatcttggtatttgttaattgtgtccttggaaggcatcttttatatcagcctgactaaaatgatctaccaccctttgctctctctttaaacaaatacagtgagtttacttcctcacactttgatacaaatttctctattccggtgaatatggatgtctattttttctttcttrgtaagcagaaagaagtctgaatcacaattcaaaatgcaattttagtttaagtcgaaaatggggggactactaattatatgggcaatagtattatgatgtgctaagaatgccatcaaaacttctgtctgcatatatattatatatgcatatatttgtgcattaattatataatagaaataacatatactgtgtgttatctattatctattttctatcatctccactttaacttaagaca

SEQ ID NO: 777948 - DNA, 556 bp, Homo sapiens
tattggtgaacatttaggctgattctatgtctttgctattgtgaatagtgctgcaatgaacatacacaccatgtgtctttataatagtatgacttaaattcctttgggtatatacccagtaatgggattgccgggtcaaatggtatttctgtctttcggtctttgaagaatcaccacattatctttcacaatggttgaactaatttytacagcctcaccagcatctgttttttttttttttttttttgactttttattaatggccattctgactggtatgagatggtatctcattgcggttttgatttgcatttttctaatgatcagtgatgttgagctctttttcatataattgttggccaaatgtatgtcgtcttttgaaaagtatctgttcaagtcctttgcccactttttaatggttttttttttgttttttcttttaaattaagttccttcttgatatggtttttggctctgtgtcctcacgcaaatctcatgttgaattgtaatccccagtactgggggagggacctggtaggaggtgattggatcatgg

SEQ ID NO: 777949 - DNA, 556 bp, Homo sapiens
tattggtgaacatttaggctgattctatgtctttgctattgtgaatagtgctgcaatgaacatacacaccatgtgtctttataatagtatgacttaaattcctttgggtatatacccagtaatgggattgccgggtcaaatggtatttctgtctttcggtctttgaagaatcaccacattatctttcacaatggttgaactaatttctacagcctcaccagcatctgttttttttttttttttttttgactttttattaatggccattctgactggtatgagatggtatctcattgcggttttgatttgcatttttctaatgatcagtgatgttgagctctttttcatataattgttggycaaatgtatgtcgtcttttgaaaagtatctgttcaagtcctttgcccactttttaatggttttttttttgttttttcttttaaattaagttccttcttgatatggtttttggctctgtgtcctcacgcaaatctcatgttgaattgtaatccccagtactgggggagggacctggtaggaggtgattggatcatgg

SEQ ID NO: 777950 - DNA, 624 bp, Homo sapiens
aactttagaggtatatgtgcaggtttgttatgcagttaaactcatgtcatgaggatatgttgtacagattcttttgttacccaggtattaagcctagtactcattagctatttttcctgaacctctgctccttcctaccctcaccctccagtgggtcctagtgtgtgttgttcctctctacgtrtccatgtcttctcatcatttagctctcacttataagtgagaacatgtggtattttgttcctgcattactttgctaaggaaagtggcctccagctccacccatgttcctacaaaggacatgatctcatttgtttttatggctgtatagtactccatggtgtatatgtaccacattttctttatccagtctataattgatgggcatttgggttgattccatgtctttgttattgtgaatagtgctgcagtgaacacatatgtgcatgtgtctttagtatggaatgatttatattgctttggatatatacccagtaatgggattgctgggtcgaatggtatttctgtctttagctctttgaggaatcaccacactgttttccacagtggttgaactaatttgcactctcaccaacagtgtataagtgtagttttatcatttgt

SEQ ID NO: 777951 - DNA, 603 bp, Homo sapiens
gttttgcagtcttctgctattattttctcgtaatttattcctccctttagatctattaatatttgccttatatacttaggtatactgatgttgaatacatatatgtatatatatatatatttataattgttatagctcttgacgaattgacccctttatcattatataatgacattctttatctcattttaccatttgacttaaagtctgttttatctgatataagtttagctactcctgctcttttggtttgcacttgcttggrctatctttttccatctctttgctttcagtctatgtgtgtccttacaagtgagatgagtctcttgtaggccacatatagttggtttttaaaaaatctatccagccactctatgtattttaattagattatgagatctgggattgaattcatttttagcaaagcctattttctttttattatggtactcttagttgttttaggacttctatcttctaatatttatggaccattattctgttctttgagacatcttttacataagttgcttttcctaaagatactctaatccttaagccttagagaagccttactttagatcagtgactggatccttaatg

SEQ ID NO: 777952 - DNA, 603 bp, Homo sapiens
gttttgcagtcttctgctattattttctcgtaatttattcctccctttagatctattaatatttgccttatatacttaggtatactgatgttgaatacatatatgtatatatatatatatttataattgttatagctcttgacgaattgacccctttatcattatataatgacattctttatctcattttaccatttgacttaaagtctgttttatctgatataagtttagctactcctgctcttttggtttgcacttgcttggactatctttttccatctctttgctttcagtctatgtgtgtcyttacaagtgagatgagtctcttgtaggccacatatagttggtttttaaaaaatctatccagccactctatgtattttaattagattatgagatctgggattgaattcatttttagcaaagcctattttctttttattatggtactcttagttgttttaggacttctatcttctaatatttatggaccattattctgttctttgagacatcttttacataagttgcttttcctaaagatactctaatccttaagccttagagaagccttactttagatcagtgactggatccttaatg

SEQ ID NO: 777953 - DNA, 586 bp, Homo sapiens
atcccagataaagtctacttgatcatagtgaattagctttttgctatgttgctagatttagtttgttagtattttgttaaagatttttatatgtctgttcatcagggatattgacctgaagttttcttttttcacttggctctgccaggttctgttatcagaattattctggcctcatagaatgagttagagaggagaccctcctcaatgatttttttgaaatagtttcagtaggattggtaccagctcgtctttatacatgtagtaaaattcggtagtgaatctgtctgctacagggatttttctgattggtaggtttttttgttattcattcagtttcagaactcgttgttgacctgttcagggtttcaatttcttcctggttcgatcttgggaggttgtatgtttccagaaatgtatctatttcttttaggttttctagtttgtgtgsatagaggtgctcataatagtttctgagggtttttgtacttccgtggggtcagtggtaatgcacactttgtcacttctgattgtgtttatttggatcttctctttttctgtattattagcctagcaagcagtctgt

SEQ ID NO: 777954 - DNA, 577 bp, Homo sapiens
gtttaactaggtgaatggtaaagaaaaaagcagaaatagcagcatgttcaatgaccttattatgcaagggggcattctaagtttaagaaccaaagaagtggtcactgtgtctacagagagaatgaagagtcatggtcctagatgaagcaggaaagtttgatrtggtctataccttataggaactttcaggttgtttctgctatatattgcagcataacaaaccattctataacttagtggcacaagtcaataactattttattttgtgcttatggatatcaatacttgtatatcagtaattcagaaatagcacagtgaggatggccctcctctgctacactagatctggagcttcagctggaattactcaaatgaatagaggaggaaacaactgggccaagaagatcaacttacaaaatggtttcatttccatatctagcaaccgagtgtatatggctgaaaaataactcagctgatactgtcaaacaaaatgtctacctgtggcctctccagcatgtcagtcttagggttgtccagcttctgacatggaagcttagcattccagaagcaaatgttc

SEQ ID NO: 777955 - DNA, 659 bp, Homo sapiens
ttattactatacacaatatatttagatggactaaagtggatatgtaagttttcattccattaaaaattaagaaagaaacaacaaacaggctcaacaatgcaccagatttgcaggtagcattgccttaatgtgttccatgtaggattaatatgtaatccagctagcaccaccagatgcattaaacatcttgtaatctttgatttcctattattcatttggggatttcccctaatttttatatttatatatatttattatatcaataaactcaaaatttctattaatattatgttttaatttttatacattataaggaaaagtattgctttatataatgtatcaatatccctaacaaaatggtgatatttcaggacaggacaatattttagtcttatttgtatgcctagtatccagctcagtgcttgaagacttgtgwtagtttaatacatgtttgttatggcaatgaaataagtgaatttattcattaataatgtactcagacaattattttgtctaatcttttggtttcaatgtaagagaaaaaaagctggtacttaagggtactggcatgctcttgtagaagctcttcccctctgtgatgaaaaatgggtaaagtctggcttcctggaaactcattattctcttactttagacctccc

SEQ ID NO: 777956 - DNA, 580 bp, Homo sapiens
ctgtaaattttactaggatctttctgaaggccaaattccatctttatggattgaatcccagtgttcctgaacctgtcaatcacaaagacctcttataattttttcccacaattttataagatttttgtctactaaacaaacacaaccaacgatatatttttcctattaattagagtttctgtttagcttgaagtaagtatcagcacactgagttctacaactaaaatcacaagaaaagaaacttgatgtgcacgtgtatttcagacaaatgtaggatatataaagagacctttgatattaraaaaaagctctagtaccctaattaggaaaatcatttaaactaaatgaagatttagtgaaagatttcaggaggcggtattatctctggcttgttgggagattttgaagagcaataggatttgatgcaccctcaattcatattatattagcagttgccagtagctattagctatttcccttactctcatgaatatttacacaacatatgtgtgaaaatttctcctttgtagatgtatagttgggggaggggatttctgaaatgcaactttgcactgataat

SEQ ID NO: 777957 - DNA, 608 bp, Homo sapiens
atcttgtttacttttttcaaaaaaccaatccttggtttcattgctcttttatatggatttttacaattcaattttgttcaattcttctttggttttagttattttttttctgccacccttggggttggtttgggtttttctctagttcctttgggtgcaaaattagattgttaatttgatattattctaacttctcaatgaagacatttagtgctataacctttcctctaaacattggtttagctgcatcccaaaggttttggtaagctgtgtccttattttcattaatttcaaaaacattttttatttctgttytaattttggtgttcacccaggagttattcaggagcaaattgtttaatttccatgaatttgtgtagttttgagagatcttcttgatattaatttgtttttattgcactatggtctgagagtgtgcaaggtctggtttaatttttttaattgattgagatttgctttataaccaagatgtgatcaatcttagaatatgtttcatgtggagatgagaagaatgtatattctgtggttgctaggtggagtgttctggaatgtctgttatgttcaattgatcaagcattgagtttaaa

SEQ ID NO: 777958 - DNA, 612 bp, Homo sapiens
caaatatattttttgagttgtttattctctttcattctctctcaggaatgccaatgagtcacagatttggtctctttacataattccatatttctcaaagcttttattcatttttaaaattcttttttctttatttttgtctgactaagttgattcaaaggaccagtctttgagctcagaaattccttccttacctttgtctattggggtgttaatacttctgagtgtattatgaaactctggtagtgaaattttagctctagaagttcggttttcttctttcttgactattccatttttcagctcttggatcattttactggattccttgaattgcctggattggctttcaactttctcctgaaacttygtgagcttccttgtcatccagattctgaattctatatctgtcatttcagtcatttctgattcatttaactatttctggtgtactagtgggcttctttggaagtaagaggacattctggctttttgaaggcaatgactttttagatatgacataaaggcatattcctagaaaataataactgacacactgaaattcattaaaatttaacacttgtgctctataaaagactgtgtcaagagaat

SEQ ID NO: 777959 - DNA, 570 bp, Homo sapiens
atggatttgctgtctcctatgacaggatggcactgagttcaatgtcaaaggtcctctctgtaggcaggtcattctgtttgagtgttccgctctcagcagaaaggaggccctggagtaggtggctcctctctgcaagcaggtcatctcgacaagtgttcagctctcagcagagggtagctcctctctgcagctggtcatcctgttgtctgcaactctcagcagagaggaggccctgagaatggtagctcctctctgcagctggtcatccctatatctgctctgctctggctgagtctgggatttttatggtcttcagagggggaaagtgtgtggtgattggtctatgggctgccatggtgggcccaggaaaaataycatgaattccctggccccaggcttcaggccttcctcggtctggaggtggtgtttcacctgggacgtgtccccttccacccagagcctatctatctcctcccactgttcatggctgcccaggctgtttgtgccaaggggagcctacaggccagcaatgagctgcccttagcaccacctcagcttccctcctgtgcc

SEQ ID NO: 777960 - DNA, 570 bp, Homo sapiens
atggatttgctgtctcctatgacaggatggcactgagttcaatgtcaaaggtcctctctgtaggcaggtcattctgtttgagtgttccgctctcagcagaaaggaggccctggagtaggtggctcctctctgcaagcaggtcatctcgacaagtgttcagctctcagcagagggtagctcctctctgcagctggtcatcctgttgtctgcaactctcagcagagaggaggccctgagaatggtagctcctctctgcagctggtcatccctatatctgctctgctctggctgagtctgggatttttatggtcttcagagggggaaagtgtgtggtgattggtctatgggctgccatggtgggcccaggaaaaataccatgaattccctggccccaggcttcaggccttcctcggtctggaggtggtgyttcacctgggacgtgtccccttccacccagagcctatctatctcctcccactgttcatggctgcccaggctgtttgtgccaaggggagcctacaggccagcaatgagctgcccttagcaccacctcagcttccctcctgtgcc

SEQ ID NO: 777961 - DNA, 553 bp, Homo sapiens
ctctgcagcatacaatgatgtttgacagcatttacccctggtagaactgttttcaaaattggagtcagtcttctcaaaccctgcgctactttatcaactaagtttatataatagtctaaatcctttgttgtcagttaaacaatgttcacagcatcttcaccaggagtggattccattccataaaaccactttctttgcttatccataagaagcaactccttatccattcaagttttatctgagatggcagcaattcggtcacatcttcaggctccacttctaaatctaggtctcttgtgatttcyaccacatctgtagttactttctccattgaagtcttgaacctctcaaagtcatccatgagggttaaaatcaacttcttccaagctcttgttcatgttgatattttgacctcttcctgtgaatcacgaatgttctatggcatctagaatggtgaatcctttctctggaaggttttcaatttattttgcccagatctatcagagttaatcactatttgggtagctataaccttatttcttaaataatgaga

SEQ ID NO: 777962 - DNA, 598 bp, Homo sapiens
actctccattctcacctctcttgcactgccaagggccttgagacatacccatctttcttcttccctatggtcgtgttacccaccaacttctccaaagccttgttcatgaaagatgattgctggtgctctttgtgggatgcaggagttgggatggtgggtatgagagcaactgagctggacttccctggataaaaggatgaatgcccaggccttgtattttttctttctttctttctctttcttcttttcttttttttgagatggaatctcactcttttgcacaggctggagtgcagtggcatgatctcagctcactgcaaccaccacctcccaggtccaagcgattctcctgcctcagcctcctgagtagctgggacgacaggcgcccgccaccaggcctggctaatttttgtatttttagtaragacggggttttgccacgttgggcaggctggccttgaactcctgacctcaggtagttcacccgtctcggcctcccaaaatgctgggattataggcatgagcccccgcacctagccaggccttgttttttcaaaaaaaaaaaaaaaaaaaagatgggaagaattttgtcttggac

SEQ ID NO: 777963 - DNA, 612 bp, Homo sapiens
gcaactgagctggacttccctggataaaaggatgaatgcccaggccttgtattttttctttctttctttctctttcttcttttcttttttttgagatggaatctcactcttttgcacaggctggagtgcagtggcatgatctcagctcactgcaaccaccacctcccaggtccaagcgattctcctgcctcagcctcctgagtagctgggacgacaggcgcccgccaccaggcctggctaatttttgtatttttagtaaagacggggttttgccacgttgggcaggcyggccttgaactcctgacctcaggtagttcacccgtctcggcctcccaaaatgctgggattataggcatgagcccccgcacctagccaggccttgttttttcaaaaaaaaaaaaaaaaaaaagatgggaagaattttgtcttggacacctgccatctccatcaaagcccaaagtcccctgggcacatacccagcagccttacactgcccccacatggccttggagtctccctgaatactctgcctgagccagccttctctaagaatgcttagttgctaaagctttctgccccctgtaaaaccaccagtcagcaactcagttggca

SEQ ID NO: 777964 - DNA, 585 bp, Homo sapiens
caaatagcaccactgttacataaaatcacatagaaaagaggagagagacttcacagcttattttatgaagcctacataactttgatataaagacttgacaaggatattacaataataattacttgccatttctttcataaacaaaaatatytttaattagtgaacaaagtccaacaatttataaatgtatgataacaagttttttatcctaggaatataaaaatggctagaaaaaataagtaaatatagatggaaaagaagtgataaatttcaatatttattattgatattttattttatttttaacatatttcttttttataatctcaacttttattttagattcaggtggtacgtgtgcaaatttgttacatgggtatattgcaagatgctgaagtttggggtacaaatgaccccattactcagttaagttagcatagtacccagtaggctttcagacattgctcccctccttgtctcccctctccagcagtccccagtgtctgttgttcccatcttcatgtccatgtgtgctcagtgttcagcttccacttataagtgagaacatgcagtattcggttttct

SEQ ID NO: 777965 - DNA, 585 bp, Homo sapiens
caaatagcaccactgttacataaaatcacatagaaaagaggagagagacttcacagcttattttatgaagcctacataactttgatataaagacttgacaaggatattacaataataattacttgccatttctttcataaacaaaaatatctktaattagtgaacaaagtccaacaatttataaatgtatgataacaagttttttatcctaggaatataaaaatggctagaaaaaataagtaaatatagatggaaaagaagtgataaatttcaatatttattattgatattttattttatttttaacatatttcttttttataatctcaacttttattttagattcaggtggtacgtgtgcaaatttgttacatgggtatattgcaagatgctgaagtttggggtacaaatgaccccattactcagttaagttagcatagtacccagtaggctttcagacattgctcccctccttgtctcccctctccagcagtccccagtgtctgttgttcccatcttcatgtccatgtgtgctcagtgttcagcttccacttataagtgagaacatgcagtattcggttttct

SEQ ID NO: 777966 - DNA, 500 bp, Homo sapiens
ctgtataatattccagggtgtatatgtaccacattttctttatccaatccaccattgatggggatctaggtatctaggttgattccatgtctttgctattgtgaaaagtgttgtgatggacatatgggcacttgtgtctttttacagaatgatttattttcctttgagtacatacccartaatggaattgttgggtcagatggtagctttgttttatattctttgagaaatcaccaccctgctttccgcaatggctgaactaatttacattcccattaacagtgtataagtgttcttttttctccacatcctttccagcatctgttattttttgactttttaataatagccattctgattggtgtgcaatagtatcttattgtgctttgacatgcagctctctgataattaatgacattgagcattttttcatatgctctctggctgcttatgtgtcttcttttgacaagtgtctatttatgtcctttgccctcttttta

SEQ ID NO: 777967 - DNA, 591 bp, Homo sapiens
caggccccattccagaatgaatgaaccaggaactctggtggcagtgctgtaaatttgagttttaacaatctctccaggtaattatatgtacactaacatgtgaggtccaccactttagtgaagttgacatgtaaagatacgcattaattgtcagatactacagaataatctcaggaagctgcatttacagacaccattagttatgtcatgcttctttcaatattatctggtgtcctactctgaagagagaaggactgacccaggatttattcaaaattcatatttaagcacttgttaattgctaggtatgaaagaagcaagggcaattcagataagyacttgcacttgggaggattagatgagaaaaaaattataatagggcaataaaatatcacaccactactgacacctgtatacttaaatgaacaatcactactgacacctgtatacataaatgaacaatttagaaccaggaaacaaaccatgccactttagaagaaactcaagtattcacttggggtggctgcacacagaagtcaaagggttattcaatatatgatattcatgttcatcttctattcatttaggtgc

SEQ ID NO: 777968 - DNA, 624 bp, Homo sapiens
ttttatgattagtgtttgcatgtcatacttttcatcccttcacttctgatacatctgcatcttttatttaaggtatatatttttaaacagcatatagttgattctttcttttccaatctgataatcactgctttttaaatagtgcatttagtccatttgcatttgacataatttaaatctgttttgtcttatgtctaccattttccttttatttgtttcatatttatgcattcttcattcatttttctgccttctttagaatcatttgggtagtttttaacattccattttatgtcttctattggatttttagctgtatttctttgctttaaattttgagagaytgtcgtaagtattacaatacacatatttaacctattacagttgacctttaatcactattatttatgccatgtaaaacagaaatagtattaattaaacacttacaacagtgtagtattttaccactcatgtttttttttcattgctgtcatataccatacatctacatatgttataaactccatgttagaaaacagtgttttagtgtttgttttaaacaaccttttaaatatgtcatttaaagacattaagaaacatgtaaaataactattttctacttac

SEQ ID NO: 777969 - DNA, 624 bp, Homo sapiens
ttttatgattagtgtttgcatgtcatacttttcatcccttcacttctgatacatctgcatcttttatttaaggtatatatttttaaacagcatatagttgattctttcttttccaatctgataatcactgctttttaaatagtgcatttagtccatttgcatttgacataatttaaatctgttttgtcttatgtctaccattttccttttatttgtttcatatttatgcattcttcattcatttttctgccttctttagaatcatttgggtagtttttaacattccattttatgtcttctattggatttttagctgtatttctttgctttaaattttgagagattgtcgtaagtattacaatacacatatttaacctattacagttgacctttaatcactattatttatgccatgtaaaacagaaatagtattaattaaacacttacaacagtgtagtattttaccmctcatgtttttttttcattgctgtcatataccatacatctacatatgttataaactccatgttagaaaacagtgttttagtgtttgttttaaacaaccttttaaatatgtcatttaaagacattaagaaacatgtaaaataactattttctacttac

SEQ ID NO: 777970 - DNA, 605 bp, Homo sapiens
ttgcttctcctcattttctcttgcctccaccatgtaagaagtgcctttcacctcccaccatgattctgaggcctccccagtcatgtggaactgtaagtccatttaaaccacattttcttcccagtctcaggtgtgtctttaccagcagtatgaaaacaaactaatacagtaaattggtaccagtagagtggagtgttgctgaaaagatagccgaaagagtggargcaactttggaactgggtaataggcagagattggaacaatttggaggactcagaagaagataggaaaatgtgggtaagtttgaaacttcctagtaacttgttgaatggctttgcccaaaatgctgatagcgatatggacaataaaatccaggctgagggggtctcagatagagatgaggtacttgttgggacctggagcaaaggtgacccttgttatgttttagcacagagactggcagcattttgcccctgccttaaagattttgtggaagacagaacttgagagagatgatttagggtatttggcagaagaaatttctaaacagcaaagcatgtaagaggtgacttgggtgttgttaaaggcattcagttttataagag

SEQ ID NO: 777971 - DNA, 605 bp, Homo sapiens
ttgcttctcctcattttctcttgcctccaccatgtaagaagtgcctttcacctcccaccatgattctgaggcctccccagtcatgtggaactgtaagtccatttaaaccacattttcttcccagtctcaggtgtgtctttaccagcagtatgaaaacaaactaatacagtaaattggtaccagtagagtggagtgttgctgaaaagatagccgaaagagtggaagcaactttggaactgggtaataggcagagattggaacaatttggaggactcagaagaagataggaaaatgtgggtaagtttgaaacttcctagtaacttgttgaatggctttgcccaaaatgctgatagcgatatggacaataaaatccaggctgagggggtctcagatagagatgaggtacttgttgggacctggagcaaaggtgacccttgttatgttttagcamagagactggcagcattttgcccctgccttaaagattttgtggaagacagaacttgagagagatgatttagggtatttggcagaagaaatttctaaacagcaaagcatgtaagaggtgacttgggtgttgttaaaggcattcagttttataagag

SEQ ID NO: 777972 - DNA, 630 bp, Homo sapiens
tttgtaactgtcactcagtgctgagcctgtggcaaattatgattgcttttcctttcctatatgactttttgtcttttctggactaatagctgtttttttcattgtttatgtctgtatgttttgattactaatttaactccaaactccctgctagttgtccaaatctcctttctcaaatttcccagacattaggtgtyctgagacttctgtcttcttgagtaaaccttttccagaaactttgggcctgattcaatgcagggttcttgctttcaggccccacgctcagctgtatgttcctggactttccctccaccatcactgtagggattcccttctcactttgctcctctgtttccttgcttgagccttcctctgatttcgaatacctccttgttttggggatgcacctcctccaggagcttgctggtacagaatgcatgggactctatctgtcaggattcagagggcaagctctagtaagaaacttcaagaagcatttaataaagggatggtttacaaagatgtggaaggctgaagaaacttggggccagtacgagcaaaagtctttttccatacctaggtttggggtcatgggaaggaagcagttactgggatctgcagacaaaaata

SEQ ID NO: 777973 - DNA, 648 bp, Homo sapiens
agaagaggccgctgggcacgggtgaaagcagttcagaagacttgggggagaggaagacacccaggacctcgtcagcctcctgcctccccctttttttgggcggcttcttttggaggagagtagcgagtgttctcctcagaatgatctgcccgggcatcagcctgccgttcctaatggaaacagaaacgttaactcttactctagtggtggagccccttggactccatctgcagttctctcgaggccaggattctgaatgagcgagatgaactttaatcttcacttcttgtactttggttcttattttctgcctcagtgtcttcttctytttgttcatggagtcccagtactctcatgtctggaaacctatcaccctgattacatagagatgagatgatgaaattgtcagcaacttgctgaaagtcacatgcctgtgtcctcagaacaggcactgagctgtgggttctctggatgacagaatagtcttttccacattaacttaaccggtgaggacccactggctggaaaacgttaagtttggaaacaggcaaagtgagattgtgcgtgtgtgtgtgtgcacgtgcgagcgtgtgtgtttgcaagtgtgtgtaattgtgtgtgcgtgtaagtgtgtgcaagcaagtgtgc

SEQ ID NO: 777974 - DNA, 648 bp, Homo sapiens
agaagaggccgctgggcacgggtgaaagcagttcagaagacttgggggagaggaagacacccaggacctcgtcagcctcctgcctccccctttttttgggcggcttcttttggaggagagtagcgagtgttctcctcagaatgatctgcccgggcatcagcctgccgttcctaatggaaacagaaacgttaactcttactctagtggtggagccccttggactccatctgcagttctctcgaggccaggattctgaatgagcgagatgaactttaatcttcacttcttgtactttggttcttattttctgcctcagtgtcttcttctttttgttcatggagtcccagtactctcatgtctggaaacctatcaccctgattacatagagatgagatgatgaaattgtcagcaacttgctgaaagtcacatgcctgtgtcctcagaacaggcactgagctgtgggttctctggatgacagartagtcttttccacattaacttaaccggtgaggacccactggctggaaaacgttaagtttggaaacaggcaaagtgagattgtgcgtgtgtgtgtgtgcacgtgcgagcgtgtgtgtttgcaagtgtgtgtaattgtgtgtgcgtgtaagtgtgtgcaagcaagtgtgc

SEQ ID NO: 777975 - DNA, 643 bp, Homo sapiens
ggtcagaaggtagacattgttgctcagatggaggcatctcctcagttccgcagaaaacggtgttgcttgtggaagtgacagtgggtgagattttgtcacagagatctaaaggaaactcgatctttgtttaagcaggaattatcctgctttcatgttctatttcatgtggcaaagaaatgcaggctttgtccaaaagctacttataaacttgtgctttgtgttagttttacattttatgtgtttatgttatattttagctttttgacatattttattttaggttttttyttttaagccagtttatttgtcagctgtctgacaggcaataaccacaggacagcccttaagaaattgggggtaggctttacctggcataatttcaggttgcaagaaacctctccccaaaataatcaccacctaccttttggacccggaaattctgttgaaagagttccattgcatttctttaaagtgtttatcctgctagaacacaagatttagaatagtaagacattttctttatttaaacattaaattcagtacatcttcagcttcccttttgaaaatacataaagataccaggtatctgaagagagaaagtaaaaggttcaccaaaaatctgaaaagaagttttaagttcctg

SEQ ID NO: 777976 - DNA, 616 bp, Homo sapiens
ctgtggattgcttgaaaatattttataattccattttgacttatagtgttttttaagtgtatttccttgtatcaattttttagtggttgctctaggtgctacatcctgtacatgtaactcaggaaagtctatttgagttgatgttttatcagttcgaataaagtgtagaaacttcatctccctttagataactttaccctatcacattgataatataattatcttaaatagtttctttctatatctcgagaagtatattagacaatgttataatttttgcatcaaccatcatagtttagaaaacttgagaagctaagtgtagcatatatttacccatattttttctctttttgtcctttcttcctttctgctactagaagattctttctatcatcatttcctatccatctcaagaaatttccttagttattcttttagggtagrtctgttggcaataaatcctgtttgttttcctttatttgacaatatgttgattttccctgcattcctaaaggatatttgtgctagatatagaattaggggttgacaggtcttttctttcattacttgaaaaaaatctgtcacctctagtctctgttgtttctgatgagaaaca

SEQ ID NO: 777977 - DNA, 500 bp, Homo sapiens
tttctgcttttctctaaaagcttccaaagttttagttttgtgtatacttacataattcatttcaaagtaattttgtatatgatatgaggtacatgttgaggttgtctaccagggaagctcatcagagactcagcacccaagtttttaattgggasctgacatgtaggtaaggtaccctctgccttgtatgtacccaagttccagattctcaggagaatgtgtgttagcctaaaccacgttgtttgtagttcaagcacggtaaacacaggtatatacattttgttttaaagcaaccggttaatttacttggaatcagattgtcattctttcttggttgctagctctaatcttggtgcacgtctttatcctgtgggctgttggagtctgccctgtgcacacatggttcatggatcaggcagacatttgcacagaatttatatacagagcttggggccctgtctctgtggctctctcctttgtcatattctgtcctcacctcc

SEQ ID NO: 777978 - DNA, 500 bp, Homo sapiens
tttctgcttttctctaaaagcttccaaagttttagttttgtgtatacttacataattcatttcaaagtaattttgtatatgatatgaggtacatgttgaggttgtctaccagggaagctcatcagagactcagcacccaagtttttaattgggacctgacatgtaggtaaggtacyctctgccttgtatgtacccaagttccagattctcaggagaatgtgtgttagcctaaaccacgttgtttgtagttcaagcacggtaaacacaggtatatacattttgttttaaagcaaccggttaatttacttggaatcagattgtcattctttcttggttgctagctctaatcttggtgcacgtctttatcctgtgggctgttggagtctgccctgtgcacacatggttcatggatcaggcagacatttgcacagaatttatatacagagcttggggccctgtctctgtggctctctcctttgtcatattctgtcctcacctcc

SEQ ID NO: 777979 - DNA, 500 bp, Homo sapiens
tttctgcttttctctaaaagcttccaaagttttagttttgtgtatacttacataattcatttcaaagtaattttgtatatgatatgaggtacatgttgaggttgtctaccagggaagctcatcagagactcagcacccaagtttttaattgggacctgacatgtaggtaaggtaccctctgccttgtatgtacccaagttccagattctcaggagaatgtgtgttagcctaaaccacgytgtttgtagttcaagcacggtaaacacaggtatatacattttgttttaaagcaaccggttaatttacttggaatcagattgtcattctttcttggttgctagctctaatcttggtgcacgtctttatcctgtgggctgttggagtctgccctgtgcacacatggttcatggatcaggcagacatttgcacagaatttatatacagagcttggggccctgtctctgtggctctctcctttgtcatattctgtcctcacctcc

SEQ ID NO: 777980 - DNA, 409 bp, Homo sapiens
attgccaccagttgctcatgtacctctttaacacagatgaaaggagagtgctccaagcagcaactaagtggctggaagaacatgttccagctgattaccaaaacccccaagagtatgtgaggatccaattaccaggaacagacccccastgggacccaaatgaaagacagggtatgcaaaggctaaaccgatacagggaagcccttctggaagggttaaagaagggagctcagaaggccacaaatgttaacaaagtctctcaggtcattcaaggaaaagatgagagctcagttcttgagacacaagtctgcggacgctcccggccaactgagacctgggaggcgagaccaagcccggacaacacctgcatagtgactctgaagaagacgacaagccctgctccagtcac

SEQ ID NO: 777981 - DNA, 409 bp, Homo sapiens
attgccaccagttgctcatgtacctctttaacacagatgaaaggagagtgctccaagcagcaactaagtggctggaagaacatgttccagctgattaccaaaacccccaagagtatgtgaggatccaattaccaggaacagacccccagtgggacccaaatgaaagacagggtatgcaaaggctaaaccsatacagggaagcccttctggaagggttaaagaagggagctcagaaggccacaaatgttaacaaagtctctcaggtcattcaaggaaaagatgagagctcagttcttgagacacaagtctgcggacgctcccggccaactgagacctgggaggcgagaccaagcccggacaacacctgcatagtgactctgaagaagacgacaagccctgctccagtcac

SEQ ID NO: 777982 - DNA, 610 bp, Homo sapiens
ttatagtaagacatacatgtacatctataataactattacattagaaggtgtgaagtattgtgaaaaatatgtagagctgtagtggagcgggaagaaatgttttgaaatagagcttgagattcttgattgtcttgccctctacttgaacagtgtgccttactgttttcctccaccaccagatctattgcagattggctccgagcccctgacaccatgtatttgttggactttgtgaagccagaatttctcttgcttagggtatgctttgtcttcatttgtgttaacatgagaagtctatttgtggttcttaaacttagcttgtaagccgggcacagtggcttacgcctgtaatcccagcacttcagaaggttgaggcaggaggattgcttgagtccaggagtttgagaccagcctgggcaacacaggctgttctccatgamtgaatgaatggcaaacataaatgtctttacaagagagccttttatttttaatttgtcatgcatatctaattggcagtgttcatttgaaatttcacaaataggactttgggaatcccaagaaaggtaaccacgttgatatttaatacttggagtgacatttcactgtctc

SEQ ID NO: 777983 - DNA, 643 bp, Homo sapiens
gaaatatgaaggtattactattttccactgaggtttatattttatttctgaactccagtaggcaggaaatagaaatagcttttaatttttatatactttcttcgttcaaactcaagtctaaacttatctattttcttcacaaattgggttagagtctttggaatatgctctaatttttagaagaagcaatactacaaatttaagttaaactgtgtccaaaaatctttcaaaagtatttcataaacaacttactgaatactgccaaacaaaattcaccaatgtcaaccctgggaactatttatacatttcaatcytgggaaccattataaaggcttggtcataagtaactgactaaaatgaaatatgagttgaattaaaataaactgctgtctccgtacttggaagaacaaaggatgctaactcagtcctctggctgccactcatccagtccgcctgccccacttttgccgtctaattattccttagggtcctaactactttagactactctactttgtatcaccagcagggacacagttgctcatggaattacaggaaactgaagttaaattcagaagtcttaatgcctgattatgggacaaatttcttgtgttggaaacttatctgagtcaagaatatagag

SEQ ID NO: 777984 - DNA, 643 bp, Homo sapiens
gaaatatgaaggtattactattttccactgaggtttatattttatttctgaactccagtaggcaggaaatagaaatagcttttaatttttatatactttcttcgttcaaactcaagtctaaacttatctattttcttcacaaattgggttagagtctttggaatatgctctaatttttagaagaagcaatactacaaatttaagttaaactgtgtccaaaaatctttcaaaagtatttcataaacaacttactgaatactgccaaacaaaattcaccaatgtcaaccctgggaactatttatacatttcaatcctgggaaccattataaaggctyggtcataagtaactgactaaaatgaaatatgagttgaattaaaataaactgctgtctccgtacttggaagaacaaaggatgctaactcagtcctctggctgccactcatccagtccgcctgccccacttttgccgtctaattattccttagggtcctaactactttagactactctactttgtatcaccagcagggacacagttgctcatggaattacaggaaactgaagttaaattcagaagtcttaatgcctgattatgggacaaatttcttgtgttggaaacttatctgagtcaagaatatagag

SEQ ID NO: 777985 - DNA, 565 bp, Homo sapiens
tgtttctcctgcatcagcctcttgagtagctggtactatagtcacccggctccttgcctggctaagttttgtatttttagtagagatgcggtttagtgattctcctgcatcagcctcttgagtagctggtactataatcacctagctccttgcccagctaatttttktattgttagtagagatgcggtttttttttttttttttgagatggagtttcgctcttgttgcctaggctggagtgcagtggtgctatctcggttcaccacagcctccgcctcctgggttcaagcgattctcctcctcagcctcccgagtagctgggattacaggcatgcgccaccgcacctggctaattttgtatttttagtagagacggggtttccccatgttggtcaggctagtctcgaactcctgacgtcaggtgatctgccttcctcggcctcccaaagtgctgggattacaggcatgagccagcatgccaggctggcccttttttttttttttttttttaatcacttaacatatatcttggagaactttccattttgggagttaaagagatttg

SEQ ID NO: 777986 - DNA, 558 bp, Homo sapiens
acggggaaacccgtctctactaaaaatacaaaaaattaccagggcatggtggcacgtgcctatagttccagctacttgggaggctgaggcagaagaatcacttgaacccgggaggcagaggttgcagtgagccgagatcgcaccactgcacttcagcctgggtgacagagcgagactctgtctcaaaaaaaaaaaaaaaaaaaaaaaaaaaaattaycaagggggagatcatgaaaatggcatgaatagtgtgggatttctctaagattgttgatattaattccattagactcttatgtgagtgaagacgaagacttcccctgagtaagttcagacagcttgtgataacatttctacgtcgattcctcaggatttaactatatattcttgaaaacatctcaattttaaatgtttctttcaagatggtgaattaaacagagatagcccttcaacaggttgaactcagcatatgctgagtctgaaatggaaatgatgaagttagagaaccatacaacaatggtaatgatttcagaaacatggtgttgagcagaacaaagc

SEQ ID NO: 777987 - DNA, 571 bp, Homo sapiens
agtttccagtattttccagctttaagtgaataaaacagagtggtcatatttgtcacctcttgttacaactccttgatccttgaattacaattttaggtgattttttttccagtctcttttcactgttctgaggttggtgatgaggtgacartgactctatgtaaactttactccagtggtgatctcagggtagcagtccccttgatgtagaaatttgctccttagttcagctaaaactggattcgcatcacatgaccaagaaggattaggaatgcagacacattgaaaggtgaggggaatggaatttactgggtgaaaaaggaaaagaagaagaagaagaagaagaaaaaaaaaaactcccagcaaagtgaaaggggttcctgctaacagccccccgcccacctcacagacagaatctcatattcatgagaataaatattgtatataactgatatccccctaaacagaaggtatgtaaatccacccttccaccaatattaattgaaaatccccaatgggaaccagttatattgtccaagcatgcatggtgtagagtagaagctggagtgct

SEQ ID NO: 777988 - DNA, 634 bp, Homo sapiens
  misc_feature 319, 322, 324: n = A,T,C or G
tgcatagtaagtcccaattacatatgagtaaatgctgaaatgtgatatcagaaatatgatactaaataaataatagataaggttattgataaaactaacttaaagaaaactgaaaagtactatattgaaacaagacacaaaaataatttggtgccatatttctattcattcccatatagtgcttaaatataataataaattgtacttcgccaaaatgaaaatatattttaagattttatgtactcaatcaaaacaaagcccagttttatytattcactgtaaagattattttttagcattttttgtagctaaaatctgnagntnttttttttttttttttttttttttggaaaacaaagtcttgctctgtcaccaggctggagtgcagtggcacgatcccggcttactgcaacctctgcctcccaggttcaagcgattctcctgcctcagcctcccaagtagctgggacaacaggcgtgtgccaccacactgagctaatttttgttttttcagtagagacagggtttgaccatgttggccaggtcttgatctcttgacctcgtgatctgcccgccttagcctccctgagtgctgggattacaggtgtgagccaccacgtccagtctaaaatctg

SEQ ID NO: 777989 - DNA, 566 bp, Homo sapiens
caagccaccactacaagaactgctaaaaaggagctgtaaatcttgaaacaaatcctggaaacacatcaaacagaacctctttaaagcataaatcatacaggacctataaaacaaaaatgcaagttaaaaaccaaaaacaaataaaaaacaaagtacacaggcaacaaagtgcacgatgtatgcaagggtacctcacatttcaatactaacattgaatgtaaatggcctaaatgctccacttaaaagatacataactgcagaatgagtaagaactcaccaaccaactatctgctgccttcaggagactcacctaacacataaggactcacataaactaaaggggtgraaaaagacatttcatacaaatggataccaaaagcaagcagaggtaggtgttcttagagaaaaccaactttaaagcaacagcagttaaaagagacaaagaggaacattatatgatggtaaaaggccttgtccaacaggaaaatatgacaatcctaaacatacatgcacgtaacactggaggtcccaaatttataaaacagataccaatagacttaagaaat

SEQ ID NO: 777990 - DNA, 644 bp, Homo sapiens
tcaagtgatcctcctgcctcggcctcctgagtggctaggattacacatgtgtgtcaccaggcccggctactaagctactaaccctctcttaaatacaagctactaaatctattgaatgatccgggaagaaacaatatgaaaaataaaaagataattaagaatttcacaaagcaaatatatgtataatgtctagaagaatcaaagatggaaagataatatggtaatatgacactaaagagcctgatgaactttttgatttgttataaaacatttaaaaattttccttcaatatttaattggccaatgagtctccaaatagctattgcctctctctctctttttttttttttttttttttgagatacagtctcgctctgttgcccaggctggagtgccctggtgcratctcggctcactgcaacctccgcctcccgggttcaagctattctcctgcctcagccttctgagcagctgggactacaggtgtgtgccaccacgcccggctaattttgtgtatttttagtagagacgggtttcatcatgttagccaggatgttctcgatctccggacctcgtgatctgcctcccacggcctcacaaagtgctgggattacaggtgtgagccaccgcgcccggccatccct

SEQ ID NO: 777991 - DNA, 641 bp, Homo sapiens
ctgcaacactaagtaaaatcatgataaggagtccccagccaaatagaatattccctcagggtaccttcacttctgtttgttaaggctttttctttttttctggaggtgacacaaggtcttgctgtgttacctaggagtacggtgtaatgtagtggagcaatcatggctcactctctgcagcctcagcctcctgggctcaagcaaacctcccatctcagcttctaggactacaggtgcacaccaccatgcccagctaattgttctatttttttttttttttttttttttttggtagagacagagtctcactgtgtgtcccaggctggctttgaacttctgaattcaaaccatcctcccatctgagcctctcaaagtgctaggattataggtgtgagcctattcrctcttgaaagcaaataaaactctgtcctgggctttcaggctccgtaccaattgcctgccgcctcagagactttacctctccctctaattgttgccataggctttttacctgtagatggattccattacattccagtattcagcactcccagcctttgtcacttccaagctggacaacctgagcaatctctttaatctctatgaacctctcactgtaggcatgagacagtcaggatcct

SEQ ID NO: 777992 - DNA, 654 bp, Homo sapiens
tgtatgaatatgtccaaatccatcaaaatgtatacattaactatgtaaaatttttgtatatcaattgtacctcaataaagctttaataaaatactcgatgaaaggaaatagtgtggttttttctgcagtgtaaagagtaacttgtggacggtgtgcggaggcattctagagtaggatgggagcaagctcatctcatttcactatggcagccctgttacactactgacttrcaaaaaacttagagtcaactaaaaccccctacattgtctttttcacacattcagaccagattagcactcaggtgtcctgattcctgattctcagccaccacactgcatgcccactagaaaatatccttctcatgagagcggggtcttagggaaaatatggagtacagacaaggcttgaagaaagtaaaactgcttatttctttcaaataatgcagtctacatatttcacagaactaatattgacagaattcacagagtttagggaaaagcaagagccagtgcacacgtgatttcttccagccatttcaaagctcacaatttctctgccattggtaacctaccatggagaattcatttcatgcctgtctactctggtaaaaccttggaatgaattgaattgttacaaaaaggtgaaaattaagaa

SEQ ID NO: 777993 - DNA, 654 bp, Homo sapiens
tgtatgaatatgtccaaatccatcaaaatgtatacattaactatgtaaaatttttgtatatcaattgtacctcaataaagctttaataaaatactcgatgaaaggaaatagtgtggttttttctgcagtgtaaagagtaacttgtggacggtgtgcggaggcattctagagtaggatgggagcaagctcatctcatttcactatggcagccctgttacactactgacttgcaaaaaacttagagtcaactaaaaccccctacattgtctttttcacacattcagaccagattagcactcaggtgtcctgattcctgattctcagccaccacactgcatgcccactagaaaatatccttctcatgagagcggggtcttagggaaaatatggagtacagacaaggcttgaagaaagtaaaactgcttatttctttcaaataatgcagtctacatatttcacagaactaatattgacagaattcacagagtttagggaaaagcaagagccagygcacacgtgatttcttccagccatttcaaagctcacaatttctctgccattggtaacctaccatggagaattcatttcatgcctgtctactctggtaaaaccttggaatgaattgaattgttacaaaaaggtgaaaattaagaa

SEQ ID NO: 777994 - DNA, 544 bp, Homo sapiens
gtcttgcctctgtcttactgagtaagtgtaaacaaggcactttgccctgccacatctccattttctcaaatacaaaacagggaaaataatttctgcccagcctcctccacatgacccctacaggattcagaggatgctgctggcagygcagcactttgaaagtttatgaagttttccacataggcaagatgctgtacatgtctaagatctctcccctcccactttctttgcttacacaaccaggaagtgaaaagcagatgtggaaaccactctcaaactttgtgccagaccctcaaatcttgtgcctaggaaatgtcctccaactttccctcacaccaacagcatcattatcttggcatagaagaaaaaaaatctatacatctcttcaaatagacatctaatttccaattggcttcacctggactgtgaaccataggaaacagaccacaaccaaattttccacaagcactgttttccatgcacacccaaaaccaagcaggaaagagaggaaatggaaaattcccctgggcacttagctcttcat

SEQ ID NO: 777995 - DNA, 551 bp, Homo sapiens
tataactatatatttctccagattctaggaactgtccactgaaatcattttacattttaaatccattgtatttaggttttgtctttcccctacaagaactgaatctatctataaactaactacctagtattttcttggtgagtagccacttttattttcytaaagtgtacaggatggaaatttgaagaagatgtgcaaatcacaactacaaggcaggcaagtgagtaggggaggcttctaccctttcttctgttcctaatagaacccccttaaagctcaagaaagagatgtaagcagctagacattagagttcttccttcttttgcaaggaaaaaagggggaggggaagagagagagagactgattttctgagcactgacaggctttgtccttgatgaatttcattcttcctttgttctatgtgtgtaagaaggagggagagaattagaagaaagagtgacaaagaaattgacatccaatgggtatgcaaaagagaccctggctgaacttaccatttgagggcagggcgccaatgatctgtggccacccgt

SEQ ID NO: 777996 - DNA, 619 bp, Homo sapiens
aaacaaaacaaagaaaaccacctttaaaccttgacctgtctggctaaagcatttcatgaagccatggaaaaccacacggtaaaggataaaggatgggtaagtattgaatatactacagatgtagattagtgaagagaaaggataacttacctctttcatgggcgatcaactcacaagagctcctcatatgatgacagctggtggctggaatcagctcacttttgaagctctgattcctccctaagcaagcaagcaatcatgtggtgtgtgtgtgtgtgtgtgtgtgtgtgtgtgtgtgttgttgttgatggtttccttttccagaaaaaaaaaagataactaaattagatttcttaccattatcatttttatattagtttagatataaaaagccaggtttctgaagatttgactaccattaaacaagatgaaaaagacttgatagaccaaataatggtgargttgtaggcaaaactaaaggctgcccttttatatccagtcagccaaattgccctcccaacactggatgtcacagactctaaaccaaataatgaaatgttacagctggcagagctcgtaaaaatctagtctaacgccttatttgttcatgatgtagtgt

SEQ ID NO: 777997 - DNA, 582 bp, Homo sapiens
tctcaagggcaggtatggcactgtgttcagcttgatctctcacagtcctgagcccggatgcttgtacttgataggagttaatgtctgaaggatttacctaaacagccagtgggaacctcaaagccgatgaaactacgattgattaccaagaggtagggtgttgttgctaggagctactcatcataaataagatgccactggggttctaaaggaaacacgtaagactgtgtatttctcaagcattgtccctctctactcctgagaaaaggagaaaccttttttttaaaaaaaaaattctacatctgaacccttctgttagaaccttctgatttctttttaaaaaacatttatttatttatttagagacagggtctcattatgtcgcccaggctggagttcagtggcacgatcacggttcactgcggcctygacctcctaggctcaagctatcctcccacctcagcctcctgagtagctgggactataggcatgcaccaccatgcctggctttttttttttttttttttttttgcagacacagggtctctccagtgtggtctggaactcctggactcaagcaat

SEQ ID NO: 777998 - DNA, 647 bp, Homo sapiens
tctggaactcctggactcaagcaatctgcctaccttggcctcccaaggtgttgggattacaggcgtgagctatcacgcctggccttaaaaccttctgctttctgatctaccatagaaattaaaatgataagcaaatactattttagtgaaactctttagaaaccagcttccaaaacaatgagcaaacttggagggactgtttcttycacccaagcttagccctggggatgtgaatagccaaattctggactctctcttcctacctaccccttttccagccagtattgggggcagggtggcagggggtgggggaagggcaataggaagccccggcccaggaaagggctctcctgggtcctgcctacctgcattgctcccccaacctctaccacatgcctcataccatgctggggagaaaagtggagcctgagccaaagccacctctccagaggggcctgggctagtgcagcaggggatggcaacctgatggcactttgcaaggtaggaagtggcagggcttagcagcctggaaaagaggtgctgagagcgcatggcagaagctataagcccagccacatgggagaagcaagtcttccacctggccagacgcggtggctcatgcctataatcccagcactttgggaggc

SEQ ID NO: 777999 - DNA, 629 bp, Homo sapiens
ttgtctcagaggagtacctggccgtatgaggtgtcagtccacccctactggggggtacctcccagttaggctactctgaggtcagggacccacttgaggcggcagtctgcccattctcagatctcaagctgcgtgctgggagaaccacttctctcttcaaagctgtcagggagggatatttaagtctgcagaggttactgctgtctttttgtttgcctgtgccctgcccccagaagtggagcctaaagaggcaggcaggcctccttgagctgtggtgggatccacccagttctagcttccaggccgctttgtttacctaatcaaacaactaactccgcaatggyggatgcccctcccccagccttgctgccaccttgcagtttgatcttggacggctgtgctagcaatgagaaagactccgtgtgtttaggaccctccgagccatgtgcgggatataatctcctggtgtaccgttttttaagcccattggaaaagtgcagtattagggtgggagtgacccgatcttccaggtgccatctgtcaccactttctttgactaggaaagggaattccctgaccccttgcacttcccaggtgaggcgatgcctcgccctgcttcaactcatgca

SEQ ID NO: 778000 - DNA, 642 bp, Homo sapiens
ctcaatgaagagaatgacttagttttgttcactcttgtaccccccaatgatgtagtgccattttggcgtatgtattagtttgttttcacattgctataaagatattacctgagacagggttatttataaacaaaagtggtttaattgacttgaagttccacgtagctgtggtggcctcaggaaacttacaatcatgacggaaggtgaaggggaagcaagcacctccttcacaaggtggcaagagagagacagcaggtgaggaactgccaaacacttttaagccaacagatcttgtgagaattcactaactatcatgagaacagcatgggggaaattgcccccagaatycaatcacctcctaccaggtccctccctcgacatgtgaggattgcaatttgagatgagatttgggtgagtacacagaggcaaaccatatcagcatatattaaatgataaataaatacactttggatacatgaatacatagaggctgggtatggtggctcatgcctgtaatcatgcacatctccagatctttgaataaagttaatattttggaatatgctgtaatttggataacttctagaataccactgtgtactcttggtgctgcttacgtaggttgaaacaagaagtagagtt

SEQ ID NO: 778001 - DNA, 645 bp, Homo sapiens
gtataatattattatataataagataaatattactagcaaatgatgaaagttcactaataatgatgaaggtgaagttattttacagttggatttattatgtaaaaatattttaattgaatctcataaattaatatgatccaatttttttaaaaaaagtgaaataattcagaaatactcttgcagtgctgatttacaaagagaaactgagtagcaagtaagggagtatgaataatgaaaacaaacaaggaatgaaattgtgaaagcagagaggaatattctctcacatctattttttagtgttaaacattagatttaaaaatatatatatttctgtaaactctgtccttgtcagcaaacaccgcaatttatttttctaaattttcctggtatgrttatttaccaagttaagttctggagatggattaagaaattggaagcctaaggcttttgggctacaaacattaaacagcaattaaatttttacattagattaatacaaatacagtgctgcttacctatgtctagttcctagtgcatctcctcaagtgcttctgtgagatactaactcaatgaagtcgtgaatgccatgtatgtgtgtgtgggtgtctgagcaaatatatacacaaacaaatatgcatctctct

SEQ ID NO: 778002 - DNA, 645 bp, Homo sapiens
gtataatattattatataataagataaatattactagcaaatgatgaaagttcactaataatgatgaaggtgaagttattttacagttggatttattatgtaaaaatattttaattgaatctcataaattaatatgatccaatttttttaaaaaaagtgaaataattcagaaatactcttgcagtgctgatttacaaagagaaactgagtagcaagtaagggagtatgaataatgaaaacaaacaaggaatgaaattgtgaaagcagagaggaatattctctcacatctattttttagtgttaaacattagatttaaaaatatatatatttctgtaaactctgtccttgtcagcaaacaccgcaatttatttttctaaattttcctggtatggttatttaccaagttaagttctggagayggattaagaaattggaagcctaaggcttttgggctacaaacattaaacagcaattaaatttttacattagattaatacaaatacagtgctgcttacctatgtctagttcctagtgcatctcctcaagtgcttctgtgagatactaactcaatgaagtcgtgaatgccatgtatgtgtgtgtgggtgtctgagcaaatatatacacaaacaaatatgcatctctct

SEQ ID NO: 778003 - DNA, 595 bp, Homo sapiens
tgaaagagagaatgtaaaaggcagctagagagaaaaggcacaggtcacctacaaagggaaccccatcaagctaagagtgaacctctctgctgaaacccaacaagctagaagggattgttagcctatattcaacattcttaaagaattttatgtctggccaaattaagcttatcaagcaaaggagaattaagatccttttcatataagcagatrttaagggagtttattactaccagacctgccttacaagagatcttgaaaagagctctaaatatagaaaggaaagaccactgtcagttaacacaaaaccacacttaaacacacaggccagtgtcactataaagaagaaacacaagccaacataataactagctaacaacacaatgaaataatcaaatccacacatatcaatactcaccttgaatgtaaacaggctaaatccccaacttaaaaggcacagagtggaaagttgacacccatctcatatgtaatggcacacataggctcaaaataaagggatgaaggaaaatctaccaagaaaatggaaaacagaaaatccaggggttgcaatcttaatttcagacaaaacagactt

SEQ ID NO: 778004 - DNA, 619 bp, Homo sapiens
tcaaatcgtagccattcctgtgagacaagaagagaaagcaagcaactttgaaaacatattgcaggatataattcaagaaaatttccctaatcttgttagagagttccacacgcagatacaagagatccagagaactcctctgagatactataaaagatgaccatccccaagacatacagycatcagaatatccaaggtcaaagcaaaagaaaaaaatcttaaaggcagctagagaaaagatcacataacctatagatgggaacccgtcagtctaactgttgacttctcagcagaaacattaaaagccagaaaagatggtaagttgggggggcaggggggcgcatttttagcattcttaaaaaagagaaatgccagccaagaattttatatcctgccaaagtaggcttcataaatgaagaagatatcaagtctatccaagacaaacaattgctaggagaatttgccaccaccaggccaaacctacaggagagacttaaggaagttctaaacatggaaatgaaagaaaaatacttgctaccacaaaagcacacgagtacatagcccacagatcctataaatgaattacacaaatgagactacaaagcaattagctaacaac

SEQ ID NO: 778005 - DNA, 587 bp, Homo sapiens
ttattatttttgttccattttggtttaattatttttggttttttaaaggtttagatcccaaaaattactttaaaaaatttttttggtccaaaaatttttcaggtaaaaaactggaaattcatattgtttaaaaaaaaaaaaaaaaaaaaaaaaaaaaaacaccaaaaaaaaaacttgcttgtgttcataagccagttagtgctgatgctggccataaaacaccaatactgcaccctttctgccacactgcactgttaccatctaagtgccagccactagaaaagacctgtgcagaaaagtgaatgctgcattgctatagttgtaagaacctatcaaaagtgagttccttcctttraataatccattgataatccaatacaaaaggtctttctcttaaatagtccatcatcttcttccacatgtctgctattgttgtgccagttatctaaacaatgtaactattgataaagtcatttcaggtgccattggaaaacacactcttcatgattttagtagaaaaatattagctataggttttgctatctgataattctaaattttttagtttaatatagacaaatatgaaa

SEQ ID NO: 778006 - DNA, 638 bp, Homo sapiens
tatatgtccccttctctctctctgatttaaaacagagcaaggcaactgggcaagttttcagatgatcctgataggtatatagatatcctacagggtctagggcaaatgttcaacctcacttggagagatgtcttgatactggaagaacaaaccctggcctttaatgaaaagaatacagctttagctgcagcctgagagtttggagatacctggtatcttagtcaagtaaatgataggatgacagctgaagaaagggacaaattccctaccagtcagcaagccatccccagtatggatccccactgggacctcgactcagatcatggggactggagtcacaaacatccgttgacctgtgttctagaaggactaaggagaattagaaaaaagcccatgaattattcaatgatgtccaccataactcagggaaaggaagaaaatccttctgccttcctcgagyggctacaggaggccttaagaaaatatactccccagtcacccaaatcacttgagggtcaattgattctaaaacacaagtttattacccaatcagccacagatatcaggagaaagctgcaaaagcaagccctgggccctgaacaaaatctggaggcattattaaacctggcaatcttggt

SEQ ID NO: 778007 - DNA, 530 bp, Homo sapiens
tcctcagaatagtcctgggaggtggataatgtaattgtgctcactttgaggtgatatgtagcttgcctaagtcacacagttagtgagcagcctaagattcatactcagggtccctgttcctcaccatcatgccaactgcccrtgagtggccacggctgagctcaagaggactgaagaatcagagcagagcctggggccaggctgtcctggtagggttgcttccttctttgttagaacatgtgtcaggtgcctctagactgtgcatcactagtgcacgcgtgctcacgcaaaagtgctgggatgtgacaaacaataggaaatgaggtccctgccctcccagggaggacccgagccagatgtgcagagtgaaggtcatgccctcgagtgccagcagggctcagtctggcctttggatgacaaaaggagcctctttagtgactcctgagctgggtccaaatggaaggaccagttggtgcattcccaccgtaggaagggcaggggtgcctactgtggggcagcagaccctgcca

SEQ ID NO: 778008 - DNA, 602 bp, Homo sapiens
acagcatgcaatggtactgaatactcaaggcaactgtaacacaatataagtatttgagtatctaaacatatcttaacatagaaaaggtaatgggttgtgccatgatgacatgatggccatgatgttaccaggcaatagcaatttttcagctccattataatctcatgggaccactgtcgtatatttggtccatcactgaccatgtaatgcatgactgtacttaactgctgctatagcctaaaagcagtcatacacaaaacctaaaaaataagaatggytaatgttctaataaagctttactcataaacactaaaaattaaatttcatataactttcacgtgtcacaagttagtcttcgagattttttttcaaccatttacaaatgcaaacaccactcttagctcatgagtcataccaaagcaggcaccaggctgaataaatttggtggtgtgcagaccccagtgaaggcctgcttgtaaagaggagctgcagtctggctcttcttttacctcagtcagctgacactttatctctatagctaaggcctggcaggaaataattcttactcgactttcagtcatttgcaaatcatcttccttaaa

SEQ ID NO: 778009 - DNA, 590 bp, Homo sapiens
catataaaatacacagcatgtagtaagcactcaaatgttaacaactattatttcataagatcaaaacaaaccaagcaagactggcttaagatcttctattaattcagtactttgtcctatactatgatgtccccccaaatttatttgagacagagtcagactctgtctcaaaataaaatgcaaacacagttcactgcagcctcgacctcctgggctcaaatgatcctcctgcctcagcctcctgagtaactgagaccacaggtgtgtaacaccatgcctggctaattttttgtattttttgtagagatggggtcttgtcacgttgcccaggctggtctcaaactactgggctcaggcaatcctctcgccttgctctcccaaagtgctgggattacaggcatgagtcacctcgcctggccccgccgaaattttawatcttagcctggctgcctctttccagtcagtttctagtggttaactctttcactttcccacttccctacttgtcatctgtttgttgggtccaggaaataaaaataaaatacctaattttacatttgaaaaggtaagttatatgtggcaaagagcca

SEQ ID NO: 778010 - DNA, 609 bp, Homo sapiens
gctttattcatttaatcctcacagcaaccctttgagacataggtagcccttatgttacagatgaacttgagtcacaggggggtgtacctattggcccaaggtcacgccgtaactgataatgccttggctatgaactggcagtctgattccagagcctatacacttaaccactacactgtgtccctgtgaaggtgaattagacaaagaagatgatccttgcacatagcagtgaaggaatggtaatggatcactttttaatcctgttaatattttaattaaaaaaratcttctatcttcacggtaccccgatacttttcgttttaagttcttgtcaccatgattggttgtatgattttggccacccaggaccagcttagtatgtaacaagctttatgtttatttttcttgtgttttgtgtgtaggaaggttttaagaatatgtagcatcgcttaatgatggggatgtgttctgagaaactcattatcaggcaatttcattgtgcagacgtcctagagtgtactcaacacaaacctagatgtataacctgctatacacctaggctaaatggtatagcctatggcttttaggctacaaatctgtacagcgtgt

SEQ ID NO: 778011 - DNA, 609 bp, Homo sapiens
gctttattcatttaatcctcacagcaaccctttgagacataggtagcccttatgttacagatgaacttgagtcacaggggggtgtacctattggcccaaggtcacgccgtaactgataatgccttggctatgaactggcagtctgattccagagcctatacacttaaccactacactgtgtccctgtgaaggtgaattagacaaagaagatgatccttgcacatagcagtgaaggaatggtaatggatcactttttaatcctgttaatattttaattaaaaaagatcttctatcttcacggtacccygatacttttcgttttaagttcttgtcaccatgattggttgtatgattttggccacccaggaccagcttagtatgtaacaagctttatgtttatttttcttgtgttttgtgtgtaggaaggttttaagaatatgtagcatcgcttaatgatggggatgtgttctgagaaactcattatcaggcaatttcattgtgcagacgtcctagagtgtactcaacacaaacctagatgtataacctgctatacacctaggctaaatggtatagcctatggcttttaggctacaaatctgtacagcgtgt

SEQ ID NO: 778012 - DNA, 603 bp, Homo sapiens
cttgcagtatataatttatagagctgggagttagagtaacctttcctaactctatgtaattgacgaatatatagaaaatggtcccctcccccttgtccccccccttcttttgggaaagagatctggatatcacaaagaacttattttragtagatgcctatcttctagaatggctcaaacaaacccagtctttgctaatatagaagtagaaatcttgtcattcgagcaaactcatgaattatttttttaaatcctttagtacaataatgccagtattattatttcataatagggtcaaaagtagacaactgttcgccaggcttacacctgtaatcccagcactttgggaggccaaggttggtggatcacctgaggctgagtttgagaccagcctgaccaacatggtgaaagctcgtctctactaaaaataaaaaaaattagctcggcggggtgacacatgcctgtaatcccagttacttgggaggctaaagcggaagaatcacttgaatctgggaggcagaggttgcagtgggcagattgtgccactgcactccagcctgggcgactaagcaagactccgtctcccaaaaaaaaaaaaagaag

SEQ ID NO: 778013 - DNA, 652 bp, Homo sapiens
caagatttaaacttgtgctatctgcctctggagtagcgtgagctcttaatcactcgcttggaggattgctggagtaactggcttttctcttgtgctatggacagttgacaatttaacctaagcatataacttttcaatatgtaattgacagtagaagtgtgacaggatggtggtttacacacatgtatgatacycttttctaaataagagtttctgggctgggcaggttggctcacactggtaatcccagcactttaggaggctgaggtgggaggatcacttgagcccagcagtttgagaccaacctgggcaacataggcagaccctgtctctacaaaaaattcaaaaaatgagccaggcatggtgatgcatacctgtggtactagccactgggcagtttgagatgggaggattgcctgggcctggaaggttgagactacagtgagccatgactgcacgactgcactccagcctggacaacagagcaagactttgcctcaaaaaaaaaaaaaaaaattctgtaaatgatttgcgagtgaagtggtgaaactttcttttcaaacctttaaatgcttatgagatcttcttttaccctttcaggagtggtcattcactgtaaccacaggatcccatttggagactggtttgaata

SEQ ID NO: 778014 - DNA, 594 bp, Homo sapiens
aaaatcttgtaaaagaaataaagaatgccattaatgagcttatcagcagactagacattgccaaggcaagaataaataaacttgagatatgttaataaaaacttcccaaactgaaacgtaaacatcgtttaaaaagaacaaatatgaatatcttaataaactaggaatattggagaacattttcaacttgattaaaaatagctataaaaaatctataacaaatatcataatgctragacactcaaagctttcccaccaaggaacaacatccccttttaccactgcgattttagtatcatactggaagttttagctaatgcaataagacaggaaacagaaaaaaaggtatacagattgggaaggaaaaaatgaagctgtttgttcacaattttcatgatcatctatgcagaaaattcaatagttgaaaaaacacccaactcctagaaaaaataagtgattatagcagggttgcggattataaagttaatacacacaagtcaattgcttttctatataccagcagtgaacaacaagaatttgaaatttaaaaatacaatagcatttacattagtgctccaaaaaatgaaataactc

SEQ ID NO: 778015 - DNA, 475 bp, Homo sapiens
gatttatgtgaaattatgtcaagatgatcctagtaactgcattgtgcccaaagactatttgtaataaacatttattttaatctgaattctcattaaagacattattgatcagtattttttgagtgtttgttatgtattaggtrttgaaaaatagaacaggatgtcaaataacacagctatttccctcttctagtctccactgcttcgaagatagtatatagtaatgatctgtgattggagagaatttcagatgcaaaaatatctaaccatgtgctcctgtgtagaggataatgtgattaggctgctaatttttcatcttaaatgcttcatatttatgaagctcagcaaaatttgcattactctcacacagtagtttccagactagataaatccatagcacgtaattgtgaaattacttccaaatgataatcttttactattttcttctaatcaatgccacctgccttccttttac

SEQ ID NO: 778016 - DNA, 633 bp, Homo sapiens
ctttttaaaaaactttttcagtggttccctagaatttgcaatatgcatttacagctaatgcaaatctactttcaaatgacactatgcaattttacaggtagtacaagtactttacaataacaaaataatcctaatccttctctcctaccttggtactatctcccatggaagtttctacccatgagtttctgttctaagaagtgtaattctctgtaattctgagggcagcagtttgcccagtgacctcacttctctgttggacctaagaggtgttggttttccagtttattcagccttctacttgttataatgaagtgatgacttccaagcaactcacatgccagaccagaaatagaagtcctatatgtttaattttaaaagtctgcaagaatttttatttttattcttttattctccacatacatattgtacattgattgtgtgmcaggcactatgttacgtatgatgatggaagacaaaatgtttgtaactagcttcaaggaatacggttattttctacataaatatgtattgctagtaaacactgattatctttcaatagttacatcccagagtgagatcacagattaatcaattttctattggttgtatttctaaacaggcataaaatag

SEQ ID NO: 778017 - DNA, 633 bp, Homo sapiens
ctttttaaaaaactttttcagtggttccctagaatttgcaatatgcatttacagctaatgcaaatctactttcaaatgacactatgcaattttacaggtagtacaagtactttacaataacaaaataatcctaatccttctctcctaccttggtactatctcccatggaagtttctacccatgagtttctgttctaagaagtgtaattctctgtaattctgagggcagcagtttgcccagtgacctcacttctctgttggacctaagaggtgttggttttccagtttattcagccttctacttgttataatgaagtgatgacttccaagcaactcacatgccagaccagaaatagaagtcctatatgtttaattttaaaagtctgcaagaatttttatttttattcttttattctccacatacatattgtacattgattgtgtgcmaggcactatgttacgtatgatgatggaagacaaaatgtttgtaactagcttcaaggaatacggttattttctacataaatatgtattgctagtaaacactgattatctttcaatagttacatcccagagtgagatcacagattaatcaattttctattggttgtatttctaaacaggcataaaatag

SEQ ID NO: 778018 - DNA, 565 bp, Homo sapiens
attacctgccacaaataaaacacattcatagaaatataaattaaacaattacattagatcctagctagatgatgttctctctcattttggtgaaaatagagattaacaagcattccagaagtggtacaaaaaaaaaaaaaaaactaatawcaatctgaaacttcctgcttaacataaccagggaacaccatttaggaggtaatgttatttaatgtcttatccaggtactaactaaaatcatatcatatgccactgaagatcatttcctgtagtctccagtggtagttctaccatactttaggaaataaccaaaatattttcatgactttctggtcctacaatttcattaaaaaaatttctacttatgccttcaacaacccaccttttacataaattaatgatattcaggcagcactcagcaatgtgtgggtgtgtcataaatagtggtagtggattaataatacatacttcaccctcatttgaaggtacactaatgatcagaatacgagaaagcaagttgtccaatttgcttgtaactttaacagttccctgaaactgagtatgt

SEQ ID NO: 778019 - DNA, 565 bp, Homo sapiens
attacctgccacaaataaaacacattcatagaaatataaattaaacaattacattagatcctagctagatgatgttctctctcattttggtgaaaatagagattaacaagcattccagaagtggtacaaaaaaaaaaaaaaaactaatatcaatctgaaacttcctgcttaacataaccagggaacaccatttaggaggtaatgttatttaatgtcttatccaggtactaactaaaatcatrtcatatgccactgaagatcatttcctgtagtctccagtggtagttctaccatactttaggaaataaccaaaatattttcatgactttctggtcctacaatttcattaaaaaaatttctacttatgccttcaacaacccaccttttacataaattaatgatattcaggcagcactcagcaatgtgtgggtgtgtcataaatagtggtagtggattaataatacatacttcaccctcatttgaaggtacactaatgatcagaatacgagaaagcaagttgtccaatttgcttgtaactttaacagttccctgaaactgagtatgt

SEQ ID NO: 778020 - DNA, 621 bp, Homo sapiens
taataagatttcaatttgtatatgttgaaataatattttggatatttttgattaaataaaatagaattatttcactttattctttttactttttgaaaatgtggctaccagaaaacttaaaattatgtttgatgcttacaatcggtttccattagacagtactagcttcatctagaagggtaaggggcaaagttattcggaaagcatttgctggggtatggcatttgtgcaggcatacaaggaactggaacagatgctctgctcctcagctcagccctggggctgtcctgcctacacatgggcactgctgtcatcatgcctcttttcaaactttctgagggcaggatcagcttcatttctttttttaaacatgctccttatctcaggttagggaaagtatataaactgttaaaggctggcaggttccatttacttttcaaggctctggaaacttgagctcagaatggaacaraatatattatgagatcaagagagtgttagcctggtgaggatcaagagggaatggaaaggaacagggaagaaactcataggtggatgcaaagattttggtattattctagtgcttaagttgggtggtaggtaaatgagtgccaattttgt

SEQ ID NO: 778021 - DNA, 589 bp, Homo sapiens
ccattggtcgtcctctttacagaaacactaagaaaagttgcagcatcctctcttgaacccaaagggatctaaggcagtcaactttaattgtacaaaaagcaaactgaggacaagaggggtacatggtttatctgcagttacacagatgacatgcaggtgagaatcctggctctttccaatggcaaatgtacttgagcaactatgactctgactcttaccaaacattcacccatgccttgccaattctcaatgcaggaatggctgcctaagaggccaaatattgagctagggggagatgatgatactggtggtgatactatcaatgaagaaaatggtaactaacactgaatcccaactacgattggttctaaattactttatataaacagaaagtttatgtaatgtggtcaaggtcacgcagcctggatagaatcccttcactgtattcaagaaygacatacacacaaaaagtccactaatccatagacgtatggatttggagttcttccattcacctggaactagaactacttgcttgacatgaccgattaaaaaaaattagacacgtatagaaaaatatattcggtta

SEQ ID NO: 778022 - DNA, 600 bp, Homo sapiens
tgagggaaaaggatacaccaggaattaaaaaaaaaatcagggaaaaatatctgcctaacaatctgtccttctacagcagtcgttctcaactgatggttaattgtccctcccccaccaggggacatttggcaatggctgaggaccattttggttgtcacacctggaggagggggcttgtgccactggaatctggtggggagaggctggggatgctgtcggacatcctacaatgcacagcagagcccctacagtaaaaattacctggtccacgcatcaagagtgctgtgacagagaacacttctataagaatttgttctatttttatttttaytttattttatgctttaatgtattattattttttgagatggagtctcattctgtcacccaggctggagtgcaatggcatgacctcggctcactgcaacctccgcctcccaggttcaggggattctcctgcttcagcctcccgaatagctgggattacaggcatgtgccaccacgcccagctaagttttgtatttttagtagagatggggtttcatcatgttggcctggttggtctggaactcctaacctcaagtgatccacccgccttgg

SEQ ID NO: 778023 - DNA, 531 bp, Homo sapiens
tcctatgattagcctggggtactcttgccctggttttaggccacatgtaacaaacctctatcaataaatgcgtcttaattaaaattatttgaaatgaaatttggatgaaaacccagcatacaaatctcaaagaataacttaaggctgttyactggctcagtttggacatgctttatctgaaatcattctcagcatttgcaatgttaaggaacatattgcaggagtgtagaagttagctctacaagtaagtaatttttagtgtaatacaaaaatataaaatggaaaccacgattaatttttcagtttctctctgcaggtatctaatcattgtacccatggaccgccagaggctcccattaaagatttaaaatgcaagaggaaggtagaatccaaaagatgggatttgggattaaataatgtaaaataactgcagggcagtaatgaagtgaaagctattggtgcagtaagacatcctcttaagactttcttgggatccacttaaaatattgacactgacacacagtgtcagag

SEQ ID NO: 778024 - DNA, 528 bp, Homo sapiens
tttttgaattagaatgcaaatagggttcacacattacatttgtttgaattgcctcttaaatatggttttctctgtagatttcccctctagctttttgtcctgatgtatttgttgaagatattaagtaatttgtttggaaaattttgtttgaatgttgctttttgaatccacatagtgtcatttaacatttttctttgccatttcatgtcctgtaacctgacaattaaattataattgatgagaccaggtgcagtggctcatgcctgtaatcccagcactttgggaggccaaggcagatgaatcacacgaggccaggagttggagaccagcctggccaaaatggcgaaactccatttctactaaaaatwcaaaaattagctggacatggtgttgcacatctgtagtcccagctactcaggaggctaaggcaggagaattgcttgaaaccaggaggcagaggttgcagtgagccaagattgggccactgcactccaacatgggcaacagaggaagactaaaaatgtatat

SEQ ID NO: 778025 - DNA, 619 bp, Homo sapiens
  misc_feature 615, 616, 617, 618, 619: n = A,T,C or G
tgcctgtctagttactccacctggatatattttactatagcagaaacaaggtcgagaacaatacctaccagggaagaaaatggtaattcaaagaagttttgctgtctcccagcctccttttttcatattttttttttactagaatagctttctccagttaactcattgcacaaattcgggattttacttctagaagtttccatgaatagttaagagtcactcatagcatgatggaacagttcagactgaggaaattgttggttmgctatggtaggaggcagggatggagggagggagggaggtttgcctcaggaaccatacctagcccagggaaggtaaaaaggcaagagggttctcttaccaaaactggactttttcttctagactttcccagaactgcagttaaccacctagttcagttttccaagaaagacaccataagtgttataattattatactaacaaaattagtataataattgtgggatcatcccaaaataagcaacaagcaaatttatttctcttcttagttaaggaaactgaagtagaaataataaaattaagatgaaaacaagagttgcaagaatgtggcaagggcggtggggagcctgtacnnnnn

SEQ ID NO: 778026 - DNA, 619 bp, Homo sapiens
  misc_feature 615, 616, 617, 618, 619: n = A,T,C or G
tgcctgtctagttactccacctggatatattttactatagcagaaacaaggtcgagaacaatacctaccagggaagaaaatggtaattcaaagaagttttgctgtctcccagcctccttttttcatattttttttttactagaatagctttctccagttaactcattgcacaaattcgggattttacttctagaagtttccatgaatagttaagagtcactcatagcatgatggaacagttcagactgaggaaattgttggttagctatggtaggaggcagggatggagggagggagggaggtttgcctcaggaaccatacctagcccagggaaggtaaaaaggcaagagggttctcttaccaaaactggactttttcttctagactttcccagaactgcagttaaccacctagttcagttttccaagaaagacaccataagtgttataattattatactaacaraattagtataataattgtgggatcatcccaaaataagcaacaagcaaatttatttctcttcttagttaaggaaactgaagtagaaataataaaattaagatgaaaacaagagttgcaagaatgtggcaagggcggtggggagcctgtacnnnnn

SEQ ID NO: 778027 - DNA, 609 bp, Homo sapiens
agttggccagtcagcaactagttttcttcagatcttttcaaaggctgcttgttgtcgctttatccaaaggagttgatagatgtgtatgaagcattctggctgacccatggcaatttgtgtttggaagaatgagatttagagccagggttagtacaccatgtggattcgcatgggcattatttaggtgtagataagcttatctgaaattgcatctggattacctgactaatccaaaaaaggaaagaaaagtagagacctgctatggaaatagtcatgaaacaaaggagcgctaggggagaggtgggtaactaaatgctagtttttaaataatgttatatcagacttaaaagatacatggaagataagacaggcctaagagtttgctagcagctggatcagattrcaaggaagaatctcagtctatcctttattactcaagccagagcacaagactagtttccacattttataaatatagagtcttttttggagactgtgaaatttggatagaatgttttatttctcattactgtttacagattcgttatgaccttggcctgtatacactttcatgacaggttaagtgaacagaggttaaaggaggcaaac

SEQ ID NO: 778028 - DNA, 609 bp, Homo sapiens
agttggccagtcagcaactagttttcttcagatcttttcaaaggctgcttgttgtcgctttatccaaaggagttgatagatgtgtatgaagcattctggctgacccatggcaatttgtgtttggaagaatgagatttagagccagggttagtacaccatgtggattcgcatgggcattatttaggtgtagataagcttatctgaaattgcatctggattacctgactaatccaaaaaaggaaagaaaagtagagacctgctatggaaatagtcatgaaacaaaggagcgctaggggagaggtgggtaactaaatgctagtttttaaataatgttatatcagacttaaaagatacatggaagataagacaggcctaagagtttgctagcagctggatcagattgcraggaagaatctcagtctatcctttattactcaagccagagcacaagactagtttccacattttataaatatagagtcttttttggagactgtgaaatttggatagaatgttttatttctcattactgtttacagattcgttatgaccttggcctgtatacactttcatgacaggttaagtgaacagaggttaaaggaggcaaac

SEQ ID NO: 778029 - DNA, 456 bp, Homo sapiens
ctgcttattcccacaatccagagagaaaagtctcataattcatggggcatgggatagagtttgcatcagtagtaaagcaaaattaaccctacactaaatgctgctctgatctcaactaacaactttcaagcaagacccaaaatgtttccaagtaacttaacttgtcataaatgaagcttggaatatttctaggaaacacaaatgtccagatccaatraggtaaaattcacaaggtctgtcatccaatcaaatgttgccaagtatgaactaagcaggaaaatataacctagaatgaggagaaaaaaatccaaaacaatcaatcaatactgaccaagaaataatactgatgatcaaagtagtaaacaagaacatttttgttttactattgtatcccatatattcaagaagtgagaatgatgagcgagcatgaaaattagaggtacagaagatataaaa

SEQ ID NO: 778030 - DNA, 591 bp, Homo sapiens
ataaaatatgtcacttcttgttggttatgaaaatactcttgcatatcaaaaactctcagcactacttaacaatcagaaggcaacaagattatatttctttcaaatgtaactcacagattcccctcttaattcctaccatgtaatggagaaatcaggcctgcttcatttacaccatctttgcatgacttctactcaccgatgaaattgattttctcaaaatagcatcaacattaaaatttgtcccatggatgctgactccttccatggtttccaagaaggagaaaatatatagatggttatgtgtaggtccatgygtgtgcattttaagaatacgaatttccacatgctgttagcaccagtcatgtgatattagctcagcaggtattaccacctcactccctcaggtagctccaattgcaagagtgatatagccaaaacttacaattggaacctggttataatatcaacatcacagcacaaattgcatgtagctcaggtcactctctttacttgcctccttgcttcaaaggaactaccttctccttgcaaatttacccaagcctataaagtgcatggagtgtcagagaataa

SEQ ID NO: 778031 - DNA, 668 bp, Homo sapiens
tggataaatctaataataagctgcataaaattataagcagagaactttagcatcccccatcaacacgcttttccatatttttataataatcatgcaatatggaatttattgaaatccctgtattttgagagcatattctgtagaatactacaatcataaattctgaagaaccatgcaaaaaaagcctaaattacctattttctcakttgaaaatcttgagattttgttgtcatgttaagaaggaatcaaagtataatttattttcatttctctcctcattgtaaatattcacttttttgaattgtaaatattgtattacttctttaaattttaaaaatatttttccctagttccagctctttatcgccaagattgtaatttttatttttctttttttaatggaaactgccaatactttctcaacatacctccccctatcgtgttcaagttgattccaagatatgtcattatttttcacttcagtaactaaatagtgctctttctgcttcttcatacgtactttcccccatgtgctcaagaagtttatgttgtttaaacaagctatagggccggcatggtggctcatgcctctaatcccagcactttgggaggctgaagcgggtggatcatctgaggtcaggagttcgaaaccagcctggccaacatgg

SEQ ID NO: 778032 - DNA, 550 bp, Homo sapiens
taccctgagaaaatcagtcagcaactcaatatacatccttccagaccttttcctgatcatatatattaaaatatatgtttgtgtatagtatgaaatatacttcgtctttgtcccagttcctgtcacaagctcttaaaacccttgggatttcctgagcaggaggagtatcttttattgttcatcatgagcccctttygatcatacctgagtttatgctaatgaggtgacttaagatagtgcacagataacccaggatgaagctgctcaccagagagaccaggttattagaagattaaaggattggaaccttcaaccccacccatcaatctacaagaaaggtaagggagggaaagtgtagagataaagccgtatgaaaaaaattttttttttttttttttgagatgggagtctcgctctgtcgcccaggctgcagtggtgagatctcggctcactgcagcctctgctcccaggtttaattgattctcatgcctcagtctcccaagtagctgggattacaggctcaagcttccaggttgctgaacatgtggag

SEQ ID NO: 778033 - DNA, 608 bp, Homo sapiens
ctggctgattcagagattctgggcttctcagaccttacttggaaaggtctgataagaccaaatttaaaatgctatgtatgtgatgattcagttctttagaagggttgccagtttgtggtgtacagtaaacacttggattactaaatattctagtgaagattagcacttttcatttgcatcttttttttttcttctgagattctcaaataccttaaagataagcagaaattcataatctacattcattctgaaaacttttatattamtattcagcaagtgatctttaagattgagctaggaacttgtggccctggtgtgttattttcaaataactagaaacttacattttcaaatgatgatttttatctttgaagcaaggattttgattttgttttggttttatagcttattttcaaagttaagaaacgcaagaaagggtgttaatatatttcattcaggaaaggtcctggttggtaaaatatgtaaaagtacaaacttctgaattcaccatcatttcctgatggatttgtaaaaatttttctccccagtctaatgtatttgtttgtatactaacttccacacagggctatggaacacacctgatgaat

SEQ ID NO: 778034 - DNA, 620 bp, Homo sapiens
ttgaacccgggaggtggaggtggcagtgaatggagatcaagcctttggactacagcctgggcaacagggtgagtgagattccatctcaaaaagaaagaaaaaaaaataatcagagtggcttctgacttcctgcttggaccctgagcatacagattgctaattttattttattttttattatctgttggtagaactaccatttatcccccttattctgagctcctttgaagtattaacaggtcaagacttygtaaagcatggtaccctttcaacagcatgaggcccagtatgctggtccaatatttgcaatgccttaagtatgattccccacatataatattcatgttttcatgtacaatctattttacatgacaataaacaatctattcttattctataccttttgttgattgcttatcgatattctttacaaacttgctttgtcttaatctatgggccagtgaaagaagagcagcgctatactggttctggaaattctacatcagtgcctaacatcatggaaatctgcctagtctattttaaggaggtagctcagtctggcatgaaaatacatttttccagtggtaggtggcagcgactagttaaccaagtttatgtct

SEQ ID NO: 778035 - DNA, 620 bp, Homo sapiens
ttgaacccgggaggtggaggtggcagtgaatggagatcaagcctttggactacagcctgggcaacagggtgagtgagattccatctcaaaaagaaagaaaaaaaaataatcagagtggcttctgacttcctgcttggaccctgagcatacagattgctaattttattttattttttattatctgttggtagaactaccatttatcccccttattctgagctcctttgaagtattaacaggtcaagactttgtaaagcatggtaccctttcaacagcatgaggcccagtatgctggtccaatatttgcaatgccttaagtatgattccccayatataatattcatgttttcatgtacaatctattttacatgacaataaacaatctattcttattctataccttttgttgattgcttatcgatattctttacaaacttgctttgtcttaatctatgggccagtgaaagaagagcagcgctatactggttctggaaattctacatcagtgcctaacatcatggaaatctgcctagtctattttaaggaggtagctcagtctggcatgaaaatacatttttccagtggtaggtggcagcgactagttaaccaagtttatgtct

SEQ ID NO: 778036 - DNA, 620 bp, Homo sapiens
tcaattttatgagacagcccttatctaagtgtggtctctgtccagcagcatcagtattatctggaaaattgttagaaatgcataatcacagaacccacaccaaacctgcacatttagaacctatggaggtcattaatctgttctagttaagccttaaaatgattttgatgtaccattgtggtaaggcaatgtaataaattattcamataaatgatttcattcattctcaaaatagtagggtaggttgatagaacaaaataaacaggtaagggtatgtagctgattatatatatatgtatatatatatatgcacatatataacattatatattaagttagttatataattagtgatagactagtgtcagagtgagattcaaaattctagacacaagttatattggttttctagcacatacactcaaactctaaaaccatttctgtaacttcaaagaaccatttttaatgtcaaacaaaaaaagcagcttttttataatgtattaatctctttataacatgttttaaaaattaatatattacagagaatattccaagtaattaaaaatcactgctatcttttaagtgttcatgaggaaaataaaaatgcccttctaattgct

SEQ ID NO: 778037 - DNA, 586 bp, Homo sapiens
ctttttcacaggcccacagctggccggtacagtggcagagaaggcgaggctgaggtggggctggggaagccagcaggggcctgatcatggagcgccttgagctgcatcccacaggtactgagaaagcatggagagctgtcccccagcccccagcatcttattagaaaatattgaaacataacagaaaacatgaagggttttatgttcatattttcattttagagagatcattctgcttgaaatataacacctactgagtactgctgaggacttascatgtgccgggttctgttcttagcatgtgacatgtattggcctatttgattctcctacataatcctggaagattggttgtgggagtgggtgatcatgacctgaacagcctaaccatgtttagggaacactctgtgttatgcgttccaccacacaattcatgtcacagctgaatgtcccagtttcccttgcagctaggacacaacgggagacccaagctttccaaacatatgccccaggcaacactttgatacacaaggaataacactggatgctgggtgtgcacagaattcaaattcaggaatggagggaa

SEQ ID NO: 778038 - DNA, 586 bp, Homo sapiens
ctttttcacaggcccacagctggccggtacagtggcagagaaggcgaggctgaggtggggctggggaagccagcaggggcctgatcatggagcgccttgagctgcatcccacaggtactgagaaagcatggagagctgtcccccagcccccagcatcttattagaaaatattgaaacataacagaaaacatgaagggttttatgttcatattttcattttagagagatcattctgcttgaaatataacacctactgagtactgctgaggacttaccatgtgccgggttctgttcttagcatgtgacatgtattggcctatttgattctcctacataatcctggaagattggttgtgggagtgggtgatcatgacctgaacagcctaaccatgtttagggaacactctgtgttatgcgttccaccacacaatycatgtcacagctgaatgtcccagtttcccttgcagctaggacacaacgggagacccaagctttccaaacatatgccccaggcaacactttgatacacaaggaataacactggatgctgggtgtgcacagaattcaaattcaggaatggagggaa

SEQ ID NO: 778039 - DNA, 632 bp, Homo sapiens
caaggacacacagcaaaatggtgttagagctaggaattgaatccaggtctttctaactattctctgctgaaatacatcagcccttgtggcttctgagatttaacattgtgactttgtgtattgaagcgaagcatcaatacaagggaccaccaaatctgtatgtcattgtaagcatttaatctgagaaaacttcctttccccccccttttaccctcaccccttttgctttttcctccccttccccttctctttcctcgcttcgtccttcccttccatctccctccttcctttctatccttgatcactcagtatggacactgacaagtcagaagggatcctgctgtggcactacaggagggggtctgggggtaccctggaagatctgggggaaggaaggggccagggacacccaaggatgctcagggtagtagctatttaccagttggtacaggaktgttacaacagtttaccaaccaccatggccctcccagagatactagtttgtgccaagcagtgcatccagagcgcaggggtccccaagccggtaggacccaggactttgcagggctgtgctgagaggggaaggcccaagcagcctcggcaaggcctcatctggtcgccgctgagggcca

SEQ ID NO: 778040 - DNA, 491 bp, Homo sapiens
gtttatttaatctgctttctggcaggtaagtatttggaaatagaaatttgtgaaggatagttttttaaaatgctgatattcaaattttattgtatcatcgcataaattgcaatagatcacacatgatttacccagaagggctcagcttggcttataataaataagtcacttaaaataacccactcattatatctcaaattataaccctctcatataaaaatattttaaataaagattaataatatatagtatgtgatatgataaatgatagtatctctttgggtctcttggcatattaatgagttacctcttcrttatttacacctggaggacaaaaggatggcactgttgctctgccaagagaagcagaatcccatccctggttatatattatgtcacagaacatttggtaatacacagagcactggtatatcagaaacatttcccaagcagatggagtacataattataatttttgtgagtaatgtctg

SEQ ID NO: 778041 - DNA, 667 bp, Homo sapiens
ggcaggcaaggatggcaaggactaggatccacttatgcatttccatgaccacctgcggggcacaaactgacagggttcctgcactcactgcaaaatagatactctggtagcaaagaacatcaagaccatctcttctgacctccagtctgggagagaagccgcttcgacaccatctgctgacagaagcatccagctttgttcaaacacttccaggaactgggagctcatcgccttccaggacagttcatcccatctctgggcagcttaatctatcagaaagctccttttcttattaagcaagaatcacatacacaacattcacactctaggttatgtaaacaggatatcctttagaagtgtacatttctattactgagggcttctaacacaataattaatccaaaaagctacgctttggaaagcaactataaacttaaaaagagccccaggaagagctccttcctacccaccttccactcttgaaaatacaaatgcastttttccatgaacatgttgtgacttcatggtcagagactggtgtcctgaaaaccgttctagagcaaaatgcaattgacggtgaaaagggcagaatctgctgggaggagactggtttgttgctaagttaacgtatgcagatagaaacagaccatcttccccagctgtctga

SEQ ID NO: 778042 - DNA, 621 bp, Homo sapiens
aagattatgatcccactatttgcaaaaaaataaaataaaataaaataaaaatacaaaattaaaaaaaaaaaaagaggcaaggtcacttttgtccccaagttataactctggtcttcctctgcttctcctcttttctcaggactctttcttatctcatccccaagttcagcttgttcagccctgcaagggctgatgggtgggggtcaggtgtggggcaggatcactgccctcctccattattttcacccaggcaaaaatgggtgaaatgagcctcaagggccgtgtcagagagaggtgtgaggggtggagacagagggagagtcaggaatggaccctcactgcactagaagcatgtggaggagagaggaccagcctccttctgagggaagaataataggagcactgtrtgtgtgtgcctgagttccaggtctggttggtactgcatgagagagtcatctcgttttcccacaaaaatagcttcaaaatcatccagacccttctttcttccctcttgatattggtctcagacctgtcactaaaatcctaaggctggctctgatcccaccatgagaagctttcagaaaagggtgcttttctcccggagctcaagggcttcagctc

SEQ ID NO: 778043 - DNA, 500 bp, Homo sapiens
aggccaggcctcaacaccctccaagcaccttccccaggccaggcctcaacacccccaagcaccttccccaggccaggcctcaacaccctccaagcaccttccccaggccaggcctcagcacccccatctgaaaatgagatgggatttctgagccccctttcagtgctgacagcccccggttytcccggaacaggaataagttggcaagcttgtcagagaaacaaaggaataacgcaacgcatcctattttctgtatagggcagggcagtggccacaccccaaacacaacaggaactgctgttttacttgggtctgggaccaagcaagagcttctcccagaatccaggctaagcccgctctctcccggagcagggggtgaaatccctcagaactactgtatgttggggagttggggtaggaggcgcagggaggcaagccctgactatgcaattaaggaaaacctataatttttattatacaagcatcgtacgtttattgca

SEQ ID NO: 778044 - DNA, 554 bp, Homo sapiens
tggagtttaaaaagtatctctaatgggaaagaaagaacgccacatcctgtaaatattttttgcaagataaggattgaagaaaaagaactacagaacacaagcagaaattaagttttcttgaaattaaaaataaaatttaataaacrcaatcccagcaccctaagccattcataattttgatttcagcatattcttccctttgtataatacatataaatatgtataagctatcaaaacataaaaatatatataactatacatataaaacagtacatacagtatatatacaatacatatgctgatatataagttttaagtatatgtagtataagttgcttgtgtttttttaccttcttaatgactgtataagattcatttagattgataacctaaataagttttcctatttaaaataaggcagacatgaacatatttgtatatatgctattcaatgctgttttaaagaaaatttgctagtgtaagagtctgaattaaagtttattaagaactttatagttcactccatgttgccatacagatttttttttaaaaaa

SEQ ID NO: 778045 - DNA, 623 bp, Homo sapiens
acactgtcctcatccccagacctcactgacatcatagtgacactggccatcagaagaaagtgactttacagaggggaaaagagtatcctggaagcgtaccggtggggcaggacacactaaggcaggactcacccagtttgtacattagacacagcctattaaatccattccagaaatgagttccacttcaactgaaaaaataaactgaagattgcccaatcactgccatttcacaaatttccagtttatggtcagccccaaaatcacattcttccaccctatgtattggaaatcaaatggcccaaagactgaggtgtcttcaggaagcacatgcttgaaaaatgttttctctgcaaaacagtattgagtaatacataaggagacatagcctactttagcccaaaacttcyttcacttgttatgtccttttacctcttaaaacatagaatgaaataaactcggatcttctttggagaagctagaagggcattttggcccaaaggctgtacaggaaaagagaggctctctccaggagactgcaaggcaaaggaacagaagcaggaggggcaggccctctggcaccaggtgggcctgctactctgatgaaatgtgctcccagctct

SEQ ID NO: 778046 - DNA, 563 bp, Homo sapiens
tgtccctagtgccaccaccatctatcagctggaatattgctatagctgccttacaggtttcccttctttcctgttctcttctagttttttgaattttagtcagcacgagattttaaaaactcaaataagattgtgttattcacctgcttaaaacctttcatgactttcagtgtcacgtagaacagaaaacacttttcttaccaaaggctagagagctctacgtgatctggctatttttaacgtttcattkcactcacccttttcctctataatcaaactactctgatctcaagggttagttcttgaaagatgatcatgttctttaatgactttaggtttttgtgtgttattttctatttctgggatgtttattctctgttccttacatgctggcccttttgcatccttcttcaggtctcagcttacatgttaccttcaagaagcctttgaccactctaagtgggcccttccttccacttctgctgtgtaatcccactcccttctcccacttgttaattagttacatacttttttgtaattgtttatttggttgctgtctccct

SEQ ID NO: 778047 - DNA, 547 bp, Homo sapiens
tatgagagtcaaacaacccatgtagcttgatgcccagtctgccttttgattcttttgtctggatttgtcagagagaattggttgctgggtagtgattattgagggccagtgtgctgtgtagcaaagaaacacccaatgggtggtggtgtgaatggattggattatatagcatgggtagtccaggctccagaaatggatttataatcagagttgaaatccagctctaccactctatttgcatgaccttgggcagattacttaacatttcttaagtcgcagttaactttgtaaaagtgagagtttgtgaaggacagtgcagggtagtgggttaagggctggrgctctgtggccagactgcctcggttagaatcctggttcttctaatttaccagagcttgttattttcaacattctgttgtcaatctgtaaaatgaggatgatagtaatagtggcctactttgtagagttgttgttaggattaaataaattattacctgtaaagtgcttagcatgatgtctgtacataatgagtgctcagtaattgtta

SEQ ID NO: 778048 - DNA, 596 bp, Homo sapiens
gtttaagggaagcagagcataaaagttcagaaaacttgcagcctgatgatgcaatagaaaagaaaaacccattttctgaggagacattcaagccagctgtagaaatttgcttaagtaacgaggagccaaatgttaattgccaagaaaatagggaaaatgtctccagggcatgtcagaggtcttcatggcagcccctcctatcacacgcccagaggcctaggaggaaaaaatggcttgctgggctgggcccagggccttgctgctttgtgaagtcttgggacttggtgtcctgggtcctagctgtggctaaaagggaccaaggtacagtttgggtcctggcttcagagggtgcaaaccccaagcattgacagcttccacgtggtgttgagctgcaagrtgcacagaagtccagaactgaggtttgggaatcttcatttagaattcagagaatgtatggaaatgcctggatgtccagacagaagtttgctgcgggggtgaagccctcagggagaacctttgctagggcagtgtggaagggaaatacagtgttggagcccccacacagagtccctactggggactgcctagtggagctg

SEQ ID NO: 778049 - DNA, 587 bp, Homo sapiens
gttttctcatcaataaaaggaattaaaatagcaccataggtctccatgagcctaaaggttagtaaaaggaccctggagccagctcagatttcaggatctgagctgacacaaccctgctcctggaatggtttctcaggtgcaatgtgcccaggcagccatgaatatatcctatgaggtgtttatagtgaagagtaccaattggtatcatctgtaaagaaaggcattaattcattcactcatttgtttaggtactccttgtttcagaaaggatgaatgccagtttatgaatatatgtgaaataaaaacagaataacaagcagataagcatgtggatcagaaagaggaaagcaaaagccagggcagtgatttcagagctagaagcaggtctaaaatgarcatctggtaccatacaggttgacgtaagactaggtgtgtgtgtgcgtgtgtgtgtgtgtgcatgtatatgtatgtattggacctgtgtgatatgtcactaagcctcaagtcacaaaatcacacatattaagatatacttatcatgatagatttatgataagttagtcattagatattctaccaccagaatt

SEQ ID NO: 778050 - DNA, 575 bp, Homo sapiens
aacaaatatgttactggcttatacattcactataccacccttttaatcattactttagagtatactccttctacttattcaaaaaacaaaaacaacaaaaaaaaggtaactgtaaaacagccccagacaggtccttcaggargtattccatgagaaggcattgttgtcataggaggtgactgctccatgcctgttaattcccctgaagaccttccagtgggacaggaggtggaggtagaagacagtgacattgatcatcctgactctctggaggcctcagctaatgtatgtggtgtgtgttcatttttaacaaaaaagttttaaaaataagaaatgtttgaaatcgtaaaagcttataagaataaggatatgaaagaaaatatgtacagctatatgtgtttgtgttttaagctaagtatgagtacaagagttaaaaagtttaaaaatttttaagtttataaagtaaaagttacagtaagctaaggctaatttactattgaagaaaaatattttataaatttagcatagcctaagtgtgcagtgtttgtaaagcctgcggtgttctacagtaatgc

SEQ ID NO: 778051 - DNA, 603 bp, Homo sapiens
tgcctgttttaaaaaagaacattaagtttggccttattccattttgttcagaagataatctggatcctactgttttttataaattggtgagtgttttactatttcatgacaaaactctaaaacaaagccataagatttattataagtatgatatctgtgtagatatgcttatcttatatatatatactatgttgtatgctgtgtctacataataaaatctcatatagtcagccagaaatccctaaaaaaattattctgattagtttaagtaaacaagtgctcatataaaatatgtagtaattaacccaaatgttttttcagttcttgtgacttaagtaaatctttgataaattaattgtttttaaaattgttgatacaagctggctgtggtagcacatgcctgtaatcctarcactttgggaggctgaggttggagggtatcctgaggccagaagttcaaggccagcctgaacaacacagtgagacccaactctaaaaaaattaaaaaaaaaaaaattagccaagtgtggtagcacacacctgtagtcctagctaattggggtggctgaggcaggaggactgcttgagcccaggagttcaggg

SEQ ID NO: 778052 - DNA, 616 bp, Homo sapiens; identical to SEQ ID NO: 741571

SEQ ID NO: 778053 - DNA, 616 bp, Homo sapiens; identical to SEQ ID NO: 741572

SEQ ID NO: 778054 - DNA, 460 bp, Homo sapiens
aatagaacaatattcctcccgtaattatctattaaagatcagtaaaatttcccctacttcctcaaagtgtcaaatcagtcatactttcagtttcatgaaagtgatctttaaaaaaggatagaggccgggtgtggtggctccagcctgtaaccctagcactttgggaggctgaggcaggtggattgcctgagctcaagcgttcragaccagcctgggcaacatgacgaaaccccatctctactaaaaatacaaaaaattagccgggcatagtggtgcatgcctgtagtcccagccattctggaggctgaggcacaagaattgcttgagcccgggagacagaggttgcagtgagccgagatcacactattgcactccagcctgggcaacagagtaagaccctgtctcaaaaaaaaaaaaaaaaaaaagcatagagacaagcccatctgtgccctcccactgg

SEQ ID NO: 778055 - DNA, 626 bp, Homo sapiens
aagacaaataaatgcccttttctgaagaatctaaattttcttacttgggatctgattatgaaattccaattataaataaactcccaaccccttacccaaaaaaggaatgtctccaagtttagactgaggtaggataaatactcmacattctattccaaataccaagaacaaggtaggtattttccctgctgcttccttaccctgaaatttgacgttcattttaatgatgcttactttattacttgtcagaaaagtgaaatggcctgtcaattttatggagtttctcctacctttcaaatgattatattacattttgaaataagtgtatagctcccacctcctttttttaacctaaatggttcatgtgtgggtttggtacttggctacgagtggaatgaaatcataatttcaggagtccaaaagaatagatcaaaatcatgccaacactttcatggatggatatatgctgctaaatggatgtttacctagaaaagtcatcatctggcatgcaacagagtgaatgtttctaagcagctaactcatgtatactaaacaaatttggcttggctgctgtgagagctgccctttggaaattctcaacatacatttgtttgattgagccgtca

SEQ ID NO: 778056 - DNA, 494 bp, Homo sapiens
ttacatgtaaatcttaatccatcttgagttaatttttgtatagggtataaggaagaggtccagtttcagttttctgcatatggcttgccagttttcccaacaccgtttattaaatagggaatcctttccccatttcttgtttttatcaggtttgtcaaagatcagatggttgtagatgtgtggtgttatttctgaggtgtctgttctgttctattggtctactttatccgttytggcaccagtaccatgctgttttggttactgtagccttatagtatagtttgaagtcaggcagcgtgacacctccagctttgttctttttgcttagcattgtcttggctatatgggctctttttggttccacatgaaatttaaagtagttttttctaattctgtgaagaaagtcaatggtagctggatgggataacattgaatctataaattactttgagcagtatggccaatttcatgatattgattcttcctatccatta

SEQ ID NO: 778057 - DNA, 602 bp, Homo sapiens
tagatcccaggaaaagacacaggctgtggcttcagagtgggtttgaatcccagtgctatcacttattatctttgcattagttattctctgagcattctgagcctcagtgtcttcctctgtaatgacatacacagtggatcaggtttttccatgaatagaatataaagtgttgggtacattggaacttaaatagttatgtccctggcaggatgcttactctatgcaaaaggactttcatggtacatatttatagaaatctagacacaaacatttttgctttcatatgcaatgttggattctattttttaaaagcacatgatatcccaacatatagtgagtattttaggtagcgtctaaatactgataccataacaaataggctccatttcatacttgcactttctcttaarttgatgtggcagtaattggcaacttgtgtagctagcaatagatggaaaggtaggaaataagtcattggtagtgactttgagcgcttgtgatttttttttgcctcaatactgcataacaatctttgttaggagtatagataattccagtaatgatatatgatctggaagcactttttgagagatcataagatc

SEQ ID NO: 778058 - DNA, 638 bp, Homo sapiens
ttggtgaaggcccggtcagcaacacagtggcattcagtactgaatcaggtaattacatcaacagtaattcccaaaaaggatgtaaaagggccacagtggagcaatgttttgcgtaggaagtttgtttgaaacccactacatgtactgtttcttgaatttctaaaaacccatttgtgggaaaaagcaaaytgatgaaggtttagagaaacaccatgcatatttttcctcacttaaagacacatcagtttaatttaaaaagcataatgaatctatactcttccaaaaagctagtcaatgaatcctctcctgcatgtctagaatgaaaataccagtgagtacatccacaaagggaacccatgatagtttaataacagctgtcaaacttcccaattagaccttacaatctccaattccttaatgagatacatctgcacatacagcattaatatttgcataatttttataccaactgtagttcatggcatcttggtgatttttaccatgaagtttttctatcaaactaaaagcagcagcttttgaaattcaagtgaaagctggaacagcgacaaatgttcctaagtactcaaattacatgtaacagatacagctgaatacctaccaggcaggagattattcaa

SEQ ID NO: 778059 - DNA, 638 bp, Homo sapiens
ttggtgaaggcccggtcagcaacacagtggcattcagtactgaatcaggtaattacatcaacagtaattcccaaaaaggatgtaaaagggccacagtggagcaatgttttgcgtaggaagtttgtttgaaacccactacatgtactgtttcttgaatttctaaaaacccatttgtgggaaaaagcaaactgatgaaggtttagagaaacaccatgcatatttttcctcacttaaagacacatcagtttaatttaaaaagcataatgaatctatactcttccaaaaagctagtcaatgaatcctcycctgcatgtctagaatgaaaataccagtgagtacatccacaaagggaacccatgatagtttaataacagctgtcaaacttcccaattagaccttacaatctccaattccttaatgagatacatctgcacatacagcattaatatttgcataatttttataccaactgtagttcatggcatcttggtgatttttaccatgaagtttttctatcaaactaaaagcagcagcttttgaaattcaagtgaaagctggaacagcgacaaatgttcctaagtactcaaattacatgtaacagatacagctgaatacctaccaggcaggagattattcaa

SEQ ID NO: 778060 - DNA, 638 bp, Homo sapiens
ttggtgaaggcccggtcagcaacacagtggcattcagtactgaatcaggtaattacatcaacagtaattcccaaaaaggatgtaaaagggccacagtggagcaatgttttgcgtaggaagtttgtttgaaacccactacatgtactgtttcttgaatttctaaaaacccatttgtgggaaaaagcaaactgatgaaggtttagagaaacaccatgcatatttttcctcacttaaagacacatcagtttaatttaaaaagcataatgaatctatactcttccaaaaagctagtcaatgaatcctctcctgcatgtctaraatgaaaataccagtgagtacatccacaaagggaacccatgatagtttaataacagctgtcaaacttcccaattagaccttacaatctccaattccttaatgagatacatctgcacatacagcattaatatttgcataatttttataccaactgtagttcatggcatcttggtgatttttaccatgaagtttttctatcaaactaaaagcagcagcttttgaaattcaagtgaaagctggaacagcgacaaatgttcctaagtactcaaattacatgtaacagatacagctgaatacctaccaggcaggagattattcaa

SEQ ID NO: 778061 - DNA, 587 bp, Homo sapiens
tggtaggctttaatgtggagtcagccaaatacaatttgttcagctttattcctctggtatcctaaaaatttcccgtaagtttagtcaatgactgaaaattgtcccatgccccataagatagaaattttttctactgccaaatgtcacatacatggatagataatgactaaatataaatctaattattttmcctgttatttagtagtaagtaaaattaaacctgttttttgaatgagtttgtagaggaaaataaaaccccacatgtaattccagatggtataattagttacatgactctagttttttattttgctattttatatacaacttctttatctcatttgtaccatcctcttctgttattttttttgatagaaaccagttttttttttcagaactggataagattaatttttaataaaaactatgtaatcttgaataaaatacactgtaatgttattcttttggtttatttctaatccaaatagactattatactgatattaaacattttcattaaaaaacataagcagaaaaataaaatctgaatctttagaactttattaaaatggtgataaatggaacac

SEQ ID NO: 778062 - DNA, 614 bp, Homo sapiens
caagtcaatcaactgaaaacattttataagtacagtgttcccttcttttccaatgaaaaactaaaaaatgttttaatgtgtttcttcaggcatctcactgaggtaggaaatgcagcacttggaaagagaagcacattttcattttaagcagatgtctgtcttaataagtgaccctggttagaattatcaacaytctgctgaattattacccagaattgttaatagtctacagcgcaggactttatttttttaaaagcaagaacctaaacactccttgctattgctggtgtttagataagacatctgttgataaaatcatatcattgagaagacaaagaaataacgaggagctaattttatgtatcagaagaaccaagtagctagtgatgtatttgagaacaaaagatattccttctcatcaaatataagttgttacaattttcggttctttggctcttacaaatgtgcagtaatttttaaaaactaaagtaggatgagctttttttggtctctttgggagtcttattttttttcattgctggataagtgaggagtataattttaatacgttaaattttaattgttacatcatattggatgtgattttttgtggc

SEQ ID NO: 778063 - DNA, 629 bp, Homo sapiens
aggtacaataagtctgatgtttcaatgttgtaggcaaaggtaatgtgctgtggaaatataccatgatcaacatccctgttgactaattcattatagagaatcagaaagttaacatagacatgaataagattgtgaaaaaatactgttgactctttcacataaaagaaaattgattctgataatcctggcttattggtacttaaaaatcaatttttatctcaatagtttcatatcagtttgctaaaawgctttgctgattcactccagtaaagtgtccgtgtttggcaaagcagttccaattcaggtgactacctgacctgttaagatattccaatatcattctccaagaactatctattgttttcagtggtaaaacagaaaagttaaatgaagatgtgaaagaatagcggctgtcttagtttcctagggctgctgtaaccaaatacccccaaacttgtctaaaactggaaatttattgtcttagagtttttgaggctagaagtccaaaataaatgtgttggcagggccattctttctctgaaacctgtaggagagaagattccttgcctcttcctagcttctggtggtggccgtgaattcttggctttccttggttgcaggtgcaccac

SEQ ID NO: 778064 - DNA, 612 bp, Homo sapiens
tgccttaggcagcacagggtttatctcctcagacaaaggtggaaaggctgatggcagcatgagtcgggttgtagaggggatgttgccactactggggatggggaagctgttactcctggcaaaaaagtttcaccagaatttacaaactcagtgtccccagcttcatcagtgtcctcccatacatccccattccacgttgcagggtcccgttcttttccaactgatgccctcactttaacagtagacacctggygaggctgtgcatgtacctttgtcattgcaagtcagccacttgcacgataaaagcttgtgtctgtttttccacaatttcagctgtttctctacaggagataagactgtcattcaggacaatcttagcagatttgaggtttagtatctgcttctgaagccaagagttagaatccctgagcttaccattttcttccatcactttttccactgaactgagaagcaaccagccagcttaattatgttccttggttctctatatatggacaaaggtattacagatagagtcactaaactccttgcctctcaagagtggtgagtcaggagtgtcaaatgcatttatttggcataactctctaaaca

SEQ ID NO: 778065 - DNA, 612 bp, Homo sapiens
tgccttaggcagcacagggtttatctcctcagacaaaggtggaaaggctgatggcagcatgagtcgggttgtagaggggatgttgccactactggggatggggaagctgttactcctggcaaaaaagtttcaccagaatttacaaactcagtgtccccagcttcatcagtgtcctcccatacatccccattccacgttgcagggtcccgttcttttccaactgatgccctcactttaacagtagacacctggtgaggctgtgcatgtacctttgtcattgcaagtcagccacttgcacgataaaagcttgtgtctgtttttccacaatttcagcygtttctctacaggagataagactgtcattcaggacaatcttagcagatttgaggtttagtatctgcttctgaagccaagagttagaatccctgagcttaccattttcttccatcactttttccactgaactgagaagcaaccagccagcttaattatgttccttggttctctatatatggacaaaggtattacagatagagtcactaaactccttgcctctcaagagtggtgagtcaggagtgtcaaatgcatttatttggcataactctctaaaca

SEQ ID NO: 778066 - DNA, 523 bp, Homo sapiens
ctccttacaaataaactaaatattgcaagtaacaaaaattaattttggtttctctccaccacaaatcaatatctggctagacagtagcatttcttagaataattgagtggaagagactgagagtctgctgattattttctgaaaatytctatgcagaaaacttctaagtcacattttagaatcaatttggaaaagtttcacatttcaactttgggctcctctatagcacagataaaatatttgggggataatttttagaaaaaggaaactggagattaaagggaagtaatatagaaggcagagtaaaaagagctgtttgtgcaacacatgcttgcaaaaaataaaattagtaaacaaggggcaaatagtgccaaagccttagactggcacttctgcatttagtggggaaaagaaataagaagtagatgtaaaggttattaacacagtgtagtgattgctgtaatatttatgtttctggctttctaccttctgagcactttgggatccctttatggatgggtga

SEQ ID NO: 778067 - DNA, 608 bp, Homo sapiens
gggtagaacacaaggtcaggagttcgagaccagcatggccaatatggtgaaaccctgtctctactaaaaatacaaaaattagccaggtgtggtggcgggcgcctgtagtcccagctactcgggaggctgaggcaggagaatcgcttgaacccaggaggtggagattgcagtgagctgagatcacgccactgcactctagcctagtgacagagcgagactctgtctaaaaacaaaaaagaaaaaacaaacaaaaatatatatatatacatatgtctcttctgtcttcagggtgctcccaatctactggaagaaacagacacatacatccgaaattctgaagaaagcagacaggtttgaattgaggaaggtacaaagtgatgcttttatttcctttttgtcctccctgtgtgtgtgtgtstgtgtgtgtgtgtgcgcgcacgcgcgtgtgtgtgttcattgattaatgttcccagggacgttattcactgtaaactgattcaactgaattaagcaaagtgtgggtatcaatgagggctgaagaaatttagaaagtttacaagagtgcccagattcctaagacaaagtttcttctgaaagaaactataaag

SEQ ID NO: 778068 - DNA, 609 bp, Homo sapiens
tgaggctgggggaggggcgcctgccattgcccagttagttgtttgattaggtaaacaaagcggccaggaagcttgaactcggtggagcccaccacagctcaaggaggcctgcctgcctctgtaggctccacctctgggggcagggcacagacaaacaaaaagacagcagtaacctctgcagacttacatgtccctctctgacagctttgaagagagtagaggttctcccagcatgcagcttgagatctgagaatgggcagactgcctcctcaagtgggtccctgacccgcaagtagcctaactgggaggcaccccccagtaggggcagacggacacctcacacggccgggtactcctctgagacaaaacttccagaggaaygatcgggcagcagcatttgcggttcaccaatatccgctgttctgcagccaccgctgctgatacttagacaaacagggactggagtgtacctctagcaaactccaacagacctgcagctgagggtcctgtctgttagaaggaaaactaacaaacagacaggacatccacaccaaaaacccacctgtatgtcaccatcatcaaagaccaaaggtacataaaaccacaaag

SEQ ID NO: 778069 - DNA, 601 bp, Homo sapiens
tgcttcttgtaagtagacatatatgctagtgattatagccttaaaacttggcatcataggtttaatgctctgagtctcagccttgggacggtcagttagttttatttatttatttatttatttatttattttgatacagagtctcactctgtcacccaggctggagtgcagtggcgggatcttggctcactgcaacctccacctcccaggttcaagcgattctcctgcctcagcctcctgagtagctgggactacaggcacccaccaccacgcctggytaatttttttgtattttcggtagagatggggtttcactatattggccaggttggtctcaaactcctgaccttgtgatccacccgccttggcctcccaaagtgctgggattacaggcatgatccaccgcgcccggccagttagttttattcttatctgaccccacagttggtaatttcttcctcttttcagccaggccataggcaagtattagtattatataacattgcttaaggtagttacaaagaagtcacgtgtctcagaattttggacttgcaagagaattagagttaatacattcaagttcctttctattgtttgaatc

SEQ ID NO: 778070 - DNA, 624 bp, Homo sapiens
agtttctgtttgttgtttgtatcccctcaacttgaatgtaagctttataaaggaaagcatctttattttgttcactggtggatcccaagccgctagaaggatgattggccactgttgggtgttacaaatgtatatatttattgaataccttgaatggaaagtaattttatatacatatatatatatatatatatatwttttttttttttttgagacagagtctcgctctgtcgcccaggctggagtgcagtggcgcgatcttggctcactgcaacttccacctccgtggttcaagcaattcccctgtctcagcctcccaagtagctgggattgggattacaggcacacaccaccatgcccagctaattcttttgtgttttcagtagagacagggtttcaccatgttggccagacttgtctccaactcctgacctcaggcaatctgcccacctcggcccctcaaagtgctgggattacaggcgtgagccacagcgccaggcctatataaatatattagtggtaattatattagataatttttactgagcatttactatgtgccaagtggtgcacatgtatcatatcatccaacactcccaatgaacttatgaagcaggtataatt

SEQ ID NO: 778071 - DNA, 624 bp, Homo sapiens
agtttctgtttgttgtttgtatcccctcaacttgaatgtaagctttataaaggaaagcatctttattttgttcactggtggatcccaagccgctagaaggatgattggccactgttgggtgttacaaatgtatatatttattgaataccttgaatggaaagtaattttatatacatatatatatatatatatatattttttttttttttttgagacagagtctcgctctgtcrcccaggctggagtgcagtggcgcgatcttggctcactgcaacttccacctccgtggttcaagcaattcccctgtctcagcctcccaagtagctgggattgggattacaggcacacaccaccatgcccagctaattcttttgtgttttcagtagagacagggtttcaccatgttggccagacttgtctccaactcctgacctcaggcaatctgcccacctcggcccctcaaagtgctgggattacaggcgtgagccacagcgccaggcctatataaatatattagtggtaattatattagataatttttactgagcatttactatgtgccaagtggtgcacatgtatcatatcatccaacactcccaatgaacttatgaagcaggtataatt

SEQ ID NO: 778072 - DNA, 615 bp, Homo sapiens
acaatgtcaggaaattcttgaagaagaagaataaagaagcataaggaaatggaaagtgatggggatgctcttttttaaattctttttaaaaaattccatctttattggggtataattgaacaataaaaaatgcatatatatttataatataaaattacaattgcataaaattgtataatttatatwtacataattatatttgtatatattgcatatattttattatttattaatttaatttatttatttgagacagagtcttgctctatcacccaggctggagtgcagtgttgttgtctcggctcactgcaacctacgcctcccgggttcaagcaattttcctgcctcagcctcccaagtagctgggaatacaggtgcgtgccaccacactcggctaatttttgtacttttagtagagacaggatttcgccatgttggccaggctggtctcgaactcctgacctcatgatctgcccacctcggcctcccaaagttctgggattacaggtgtaagtcactgcacctgacctattgcatatattttatataacacatatatatttatattataaaattataaatacaatgtaattatttaataaatgcatacatcat

SEQ ID NO: 778073 - DNA, 619 bp, Homo sapiens
tgactttccttcagaaaagaactaaaattagcatttacttaccatactaaatcagaattttaattggtgtgagtacaagtctcatttaccagacatgtggcaaaacgactttagcagaggtaccaacttagtgtgagacaggaagttttcaggtttacattgaaaagaggcttcatcgtagtcactgaggtgtagttgcaaagaaatttaaatgtatttgagtcaaggtgtgactgctcttaactagctatgtgaccttggggaaatctctgaacctctttgtgctttagtttcctcttcttgggacctaarggtagtaatgtgtccctgagctgctataaatatttaacagtcttataaaaatcttaaatttagctgtacaaactagctgtatgacttttagcaagctacttaacctctgtgtgcctcaatgtcttaatctgaaagtgggtatgataataatgcatgactatgggcttcttataaggattaaatgacataatgaccacaacacttagaacagtgcctgctacatggaaattattgagcaataaatgttaactattgttttatagttattatcagcatcattattatggtgaaatggaaaaacagtggt

SEQ ID NO: 778074 - DNA, 612 bp, Homo sapiens
tgaagaaaagaattgattttggctttgaaatgtttcataagcatgacacagtcagcacaaaggcacaaaaaggtaatagatccctaagcacaaaggcacaaaaaggtaatagatccctaaacacagacagtctcaaacacccaagtgtgaccagactaaaatcattmccgtgatacagttacaaatgagtatgtgccaggcactggggttttcttgaagttctataaacaaaacgcagagtaaaggcagagccaaatataatgttagtggggtaaactcacatgatacctaagacaaaaccaatccagatctgtacaaagaagaaatacaccagaaatagatggagggaaagcaacagttctatcaccatttttagatttttctatctgaaaatcacctcagagatcaagaaagaagcctgggaaccaaatgtccatgagatgtctctactgaacaacttattttggttagtttcattgggtaaatctttacgggaatcttaacaggtccttcagaaactataaaacaaacaaacagataaataaataaacaagcaagccaacaggggaattcgtaaacaatttagatcaatgagtgaagattatcttaact

SEQ ID NO: 778075 - DNA, 668 bp, Homo sapiens
tcttaatcagaggaagatgattgagaccctactggccagatttcattagccctctcaatgttttaaatttttgttgagctacaacttacataaaataaagcgcgcaaatcttaagtatatacattgatccgtttttacaaacgtgtacacctatctaaccaccaccccatcaagataaaaaacacttcagcaacatagacagctctcatcatttccccygcctcccagtcagcagcacctttgcccccaacttcttctattacaattattttgcctgttcttatataaatgggctcatagtgtatattcttttatttatatctaactttatttgtccaacgttttgtctgaaagattcatttacattcttgtgtgtaccggtagttcaaaaattgctttgtagtactccatgacaggactacatatgtgtatgtacccaacctattcttgaggaacatttaggctgttcccagtagttggatattatgactgaagctgatatgaacattttttggttgacataaacactggggaggaagcccagaagtagaaataattgtagaatgggaagacttttagctttaggtggatactgcctagcagttttccagaatggtcccaatttatacatccgtcaagactgtatgagagttcagtcactctgtgct

SEQ ID NO: 778076 - DNA, 498 bp, Homo sapiens
gttcaacaaaccaagtaagataaatattaagaagaccatgattagaaatactacagtcaaattgataaaaactaaaggtaaagagaaatcttgaaagtattcagaggaaaaaacaacacattacatacaggggaacaatgatacaaattattgctactgacctcttatcaaaaataatggaaatcagaagacagtggaatgaaattcttaacatggtgaaagaaaacaaaaggtcaacctagaattttatacccagcaaaaacatccctcaaaaatgaaagtaaaataaggacatttttgagacaaaggaaaagtaaacaaatatcaacagaagacttgcattmcaataaatactaaagaaagttcttcaggctgaaaaggaatgacaacagatgaaagcatggctctttaggaggaaatgaagactaatagaaagtaaataaatgggtaagtatcaaaaactgcttatttcccttaatttatttaaaacacatataa

SEQ ID NO: 778077 - DNA, 503 bp, Homo sapiens
acccttgtcatcatgaactgtctccaatagtagtctttattttgaagtctactttatctgacattggtatggtttcaccatgtttctttttgttagtgcatgcatgatctttttttctctgcctttactttgaacacttctttagtttaatacttaagatgttcattttgaaagctgcttgtagattgttgccttcagttggacaatctttcaattgtattatttartccatttatatttattaattactgatatatttggatttaattctaccatcttattctttgttttctatttgtccaatccattttttcgttttttctgctttcttaccttctttggactaattttatttcattttcttctctattaggtgactagtttatattattttaattacaccttcagtgacttacctagaatttgttgcatggtcttgacttacatataagtctaacataaattactacttttattacattttttttttcccgtagctttga

SEQ ID NO: 778078 - DNA, 624 bp, Homo sapiens
aacttattagccaattaagaaacttgacaaattgtttttttaagtcagtaattcattttatgtagagatgttgcagggacttttcttattctgtagatattgaaagcatttatctggtataataggacatcttgctrtccatttattgcttatatattgggtgttctagagtgccacattttttatcaaatgtttctttgcttataatagatctccatattggctttggtactctagagacttctagagtgatttatcagaaatatacttatttaaggaatgagggacaaataacatcttaaattttaatatagtttctttggctttttgtttgtttggtctgggtaggaaatctctttactctgaacttgtactttcttcttgaggaccattcaaatttgtaagtaaagttagttaataaagtaaatggagttgttcatatgtccaggatgtgagttttattcaaaattgtgtaaaatcaattcttatgacaactaagaagttagcagcttagtttatttcaatctgtgcttggtttcatggttgtttttaacagcctttaataatttttttcctctctttgtttttgcatttactatttttttcacacgtattttcttcaga

SEQ ID NO: 778079 - DNA, 537 bp, Homo sapiens
gcttcccttccctctttccccccgtaggagcacatcctcaaatcacaggcatgggaatctcagtcggagactccttctaggggatgggacctagggtgctctcctttgacctttgagttgtcctaactccatccctattctgtttttgttttgttttgcttttttcctatttgtgagcccatttaagtaaagactttcaatttttctctcagtcatctgtcctccataagcactaatccctacagggaaaataatgtcttacatctaattcaagtcctttcagttgcagcattagcccactttttctcagaagaaaaaccaagcagtcttttatctctgacgcaatttrcagaagactagaaatggccatcctttctccttctggttttctatgtaccagaatgtaagctggaagatggcaggacctcttctcatttactgctgtactcctagcatggagaacagcttctgctgtagagtaggtagggcctctgcacagttcatgaacgaagtgggtgggaatatgccaacacaggg

SEQ ID NO: 778080 - DNA, 619 bp, Homo sapiens
aaaataaaaaagaaaggaaaagaaaatcttatggaatataattggatatagaaattgaaaccttgagggaagggcaggacgttatttaaaatcacaaaacaaataaggactgtaacatcaatttctttacttgaagttgagggatataccactgggccagaagaaaataaggcatgctttaggaggcattccagcatcagatgggccctcctcccctgacttgctctaggtattcagatttcaaaaggaagaaagaggtgcttggaaattggtccagtgagtgaattgtagatgttagaatgtaaagctgccacctaagtttactcctaggtcagcaatagcccatgaggagatgaggcagaggaaaataggcaagaagagartagaggatgctgagattcaaacattttgcaagaatctgaagtagctgaggttttcataaattgaactctgttttctcagaataagaatgaataggggccagaattcatttagtgagctggaaccaacttatcattagattcctgctttgctctctaagtatctcagctccactttcagaaaagtcctgactccaggtaggcaaaacacatttttcttctttggttgtttggtaggg

SEQ ID NO: 778081 - DNA, 574 bp, Homo sapiens
cctggccaacatggtgaaactcggtctctaataaaaataaaaaaaactagttgggtgtggtggcgcgcgcctgtagtcccagctactcaggaggctgaggcagcagaatcgcctaaacccgggaggtggaggttgccrtgagccgagattgcaccactgcactccagcctggcgacagagcaagactctgtctccaaaaaagacagaaaaaaaaaaaaaagaaacaccttggacaggaaacatgtctatgggaggaagtaaggccagatgcttgcaaaataggggggaaagtgagaccgggagggaacacttccaaaagttacccccatggggtctgaatttggggcctgggaaggaatttgggtgcatttagatccaccactgatagtctctattttggcaccctgttttgttcccgtatagcacttaccactgttctaactaaacaattaatttcattatgggttgtgcaaagtctatgattctcatgcgggaccccaggtgtgttttttgttcatgtagcacaaagctcattgcctaagtagtaggtaggattggtagataaaatacaaga

SEQ ID NO: 778082 - DNA, 624 bp, Homo sapiens
gggctcaagaaaaaagtcatttcttctgggagagggatggaagcaaagctcatctgcttctgggaaacaataagcttcccccctacccgccctgcttctatggttataatacacagatttagcccatcttgcctcaggatgatgaagaagatgcataatatcaatataaggaacgaaagcagaacaattgctacagccctgcagccattgggaagataataaagtaacattataacaactttatgccaatatatttcatgagctatgcgaaatgcacaaattgcttgaaacatcaaagctattaaagttcackcaagaaggaacagacaaccgaaatatcctatatctattaatgaaattgaattagtagtaaagagccttagcagaaacagaactccaaatcagatgacttcactggagaattcaaccaaatatttgatgactaaataatatcaaatatagataacttcatccagaaaagaatttaaaaaggctcaacacatgacagttaattttgtgagacacccaaaccaaaccaaacagccagtggaacattacaaggaaaggattctacaggtcagtgtatctcataagcataggtccaaaaataattaataaaatata

SEQ ID NO: 778083 - DNA, 587 bp, Homo sapiens
tctttttacagcaattttccagattattcaaagtatcaggatgggcatgtgaagtgactgaccttaagatgtttccattctcctgtgaattttaacttgaactcattcctgatgtttgataccctggttgaaaacaattcagtaaagcatcctgcctcaraatgactttcctatcatgcttcatgtgtcattccaaggtttcttcatgagtcattccaagttttctagtccataccacagtgccttgcaaaaaacaccacatgaataaagcaataaaatttgattgttaagatacagtagtggaccctacttattcagtcaattaagagtaagtttttttatgtggttattaaaacagtatgaacaattagtctaactctgcatagacagggtctagattttgttaacccaaatgtataactgcagttagcttaaattacaatttgaagtcttgtggtttttatatagctaggcactttattactcttttgaactgaaagcacactcccttataggttcatgtaactgtcctgtaataaggtgcttataaatggaacaactacacagcctagttttgccacaacctt

SEQ ID NO: 778084 - DNA, 576 bp, Homo sapiens
ctgttttaatactcttacctatttctatcccctatatataatttgaaactattatgtctttgtaatacatcctaatatctgatacaaatctttgttatttctcaagtttgataggtactggtattttgtgtgtgtgtgtgtgtgtgtgtgwgagacagagttttgctctttttgtccaggctggagtgcaatggcgcaatctcggctcacttcaacctccacctcctggtttcaagtgattctcctgcctcagcctcccaagtagctgagattacaggcacccgccaccacacccggctaattttttgtatttttagtagagagggggttttgccatgttggccaggatagtctcgatctcttgacctcgtgatgcacctgcctcggcctcccaacgtgctgggattacaggcgtgagccaccacgcccggccaggtactggtttttcttcaggtgagttttaagatactatctatctaaaaaatataaaatcctgatgagactttgatggaattaaagttatagattaaaaattaatgaagttttttgttggcatcgcttcctctgggacatctt

SEQ ID NO: 778085 - DNA, 576 bp, Homo sapiens
ctgttttaatactcttacctatttctatcccctatatataatttgaaactattatgtctttgtaatacatcctaatatctgatacaaatctttgttatttctcaagtttgataggtactggtattttgtgtgtgtgtgtgtgtgtgtgtgagagacagagttttgctctttttgtccaggctggagtgcaatggcrcaatctcggctcacttcaacctccacctcctggtttcaagtgattctcctgcctcagcctcccaagtagctgagattacaggcacccgccaccacacccggctaattttttgtatttttagtagagagggggttttgccatgttggccaggatagtctcgatctcttgacctcgtgatgcacctgcctcggcctcccaacgtgctgggattacaggcgtgagccaccacgcccggccaggtactggtttttcttcaggtgagttttaagatactatctatctaaaaaatataaaatcctgatgagactttgatggaattaaagttatagattaaaaattaatgaagttttttgttggcatcgcttcctctgggacatctt

SEQ ID NO: 778086 - DNA, 576 bp, Homo sapiens
ctgttttaatactcttacctatttctatcccctatatataatttgaaactattatgtctttgtaatacatcctaatatctgatacaaatctttgttatttctcaagtttgataggtactggtattttgtgtgtgtgtgtgtgtgtgtgtgagagacagagttttgctctttttgtccaggctggagtgcaatggcgcaatctcggctcacttcaacctccacctcctggtttcaagtgattctcctgcctcagcctcccaagtagctgagattacaggcacccgccaccacacccggctaattttttgtatttttagtagagagggggttttgccatgttggccaggatagtctcgatctcttgacctcgtgatgcacctgcctcggcctcccaaygtgctgggattacaggcgtgagccaccacgcccggccaggtactggtttttcttcaggtgagttttaagatactatctatctaaaaaatataaaatcctgatgagactttgatggaattaaagttatagattaaaaattaatgaagttttttgttggcatcgcttcctctgggacatctt

SEQ ID NO: 778087 - DNA, 629 bp, Homo sapiens
ttgcatctttaggaatttgacagatgcctaaatggccaatggcaaacacccagaagctctgcagaattctaaaacatcattcagatttagtaaatgaaagcagaaaagtccatcatattttaggaaaatcttctgtccatggggtcaaaaaaaawttttgtttaattaaaccctcagttttgttgtacatgttcactttttgtgcatttttgctggtatttcttgctcaaggaaacagctctgtcaatatacttgccgcataatgaactccatcaattcactgccatgctgggtcttcgcatttatgatgacacttcctctgccttatgttatcaggaagtgaaggcttccatagaagtacattttccagataactaaagttagctctttcaaaggccactcctgaatttcaattatattttcttatgaacgtcattctaaaatgcatacatatggtggatgtctggacagaattctaagatgattccccaagacacccctgcccaggtgtacacgtcctatttagtcaccagacctttgaacattatagatctcactcctgtgattaggtcacgtcacatggcacagttgccttaacaaagagagcttagccaatgggcatgccataa

SEQ ID NO: 778088 - DNA, 540 bp, Homo sapiens
ttagttatataactttactaaaaacagaagatccaaaaagtctttaggttgctttttttttttttttttttttttttttttcatgaatctgctaacctctggccatcggatgaacttctgagaatagcactctaatgcccccctttccgatattatattgtaaagtatagtaaatattgtgcactagacaacaatggatggatagggaaaatgagagggttcgggggattgaataagagtcttacatatggtatggaggaagggtttggatttggccttcaraccttggataagccaattagcttttgagtaggaataatagaacttaatctccaggcttatcttaagaactaaattgaataatttatgaaaagctatcggaatactagctactcacttatatcaatggaattgagcagttataagatagaggatttgacgactgatcaagaaaaaaacatgagcacgaggtggcagtagtatataagggcctttactgagttgtattaatactttgacaggttgtaagagaggggaagt

SEQ ID NO: 778089 - DNA, 590 bp, Homo sapiens
gtagagattcaattctaatgaagataatatggcagaagtgatgagataccacttccaagattaggttattaaaacaccttcacttttatcttcagtgcttacactgtttatcaatctcttggatctcttgctgatatggtttggctctgagttgtaaytcccaatgttgcaggagaggcctggtgggaggtgactggatcatcggggtggatttcccccttgctgttctcatgatagtgactgagttctcacaagaactgatggtttaaaggtgtatggcacctcccccttcaccctctctctcctgctccaccagagtaagacatgcttgcttcccctttgccctctgccatcattgtaagtttcctgaggcctcccagccatgcttcctatatagcctgtggaattgtgagtcaactaagcctattttctatataaaccagccagtctcaggtagttctttctagcaatgtgagaacagactaatacacttgccctgggggtaaccagttatgatatcgtgacgtattcctgtggcaggccccagatgagtgtgattggaaatggattttctaaggcctatcaacaac

SEQ ID NO: 778090 - DNA, 590 bp, Homo sapiens
gtagagattcaattctaatgaagataatatggcagaagtgatgagataccacttccaagattaggttattaaaacaccttcacttttatcttcagtgcttacactgtttatcaatctcttggatctcttgctgatatggtttggctctgagttgtaattcccaatgttgcaggagaggcctggtgggaggtgactggatcatcggggtggatttcccccttgctgttctcatgatagtgactgagttctcacaagaactgatggtttaaaggtgtatggcacctcccccttcaccctctctctcctgctccaccagagtaagacatgcttgcttcccctttgccctcygccatcattgtaagtttcctgaggcctcccagccatgcttcctatatagcctgtggaattgtgagtcaactaagcctattttctatataaaccagccagtctcaggtagttctttctagcaatgtgagaacagactaatacacttgccctgggggtaaccagttatgatatcgtgacgtattcctgtggcaggccccagatgagtgtgattggaaatggattttctaaggcctatcaacaac

SEQ ID NO: 778091 - DNA, 634 bp, Homo sapiens
cctcgaacacactctacatagaattttggaatttaagaaggctgatggaagggcttaaatgaaagtgagaaaatgtttatggaaactaaaaattatgtagtggctaaagtttagcaataaccacacttaggtgtagttaatgtgaccagcagtcacttatagttacatggaaattaaaaaaaaaaaaatgtgccagatgaactgasttatccagttaaggacatttaccagcaaagtgctgaagatgtcacctggtttcttcttactgtcttatggtaaactatgagaagaaagagatacattgggggaagtactgctaaacaaaaaggaggcaggacttgatagttacgaaaattcttagcttctctagacagcaaataatgttgaaattaagaaacagcttttaagataagatcaattccaggacactatcagaaaaacatggtctaaagacaaaagcggagggtgtcttataaaatcggtttgttaaaatcttggaatgatcaaaagtgatatctcagagtactatttcatcagatgacagaacctcctaagggttcctcagagcctcataatgagcctttgggaaatttaagggcatgcattgtctctccccgatcttggcacaagccca

SEQ ID NO: 778092 - DNA, 654 bp, Homo sapiens
tgcatgtgagaaatccacacttgtaactctgcacttctacacgtcacatttgtgacctttttttaaaattttaaatagttgtaacatattcatctggaataggaacatataaaccttacataaactttttctggatggtttctccttatccctggaagtccaaaagcattgcaatactgtgttttaggaatgtcaggctctttgcctctacactaaatgccttttataaaaatttaaatagttatatctctctcccagatctcacagcacataattattacyttagcagtcacaccctctcctaatctgatatgatccagaacagagttaatcagtaaccgcagtccaagtttaaattgtcaaggaaggtcctttcttctgattaaagtacactggatgtttgcatattccttgatgttcatttaaggtacaataaaaggaggtggttagctacataaacaaattctgccaatttcaaaatttgaaattacccatgacaaacctggcaagagtaaaagggataaagcagcttacctcaaagagggattctgataacagctaacttttaacgagcagtacctactatatgccaagtatgtgctaagagctctacagtctatcatcttcattaatcctcacaatacctctataaaa

SEQ ID NO: 778093 - DNA, 636 bp, Homo sapiens
ggagctggcgatgcagcagaatttggggagcatttatttcagcagaaggtggcaggggtggctgcagcatgctcccacagttactgctcatggcatggtttgggctgaggtcaggagttcgagaccagctggtcccaattgctacacagcatcttctgttcctgcccattttccaagcctgttcctcagccttcccragagtccagagcttactaatattctcttactaaatgcgtaagctacttaaatcagacagaaccgtcttcagttgcatgagactaagaacactgatggataccagaggtgacgcattaactcaagagaagccgtcagtgcaccagccacagatagatgcatttgtctaattagctagtgttcacattaggaaacagcaggaccccagagaagggttttgttgatggggagaggaaatcaggagagtctggtctgatgttgcgttggctgatgggacttgcccggaaggcttcaaggcaacctgagagacatccacgacactaggctgggcgcagtgcaggagggaacggtggggtcatagcaagggcaaagcccaacaggacctgccgctaacgctactgaatgtggggcctgagatggcaaagcctaacaggacctgcc

SEQ ID NO: 778094 - DNA, 636 bp, Homo sapiens
ggagctggcgatgcagcagaatttggggagcatttatttcagcagaaggtggcaggggtggctgcagcatgctcccacagttactgctcatggcatggtttgggctgaggtcaggagttcgagaccagctggtcccaattgctacacagcatcttctgttcctgcccattttccaagcctgttcctcagccttcccgagagtccagagcttactaatattctcttactaaatgcgtaagctacttaaatcagacagaaccgtcttcagttgcatgagactaagaacactgatggataccagaggtgacscattaactcaagagaagccgtcagtgcaccagccacagatagatgcatttgtctaattagctagtgttcacattaggaaacagcaggaccccagagaagggttttgttgatggggagaggaaatcaggagagtctggtctgatgttgcgttggctgatgggacttgcccggaaggcttcaaggcaacctgagagacatccacgacactaggctgggcgcagtgcaggagggaacggtggggtcatagcaagggcaaagcccaacaggacctgccgctaacgctactgaatgtggggcctgagatggcaaagcctaacaggacctgcc

SEQ ID NO: 778095 - DNA, 644 bp, Homo sapiens
aggttaaggtgctacattcaaaaggttaagtatattaaatacatttttaacttatgatattttccatttatgatcagtttatcagcatgtaaccccatcataaattgaggagcatttgtatattgtttgatcaatcccagtacaacccagagagttatgtattgttaccagatttttcaaatgaggaaaaaaacataaggtcactctgctggtaagtggtagaactggaatttaarctagatctatcaagctctgtagtctatgttctttctactccagaaaaaaaaaatgagataacattttatgcatgcccagatgagttgttttgactcagtgattcccaggtgttttcatccctttcccatctgttgtaatatattttcaaacatcaacccaatgcaacattattttttcttaaatggagtctcactcttgtcgcccagaatggagtgcaatgacacaatctcagctcactgcaacctctgcctcccaggctcaagtgattctcctgcctccaccttccaagtagctaggattacatgcttcacaggaataaaatagagctcagagagcagcccaggccaaaagggagcaatgtacatggaagtatgagtcaatgctcacaacaatcgaggtcccaggaa

SEQ ID NO: 778096 - DNA, 611 bp, Homo sapiens
atggcccctctcaactcatgtgaactctgctcactcctagcagatggtattctctctccctgacttcctctcgggatgtttcaggcaaccactaaggtggcctccagggatccctgccttctggtacttactgcctgtrtgatcccatccccgttgagtgtgggctggatttagtgactagcttctagcaaatagaaataggcagaagcaaaatcacttccaagattagataattaaaaaaagatcatggcttctgtcttagtctctctctctctctggctctctctctctccctccacccccgccaccacccctcattctgcagaagataagctgccatattgtaatactctatagagaggcccataaatcaagggaccaatgttcccagccagtgaggacctgagcctaccaacagccatgtgagtgagcttgggagtagatccaatcccggttgaacattgagatgactccagccctggccaataccttaactgtaggtttgtgaagaacaggaagttatagccagatcatatagattcctaacccactgaagctgtgagataatgtttgttttaaactgctatgtttgggggtaatttgtaacacag

SEQ ID NO: 778097 - DNA, 592 bp, Homo sapiens
gcttgggtctggcaaccccggagtgggcacttcctgggagccggtgcttccctgtcacctgcaaggctaagactccctgtgcaagtcaccctttgagtctggaggcgacaaaacctgctgtctcttccattcatctccagttgagaatgaatcagtgggscaagtctggctgagatccaaatgcatctcatttttagaggcagcatgtgctttatggaacctagcagtttaacctaattgtttgcatatttagtgctgcggctctgcagtttgggcgagccagttgcagacagaggcatcctgtgacaatacagctgtgctctcctggaaagagcctctggtcaggggatggggtggcatggacaaaggtgtgtagggttcaagggcagagcctcgggggctggaacagagggtgtgggagaagcatggtctggctttgtgatcagatcagaaaatgcaccagattccaggcagtttggtgcaggttgagggtggggcatctacagctagacggtctaggtcaaatcccagcttggccactgcgaggctatgactgagcaatcattgagtctcgctatgtcccgattttctt

SEQ ID NO: 778098 - DNA, 592 bp, Homo sapiens
gcttgggtctggcaaccccggagtgggcacttcctgggagccggtgcttccctgtcacctgcaaggctaagactccctgtgcaagtcaccctttgagtctggaggcgacaaaacctgctgtctcttccattcatctccagttgagaatgaatcagtggggcaagtctggctgagatccaaatgcatctcatttttagaggcagcatgtgctttatggaacctagcagtttaacctaatwgtttgcatatttagtgctgcggctctgcagtttgggcgagccagttgcagacagaggcatcctgtgacaatacagctgtgctctcctggaaagagcctctggtcaggggatggggtggcatggacaaaggtgtgtagggttcaagggcagagcctcgggggctggaacagagggtgtgggagaagcatggtctggctttgtgatcagatcagaaaatgcaccagattccaggcagtttggtgcaggttgagggtggggcatctacagctagacggtctaggtcaaatcccagcttggccactgcgaggctatgactgagcaatcattgagtctcgctatgtcccgattttctt

SEQ ID NO: 778099 - DNA, 578 bp, Homo sapiens
aaagtggaactttatttaacaaagatgatatataatgttttgtggtcctaaatgtctcaaaatggagtcacttatgacaggtaactcagcttacagtgaaattgttgacctcggagtgagaagcatatacatggtggactgaggtgataagccaaccccggctgtggccaggcaccctgaaacctgatgagaaagtaaasctaaaaggcacctgaggataatggccatggatactcccaggcattaaaaactgcaaagaaactgaccatggccacgatgcctgtagaagctctgccattgagaactctaagtcctcttttccagaaactgtggctgccagaagccctgcgttggggaaaagaaaggacctccactctggctggccttccaagggaaaatcagagctgctggttcatcagtcagtgtgctggtctctgaaactacttgctgtgtttttttctccctctatcttattactgcctgtgttattgaatatatttgcatgattgttgttgtgtgaaggcctcacaataaactgtgaatttgtaagcatttaactggctactgagtcataggga

SEQ ID NO: 778100 - DNA, 579 bp, Homo sapiens
gctctcctcccttccctcaggagctggccgagaagcaccagaagaccctgcagctgctgcggaagcagcagaccatcatcctggatgacgagctgatccagtggaagcggcggcagcagctggccgggaacggcgggccccccgagggcagcctggacgtgctacagtcctggtaatggtgtggggcggccagcgggcagggcaggaggggctggtggggatcccggctgcttctgcgtcctgtgctggctcctgcagcaggccccctccatcctgggacagctcttgtttctccagggagcctggttcctcaatcagactttggyccccatcctgtgcacctcccccaggaagggggctgctgtcctggagatgggacagggttcgggtgtgtggggtgatgcttgggctgtttgggcctagtcagggtcgcccctcctgtgtacgtctctaattctgggaggcagggagctctgctcttcccatgggtgggaagtgtggcgaaagcacagagccttcctgggggaacgggagctgtgtcttggggcctggcgtctgtgcggaggagccattgtcctc

SEQ ID NO: 778101 - DNA, 579 bp, Homo sapiens
gctctcctcccttccctcaggagctggccgagaagcaccagaagaccctgcagctgctgcggaagcagcagaccatcatcctggatgacgagctgatccagtggaagcggcggcagcagctggccgggaacggcgggccccccgagggcagcctggacgtgctacagtcctggtaatggtgtggggcggccagcgggcagggcaggaggggctggtggggatcccggctgcttctgcgtcctgtgctggctcctgcagcaggccccctccatcctgggacagctcttgtttctccagggagcctggttcctcaatcagactttggcccccatcctgtgcacctcccccaggaagggggctgctgtcctggrgatgggacagggttcgggtgtgtggggtgatgcttgggctgtttgggcctagtcagggtcgcccctcctgtgtacgtctctaattctgggaggcagggagctctgctcttcccatgggtgggaagtgtggcgaaagcacagagccttcctgggggaacgggagctgtgtcttggggcctggcgtctgtgcggaggagccattgtcctc

SEQ ID NO: 778102 - DNA, 579 bp, Homo sapiens
gctctcctcccttccctcaggagctggccgagaagcaccagaagaccctgcagctgctgcggaagcagcagaccatcatcctggatgacgagctgatccagtggaagcggcggcagcagctggccgggaacggcgggccccccgagggcagcctggacgtgctacagtcctggtaatggtgtggggcggccagcgggcagggcaggaggggctggtggggatcccggctgcttctgcgtcctgtgctggctcctgcagcaggccccctccatcctgggacagctcttgtttctccagggagcctggttcctcaatcagactttggcccccatcctgtgcacctcccccaggaagggggctgctgtcctggagrtgggacagggttcgggtgtgtggggtgatgcttgggctgtttgggcctagtcagggtcgcccctcctgtgtacgtctctaattctgggaggcagggagctctgctcttcccatgggtgggaagtgtggcgaaagcacagagccttcctgggggaacgggagctgtgtcttggggcctggcgtctgtgcggaggagccattgtcctc

SEQ ID NO: 778103 - DNA, 579 bp, Homo sapiens
accccttccatctctactgaagacttaatgagcttggttttggaagaaagggatacaaacagatttcaatcttctggccaacacttggcttttagggaggcagcgggaatgagctgtcgtaacatagaataggtgctttccaccatataaccagggagacccttccacctccaccccctagggtttgccattgaaggcccctctcaggcaaagattgagtacaacgaccagaatgatggatcgtgtgatgtcaaatactggcccaaggagcctggcgaatatgctgttcacatcatgtgtgaygacgaagacatcaaggacagcccgtacatggccttcatccacccagccacgggaggctacaaccctgatctggtgaatcagctgctgtgcttctgtcttcttgtccctggcccctggttcctcacccccatgcccgaagttgccttaagcagcatgttgagagatggcagagaggaatcatttggattttaggaaggaaacaggcctgcatttgtttgtttgtttgtttgtttgtttgtttgttttgagacagactcttgctctgtcgcccaggct

SEQ ID NO: 778104 - DNA, 512 bp, Homo sapiens
ccagactttagtgtgccgtggtcatgacatcggtgtggatggcaggttgtcatctgagcagtcagggtggcagcacacagcttgcgggctggctgatggccgaggtgtgtgaactgacctgccccaagtgacttcagtgctgggcacagcataggagcagtactaatgatatggacagtatgctcagaggacgttagggagcacagctttgtgtaaagggcatgccctgccctgtccggatttaaagcagctatagcactgaaaccccatggtcaccctygcatttctacacttctgcctgtgccaagtctagtttgtgtgcctcctccattttgtgtgtacatgggggtatttttttctgctaggcaactgctatttatgcctctcagtactgtacttagtgtgtaccattcctgcaaggtatagacattgtcagcccattttacagatgaggaaaatggagtttttgagagggtgagatcattcagtggcagaatggaatgttaacccag

SEQ ID NO: 778105 - DNA, 654 bp, Homo sapiens
tagggaataaattattttgcatagagaacattcttgagaagttaaatgtagacaggtcaaaattagtcaatataaatataaacagtgctgctgtgatgttggtgctaacatgggacctctcatgaaacttttccatggtggcatcattcagcaagaaaataggatttaaattcattgtgtcattcaccaggaatctctttgtcggtaaaacattaaaaagataaygcatgatgactgtagtaattaactctgtacacaagattcccactccggcttgacccagagtcacgatgaattgtcttcacagtatggcaatctgctgccctacacagaggttatttggctaactagtgtcctcatacaaaagcaattgtttcaactatgggtaggaaaattgcatcattcatgtcatctgaggaaaagtccccacctcagctcaccaaataaaattggatcaattcttgttacttttctttgtcaagacaacacctccaaaatgcctttgaagggcattcacaagtagttcctcaaacgtatgatttcatttgctcactcttgagaaattgtgtctttgggaaacttatttggcaagaaccaacctggttgaccttcctgcacaaaaatcagttttctagtaatgaaagtgatgatctg

SEQ ID NO: 778106 - DNA, 654 bp, Homo sapiens
tagggaataaattattttgcatagagaacattcttgagaagttaaatgtagacaggtcaaaattagtcaatataaatataaacagtgctgctgtgatgttggtgctaacatgggacctctcatgaaacttttccatggtggcatcattcagcaagaaaataggatttaaattcattgtgtcattcaccaggaatctctttgtcggtaaaacattaaaaagataatgcatgatgactgtagtaattaactctgtacacaagattcccactccggcttgacccagagtcacgatgaattgtcttcacagtatggcaatctgctgccctacacagaggttatttggctaactagtgtcctcatacaaaagcaattgtttcaactatgggtaggaaaattgcatcattcatgtcatctgaggaaaagtccccacctcagctcaccaaataaaattggatcaattcttgttacttttctttgtyaagacaacacctccaaaatgcctttgaagggcattcacaagtagttcctcaaacgtatgatttcatttgctcactcttgagaaattgtgtctttgggaaacttatttggcaagaaccaacctggttgaccttcctgcacaaaaatcagttttctagtaatgaaagtgatgatctg

SEQ ID NO: 778107 - DNA, 629 bp, Homo sapiens
tccaaatggccatgatcatgtatctcaccagctgcaaaatcttaaatcgataccactggaaaaaaaaaaagcatgaccatcctggcccagaatatcttgatcatatcttgttataactgggaacttctcatccatccattctttagttttactggcaatgtgttacacatcaaacaactttttataacagcccccacaagggattttataatttgttatttaaaagttatgcatcttcattgtataatttttggaaatacaaatatcctaagcaaatgacttgctgtcttatcactgagaagaaataacctgtgtttagaaaacattttacaaatgcttattatttttagtaggttgccttttttgtcttttgtataaaagatcatgtttctttgacttctttccccttttgtggtgatttagaatataaatactctttttaatttgtttacattttwaaaaaatttagtttattttctcaattatcaatgttaaaaatgaaatttgatgtgtcatttgataaaaaattagcatgcttacttcctccttctttttcttcccagttaccagtttttatttgtcatctgatttcatatcctcattattttatatataaaacttatatttca

SEQ ID NO: 778108 - DNA, 605 bp, Homo sapiens
cttctattcttctagaatattgctgagtgtttttaatgcttcttcttcagaaagtagaactccttaaacatatacagaaaactcgcttctcctgctagctcaggataatttatcatctacttgccctggaaggcagaaggcaattgcctcaatcatgtccaattctcttgactttgcctattcctgttgatcagcacttagcatgtcatttcatggagagagttttttyccctcttttgtttcttcttttgaaagcccttgtttcctctaggcagaatatgtaaccagagttttttcctggagtgttcttttgaatacacatttccagacagtatgttcaacatattaaagctttccaccctcagatggtgctcatcatcagcatgtcttttccatcaaatgtgcccctcctcctaatccagtgaccttttctgttctggttgatatcttcttaataactttcttcttgatggcttccgtcttgcattcagtagttcaaatcctgtcacctcacaggtttactccttaaatatactgatagccacggtgtcgggggacccgtgaagagttttgcttacataacagagtttgtctactcctcagaa

SEQ ID NO: 778109 - DNA, 605 bp, Homo sapiens
cttctattcttctagaatattgctgagtgtttttaatgcttcttcttcagaaagtagaactccttaaacatatacagaaaactcgcttctcctgctagctcaggataatttatcatctacttgccctggaaggcagaaggcaattgcctcaatcatgtccaattctcttgactttgcctattcctgttgatcagcacttagcatgtcatttcatggagagagtttttttccctcttttgtttcttcttttgaaagcccttgtttcctctagrcagaatatgtaaccagagttttttcctggagtgttcttttgaatacacatttccagacagtatgttcaacatattaaagctttccaccctcagatggtgctcatcatcagcatgtcttttccatcaaatgtgcccctcctcctaatccagtgaccttttctgttctggttgatatcttcttaataactttcttcttgatggcttccgtcttgcattcagtagttcaaatcctgtcacctcacaggtttactccttaaatatactgatagccacggtgtcgggggacccgtgaagagttttgcttacataacagagtttgtctactcctcagaa

SEQ ID NO: 778110 - DNA, 658 bp, Homo sapiens
tttcattttattctgataaagactaatgtatgcctgataacctagtgataatccacaagtttggtagttcacaacatttttagaaagcacgtacgattaacatttaaataaggcattatagaaagttttataaagaatgaagtgtgtactataattcttttaagaaactttggttcatcttgaaagatcaatgaatttttaaaatatcagaagaaaaggaaaataaatttttttccccaaaaatacataagaactgcttactggcacttgtattttaagtacctggggaaaaaatggaaaagatttttaaaggcaattaataacagcttgtacgagggcttgtttcatttgttctggcaccaagtaaagagtaaatacgccatggaagacgccatcaggttttccgtccacctctcctactgccccacttctcccagaycacacagcacatcagcagccatccttgctgccccactcaggaatcactttagattccaattttctttgtttgtttgtttttgttttttgtttttttttttgagacagagtctcgctctgccccccaggctggagtgcggtggcacgatctaggctcactgcaacatccaccttccgggttcaagtgattcccctgcctcagcctcctgattagctgggg

SEQ ID NO: 778111 - DNA, 539 bp, Homo sapiens
aactctcctccacatcacatcaggcctcctaaacgtgcactgagctgggacctgaatggcagcaaggagccagctgtgtcaatatgcagggaacagcattccaggtggggggaacaacaaacgcgaaggcccagaggcagatgcggtcggtgagggctgaggagctcccgggtggcctctgaatttattctcagagcagtgggaagagaatggagagtgtggggccagagtctcatggaccttctgatgggatccctctggctgcaactcagagaccagacaggtgtgaccagagtggactggggaccccgaagaggctactgcagtcgtccaagccagacggcgacagagtgggggtccrtcatggtgcctggtctgccattcttttctttttgtcattattattgatatgaaaacagagggtctcgatggcaatgctgttcccccccaaacatagttactgtttattattattccatctcacaataacagcatattatctttactgttcctgttatttttttctgtgctgttagggc

SEQ ID NO: 778112 - DNA, 590 bp, Homo sapiens
agtaacccagcccctgtcagagagagaccgtatttgataaaagggtctttgcagatgtgttttgagatgagctcatcctgggttacccaggtgggccctgaatccaaagaccagtgtccttagaagagacagaagaggagagagcaagactacatgaactacaggaagacaaaggcagagattggagggctgaagccgcaagccaaggaatgcctggagccaccagcatctggaagaggcagaaaggagcctccctttgagcttctggagggagtagggtcctgctgacgccttgattttggacttccagsctccagaactgttagagaataaattgctgtcgttggccgggcgaggtggctcatgcctatagtcccagcactttgggaggccgaggtgggcgcatcacttgagcccaggatttcaagatcagcctgggcaacatggcgagaccctgtctctacaaaaagcacaaaaattagccggatgtggtggcggcttgcctgtagtcccacgctgaggcaggaggatcaattgagcccaggaggtcaaggctgcagtaagccatgattgtgccactgcactccagc

SEQ ID NO: 778113 - DNA, 639 bp, Homo sapiens
tttcattttattctgataaagactaatgtatgcctgataacctagtgataatccacaagtttggtagttcacaacatttttagaaagcacgtacgattaacatttaaataaggcattatagaaagttttataaagaatgaagtgtgtactataattcttttaagaaactttggttcatcttgaaagatcaatgaatttttaaaatatcagaagaaaaggaaaataaatttttttccccaaaaatacataagaactgcttactggcacttgtattttaagtacctggggaaaaaatggaaaagatttttaaaggcaattaataacagcttgtacgagggcttgtttcatttgttctggcaccaagtaaagagtaaatacgccatggaagacgccatcaggttttccgtccacctctcctactgccccacttctcccagaycacacagcacatcagcagccatccttgctgccccactcaggaatcactttagattccaattttctttgtttgtttgtttttgttttttgttttttttttttgagacagagtctcgctctgccccccaggctggagtgcggtggcacgatctaggctcactgcaacatccaccttccgggttcaagtgattcccctgcctc

SEQ ID NO: 778114 - DNA, 614 bp, Homo sapiens
aaaattacttgattagtaagaaccaaagcatttccagaaccaaggcaaggagctgaagtagacagaacacaggacaaagaaactcaagacttaagtttcttcctgactttcacacttagcacaaagtgtgatctttgatccatagaactgctcttgagtttattagcaatattactttgtaaattgggaagatagtaccttatccttaatactataaagggttattttaaagattggtaaataataatgttctttgtatcttgcaaaagggtatgattaaaattcctagagtttagaaaaacattgtgtggttatcttgtttaaagatgaggagaggaccattatccctcagaagtgccaattttacgtctttcccagttttcaacataacaggtcaagtttcaaacagaccatcttgaatcttccagtgactacaagtcaatgaaatatcagctttacagtatgtgtcttgattcrtttattcaggaaatagatgatgtctatctactctatgcatattaaaatagaagacccatcctatattacagactcagagacagattaggggtgggccaaccattcaggtaatcagggccccatcaaataggggaagc

SEQ ID NO: 778115 - DNA, 604 bp, Homo sapiens
ttttctttttgagatggagtcttgcactgtcacccaggctggagtgcagtggtgtgatctctgctcactgcaacctccgcctcccaggttcaagagattctcctgcctcagcctacctagtagctgggattagaggtgcctgccrccatgcccagcaattttttttttttgtatttttagtagagacagggtttcaccatgttggccaggttgatctggaactcctgaccttgtgatccacccaccttggcctcccaaagtgctgggattacaggtgtgagccaccgtgtccagcagttcatgaattctaataaatgcaccatactaatgtaagatgttaataatgtgggaaactgcatgtggggtatggggaactctctgtactatattctcaatttttatatgttcagaaatctaaaatgattccaaaaaataaaatctatttaagaaaatacatatgcagacaaaaagattctcatggaaatgcagcagataggagtagagtatggggatacagagaataaacaagtggaacaggagtaacgcgcagggtgccatggtgactgtgtgcctcacaataaggatggtcagtaaacagatcctt

SEQ ID NO: 778116 - DNA, 633 bp, Homo sapiens
taaagtaaagaacgtcagcagtggcatttctattcctctaaagggtattttagacaataattttggatagccccacactgcatgaagcagggaactgcatgcccttcctgctcgggagcccagccctgcctccagcagctccagcttcctttcctctctgtcatggtgctgccttctgatgagcaagaagttagwcccgactggccctcggcaagctggggcttctaagagaagaagggctgggctgccccctgcaaatcctggataatgccactcagggaacgggagaagctgatgcgcaaaatatgccataccccgctgctttcctctcactcagaccccaagtcaggtcggaagcagctcttccagacctcccccaaggcaagttgctagaggataaggcttttatgtgtttcctgataaatgtgtgggagaatccagcctccctggatactggagaagtctcctatctggaattgcagtgttactgctgatccagcctccctggatattggagaagtcccctatctggaactgcagtgttactgctgatccagcctccctggatattggagaagtcccctatctggaattgcagtgttactgctgaaacatgtagtttctgagcctttg

SEQ ID NO: 778117 - DNA, 625 bp, Homo sapiens
ttcccttctgggaatctttaggagttgggtacccaccgatatctggagattctgtgtgctgtgacttgccacgaagatggtggctttagacaggatgggctgtttgggagcaccggctccgaagccagactaccactcgctaggtgtgggacactggagcaagtcttttagcttctgtgtgtccctgtgtcctcaccagataatggaaataataggagcatatatatcaatgcacggtttgggaaaaattaaatgcaataattcacrtaaactgctttaccatgctgcccaataaatatcagtagttatgagatgccgcaaacacaggggtattttgtcagcctggctgtgcatgggaatggtggtgtggggttccctgggcacaggaaggtctgtcagaaactgtcaccagctcatgttgaggctgacgggggagggcctggtggtgtttcaagctcatcctttgtgttcatcattccccagggccctatggtgaccatggcaacgcagcttacaggttgccaagttcaaaacaatgtttctaagcaagaagttttgctgacatcacccgtcttgatgagaagggaatggagactcgtgggtccacactgctgtcagggccaac

SEQ ID NO: 778118 - DNA, 625 bp, Homo sapiens
ttcccttctgggaatctttaggagttgggtacccaccgatatctggagattctgtgtgctgtgacttgccacgaagatggtggctttagacaggatgggctgtttgggagcaccggctccgaagccagactaccactcgctaggtgtgggacactggagcaagtcttttagcttctgtgtgtccctgtgtcctcaccagataatggaaataataggagcatatatatcaatgcacggtttgggaaaaattaaatgcaataattcacataaactgctttaccatgctgcccaataaatatcagtagttatgagatgccgcaaacacaggggtattttgtcagcctggctgtgcatggraatggtggtgtggggttccctgggcacaggaaggtctgtcagaaactgtcaccagctcatgttgaggctgacgggggagggcctggtggtgtttcaagctcatcctttgtgttcatcattccccagggccctatggtgaccatggcaacgcagcttacaggttgccaagttcaaaacaatgtttctaagcaagaagttttgctgacatcacccgtcttgatgagaagggaatggagactcgtgggtccacactgctgtcagggccaac

SEQ ID NO: 778119 - DNA, 639 bp, Homo sapiens
acaatgtttcattttcattgcatttgtctttatggctacgttttaatggtgacaagtaaaaccagtttttcatttacagtagcgatataaagtatcctttaaaatgtatttttttagataataaatgagtcaaattaaagataatatattgttaatagaacacagagtctaaaaatggcaaaagtcacgaagatgttatttgatgaataaatacatcttattcacattggtttctggggggaaggagggggatgaagggttaggsaagaaaatgaaacatttgttagacacttattttgttctaaggatttcagatatcttacataaattaattgaactccagcaagttgaactcaacaaatgaggtcactatctccctctgtctttatatttctccaagtcactaatgaaagggttgcctgggacacgaccagggcagagcactgtggcattccactccagtcctcaaccagctctgctctcatcacttattacctcctttggttgtaaggacacaacttgctatggcttcacctcactctaggggctcaatgggaatgaagggtcttctttccaagagtctggctgccttgggactagagatgactcagcagagtctaagacccttttttttttttc

SEQ ID NO: 778120 - DNA, 590 bp, Homo sapiens
ccagaaagagagccaggaggaagccgtgttgctttttatgatccagcctcagaggtcaggaaatgtcacttctgctgtgttctgttgatagaggtaattgcaaacgtctacccaggttcaagggaagggaacatagcctccacccctcaatacaggaatgtcagtgtcacgtcagaagaagagcatgtgggatgsgatatatatttgtgcatcatctttgtaaaaatacaatcaaccacaattgttttatttaatcatccttcaccgtaaatgaagttgcttcgatatatcattatcccaattttacatttaagtgaaagcagaaggaaacattaaagatcttcttacgccctttcggtgtcatactagagcattgcctaataagctgtcaaaagtgtcatctgtacacgattctcagtcttggcgctattgaaattttggtctgggtaattctttgccgtgggggctgttcagggcgtaataggtcatttagcagtatccctggcccctgcccaccagacaccagtagcacaccttcatccctttagttgcgatagccacaaatgtctccagacattgtcagatatctc

SEQ ID NO: 778121 - DNA, 621 bp, Homo sapiens
aaaggggaaggagcaataatgcttaaatgaccttaaaacctaagaagtttcaggctgtcaacatgaaaaagcatttcatacagatgcctctccccacaggttcccacggcctggctactgcttcttaatctgtggtggtccaggcaagcgcttaatgcccttgaaatgaattaataacagtttcatctcaggtaaccacatgtggaatatttattaatcatctttacaaagagtgtagcttgctaaaaacaygactctaatttgggggattttaaacttgttggggtagctaacatactctgtcttcctgttaagaaaaagtgttctttttccttcactcactcctttcttccatttccacaccatcctccttagttccttttatttatttatttatttattttttgagcggtttctatctgcatacaaaaagcaaagataagtgaacaaaagctaagggggaaggaatgaacttattttctattaaagttggtgttaatgtgtttttgagtttataaatcacttatttgtggaccttagaatttgcctccttttctacctgggtgttattgaatttttcagttgaaataacacattcatctcaacctttcatttgaaatg

SEQ ID NO: 778122 - DNA, 621 bp, Homo sapiens
aaaggggaaggagcaataatgcttaaatgaccttaaaacctaagaagtttcaggctgtcaacatgaaaaagcatttcatacagatgcctctccccacaggttcccacggcctggctactgcttcttaatctgtggtggtccaggcaagcgcttaatgcccttgaaatgaattaataacagtttcatctcaggtaaccacatgtggaatatttattaatcatctttacaaagagtgtagcttgctaaaaacatgactctaatttgggggattttaaacttgttggggtagctaacatactctgtcttcctgttaagaaaaagtgttctttttccttcactcactcctttcttccatttccacmccatcctccttagttccttttatttatttatttatttattttttgagcggtttctatctgcatacaaaaagcaaagataagtgaacaaaagctaagggggaaggaatgaacttattttctattaaagttggtgttaatgtgtttttgagtttataaatcacttatttgtggaccttagaatttgcctccttttctacctgggtgttattgaatttttcagttgaaataacacattcatctcaacctttcatttgaaatg

SEQ ID NO: 778123 - DNA, 660 bp, Homo sapiens
agtcctgggacccctgatgttcaggatccagctgcaccactgggctggcacatccccctcttgctttgccaactgggacctataaacgaacacttattcttaccattttatctttcctcttttcctagtgatagatattttttaaaactgccagggcattgtatgttacatgagaaaactcatcatttattccagatcaacctgaaatcctttttaccagcatctcaaggaggggaaacccttcctggctgctctgagcctccctggggaggaacgatgaagagaggcagtcatgcccatgctgccggctctgtccccatgtccccatctataatatgggtcattcccrgcctcgtgggccagaaccgaggggtaggaactgcacagggggttcctgagcaagagcaacttctcagggagggccaggccacgcgtggcctgggattctgtggctggaattaatgtcacccttgtgtatgtgtattggtttactgagtgctcacgtaggaggtaatgggaaaagaccttgggaactaccctggaggcagtgcagggctcggagcccgtatgcagaggaaactggggtccatgagggacatagctcctctcaaggctcccccctgggctgaggtgggatttagactctggatatcaggcctg

SEQ ID NO: 778124 - DNA, 351 bp, Homo sapiens
ctccctgcaggatcccagtgacagcatcccctgcctcccttctgcagtagctccagcaggtggatgggacccgaggctgctgggccccaggggctgggcgccgagtgtaggggaggccaggtccacagaagggggctgcctccaggtacagggccctgtgctggaagggcctcagaggcccctgtggaaagctyttagccaagtagtccaaccacactgtcacaccaggtggccacccaagccctgcgtacatgtttctcagagacaagcttctcactcctttttgaggggtgcccgtgtcatcatgaagcaactctggggccaaggatgctcttgcagaggtgggagagg

SEQ ID NO: 778125 - DNA, 636 bp, Homo sapiens
gatgatgacaaaaatttataggaaaaaggttttaattaccccaagtcgatttatataccattttgaatctcatgccattgattgggggaaaatttcctatcatcttctactctccagggtatacttccaaatggcataattctctgtcataaaatatttccaatttttcttcaaatttcagtagaaagggattgaatttgaagagtcatcaccgcagttctgctttcataaacaaaagcaaacaagcaaacaaaaatcactacgagtgttttgtaaagggagaaaggcaccaatagrttattaaagttgaattaccagggccatttacgctcattcccagtgcctgtgtcacacataacccctgaagaaggaaaatagcaatacttagtgaagcaggtaaacggaatttccagccaaggagttcaacagacaatctgaattctggctggccttttaactcagaggtaattacagtagatttgggggcctaaccttagtttgcaatatttttttaactgatattatattttatgcaggccaagtcaaacacttgaagggcagagggcaagatgtaattaaattactaccttatttatgttaattattcattcttattaaatgaggacaaagatgtga

SEQ ID NO: 778126 - DNA, 636 bp, Homo sapiens
gatgatgacaaaaatttataggaaaaaggttttaattaccccaagtcgatttatataccattttgaatctcatgccattgattgggggaaaatttcctatcatcttctactctccagggtatacttccaaatggcataattctctgtcataaaatatttccaatttttcttcaaatttcagtagaaagggattgaatttgaagagtcatcaccgcagttctgctttcataaacaaaagcaaacaagcaaacaaaaatcactacgagtgttttgtaaagggagaaaggcaccaataggttattaaagttgaattaccagggccatttacgctcattcccagtgcctgtgtcacacataacccctgaagaaggaaaatagcaatacttagtgaagcaggtaaacggaatttccagccaaggagttcaacagacaatctgaattctggctggccttttaactcagaggtaattacagtagatttgggggcctaascttagtttgcaatatttttttaactgatattatattttatgcaggccaagtcaaacacttgaagggcagagggcaagatgtaattaaattactaccttatttatgttaattattcattcttattaaatgaggacaaagatgtga

SEQ ID NO: 778127 - DNA, 636 bp, Homo sapiens
ttgggaaccaagacatgctgatctaatggcagacccttgcgtctccccattcaccactgcttatgaggaaatgctaaaagctgttgtatttttatctgtacctcttattcaagataaagcagtattttggtggtccattgacacrttgattacagtggagccatgtttgactcagaaattagggtttaaagtcagtagttatagtgaaatccatgtctagtaaaattgcccttagaaatctgttaagctggacataaagtgcattgtaaatagatttgtgtatgcaatcttaagtagcaaaatagtatttaaaaatagtagagtaggccaggcacggtggctcatgcctgtaatcccagcactttgggaggccaaggtgggcggatcacctgaggtcaggagttcgagccagcctggtcaacaaggtgaaaccccatctccactaaaaatacaaaattagctgggtgtagtggcgcatgcctgtgatcccagctacttgggaggctgacacaggagaatcgcttgaacctgggaggtggaagttgcagtgagcagagattatgccattgcactccagtatgggcaacaagagtgaaactctgtctcaaaaaaataaaaataaaaataaaaaaaatt

SEQ ID NO: 778128 - DNA, 636 bp, Homo sapiens
ttgggaaccaagacatgctgatctaatggcagacccttgcgtctccccattcaccactgcttatgaggaaatgctaaaagctgttgtatttttatctgtacctcttattcaagataaagcagtattttggtggtccattgacacgttgattacagtggagccatgtttgactcagaaattagggtttaaagtcagtagttatagtgaaatccatgtctagtaaaattgcccttagaaatcygttaagctggacataaagtgcattgtaaatagatttgtgtatgcaatcttaagtagcaaaatagtatttaaaaatagtagagtaggccaggcacggtggctcatgcctgtaatcccagcactttgggaggccaaggtgggcggatcacctgaggtcaggagttcgagccagcctggtcaacaaggtgaaaccccatctccactaaaaatacaaaattagctgggtgtagtggcgcatgcctgtgatcccagctacttgggaggctgacacaggagaatcgcttgaacctgggaggtggaagttgcagtgagcagagattatgccattgcactccagtatgggcaacaagagtgaaactctgtctcaaaaaaataaaaataaaaataaaaaaaatt

SEQ ID NO: 778129 - DNA, 527 bp, Homo sapiens
tgtaacaaatgatgattcaaacctgacaattaaattgcattagatcagtgctcctcacacctaaggtgcaaaaggaatcccctgggattcttgttaaaatgcaaagtctggttcagcagacgaagggtggagcttgagggtctgcatttctaataaacccctgatagataccaaagccgcccatgcccagccatactttggacactaggagtagaaagggtttagaattcagtgtatgtttccagcaaaatacatccagaggaaaaagacggcgagaaaaaggagtgggggaagtatgatctwctgatttaaaaaaatatggtatttacaaatcaagtataagttgagacttatagatttaaaaacaaaactatcctttgataaaagcatacattcaaacgaaaacaccgataagatttagttaaatgtattgttgatatcctcacagcagtttgttgtttaagctgatgaggagaagcacaggggccggttctcctttgattggcacaatcctttcgagaaatatg

SEQ ID NO: 778130 - DNA, 504 bp, Homo sapiens
gccatatggaactgtaagtcaattaagcctctttcatttataaattacccaatctcaggtatgtctttattagcaacgtgagaacagactaatacagatagttgatgttattatcccccttttatggatgtattactctgttttcacamtgctgataaagacatatccaagactgggcaatttacaaaatatgaaggtttaacggacttacagttccacgtggctggagatgactcacaatgatagcggaggtgaaaggcacgtctcacatggtggcagacaagagaagagagcttgtgcagggaaactcccctttctaaaaccatcagatctcatgagactcattcactgtcatgagaacaacacaggaaagacccacccccataattcagtcacttcccactgggttccacccatgacacatgggaattgtgggagttacaattcaagatgagatttgggtggagacacagccaaaccatatcatccgccccagaccctccc

SEQ ID NO: 778131 - DNA, 504 bp, Homo sapiens
gccatatggaactgtaagtcaattaagcctctttcatttataaattacccaatctcaggtatgtctttattagcaacgtgagaacagactaatacagatagttgatgttattatcccccttttatggatgtattactctgttttcacaatgctgataaagacatatccaagactgggcaatttacaaaatatgaaggtttaayggacttacagttccacgtggctggagatgactcacaatgatagcggaggtgaaaggcacgtctcacatggtggcagacaagagaagagagcttgtgcagggaaactcccctttctaaaaccatcagatctcatgagactcattcactgtcatgagaacaacacaggaaagacccacccccataattcagtcacttcccactgggttccacccatgacacatgggaattgtgggagttacaattcaagatgagatttgggtggagacacagccaaaccatatcatccgccccagaccctccc

SEQ ID NO: 778132 - DNA, 630 bp, Homo sapiens
tcatctagtggttccctgaggggctggcacagaagctgacctgtgtttattccacgcctatagctttctaggaagtggcaatatctattgaaagacttcaaagacatactgccgaagcccaactgggacaaaggacagtagatgatggaagtggcagacagacccaacagcccatgaataaagaggcagtctctttctggaaaaagggctcagaaggactgctgcatcatatactaggaagcagagaacgtaatgtgcatttctrggactggacgcatgttcataaatgaccccaagaagatactgggttgcacctctggtggatctgtagattgtgtataagcaggagatgaagactaaggcagagttttaggtggcctggcttagtcttgaaggagtgtcccagcttagagccaagctgcaaagactgagagagtaatctctgtctctgtctctgtttctgtctctctctcactctctctctggatccaggaattcaaggaaatatgtgagaaatcagtggctaaccactgagatagtggaatagcaaacatatacgacaagaaatacagtcttccaaaatagttttgggaggccgaggtgggtggatcacaaggtcaagagatcgag

SEQ ID NO: 778133 - DNA, 589 bp, Homo sapiens
tacatacagtttctaaatttgttttgtataatgtcttcttcctccacgggtgtttcttcttgaagacggaattttgaaaagcttctgattcttctgttgcatcatcctccgtgacacctcataatgcagatggccaccacgcccagccagggcatggacaggcaaccacctctctgcttcaagggcctaattgtaccatatgtcacacccactgaataatacaaaggcccccccatgtacctaccgcttttcgatagcaaatmtggatgttttgctgtgtttgcttcagtgcttttctaataaagaaaatatcagaaatataatagtagacccccaagtatccctgaatctcagcactcttattttccacagataactacaacctgaaaattgatatactctattctcattatttttgatactttactatgtaaatctgtatctataaataataccattttcatgcttaaaacataaactaaatgttatgccactctaggttttcttacaatattatttatcttgagacattaactccactcattttaattgctctatggtatttcattatacatacatcacaattcat

SEQ ID NO: 778134 - DNA, 615 bp, Homo sapiens
atgaagaaatcaaacacagaaggtctcgtttttaagcagtgtgacatcctggtaaaacctgcaagaaaagctggtagtgaaatattgcccccggtaagtgaatgagttgtctttgctataaatggttgtcaaaagaaagaagttgcgaaggttaaagttgtaatgtacatcttgatcaggaggcaagaagaaacaaagagactggaggctggaccttgagagagctggctctagtctacactgggatcrtagccaaatgggaaaccaggtacttgctaattgtcctcgcccatgaaatggggctattcaataccctaccctactccatagggtagccacgtgagtcaaatgacgcaaagtttgctgaagtatcttaaaaaattgtaggccagtcaccgtggctcatgcctatagccccagcactttgggaggctgaggcaggaggatcacttgaggccacaagttcgagaccagcttgggcagcaaagcaagaccctttcgctaaaaaaaaaattttaagttagctgtatgtggtgacttgcatctgtatttccagccactagagaggccaagccaggaggatcgcttgagcccaggagtttgaggctgcagtga

SEQ ID NO: 778135 - DNA, 647 bp, Homo sapiens
atagctgtttcaaagtccttgctaattccaacatctgagtctcctcataggcagtttctattgcctgcttatttttctcatgtttgggtcacacttaatgtttctttggatgtctcataatttttcattgataactggacattttagataatatattgcagccactctgggtattggcctacctccttttcctggcttgttgtcgttgtttttgtttgtttggtcattggtttatatgtttattagtttggcaagaygaattctgtaaagtatatttcccctcgttgtgcagccagtgatgtttctgctcagatttatttgttctttttatctttaacttggcttcctagggtcttagtctccataaatcacttattggtcaagggtgaacttaagcatcgtgtatagagcccatgatgcattttctaatcaattagaacatgatttctaattaatttacttcttgcaatgacccactgcggtgtgtccagatgaaaatttctattttatacatttggaaactgaggatcatttttctcttaaacaatactcttgtgctcatacagcaaataaattgcagaacaagggctgaaactggcctttgacctcatgtataggcctcttttcacaatactgtgttatctttt

SEQ ID NO: 778136 - DNA, 578 bp, Homo sapiens
gaccatttgttttcctttggtcaagaggccgaatatcaaaaagcagcttgctacttaggaagctggccaatagtcacctagagaccaaacctggacttaaatccagttctcttagcccgtagttcagtcattttaattccttataataatgaaaaaggcaagaatatatgcatcatatgccatgaggcactttatttacatcttttctgttcatgcagctaagctttatgagtgcrgttctcatcctcaaatacacccgggcactccttgctcaaggccaggcattttatttacatcttttctgttcatgcagctaggctttatgagtgcggttctcatcctcaagtacacccgggcactccttgctcaaggccagttctcggggccatttgtgattgacaaaggagtgaggcttgagctcatcggtctcatatccagagtctgggaagtctctgagcaagaaaactcgaaggaggaagtctatcgacatgaagaaggaattacagtcatctcagatttattgttggtaagtcacactttttctccatccataaaaatactgtttccatatcccagga

SEQ ID NO: 778137 - DNA, 622 bp, Homo sapiens
tgtaacacctagaaattaacatgacttatataactggctcaacaatatttaactcaattttacacgttattggtttcagatttccttattcacagatgccattattactaggactaattttaattggaagtcaataatatacttacaaaaatatgatagaactccttattgcagattgttttctcttagaattataacttctgcaataagagatctgatgatgtgatggcaccactttttcacagtctttctgcaatgttcatccttacagggaagagagtcaagctccatcaacatgcaataagtrgaaatttaagaatgttctggtttattctaagtttctaaagaaaacattttcctatatattcattttaaactgcaattttgttataatagcttatatgaaaacataaataagacctaatcatcatctaaacaatacactgaattccctggaggtacatggctctactagccaattttacagttaaggcaactggaatttgagtaactcaaactaagagcaaggaagcagacagttaaataggtcgaagagttaagttataaatggtctagactccaactcagctgactatagcacccagagcaaatctgtccacag

SEQ ID NO: 778138 - DNA, 625 bp, Homo sapiens
tcattagtcaactaacagccaacttatgtcctctgttcaatcaagagcaagctaaacagctgcatcgttctgtttgccattattgccaatgaggtgggactttgttcaataattacaaacttaacaggttgtcagggatgttatgtaacagagagagcatcagtcaaccaggaagcaacagggcacttgttacctgtgaactgtggagatacaggaccaagttggacgctgaggaacaggaacactgaagaactgcttgttgccccgccactgctgtccactctttatttagtatcccccaatttcactgacatccgtcaggtttttttgttgtttttgtttttgtatttttttgagacggagtctcgctctgtcgcccaggttggagtgtggtggcgtgatctcggctcaccgcaagctccaccttgccggttcacgccattctcctgcctcagcctcctgagtagctgggactacaggtgccygccaccatgcctggctaattttttctatttttagtagagacggggtttcaccgtgttagccaggatggtctcgatctactctgtcaggcttcttaaagatattactctaaaattcacaaatctcccctagcacataacaa

SEQ ID NO: 778139 - DNA, 644 bp, Homo sapiens
ttagaaaatgaatttgaatgtattctccaaggaaagccatgtcctaaaagaaaaaaaaaaacagctattcattgtgatgcaagacttcagaatatagttaatggggtcgtggaagtttgccagctcttacagaatatctctgcatagttgcccataatctactgtaatatgacttacacagaaaattcgacatatatggctttttcaagttgaattttctgtatagtttttttagcttttttcatcatcataaattgtcagcattatttttttacagttcactatgctctcattttatccttgcatcatttcaatactgaagatataaattagaacacttatacagtgttctaatttgttttaggcattttttgcaaaactgactccacagaagtgcattaccacaatgttgtctgtgtgtgtaggtaaaaatgggawatttcctcaataaatgaagagatgtcctttttgcacatctgcatttgtgaaaaatttctctagatcttggtttttttggtgactggctatgtggtggtgaactgttgcggttctagattgagcctgttagaaggcgtaggttgttcatcctggcttttcggaagactgcagttatgaagctgggcgcacgcaattcccacccgagc

SEQ ID NO: 778140 - DNA, 644 bp, Homo sapiens
ttagaaaatgaatttgaatgtattctccaaggaaagccatgtcctaaaagaaaaaaaaaaacagctattcattgtgatgcaagacttcagaatatagttaatggggtcgtggaagtttgccagctcttacagaatatctctgcatagttgcccataatctactgtaatatgacttacacagaaaattcgacatatatggctttttcaagttgaattttctgtatagtttttttagcttttttcatcatcataaattgtcagcattatttttttacagttcactatgctctcattttatccttgcatcatttcaatactgaagatataaattagaacacttatacagtgttctaatttgttttaggcattttttgcaaaactgactccacagaagtgcattaccacaatgttgtctgtgtgtgtaggtaaaaatgggaaatttcctcaataaatgaagagatgtcctttttgyacatctgcatttgtgaaaaatttctctagatcttggtttttttggtgactggctatgtggtggtgaactgttgcggttctagattgagcctgttagaaggcgtaggttgttcatcctggcttttcggaagactgcagttatgaagctgggcgcacgcaattcccacccgagc

SEQ ID NO: 778141 - DNA, 598 bp, Homo sapiens
cacataacccctagatcaggaaatcagcattgttcctacatgataattcggtccacaaactcacttcacttttacctcatgccacacttgggagtataatgtgttttttttttttttcattacgatccagttttcttttcctggaactgttccccagactttcctgcatatttatgacctkgacacatttaaagagcatacaggtttttgtttgaacagttgttttcaggtctttggggtatatacctaggaatggaatcattgactcatatggtaaatctatttgtaacttcatgaggaaacatcaaattattttacacgtaggctgcaccatttcatattgtcacaagcagtgtttaagagttcaagtttctgcacatctttgtcaacacttgttattttttagtataactattcttgtgtgagttaagggttatctctttatggttttaattatggtaatgatgttaagcatcttttcatgtgcttgttggtgaagtgtgtattaaagtcttttgtcaatttttagattgggttgtctttgctatggagttgtaaaagttctttatacattctggataacagacactgatgaagt

SEQ ID NO: 778142 - DNA, 620 bp, Homo sapiens
agttcaatatgggaaatataatttgttaaaatataaaagtgcaattgtgttacatgctgtacgaagtacatgttgacatgtgagcatataataaatgggctggaggccagaggattgccaaagagaatgggcctcctgctgagatgaaaagttgagcagggattagttggcgaaagtggagggacgatcctttctaggcaggaggaagaacatgtacagaatctctgaggtgtgatgcgacaaagtctatataaaaaactgaagaaaggtctaatgtggcttaaatacagaagctagtaggagaggagtygaaaacaggctggagaagtagaaagtgatcgcattctgcaggaacttatattgtataaaatatattgtatattgtataaaaagaatttctctttattctaagtgcaatgtgaagccaatgaagtgctttaaacaggtgatgtgatttgattgaatttattacttcacttaacaaatattcattacatgcccactgtttgtcagatattgctgtagcccctggtgatacagtagggaataaaacaggcaaaaatccctgtcctcttgcagcttataatggactgcaatgtttaatatgtcagaggaggtcc

SEQ ID NO: 778143 - DNA, 620 bp, Homo sapiens
agttcaatatgggaaatataatttgttaaaatataaaagtgcaattgtgttacatgctgtacgaagtacatgttgacatgtgagcatataataaatgggctggaggccagaggattgccaaagagaatgggcctcctgctgagatgaaaagttgagcagggattagttggcgaaagtggagggacgatcctttctaggcaggaggaagaacatgtacagaatctctgaggtgtgatgcgacaaagtctatataaaaaactgaagaaaggtctaatgtggcttaaatacagaagctagtaggagaggagtcgaaaacaggctggagaagtagaaagtgatcgcattctgcaggaacttatattgtataaaatatattgtatattgtataaaaagaatttctctttattctaagtgcaatgtgaagccaatgaagtgcyttaaacaggtgatgtgatttgattgaatttattacttcacttaacaaatattcattacatgcccactgtttgtcagatattgctgtagcccctggtgatacagtagggaataaaacaggcaaaaatccctgtcctcttgcagcttataatggactgcaatgtttaatatgtcagaggaggtcc

SEQ ID NO: 778144 - DNA, 618 bp, Homo sapiens
attgccttcatatatttttcaaaaattggttgtgtttgtgctcctatttctggactctgttttgtttgatcggtctgtctgtcttgcagaccagtactgcactgttgtgattactacggctttaacgtagttggtgaaattaggtagcccctcctttttcattgtcaatgttgttttctctattctaggtccattacatctccatatgaattttagaatcagcttgccaatttgtacaaagaagcctgtgggattttgactgaggttgctgattctgtggattaatttgggggagaagtgcgttcccaacacccagagtctcccagcctgtggacaaggcctctctctctccctgtgtggaggttgccctggagctctcttcacagtgctcggagcttgtcaygtgcaggtttttcttggcctgttccgttccatctctgtgtatttcatggtgttggatgcttttgtcagtagtattttccagatgactttctggtgctgattgctagtttaattccatgatggtcctataacatagttagaattatgaaattcctaaatagactgagccttcttttatggtttagcatgaggtcttcttggtacatagttcaagtg

SEQ ID NO: 778145 - DNA, 481 bp, Homo sapiens
agcgccactgctggcctcacgagcgccgctgggtgcctgagcacctgccccaccagagcgccactgctggcctcacgagcgccgctgggtgcctgagcacctgccccaccagagcgccactgctggcctcacgagcrccgctgggtgcctgagcactcgccccaccagagcgccactgctggcctcacgagcgccgctgggtgcctgagcacttgccccaccagagcgccactgctggcctcacgagcgccgctgggtgcctgagcacctgccccaccagagcgccactgctggcctcacgagcgccgctgggtgcctgagcacctgccccaccagagcgccactgctggcctcacgagcaccgctgggtgcctgagcacctgccccaccagagcgccactgctggcctcatgagcaccgctgggtgcctgagcacctgccccaccagagcgccactgctctgacttccacgctggatacc

SEQ ID NO: 778146 - DNA, 627 bp, Homo sapiens
gcatttagaggaagcgtgcagatgtctgcaatttacttaaagcgcgtcagaagaataaagtggcgcggcggctgggcgagggataaagagatgtcaggaagccccgcggcggaacatccgtggtggagccttggtggcgggtgaccaggcgctcgctgcaaacttccctcaacttcacaacrtatctttaaatgttcatcatcaaatgctgaaaaaacccaacagggttgagtctgaatgctgctcccatcactgctgggtgacacgggggccccacgggcacaggtgccggcccaggctgcacacttcacacacacaagctggaggctcctgggtgggactgtcaggtggggatgcgcccgcccagccagaaggtcagtgtcctgcccagtgcggcctccactggacgtgcccctctctacccagggcggcctgtgagccccgactagcctcactgtgtgtcctgccccgtagcctgtgagccccgaccagcctcactgtgggtcctgccccagctcggtgccctccatccccgcatgtggcccatcagaaccacagacgtggaaaacgtccaagtgtcttggaggtaaggacgacggtattatgacagacaacaggaatggccac

SEQ ID NO: 778147 - DNA, 555 bp, Homo sapiens
atcttctttcttagagaaaggatacactgtcatctggctggggtggcttaactatgttcactaaggttctcaagactgctaaactgttatttttgcaaaaacacaataactttaaaaattggctgtaagcatgcctgcttaagcactctaaatgcaaacaattactgcttatataacagtgactcataccctatggtgtcacctaaaacctgactattctccaaagctttctagttatagatggaaattctcatacttaaaaacttgtaacttacaagccatcacaggtgcaaagctattttccagagcaaaagcatatcaactccgtctggcaacaagacatgcagtaacaattatgcaccatccttttrgttcaaatatacttttgcccgaggcattagcattattctagtgtgtatttgctatgtttacacttagttttgagatactttatgaacatttactccagtgtctcaaataaatgcaaaaacaataaagcttgtaaaaaaaaatactagattgaagaagcggacaatcacaaatgaaacaaaagta

SEQ ID NO: 778148 - DNA, 611 bp, Homo sapiens
aaaagtgagtggtgacacatccatcacaagcaaaagtcagtggtgacatgtccaacacagatggggcagcggttctctgttggtagactccgtcccatacaggggaacaaggcttagtgattagaacaaggctgcaatccggcttccatttgccacctcagttgggtggccaacctgcatctacaaattgcttgctagaaaactcctcacaacacaagtggcactcatcctgaagtggrgatacctacccaaaatatttttgttatagtgaaaatcgatctggtttggaaacagatgccaagtggaacttacaatatcaaggaggaaaagactctgattgtaaagctcttagaagaacaattcactgtcctactggatgataatgcagtgaggaaccacaatcacaagcctcttgtagccataagaacctacatgggggaaattggcttatttacaaatttttaggtatggttggtggtaggcaaacatgttcaccagcaattccttctaccactggttgcatgcgccgtttcttccattaagaaatgaagtctatttcctttccccttgaacctggccagatcttttaacttgctttacttgctttgatt

SEQ ID NO: 778149 - DNA, 611 bp, Homo sapiens
aaaagtgagtggtgacacatccatcacaagcaaaagtcagtggtgacatgtccaacacagatggggcagcggttctctgttggtagactccgtcccatacaggggaacaaggcttagtgattagaacaaggctgcaatccggcttccatttgccacctcagttgggtggccaacctgcatctacaaattgcttgctagaaaactcctcacaacacaagtggcactcatcctgaagtggggatacctacccaaaatatttttgttatagtgaaaatcgatctggtttggaaacagatgccaagtggaacttacaatatcaaggaggaaaagactctgattgtaaagctcttagaagaacaattcactgtcctaytggatgataatgcagtgaggaaccacaatcacaagcctcttgtagccataagaacctacatgggggaaattggcttatttacaaatttttaggtatggttggtggtaggcaaacatgttcaccagcaattccttctaccactggttgcatgcgccgtttcttccattaagaaatgaagtctatttcctttccccttgaacctggccagatcttttaacttgctttacttgctttgatt

SEQ ID NO: 778150 - DNA, 596 bp, Homo sapiens
caggaggcagaggttgcagtgagctgagatcgtaccactgcattccagcctgggcgacagagcgagactccatctctaaataaataaataaataaataagtaacaaatgaataagaaagaaacttcaataaaaattataaaattatttataactaaatgaaatgaaatgaaaatgaaaatttttcaaatttgtggaatgcagaaaaarcagtgtttagaaggaaatttaaaattaaatgcctttattagaaaagaagaaaacctaaaatcaataatccgagctcaggaaactagacaaaggagagcaatttatacctaaagaaatcagaagaaaataaatactaaaactgaaagcagaaagtaatgacattgaaaagaataaagtagtagaaaaaatcagtaaagccaaaagctctttaaaaaaaaaaaaattggtaaatttgataaacttctaaccaagataaccaagaaaaaagacacaagttaccaatatccgacataaaaacagggccatcactactgattattatcagtactgggccaattccctgaaagacacaaactcccaaaactcacacaaggagaaataaataaac

SEQ ID NO: 778151 - DNA, 644 bp, Homo sapiens
tgataaacattgctcctatagattatagattaactaaaagtattccttacaggaaacaaagggatggggtgaaacaaagagatgggctctggctagttatctgcagcaggaacatgtccttaaggcacagattgctcatgctattgtttgtggttcaggaatgcctttgagcggttttccgcctgggtgggccaggtgttccttgccctcattccggtaaacycacaaccttcagcatgggcatcatggcccatcacaaacatgtcacagcactgcagagattttgtttatggccagttttggggccagtttatggccagatttgggggcctatccccagcatgaaaaggtagagagagagactggggtagaaattgtattcaaagagataacacagagctttccaaacctacagaaagatatcagtatttaagtacaagaagattgtagaacaccaaacagggttaactcaaataagactacctcaggacatgtaacaatcaaacttccaaatatcaaggataaagaaatgatcctagaagcagcaagataaaaacaaaaacaagaacaagtaacatataatggaattgctccactatgtctggctgtagacttttcagtggaaaccttacaggccaggagag

SEQ ID NO: 778152 - DNA, 644 bp, Homo sapiens
tgataaacattgctcctatagattatagattaactaaaagtattccttacaggaaacaaagggatggggtgaaacaaagagatgggctctggctagttatctgcagcaggaacatgtccttaaggcacagattgctcatgctattgtttgtggttcaggaatgcctttgagcggttttccgcctgggtgggccaggtgttccttgccctcattccggtaaacccacaaccttcagcmtgggcatcatggcccatcacaaacatgtcacagcactgcagagattttgtttatggccagttttggggccagtttatggccagatttgggggcctatccccagcatgaaaaggtagagagagagactggggtagaaattgtattcaaagagataacacagagctttccaaacctacagaaagatatcagtatttaagtacaagaagattgtagaacaccaaacagggttaactcaaataagactacctcaggacatgtaacaatcaaacttccaaatatcaaggataaagaaatgatcctagaagcagcaagataaaaacaaaaacaagaacaagtaacatataatggaattgctccactatgtctggctgtagacttttcagtggaaaccttacaggccaggagag

SEQ ID NO: 778153 - DNA, 633 bp, Homo sapiens
tgcaatctccaggctgataagggtctagagctgtctccaataattacctctgtccttcctggtggagaggagagagaggcacatttacaaatttacattctgcttttaatcaaatgagggagggaagagagtttttcttatgtctgtttcttcttaattgtcttcagctcaaaataatcaatatrccaaaatgacatattttggggtgcatcttctgcatctcttcactgccatttctcttggtaatgaaccttgttgctgcttgtaagattgctttgaaagtgatgggactgaggatgtttgcgactgaaaattacagacagctgggcaatgctgtaatcagaaaaaggatcattgacttaaataaagcttccatcaaaatatattctttataagaagatttgcaatattaatagcctttctctcaaggtatactagaaagcattcagtgagtcttactgtatgtcaggtaagccttgttctcagtcttttctggaaaaaaaaaaaagaattatcagacgtcaaatataaagaatatttatcagtatttattctaaaaatctctgagaacacttaaattttttttttaaattaagctcatgtcttctcttctttgtaatgaaccagaaggat

SEQ ID NO: 778154 - DNA, 641 bp, Homo sapiens
ccaagatctccccacagcctaaattcctattccttgtaactcattataaaattttctttaaggtgtccacatggcccataatcccgcttgaagcagccctgagaaacatcatccattatctctccataccaccccccaaaaatttttgctgccccaacactttgccactattttgttttatttttcttaatataaaaagacaggaatgtcaggcctctgagcccaagcctgcacrtgtacatccagatgcctgaggcaactgaaaactgcaaaagaaatgaaacagccagctcctgtcttaactgattgagcaatcttacgacattccattatgacttgttcctgccctgtcccaactgattgatcaatcaacctggtgacattcttctctgcacaatgagtcttatgatctccccaccatgcaccttgtggccccctccactgctgacaatggataaccacctttaactgtaactttccactgcttaccccactcctataaaactgccccacccctatctccccttgctgactcctttttcagactcagttggcctgcacccaagtgattaaaaacatttattgctcacacaaagcctgtttggtggtctcctcacacggacgcatgtgaaagtagggaa

SEQ ID NO: 778155 - DNA, 636 bp, Homo sapiens
gtaagatatgcagaagacaaataacaaaatcacagtagtaagtccttccccatcagtatgttttaaatgtaaatacattagacccctcaatataaagacatagattgccagagtgaataaaacaaataggatccaactatattctgtctacaagtgactcactttagatctaaaaacatgcayacattgaaagtgaaagaatagaaaaagacattccctgcaaataataatcagaagatagaaggagtagctatactaacactagtgtcatacaagattgactttagttcaaaaactgttacaagaaacaaagaacattacataatgataaaagagtgaattaaccaaaaagatataataattataaacatatatgtactaaacatcagagctcctaagtatatgacacaaacattgatagaattaaatgagaaaataaatagctctacaataatagtaagaggcttcaacagtcaactttcgatattaaatagaacaactaaacagaggataataaggaaataagggacaagaacaacactataggccaattagacccaacagacatatatagaacattccacccaacagtagtagaagacatttttctcaagtgcatatagaacattgttcagg

SEQ ID NO: 778156 - DNA, 636 bp, Homo sapiens
gtaagatatgcagaagacaaataacaaaatcacagtagtaagtccttccccatcagtatgttttaaatgtaaatacattagacccctcaatataaagacatagattgccagagtgaataaaacaaataggatccaactatattctgtctacaagtgactcactttagatctaaaaacatgcatacattgaaagtgaaagaatagaaaaagacattccctgcaaataataatcagaagatagaaggagtagctatactaacactagtgtcatacaagattgactttagttcaaaaactgttacaagaaacaaagaacattacataatgataaaagagtgaattaaccaaaaagatataataattataaacatatatgtactaaacatcagagctcctaagtatatgacacaaayattgatagaattaaatgagaaaataaatagctctacaataatagtaagaggcttcaacagtcaactttcgatattaaatagaacaactaaacagaggataataaggaaataagggacaagaacaacactataggccaattagacccaacagacatatatagaacattccacccaacagtagtagaagacatttttctcaagtgcatatagaacattgttcagg

SEQ ID NO: 778157 - DNA, 524 bp, Homo sapiens
cccagcacagcgtattgacagtgatgattcttgagtgtgactcgataattattttatttcaagggtttaaaaggtcagcctggggaccaatcacaaagtcagggttgagatcctatatatcacaaggcttttatactacctgaccaacatgkgtttaattactaatcctgcaaagactaatatagtttctaacgttttatccatgttttattagtatgctgatgttgaatgttgggtgtgtgttgttggcgtattaattttttttctgcaatcaaatatggctttctttctcctttggaagaaatgacgtaaggtgggtgaaattgggctatcacagtctcagcattatggacattggggatagctaattatttgttgtgggggctctcctctgatatttagcaacatccctgcctctatccactggaagtcactgacacctccctcttaacaccaggtctttaatcttgacaacaggaaatttctcccagacattgcagaatcccgcctgtatgagaaccact

SEQ ID NO: 778158 - DNA, 650 bp, Homo sapiens
cttttaaggacaactactgtgtataacaaagatgctgtcttcacactgcagtatttaaatcaccacatgcaaaggtttctcctcttcttttctgtgagctatccaccatgtggaggatacaagaacatcacagcattataaaaactaaaatgaagtagtctttagttccacactaaatcaacagtcccaaccagatcacaagcaagacaacctcttcctccaaaatacacaggcgctctgtctcctttcattccaagttcaggaccatgttacaccagctaaattaatctaccgggtgattttcttgactgtatgmctctcacttgaaggatgacagaaattctcaattaaaaaaaccaaaaggaagctgtgtcagacagcaacaaaacaacaaaaaatcctgcaagagtcatcactgttggaaatatacttttcctgtggattaatacactctccctgacaacctgtcatgtgatttcatccaaactgtagtcgcatcaaatccaagagaaagagacagcaggaagggttggacagtatttgcttttggagtagttaacccatgaaggctttcttcgggcctgatcctttaagcccaagtatgtccctggtggtgtcgtttaaggcagtgatcgggctaagtgaggcat

SEQ ID NO: 778159 - DNA, 552 bp, Homo sapiens
gcttgggcaacaataaataaaaataaataaaatttaaaaaatatagtatgtacatttgcatatcctattcccattgaatattatctaaacttgcctatatttcttaactcagaagttacatgcatcctccttaacaagtgggtgagctagataaatctcaggggattaaaaaagattcaattacttatcttttggggtgaattgatgartaagaaactgtaatagcaaccctctggacctactaggcatctgtaattggtaggcttttccgacattttttccttcacagacttagcaaccgaagcacaaggtggattaaataaatgactaaataaaagagaaacagaaatatcatatcctggctccagatccatgattgtcagtagtgtgttacagtgtttttaccagtaacagttagcattgccttgattataagcaaacaaaagtagattctatttagcttaagcaaaaaaaaaaaaaaaaaaaaaaaaaaattattggcaggctttgagtagttcactatatagactaaaggatataggagaatgagac

SEQ ID NO: 778160 - DNA, 622 bp, Homo sapiens
ctaggcccacggccggtggacagtgggggcccaatatcgcggaagcttcaagtgtttccttacaatcctggccatggcatttctcagtggggagttcttatcctcaacaactttctagttcctgtgtctctgtccctctgtcatggtgggggtggagggaagactgcacatttcataacctgtrtaagattatgtatactgattatgggaactttgctccattccatttctaactcatctcatctgtacatcattccaaaagaatctgtcaaaaaagaacagatgaaatcttactgcattccctgatttcaaaaagccatgtatgtcatcgacccaaatgatttttatggtgtctgtctcactgttaggtgtctatgtgtatagtataaggaactcacacacctctcagggtttacacttttagatcccagttaatagctggggtccactggtaaaatgtttaaaaattataactgtctttgcaataatgaaatgcagtaggaaatgtttgaaaaggctcagaaggcccactgagatgtcttcttgactcttctccaaataagaccagtagaaggttgcaacaagagaatggaattaaccaacccttccctgttaacaagct

SEQ ID NO: 778161 - DNA, 513 bp, Homo sapiens
cacatttggattgcttctacgttttggctattgtgagtaatactgctgtgcatatgattgtacaaatacctgttgaaggctgggtgcagtggctcacgcctgtaatcccagcactttgggaggcctagcggggcagaccatttgaggtcaggaattcgagactagcctggccaacatggtgaaaccccgtctctactaaaaaaataaataaaaaattagccgaaatggtagcggctgcctgtagtcccaactactcaggaggctgaggcaggagaattgcttgaacctgggagacagaggttacagtgagccaagattgcaccactgcacttcaggctgggagaccatgcaaratgttgtctcaaaaaaaaaaaaaaaaaaaaaaaaaaaaaaaacacttgttcacatacctgctttcacttcttttgattgcatatgtggaagtggaattgctggatcatacagtaatttgatgtttaattttgtgaggaattgccatgccatttgccacag

SEQ ID NO: 778162 - DNA, 656 bp, Homo sapiens
atttgcaagatttctctagcgtatattcctagaagtagaattttgagactgcaagcaatgtgctaattcaacttcgctaattggtgccatattgtcttctaaagtggttgtgtcatttaaaactcccacttgtcaggtagtagagctccccttgtttcccattttcagcaacacttggtattgttggctcgttgatttttgccaaacgactgagtgtgaaatggtaatctctttgagattttaatttgcatttttctgacaacaaatgaggttgagcatcttttaatttttttatgggcatttatatttcctttgaaatgactgttgatgtcttttgtatatrtttttttcaattggatgttttgtctaaatttctgttgggtcattttgaggacatttaagttcttaaaatcatctggaattgatatttatgtgtagtgtgaaataggaatccaacttcatgttgtttatattgaaaaccaattgtcccagtacaattttttggatagtacatcctttcttcacttacataccatgccagctgtgtcaggtttccatctatgtgggttttcttctagagtcactgttcttgtacaatagttgatgtatccctatgacatatcacacaatcaccatgattataacttcataataag

SEQ ID NO: 778163 - DNA, 624 bp, Homo sapiens
aaaactgcctggagataccatctcacaccagtcagaatggctattatgaaaaagtaaaaaattaatggatgctggtgagtttgcagagaaaagggaacacctatacattgttgggagtgtaaattagttcaactattgtggaaaacagtgtggcaatttctcaaagagctaaaagcagaaccatcattygacccagcaatcccataaatcattctaccataaagatacatgttcattgcaccactattcacaatagcaaaggcaaggaatcaacctgaatgcccatcaatgacagattagataaagaaaatatggtacatatacaccatggaatacagtgcaggcataaaaaaaacaagatcatgtcttttgagagaatatggatggagctagaggacattatccttaacaaacaaatgcaggaaaggaaaaccaaataccacatgttcttacttataagtgggagctaaatgatgaaaactcatgaacacaaagaaggaaacaacatacactgtggtctacctgagagcagagggtaggaggaaggagaggagcagaaaatacaactattgggtaatgggcttaatacctgagtgatgaaataatctatataacaaaccccca

SEQ ID NO: 778164 - DNA, 598 bp, Homo sapiens
aagcttttataaaacgagatgaaaacattacaaacgcaaaacgactgaaaatactacaaacgcatgtatctttttattgacatttaatggttttaatgccaaaataaaagcttggtaatcctgatgaaactgttagaaggaaaataaaggttgtatcttacaaagaaaggcagacttgcttctttagcttatatagatatcatcattgttataattaggttatagtttgtagaataaatataaaataaacacaagtgatatyttctcaagcaatagctagattaaatcctaaattaggtatttacctgaagggaaagagacagaattttgaaatgagatttcaaggtacacttaaagacagattttttttaatgcatggtgttttgtttcaatattataaaagaaataggatgttaaatatttagtctatagaaacaaattgcctgtttctgaaacttagatctgacactttctatgttgacatgtaatccacaatgttgaaggtgagggttgttaggaggtattagggtcatgggagcagattcctcatatggtgccttggagccctcctagcagtaatgagtaaattcttgctgtg

SEQ ID NO: 778165 - DNA, 600 bp, Homo sapiens
tggccaactttctctaggctcccagtgaggagggaggaatgcagctaccatctccacaggccaggtgaaacgcagacagggaaggtgtatttattacttccacccagacgtaatcatccccagcaaggaacaaggactcagcagggttgaaaacagatgagaaaattaatgaaatgagatcgtctgagagaatagtaagccaggggagagaaggaatattgcaaggccccaggcaagttctcttcacccactcacaccccacctaaggccagaaaacaagtagtacctaaggttgccagatttcgctaataaaatcacaggatgtccagttgcatttggacacacttatactaaaaaaggattcactgtttttctgaaattcaattttaagtcacacgaatagcctcaattcacagagaagtggactgartgactgcaagacgacagtatcatgacagggtatctgtctaccctaataagaccagaagctgagagatggccttattgtttcccgtttgtgatcagacagagtgggaaaggctttggggaagagaggggtgggtgaaaatgtggatacagggggtcctcctctcttacaga

SEQ ID NO: 778166 - DNA, 580 bp, Homo sapiens
cagagttctctccttccaccatgtgaggacacagctagaaagtgtcatcagtgaaccagaaattgatccctcaccagatactaaatatgttggtgccttggtcttggactttccagccctcagaactgttagaataaatttctgttgtttaaaagttacccagtatatggtattttgttatagtaacccaaaccacagtttctgcaggcatttcccattcctgggctggcaggactcacacttggccgggcttctatagacatgataggccagactgtggagttcctggtggtcctgagctgtgttagctcaacaaaggggatgggctacttgataccatagtgtyacaaatttgagggcagaatgtttatagagatttcatctaaacagtctttttttttttttttttttgctcaaaaaagtttcaggaaaacctaggttaagcaatgtgaaacaactttcttgagtgactgcgggatctctcaaagactttaatatattaatgaatattttgaatctcaaagaatgaggtgatggtacacaatattttccatacttatttgatcagagaatgtccttt

SEQ ID NO: 778167 - DNA, 469 bp, Homo sapiens
  misc_feature 201: n = A,T,C or G
aatatactatagttctgaaggtgtcatgcacatctttgtaaccaacaatcctaaacaatgtggcatcttacatttacccagccctgtgtctccaggtccagtcaaacctccgggacgagtgccaaatctaagtgtctcactcaaggtcatgcattttactgtcttmttcttctttttttttttgtttgtgagacagagtcncactccgttgcccaggatggaatgcagtggcatgatctcggctcactgcaacctctgactcctgggttcaagcaattcttgcgcctccgcctccagagtagccaggtacaggtatgcgccaccacaactggctaatttttgtatttttagtagagatggggtttcatgatgttggccaggtttgtctcaaactcctgacttaagatgatctgcctgcctcagcctcccaaagtgctagggctacaggcgtgagccaccgcgcctggcc

SEQ ID NO: 778168 - DNA, 573 bp, Homo sapiens
gacaacttccatgggaaaataaacttttttttctacttttcaaaataaaccttcaagttgaaaaatcaaaccctgcctgtgagttagtgttgaaagtttataaagacaattattttgcaattagtgtctgtagaacttgttggaattacaaaggacaatgacaactgacttctttattttgcaaaactaaggaggctagcgtttgccaacgctttttatgtgtacatcttgtctaactgaagtcttttagttaattttgtcttagagttctttggtgtcctttgtagttactgagaagcttggctttaagctgcatcctactcttctgttctgcatgtgaatggccrgatccagaaatatacctgtgtttagatccagaaaatatacctgtgtcagaggtgtatgaaccagagcaactccatcttgaataggggctgggtaaaatgaggctgagacctactgggctgcattcccagacagttaaagcattctaagtcaggatgagacaggaggtcggcacaaggtacaggtcacaaagaacttgctgatgaaacaggttgcaataggctgggt

SEQ ID NO: 778169 - DNA, 630 bp, Homo sapiens
aggagaatataaaacagaaacccatagtaaaaaacttcaatttgttgtagcttagtcctctaatcagatgtcccattacagggttgtgttaaacctcctcttatgttggcagtaggacaaatcaatattttacctgattttcaaactatatcatgtcttggctgtcatcttttcacttgcattgactctacatttgataagaataatagtatcttgcttgtcagagcctgagagggagtttggatacctgtttcccttaatagaccttggaaagcttccctttccattcataytgtcactgaaatactaaagggaatgcttaattgaacaaaaaggtttattttcactcttattgcagttattatgggtaccatagctgtaacagccacgacagcagccacaggtgttgcttacattcttctgttcaaactgctgattatgttaaccagtggcaaaagaattcttctaagctttggaatacccagaaacaaattgatcaaaaattagctaatcagattaatgatctccatcaaacagtaccatgaatgggggattgaattataaacctggaacatagaatacaaatacagtgtgattggaatacttctgatttttgtattactcctcaat

SEQ ID NO: 778170 - DNA, 630 bp, Homo sapiens
aggagaatataaaacagaaacccatagtaaaaaacttcaatttgttgtagcttagtcctctaatcagatgtcccattacagggttgtgttaaacctcctcttatgttggcagtaggacaaatcaatattttacctgattttcaaactatatcatgtcttggctgtcatcttttcacttgcattgactctacatttgataagaataatagtatcttgcttgtcagagcctgagagggagtttggatacctgtttcccttaatagaccttggaaagcttccctttccattcatattgtcactgaaatactaaagggaatgcttaattgaacaaaaaggtttattttcactcttattgcagttattatgggtaccatagctgtaacagccacgacagcagccacargtgttgcttacattcttctgttcaaactgctgattatgttaaccagtggcaaaagaattcttctaagctttggaatacccagaaacaaattgatcaaaaattagctaatcagattaatgatctccatcaaacagtaccatgaatgggggattgaattataaacctggaacatagaatacaaatacagtgtgattggaatacttctgatttttgtattactcctcaat

SEQ ID NO: 778171 - DNA, 390 bp, Homo sapiens
ttaggtgagggcttgagttgtcagggacaagtgggcattgacttattcaatttgcagggacataagcttaatccagatgtcttttaggatgagtgagttctgccagtttcatggctagagttttaaaatcaaggctgggtatctttgcttctctctgtatttttatgtgcacatgtgagtatgtttttatgtatttactgtgatatcaaattggcttataaacaaaggagtactcataaatgaaataaataagyccagtttttttcaagtttatgtgattttagcagtctttgataaatatagtttttaaattgttgttaaaatagaaatgtcttcaaaatttaatttagacacatttgtcttggtcaggaaggtttataatctttctgc

SEQ ID NO: 778172 - DNA, 658 bp, Homo sapiens
tgggtttttcagctctatcaggtcggttacattctcttctatagtggttattttttctgtcagctcctgtatcgttttatcatgattcttagcttccttagattttgtttaaacactctcctaaatctccaaaatcttcattcctatccgtattctgaattctattcctgtcatttcagycacctcatgccagttaagaacccttgctagagaactggtgcaattatttggagaaaataaaacactctggatttttgagttgtcagagttcttatgctagttctttctcatctttgtgggctcatattccttagatttttgaagttgctttcctttggatggtttttttcttttatcctatttgatgatctttgggatttgtttgtggtataaagtgagatcagtcaactggcttcatttctggaagattttaggtggccaaggctcagcccaggacttctggactgcatgctctaactctgggagactggtatcaagccctagttttgttctctggctcctcgaggttagaaacctgttgtgcaggaggggcctagttcctcctgaactgctggtaacaacactccaatgagtggtgccagccaaagcactttttagggcagtggcagcaggatccgttctatttcacatatattag

SEQ ID NO: 778173 - DNA, 658 bp, Homo sapiens
tgggtttttcagctctatcaggtcggttacattctcttctatagtggttattttttctgtcagctcctgtatcgttttatcatgattcttagcttccttagattttgtttaaacactctcctaaatctccaaaatcttcattcctatccgtattctgaattctattcctgtcatttcagtcacctcatgccagttaagaacccttgctagagaactrgtgcaattatttggagaaaataaaacactctggatttttgagttgtcagagttcttatgctagttctttctcatctttgtgggctcatattccttagatttttgaagttgctttcctttggatggtttttttcttttatcctatttgatgatctttgggatttgtttgtggtataaagtgagatcagtcaactggcttcatttctggaagattttaggtggccaaggctcagcccaggacttctggactgcatgctctaactctgggagactggtatcaagccctagttttgttctctggctcctcgaggttagaaacctgttgtgcaggaggggcctagttcctcctgaactgctggtaacaacactccaatgagtggtgccagccaaagcactttttagggcagtggcagcaggatccgttctatttcacatatattag

SEQ ID NO: 778174 - DNA, 658 bp, Homo sapiens
tgggtttttcagctctatcaggtcggttacattctcttctatagtggttattttttctgtcagctcctgtatcgttttatcatgattcttagcttccttagattttgtttaaacactctcctaaatctccaaaatcttcattcctatccgtattctgaattctattcctgtcatttcagtcacctcatgccagttaagaacccttgctagagaactggtgcaattatttggagaaaataaaacactctggatttttgagttgtcagagttcttatgctagttctttctcatctttgtgggctcatattccttagatttttgaagttgctttcctttggatggtttttttcttttatcctatttgatgatctttgggatttgtttgtggtataaagtgagatcagtcaactggcttcatttctggaagattttaggtggccaaggctcagcccaggacttctggactgcatgctctaactctgggagactggyatcaagccctagttttgttctctggctcctcgaggttagaaacctgttgtgcaggaggggcctagttcctcctgaactgctggtaacaacactccaatgagtggtgccagccaaagcactttttagggcagtggcagcaggatccgttctatttcacatatattag

SEQ ID NO: 778175 - DNA, 658 bp, Homo sapiens
tgggtttttcagctctatcaggtcggttacattctcttctatagtggttattttttctgtcagctcctgtatcgttttatcatgattcttagcttccttagattttgtttaaacactctcctaaatctccaaaatcttcattcctatccgtattctgaattctattcctgtcatttcagtcacctcatgccagttaagaacccttgctagagaactggtgcaattatttggagaaaataaaacactctggatttttgagttgtcagagttcttatgctagttctttctcatctttgtgggctcatattccttagatttttgaagttgctttcctttggatggtttttttcttttatcctatttgatgatctttgggatttgtttgtggtataaagtgagatcagtcaactggcttcatttctggaagattttaggtggccaaggctcagcccaggacttctggactgcatgctctaactctgggagactggtatcaagccctrgttttgttctctggctcctcgaggttagaaacctgttgtgcaggaggggcctagttcctcctgaactgctggtaacaacactccaatgagtggtgccagccaaagcactttttagggcagtggcagcaggatccgttctatttcacatatattag

SEQ ID NO: 778176 - DNA, 561 bp, Homo sapiens
ggaggaatccaggcagcgggatccatattgggggagtggggaggggcgtaggtaggcggtaccctgggaatctcacactgatgctcccttctctcctcccctttcctttaccaaggaagcctgaaggccactcttccctgacctttagcaaggaagactaaacgtaaaaagctgcagttaccactcctaagaggtcaaagtcagtgacgttggtaaatagaccaatgaccctactccattccatgccttccctaatctagtcgcaycctctgtttccccaaaatagttatgtggataaattacctttatttcttttgctacttcataaacttctacctaaaatttgaaatgaggtagaggaaatttgtgttttatgtgaaatgagacgaggatagttcataacgtctataatgaataagtttatagaatttcaggcatcaaggaaattaatggcactattgttcccataagaagaaatactttcatgctgtatcccaaattgtatccattaaatatttaattcctttaaatttttccgtaaatatagtcctattgtaagca

SEQ ID NO: 778177 - DNA, 602 bp, Homo sapiens
acctggaactggaggctccctccagccactatacctgtgaacctgtggaagacctgaagtacctgtttaaaagaaagccaaaagataagtaaatacctaccaattttccctggtgtaaaatgttaattgatttttgctccctcacttacagatgcttgtgcaagggtttcagtcagttttggaacaaaatccaaaatcgagccaaagatactcaactgtcacaactggatcaagctagctgcaccttttatgaccaagtacaagtttcattgcagcccacggacacygacctaactacctagggacaaagagccaggattctcaataggcagggacaatgcccgtgaccagcaggaagcagctacagaaagctgatcttcagtgcctctgcctcccataaagattcaaggggatcatgtctctcagcaggaaatgagacaggagaatagggaattaaggtaaccaagggttaaggcataagcaaaaaaacagcaggtgccgacagttctaggcaagattaggcagcataaaggccacatccttgctcctgtgataacaagacataagtttccactttattctctgattggtcacaggccaat

SEQ ID NO: 778178 - DNA, 525 bp, Homo sapiens
acaccatggagggtgagcgtcacctcacctaggacgtccaagcagccaggggcctccctcccacagccaagggaagttgtgagggactgtgctatttggcccagatagaactacacatttcccatggtttttgcaatccacagaccaggagattccctcgtgtgcctacaccaccagggccctgggtttccagcacaaaactgggtgactatttgggcagacacagagctagckgcaggagtgttttttcacaccccagtggcacctggaaccccagtgagacagaatggttcactcccctttagagagggctgaagccagggagccaagtggtctcgctcagcaggtcccaatcccttggagaacagcaggctaaaagccactggcttgaaattctcactgccagcccagcaatctgaagttgacctgggatgatggaacttgctggggggaggggcgtccgccattactgaggcttgagtaggcagttttcctctgacagtgaaaatacagtcatgtatccct

SEQ ID NO: 778179 - DNA, 625 bp, Homo sapiens
tagccatatgtagaaagctgaaactggatcccttccttaccccttatacaaaaattaattcaagatggattaaagacttaaatgttagacctaaaaccataaaaaccctagaaaaaaacctggggaataccattcagggcataggcatggagaagtacttcatgtctaaaacaccaaaagcaatggcaacaraagccaaaattgacaaatgggatctaattaaactaaagagcttctgcacagcaaaagaaattaccatcagagtgaacaggcaacctacagaatgggagaaaatttttaaaatctacccatttgacaaagggctaatatccagaatctagaaagaacttaaacaaatttacaagaaaaaaacaaccccatcaaaaagtgggcaaaggatatgaacagacacttctcaaaagaagatatttatgcagccaacagacacatgaaaaaatgctcatcatcactggccatcagagaaatgcaaatcaaaaccacaatgagataccatctcacacaagttagaatggcaattattaaaaagtcaggaaacaacaggtgctggagagaatgtggagaaataggaacacttttacactgttggtgggactgtaaactagtg

SEQ ID NO: 778180 - DNA, 629 bp, Homo sapiens
gtccttgagtcggatttgatggctgaaaagcaatgtacctggttattagctttgccctttgtagctaccctccctgagctgcagcataatgggatgttcccagtttttatggaggtcgcaacaagaaagaggcatatgaaatttgctccttcatttactctgacaccctctattacgttatttaatgtactttgtataaatcctcacatgagccattcctttagartttggttacaggtaaaaaacttgtctctcctaaggaatttgttgctaagcttctttctcttaggttataagaactcagtattatttacacacttacattttatttctatggttctgaaatactattgcaatttataaacctttttaagccatagtttacatgttgttccaaattatttttgggaaggggtaaaaattaattaaacaaaccaataatattctgtgattgtcctagtttagtagccttaaaatattacttttagaaaaactacctttaaaagatgttctaactgccaagttatttaaaagtataacataaaaatatccttattttaacatgggaaataacattatgtattttatggcactattgtggtgatcacctcctcacctaaaaagaatgg

SEQ ID NO: 778181 - DNA, 574 bp, Homo sapiens
aatttagcatgatatgcatgacgattttgacctccaaaataatttagtgccttgagctgagattaaatgcagaacattaatttttccctctggttgtcaagccaaccaagagacccatcaaatccatttaaataaagcctgcatcatgtaataatattaaagggaataaaatattaatatgggcctgtggtagaacattggccaacagcgctgcagtgaggtgcctttaatttattaccctgacaatctgtcttgcactaaaactaggcgttaaagcaccatctaagaattatttttttgagctagaagatggacccatttaagaaaggtcacagttccttccactgcacagaatttttagtatctccaagcaaaagaagtcgagttccaytttaattgtatgaacttgaagagataacaaagtacaaatgcccaaaacccattgtaatgaaaatgaaattttcaaagaaaagggtagacactaactcattacgtgaggcttgatgagctttcccccatagtaaaagtccatctaaatcaatgtattatttacatgccacatacaccaaccttc

SEQ ID NO: 778182 - DNA, 601 bp, Homo sapiens
gttaaaaatgaaagggttgtgaatccagacattaaatatggccaagtgtgagctattttatttccttgagtgttgcaagtgcatgaagcatctctgatttctcaagattcaatatgaaaagtcagtcaagtagctggagttctatttctttgatgggaaattaggcaaggctgaagagcacagcagagcagcttttgcatatctttgaggtaactatggaaagggcatgtctctcattagtattggttacgaacaactcaacaagcctggaatatgacagatggggtctyggagctgacttaatactctagcatgacagcaactcaactgtgaaaacacaaaggaagttcagaggaacagacttaccctttctgcagcctggaagcactgttggttttgcttggctttgtattatgtcagagtgtcattcgcccttacctgagtagccttgtctccttgcacttaatgcactgctgtatttagcatttctacactgtctcagctgacttcccagtctcttttttgacttgtctagggcatgattcaaaatcttccatcaaagacagctccagccaagttcatttttatgatcctgttttgt

SEQ ID NO: 778183 - DNA, 618 bp, Homo sapiens
taaaggtaatttaaataaaattttgttaagatttttccaacaaaggtgactctaaatttgaatgaattgaattctagtatcaaaaatgaattacattttaaagtcagaatatgtttcccgtaagaaaacacattcctggggaattgagatgaaaatgtttaacaagaccacagaaagataacacggccctgggaactctgtttcaaaaaaccacagatcagctctctggctgcccacatccactcttgggcatcatgaaacttgaataattctgcccattctraatgagggctccctcagccagtgacctcactcacctaaaagccttactattacctggaaatctcctggttccccttcccaatatctattactttaaatggaattctgacaaaacagaattcttcccattttctctttggcaggatatttcaatagctcatagagctggttacacattcctttaatcaatcattattatttatcactcaataaacacttttctccttttgtaaattctttaattaaaaattaaaggtattttgttttcttcatgtgtgaattaatcatgcaaaagcatggcaagcagcctaaaaagtttcatctttcttaactttt

SEQ ID NO: 778184 - DNA, 669 bp, Homo sapiens
cttaacatggagcagacagcaagaactcaaaatgtgttacctataattgttcacttttggaaccaattggtaactttgagtatggataaataaaagggaagactcagcagggcgcggtgggtcacgcctgtagtcccaaaactttgggaggcatttttgtaaaaatataaaatttggggaggcattttgtaaaaatacaaaaaaattagctaggcgtggtgatgcgtgcctayagtcccagctacttgggaggctgaggcaggagaatcccttgaacccgggaggcagagggtgcagtgagccgagatcgcactactgcactccagcctgggcaacagagcaagactccatctcaaaaaaataaataaataaaaaaggctgggcgcagtggctcacgcctgtaatcccagcactttgggaagccgaggaggcgcatcaagaggtcaggagttggagaccaggagccggagaccagtctggccaatatggtgaaaccccatctctactaaagatacaaaaacttagccaggcgtggtggtgcatgcctgtaatcccagctactcgggaggctgaggcaggagaatcacttgaacccaggaggcggaggttacagtgagctgaaatcgtgccattgcactccagcctggacgacagggtgagactccatct

SEQ ID NO: 778185 - DNA, 630 bp, Homo sapiens
cagagaaaggcacaccctagtgggtcttccagttccgtggtgaaatgcacagggttttatagacaagcttgaggaggcggtatctgatttacatggggcacaagagattggtcagacgaggtgtgccgtttgcatagcacgcaaagaagttggccgtyccaccctaatcttttattatgcagatggagtctttacctggacagtgccatgttgcctgctttcttactgcacacatggtgacaaagaaaaggaaggagggaacctctacgttgaacatccctggcttccaggtatccctttgctattggcacagctgccagcatttacctatgcaagcttttagcttgcttattcatctctgcttgcagcttgattttttaggctgctctttgttagaaaagaaatgatttcggggctgctttttattaaaaggaaaccttactgaagactcttttaccctcaccatctgcctaaataatttctttctagctcctgtatcagtaacttgcccaaagttaaaatatggttcccagacaaatatatacatatgtgtgtgttagtatgtgtgagagagagaaagagagagagaaagaaagatttgtttgacttatcagtgaaggaatctgcaga

SEQ ID NO: 778186 - DNA, 630 bp, Homo sapiens
cagagaaaggcacaccctagtgggtcttccagttccgtggtgaaatgcacagggttttatagacaagcttgaggaggcggtatctgatttacatggggcacaagagattggtcagacgaggtgtgccgtttgcatagcacgcaaagaagttggccgtcccaccctaatcttttattatgcagatggagtctttacctggayagtgccatgttgcctgctttcttactgcacacatggtgacaaagaaaaggaaggagggaacctctacgttgaacatccctggcttccaggtatccctttgctattggcacagctgccagcatttacctatgcaagcttttagcttgcttattcatctctgcttgcagcttgattttttaggctgctctttgttagaaaagaaatgatttcggggctgctttttattaaaaggaaaccttactgaagactcttttaccctcaccatctgcctaaataatttctttctagctcctgtatcagtaacttgcccaaagttaaaatatggttcccagacaaatatatacatatgtgtgtgttagtatgtgtgagagagagaaagagagagagaaagaaagatttgtttgacttatcagtgaaggaatctgcaga

SEQ ID NO: 778187 - DNA, 630 bp, Homo sapiens
cagagaaaggcacaccctagtgggtcttccagttccgtggtgaaatgcacagggttttatagacaagcttgaggaggcggtatctgatttacatggggcacaagagattggtcagacgaggtgtgccgtttgcatagcacgcaaagaagttggccgtcccaccctaatcttttattatgcagatggagtctttacctggacagtgccatgttgcctgctttcttactgcacacatggtgacaaagaaaaggaaggagggaacctctacgttgaacatccctggcttccaggtatccctttgctattggcmcagctgccagcatttacctatgcaagcttttagcttgcttattcatctctgcttgcagcttgattttttaggctgctctttgttagaaaagaaatgatttcggggctgctttttattaaaaggaaaccttactgaagactcttttaccctcaccatctgcctaaataatttctttctagctcctgtatcagtaacttgcccaaagttaaaatatggttcccagacaaatatatacatatgtgtgtgttagtatgtgtgagagagagaaagagagagagaaagaaagatttgtttgacttatcagtgaaggaatctgcaga

SEQ ID NO: 778188 - DNA, 614 bp, Homo sapiens
cgaagttaatttaaccctggatttacctgagtccatgaaattacaaatcacaccatgttagatggaatagcataataatcaacaacaccggcactggagtcagactaaggtggttcagaccctgcctcctatagctgccacctgtacatccttgggcaaatcccttaatgtgcctacccctcagtctcttcatctgaaatgaagttaactgtaatacctaccttctagttacgagaactgtgtgctgctcaaagtgctagatgtattatcctcctcatcatcgtcattgggaacttaaagaattttaatctaagaaaatacattttggccgattgtaaaagaaaactaatttattaatattggtgttgtagcagcttctgtggtgactccagaattcatgttggaactcattcaattcaggtagatagagtaattacagttcacatttatcttgaagcctgackgagctaagcccttcgcatggattatttcattttacctcacaatgaccttgaggtgaggtttattattattcccactttacagttaaggaaactgaggtttggagagtttaaataatagctaagcctaagcttagctagtgagaattggac

SEQ ID NO: 778189 - DNA, 669 bp, Homo sapiens
aaagttctggcctagagtcctgtgagctatcctgcttacaattgttactagcagcacacacatgtctctggaatgcgaagaagaaagaaaaaaagacaaggaacgtgaaaattgggtgatgtcagcctcccttggataaagcccatcagtggttttcattgtcttggggtgaggaacaaatccttgatagaactaatatgatcctccatgatctgcccatgccgccttctccagcatcatctgctactccaactcccttgctgcctgtgcaccagcccctggcctcatttcagtttctcaaacattctgagcttctttccaccagagggtgtttgcatatgmcgttcccactcccttgaatgcagctactccctctttttccttagttaatgcttggatatctttcagatctcaggtcaaatttcacttcttcagaaagtcttccttgattgcccctgttaaacacacattcttgtagcaactggtatttccagggtatttcttgcagttgtaattttacatcttttgcagggtccttttactaataatgttcttctccctaccccaccaggctacaatttccatgaatgcagaaaaagagtttatttttgccaaccattgaaatccatgtgcttaaaataaagactggcccacagaagatgctgaata

SEQ ID NO: 778190 - DNA, 525 bp, Homo sapiens
atatgaaatctgggttgaaatttcttctctttaagaatgttgaatattggcccccactctcttctggcttttaggctttccgctgagagatctgctgttagtctgatgggcttccctttgtgggtaacccgacctttctttctggctgcccttatactttttccttcatttcaaccttgttgaatctgacaattatgtgtcttggggttgctcttcttaaggaatatctttgtggtgttctctgtatttcccgaatttgaatgttggcctgccttgctaggttagggaagttctcctggataatatcctgaagagtgttttccaacttggcttsatccgcccatcactttcaggtacaccaatcagatgtagatttggtcttttcacatagtcccatatttcttggaggtttcattcatttctttttactctttttgctctaaccttgtcttcttgctttatttcattaatttgatcttcagttactgataccctttcttccacttgattgattcagctattgaa

SEQ ID NO: 778191 - DNA, 525 bp, Homo sapiens
atatgaaatctgggttgaaatttcttctctttaagaatgttgaatattggcccccactctcttctggcttttaggctttccgctgagagatctgctgttagtctgatgggcttccctttgtgggtaacccgacctttctttctggctgcccttatactttttccttcatttcaaccttgttgaatctgacaattatgtgtcttggggttgctcttcttaaggaatatctttgtggtgttctctgtatttcccgaatttgaatgttggcctgccttgctaggttagggaagttctcctggataatatcctgaagagtgttttccaacttggcttgatcygcccatcactttcaggtacaccaatcagatgtagatttggtcttttcacatagtcccatatttcttggaggtttcattcatttctttttactctttttgctctaaccttgtcttcttgctttatttcattaatttgatcttcagttactgataccctttcttccacttgattgattcagctattgaa

SEQ ID NO: 778192 - DNA, 621 bp, Homo sapiens
tatctatgtgtatatgtatatgcatatgcacacacgtatataaaatcagtcaatttccaagaacttttgagtcttgtctttcaggtattttgtccattgtcactgttaacgtcccaatccaggctctcatcatctcctgcatggagtattataacttcagtttctcctcctctggttcacttttagcaccctaccatcaaaatatctctttatctgcatacctgtgttctaaaaccctttatagcttcctgaagtctacaacacagagcatgagtcccaaacacctcattaggtgccatctattacctacttctgcmgtctcatatctacaaagtccttatgagatacatatttttctctgaaaacatcaacccttttcaatcgccctgcccttgtttatcctcactgcccctggtggaagaggagacctcctctcacctctccttactccctcttcaaggccaatatcttcactgaaaacttttttgaccaactcaaccctcagagaccattcttgcctctgaacccctgaacacactatgatataaatacatatggatccagaatttgacatatcttacttttgtttgtttttattaatttgtttatatatagagacag

SEQ ID NO: 778193 - DNA, 570 bp, Homo sapiens
tagtgtttttaaatggagcatgtactgtgttatttatgtcattgacaaaataggatgtaccaaaatagggcagtatattcatttttctattgcaggaattaatttttttattaaattttgatcaagtgaaccaccccttagtgttaaaagtatgtgttcatgcacctaggcatatagtatgtgcagtagcaataccggaagaatgtaatagtttaatattctaaagaaatgttcaagtgactatccattttcttttcacttaaatgagtcttaattttttctgctttttcattgcagttaatacctgattgcctcctccttatttcttctgcctstctactttccattctgcttttacaatgcttatatgtccttaatattttcttctgttaaattttgattgcacatctagagagttcagtgctttataaggtaaactatatcatataaacggaattcgtttttatagctttagggtcttaaatttccttaagaacttatacagaaagaaagtaatagagaaagaatacagaaagcatatagaaaaaagtaatagtttaatattctaaa

SEQ ID NO: 778194 - DNA, 525 bp, Homo sapiens
ttgtctgtttattctgttgatagtttctgttgctgtgagaagctctttagtttaagtaggtccacttgtcaatgtttttgttaaaattacttttggcatctttgtcataatctttcccaggttttatgtccagaatggtatttcctaggttatcttccaaggtttttctagtttaacatttaagtctttttaactgatcttgagtttatttttgtgtatggtgtaagaaagaggtccagtttcaatcttctgcatatggctagttatcccagcraatagcgagtcctgtccccattgcttttgtcaactttatcgaagatcagatggttgtaggttttatttctgggttctctattctgtccattggtctgtgtgtctgttttggtaccagtaccatgctgttttgtttactgtagccctatagtatcgtttgaagttgggtaacatgtgatgcctccagctttgttatttttgcttagaattgccttggtgatttgggctcttttctggttccatatgaatttt

SEQ ID NO: 778195 - DNA, 592 bp, Homo sapiens
tcccacttaggacccccacaaatggatccattggcacgtatacccccaataaagaggacgtgaagactaaactttattcaccctttattctgtttctttctgaggggcttggagaaaaaaagttcccctagccaggccagttaacatttttccacggaccccaaatttttaaacaaagcttctcttcttaaccaatggcaaatcagaagttcttgaatctayctacaacctgtaaaccaccactgcaagatatcctgcccttttaagctcaaaccaacatgtaaccaccatattgatttattattttacctataacttctgcttttctgaaatttacccttgccttaaaaaactcattggggagtctagacttgggcatttagctgtctgatcttccttgtgtagtactatgcaataaacatcttcctttctagcactgcaaaaacctcagtgtaggcatctgtttttactgtgccagacaagtggaccccagttcagttctataacaacaggagccactgaaagagctctcagtagccaaaaatggaaggaattaagcaaaaaaataaataaagtagtattggattataac

SEQ ID NO: 778196 - DNA, 617 bp, Homo sapiens
tcagagttttcttcttggtttggatccattgctggagagctagtgtgatctttgggggtgttacagaacactgttttgtcatattatcagaattacttttctggttctttctcatttgagtagactatttcttcaaattcttcttgaatttatttttgattgaattktgtttttttaaatttaaatttctttttttccctcttaagatcagactttaaagttcattttagcctaatttgattctcggtgtcagtatgtgtgaagactctgtatgagatcctttgttatagacagtctttgtgccttggcattccccaatggtgatggtaatagttatattcttagtgtgtgaatgagttcattgtctcctatggagttggatggcagggatctcatgaagcttatctcattctcttgtggtgtacactttatttatttaatttgtccccaatgttttgtttactgagttgatgattcagcttcaggccaataggggaagtatccctgggcaggcacaagttgtggctaaggcaggtgtgtagatgcaatcctaatgctgggctgaggtcctagccttgatgagggtgcctggaggggctctcaattagaaatactgg

SEQ ID NO: 778197 - DNA, 545 bp, Homo sapiens
cttaatatagtttgggaactttcttaatgtagtttgggaacctactgcctcttttctggcagaagctgtttctcctgttatcttgactttttcaaagccaaacctttttctaaaattaccaaaccggccaggtgtggcggttccactctataatcccagcactttgggaggctgaggtgggtggatcacctgaggtcaggagtttgagascagcctggccaacgtggtgaaaccccatctctactaaagaaatacaaaaattagccgggcatggtggcacacacctgtaatcacaactacttgggaggctggggcaggagaattgcttgaacccaggaggcggaggttacagtgagccgagatagtgccactgtactccagtctggatgacagagcaagactccatttcaaaaaaaaaaacaaaaaacaaacaaacaaaaaaaaacaccatcctttgctggcattaaagtctccagctttagaatctaaaagctgtgatataatgacttcactttttcttgaatcatagtatgcctttttttata

SEQ ID NO: 778198 - DNA, 545 bp, Homo sapiens
atcaaatattaatgtttaaaatattgattcctgtgctccatttctaacaattgtatcataccataaaattctaatttgggggagcaggaccagttttatttaaagactggctgcacccattacatctcgattttggttttaactccaggcattttcttaaaattaagtagcatttattgtgtgttttaccatatgttcagaattaaattcmttcctcatttaatccttacttattattattccaaaattacagatgcagaaactcaagctcagagaggctaatttgccttcattagtaagtagattgacactgaggcaggcaggctctagatcccgtgctcttcacctctcaactgcagtacagttcacatctccatgggaggttagcagagaaaagcaaatatcgaagctgtgttctttgttaacagttctttcagaggtattatttgatctttcttaaataaatgccaagactgccttctgacagtaggcttattctcacatcgtagtgtttggatttgaaaaatgttttacattttcaacct

SEQ ID NO: 778199 - DNA, 604 bp, Homo sapiens
cagaagcattctgagaaacttttttgacatgtgtgcactaatctcacagagtttaatctatcatttgattgagcagttttaaaaaactttttttgtggaatctgcaattggatatttggaacgctttgaggcctattgtggaaaaggcaatatcttcacataaaaactacacagaaacattccgagaaacttctctgtgatgtgtgcactcatctcacggagttgaacctttctttgattgacaagttttgaaagactatgtttctataatgtgcaagtggatatttggagtgctttgaggcatatggtggaaaaggaaatatattcacataaaactatacagaagcgttcccagaaacttatttgtgatgtgyttattcaactcgcagagttgaccctatcttttgatacagcagttttgaaactctctttttgtagaatctgcaagtggatatttgcagcgctttgaggcctgcggtggaaaaggaaatatcttcacataaaaactacacagaagcattctcagtaacttctttgtaatgtgtgcattcacctcacagacttgaaacttcctcttgattgagcagcttggaaacacactttt

SEQ ID NO: 778200 - DNA, 610 bp, Homo sapiens
ctagttttgaaaatctctttttgtagaatctgcaagtggatatttggagtgctttgaggcctatggtggaaaaggaaatatcttcatatgaaaactacacagaagcattctgagaaaattctttgtgatgtgtgcattcaaaccacagacttgaactgatcttttgatagagcagtttttaaagtgtctttctgtagaatctgcaagtggttacttggagacctytgtggaagatggtggaaaaggaaatgtcttcccgtaaaaactacacagatgcattctgagaaacttctttgtgatgtgtgcattcatctcacagagttcaacctatcttttcgtagagcagttttgaaactctcttttcctagaatctgtaagttgatatttggagccctttgcggcctattgtggaaaaggaaataacttcacatgaaaactacacagaagctgagaaacttctttgtgatgtgtgcattaatttcccagagtcgaacctttcttttgattgagcagttttgaaacactctttttgtagaatctgcaagtggacatttgaagcactttgaggcctattgttgaaaaggaaacatcttcatataaaaacaacaag

SEQ ID NO: 778201 - DNA, 610 bp, Homo sapiens
ctagttttgaaaatctctttttgtagaatctgcaagtggatatttggagtgctttgaggcctatggtggaaaaggaaatatcttcatatgaaaactacacagaagcattctgagaaaattctttgtgatgtgtgcattcaaaccacagacttgaactgatcttttgatagagcagtttttaaagtgtctttctgtagaatctgcaagtggttacttggagacctttgtggaagatggtggaaaaggaaatrtcttcccgtaaaaactacacagatgcattctgagaaacttctttgtgatgtgtgcattcatctcacagagttcaacctatcttttcgtagagcagttttgaaactctcttttcctagaatctgtaagttgatatttggagccctttgcggcctattgtggaaaaggaaataacttcacatgaaaactacacagaagctgagaaacttctttgtgatgtgtgcattaatttcccagagtcgaacctttcttttgattgagcagttttgaaacactctttttgtagaatctgcaagtggacatttgaagcactttgaggcctattgttgaaaaggaaacatcttcatataaaaacaacaag

SEQ ID NO: 778202 - DNA, 414 bp, Homo sapiens
atgctgagaaacctctttgtgatgtgtgtattcacctccgggagttcaacctatcatttgacagagcggttttgaaactctttttgtagaatctccaagtggatatttggagccctttgcattctattgtgaaaaggaaatatcttcacatmaaaactacacagacgcattctgagaaacttctttgtgatgtttgctttcaactcacagaattgaaccttttgtttgagtagttttgaaactctctttttgtagaatctagaagtggatatttagaacgcttggaggcctatggtgcaaaaacgaataacttcacacaaaaaatacacagaagcattctgagaaacttctttacgatgtctgcattcacctcacagatttgaatgtctcttttgattgagcagtttggaagca

SEQ ID NO: 778203 - DNA, 395 bp, Homo sapiens
tcaactcacagaattgaaccttttgtttgagtagttttgaaactctctttttgtagaatctagaagtggatatttagaacgcttggaggcctatggtgcaaaaacgaataacttcacacaaaaaatacacagaagcattctgagaaacttctttacgatgtctgcattcacctcacagatttgaatgtctcttttgattgagcagtttggaagcactctttcggtagaatctgcaagtggatatggagagagctttgaggcctgttgtggaaaactaaatrtcttcatataaaagctacacagaagcattctgagaaactcctttgttatgtgtgcattcatctcacagagttgaaactttcttttgattcggcagttttgaaacacggtttttg

SEQ ID NO: 778204 - DNA, 631 bp, Homo sapiens
actacacagaagcattctgagaaacttgtctgtgatgtgtgcattcaactcgcagagctgaacctatcttttgacagagcagttttgaaactctccttgtgtagaatctgcatgtggttatttggaggcctttgtgaccgatggtggaaaggaaaacgccttccccaaaaaactacacaaaakcattctgagaaacttctttgtcaggtgtgtattcatttcttagagttgaagcttccatttgattgagcagttttgaaacactctttttgtagaatccacatttggatatttggagggcttcgagacctattgtggaaaaggaagtatcttcacttaaaaactacacagaagcatttgcagaaactcctttgttttgtgtgcattcatctcacagagttgagcctttcttttgattgagcagttttgaaaatctctttttgtagaatctgcaagtggatatttggagccctttgcagcctatggtggaaaagaaaatatcttaacataaaaaatacacagaagcattctgagaaacttctttgtgatgtgtgcattcaactcatgcagctgaacctctttttttgacagagcagttttgaaactctcattttgtagaatctgcaagtgt

SEQ ID NO: 778205 - DNA, 631 bp, Homo sapiens
actacacagaagcattctgagaaacttgtctgtgatgtgtgcattcaactcgcagagctgaacctatcttttgacagagcagttttgaaactctccttgtgtagaatctgcatgtggttatttggaggcctttgtgaccgatggtggaaaggaaaacgccttccccaaaaaactacacaaaatcattctgagaaacttctttgtcaggtgtgtattcatttcttagagttgaagcttccatttgattgagcagttttgaaacactctttttgtagaatccacawttggatatttggagggcttcgagacctattgtggaaaaggaagtatcttcacttaaaaactacacagaagcatttgcagaaactcctttgttttgtgtgcattcatctcacagagttgagcctttcttttgattgagcagttttgaaaatctctttttgtagaatctgcaagtggatatttggagccctttgcagcctatggtggaaaagaaaatatcttaacataaaaaatacacagaagcattctgagaaacttctttgtgatgtgtgcattcaactcatgcagctgaacctctttttttgacagagcagttttgaaactctcattttgtagaatctgcaagtgt

SEQ ID NO: 778206 - DNA, 612 bp, Homo sapiens
atctgcaagtggttacttggagacctttgtggaagatggtggaaaaggaaatatcttcccgtaaaaactacacagatgcattctgagaaacttctttgtgatgtgtgcattcatctcacagagttcaacctatcttttygtagagcagttttgaaactctcttttcctagaatctgtaagttgatatttggagccctttgcggcctattgtggaaaaggaaataacttcacatgaaaactacacagaagctgagaaacttctttgtgatgtgtgcattaatttcccagagtcgaacctttcttttgattgagcagttttgaaacactctttttgtagaatctgcaagtggacatttgaagcactttgaggcctattgttgaaaaggaaacatcttcatataaaaacaacaaggaagcattctgagaaaccattttgtgctgtgtgcattcacctcacagagttcaactttatttgatacagcagttttgaaacactcttcttgtagaatctgcaagtggaaattgggaaatatttaggcatatggtggaaaaggaaacatccgcacataaaaactacacagacacattctgtgaaacttctttgtgctgtgt

SEQ ID NO: 778207 - DNA, 616 bp, Homo sapiens
tgcttccttgttgtttttatatgaagatgtttccttttcaacaataggcctcaaagtgcttcaaatgtccacttgcagattctacaaaaagagtgtttcaaaactgctcaatcaaaagaaaggttcgactctgggaaattaatgcacacatcacaaagaagtttctcagcttctgtgtagttttcatgtgaagttatttccttttccacaataggccgcaaagggctccaaatatcaacttacagattctaggaaaagagagtttcaaaactgctctacgaaaagataggttgaactctgtgagatgaatgcacacatcacaaagaagtttctcagaatgcatctgtgtagtttttacgggaagayatttccttttccaccatcttccacaaaggtctccaagtaaccacttgcagattctacagaaagacactttaaaaactgctctatcaaaagatcagttcaagtctgtggtttgaatgcacacatcacaaagaattttctcagaatgcttctgtgtagttttcatatgaagatatttccttttccaccataggcctcaaagcactccaaatatccacttgcagattctacaaaaagagattttcaaaactag

SEQ ID NO: 778208 - DNA, 616 bp, Homo sapiens
tgcttccttgttgtttttatatgaagatgtttccttttcaacaataggcctcaaagtgcttcaaatgtccacttgcagattctacaaaaagagtgtttcaaaactgctcaatcaaaagaaaggttcgactctgggaaattaatgcacacatcacaaagaagtttctcagcttctgtgtagttttcatgtgaagttatttccttttccacaataggccgcaaagggctccaaatatcaacttacagattctaggaaaagagagtttcaaaactgctctacgaaaagataggttgaactctgtgagatgaatgcacacatcacaaagaagtttctcagaatgcatctgtgtagtttttacgggaagacatttccttttccaccatcttccacaraggtctccaagtaaccacttgcagattctacagaaagacactttaaaaactgctctatcaaaagatcagttcaagtctgtggtttgaatgcacacatcacaaagaattttctcagaatgcttctgtgtagttttcatatgaagatatttccttttccaccataggcctcaaagcactccaaatatccacttgcagattctacaaaaagagattttcaaaactag

SEQ ID NO: 778209 - DNA, 608 bp, Homo sapiens
aaagaaaggttcaactctgtgagatgaatgcacacataacaaaggagtttctcagaatgcttctgtgtagctttwatatgaagacatttagttttccacaacaggcctcaaagctctctccatatccacttgcagattctaccgaaagagtgcttccaaactgctcaatcaaaagagacattcaaatctgtgaggtgaatgcagacatcgtaaagaagtttctcagaatgcttctgtgtattttttgtgtgaagttattcgtttttgcaccataggcctccaagcgttctaaatatccacttctagattctacaaaaagagagtttcaaaactactcaaacaaaaggttcaattctgtgagttgaaagcaaacatcacaaagaagtttctcagaatgcgtctgtgtagttttgatgtgaagatatttccttttcacagtagaatgcaaagggctccaaatatccacttggagattctacaaaaagagtttcaaaaccgctctgtcaaatgataggttgaactcccggaggtgaatacacacatcacaaagaggtttctcagcatgcttctgtgtagtttttatgtaaacatatttccgtttctatcat

SEQ ID NO: 778210 - DNA, 606 bp, Homo sapiens
catcacaaagaggtttctcagcatgcttctgtgtagtttttatgtaaacatatttccgtttctatcataggcctcaaagtgctccaaatattcacttgtacattctaccaaacgagtatttcaaaactgctcaatcaaayggaaggttcaaaactgtgacatgaatgcccacatcacaaagtagtttctcagaatgcttctgtgtagtttttatgtgaagatatttccttttccacaacagcgtgcaaaacgcttcaaatatgcccttagagattccacaaaaagagtgtttccaaactactcaaatcaaaaaatgatttcaactctgtgagatgaatgcacacatcacaaactagtttctcagaatgtttctgcctggttctcatgcgaagatagttcctttttcaccataggccgcaatgtactccaaatatccacctgcagattctacaaaagtgagtttcaaaactgctctatcaaaagatcagttcgtctctgtgagttgaatgcatacatcaaaaagaagcttctcaaaatgcttctgtgtggtttttcggtgaagatagttctttttctaccataggtctcaaaccactccaaatatcc

SEQ ID NO: 778211 - DNA, 600 bp, Homo sapiens
tttcaaaactgctgtatcaaataaagttgaactctgtgaggtgaatgcacacagcacaaaatggtttctcagaatgcttccttgttgtttttatatgaagatgtttccttttcaacaataggcctcaaagtgcttcaaatgtccacttgcagattctacmaaaagagtgtttcaaaactgctcaatcaaaagaaaggttcgactctgggaaattaatgcacacatcacaaagaagtttctcagcttctgtgtagttttcatgtgaagttatttccttttccacaataggccgcaaagggctccaaatatcaacttacagattctaggaaaagagagtttcaaaactgctctacgaaaagataggttgaactctgtgagatgaatgcacacatcacaaagaagtttctcagaatgcatctgtgtagtttttacgggaagacatttccttttccaccatcttccacaaaggtctccaagtaaccacttgcagattctacagaaagacactttaaaaactgctctatcaaaagatcagttcaagtctgtggtttgaatgcacacatcacaaagaattttctcagaatgcttctgtgtagtttt

SEQ ID NO: 778212 - DNA, 651 bp, Homo sapiens
aaagttgaactctgtgaggtgaatgcacacagcacaaaatggtttctcagaatgcttccttgttgtttttatatgaagatgtttccttttcaacaataggcctcaaagtgcttcaaatgtccacttgcagattctacaaaaagagtgtttcaaaactgctcaatcaaaagaaaggttcgactctgggaaattaatgcacacatcacaaagaagtttctcagcttctgtgtagttttcatgtgaagttatttccttttccacaataggccgcaaagggctccaaatatcaacttacagattctaggaaaagagagtttcaaaactgctctacgaaaagataggttgaactctgtgagatgaatgcacacatcacaaagaagtttytcagaatgcatctgtgtagtttttacgggaagacatttccttttccaccatcttccacaaaggtctccaagtaaccacttgcagattctacagaaagacactttaaaaactgctctatcaaaagatcagttcaagtctgtggtttgaatgcacacatcacaaagaattttctcagaatgcttctgtgtagttttcatatgaagatatttccttttccaccataggcctcaaagcactccaaatatccacttgcagattctacaaaaa

SEQ ID NO: 778213 - DNA, 679 bp, Homo sapiens
aggttcaactatgtgatatgaatgcacacatcacaaagtagtttctcagaatgcttctgtgtagtttttatgtaaagatatttccttttccaccataggcctcaaagcactccaaatatccacttgcagattctacaaaaagagattttcaaaactatttaatcaaaagaaaggttcaaatctgtcagttgaaggtacatatcacaaacaagtttattggaatgcttctgtgtagtttttatgtgaagatatttccttttccacaacaggcctcaaggtgctccaaatatccacttgcagatttcactaaaagtgtgtttccaagctgctcaatcaagaggaagtttcaagtctgtgaggtgaatgcacacattacaaagaagttactgagaatgcttctgtgtagtttttatgtgaagatatttccttttccaccgcaggcctcaaagcgctgcaaatatccacttgcagattctacaaaaagagagtttcaaaactgctgtatcaaaagatagggtcaactctgcgagttgaataarcacatcacaaataagtttctgggaacgcttctgtatagttttatgtgaatatatttccttttccaccatatgcctcaaagcactccaaatatccacttgcacattatagaaacatagtctttcaaaacttgtcaatcaaa

SEQ ID NO: 778214 - DNA, 373 bp, Homo sapiens
atgcagacatcgtaaagaagtttctcagaatgcttctgtgtatttttttgtgtgaagttattcgtttttgcaccataggcctccaagcgttctaaatatccacttctagattctacaaaaagagagtttcaaaactactcaaacaaaaggttcaattctgtgagttgaaagcaaacatcacaaagaagtttctcagaatgcgtctgtgtagttttkatgtgaagatatttccttttcacagtagaatgcaaagggctccaaatatccacttggagattctacaaaaagagtttcaaaaccgctctgtcaaatgataggttgaactcccggaggtgaatacacacatcacaaagaggtttctcagcatgcttct

SEQ ID NO: 778215 - DNA, 526 bp, Homo sapiens
aatatatgagatgaatgcacacatcacaaagaagtttctcagaatctctctgtgtaatttttatgtgaagatatttcctttcccaccttaggtcttaaaacgctccaaatatccacttgcagatactacaagaagattgtttcaaaactgcacaaaaaaagaaatgttcaattctgtttgatgaatgcacacatcacaaagaagtttctcagaatgcttctctgtagtttttatgtgaagatatttccttttccacaataggcctcaaagggctccaartatccacttccagattctatgaaaagaatatttccaaactgctcaatcataggaaatgttcaactctgtgagatgaatgcacacatcacaagaaatttctcagaatccttcagtgtaggttttatgagaagataattccttttccacaatagttctcaaagcactcaaaatatccacttgcagattctacaaaaggagtatttcaaaactgctcaatcaaaagaaaggttcaactctgtgagatgaa

SEQ ID NO: 778216 - DNA, 620 bp, Homo sapiens
accttatggggttattgcaaacattaaatgaatgaatatgggtaaaacaggtcagcgcctggcccatctgaagacctggaaagtaccaggtgttagctgtgattgtactctgtgcacaagccctctgtggtttggagcatttgttatcctctctgagccacagccactgctgtacatgtgtaaacactctctacagaatttggaaaatgcagcctgggtggcttcctgggaaacatagattaggactggatgccccagggaggtaaggttgacaggtgtagcaaagaaaactacagggagcccagttacattttaatttcagataaatagcagatactttctttggtatagatatttcccattcagtacagtatttgggatataaacttgaaaaatttatcactgaaattcaaatttaaccagrtgttctatatttactctggcaaccctgctgggagggtttcttcaaggcattgccttctgatctggtagcctacagcctgccaaagtgaaggggaagacaggagccagggattaaaaccaatgacccatcctggagcctctaaatcatgcctttaagtctcgctaccctcagtggcccattggcccatcctggagcc

SEQ ID NO: 778217 - DNA, 579 bp, Homo sapiens
aaattttatttatagacactgaaattttatttcatattattgtcacatgtcacaaaaaagggattcttctgattcttttttcagaagattttagattttttcagaagatttcagaggatttaaaaatgtaaaatccatccatagctagcaggtcatataagaacaggcagcagacagtaragtttcccacccctgcaggggatcctaacagctccatcatgcagtctttccatgtgctgtgtcctgggcataggactgctttttatgcataggaggagcttcctgaacacggggggtggccaactaaaccctcccaggaggtttccctcaccactcaggcttttcttgccaccagaccccaaacacaacattcccttgagaaaaccacatataaacgttcaaggtgcttctattcttcctgttggaatgtgacttaagtgtgcaggaagcaaggtagggaagtaaaagcccttcaaagggacatttggctcagacagaaatcctgattataaaataattcttttagaatcatcttaaaatatgttggtgttaaatattcatagggaaagagatgtgtat

SEQ ID NO: 778218 - DNA, 583 bp, Homo sapiens
aaaggggaaaagaatcaataatcctaaaaagtgaaaagtgacacaaatatcaaaccaaaagggactggtttcctgactgagaagcaaacccaggccaaagtggtgaagcatggaattttaactagacaacaaggtggagtggctgtcattaaaatacaagggattttaactttattttaagtcagatttttgctcttcaattttgtcaagasaatttttaaggctatccacgacattattatgtgtcttttaaaaaatatgaccatttctccgccaaccatagtctatggacctttttacataattgaatattttcaattattgacattttgtgtctaaaggttgacttaacatgagatattttcatgcaaagtcttcagtggttgtagagtctattgttttgtgaataaacaaatctgaatctattttatatgatattaaaaaatttgatctcataaatacaaacaagacaattgcttagaatgagagtctaaaatctttttttaatttaggggtctttccaatttaacaaatccatcatttggccactgacgttgagaatttccaatggtgtacttatttc

SEQ ID NO: 778219 - DNA, 607 bp, Homo sapiens
taagaggcaaaatggcggagtttaactggtgtatgaccttctagggacatttagtaggggaagaatgcctcaggtgagcatgcatacatctccagtaaacacactgcacttgctcctcttccaagtgctagcagtgccactgttcatgtggacagccaacccaaaggaagaataacagaagaagggatgcaagaccccagaagtatgccaacatataaaaccccaagtcaaaggtcaaatcatgcacttgatctctcaagtcatctccttggcccttttccaaatagagagggtcaagtatttccaaatgtattttatttccttttgttcctgctgtaaagctttttaataaacgtcactcytgctttaaaacttgcctctgtctctccttctgccttatgcccttgagtcaaattctttcttctgaggaggcaagaattgaggttgatgcagacccacatggattcactgctggtaacaaggtgaccatggtgaggcctaggaatatgtcctcagtgcctggaccactatctgcaaagcagagccaacctccaatggcacattctccctgaaccagtgttgccagctggccatgcgggaggggttt

SEQ ID NO: 778220 - DNA, 461 bp, Homo sapiens
tgtgacaaaaggtgttgtcaagtcctctaacttgaggactagtgattgttaatcttgagaacacgtatgcactggggtgtatctgctgcctatgtaaggggatgagattcctttctgtctttggaatctcttggcaattgcctgtgagacccatcacatcmtggtttatggttattcaataataaaagtggcttgcataagagcgtgaaggataaacttaaaagaaaactaacagtaaaggtggtttgtttctctactacctttgtggagaagatttctggttaattatatttcccccacactaccccaaagcatcagcaagtatgccttctgttgtgttctatggtattactgttttattcctgtttaaaaaaaaaaagtgggaaatctgctccaaacagccctatggtggcgtagccagcagtgattaatcaaacctatctgtgctttaataagccacc

SEQ ID NO: 778221 - DNA, 484 bp, Homo sapiens
gctaatttactgaaagttttaaaatgtagcttttctgtaaagaaacaaacaggacattctaactaaacaaagtgctgtgaaatcagtcattcacactgggtagctagagctactgtgtctcaactggaggaggcaccatctccagtggatyatttagaaacgtagagggtggctactggtatttggtgcctgggggcccagggcactaaatgtctggtaatgtgtggaagagttctgcacaaataattgtcccactcaaaacgccaagagagcccccctgccccgccccattcaggtacccgagctacaccagtggagatggaggctgcacccatacctgagacctcagccaatcaattctatggccatctccttgagtgtgtcatctggaatagaagatcctgcccatgtattgtagctcatctctttagaactttgactgcccttggaattctccagtgggaagagtggcctctgtctagtg

SEQ ID NO: 778222 - DNA, 553 bp, Homo sapiens
agagcaaatgtacctaaatgttaatatatgttcatcataaattagattaaaaactaactcaagttaattttagtatgtcattatacagtattaactaaacaattaggataaaccactacaaaacagtgagctgtgacatcatagagccatttcctttcaagccctacccttaatccactcttccacctgccaatacacacacatgcacgtgtgcacatacgcacacagaaccccccctmcaccaccacctttcatggtgtatttttcaacccctttagagaattgacaaggatagaagacatttaagattaaggtccataaagtattcattattgttgttttctgctttctttaagaactgtctcgtcctatcaggacacacagctatgctagctcagctgtaaacaaaaggatacgaccttgaaggtgtctatagctcactggttttagatgccgactccacatcttcatcacagctcctaggtggtggctgcactgatgtgtacaataagataaactgaatcgctagctgaaataagcattttgaattttc

SEQ ID NO: 778223 - DNA, 637 bp, Homo sapiens
ctgctgctcctgctgagcaagggaactagagtggcccagtctccacctgggtctggctccgttcccgaagctgattcaggaattgagtcatcattcgcaacctgaagtcaaggaacatcttaattagatttaaaacactgtatttcaataatatctaacagtttaaaaatacccccacatttaaccctcagcattcctgcgtgagggaaacacagtggtgcctgcaatttacttgaaatgagtaaaacatgtgaaatggacagatggayggatcggcagatacgtgataaaacaaagtaaaagaataaaggtagaattcaggtattggatatatgagcgttccctgtaaaattctttcagctttgttgtagttttgaaatcttcataataaaatgtcagggagagtgggagggagggactctcccatcatcctggattatttcaatatccatgtgaatgattaattcaacaacccagcctcaagcttcctggccctctgaatgccggcactctcccgtcacctcctggaccttacctcacttaaaacagtcctgccttgatcttaaactatctcttcagaccagattcctttcattccagctcactgcctcataggtgcttccgcttcaggaaggta

SEQ ID NO: 778224 - DNA, 554 bp, Homo sapiens
aagagaagaaacccatagaggaatattggagtgtctcccagtccccaaaggcaagaatgcatattggccttggaaaaaggctggaacagagaatttgcatgacatcagtattcagttctgcatcatttatgtctgccctcttcacatacatattttattcttatttgtctgtaaaaaggccttccctgcgcttcttgtccatgtggcaagaagaaagatgaccaaggcttgaggcccgatccacgtaatataagagaaagaatggttgaatcaggagaccacccagcaggtgtctactacatacgtaggccttttaacccatttcctgtttgccctgagaaatgtgtgctggcagcgagctgcattttttttttmtaaacaggaaatgggtaagatatgtaaatagaaacatccttaaaaaaaaaaaacagtatccattcaagaagtctctcatcttctggaagcttgtcatatttatatgcttaagtctgtatgtcttttataacttctctaatccatgtcatatttagactggactccccaatataagatta

SEQ ID NO: 778225 - DNA, 488 bp, Homo sapiens
aaagcaattggcgttttcactaattgttatattttaggcttcttccattttaaacacatggctcaagagaggaaagaggaggagtgggatatgcagtcctcttctatgttggaagaaaacatgataagttgcacagataacattatctctactacaacacaattttcaagggattgttcacaatatctctccagtatttggagactcctaraatttctttgacttcatgatttggttctcaaagaaatatacatttatatctgttttatggactctaggacttcttacagttcctcaaatagtcagcaaccctttcattgtgtatataagcatgatgtagtagtaaagtattgccttggagtcagcgccatttcagttagattattctacaacctcccttggcaaatgttaacaacacccttatacattggttcttcaatttaggcatctgagaaatgaagataacatgaattgtggactgcatcata

SEQ ID NO: 778226 - DNA, 461 bp, Homo sapiens
ctaacaaatagaatgtgtctttccaagctatattgtgcaacacaacacagcttatgccttcccatccccccatccccgaagtgtctgtgtctgtgtgtgtgagagtatgtgggcacacacaagaacatggatagttttcttgcaattctcctcattgaaataaaggcattgtgttgagaacaaattctatacacagagtttatagtcaagtacacatctgactcagracacatggagaggccaaataggtgttccaaccacagccatagctgaggacccagctgacagacagcatccacctccagacacatgaatgagtgagcatgcagatgattctagcccaccctttgatgctgaggggagtagaggaaagctgtcttcactgagtctttcccaaattgcaaattcatgagcaaagtaaattttgctgtttctttaagcaactaagttttggaatggtt

SEQ ID NO: 778227 - DNA, 461 bp, Homo sapiens
ctaacaaatagaatgtgtctttccaagctatattgtgcaacacaacacagcttatgccttcccatccccccatccccgaagtgtctgtgtctgtgtgtgtgagagtatgtgggcacacacaagaacatggatagttttcttgcaattctcctcattgaaataaaggcattgtgttgagaacaaattctatacacagagtttatagtcaagtacacatctgactcagamcacatggagaggccaaataggtgttccaaccacagccatagctgaggacccagctgacagacagcatccacctccagacacatgaatgagtgagcatgcagatgattctagcccaccctttgatgctgaggggagtagaggaaagctgtcttcactgagtctttcccaaattgcaaattcatgagcaaagtaaattttgctgtttctttaagcaactaagttttggaatggtt

SEQ ID NO: 778228 - DNA, 626 bp, Homo sapiens
aagacaagacttgcggcactattcacaatagcaaagacagggaatcaacctaaatgtccatcagtgtgatagactagataaagaatatgtggtacatatacaccttggaatactatgcagccattaaaaaatgagatcatgttctttgtagggacatggatgtagctgaaggccattatctctaccaaagtaatgcaggaacagacaaccaaataatgcacattctcacttataagtgggagctaaatgatgagaagacatgcaaacatagaggagaacaacacacactgaggcttatcagcgggtggagggtaagaggaggatgaggatcaggaaaaataactaatgggctcaatacctgggagatgaaataatctgtacaataaacctctgtgacacaagtttatgtaacaaacctgcrcatatactcctgaacttaaaagttgaaaaaagccctgaacttagagaatttacattcacttgatacagacattaatcaaatgaagataaatgagttatctaattacagttgtggtgagggctaaaggcaaaaaagaaaaaaaagggggggaatgatgtgaatagtgggtactatgaggacagaaaacagaggacttgacttggtt

SEQ ID NO: 778229 - DNA, 500 bp, Homo sapiens
tgattaagtctcatgagacctgatggttttataaggaggagtttccctgcacaagctttctctttgcctgttgccatccatggtgacttgctgctccttgccttccaccatgattatgaggcctccccagccatgtggaattgtaagtccattaaacctctttcttttgtaaattgaygagtcttgggtatgtctttatcaacagcatgaaaacagacaggaagcaacaataaaatgaagcaggaagcataggcaagtttttagggtagatgagttatagttatgtagcaaatagtgtttctaccacaatgagtatatctatgctaattgtaattataaggccaatcactgaatcacgagattaacaacattggtcaacatatgcaaaaaatccattctatcattgcctatagcgctcagtttgaagttttatttctgctatatctgctatagtgaaagccattagttaccaggatgaccagaaaaaaaaaaaaaaaaag

SEQ ID NO: 778230 - DNA, 500 bp, Homo sapiens
tgattaagtctcatgagacctgatggttttataaggaggagtttccctgcacaagctttctctttgcctgttgccatccatggtgacttgctgctccttgccttccaccatgattatgaggcctccccagccatgtggaattgtaagtccattaaacctctttcttttgtaaattgacgagtctygggtatgtctttatcaacagcatgaaaacagacaggaagcaacaataaaatgaagcaggaagcataggcaagtttttagggtagatgagttatagttatgtagcaaatagtgtttctaccacaatgagtatatctatgctaattgtaattataaggccaatcactgaatcacgagattaacaacattggtcaacatatgcaaaaaatccattctatcattgcctatagcgctcagtttgaagttttatttctgctatatctgctatagtgaaagccattagttaccaggatgaccagaaaaaaaaaaaaaaaaag

SEQ ID NO: 778231 - DNA, 586 bp, Homo sapiens; identical to SEQ ID NO: 776458

SEQ ID NO: 778232 - DNA, 616 bp, Homo sapiens
aaacaaaacaacaaaaacaaagaatggaattactaaagctgtagtagggaatgaagttctgatgcatgctacaacatacatgaaccttgaaaatatgctggctgggcgtggcggcacacgcctgtaatcccaggactttgggagggcgaggcgggtagatcacgaggtcaggagatcgagaccatcctggctaacacggtgaaaccccgtctctactaacaaaaaaaaaaaaagaaagaaggaaaagaaaataatatgctaagtgaaataagcaagacacaaggatacatattgttatgattccatttatatgaggcatctagaatgaacaaatccatagatagaatgtgattagtgattattaggggctggggagaggaagatggcaaattattgcctaatgggtacaaagtttgtttgggatgatcagaagttctagaaatggakagtggtaatggttgtataacattatgaatatacttaatgctactaaatgtacccttaaaaacagtttaaatggtatattttacgttatatcaaaattaaaaattaaataatgaagaaactttatattactgatttaaggcaatctccaaaataaactgctaaatgcaaa

SEQ ID NO: 778233 - DNA, 561 bp, Homo sapiens
actaattatataattcctaactctcaaaataacccttcaaagtaagtatttactaatatacatatttttatagttaagaaaattggtaaaactacgaagcgtatttgaatatagctgtttctcaatccgcatgcagcttcccgatcactaagcacactttcttgcagtacaggggctgggttcaagtctagattttgtctcttaatgtttgttgagcctcagttttcttaccttaacatctggatgatgatcatcttggctctacttatctcccaggaggatgttytaatcaaagggcctagaggatgtgaaagggtttgtgtagaacccataacacaatagtgtggaaagtgataaatgatgcaatacaggcactgaggagaaggtagcggtgtccagagggagagacacccctgttgggatatcagaacagtaataaacatttgtggatataggcttttggggagcagccatggcttctgctctgaaagagtggctctcctctggcaggcagatacactctgacaactataatggagttctaatcacaaggcaaaaatc

SEQ ID NO: 778234 - DNA, 632 bp, Homo sapiens
tcttttgtgaattgcccagtctcaggtatgtctttatcagtagtgtgaaaacaaactaatacatcaatatattgaagaggtatctgcattctcatgtttattggagcactgctcacaatatccaagattttgaagcaacccaagtatccatcaacaaactaaatgaataaagaaaatgtggtacatttacacaatgtattgctattcagccctaaaaagaatgagattctgttgttcgcaacaacatggatggaactggagattattatattaagtgagataatccaggaacagagacacagactttggatattctcattaatttgtgagagctaaaaattaaaamaattgaactcatagagatagagagtagaaggatggttaatagaggctgggaaggatagtgggagtttggggagtgggaaagtggggatggttaatgggtaaaaaaaatagaaagaatgagtaagaactagtgtttaatagcacaacagggtgactatagtcaatagtaatttaattgtacattttaaataacagagaccttatttaaaaataaataatataattggattggattgtttgtatccaaaggataaacacttaaggtgaaggataccccatttaccctg

SEQ ID NO: 778235 - DNA, 557 bp, Homo sapiens
aactaaacaattattttagcactgaaaaatttgagaatataatttttaaatgtctagcacttcatgtgcatatactctactacaataatataattttaaatatcatcattaacctactttaaagatgaaagtattgaaggttgagtaacttgcccaagtcacaaatattcccagaggctgaactgttagtcaaacacaaatctcttgactctagttcctgcaaccccaagcctaatctaaactagatgccctctacaaactgaattgcacatgtctagctcatttggttcaayatcagactcaccttgaatggttgatgaatatggcccccacatgaggagtgatacttataaaaagcatacagagcaggaatatgaagtcccttctaaatttgatgttccatcatttgaatgtcctaacatgccttttgtaatgaataagtttaataaccttgatcattttctatgttcctaagaaaaatctaggcccagatatttcctgaggcccttaataatacaatcgataatatctcagtgaaacatcctcagaaacagaat

SEQ ID NO: 778236 - DNA, 606 bp, Homo sapiens
atctaatacgtcttctgtgtcctcaagttttctcatccttaatgcctccatttttgcgttttccatttacttattcaaccaatatttgagggcctactatgtgtggtagggacacagtttgaacaggcaggtctggttaggtgaggctgagggtggggtgtggaaataaaaattatttgtctatgatatgtaractcaaccttacagacaattacctaaaagaaggcaagggtggctggtacctaattggagagaaagactttggtacaagatgagttcaaagatgagataggggacagatcgcaaaatacctgatctgctatggtaaaaaagttgtgattacagtgccatgggtctaacttacctagtcatttcttgatccaaatttcattttttactctgtttttcctcataattctcctcttaaatttcgggttactctcttttctttattttacattgtatgtgtttgtgtgtgtattttttttttaattttagaaatagggacagagtctatgttgcccaggctgtattcaactcctgggctcaagtgatcctgctgccttagctttccgagtagctggaactacaggtacacaccaccat

SEQ ID NO: 778237 - DNA, 606 bp, Homo sapiens
atctaatacgtcttctgtgtcctcaagttttctcatccttaatgcctccatttttgcgttttccatttacttattcaaccaatatttgagggcctactatgtgtggtagggacacagtttgaacaggcaggtctggttaggtgaggctgagggtggggtgtggaaataaaaattatttgtctatgatatgtagactcaaccttacagacaattacctaaaagaaggcaagggtggctggtacctaattggagagaaagactttggtacaagatgagttcaaagatgagataggggacagatcgcaaaatacctgatctgctatggtaaaaaagttgtgattacagtgccatgggtctaacttacctagtcatttcttgatcyaaatttcattttttactctgtttttcctcataattctcctcttaaatttcgggttactctcttttctttattttacattgtatgtgtttgtgtgtgtattttttttttaattttagaaatagggacagagtctatgttgcccaggctgtattcaactcctgggctcaagtgatcctgctgccttagctttccgagtagctggaactacaggtacacaccaccat

SEQ ID NO: 778238 - DNA, 606 bp, Homo sapiens
atctaatacgtcttctgtgtcctcaagttttctcatccttaatgcctccatttttgcgttttccatttacttattcaaccaatatttgagggcctactatgtgtggtagggacacagtttgaacaggcaggtctggttaggtgaggctgagggtggggtgtggaaataaaaattatttgtctatgatatgtagactcaaccttacagacaattacctaaaagaaggcaagggtggctggtacctaattggagagaaagactttggtacaagatgagttcaaagatgagataggggacagatcgcaaaatacctgatctgctatggtaaaaaagttgtgattacagtgccatgggtctaacttacctagtcatttcttgatccaaatttcattttttactctgtttttcctyataattctcctcttaaatttcgggttactctcttttctttattttacattgtatgtgtttgtgtgtgtattttttttttaattttagaaatagggacagagtctatgttgcccaggctgtattcaactcctgggctcaagtgatcctgctgccttagctttccgagtagctggaactacaggtacacaccaccat

SEQ ID NO: 778239 - DNA, 524 bp, Homo sapiens
tagtcattttacatgaactttaataaaacaataatagatgaactgtgttgtgcgttctatggtgactagaggaaaatataatcattttggggaatgccaatgcatgaactcctcaggagtaggcactcttccattaatcctcccagattttcagttcccttttctgaacactcgtctttagtctccgcgggttcttccaccatcagcccctccccacaacgtaaaatgtgcatacttcagggctctatcctttaccctcttattccacataatatccctggagaaaatmatcacattttaacttcaatcactaaatgcttaatccaaatttctatcttcatctcagactttttccctttagttccagacccacatgtccaactacttatgggacctcccaacatatatgacaggcttctcaaactgaacacatctaccccacttcttaaactcctcaatttttttttcttctttagagttcaatgaataacagaacaatccactctatcaccccactgtcatcc

SEQ ID NO: 778240 - DNA, 524 bp, Homo sapiens
tagtcattttacatgaactttaataaaacaataatagatgaactgtgttgtgcgttctatggtgactagaggaaaatataatcattttggggaatgccaatgcatgaactcctcaggagtaggcactcttccattaatcctcccagattttcagttcccttttctgaacactcgtctttagtctccgcgggttcttccaccatcagcccctccccacaacgtaaaatgtgcatacttcagggctctatcctttaccctcttattccacataatatccctggagaaaataatcacattttaacttcaatcactaaatgcttaatccaaatttctatcttcatctcagactttttccctttagttccagacccacatgtccaactacttrtgggacctcccaacatatatgacaggcttctcaaactgaacacatctaccccacttcttaaactcctcaatttttttttcttctttagagttcaatgaataacagaacaatccactctatcaccccactgtcatcc

SEQ ID NO: 778241 - DNA, 576 bp, Homo sapiens
agctgagtagtatctgaaaaattcattagtaaaattatggcactaggggtgagtcatgcagtcgaaggatgaatactaaatccagtacaaacacccatggtctttctttacatgaattccagtgaaaaatttctaagtgcctaaaatagcaagtggtctgaaatgatggcagcagtttattaaagactgaaaaaagaggccaggcacggtggctcacacctgtaatcccagcactttaggagtccaaggccagtggatcacaaggtcaggagttcaagaccagcctgtccaacatgctgaaaccccgtatctacagaaaatacaaagcttagctgggcwtggtgacacatccctgtagtcccagctacttcagaggctgaggcaaaagaaatgcttgaaccctgaactgggaggcagaagttgctgtgaattgagattgtgccactgcactcgagcctggtgacagaggaagatgctgtctcaaaaaaaaaaaaaaaagaaaaagaaatggcatcttcaagaaccacaagagagtaccgcgctgaagaagctctgattctgcatttgctgaactac

SEQ ID NO: 778242 - DNA, 597 bp, Homo sapiens
atttctagataatatcctaaacaaggggtggattattcgtgcctccttttttttttcttaagaccatgtagggtaaatttctgatattgccatgacatttgtaaactgtggtggcgctagtgggagtgtagcagtgggaggatgaccagaggtctacaggtwtttttggtaatcatcttgagaaataaagacttcataaatcatcttacagttatgacaatatataacaaccatatttcaactgaacgcaaagttgtaccttttcatacccccactgtgttattaatatcacatattatctgttattgagtatctatgaacacacatttatgcagatttgtgcttcattttttaaactccatagcaatattttgaaaattttgtgcaccatcattatgacagtagatagagatttctatacctgtttatatatttacctttaatatagcactttctattttcatatgctgttatgatgctgtgcagcatcatttcatttttggacttgatagactttgttttacatttcctttaggattgatctagtggttagtaacacactccacttttatttattttggaaaggcttattttttt

SEQ ID NO: 778243 - DNA, 597 bp, Homo sapiens
atttctagataatatcctaaacaaggggtggattattcgtgcctccttttttttttcttaagaccatgtagggtaaatttctgatattgccatgacatttgtaaactgtggtggcgctagtgggagtgtagcagtgggaggatgaccagaggtctacaggtttttttggtaatcatcttgagaaataaagacttcataaatcatcttacagttatgamaatatataacaaccatatttcaactgaacgcaaagttgtaccttttcatacccccactgtgttattaatatcacatattatctgttattgagtatctatgaacacacatttatgcagatttgtgcttcattttttaaactccatagcaatattttgaaaattttgtgcaccatcattatgacagtagatagagatttctatacctgtttatatatttacctttaatatagcactttctattttcatatgctgttatgatgctgtgcagcatcatttcatttttggacttgatagactttgttttacatttcctttaggattgatctagtggttagtaacacactccacttttatttattttggaaaggcttattttttt

SEQ ID NO: 778244 - DNA, 535 bp, Homo sapiens
atggacgcaggaagtcctcctggatccacacccacaatgactgaatgaattgcttgctggtctattactgaccaaagcacagatgtgacaaagaattccttgttcacacagtttctttttttttaattttattattattatactttaagttttagggtacatstgtacaacgtgcaggtttgttacatatgtatacatgtgccatgttggtgtgctgctccctttaactcgtcatttagcattaggcatatctcctaatgctatccctcccctctacccccaccccacaacagtccccagtgtgtgatgttccccttcctgtgtccatgtgttctcatagttcaattcccacctatgagtgagaacatgtggtgtttggttttttgtccttgcgatagtttgctgagaatgatggtttccatcttcatccatgtccctacaaaggacacgaactcatccttttttatcgccatatagtattccatggtgtatttgtgccagattttcttaatccagtctatcgttgttggacgta

SEQ ID NO: 778245 - DNA, 584 bp, Homo sapiens
attatataaacaaccaaatctatgactgattagtgtacgtgaaagagatgaggagaatggaaccaacttggaaaacatacttcagaatatcattcatgagaatatccccaacctatccagacaggccaacattccaaytcaggaaatccagagagcctcagtaagataagccacgagaagatcatccccaagacatataatcatcagattctccaaggtcaaaatgaaagaaacaatgttaaaggcagccagggagaaaggcaacgtcacctgcaaagggaattccatcagacttagcagacttctcagctgaaaccctacaagccagaaaagatattcaacttcttaaagaaaagaaatttcacgtagtatggcagagacagatataccatataataacatggtgttattataaatggttaaaagaaaaagaaatttcaacccagaatttcatgtccagcaaaattaagcatcataagtgaaggagaaacaagatccttttcagacaagcaaatgctgagagaattcattatcaccagatctaccttacaagagctcctgaattaagcactaaatatggaaag

SEQ ID NO: 778246 - DNA, 621 bp, Homo sapiens
ccaccccatatccactacccactgtttccaagcaaaagcctgagacagagacagatccgcctggaaaacctctactagggcagtgcaaaaggaaaatatgggcttggagccccccacgcccaccatcctacagcccaagagtcatggacctaccaacagctcacacccccagtatggaaaagcttcaggcactcaacagcagcccagcccatgagrgcagctgcaggtgctaaaccctgcaaagccacaggtgcactgccttagtagaggttttccaatgagcctctgcctctgtggcaggctactcccctcctgctacacaccaccctacagccagcctacgtctccccaccttacccacctgtttttacttccaactccacccctctcccatccatgaataaatcacttcccaccaggccccacctgcaacattcaggattacaattacatgtgagtttaggtagggacacgcagctaaatcatactattctgaccctgatcccccaaatatcatatccttctcacagagtaaaatacaatcatgccttttcaaaagttgccaaaagtcttaagtcatttcagcattaactcgaatgtaaaaagttccacgtctcacct

SEQ ID NO: 778247 - DNA, 552 bp, Homo sapiens
caccgtgttggtcaggctggtctcgaactcctgatctcatgtgatccacctgcctcggcctcccaaagtgctgggattataggcatgtgccactgtgcccagcctctttctgctccccccccccgtttttttgtagttgttgtttttagagagacagggtcttgctgtgttgcccaggtatgcctcaaactcctgggttcaagggatccttccacattggcctccctgggctcrcgcatgtttttaaagaaatggtagataagagatctaaggtattctcagtgactaagaaactgaggtgaatgactaagggactgagacttgtgtgtgcaaacctgtttctgcactagtcttccaagccttcccagttactccaacctgaaaatgagtcatccttggctcctcattaccaaccctcaccccacccttttccatccatcagcagatctgtttattccacttccaaaatataccccaaatgtgcttccttttcctccgtactccaagctaccatgccgtgtaagttatgattgtgatttttgcgtgtctgct

SEQ ID NO: 778248 - DNA, 552 bp, Homo sapiens
caccgtgttggtcaggctggtctcgaactcctgatctcatgtgatccacctgcctcggcctcccaaagtgctgggattataggcatgtgccactgtgcccagcctctttctgctccccccccccgtttttttgtagttgttgtttttagagagacagggtcttgctgtgttgcccaggtatgcctcaaactcctgggttcaagggatccttccacattggcctccctgggctcacgcatgtttttaaagaaatggtagataagagatctaaggtattctcagtgactaagaaactgaggtgaatgactaagggactgagacttgtgtgtgcaaacctgtttctgcactagtcttccaagccttcccagttactycaacctgaaaatgagtcatccttggctcctcattaccaaccctcaccccacccttttccatccatcagcagatctgtttattccacttccaaaatataccccaaatgtgcttccttttcctccgtactccaagctaccatgccgtgtaagttatgattgtgatttttgcgtgtctgct

SEQ ID NO: 778249 - DNA, 572 bp, Homo sapiens
gctttgcctacactgagattcatgacatatcactgcactgatcacccaggtgatgtaactcttgtctgggctctgcttacaggggttattgtgagatatctctgcactgatcacccaggtgatgcaactcttgtctaggctctgcctacagcggcattttaacatatcactgcactgatcaccgataagatgtaactcttgtataggcttcgccaacagggggcattgagacatatctctgcaatgatcaccgaggtgatgcaactcttgtttgggatctgcctacagggggcattgtgacatatctctgccctgatcacccaggtgatgtaactcttgtcttggcctgyctactggagacattgtgacatatctccgcactggtcacccaggtgatgtcatttttgtcaaagatatggctacagggacattgtgacatgtcactgcactgatcacacagctgatgtaactcttgtctaggctctggctacagggggcttgtgacacttctctgcactgatcacccaggtgatgtaacccttgtctaggctctgccaaaagggggcattgtg

SEQ ID NO: 778250 - DNA, 572 bp, Homo sapiens
gctttgcctacactgagattcatgacatatcactgcactgatcacccaggtgatgtaactcttgtctgggctctgcttacaggggttattgtgagatatctctgcactgatcacccaggtgatgcaactcttgtctaggctctgcctacagcggcattttaacatatcactgcactgatcaccgataagatgtaactcttgtataggcttcgccaacagggggcattgagacatatctctgcaatgatcaccgaggtgatgcaactcttgtttgggatctgcctacagggggcattgtgacatatctctgccctgatcacccaggtgatgtaactcttgtcttggcctgcctactggagacattgtgacatatctccgcactgrtcacccaggtgatgtcatttttgtcaaagatatggctacagggacattgtgacatgtcactgcactgatcacacagctgatgtaactcttgtctaggctctggctacagggggcttgtgacacttctctgcactgatcacccaggtgatgtaacccttgtctaggctctgccaaaagggggcattgtg

SEQ ID NO: 778251 - DNA, 623 bp, Homo sapiens
ttcatcagaaaagataaatgaccaataagcacatgaaaagatgttcaacaccattagttgttagaaataggtaaaaaacacaataaataccccttaacacccaaccaggctataatcaaaaagacagaaaatgacaaatgttggaaaggacgtggagaaactgaaaccctcatatactgctcatgggaatgtaaatagtgcagctacttcagaaaaaagtttagaagttcctcaacatgttaaacatggagttactrtatgtcccagtaattctactgttaggtatataaccaagagaaatgaaacacctaccctaacacataaacactatgttcatagcagcactattcacaatggccagagtggaaaatccaaatgtctaccaactaatgagtaaacaaagtatctatacaatgaaatgtaatttggcaataaaaagggatgaagtactgattcacattacaacataacatgaatgactcttgaaaacactatgctaagtaaaagaaggcagtcacaaaagatcatacattacaattctgtttatataaaatgtccagaattggcaaaaaagaattgggagagaaagtggactggtgtttgcctagggctagggaattggg

SEQ ID NO: 778252 - DNA, 623 bp, Homo sapiens
ttcatcagaaaagataaatgaccaataagcacatgaaaagatgttcaacaccattagttgttagaaataggtaaaaaacacaataaataccccttaacacccaaccaggctataatcaaaaagacagaaaatgacaaatgttggaaaggacgtggagaaactgaaaccctcatatactgctcatgggaatgtaaatagtgcagctacttcagaaaaaagtttagaagttcctcaacatgttaaacatggagttactgtatgtcccagtaattctactgttaggtatataaccaagagaaatgaaacaccyaccctaacacataaacactatgttcatagcagcactattcacaatggccagagtggaaaatccaaatgtctaccaactaatgagtaaacaaagtatctatacaatgaaatgtaatttggcaataaaaagggatgaagtactgattcacattacaacataacatgaatgactcttgaaaacactatgctaagtaaaagaaggcagtcacaaaagatcatacattacaattctgtttatataaaatgtccagaattggcaaaaaagaattgggagagaaagtggactggtgtttgcctagggctagggaattggg

SEQ ID NO: 778253 - DNA, 523 bp, Homo sapiens
gtacatccactttgctattaggagtaatatcttcctaggacattacaaataacatcgcagagtgtacacccactgtaatattaggaatcgtatttccctaggtgattacaaatactatcacagggtgtacacccactgtgatattaggagtaatatcctcctagggtattacaaataatttcacagtctgtacacacatggtgtacactcactgtgatattaggagtaatatctacctagtggataacaaataacatcgcagggtgtacacccactttgatattagctgtaatatttttctaagttgttacaaataatatcacagggtgtacgaacakggtgtacactcgctgtgatattcaggagtcgtatctccataatatattatgaataatatcacagggtgtacacccactgtattattaggagtgatatctctgtaggatattacaattaatatcacagggtgtgcagccactgtgatattaggagcaatatctttctaggatattacaaacaatat

SEQ ID NO: 778254 - DNA, 617 bp, Homo sapiens
tactaaaagttaaaaaaaaaaatcagctgaacgtggtggctcatgcctatagtcccagcgacttggaaggctgaggtgggagaatcacttgagcctgcaagatcgaggctgcactgagctatgattgtgccactgcattccagcttaggcaacagagcaagactcagtctcaaaaaaaaaaaaaaaaaagaatcttttttgttttcggccagtttggttctacattttarattgcttttgactgactttttgggagactgtcgtgcccttagagtatccataataattatgaagatgtcaagtcccttaggactgcatgtttgacttagctttcagcatcaaaacatgcatcagaatagcataatggaaagatcagtgattctggagtaaagtagacttggtttcaaattccagccctcctctaatgcccttggataaatttcttcacggccttagtttcttcatctgtaaaatggggattttttttttttttggagacggattctcgcactgtcacaggggctggtgtgcagtgatacaatctcggttcactgcaacctccacctcccgggttcaagcgattctcctgcctcagcctcctgagtagctggggttac

SEQ ID NO: 778255 - DNA, 516 bp, Homo sapiens
atggctgagaaacccatagacggttcacatcacaggactctgcagacaacccctagtaccagaccatagccgggtagacttgctaggtggctagacgaagaagacagacaacaatcactatggatgtggcatgggaagccacatccatagaaaaatggggagatactactcctacatcaagggaacacctgtgggacaaaagaatctgaacaacagccttcagccccagaccttccctctgacagagcctacccaaatgagaaggaactagaagaccaacygtggtaatatgacacaacaaggctcttcaacacccctcaaataaatcacactagttcatgagcaatagacccaaaccaagaagaaatccctgatttaccggaaaaagaattcaggagattagttattaaactaatctgggagcagaaagcccaatacaatgaaatccaaaaaacttatacaagaagtgaagggagaaatattcaaggaattagatagtttaaagaaaaacaaaca

SEQ ID NO: 778256 - DNA, 529 bp, Homo sapiens
gaaaattgaagttatatcaagcactctctcagaccatagtggaataaaactggaaatcaactccaaaaggaaccttcaaaaccatgcaaatacatggaaattaaataacctgctcccaaatgagaaatgagtcaaaaacaaaatcaagatggaaactaaaaaattcttcgaactttacaataatgacacaacctatcaaaacctctgggaaacagcaaaggtggtactaagaggagagttcatagccctaaaggcctaccaaaarctgaaagagcacaaactgacactctacggtcacatctcaaggaaggagagaaacaaggacaaaccaaacccaaatccagcagaagaaaggaaataaccaagatcagagcagaactaaatgaaattgaaacagcaaaagtacaaaagataaattaaacaaaaagctgtttctctgaaaagataaataaaattgatagaccattaccaagattaaccaagaaaagaagagagaaaatccaaataacctcattaagaaacaaaacag

SEQ ID NO: 778257 - DNA, 603 bp, Homo sapiens
aaataccacctgtaccccaataacttatgggaaaaaaagtagtaattcttgcctaaaatctaacacctgaaatatgctgatttgaattttttttaagtactgttactcaacgtacaatgacttatggattttaatgtaggagctagtgaaaacaaagataatgctatagcttttattttaaaaatagcaataggaaagacttactgagacaagttctccagtattccttccccaaaaaggagtcaaattgttatttgcttactggaaagaaaagagactggtcgtaaaaactttgattttgtgaccttaaataaattagactttctcagcaacaataacaagattattcttggccaaatgcytttatgtgtttttctttttaaactaaatttataatttaaattacaatatcccaataatttatttaacataagaatgccttgtgaagaattctaacagggcaaacaaaattaataaatcaagactttaaaatgatgtttggaattcttaggtctttatttcattaatcatacttaagttttctaaatatactgaaaatataatgaaattatgaatccttaattttcatgcagtatgttagaa

SEQ ID NO: 778258 - DNA, 605 bp, Homo sapiens
cgcctacagaaccctaagctaattaaacctcctttctctacaaattaccaagtctctggtatttctttatggcttgtgaggacagactaatacacctgttctggggcagagtggggaccactgccctgaagggtgagtgctaggcctggcagcattcaccacaagctgacaaaagagaccttgggtttaggtgaccattatcagtggcctggcagaacccccatggactaatggtggtggtggccacagaaagaggctcctctscctatggaaaggagagggaagcacaggaaaagctttgtattatggtataagtaccagtttagctgcagttgaaacatcaggtaaactgctaagatttttgactccaatcactggctcccagacagcatctctgaatatacccagggcctagaggaactcactgccctgaagggaaaactcctgggcaagacccagggctgtgctggcttcacgtccgacccaccacagtcccagggtggggccacacgggtacttgcatcatcatactcccagctccaggttgctcagcacagagagacagagactctgtatgtttgggagaaaataagggaaaagaataa

SEQ ID NO: 778259 - DNA, 624 bp, Homo sapiens
ttagattatttctgttttcagattatttctgtttttatttctgtttttctttagttaatttgctacatttatttgctaggacttttattatataatgtgtagtaaagggtttcataacatgccaaacactatttaaattttccaatgataattttaatatatatttattgttataattacaatatgttcaattttcatctttgtgctgaaggtgcttgtttgtagttgtcacctctaaaaaatctcaaaccacgttagtttccccaaaatagatttggaagccatcacacactaaacttgtcaatcagattaattttaagaattacccatcttaatttttagctgatgaattaaaatatatggaggtttgctccatttargattttagtctctctgcagctttctgtgaaaccttcagtaccaatatgtaattaattttatctgattatttctcccaagcactaaagccaatgtcaacatatgaaatctgtgcaatgtattccactaccatcacgaaatattgcgatctcttcacccggtccttgaactttgaggcgacaggacctgtgaaaagagtatttttgctttccaagcctttgtgggaaaatcttatttatggttccc

SEQ ID NO: 778260 - DNA, 503 bp, Homo sapiens
gacttcttggtgtattttcccctttttcattttgaaatgttattcttcatccccagtgatatttcctgttctgatgtctactttgctcatcacagttttagggggttttggtttgtttgtttttctattgtttggttcaagtaagtttcttataaatctgttcgattccatttgatgattccatttgattccattcgaggattccactcgattccattcgatgatgattccattcgagtccattcaatgattccattcgagtccattcgatgattccattcgaatccattcgatgatgattccattagagtccgttcgatgattcagtttgattccattcgattccattygatgatgattccattagagtccattcgatgactccattcaagtccatttgatgattccatccgattccattcaatgatgacacaattcgagtcccttcgttgattccattcaattccattctatgatgactgcatttgtttccattcaatgat

SEQ ID NO: 778261 - DNA, 597 bp, Homo sapiens
tatggtggaaaaggaaatatcttcacataaaaactaagcagaaacattctcaggaacaactttgtgatgtgtgcattccactaacagagttgaaccatccttttgatagagcagatttgaaacactccttttgtagaatctgctagagatatttggatatttttgaggactttgttggaaacgggaatatcttcacataaaaaataaatattagcattctcaaaatctgctttgtgatgtgtgcattcaactcactgagttgaacctttcttttgatagagatattttgaaacactccttttgtagaatctgcttgtgtatatttggatctctttgaggccttcrttggaaaaggtatatcttcacataaaaactagacagaagcattctcagaaactgctttgggatgcatgcattcaactcaggtatttgaacctttcttttgatagagcggttttgaacctctctttttgtagaatctgcaagtgttcatttggagcgccttgaggcctatggtggaaaaggaaatatcttcacataaaaaatagacagaagcattctcagaaactaatttgtgatgtgtgcattcaactcaca

SEQ ID NO: 778262 - DNA, 597 bp, Homo sapiens
tatggtggaaaaggaaatatcttcacataaaaactaagcagaaacattctcaggaacaactttgtgatgtgtgcattccactaacagagttgaaccatccttttgatagagcagatttgaaacactccttttgtagaatctgctagagatatttggatatttttgaggactttgttggaaacgggaatatcttcacataaaaaataaatattagcattctcaaaatctgctttgtgatgtgtgcattcaactcactgagttgaacctttcttttgatagagatattttgaaacactccttttgtagaatctgcttgtgtatatttggatctctttgaggccttcattggaaaaggtatatcttcacataaaaactagacagaagcattctcagaaactgctttgggatgcatgcattcaactcaggtatttgaacctttcttttgatagagcrgttttgaacctctctttttgtagaatctgcaagtgttcatttggagcgccttgaggcctatggtggaaaaggaaatatcttcacataaaaaatagacagaagcattctcagaaactaatttgtgatgtgtgcattcaactcaca

SEQ ID NO: 778263 - DNA, 616 bp, Homo sapiens
tccgggcaggcctgaggctgggatgccttgctgcttctcccggactctgcctggggtttcctcaatctggtctgcgttttgcggctcctggcatccggagacgttccagtcgaccctgtggagaggtcaggccggagccccagagccccgacacccaagcactgccatggagggctcctgctttgccaagcctcggggaccggtttctaagacaaccatgggaagcactgtgactggaaaagccgctggcgcctcgcgcatgttcattggctgrgccgactcctgcaccgctcctggcagtcaggctgtgtcccctttaaataacgccaacgacgagttagttggtgcagcacaccagcatggcacatgtgtaggtatgtaactaacctgcgtaatgtgcacatgtaccctaaaacttaaagtataataaaaaaaagcttaaaaaaataaaataataaaataaaataaaataatgtttgcttacaccctaaaaataaataaataaataaataaataaataaataaataacgccaccgctgcccaccggggtcggctggatccggggtccagtttggggtggagtgggagaggggccgcgggtgtcctgtcaaaggg

SEQ ID NO: 778264 - DNA, 616 bp, Homo sapiens
tccgggcaggcctgaggctgggatgccttgctgcttctcccggactctgcctggggtttcctcaatctggtctgcgttttgcggctcctggcatccggagacgttccagtcgaccctgtggagaggtcaggccggagccccagagccccgacacccaagcactgccatggagggctcctgctttgccaagcctcggggaccggtttctaagacaaccatgggaagcactgtgactggaaaagccgctggcgcctcgcgcatgttcattggctgagccgactcctgcaccgctcctggcagtcaggctgtgtcccctttaaataacgccaacgacgagttagttggtgcagcacaccagcatggcacatgtgtaggtatgtaactaacctgcgtaatgtgcacatgtaccctaaaacttaaagtataataaaaaaaagyttaaaaaaataaaataataaaataaaataaaataatgtttgcttacaccctaaaaataaataaataaataaataaataaataaataaataacgccaccgctgcccaccggggtcggctggatccggggtccagtttggggtggagtgggagaggggccgcgggtgtcctgtcaaaggg

SEQ ID NO: 778265 - DNA, 517 bp, Homo sapiens
gtattatttcattctccttaaatttattgaggtttgttttgtgacctaccatatagtctattatgttccatgttcacttgagcaaaatgtgtattctgttgtaaatgtgtattcttgagcaaaatgttgatggagtgtgtcctatatatctctgttaggtcaggttggtttatggccccattcaactctttcatctccttattgatcttctgcctcatttttctatccattattgaaactggagtattgaaatctccaactattattgggaattcggggggaggttttattgtcattattgttgttttgagacaggatctcactgtgttgcccagactgtrgtgtagtgaccattatagtccactacagccttgaactcctgggcccaagtgatcctcctgcctcagcctcccaagtagctggaactataaatgcacaccaccaagcccagtttattgttttttgtagagatggggtcttgctatgttgtcctattgccttctggccttcactgttg

SEQ ID NO: 778266 - DNA, 573 bp, Homo sapiens
tagaatttatcaccgaacatacttacataatgcatttactatatctattgtttactgcctgtcatgacaaactaacttgtaagccctttgagggctgggatgtttattattattatttattgataaatccctgtagtcttgaacagggctgagaayatagtgggactttgataaacatttgttcaatgaatgaatgaatgaatccagcagtagtgatggattcaaggttcaaaacttggatctactgacttcaaatttcacaactgccccccttgatggtgtgctgctttcaaacagaagaaagactattaagggcacaagtgaatggacttgctatccatagttttagaaagcaaaaccagggcatatggatcaaaactacatggagcttcttaagggaacagcttcttcggctaatccccacccacattctccagagtgcagcttgctgctaactctggttttaccattcccttggggccctttcactttaatccccttttgtccttatgacagctgagttcaaaggcacttttttgcctttgtttcttgtttttgttttttagagacagg

SEQ ID NO: 778267 - DNA, 616 bp, Homo sapiens
ttcaagtcacttagatttggatttaagcctcattttactatctgccaactgtgtgagactggggaaagttatttaatttctctaattctcagtttcctcacctaaaaaatgggtatgattatccctacctcacagggagattgtgatagttaaataaaataacaaatataaagtgccaggcctatactggacactcagttaatggtagctattaatcattattattaagggataataatattctggatatgttttctgtgatctcaccatctcctgttgtgatctcaaattattcttcatgtcttgacartgcttccttttttgttttttagacagaatctctctctgttgcctagggctggagtgcagtggcgtgatcttggctcactacaacctccacttctcaggttcaatccattctcctgcctcagcctcccgagtagctgggactacaggcgcccgcctccacacctggctagttttttaatttttagtagagatggagttttgccatgttggccagactggtctcgaactcctgacctcaggtgatccacccccttcagcctcccaaagtgctgggatttcaggcatgagccactgtgtctggccaatt

SEQ ID NO: 778268 - DNA, 569 bp, Homo sapiens
atctacaaaaactttgaaactaatacatgagttcagaaaggccatgggatacaaaatcaacaaacaaaaattaattatatttttatataattacagtggacacctgagcaaaaaaattaaaaatataatattatttgcaattgttaaaaataaaagattttagttaaaaatayaccacaatatgtacaggacttgtatgatgaaaattacaagtgtgatgatgaaaaaaattatatgagatctacataaactgagagacataccatgctcatagtttaaaaaacaattatttccaaattgatacagaggtttaatataatttttatcaaaattttgacaagacctttttgtggatatagacccaattattctaaaatttatatggaaaggcaaaggaataaaatagtattgaaaaaaacaaataaaatgggagaaatccatttatccaatttgaagttctgaaatatagccacagtagtcaattctgggtcatagtggcagaggatagacacttagattaatggaatagaacagagaaccccaggaatagacccatacaagtatgctca

SEQ ID NO: 778269 - DNA, 315 bp, Homo sapiens
ggtagtcagagaagccgctttgtgatgtgtgcattcatctcacagagttaaacatttcttttatttcagcagttttgaaacactgtttttgtagaatctgcaaagggatatttcaaagaggattgaggcctatgtggaaaatgaaaagtaraaaaaagcttgctgagaaactgctttctgatgtgtgcattcatctcacagaataaaacctttctttgcattcagcagtttggaaacacagtcttttttattctgtgaatagacatttgggagctcattgaggctgatggcgaaaaagtgaataacaggataaaa

SEQ ID NO: 778270 - DNA, 505 bp, Homo sapiens
tcacagatttaaaccttactttggattagtagtttggaaacagtgtttttgtgcattctgaaaatgtactcatgggagttcattgggaccaatggcgaaaaagataatatcccacaatataaactagaaggaggttatctgagaaaccattttttgatgtgtgcattcatctcacagagataaaactttattttcactcagaggtttggaagcactgctttttggaacatgcaaagggatattaaggggagcattgagccctacggtgaaattggaatcattttcagcctatggtgaaaaaggaaatatcttcacatataaactagacagaatctttmtgagaaactacattgtgatgtgggctttcatctcacagagttgaatctttcctttgattgagaagtttgggaagagtcttttcgtagaatctgcaaagggatatttgggatccttttgaggcctatggtgaaaaggaaatatcttcctataaaaactagacagaagc

SEQ ID NO: 778271 - DNA, 591 bp, Homo sapiens
aacactctttttgtgtaatttgctagtgcagatttcaagctcttcgaggacaatggtaggaaaggaaatatctttgtattaaaactagacaaaatcattctcagaaactactttgtgatgtgtgcgttccactcacagactttaacctttcttttaattgagcagtttggaaacactctctttgtaaagtctgcagtaggatatttggacctctttgaggccttcgttggaaacgggatttcttcwtataatgctagatagaagaattctcagtaacttgtttgtgttgtgtgtattcaactaacagagttgaaccttcctttagaaagagcagttttcaaacactctgtttgtgcaatttccaatggagatttctagggatttgaggccagtcttagaaatggaaatatctttgtataaaaactagacagtgtcattctgagatactaccttgtgatgtgtgcgttcaactcacagagtttaacctttcttttcatagagcagtttggaaacactctatttgtaaagtctgcaagtggatatttggacctctttgaggccttcgttggaaacgggatttcttcctataat

SEQ ID NO: 778272 - DNA, 597 bp, Homo sapiens
agataataaatcgtgataaagaaaacaatgcaatgagttcaaagaaaaagagaattgaaagtatattactgaccacattgttttacatacatttttgagtgagatatgacagttgtgataaccagattgtggttcacaggcctaatgtgaaaaccccaatttaacttaacctttgtaaagacaaatacaaattaaaattaagagtcttaattcttcctattaaagataagggaagagattctcctctcctcatttttatcagagtatttactttagaaagtttataattctaaatatttcctcctcctttgaagtgtatattaattcatttgaagactaaatatgtcttttgtcaactttatgaccaagaaatatctttctcaaggasctgggaaccatctctttgaaatgtaaacatcaggagagatagctgcgctctctctcagcttctggaggagggtagagcttaacatcagagggcacctggctccaagctgcaaaactacctctgtctctcaagataggagaagtttgtttttcctatgtataaaaccaattaactaacacagatggtcaccccaattaccaggtgaacct

SEQ ID NO: 778273 - DNA, 624 bp, Homo sapiens
aggcaagagaacaaaccagtgaaggatccactcagtagctgacaattggagaaaagttagggagtttcaagagctgtaccgtgcaaagccaccagggtggggctgcccaaggccatgggagcccgcctcttgtatcggcatgacctggatgtgagacatggagctgaaggagatcatttcagagctttaagatttgacaacctcgctggatttcagacttgcatgggacctgcagcccctttgttttggccaatgtctctcattgggaacaggtgtatttacccaatgcccgtacccccactatatcttggaaggaaataacttgttttttgttttactggctcataagtagaagggacttgccttgtcttagatgagactttggacttggactattgggttaatgttgaaatgaataaaggctttgggggactgttggaaaggcaagatyatgaggacatgagaggaagggcaggggtggaataatacagtttagctgtgtccccacccaaaatctcatcctgaattataattcccataatctgcataatccccatgtgtcaagggagagaccaggtggagataattgaatcatgggggcagcttcccccatgctgttctcgt

SEQ ID NO: 778274 - DNA, 615 bp, Homo sapiens
aagtaatgggcctgtgatcacttctctctagattatgagagtgggaaatgtccacagagaaggaatggtagattatggtctaaacttctagtaaatacactgataactgacctcctggtaggtagattaacaatattttctagaaggtaggttcttatttatggawtattctcagcacaaagttagtagtttaaaatattttatggttcacaaacgtaagttccatagatttatggggcatgtctcccaggaccccaggaatgtctagaaatctgagtgacaatctgagatataaaatagagacatttaataacctaaatgctccccactttgtgagatgattccaaaacttcccttagagaatccatctgttactctgggtcactgcaggtgagtgatgagtaaaggaaggatccacataggatgtcccggatttccctttctctgcctggcttccttggttacttgtgtcctcaaatttattagtaaaatttgacacaaggtgggatctctgtgagtttgatttgatcatgtcaccagctgtgctagtttaaccttctacacagatcattcttattgtagtactcttgtctaggtagagccttgacaaaaagg

SEQ ID NO: 778275 - DNA, 643 bp, Homo sapiens
gctttttggctgtgcagaagctgtttactttaatcaagtcctactcgtctacttctgtttttgttgcaattgcttttgagtatgtagtcataaattatttcctaagactgatgtccagaatggcatttcctaggttttcttctaggaatcttcaagttgttgttattacatttaaatctttaatccatattgagttaatttttgtttacaatgaaaggtagggttcagttagattcctctgcacatggctagccatttgtttcagcgctaattatcaaataaagagttgtttctctattgcttatttttgttgactctgttgaaaatcggataggtttagatgtgcagttttatttctgagttctctattctgttcagttggtctttgtgtctgtttttgtactagttccrtgctattttggttattgtagcctttagtgtagttttaagccagataatatgatgcctctggcttagttgtttttgcttagaagtgctttggctatctgggctcatttttggttccatatgaattttaaatatatttttctagttctgtgaaaaataatgtcggtaggttgataggaatagcattgacactgtgcattgctttagatagtatagtcagtttgacaatactgat

SEQ ID NO: 778276 - DNA, 643 bp, Homo sapiens
gctttttggctgtgcagaagctgtttactttaatcaagtcctactcgtctacttctgtttttgttgcaattgcttttgagtatgtagtcataaattatttcctaagactgatgtccagaatggcatttcctaggttttcttctaggaatcttcaagttgttgttattacatttaaatctttaatccatattgagttaatttttgtttacaatgaaaggtagggttcagttagattcctctgcacatggctagccatttgtttcagcgctaattatcaaataaagagttgtttctctattgcttatttttgttgactctgttgaaaatcggataggtttagatgtgcagttttatttctgagttctctattctgttcagttggtctttgtgtctgtttttgtactagttccgtgctattttggttattgtagcctttagtgtagttttaagccagrtaatatgatgcctctggcttagttgtttttgcttagaagtgctttggctatctgggctcatttttggttccatatgaattttaaatatatttttctagttctgtgaaaaataatgtcggtaggttgataggaatagcattgacactgtgcattgctttagatagtatagtcagtttgacaatactgat

SEQ ID NO: 778277 - DNA, 515 bp, Homo sapiens
tttgttatatattctgaaaaatttgttttccagtaatgtgatttacaaatattttcattctttcaacattctttttttgtatagaaaaagtttttatttttgaagtccaatttatttttattctttctttttttttttttttttttgagacggagtcttgctctgtcrcccaggctggagtgcagtggcgcatctcggctcactgcaagctctgcctcccgggttcatgccattctcctgccttggcctcctgagaagctgggactacaggtgcccgccaccacgcccagctagtttttttttttatttttagtagagacgggttttcaccgtgttagccaggatggtcttgatctcctgaccttgtgatccgcccgcctcagcctcccaaagtgctgggattacaggcgtgagccaccgtgcctggccaatttatttttattcttaaaggacgccatttttatagtgtatctaaaaattatttgcttaacacgtttgcaaacattttctatgct

SEQ ID NO: 778278 - DNA, 524 bp, Homo sapiens
ggaaacaaatgaaggacttgccaacaaaactataagccaactagacctaacagacatatacagaacactccacccaaccacaacagagtacacattctctcaagtacacatggaacattctctagtatagactatgtgctaggccacaaaacaagtctcaataaattttaaaagattaaaatctgttccaccctgagyaggtctatgtaaacctacccctaaaggccaagaggccaaagaaagagtctagcaaatccagtttctcagaaagaaactgtttgtttgtttgttttataaacacaaggtctcgctctgttgtccagtcaagagtgccgtggcatgaacatagctcatttcagtctctaactcctaggctcaagcaatccccccacctcagactcctgagtagctgggactacaggcacgtaccaccacacccagctattttttgttattttttgtagaaacagggtcttgctatgttgcccaggctggtctcaaactcctggcctcaagcaatcctt

SEQ ID NO: 778279 - DNA, 571 bp, Homo sapiens
ctgcttcttttcagagaaagtcttcagaaactttccaacagtagatagaaaaaatgatattgtatctcagaaactactataaagggggaagctgagtggatacatacacttctttgttttagatgctgcttatagctgtaaagtaacttccttaaataaaaaataaaatgtattgtgtatctgtatctggggaatcagacgagatcgggcgtgttcagggtggtatgactgtagaggtctcggccgggcaggagctgagtgagactttatctgatatgcagatttgggcaacacccttcctcccatgcatttagctggtccagcaggaccaatgcccatccatgcttcaaaattttcttagccatatatctgatgatttacttaagaccaaagaagtcctgagcaagaacgcttaagaagctgayagtagccaggcgaagtggctcacgcctgtaattgcaacaccttgggaggttgagacgggtggatcacgaggtcaggagtttgagatcagcctggccaacatggtgaaaccctgtctgtactaaaaacacaaaaattagctgggtgt

SEQ ID NO: 778280 - DNA, 571 bp, Homo sapiens
ctgcttcttttcagagaaagtcttcagaaactttccaacagtagatagaaaaaatgatattgtatctcagaaactactataaagggggaagctgagtggatacatacacttctttgttttagatgctgcttatagctgtaaagtaacttccttaaataaaaaataaaatgtattgtgtatctgtatctggggaatcagacgagatcgggcgtgttcagggtggtatgactgtagaggtctcggccgggcaggagctgagtgagactttatctgatatgcagatttgggcaacacccttcctcccatgcatttagctggtccagcaggaccaatgcccatccatgcttcaaaattttcttagccatatatctgatgatttacttaagaccaaagaagtcctgagcaagaacgcttaagaagctgatagtagccrggcgaagtggctcacgcctgtaattgcaacaccttgggaggttgagacgggtggatcacgaggtcaggagtttgagatcagcctggccaacatggtgaaaccctgtctgtactaaaaacacaaaaattagctgggtgt

SEQ ID NO: 778281 - DNA, 494 bp, Homo sapiens
cactaatccctggggaccaaactgccactacggtctacttgtcagggtgggaggcttataggttctagtgagaaatgcagttttagccaatgtctacctcagagtattttttggtagatttatgtgtatatactatgattatttttccaattcctgagtatagaatttatatatacatgtatgtatatataaacatacatagtcacactttgcttaacttaatatataataagtcacacatattctgagaaatgcattttttttttttgagatggagtcctgctctatygcccaggctggagggtcaggggcacgatcttggctcactgcaagctgcgcctcctgggttcacaccattctcctgcctcagcctcctgaatagctgggactacaggcgcccgccaccacgcctggctaatttttttgtatttttagtagggacggggtttcaccgttttagccaggatgctcttgatctcctgacctcatgatct

SEQ ID NO: 778282 - DNA, 617 bp, Homo sapiens
gggccaggaaaagaaaggctaggtgtttgtatttttcccaggggttggagaaatgaaggtttgacctttcaggaagtaggtgagttcctcagagaagaaggaaccagagaccgattgttaatttatgtggtgaagactgggatctcaccagaaagtagtgtctaagaggtgtcatgactccrcagatgatatttgtctaggtgtcagcaaggaccgtgtaccaaaagctgtcctgtggggaccacagattagctggatgctaatgatatgaatgccatctgcagaacagtccacctttgggtgtgcataggcatgatgagcatttcaagtgagaccaggatctctcctttatttccacaggattttgtaatcccacgggtctttataagcttctgtgagagggaaggaagccatttaaaatgactgacattgctgaccatggcaagtgaggttccagaggtagatttgatttgatataaaaaggaaacataacattcttagccctttgtgtatgaggagaaactgctcatattagcatgcacaccttacctcgttcactcctgagaatttctaaagggattagtggtattccttgctgttcacattctcattccctt

SEQ ID NO: 778283 - DNA, 610 bp, Homo sapiens
aaacctggtattaaaatgctgaagcttaacttcatttcctctgaaggctcctgtgtcaggtgaagcttccattaaataagtttgtatgcttttctcttgttaatctgtcttttttttagtctaattaacagggccgcagccagagaaactaggaggatgtagaggaaaagatgttttttcttcccctacaataaacacacacacactcacacacacacacatatcctactagttctgcttctctgtagaactctgactgatacagaaagtgtttttcccaagtcatatagttggtaagtggygaaacagggaggtggagaaagaagttgagagcataaagcagtcattcaatcaacaaagattgatgagtgatgtggcagattgtgttttccaaagatggtcaccacaacatatcccaatccacatgctcttcttagaatgtgacactgagaactttcccatcaagagatggggtttgtgcttcctccccttgaatctgggtgggtgtgtgattacagcagaagtgacactatttgatttccaagcctaggtcttaaaaggtgacaccacttttgcctaccccacttgagatcttcacacttggaagtca

SEQ ID NO: 778284 - DNA, 588 bp, Homo sapiens
aggatccatccagtttctgcagaagccagacttgcaaattaaatagatatgataataaccattttccttgcattttttgtatccttaagggtggcattagtctccaccatcccctccactagattgcaatattgtttctaatctactcttttttcctgggagaagggggcagtttcagagatttccacttcaccttccctctagagatgcttgttctattaaccattgccacaactctccatgggtcaagaccccttgattgtcactccaaccttgctggctataacgatatttakaaccccttggcttctgtttgttaaatgctgctacctagcctccactgcttcaaggcaagaaagctccactgcttcaaggagagagggccccactgcttcaaggaggaagagctatcaatgggccaagttttgtgacagccactcttaccatcagccctagcctataaagaaggcgggaccactaacttcttagaaatgctggtgctcctctcaccagggagtcctggtggctttggtgaatagtgcattcccatggaacataatctggtgagtcttctggcctcatgtaatg

SEQ ID NO: 778285 - DNA, 563 bp, Homo sapiens
tttgcaaactatgcatccagcaaaggtctaatatccagaatctgtaagtgccttaaacagttgaacagccaaaaacaaccccattaaaaaataggcaaaagacatgaacatacgttcctcaaaagaagacatataagcagccaacaaacacatgaaaaaatgctcaatatcactaatcatcagagaaatgcaaatcaaacccaaaatgagttactgtctcacaccagtcagaatggctattagtaaaaagtcaaaaaaataacatgctggtgaygctgtagagaaaaagggaacagatatacactgttggtgggaatgtaaattagttcagccactgtgaaaagcagtttggtgatttctcaaataacttaaaacagaactaccattcaacccagcaatcccattactggatatatattaataaaaatcattgtacagaaaaagacacaagccctcgtatgttcatcagagcactattcacaatagcaaagacatggaatcaacctaggcgcccatcagtgtcgactggataagaaaatgtggtacagatacaccatgagcta

SEQ ID NO: 778286 - DNA, 557 bp, Homo sapiens
gccatctcgggagaggctgcaaggggcaatcccagggaactaaaaaaacaaatcccagaggcatccccagcagaggagccagctccctccagccctgctcctccaggtccaccccatcctccctatccagcttcagtctctcacttgccccctcctagaaattctcaccctagacaagccccagtctcattctttcccctccaacagatgcctggtgaatttaccccataaggtccaggtactcttctctctacagaacttgaagcaaattgagggggatcttggcaagttttcagatgaccctgagagatatatagaggcttttcagaacttaacccaagtatytgagctctcctaggaagacgtcatgttactttgaaccaaaccctgactaacactgagaagcaggccactctgcaagtgacagagagatctggggatgaggtttgtatcatacgtagcacccaggaaagggggtgaatattatccaactggaagagaaggagtatcaatgaatctccctaaatgggatcccaatgacaagatgggagaatgca

SEQ ID NO: 778287 - DNA, 475 bp, Homo sapiens
cacacaaaaaaagcttcctgtcccctaaaaagacaagtttccattcgttgatggattcttccttgttctgttctgtcccctgtgccacggtgagtcatggccaccacagggactctccccagggactcgtcaccttctttctcctaaaatgtaccaccagyatttaaaataccgctgtgcctatcaccatcacacccaagcactacctgctatgttgcctttgtagctagaacccttccaagcagaggcaaaattatttgaggtgatcagataaagtcctctgcctgcctgctgcccaaaccccagccctacaggctgctcctcacaaggatgcccctctcccaccttcctgctcagccagaagcccccacctcttgctttgcagcctcctttctgcgaatggccacctgttaatccagatccccacgctctgttacttcatcctgtctccaactgtgagggactcccattccaa

SEQ ID NO: 778288 - DNA, 475 bp, Homo sapiens
cacacaaaaaaagcttcctgtcccctaaaaagacaagtttccattcgttgatggattcttccttgttctgttctgtcccctgtgccacggtgagtcatggccaccacagggactctccccagggactcgtcaccttctttctcctaaaatgtaccaccagtatttaaaataccgctgtgcctatcaccatcacacccaagcactacctgctatgttgcctttgtagctagaacccttccaagcagaggcaaaattatttgagrtgatcagataaagtcctctgcctgcctgctgcccaaaccccagccctacaggctgctcctcacaaggatgcccctctcccaccttcctgctcagccagaagcccccacctcttgctttgcagcctcctttctgcgaatggccacctgttaatccagatccccacgctctgttacttcatcctgtctccaactgtgagggactcccattccaa

SEQ ID NO: 778289 - DNA, 612 bp, Homo sapiens
taaaaagacaagtttccattcgttgatggattcttccttgttctgttctgtcccctgtgccacggtgagtcatggccaccacagggactctccccagggactcgtcaccttctttctcctaaaatgtaccaccagtatttaaaataccgctgtgcctatcaccatcacacccaagcactacctgctatgttgcctttgtagctagaacccttccaagcagaggcaaaattatttgaggtgatcagataaagtcctctgcctgcctgctgcccaaaccccagcmctacaggctgctcctcacaaggatgcccctctcccaccttcctgctcagccagaagcccccacctcttgctttgcagcctcctttctgcgaatggccacctgttaatccagatccccacgctctgttacttcatcctgtctccaactgtgagggactcccattccaatgatgcgaaaaacgagactgccaaatccatttccacccagcattacttcttctaaaatgctaagcatcaccaaagccttgtattatctctttctgccctgaacaagacccaagatcaagcaaatttctaaagagggcaatgaaatgaacacaaatggaaatt

SEQ ID NO: 778290 - DNA, 594 bp, Homo sapiens
ctgctatgtctttaatgcctctccaacactggctcattgcccattcaacagagtgagggcttcaagctccaagccttaagcaagtgtgataaccagatgaagcttagtaactttttggttttaactgtgcttgttttaatgattacyttctatctgtagggatcatggtttttccaattacgatagtgatgattacataaaaatgaagtgttataagtaagtattagcccaggtggtacctggttcagacagaaaccataaagatggttttcagctttgatgaagtttgggcggcactgattatcaactcaatccacgctacgtgccaccatggccccactgcagagctcaggggagaagggcccagggaagccaagggctttgcccacggtcatgggagatgggcctggcatgatcccggcttcaggatgcctgtggccatggctccccagccacagcacagaggagacccctgagaacggcaccagcatctcacagctccgagcaagagcctgtgggagcaaagcaccaccagacaggcctgggaagggagggctgctgcactagaaatggaaaaggggggcaaagggagaa

SEQ ID NO: 778291 - DNA, 430 bp, Homo sapiens
ctcctgtagacaacatatagttggatcttttttaaaaatccagtttgacaatctctgcctatttgatttgatcatttaatcagttcatattgaatctaatgttattatggctgtaattggatttatgtctgccattttacttttgactttctctttccctaagctctccattaagctgtctgccttatttggtatcacactaagctgttagrcttcaccaatttctagcagattgctctattgttttgacagttcctggggcataattcgttccacagcctgacccgattaaattcaagcaggaataatttttgaggccagtctttgaggtttgttctgttgccaagagtactcttcttagctgtttctttccctgattttctctcttaaattagctagcctatgatttagcttgttactcttacagagc

SEQ ID NO: 778292 - DNA, 506 bp, Homo sapiens
ttacaccaaccatttttctattcttaactttcataatgacaaatgttaagcatctgttttctgatgctttagagtattataaaaatgtaatgaagccatttgaactatctaagtacccttaagacagctcaattcctaaagaaattgtcaatattgatgtgttgaccagaaatccttattcatagaacataaaaagatttcactcaagattgtattcacttccagacatgatggcacaagtctgtagtcccagmtctttcggaggctgagacaggaggattgcttgagcccagaaattcaaggctgcagtgagctatgatatcaggcaccactgtactccaacctggaccacagagtgagaccctatttctttaaaaataattatattcctaaaaattttatttttttactgagcaaatatgtatcccagtatattaattaaaatacactatagtagacagaataaatgagacaaattttctgccttcatgtggctttcaagataa

SEQ ID NO: 778293 - DNA, 539 bp, Homo sapiens
atagaaaggcacatagatagttcacacacgaatcggaaccaaagcacaaaggactgaacagaagaccatataattaaaatacactagagatatcaacttttcccccaaccccaacattcccttcttggagaacatacttaatccagagragcatggtttatattatacacaacattggccacacctggtttaaccagattgggcacaagatcaaatccaggacaatcacatattttcttttagaaattcgtatttgttacaaacaaagattcaagatggtctgtatgagcttttcgatttggacagcactttgagtaagggttgaagcagataatctgagggcagatttatttgaatcagaaaaagccaatgtggatagagaggagaaaattaggtagaaacagagaaaagaccatgtgatcccagaaagagagacagacagaaggaaaacttgccctgtttcttacccatatagtaattctagttgtggtccaccaaatcttctctgtatgctctgctcttgctatgcctcagttctc

SEQ ID NO: 778294 - DNA, 634 bp, Homo sapiens
tcatccatttccctcaatccttccgtcttctacagctgtggaaaaccgctaatctactttactccgtatacatttgcctattccgaacatttcatacagatggatatattccatacgtggtcctttgtaagtggtttcattcacttagcataattttttcaaggttcmtcatgttggagtattcatcagtacttatttctttttgtcaataaataatattcaattgtgtgtttccaccattttctttatccattcattagttgatagagatctgtgctgtatccatttttttctattatgaataatgctgctatgaaaatgaacgtatacatttttaagtatttattgttgttatttgcctggggagtggaattgctgggtcaaatgataacttcatggttattattttatgtcactgccagacttttttccaaagtgactactagtttacaatcttttattacatatatggttgtagttgttataactttctgatgaccctcttttcattctacaatatgttttatctttaacattttataattttttaatttaaaatttatttaaaaatttaaatcagttttgcctgatgttagcatagccactccagtataattttcttcctttgagacag

SEQ ID NO: 778295 - DNA, 634 bp, Homo sapiens
tcatccatttccctcaatccttccgtcttctacagctgtggaaaaccgctaatctactttactccgtatacatttgcctattccgaacatttcatacagatggatatattccatacgtggtcctttgtaagtggtttcattcacttagcataattttttcaaggttcatcatgttggagtattcatcagtacttatttctttttgtcaataaataatattcaattgtgtgtttccaccattttctttatccattcattagttgatagagatctgtgctgtatccatttttttctattatgaataatgctgctatgaaaatgaaygtatacatttttaagtatttattgttgttatttgcctggggagtggaattgctgggtcaaatgataacttcatggttattattttatgtcactgccagacttttttccaaagtgactactagtttacaatcttttattacatatatggttgtagttgttataactttctgatgaccctcttttcattctacaatatgttttatctttaacattttataattttttaatttaaaatttatttaaaaatttaaatcagttttgcctgatgttagcatagccactccagtataattttcttcctttgagacag

SEQ ID NO: 778296 - DNA, 544 bp, Homo sapiens
aacagaattcattttttaacaggtgaaaaaaaaacagaaagtaacagaggtcaaatcatatccttaagaaattgcagaactggaattcaacacctatttttcatcccagagtaataacttgaaattttatgttgagattattattttcattgaggtcagaaaatttctgtaaggcgaaagagaactcaaggaaaagccctaggkgggggaaatggaagcaaagaagtgagaagagttgaataatgggagagactgaggaccataaaccttgtttactgaaagaatcagagataattagatagcagagaagcaaccattccatctaagtcttgccctgtgaacttgacccagatccctcaaaaagacacaattcttgccaaaggttaaaattaattatttctcgtacaaaggaattttccatgtgggccccattgcactctaagatggatgattttggccacaaaacttgctgttcactcacagcaaaagcgatgaccacaacttcagatcttcttaaacgtgccgttgagagcagagaataaag

SEQ ID NO: 778297 - DNA, 673 bp, Homo sapiens
tggtcagaaaagacaccagatactatttcaacattgttaaatgttttgagactcattttgtggcttaaaatattgtctacactgaagaatgttttacatcctcttaagaagaatgtgtattctgaagctgttggctgaaatgttccctagatatctattargtcagtttggtctgtagtgcaaatttagtctgatttttctttcttgatttgtagataatttctagattgtagatatttctagataatctgtaccatggtgaaagtgtggtgttgaactcccaactattactgcactggggtctgtctctctatttagctctaataatatttgctttagatatttgagtgcttcagcactgggtgtatatatatttacaattgttatgtccccttgctgaattgacccctctatcattatatagtgaccttctttggttttttttacaggttttgtcttaaaatctattttatctgatataagtatagctactcctgctcttttttgttttccatttgtatgaactatctttttccatcccttaattttcagtctatatgtgtctttataagcaaagtgagtttcttatagaaagcatatctcgtaaaacaagtcagatcttgtttttacagtaggcatagtgatcatgtcctcagataaaaacaggctactg

SEQ ID NO: 778298 - DNA, 652 bp, Homo sapiens
tcatcataactcattaagctgaatgttttaatgctgttttctgtatttgattatttttgaaaataaagttaaaaaatttaaataaaatccaagtataacctgttatttcttaatgtttaaaagttagggtttccttccaagatggccgaataggaagagctccggtgtgtagctcccagtgtgatcaatgcagaagatgggtgatttctgcatttccaactgagatacctggttcatctcattgggactggttggaaagtggatgcagcccatggagggtgagctgaagaagggtggggcatcacctcatccgggaagtgcaargggtcaggagatttccctttcctagccaaggggagctgtgacagactgtaccaggaaaattgggccactgccacataaacactgcacttttccaatggtcttagcaaatggcacaccaggagattatatcctgtgcctggctcaatgggtcccacacccatggaggtcgaaatgcaaggtggcaagccaggctgggggaggggtgtccaccatggctgagccttgagtaggtaaacaaagcagtcaggaagcttgaactgggtggggcccactgcagctcaacgaagcccacctgcctctgtagactccacctctgggggcagggcat

SEQ ID NO: 778299 - DNA, 540 bp, Homo sapiens
gggagaaattgatagtgtcctctggtgtttggaaggcacagtgagcttgaggaacccaaaggtgcgagggagccggagggtacagccctgaaatggtggaactgaaagacagctgagttgcattacatacaagcagggaggatgtgcatacattcccctggatctgatctgggccatgccatatcaagcaagtcaggcttgagctgtttaaagttctatccaagagcgctgtctggaggaaaaaggtattctagcaaggtgtgggccactacyttcttacagctgagagaaaatataaccaccagctgcaggaaatacaccactcacgatacagcagtggacttgaatattttttgtgggggaaatcctgaagaacccgcaaatgttctcctgactcaaggaactcaagaaaatgagttctcctggctcaagaaaatgagtcagctttcattaaatacaaagtccaagagattgggttttaagtaactaccatagacaaaagatgacggcaccagagccagtccgatgacatctttcctg

SEQ ID NO: 778300 - DNA, 601 bp, Homo sapiens
actctctcctggcctgcaagttttccactgagactatcactaatagtcttacaaaggatcccttctatatgatgagtttattttctccaaatgctttcaaaattttctgtcttttacttgagaatttgattacaatgtggtcatagaaggttttttgtatttaaacctttgttctttgggatttgtggatctgatgtttacttctccagatttgtgaagctttctatcattatttctttaaaaaaaaaaaaaaggctttccatctttttctcrtgctctgctttctaggactcccataacatgtgaattaatttccttgccagtgtcctatatgttctgtaggctttctgcattctttttaattcctttttctttttgtttttctgattaggtaatttcaaatgacctgtcttcaagattaccaattatttattcagcttgattgagtctgctattgaagctctcaattcaactttttatttcagtcattgtattcttcagttctagaatttgtgtttggttctttttaaaggtttttatctcagttgaaattctcatcttgttcatgtattgggttttcctgattttgtttagttctgtg

SEQ ID NO: 778301 - DNA, 585 bp, Homo sapiens
tcttctataatcagtttctctgacaatgggtcatcaagtaatcatgatacctgagcttcccatcatgaactgtgttttctgggtcatgaagccatagattgggcatgtaagatagcaatctgccactaaggagaagaagccaacaagagaacaggttcaagctagccaggactgcacaagttagttgcatgagcaggtagttctgctccattgcctcctctcttctatggcacacctatggcctcttagttttctgtttaataatgaactgatctgagataggagaaactggcatttacaaatggatattctggcaacaactgggaggtggactccccaagcattaaaccacaatcaggggtgtctcatccattgagtctggacagatytacattaattcatggctagttgctaacagcttgacttccatcatggttagaatttatcctcactggaataaacagatatttttggatatggatgttcctgttaataatgcttctgccgccaccattaattgtggacttagggaatgctttattctccatcagcgtgttttaaacacagaattatttccatccaaga

SEQ ID NO: 778302 - DNA, 630 bp, Homo sapiens
agatctctcctttcccctgtggctgatacgtccctgtatacgtcctctgcccgttcttcttttccccaacccacaacttacttttgaacatccttccaaccatgcaggcctcttctgttgttgctgtgcatattcctcttcctctggagcacttttctcctgggaactggaggtggcacatcctacacygaacaatttctatcacttggccagagagaggggaaagagaagtgagaaaagatggcactaccaggaaagaacccctctccccttttgggttagaagtctgcctagagccacagggctttgccagagcccatcaagcgtgaacctcttcctctgtggaaatacactaagccaagagagtgattgaggtttatggtctcaggaattttagcctgaaaaatgggaggggaaagaaaggtggaggaataaggaaaagtgaaacattatcaagactgaggtgatcagacaggtcctcttcatacttaccaggaaaattgtttttcacagcaactatttcattgactgtactggcaagagaaagaaaacacatctgaaatgtgcctgagatttactcttgtattgggttcttatagtctgcccttcagggtccatcctgcactctta

SEQ ID NO: 778303 - DNA, 649 bp, Homo sapiens
agaactacctaaaaagcttttgaagatgcagacatcagattctacccaaacctactgaatcagtcattgtaggatatgaaatatttaaagctccatgggtttctaatacttaccccaggttgagagccactgctctggctaatgaggacctcttgaaaggtttttatttcttgtggtatcagttttaggacagcttgcagctttgaacaaatatactataaataatattatcacataatattataacacaatatgaacacatatttatatgcattttctaagtttccatcctaaaaggtgaccctctgaattgagaagaatcctcaaggtgctatgtggccagccccatgctcggtgggaagactgcttatcttcttcatgtgctcttcctcgggrtatgtagtacagggttgtggtccttctccaggagccagaactactcttggctccccgttgagtttgtggtctattaaaactccctcccacatcttttgcacacgaagggctataaatctaggttttccctctccaccacttgttcaattgattttttggagcctgaatgcaggccttgacttatatctctgtttaatttcatcttgtggtttcagccaagtgttctggcctgtcgaggccttctgtagtttca

SEQ ID NO: 778304 - DNA, 649 bp, Homo sapiens
agaactacctaaaaagcttttgaagatgcagacatcagattctacccaaacctactgaatcagtcattgtaggatatgaaatatttaaagctccatgggtttctaatacttaccccaggttgagagccactgctctggctaatgaggacctcttgaaaggtttttatttcttgtggtatcagttttaggacagcttgcagctttgaacaaatatactataaataatattatcacataatattataacacaatatgaacacatatttatatgcattttctaagtttccatcctaaaaggtgaccctctgaattgagaagaatcctcaaggtgctatgtggccagccccatgctcggtgggaagactgcttatcttcttcatgtgctcttcctcgggawatgtagtacagggttgtggtccttctccaggagccagaactactcttggctccccgttgagtttgtggtctattaaaactccctcccacatcttttgcacacgaagggctataaatctaggttttccctctccaccacttgttcaattgattttttggagcctgaatgcaggccttgacttatatctctgtttaatttcatcttgtggtttcagccaagtgttctggcctgtcgaggccttctgtagtttca

SEQ ID NO: 778305 - DNA, 620 bp, Homo sapiens
ctgcagaagggacaacacagccggaagtccaaggagagcgcatgcacccatgccttggggaggctgccatacctccagcatgccagctgccatgacaccttctggtaaggacggacagtcacagggctcacacatggtggccaggctcggcattcccttggcttttcttgccactgagggcactgggcggagcagccctgctgtggtctgatgtggaaggcgagtggattctctgtggccatgtccactttggtcagagagtgctggggaatgaagaggggggagtccagccttctctggagaggtcccttgtggactgttgtccatgacctcctcctgtgtcacccraactctcacctcatggtccaggaaggctcctgctttgcaccttcaactcccatctccctccatcacatcccagcggtaccaagaagttaccactggaattttctttggaactgaaaatttctgtgggcaaaagtccagcagcttcggttcagaacatgtataaatactttttccttcttcacctgcctcatggatattttatgcttggatcatgtccggtcagtggggggagaatcgagttttactaggacttccgatgggtgaatactgga

SEQ ID NO: 778306 - DNA, 628 bp, Homo sapiens
ccgtacctcagcctcccaagtagctgggactacaggtgcgcaccatcatgcccagctaatttttgtattttcagtagcgacggggtttcaccatgttcgtcaggctggtcttgaactcctgacctcgtgatccacccaccccggcctcccaaagtgctgggattacaggcgtgagccagtgcaccccgccgctggtggtgttattaaccctctttacagttggagaaaactaagctgaagttaaaagtcttattcacaatacccaggtaaggtgatccagttgggatgtaaacttggaccttcttattgtggagtctgggttctttccacttactctcctgtggtactgtagtattcctttcttaacatttgcttttccattaattttgtcatttgtcttgccggacaaggacaggacacaatytaattaaaatagattcaagaaaattatttattaataatagatacagttatttcaatgcaaaaaatagtcattgcagtgccagaaatatttatcatatgcttgctatgtgtaaggcagtgtgccaaacattgctggtatgtgagtatttgcatatgtactaggagacattgtgctgtgaatgttttttttttttttttttactgt

SEQ ID NO: 778307 - DNA, 617 bp, Homo sapiens
agacagtctcagccaggtccaccaggagctccaaagcaaagatttctccttagaggagcccttcattgggcaggaatgacaaatgtaattccctctccatgctcagttattggttaggagcaggctgcaggggtgtggtctcagcagaaattctgtgaccaattcaaagatgtggcatccagaggtcaattgcattccttgcagcaggttctttcttgacaggagatctgagaagcatactgttatgatgacctttctttgtcttttatgacattgacatttttgaagaatttagctctccctctccttcataataaaacattcttcatttgggtttgaggtttaacccagtattttttttcacagacctttttactgawaattacctattagcatccctttggacttgtattctgtagaacacactttgggaaactgcacagatgttgatgttgctgctagaaatgatatttggttaaccttggtgtgtccataagggtattaccggatgagattaacatcgtttttttgtgggttgggggtgttaacaggatcttgctctattgtccagggtgtgatcatggctcacggcagccttgacctccagggctcagatg

SEQ ID NO: 778308 - DNA, 429 bp, Homo sapiens
gcccccatttcttgaacttctgttgtcttaactagtaccttgaactgtattcattttattattttgttgttgttagtcctgtctttccaaatggacttcaaattttctgagggaaaagatattttgctaactttcatgtacatcttctttcttagcccagcacacacagccatagaygtaaaagattgcctcataaaagcaaatcaggtgctgaagagagtcatctgtatgtgaagcagagagtcaatgaggccatctttagtggttggtgtgctagtgacttaaggttcaattttagcagctgttcttcactttccaacagggatatataaaacacacagattgttataactctcctttgactttccttgttgataaatttagatataatattttcctattttaagtagtggttctcaacattgttta

SEQ ID NO: 778309 - DNA, 552 bp, Homo sapiens
agagcaaatgtacctaaatgttaatatatgttcatcataaattagattaaaaactaactcaagttaattttagtatgtcattatacagtattaactaaacaattaggataaaccactacaaaacagtgagctgtgacatcatagagccatttcctttcaagccctacccttaatccactcttccacctgccaatacacacacatgcacgtgtgcacatacgcacacagaaccccccctmcaccaccacctttcatggtgtatttttcaacccctttagagaattgacaaggatagaagacatttaagattaaggtccataaagtattcattattgttgttttctgctttctttaagaactgtctcgtcctatcaggacacacagctatgctagctcagctgtaaacaaaaggatacgaccttgaaggtgtctatagctcactggttttagatgccgactccacatcttcatcacagctcctaggtggtggctgcactgatgtgtacaataagataaactgaatcgctagctgaaataagcattttgaatttt

SEQ ID NO: 778310 - DNA, 467 bp, Homo sapiens
aataaacccaatctaaaggaaatatgtagatccaactagagaacccattattttcaactccacagtcattaaagaaaaagaaaaaatgcaaatttcaacaatgatcaaagaatctttatcatacaatttacattatttaaacccaataaaatcagaaatcaaggacaaaaaaaatcttggaaatttatggacayagttttaaaaaatcacaggtcagagatgaaaccataaaggatattaggaaatacttacaactttaatgacaatgaaagcactaactattgaaatatatgggattcagctaaaccactacttagagagaaatgtggagttttatgtgtgtattagaaaagaagaaagcctgaaaaccaataatttaaatgtatgactcgggctgagtgctgtggctcaggcctgtagtcccagctctttgggaggccgggggaagtggatgacatgaggtcaga

SEQ ID NO: 778311 - DNA, 467 bp, Homo sapiens
aataaacccaatctaaaggaaatatgtagatccaactagagaacccattattttcaactccacagtcattaaagaaaaagaaaaaatgcaaatttcaacaatgatcaaagaatctttatcatacaatttacattatttaaacccaataaaatcagaaatcaaggacaaaaaaaatcttggaaatttatggacatagttttaaaaaatcayaggtcagagatgaaaccataaaggatattaggaaatacttacaactttaatgacaatgaaagcactaactattgaaatatatgggattcagctaaaccactacttagagagaaatgtggagttttatgtgtgtattagaaaagaagaaagcctgaaaaccaataatttaaatgtatgactcgggctgagtgctgtggctcaggcctgtagtcccagctctttgggaggccgggggaagtggatgacatgaggtcaga

SEQ ID NO: 778312 - DNA, 467 bp, Homo sapiens
aataaacccaatctaaaggaaatatgtagatccaactagagaacccattattttcaactccacagtcattaaagaaaaagaaaaaatgcaaatttcaacaatgatcaaagaatctttatcatacaatttacattatttaaacccaataaaatcagaaatcaaggacaaaaaaaatcttggaaatttatggacatagttttaaaaaatcacaggtcagagatgaaaccataaaggatattaggaaatacttacaactttaatgacaatgaaagcactaactattgaaatatatgggattcagctaaaccactacttagagagaaatgtrgagttttatgtgtgtattagaaaagaagaaagcctgaaaaccaataatttaaatgtatgactcgggctgagtgctgtggctcaggcctgtagtcccagctctttgggaggccgggggaagtggatgacatgaggtcaga

SEQ ID NO: 778313 - DNA, 576 bp, Homo sapiens
tgaatgttagtgtgcccccaaaatttgtgtgttgaacccctcatctcattatgactgtatttggattgggagctgttggaagataaccaggacatgaggctggagccctcatgaatcgcattagtacctttataggaagagaccagagagctagctggttccttccaccacgtgaggttacgacaactcmttagtctccaatttggaaaaagagccctcaccagaacctgagcatgccagtactctgaccttggactttcacactgcaaaactgtgagaaataaatttcttccgtttatacccatctggtctatgataatttgttacagtaacctgaactaagacggtgttcccactgtagtttgttacttcttaaaccaattagactttttttttttttttttttgagacagagtctcactctgttgcccaggctggaatacactggcaccgtctcagctcactgcaacctccgactccctggttcaagcgattctcctgcctcagcctcccaagtagctgggattacaggtatgtgccaccaagcccagctaatttttgtatatttagtagaga

SEQ ID NO: 778314 - DNA, 576 bp, Homo sapiens
tgaatgttagtgtgcccccaaaatttgtgtgttgaacccctcatctcattatgactgtatttggattgggagctgttggaagataaccaggacatgaggctggagccctcatgaatcgcattagtacctttataggaagagaccagagagctagctggttccttccaccacgtgaggttacgacaactcattagtctccaatttggaaaaagagccctcaccagaacctgagcatgccagtactctgaccttggactttcacactgcaaaactgtgagaaataaatttcttcygtttatacccatctggtctatgataatttgttacagtaacctgaactaagacggtgttcccactgtagtttgttacttcttaaaccaattagactttttttttttttttttttgagacagagtctcactctgttgcccaggctggaatacactggcaccgtctcagctcactgcaacctccgactccctggttcaagcgattctcctgcctcagcctcccaagtagctgggattacaggtatgtgccaccaagcccagctaatttttgtatatttagtagaga

SEQ ID NO: 778315 - DNA, 576 bp, Homo sapiens
tgaatgttagtgtgcccccaaaatttgtgtgttgaacccctcatctcattatgactgtatttggattgggagctgttggaagataaccaggacatgaggctggagccctcatgaatcgcattagtacctttataggaagagaccagagagctagctggttccttccaccacgtgaggttacgacaactcattagtctccaatttggaaaaagagccctcaccagaacctgagcatgccagtactctgaccttggactttcacactgcaaaactgtgagaaataaatttcttccgtttatacccatctggtctatrataatttgttacagtaacctgaactaagacggtgttcccactgtagtttgttacttcttaaaccaattagactttttttttttttttttttgagacagagtctcactctgttgcccaggctggaatacactggcaccgtctcagctcactgcaacctccgactccctggttcaagcgattctcctgcctcagcctcccaagtagctgggattacaggtatgtgccaccaagcccagctaatttttgtatatttagtagaga

SEQ ID NO: 778316 - DNA, 641 bp, Homo sapiens
gtaactagcatacattttcagaaacaaaaaataataaagtttataaggcaatcataaaaagaaaaaaatggaaaaaagatttgaacatatgcacaaaagaggctaatttataaacaaccaataagcacatgaaaaagcactgaatattattagatattaggaaaattcaaattgaaaccccaatgagatatcaaatatccactgaagtagctaaaatcaaaagagaaataatgttaaaggttgatgaagacttgtggccaccagaactttcacatattgttgatggcagtgaaaatcctgcaattttagaaaaagctcccttagcatcttaaaaaaagtggatcaacctgtagtgtaagacttggtgattccaaagaaatgtatttccacaaacaggcttgtacaaaatcatttattggagccttatttrtaataatccccaaaaagaaacagcctagatacccaacaataggacattggataaataaaatatgcttttacagtgggatattagacagcaataaaaataataaattactgatatatacaataacatggatgaattgccaaagccttatatggagcaaaagaagtcttacacactaacatacactatgattctacctgtataaacttctaga

SEQ ID NO: 778317 - DNA, 620 bp, Homo sapiens
aaaacttaggttcaagtcatacacagtcccctcttgaaaagtttgagaagtggttgagttaacaaaacaagtcaaggtgaaagagaggactcatatcaagacaaaacagtatttctcgaaaagaaagaggaggataatatcctcaattagtttatttcctgctcttacaattgtgtaattaatctggtctagcagttggcatgawtcaaagtaccgcagagaaacatcaggaagctttttttccatttaaattttattgtgtggctggctcctccctgggaaaaaagcctgttcacatgagttagccattccactgacatttgaatttgcgagggaaaagccaagtgtctctagcatgcagtaaaagaaatgtgctgaggccataaatatcctcctgctgatgcatgatttagatagagttgtttatttaggtagaatggtcatttctctccttctactcctccttcctctcttttctgttctcctccttttcctccttgctcttcctcttcttttttttgtacagaaacctgttgagacaatatgaatgccgctggaggccattatcctaagcgaattaacataggatcagaaaaccaaataccgcatgttctcactta

SEQ ID NO: 778318 - DNA, 620 bp, Homo sapiens
aaaacttaggttcaagtcatacacagtcccctcttgaaaagtttgagaagtggttgagttaacaaaacaagtcaaggtgaaagagaggactcatatcaagacaaaacagtatttctcgaaaagaaagaggaggataatatcctcaattagtttatttcctgctcttacaattgtgtaattaatctggtctagcagttggcatgattcaaagtaccgcagagaaacatcaggaagctttttttccatttaaattttattgtgtggctggctcctccctgggaaaaaagcctgttcacatgagttagccattccactgacatttgaatttgmgagggaaaagccaagtgtctctagcatgcagtaaaagaaatgtgctgaggccataaatatcctcctgctgatgcatgatttagatagagttgtttatttaggtagaatggtcatttctctccttctactcctccttcctctcttttctgttctcctccttttcctccttgctcttcctcttcttttttttgtacagaaacctgttgagacaatatgaatgccgctggaggccattatcctaagcgaattaacataggatcagaaaaccaaataccgcatgttctcactta

SEQ ID NO: 778319 - DNA, 628 bp, Homo sapiens
gtagagggtagacacagaaatacagatagggaagggctttatgaagaaagaagcatttgagctgctttttgaagtatgagtaaagttttaaaaattagtgaagccaaaaacaaaaatagaaagaatgaataagatctagtatttgatagcacaacaggagggctatagtcaataataattttctaatttgtattttatttttattttttgagacggggtctcactccagttgcccaggctgaagtgcaacccgatctagtggtgtgatctcactgcagcctcgacctcctgggctcagatgattctcccacatcagcctcctgagtagctgggactacaggcatgtgccaccatgtccacctggctaattttttgtatttttagtagagatgggatttcgtcatgttgmccaggctgatcttgaactcatgggctcaagcaatccacccacctcagcctcccaaagtgttgagccactgcgcctggctcctctagtcaataataatttaattgtacatgtaaaaataactaaaagagcataattgaactgttcataacatgaaggattaattcttgaggggatggagacccaatttcccatgatgtgattattatgcattgcatgcct

SEQ ID NO: 778320 - DNA, 629 bp, Homo sapiens
gtttatgttgttgtaatattaatctagaaagctgactcctgctacgtagcctttgtctttccaaatgcgtttcagtttttttatttgttaagctaagggtacttagctgttacaaggatactcggttaactgttaagccatgaagctccagaaagtcttccctctgaattgaagaatggcatctttggccagatgcttttctatgactggaggaggaaaagaaaagtttgtcagctattctagttaataaatccagtcccccctgaaatstccgcttactgtgaaagctgacccccttccccaacatttgggccaggagcaacccagggttcctttgaattctttgacaaaggtcttatggccttgggctgctctttaaggaagcactagttggttcctcaaacctggaggcttttgaggaggaaacctcagggagccaactctgcctctaaatatccatgtgaccttatggtaatgactttcttcggacctcgctttcctcttgaccaaggagccacattattttaggccctttaataaatcattgtgattgtttttcaatcagtatcatcagaaagcccttgactagacctgagcactttgctgaataccatacaacagatctaaat

SEQ ID NO: 778321 - DNA, 599 bp, Homo sapiens
gattatttttcacttacagtaataatgtcaccaattccaggtcattaaaattttttccttataagatatttatttttctgtttcaaaagcatttattatcactcagagtttacaattatattatttgggatataactgtaggaaagtgtcagataggaaaattgtttcttttttctcttttttttttttttttttttttttttgagatagggtctcgctctattgccaaagctgaagtacagtggcatgacccyggctcactgcaacctccacctcccaagctcaagcctcatgcctcagcttcccaagtagctggaactacaggtgcacaccaacatgttggctaatttttgtattttttgtagagatggggtttcaccatgttggccaggctggtctcaaactcctggccataagtgatatggctgcctcagcctcccaaaaaggaacaattaacacttgtgtgatgaggtaggacccacagggagagtacagacgcctaggtgtgccacagcagagacttcactccagagtgtgatggaacagagtgcgggagagactgccaaaattgggaaggagagagtagtggagagtagtca

SEQ ID NO: 778322 - DNA, 524 bp, Homo sapiens
aaaacttgcaactcaggtgtttatacatgcaacttgatcttcttgtctatgacagtacctaatttctctcctaaatccccatttcaactcagtatctctgttgcttttggttctaagaagggtcagtttggatttaaacactggcaattgaatattaaagattgtcctcctccctctcctccttctctcatccccagaagggagctgtttccctggggtttgtttgctgtcctggctcttggttctcacggcaaggcatctggatcttgggcatcatgctatggtatatccaccgatgtccatggtcctattacagtttctagttcctcattctatgtgctctgcattctcctcaacagaaccccactgggayttccatgctcaaccctatcctgaatgacagggcaccctcatctttctatgtcgtcctgagggactgctctcaggtccacctgcctacttgccacatgtccagtcattgcccacatacatatggaacttctcggtgaggcttttagagtccc

SEQ ID NO: 778323 - DNA, 501 bp, Homo sapiens
agctacatgggaggctgaggcacgagaatcgcttgagcccgggaggctgaggttgcagtgggccaagatctcaccactgtagtccagcctgggtgacagagcgagatcccatctcaaaaaaagaaagaaatgcagaggttaatgatagtattattttattcgtatatcctataatttgaaatgaactgtccttcatacacataaactyttcttccacattggtgatgaatttacagtgaatgattgatcattcctcttttacctggtctttcttataaaattaatggcatatactaggggatcaatcaaaggagcttctaaccccgtgtttcttccttcccagggcctacctcatgctgtctccttacaaacaccaattcagtgtaggacaaggtaggctggttatgaaataaagtacagttaaccgtgttatgtgggaattgaaatcatgacctcatgtgcataacacctgcaatcagccagtgaaggcctgataaatct

SEQ ID NO: 778324 - DNA, 609 bp, Homo sapiens
tgtggtggatgaagaaacttttttggtttgttctctttttttgagacagagtctcactctgtcacccaggctggagtgcagtggcacgatcttggctcactacaaactttagctccggggttcaggcgattttcctgcctccgccttctgagtagctgggattacaggtgtcctccaccatgcccagctaatttttgtattgttagtagaaatggggtttcaccatgttggccaggctggtctctgaactcctgacctcaggtgattattccaccttggacttccaaagtgctaggacaaayaggcataagccaccacacctggcctgaaacaatttttaagaagtgatttagttgcaagttggctcagatcctctgtttaaacattatgaattctcctcaagttatcagaattgactaacttttagttaagccccattccatggcaaatagaacataccttaggctagggacaaatttattgcatctttatatatttgtgaaatttagcattctgcctctaaatttcctgtaataaaaatactcttagaatgatccttcttgaaaggacgtgattctaaggaagtcactgaacataaataactaagta

SEQ ID NO: 778325 - DNA, 658 bp, Homo sapiens
gcagcttgttttttcagagtcttgaaagtttaacacctcttgactgggctctaaaaatgtgattctgatccaggtatttacatgtgaatttaagagcccagagagttccttcttcagggtgaaaactacgtaagaaaaaaaaatcaaagcattctttggcatttcgtggcacaaaaataaatactttaggtgtacacacccttcccttttggcaggttttaaataaatggattattcatggattcttcagcattctagtgagtcctggcttggtgcactgytgaacaccccatgatgggctactcatctgtggccactccatctctaaaaacagggatcccaaaggcctaatcttaaagtggtcaggagcattcgatatgagcttaacagttggcagacaatttgtatgttgccctagttaacatttctctgttttttttcttttaaagcattttgtaagaaagtaatttcaaataaatcatttcatttatctgggatgcagtttccccatctataaaataggtatgactctggcctgcctttctgtataaaacagaggtattcaaagatccaccaagtttctgagctattggtgtatgacggtcctagggctgccatcacaagatattgcaaacaacaggaatttattctctcacag

SEQ ID NO: 778326 - DNA, 664 bp, Homo sapiens
catgggaaagaatatttccagtaaaaggagcagcccatgcaaaggtgttgctagcggtttggtaggtaggaggacagggcaccttggaggtgggccaaagtgaggctagagaggaggaggtagaggggagaaagatcatgatagggcggtaagttatgtgaaagagtttatgatgttggccgggcgcggtggctcacggctgtaatyccagcacttcaggaggccgaagaaggtggatcacaaggtcaagagatcaagaccatcctggccaacatggtgacatcccatctctactaaaaatacaaaaattagctgggcttggtggcacgtgcctgtagtcccagctactcgggaggctgaggcaggagaattgcttgaacccgggaagcagaggttgcagtgagctgagattgtgccactgcactccagcctggggacagaacaagactccgtctcaaaaaaaaaaaaagaaaaagagtttgtgatgttatctttcagtttttgtcaggggaataaccaaatcatattaaaattttagaatacaaatttaaaatcaaataataaaaactatgctactttaatttttgtgtaaaaaagatatgcagcaaatgtggctaaatgttacttttttttatatttgtttgctagcaaaaataatcatttg

SEQ ID NO: 778327 - DNA, 620 bp, Homo sapiens
gcagaaagaacaaatatttggtgccagcttacactgtattaggtaaaaggttaaattgaatttacatattttcttatttaattctcaaaatataatttaggtctattgtgcaggcaaagcattgaggctcaaagagacaaagaaaatgactcaggattatatagagtatacgtgaaggaggcaagattcaaatctagtactttatgcctcatactttccagttccccctgaagtagatgagaagtttatcactaaaagcaacttagtgcattgtttytttcatatctgcctctcattttccatacatatctctgtagtatttataattttaggtcttccaatgaactccttcactttctgggtttttttttttttcagagatttctaaaataccaccggttgcttttcacagatgccacattctgaagaattcgggggaatgcccatatgtgtagggaaagatgcccagcatacaaggcagtggctgtgcatgttctgccaggccataggcatcagtattcctttccaaaaagcaattggagaggatcaacagaacaccatttatataaggaaacaagatacgctggttcctacatttctattctcccatctatcaaaga

SEQ ID NO: 778328 - DNA, 607 bp, Homo sapiens
gttaggaataatagaattcaaaatactggagctagagcctgagatatggctcttcatttctatgttttaaaagaagttatcaataaaaaaactttaaagatctcagatttttagggactattttgatttttcgtatcagtggaatcattctttatcacccaagagttcctggagatttgctgactggtacaggaatgttatgtgtgacccacagactgatggctcagctggggctacagaatatttcctgtgctgtgtgggggaaaatttcccagagccaaagattccctctggtcagagccttctttactagactaccaccgtatacctcttcaatttccttctgtaatcttcacattaccaaaataaagscatgagttggagagataagagggaccacttttttttcttttgatacttagtgctacctgtctgctttgattaaactcttagtctgtttgaacaaaacatgacacacttcctagcctgtagatggctagagcaccagagccatgctcacagtttatactcatattaaagtatatttgatagtaggtagatgctttttcgttactgctatttttaataaaactagtcattttccacc

SEQ ID NO: 778329 - DNA, 643 bp, Homo sapiens
tttacacctaataaaacacttctataatgcaaaatatttttaaaaagctaagtccaaagacaaaactaggaacaaacattttaacttatgccaaaaatatacacaaatatgtaatgattttctataaattgatttttaagaccaacaactcaatatgaacaggctgttcacagtaatggaaatagtttccttctttcttctttcttcttctttcgtctttcttcttcttttyttggtgtcacccaggctggagtgcaggagtgcagtggtgcaatctctgctcactgcaacctccacctctggggttcaagcgattctcctgtcagcctcctgagtagctgggactacaggcatgcgccactatgctgggctaatttttgtgtttttcaaagagaggaggtttccccattttggccaggctggtcttgaactcttggcctcaagtgatccacccgcctctgtctcccaaaatgctgggattacaggcgtgatccactgcacctggacaggaaatgcaattttcttttaaacatacaaaaaaattatgattaacctattataaatatgctaatgtataataaaataattgcaaattaaaacttcactgaatcatttgggatccctctgttctctgctccaattt

SEQ ID NO: 778330 - DNA, 635 bp, Homo sapiens
ctatcaaactggcaaagatctagatgtttcattacaaaccatgtgagcaagactgtgaggaagcagaatcctcatacgtaagataaattggtgtcatgcctccccctctagagggtaatttggtcatatttatcaaaattaaaaatgcacacttcttttgacccttgaattttacttcttgatatttattctgcagatacaattacatacatgcaaaaytaagtgtgttcaaagatccttattacaagattattagtaactagagaagaaaggaaataatctaaatatgtatcaaatgagaagaataaataccatgatatctccagctagtacaatatgagtcaacagtccctgagccagaagtgtttcggaattcagaattcttttactgaaagataatatggtgatagcatattacatcacacttccagaagggtttgggatagcacctatttaccaactgcatcaacattttgcatcatgtttgaaaaatcacattcggtggcattatatatagaaaaaacataagtatacttacttcaggtcaggccagttcagttcagacagggtgagattgtatcactggggtaggcaaaataatggccactcaaatatgcctatgccctaattcctgg

SEQ ID NO: 778331 - DNA, 619 bp, Homo sapiens
tctgtatcattatttttgccctagaaaaacattagaagattctactcaactcctctcattgtttccttggatactttccattttctatttagtgcctgtgttggcaggttatgtattggtggtttgtaatatctgatagattttgtattgcttgggcgtgggaggtggcagcggaattgagaactggcaaaacgagcagctgtcagctggtaactctaatttgggtaagttctttcttagcacttgccaaatttgaaataccatctgcctcagggctatgtgtgctcccttgattagaagtgtgcggctactttagagctcatcctttcacttgcttgaggacagcagattactttgttgggaaaccagtgaccatacaatgccctcatctcccaaaygtttgttgcacgctatggacttatctctattgactttcatctaaaattgcaaacttagatctctgctccttgttatccaatattctccaccctgcttatcttataccatttgggatttttttgtgacttaagaaacccaatgactttagccatagaatttttgttttgtttggggtattgtttgtgtaaataaaaatacagaagctaagctaattttatgt

SEQ ID NO: 778332 - DNA, 642 bp, Homo sapiens
gtgacatacaatttacctatataacagactggcacatgtactcttgaacctgaaataaaagattttaaaaaaagaaagaaaaaaatggttgtgaaaaacttcccataactggtgagaaaaaggaacatctacatccatgaagtacaaaaaactccacatasattaaatataaagacatcttcactgagacacattacaatcaaattccaaaaagtcagggatgaaaagaaaattttcaatgcagcgaaagaaaaataacatattatgtgcaagcgaatgtctataagattatcagttgatttttcagaaggtacctttcagggcaggagagagtgggataatatattcaacatactcaatgaaaaaacaaaacaaaacaaaaccctgcaaaccaagaacactatacctggcaatcctatccttcagaaacgatgaaaagagaggaagtttaccagaaaaacaaaagctgagagagttcattaacactagaccttctttatgtaaaagactaaaagaatttcttcaagatggaagataaaaatgctagctgataccataaaaacacaggaaagtataaagtataaattgactatgttaagtacatagtaaaatttgaaatactctaacattgtagtgatggtt

SEQ ID NO: 778333 - DNA, 648 bp, Homo sapiens
gccagagagacaaatcacctagcttataggcccaaggatatgtgataatatcccctgttgacagggtccaggcagaagagtcacattattatgattcaaaaccagcgatatgtcacaatgcagtcaccggaaggaatttaagccaaaaagtctcaacatctgggtacttggcatagtaatatgcattttttttgtctttgagggtgacagtgggctttggacatgtgggatggtcacaacttttgctttcacctgggtgtgtaatcaagagtcccaatctgaactttttgctggtctctgtcatgaaactctctgtaccacccaagcagtttaaacattatgagttagtgttgtaaagttctgtgagtttgataaaaatatgcaacttgggaccttacctattgccctaagcgtagagatgaaaggcaaaatatctcctattggctgaatcccagtataagtctgaccatctatgtcatwgtcccatttgtgggcaaaaaactaggcaggaggttaacatcacttgggtgctgtgccaaccaatatgtcacaatgacttctgtaggcagggtataggaattacagtcacattaactgggtgctggactcaccaatgtgacaccattccacatgtggaaaaaaacccag

SEQ ID NO: 778334 - DNA, 537 bp, Homo sapiens
tctctgcccacaggtgatattgtgccatatacctgagaccagataagaggactaatcatgactcttaaacctggagccaggtcatatgcaagatagtgtccccattcttggaaatttccaccagtgttattgtgacatatatcttttcctagctcctgagtgatttaataatcctgcctagggtagcccacacatgaagtctggacatttacctcaagtgagacccttggtgatttgactctcctgtcttaacaatatcctcaggaaggattgtaacatgtttctggacccattttctaggttacctgactctcctctcctgcctggaccctgcttccactggggactgtagcatttccaagctctgcatcyaaatgataagactctcttgcctggtcctttcaacaggagatattgtgacatatctctgggtgatatgagtctcctcttctgtctggatattgcccacaaggagcattttgccatacagttggacgtagccccaaagttatgtgacttttctgccaggaacttgcc

SEQ ID NO: 778335 - DNA, 621 bp, Homo sapiens
aacaaaattcgactgggcgcggtggctcacgcctgtaatcccagcactttgggaggccgaggcaggcggatcacgagatcaagagatcaagaccatcctggccaacatggtgaaaccctgtctctactaaaaatgcaaaaattagctgggcctgttagtgtgtgcctgtagtcccagctactcaggaggctgaggcaggagaatcgcttgaacccaggaggtggaggttgcagtgagccaagatcctgccactgcacttcagcctggcgacagarcaagacaccgtttaaaaaaaaaaaaaagaacaaaattctatcatttgtggcaacatggatgagcttggaggacgttatgtgaatgaaataagtcaggcccagaaagagaaatactgcatgttctcaagttgatctcaagacatagagaatagaacagtggttattagaggtggggcagtgtgttgggggttaggggatagccagagatttgttaacagatacaaaagtacagctgcataggcagaataaatcctcgtgtgctatagcactaggggatgtctataattgtcaacaacttattgtatattttcaaatagctagaagagtagattttgaatgtttccaa

SEQ ID NO: 778336 - DNA, 526 bp, Homo sapiens
gaattctctgtgagcctccttcagccttttccctgtgcctgatccatgaatcacacgtgaacctgatggacacagacgccctgagctgtgactccatgtctcatgtgcacgccctggccagctgaacctcgagctgtcaccaacacctctaagtgcctgatgccctctctgcacctttccatttctccaggagcttggcattgcttccttcamcgttttcacagggaggagcaggtccaggactcccctgcacctttgccaccataatggcccacactccccgggtccaggagtgcagaatatgtggctgcttccatttgctgagtgtgtcaattcaatgatgctttcgaactttaagaaatgacaatacatagattctggacctatcatgcccactaagtcagacctgggtgaaaactccattgttccctgatctccacaggcctttgctcagaatagtggactaagccccaggctgggcctctcaggactggggtccctgcagaagaggatccaggattccccc

SEQ ID NO: 778337 - DNA, 563 bp, Homo sapiens
ggagagccagaggacagctccctgggtctgacttgtggttttgccccagcatcaacgtcaatgacacctgcaagtatcactgcggccaagacctcaacaatcacaactgcatttccacctgtatcatccactaccctgtttgcagtgggtgccacccacagtgccagcatccaggaggaaactgaggaggtggtgaactcacagtaagcaccctagcccctgagacatggagggggccctgtgctaagaggaggagcccagggcggggaccttggccatgtgggccagctggaggtgtgcatcgctccstttgccccaggcccaggttggaagccatagtctgaacaccccggcttggacctgcccttggctttggaagggggctcaggtaggggggaagttggggggcagatggaaggaaagtgatagttactgacagctggtaacatcctacgaggcccgtgttagatgcttcacatgagtattctcacttgcctttcactgcagccctgtactgttgtcattccgtgtattagtctgttttcgcaccgttgataaagaca

SEQ ID NO: 778338 - DNA, 599 bp, Homo sapiens
ctcactgtgaatgaaacaaatggtccctgccctcctggaaacgctgtgtacaggagagttgacaccaaacaaataaccctttgtgaattccgggaccccagctgggtaaccctccatggggagcacagaggtagacagctgcgtcctggacacagaccctgcctggatccctggcgtgacctcacgtcctctcatggtcctgcccttcctgtgtcacagtcctcaggtcaagggtaaatccgaggctgagggttaggggccgtgatgctgagacgggatggactgtccaggggggtgcttatgtggttggctgtggtcacaggattgggacacaagggtcaggggatggtggagggcacctgggctcccctggggaggtgactcactgccygtcaccgtgtccccacagctccctgttcagcaatgtccgcttcctgctcctggtcctcttggagctgcccctgctcctgagcatgctgggtgccgtcctctgggtgaacagacctcagagaagctctagaagcaggcagaattggcccaagggtgagaaccagtagcatctgctgtccatcaaggccctgtgctgcaacagagcccct
